United States Patent Application Publication US 2007/0042381 A1 - sequence listing, part 91

SEQ ID NO: 4118605 - RNA, 59 nt, Human
ucccuagacugagagcaugucagggcuagaaggaaccuuacagagccucauuuuagaga

SEQ ID NO: 4118606 - RNA, 112 nt, Human
ucccuagcaggccuagggggggucuggggcaggggucucccuuggggaguggcgucugccagcugcugugcagggaggcucuccugcucauacccucuucugggcacaggga

SEQ ID NO: 4118607 - RNA, 73 nt, Human
ucccuagcuggugggaucagccucagcaccuuagcaaguauaagugugucugccaccccaucaagcucaggga

SEQ ID NO: 4118608 - RNA, 104 nt, Human
ucccuaguaucaucacucagucguguacuuagcaccuugaacagacccuggcacacauuagguucucaguaaguguugaaugaaucagugagugaauacaggga

SEQ ID NO: 4118609 - RNA, 77 nt, Human
ucccuaucaguuccuguuugcucagcucccaaagaggacuuaggugcccucugaggaagcagcaggaagugaaggga

SEQ ID NO: 4118610 - RNA, 64 nt, Human
ucccuauccucauacauaucucagucuuguugcaacagagaaaagcauauggugaaacaaggga

SEQ ID NO: 4118611 - RNA, 60 nt, Human
ucccucagauuggcaauuagaucuuaacaauggugaucuuaaagagcgcaauuugagggg

SEQ ID NO: 4118612 - RNA, 57 nt, Human
ucccucagcuugucuccaugcacgcagugaagcccguggggauguaugggugaggga

SEQ ID NO: 4118613 - RNA, 61 nt, Human
ucccucauagaagcacucagcucccucggggacucccagggaagcuuguuacugagaagga

SEQ ID NO: 4118614 - RNA, 55 nt, Human
ucccucauccugacagcuggcccugcauuauagccagcccuugagauggaaggga

SEQ ID NO: 4118615 - RNA, 70 nt, Human
ucccucaugaauggucuccgcuggcguauuucugaugugcaaagaaugccagugucugcuaucugagaga

SEQ ID NO: 4118616 - RNA, 55 nt, Human
ucccuccccacuucugagcuuugcagcaauaucaaaggcugaaggaggggaggga

SEQ ID NO: 4118617 - RNA, 81 nt, Human
ucccucccuacucauuuuucuuaagcuguaaagcagaauagcuuguucuguauuuaguuugaggacaauuugggcauggga

SEQ ID NO: 4118618 - RNA, 120 nt, Human
ucccucccugcgccagguuucuacucucaugugacccaaagcagggucauugggccaggcugaaucuaggcugggguucugagacugcugggugggagaguugaucccaggagggaggga

SEQ ID NO: 4118619 - RNA, 74 nt, Human
ucccuccuuaauaagaggucuguaucuuaaacaacaggcaaaguauuagagagccauaucucuuaaaggaggga

SEQ ID NO: 4118620 - RNA, 92 nt, Human
ucccucugccuuuggaaaauucuuucauggcuaauaagauaacacuucuauucccauuuuauugcuguguuagggacagucuagagguugga

SEQ ID NO: 4118621 - RNA, 84 nt, Human
ucccucugguggcuuuuucucccucuagugcugggagcucuccaugcagaugguggauggagaaagagaacaaaaaguggggga

SEQ ID NO: 4118622 - RNA, 74 nt, Human
ucccucuugacaagugacccuggaguuaguccuguguccuggaguuggaggcagcauucaggggugaugaggga

SEQ ID NO: 4118623 - RNA, 110 nt, Human
ucccugaugacuccuuagaggaagugguaacccaggcuucccaaucagaaggcacagggaagacugaccugguugagggagguguggaccguggggaguaacuucaggga

SEQ ID NO: 4118624 - RNA, 59 nt, Human
ucccugauggagcccugcugcaugcuggccugacccacaugcuccacgcucugcaggga

SEQ ID NO: 4118625 - RNA, 76 nt, Human
ucccugcacagcuggccagggagagcuugagcccauaacuccaauucaaucacucucccugccaucucugcagggg

SEQ ID NO: 4118626 - RNA, 55 nt, Human
ucccugcaggugggguggccagguguccucagaccggguggcucucccucaggga

SEQ ID NO: 4118627 - RNA, 56 nt, Human
ucccugcccugccuucaugguuaucucugcuaugucagguuggaaagcagaaagga

SEQ ID NO: 4118628 - RNA, 78 nt, Human
ucccugcuuuuauuuguagcuucccaaagcuuuugcugguaauaaaaggauuguaaaguugacaaauauaagcaggga

SEQ ID NO: 4118629 - RNA, 56 nt, Human
ucccuggacaacagacuucacugauacgagauaguggaaggaaagggucccgggga

SEQ ID NO: 4118630 - RNA, 66 nt, Human
ucccuggcacaagaaggcuguccagugaugaagacuucagaugaaauggcaugcuggugcagggga

SEQ ID NO: 4118631 - RNA, 73 nt, Human
ucccuggcugugugcccccggcaccgcggagcgcccaggugaacccucgacugggggcagccgcaccagugga

SEQ ID NO: 4118632 - RNA, 85 nt, Human
ucccugggaugaaagacccaggccuggggcuuaagguggaaaaacaacucauuccucgaggcccggagucgggcgucccgggaga

SEQ ID NO: 4118633 - RNA, 74 nt, Human
ucccugguucuuucugagggcaaaggucucuguuuucuugcuggaaacucucuuuucuucaguaggguuagggg

SEQ ID NO: 4118634 - RNA, 68 nt, Human
ucccuguguguauauaaacgguggcgauauauacagccuauucuaaacuguuuaugaugauagagggg

SEQ ID NO: 4118635 - RNA, 71 nt, Human
ucccuguuagcucacagagcuuuccccaugugacuucagacaugguugacccaugugaguuagugcaguga

SEQ ID NO: 4118636 - RNA, 59 nt, Human
ucccuuaagcaccugaguagucaauauuuacauuuuagacaacugaugugcuuguggga

SEQ ID NO: 4118637 - RNA, 79 nt, Human
ucccuucuuuccccugcugcccuccaguucccacagucaucuuggacuccaggacccugugaggguaaaggcuaaggga

SEQ ID NO: 4118638 - RNA, 89 nt, Human
ucccuugauaaaaccuuuggagcaugcauuuucuugacuaguguuucugaacuaauccucaguuauggauguuuuaaggguucaaggga

SEQ ID NO: 4118639 - RNA, 69 nt, Human
ucccuugggcacaucaguaaguggcaccggccaguucucgcugugggcuagauuuggugacccaggggg

SEQ ID NO: 4118640 - RNA, 69 nt, Human
ucccuugugcauuaucuuuaauguucucaauaaccuucccaguuguuaugaucaugauauugcagggga

SEQ ID NO: 4118641 - RNA, 109 nt, Human
ucccuuucccacccugccucccagaggcucugcagagauucugggcugaggaagcucccucucucagccuuggcccucgcccugccaggagagcagggauggaaggggg

SEQ ID NO: 4118642 - RNA, 69 nt, Human
ucccuuucuccuuguucccuucaauuguuaaaaaacuugggucaaacaacaugaaaggagaggagagga

SEQ ID NO: 4118643 - RNA, 68 nt, Human
ucccuuugcaauuuggcuuccauuuucucaauucuaaugaaaggggagagaaauccgaaugcagugga

SEQ ID NO: 4118644 - RNA, 73 nt, Human
ucccuuuggauccaagcuuaugauuuuaucauuuuuaguguauuacgaauaugggcuuaugauuucacaggga

SEQ ID NO: 4118645 - RNA, 93 nt, Human
ucccuuuggcccccaacucucugcccugcagggagcaguaagaccugaaacucaauuguccucuguagagcagcuccugggaggacggaggga

SEQ ID NO: 4118646 - RNA, 79 nt, Human
ucccuuugucacacuucaccccugcucccagugaaguauauggcuaagcugagagaaaagugagguucuggggaaggga

SEQ ID NO: 4118647 - RNA, 80 nt, Human
ucccuuuucuaucuuagcagguuaucuuuuguaaucacugauuacugugauuacugucuacuugggauagaaggcaggga

SEQ ID NO: 4118648 - RNA, 96 nt, Human
ucccuuuucucagcgggugaacgagugagcaguacuuacuccugcuuuuguagaagcaaggguggcugcuuaacucugagcugcuggagagaggga

SEQ ID NO: 4118649 - RNA, 67 nt, Human
ucccuuuuuuagucccuuuuaucauguaagguaacacaguuacagguuccaggaauuaggacagggg

SEQ ID NO: 4118650 - RNA, 70 nt, Human
uccgaagguucccagacuccacacugaggcaccccagagugccgagcuggagucaugggaagcugccgga

SEQ ID NO: 4118651 - RNA, 61 nt, Human
uccgaguaauaugcuuuuugaccugcuaaacuuugcagcugagacucucauguuauuugga

SEQ ID NO: 4118652 - RNA, 64 nt, Human
uccgauguauaaacugccggguuccuacaguguacugagccugcagugagugcagaaggucgga

SEQ ID NO: 4118653 - RNA, 75 nt, Human
uccgcaauuaaaaugcuagagucagugcuaaauuauuuaaaccucaauaauugcuugaugacuaguaauugugga

SEQ ID NO: 4118654 - RNA, 73 nt, Human
uccgcgaacuggggccacagcuuuuaaccucggggcucuucuggcccuggaguagcacugggucgcaguugga

SEQ ID NO: 4118655 - RNA, 84 nt, Human
uccccucugugcuuuucugcaggguccuaugugaaauagccacaucucaugaacugcuuuuguagaaacgggcaccgaggaggg

SEQ ID NO: 4118656 - RNA, 124 nt, Human
uccccugcacuguccucgccaugcaccugggagagcagagaacccucuuuguaaggcaaaccagccucaagaggaggagacuuugaaggcuccggcuguaucuucaggacuuugcagcaaggga

SEQ ID NO: 4118657 - RNA, 75 nt, Human
uccccuggaagagaacuacaucaaaggcaauauaaccagauuuauauaaggcuuuuaaagguucaccaaguggga

SEQ ID NO: 4118658 - RNA, 96 nt, Human
uccccuggggaggaugcaaaauuacauugagaaccacugcuuagagcaauuuugagcagugguucucaaugcaauuuugagaaccacucaguggga

SEQ ID NO: 4118659 - RNA, 58 nt, Human
uccccuguauuuccuguucauagauugccaggucuagagcuugauuggauucagggga

SEQ ID NO: 4118660 - RNA, 81 nt, Human
uccccugucugccucgguguccccugcucagggcucuugauggggccugggagcacaucgggguccuugcaagacccggga

SEQ ID NO: 4118661 - RNA, 76 nt, Human
uccccuuaguucuggccaaggcugccagauuagcacggugagugugagugugggguuguggccagcauggggagga

SEQ ID NO: 4118662 - RNA, 56 nt, Human
uccccuuccugagcuaccugcccacugaggucagcgcuggguggcaagcaaggggg

SEQ ID NO: 4118663 - RNA, 103 nt, Human
uccccuuggacuccucacccuguggccagaagguuuaaaagaggggccuuaaagcacggccccccugcuuggucauagagugguacugagacuccaagaggga

SEQ ID NO: 4118664 - RNA, 96 nt, Human
guucuggaacuagaagcugcugccccugaugccuagaacagagcucucauuaagcugcagggcagcuagggagcuuuugguaucuguguuccagac

SEQ ID NO: 4118665 - RNA, 63 nt, Human
guucuggaaugccuguucuaauucuccaaggagaauuagaaaauaaaaggcagagucuagagc

SEQ ID NO: 4118666 - RNA, 72 nt, Human
guucuggacaaagacugugguuuauucuuugaucuucugagauuagugccaccacugucuuuggcccugagc

SEQ ID NO: 4118667 - RNA, 63 nt, Human
guucuggagcucagacaucugaaauggguuaucaaggcucauuucuuguggagacuucaggac

SEQ ID NO: 4118668 - RNA, 79 nt, Human
guucuggaggcugggaguccaggauacagaugccagcagguuuggugucugguaagaaccuggacucuguuuccaagac

SEQ ID NO: 4118669 - RNA, 56 nt, Human
guucuggccccuggcaguccuggagaaagagaccuucugucugauggugccagaac

SEQ ID NO: 4118670 - RNA, 62 nt, Human
guucugggcgccgugggaaacagccggagccaaaggcccggcgccuucacggggcuuagggc

SEQ ID NO: 4118671 - RNA, 64 nt, Human
guucugggcucugggaauuagggaugagccagccauguuccucuuucuucccagaacucagagc

SEQ ID NO: 4118672 - RNA, 56 nt, Human
guucugggugaugagguuggcuuuggacuuuaauugcuucccuuguuaaccagaau

SEQ ID NO: 4118673 - RNA, 55 nt, Human
guucuggguucagugacaucuguuaucaccugggagcuuguuauuaauucagaac

SEQ ID NO: 4118674 - RNA, 59 nt, Human
guucuggucacuagcagacucauuucauucaccccuuggaaucugcccaggacuuggac

SEQ ID NO: 4118675 - RNA, 55 nt, Human
guucuguagcagaaagcacaugguaaaaugugcauuccuuugucuguuaaagagc

SEQ ID NO: 4118676 - RNA, 86 nt, Human
guucuguaucauacagcugacgccagaguggaauuauagcaugaauaucaauuucuuuggcucaguuucuuucugugguuguuuac

SEQ ID NO: 4118677 - RNA, 95 nt, Human
guucugugaggaaccuucuugugcagaacuguagacauugauaaagauuggcacaucauaaccugacaaguuuugcugcaggaagaacaugggac

SEQ ID NO: 4118678 - RNA, 63 nt, Human
guucugugagucuugacgaauguguacagucauguaacuagcaccacaaucaagauacagaac

SEQ ID NO: 4118679 - RNA, 88 nt, Human
guucugugguggcaucuuccaaaugucugucuuuagcccaggucccuucccugaggucauggcugauauuuccaguugccagcugaac

SEQ ID NO: 4118680 - RNA, 105 nt, Human
guucuguuuugccuuugugaagaacagugaacaugcucugcacuuuucuaaaguagaaaaaugagcugaugucagggauucuuucaagaaggcaaauuucagagc

SEQ ID NO: 4118681 - RNA, 58 nt, Human
guucuuaagcuugagguuugcagaggagcaguaauaguagcuucaggcucaagagaac

SEQ ID NO: 4118682 - RNA, 99 nt, Human
guucuuauuguuguugucauuagcuguuuaagcguaugcauaugacuuaucacaucuaagaugcuugaauaguuuuggauagcauauauucauaagaac

SEQ ID NO: 4118683 - RNA, 83 nt, Human
guucuucagcguggcguuaguauucuuucugauuuuuucuaaucccuagacagguguugauacuaaucguggccuaggagggc

SEQ ID NO: 4118684 - RNA, 85 nt, Human
guucuuccaggcccuacagaggagaccaaggcucagcuggcagcuagcuguggggccaaauucuccucucugccuaggggagagc

SEQ ID NO: 4118685 - RNA, 62 nt, Human
guucuuccuaagcauccuuaacaggugaucaccucgccuauugagaacccucaggaggcagc

SEQ ID NO: 4118686 - RNA, 66 nt, Human
guucuuccuuggguaacuggguaaauggugguguuucccugagaccaggagacccagggaaggagc

SEQ ID NO: 4118687 - RNA, 66 nt, Human
guucuucuugcucuuuuagguccuuuauacccugucauaaagagaauacaagcaggcaggaagagc

SEQ ID NO: 4118688 - RNA, 126 nt, Human
guucuugacagacugagaaugauacugagaauguuuucugauugauuuggugagcugucuguuuauagcaucauuagagauuauuuuccauggcuaggaauuauucuugaccucacaguaaaggac

SEQ ID NO: 4118689 - RNA, 60 nt, Human
guucuuuaggggcccaauuuccugcuccuucaaccagaaagagagggccucucuaagagc

SEQ ID NO: 4118690 - RNA, 69 nt, Human
guucuuucccgagucauugauucaacagaacagcccacugugguuauuggaaugcacugggagagacac

SEQ ID NO: 4118691 - RNA, 63 nt, Human
guucuuucuauucugaugucauagaauacuguaggugugugauuacugaauagaaaauagagc

SEQ ID NO: 4118692 - RNA, 63 nt, Human
guucuuucucugggcagguaggaauucauuugcccugccugccagcccccauagagacagaac

SEQ ID NO: 4118693 - RNA, 79 nt, Human
guucuuugggccaaagauguccuuguuaaccuaugggaagaucuuuccucuacuaacaagagacucuguuccagaaaac

SEQ ID NO: 4118694 - RNA, 85 nt, Human
guucuuuucaugaugaaacuguuauguaucuugauugggugguggugauccuaugacucuaugcauguuucacaauucaaagaac

SEQ ID NO: 4118695 - RNA, 61 nt, Human
guucuuuucuacauuauacuucuugaagcuucuguuuuauucaguuuguguagaggugaau

SEQ ID NO: 4118696 - RNA, 76 nt, Human
guugaaagaauaggcaagugcauuagaagagcauuugugaacgaguaugcauucugcaauuugccucuucugugac

SEQ ID NO: 4118697 - RNA, 69 nt, Human
guugaaagccaagagcacuucuugaagagcugcccaaguagccucucugggaauuuuuuggacaucagc

SEQ ID NO: 4118698 - RNA, 66 nt, Human
guugaaauaacagagagcuacugaacugguaggauuucuuuacauucagagcuuucuuaucauaac

SEQ ID NO: 4118699 - RNA, 129 nt, Human
guugaaaugucaugaucucccagcugugagcaauguuugagauaguccagguuaaucccugccuuuuagaaaggaagaaaggaaagccuggccacuagcuccacaucaccccuaaagguaauaacaaac

SEQ ID NO: 4118700 - RNA, 104 nt, Human
guugaacacuugacauguggauagugugacugaggaguugaauuuuuuauucuauuuaauuuuaauuaguauacauuuuaaaaccacaucugacgagugccagc

SEQ ID NO: 4118701 - RNA, 72 nt, Human
guugaaccauaggaaauugccaauauaugaccacuuuuggauuauuaaaacaguaauuucauacgguccaac

SEQ ID NO: 4118702 - RNA, 72 nt, Human
guugaaccauaugauauugcuauuuuuguaggucaagaucugucaauuaguggcaauuucauacaguuuaac

SEQ ID NO: 4118703 - RNA, 64 nt, Human
guugaacccaggagacagguugcagugagccaagaucgugccacugcacuccagccugggcaac

SEQ ID NO: 4118704 - RNA, 124 nt, Human
guugaaguagauuuuucaauuagaaaguaaauggaacgcauuguaaaugacugcagcuucucuuguuguguuuuuacugugauccagaaaugacuauauugauuuuugaaguuuuuacguuaac

SEQ ID NO: 4118705 - RNA, 59 nt, Human
guugaagucugagggucaugggucucaccuguugguggggcugggcucuuagcuccagc

SEQ ID NO: 4118706 - RNA, 78 nt, Human
guugaauauagaaacauccugcuuuccauuugcagcucauaguacugcauuguguggagaugcaggaguugaugcaac

SEQ ID NO: 4118707 - RNA, 62 nt, Human
guggucauuaagauuuuuuucuacugggauuuuccaagcagacugaauccugauaauaccac

SEQ ID NO: 4118708 - RNA, 56 nt, Human
gugguccagguacccguugugggcaucauggccacaggaggaggugcccgggccau

SEQ ID NO: 4118709 - RNA, 65 nt, Human
gugguccccagagcuguguacagccaaaaguaauuucaaacuaguucacauuucuaggauaccau

SEQ ID NO: 4118710 - RNA, 89 nt, Human
gugguccuggugcuggucauugucggccucugucucuggcugcccucggccuccaaggaaccugacaaccauguguacaccagggcugc

SEQ ID NO: 4118711 - RNA, 94 nt, Human
guggucuuauuccugaauucuuaaugaaaucuacuuuuuucaggagugggaauauuagugagauauuauuaaaguuuuuaggguuaaguaucac

SEQ ID NO: 4118712 - RNA, 80 nt, Human
guggugaaucgcaugcucugcccuguuccgcugccccugagcagugucugaaccaccggggcauuuuaacgucuucccac

SEQ ID NO: 4118713 - RNA, 62 nt, Human
guggugacaaucuguuugaucugagcacaauuacuuuauuuggauggagccauugccaccau

SEQ ID NO: 4118714 - RNA, 71 nt, Human
guggugagguaacugccuaaaacuguaggugagugcauuagaguuuuaucauugccuuaacaaaucaccac

SEQ ID NO: 4118715 - RNA, 90 nt, Human
guggugccguugccuggagacccaggggcagggagaaagugagauuuccugggcuuucucucucccucugggaccagaaaacagcuccac

SEQ ID NO: 4118716 - RNA, 68 nt, Human
guggugcugauugauacaacucaauccaaugcauauuuauugggcaucuacugugugauaggcaucau

SEQ ID NO: 4118717 - RNA, 76 nt, Human
gugguggaccuuuuaaaggcuguaugaccaagauauaauuuugguucagguugucuuuauugauauguucacucac

SEQ ID NO: 4118718 - RNA, 104 nt, Human
gugguggcauaugccuguaaucucagcuacucagaaggcugaggcacgagaaucgcuugagcuugagagguagagguugcagugagcugagauugugccacuac

SEQ ID NO: 4118719 - RNA, 104 nt, Human
gugguggcgcuugccuguaaucccagcuacucgggaggcugaggcaggagaacugcuugaaccugggaggcggagguugcagugagccgagaucgugccauugc

SEQ ID NO: 4118720 - RNA, 71 nt, Human
guggugggaauucauagcaacaaagacccaacugucaacacuagaugguuaugggcuauggaucuuauuac

SEQ ID NO: 4118721 - RNA, 77 nt, Human
gugguggggggcuuccugaggcuaaagugcaguggugcaaucacagcucauugcagcuucagguguucacccacuac

SEQ ID NO: 4118722 - RNA, 79 nt, Human
gugguggugcaugccuauagucucagcuacugggagggucacuugagcccaggaguucgaggcuguagugcacuaugau

SEQ ID NO: 4118723 - RNA, 78 nt, Human
gugguggugucuggaguccuaggagucuagaagugccuuucagugggucuugaaggacauccaguccacacucuccac

SEQ ID NO: 4118724 - RNA, 97 nt, Human
gugguggugugagccuguagucucagcuacuugggaagcuuaggcaggaggaucucuugagcccaggaggucgagacugcagugaacacgccacugc

SEQ ID NO: 4118725 - RNA, 60 nt, Human
guggugguguuuggggcgggagagugcuaauauuauuccaaaaucccaaacugccaaaac

SEQ ID NO: 4118726 - RNA, 57 nt, Human
guggugucuccauacauugugaccuagucacugcuagcacacaggagccacacucac

SEQ ID NO: 4118727 - RNA, 67 nt, Human
gugguuaaacaauaacuggcacacagaaagcacucaguguuagcuguuccuguuuguugcuaaccac

SEQ ID NO: 4118728 - RNA, 73 nt, Human
gugguuaaacguuugguaguuugaaaucagccauggugggaauauuuacaccauggaaauuggcaaaugcuac

SEQ ID NO: 4118729 - RNA, 64 nt, Human
gugguuagcgccccauucuucugcuguaguuauuucaccccgggagggugugggccuuagccau

SEQ ID NO: 4118730 - RNA, 86 nt, Human
gugguucaaucagaauaaaguauuccccaaguauucuggaucccuaaggaccagugcuuccaggaauacgguacugaugauuccau

SEQ ID NO: 4118731 - RNA, 64 nt, Human
gugguuccugaggacaucagcaucaccugggaacuuauaggaaaugcaaauccucagggccuau

SEQ ID NO: 4118732 - RNA, 79 nt, Human
gugguucuggaaagaaggcuaaggucccacagggcagcaacuuccuggaaggccuuugccuuuagaguucuagcuuugc

SEQ ID NO: 4118733 - RNA, 82 nt, Human
gugguucuguccaggcccugggaugggagcagucccauacucacuggccagugucccucccagggccaucuggcagagcugc

SEQ ID NO: 4118734 - RNA, 119 nt, Human
gugguugacaauggcaccauuguuccuggaguccccucagugggggccacagggcucacacacccugguccaguggaugcugagggggugccaggauucuggaugcaagauacagccac

SEQ ID NO: 4118735 - RNA, 86 nt, Human
gugguuggugaauguccaggaagucuuaacucaagccaccccaaggcugugauucagaacauuuucgugguccgucucaucuccac

SEQ ID NO: 4118736 - RNA, 57 nt, Human
gugguugugggacugaaguuaccauuuucuugcuggcucucagcucccagcagccac

SEQ ID NO: 4118737 - RNA, 64 nt, Human
gugguuuaaaacaguuguuuucagaagagguuauuaugaauuaacugucuuuaacuggaaccac

SEQ ID NO: 4118738 - RNA, 69 nt, Human
gucccagaaacauauugcuggucccagauuuaauugaaagggauagcaaauuuuaauuucuaaugggac

SEQ ID NO: 4118739 - RNA, 99 nt, Human
gucccagcuacucgggaggcugagguggaaggauccuuugaaccugggaugugaagguugcagagagccaugaucauaccacugcacuccagcuugggc

SEQ ID NO: 4118740 - RNA, 67 nt, Human
gucccagcuacuugagaggcugaggcgggaggaucacuugagcccaggaggucaaguagcuaugggc

SEQ ID NO: 4118741 - RNA, 66 nt, Human
gucccaggaauccguccucuagaucauuucuucagcuuuugacaucugaggaaaaguucuugucac

SEQ ID NO: 4118742 - RNA, 59 nt, Human
gucccaggcuuauguggagcuuaauuaauguucauugagugccauuugcuucuggugac

SEQ ID NO: 4118743 - RNA, 58 nt, Human
gucccagggagguucagggcuugccacuggaagugguaaccugugcaggcccuggggc

SEQ ID NO: 4118744 - RNA, 59 nt, Human
gucccagggaugcagacaugagggcauuggucugucuuccaugaugccauuuccugggc

SEQ ID NO: 4118745 - RNA, 90 nt, Human
gucccaguugcaggagguguucugaagagaggcuggaauucugcauauguggaugagauuuccguucucucuucagucuucaguauggac

SEQ ID NO: 4118746 - RNA, 88 nt, Human
gucccauggggacacugagagaacgggcugcucccuaaggaaacucgaguuuugggucagucugauccuaccagacaucacaugagac

SEQ ID NO: 4118747 - RNA, 88 nt, Human
gucccccuauugaauauugccaggagaaagacccuguccuggccugggacagcuguacacuccugguuaaucaguucugaugggaggc

SEQ ID NO: 4118748 - RNA, 113 nt, Human
guccccuagaccuggaguauugucucucagucaagagugacaggaauauuuaucuguccuauuaaagaggauguuugucaucauugugagagagauucuaguagcugggguac

SEQ ID NO: 4118749 - RNA, 76 nt, Human
guccccugaguacuuuacuucuuacaguuuauguugcuacaucucagaaaagguaggggaaagaguacaggguggc

SEQ ID NO: 4118750 - RNA, 58 nt, Human
guccccugcugguguugcugcuugguuggcuuuacagcaguagugcgucgcagaggac

SEQ ID NO: 4118751 - RNA, 74 nt, Human
gucccgggagcccggggaauacuccguccagggguccuugacccucugguucagggcucccuggcucccaaggc

SEQ ID NO: 4118752 - RNA, 72 nt, Human
gucccuagccaacaccuuauuuucuggcuguauaagacagcgacccaaaaagcaaaggguugggaggaggac

SEQ ID NO: 4118753 - RNA, 78 nt, Human
gucccuagcccuggcagagccagguagugccugcgggcuaaggaaauuauuaaccuggcugugcccagaggaagggau

SEQ ID NO: 4118754 - RNA, 69 nt, Human
gucccuagcuuugcuggcaagcaugucagggaaauggugggacuggcagccagcacgcaguugauggau

SEQ ID NO: 4118755 - RNA, 61 nt, Human
gucccucauaacuggcaggugucaccugguuggccgcagaagggccugccagccgagggac

SEQ ID NO: 4118756 - RNA, 87 nt, Human
gucccucccuucaugaaguuuauggucaggugggcuaucccccagcuaccagcccuccccacaaagcuucacacuggaggcagggac

SEQ ID NO: 4118757 - RNA, 78 nt, Human
gucccugaaccacuagugaugagaagaugaggggaggcugacuccucaggcuuguacuuagugagaaauucagaggac

SEQ ID NO: 4118758 - RNA, 130 nt, Human
gucccugcagcaggaagaagcauuuccuggcccuggucuccucucagggguccccggccgaguauccuguuucugcucugccagggcauccuguggugguccccggggcugcuggagccuggcagggggc

SEQ ID NO: 4118759 - RNA, 61 nt, Human
gucccugcagugccugccacugagccugauuaccacagccugcagaggugcugcuagcuac

SEQ ID NO: 4118760 - RNA, 74 nt, Human
gucccugcgucuuaugcauauucauaacacacugaacccuggugguugugagcgauggauggagcuucagggau

SEQ ID NO: 4118761 - RNA, 88 nt, Human
gucccuggcccggagggacccacucuagaggugguaaguaauucagucuuucugcuagcucaguccugggccucuccccaacaggggc

SEQ ID NO: 4118762 - RNA, 72 nt, Human
gucccuggggguuuaggacucagaaaaaagaccuaguucagucaucccaguccaaacaaacuucccgagggc

SEQ ID NO: 4118763 - RNA, 55 nt, Human
gucccugggucuaaggcaguaauucucaacuggagcaauuuuguccucaggggac

SEQ ID NO: 4118764 - RNA, 82 nt, Human
gucccugugcucacaugugcaaguggguuguguguuucugaugugcaaagggacuugcacauggggaaguagagguagugac

SEQ ID NO: 4118765 - RNA, 55 nt, Human
gucccuucugcaaucugaccucaaucuuuugugcugcaguuuguccagaggggac

SEQ ID NO: 4118766 - RNA, 55 nt, Human
guccgagccaggcuccggagccgcgcugccgcccaaucccuggcgccucucgggc

SEQ ID NO: 4118767 - RNA, 69 nt, Human
guccgauggcacaucuuaggugcuuuguucaccuggcuaugcuuaaugagcagagaaucuacaucggau

SEQ ID NO: 4118768 - RNA, 129 nt, Human
guccgcaaacucuuuaguuucuggcugaaaauugauguguaaguuguucauggggugugauuggccuuuuggucaauaacauuuggcaucuuguaacacucaucuggcaaaggacugaagacaaaagac

SEQ ID NO: 4118769 - RNA, 100 nt, Human
guccgcccccugcagccucacugaacacaccugcagcacguguguccgcaucaugauguccacagggguguucaggagguugugucagguucugcuggac

SEQ ID NO: 4118770 - RNA, 67 nt, Human
guugccuuggccugcuuugagaaucuaccucuuuauaaugagaggcaaggacagcgucaggugcaac

SEQ ID NO: 4118771 - RNA, 85 nt, Human
guugcgaggggcugucuuguauguuguaggacacuuagcagcaucccuggcguccauccauugaauauaauaguuccccuccagc

SEQ ID NO: 4118772 - RNA, 72 nt, Human
guugcgcccauucugcucaugagcucccggguuuccaagcgggaccugucugagccagggugggcagccaac

SEQ ID NO: 4118773 - RNA, 69 nt, Human
guugcggaaaugcagggcuagggugaggaugguugaaacagcuguaccuguagcacuggguaccacggc

SEQ ID NO: 4118774 - RNA, 116 nt, Human
guugcgggaaauaggcgaagacggggcgcgcaagggagcugagccuggguggaccgcgucagggcgcggggagcucgaggcgcagcggcugcagcuccggccucagagcccgcggc

SEQ ID NO: 4118775 - RNA, 94 nt, Human
guugcuaguuuuauaauugcagucucuaguuucugaaugaaaaaggaugccccacauuauacagaacauuaagaacuguuuuuaaagcugaaac

SEQ ID NO: 4118776 - RNA, 72 nt, Human
guugcucagcuccaggaggcaccuuuggaccauguuccaugcacguggcccacgccuuuggagcugugcaau

SEQ ID NO: 4118777 - RNA, 62 nt, Human
guugcucucagcuuuuaaaaacaagaaguauuuguugcuuuuugaaagaaaguuggcgcaau

SEQ ID NO: 4118778 - RNA, 72 nt, Human
guugcugcaaaaguaauuggggcuuuugccauugaaagugaugacaaaaaccgcaauuacuuuugcaccaac

SEQ ID NO: 4118779 - RNA, 62 nt, Human
guugcugcaaaggaguguagguaacacaaaccaccaccugcaaacuuccuuucuagcucaac

SEQ ID NO: 4118780 - RNA, 56 nt, Human
guugcuguuuaguugccuacauaucgcaggugguaaaagagguauaaaaugguagc

SEQ ID NO: 4118781 - RNA, 70 nt, Human
guugcuuagaacugacguuagggaagaagcccucccgguuaucaaauaccuucucuugucaguuugcaau

SEQ ID NO: 4118782 - RNA, 60 nt, Human
guugcuuccaggcuuccuaccuuugacauauuuaguucagguuuaggaauuuggaaaggc

SEQ ID NO: 4118783 - RNA, 91 nt, Human
guugcuugcauugcaaaccaaggagcaaggcucaacaaggucacuuccaauucuaccuuacccgaguguuucuuguuugaucuguggcagc

SEQ ID NO: 4118784 - RNA, 72 nt, Human
guuggaaaagggauggagggaccaaugcugaauaguaaaggaaccagcugucccagccuuucuuucuccagc

SEQ ID NO: 4118785 - RNA, 61 nt, Human
guuggacaaugaacgcuuuuuaacugugugugguucacaguacugcuguucuuguccuagc

SEQ ID NO: 4118786 - RNA, 57 nt, Human
guuggagagggugguagcugauaugaaauaaucuauuauugcaccuuccucacuaac

SEQ ID NO: 4118787 - RNA, 55 nt, Human
guuggaggaugcaaugagggaguaggccgucugccucccaaccagcaguuccagc

SEQ ID NO: 4118788 - RNA, 113 nt, Human
guuggagggagauugccucuaggcgcaaugugaggcuugguuuugagcauauacaaaguacggaaacaaaaccggggccuuuccacaauggcagguagcucagcaccuuuggc

SEQ ID NO: 4118789 - RNA, 62 nt, Human
guuggagggcagaacagagaggggagggagcccagaaccucuggaucugcccugacgccaac

SEQ ID NO: 4118790 - RNA, 94 nt, Human
guuggagucucacucugucaccuaggcuggagugcagugacacgaucuugacucacugcaaccuccaccucccagguucaagugauucuccugc

SEQ ID NO: 4118791 - RNA, 60 nt, Human
guuggauuuugguugaauuguucugauagaauucagaauagaauucucauagaauuucac

SEQ ID NO: 4118792 - RNA, 55 nt, Human
guuggccauuaauuggaggacacagauaauugaucuccuagauuucuggucauac

SEQ ID NO: 4118793 - RNA, 58 nt, Human
guuggcccagaaaugaacuugcuguggauuugauccucccagucauaguuggggcagc

SEQ ID NO: 4118794 - RNA, 99 nt, Human
guuggcccggauggucucgaucucuugaccuugugaucccccugccuuggccucccaaagugcugggauuacaggugugagccaccgugcccggccugc

SEQ ID NO: 4118795 - RNA, 79 nt, Human
guuggcggcacgguagguucauuagucaauaaagcauugccacgcguuuuauugaauuguaacccuauuuugcccugau

SEQ ID NO: 4118796 - RNA, 58 nt, Human
guuggcugcucagugauaugagaauaugcccccaugcauguuucaagggcaucccaac

SEQ ID NO: 4118797 - RNA, 72 nt, Human
guugggagggucauaguuuuucuuacugaugauuuaaaguguuucuguauuaaaggcagugaucuuuuuagc

SEQ ID NO: 4118798 - RNA, 67 nt, Human
guugggcagaggcugugcagaggacacaggagcugcccuucaucauucucugcagccugggcucggc

SEQ ID NO: 4118799 - RNA, 63 nt, Human
guuggggauuugaaucccaugugugccaccaaauagccauacagcuuuagcaaauuaccuaac

SEQ ID NO: 4118800 - RNA, 77 nt, Human
guuggggcagugcuaaggauucugccuucugggagcucauuuccugagcagaauucccucuugguaccuggccuggc

SEQ ID NO: 4118801 - RNA, 62 nt, Human
guugggucagcuuucagguaguaggauaccaguacuuucuacagccaugucgcugauuuaac

SEQ ID NO: 4118802 - RNA, 118 nt, Human
guugguaauuuuaaaaugucuuucaccuucuagaguuaauauuuauguaaauaaaaacugagaaaugagugaaauucugguaaaggaaguugguuguaacauuuuaacuuauauccac

SEQ ID NO: 4118803 - RNA, 84 nt, Human
guuggucaggccagggcacugcucuuuaguuuuugaaacuuuccuuccuuuucaugucuugagguuuggugcuugguugauagc

SEQ ID NO: 4118804 - RNA, 81 nt, Human
guuggugaacuuggugucaugccaggagugaggacuccagcccagcucacuccuggaaaagaacgcagggggcucaaagac

SEQ ID NO: 4118805 - RNA, 73 nt, Human
guuggugacauguggcccagaugagugugcuaauggaaucauuuguacccuuucuaugaggccaagcacuagc

SEQ ID NO: 4118806 - RNA, 57 nt, Human
guuggugaccgaggucuugcccaaaaauauuuagggcauuucagaaagguuaccaac

SEQ ID NO: 4118807 - RNA, 66 nt, Human
guugguggcagggucguagcgcuccacagcauucaggucauugugguagucacggcccgccacagc

SEQ ID NO: 4118808 - RNA, 76 nt, Human
guugguucuuauccuuucuaucuaugaaugucucucuguaugucucucguggguagaguggagggauaagagauac

SEQ ID NO: 4118809 - RNA, 102 nt, Human
guugguuggaauuaguucuugcacaccaagacugcacagagccagcuagcagagugugcagggccucugagccaguucugggugugcuccuuguccaccagc

SEQ ID NO: 4118810 - RNA, 73 nt, Human
guugguuuauuuuucucuucuuuuuccucagagcugcaaggaaccagggaaagggaaggagguuagaacccac

SEQ ID NO: 4118811 - RNA, 65 nt, Human
guuguacauaugaggauaaguuuuagugcagaaagucucauugcauugcauuccauguguucaau

SEQ ID NO: 4118812 - RNA, 62 nt, Human
guuguacugucuuugagcuggaggaggagaauacauccucccucagaaugaagaaaggcaac

SEQ ID NO: 4118813 - RNA, 61 nt, Human
guuguaguggaauauacccaugcuccauucacaugguucaugucugcuuucaugcuacaac

SEQ ID NO: 4118814 - RNA, 92 nt, Human
guuguaguguuuaugugcucucauaccuuucauaugcaucuucauuuaauucaaaggucaaaugccagugguguggaucaaagcuuuauaau

SEQ ID NO: 4118815 - RNA, 57 nt, Human
guugucaaauaguagaaagauggcugugucuuggccaggcuccugcugugugacaau

SEQ ID NO: 4118816 - RNA, 80 nt, Human
guugucaauuaugugacacaucuuccagggggaagccagccaaauaaaacccaagcugaagauaucacauggagacacac

SEQ ID NO: 4118817 - RNA, 76 nt, Human
guugucauuuugcugcauauuuagaccuugauacucuacuugcuccucagguucuuuuguacucaguauugacaac

SEQ ID NO: 4118818 - RNA, 60 nt, Human
guugucuggaaaggggcuuuuaucucccgucagggaacaggcucuucauuuccagaggau

SEQ ID NO: 4118819 - RNA, 63 nt, Human
guugucugggagauugaaugaguuaaguuuguaaagagcuuagaacagugucugccagagaau

SEQ ID NO: 4118820 - RNA, 123 nt, Human
guugugacucuacuuguauaaauaauuaauuuuuuaugucuugccaguuccuggaaccagcuugauauucuuuguguagaagcuagccuggagccagcagacaugaauaggcagaagcagaau

SEQ ID NO: 4118821 - RNA, 109 nt, Human
guugugacuucuaccccaucuugcacugaaucucaaggggaggguucaaugacggacaaaucuucaggcucuugugcagaaucagagagaaaggggaaguggagacgac

SEQ ID NO: 4118822 - RNA, 125 nt, Human
guugugcaggaucugauauaauccuacauucauaaguuuuugugcuggguuuggggagagagggugucuccccagacccagcacaaaaacuuaugaaucuaggauuauaucagauccugcacaac

SEQ ID NO: 4118823 - RNA, 62 nt, Human
guuguggaguggucugagcugccaggaguuuaaacccggauucuccaggccauucccagagc

SEQ ID NO: 4118824 - RNA, 80 nt, Human
guugugguugccaaagcaguuuacugucaauaacucuuccaaauaauugaaguguuacugaucguagauucagaaacagc

SEQ ID NO: 4118825 - RNA, 69 nt, Human
guugugguuugugugcuaggucugaaucagucguccuucagaccagggggagcacagagagucuauagc

SEQ ID NO: 4118826 - RNA, 55 nt, Human
guuguguucauguucagagauucuagcuaaucagugucucuggcauagacucaau

SEQ ID NO: 4118827 - RNA, 55 nt, Human
guuguguuggcuugaagcucauaggagacuuaagacgggcucucgagcaaccaac

SEQ ID NO: 4118828 - RNA, 60 nt, Human
guuguuaucuauugcugcguuacaaaccaaaccacuccaaauguagcaguuuaaaacaac

SEQ ID NO: 4118829 - RNA, 91 nt, Human
guuguucuguuucuaguuuaggauccaaucuaagaucccacguuuaguuuuuauaucucuagucuccuuuaaccugaaacaguuucucagc

SEQ ID NO: 4118830 - RNA, 64 nt, Human
guuguugauucauauguaacaucccugguuuaggagagcugggauagugggguagaaucauaac

SEQ ID NO: 4118831 - RNA, 80 nt, Human
guuguuggccgugauggcauuugaccgcuuuguggcuauuugcaagccacuucgcuacacugucauuaugaacccucagc

SEQ ID NO: 4118832 - RNA, 57 nt, Human
guuguugggcuuggggaucugccuuuuuaguaagcagcccagauaaagcucaggaac

SEQ ID NO: 4118833 - RNA, 60 nt, Human
guuguuucuguaagagacagcucuauaaauaaugagcuguuuguuucuaugagagauagc

SEQ ID NO: 4118834 - RNA, 85 nt, Human
guuguuuguucaagcucaacugaaagcuuuuaaauaacccaauuaguaaucaaaagcugaaugcaggcuugauuauucagacaau

SEQ ID NO: 4118835 - RNA, 56 nt, Human
guuguuuugggaggguguuacaauagauguagaauugaaacauuugaucaaagcac

SEQ ID NO: 4118836 - RNA, 74 nt, Human
guuuaaaccacucaugaggaaguaguuggcaauuuuuuuugaaacuuuuaaaccucaugaguauucuuuuaaac

SEQ ID NO: 4118837 - RNA, 80 nt, Human
guuuaaacccacugcucuucacugagauaauccuagaugaauaucccagggguauccauggagaagagggugaaugugac

SEQ ID NO: 4118838 - RNA, 79 nt, Human
guuuaaaucauuugugcauaguaacagaauugagugucaaaaucaagucuguuggauucuacgcccaaagcucuuaggc

SEQ ID NO: 4118839 - RNA, 75 nt, Human
guuuaaauuguaucaaagucuguuacuccugccuuaucaaggcauaaacaaccagcuuugauacgcauuauaggc

SEQ ID NO: 4118840 - RNA, 72 nt, Human
guugaauaucagaucuggcuacucuagccaacuuucaugucuggcagcaauuagcuagagcugagucucagc

SEQ ID NO: 4118841 - RNA, 74 nt, Human
guugaauggcucuguuuuaugaguaccacacugacaaaggcauaaauggcaccaaaagcagacguauuuucgac

SEQ ID NO: 4118842 - RNA, 80 nt, Human
guugaaugugauuaaagguggaaggcagguuuguaucacuggcugcagagcucaacuagucuauuuucaaucuauucaac

SEQ ID NO: 4118843 - RNA, 57 nt, Human
guugaauuaccccaugccuggagcacuuacuaagcuccaggcaugguguaauuuugc

SEQ ID NO: 4118844 - RNA, 71 nt, Human
guugaauucaguuaagcaacuggcuguuuugcgacuaaugauuuguaaguagcaguuuggcugaauuuaac

SEQ ID NO: 4118845 - RNA, 101 nt, Human
guugaauuguuaugagugugugugugugcuacuggcaucuagugggaaagaccagggaugcugcuaaguggucuacaaugcacaagauagcccuccgcaac

SEQ ID NO: 4118846 - RNA, 64 nt, Human
guugacacaggcaggcucuggguaugugcaucgagagauauuucccagagucuguuuuuuugac

SEQ ID NO: 4118847 - RNA, 66 nt, Human
guugacagugacccugaaagcauggagcgagagcugcucaccaaacucccagggugacuguucaac

SEQ ID NO: 4118848 - RNA, 61 nt, Human
guugaccaugacauuucuaguuucuacaaccacaccaucugaaauguaguguuaugucaac

SEQ ID NO: 4118849 - RNA, 63 nt, Human
guugagaguuaagcgggcuaaugaauggggagcacuuguguuuucucccuccuuggccucagc

SEQ ID NO: 4118850 - RNA, 82 nt, Human
guugagauugagaacugugccaaaaauuuuguucaacuuguacgaaauacuuugcacaguuuuaaauggcuuuaaucccaau

SEQ ID NO: 4118851 - RNA, 69 nt, Human
guugagcaccuuuguucauugccuucagucugaaacuuagcugaaaggaucugacaaauaaugcucaac

SEQ ID NO: 4118852 - RNA, 73 nt, Human
guugagcucuccuagcccugcugccugaauuagcugcaacugugaggcugagaaggagugggugaggcuaaac

SEQ ID NO: 4118853 - RNA, 55 nt, Human
guugaggagguucagggugguuacuauguucuugguucacucccaucuccucugc

SEQ ID NO: 4118854 - RNA, 66 nt, Human
guugaggcugaucccaggcacugucgcaacccagcugggugugugcaugcuuggggcagcacugac

SEQ ID NO: 4118855 - RNA, 66 nt, Human
guugagucagcaguaguaaaucaugaaauaugauaugaacaccauggaagugcucuucugaccaac

SEQ ID NO: 4118856 - RNA, 74 nt, Human
guugagugcucugcaggccugugaagggugccaccugagggagccgccugcaagcggcccugcagccacaaagc

SEQ ID NO: 4118857 - RNA, 63 nt, Human
guugagugcuuugaauguucugggcacugggcuggaugcuaggaauacacagagcaauaagac

SEQ ID NO: 4118858 - RNA, 59 nt, Human
guugaguguuccagaaacuggcccugugugcaccagggcuggaggcuggcacguugggc

SEQ ID NO: 4118859 - RNA, 67 nt, Human
guugauaagcagcauugagaucugcccuccuaagaaugggccauuaggucuucaaagcuuuuacgau

SEQ ID NO: 4118860 - RNA, 77 nt, Human
guugauaauacugaaggcccuggaguuucuggacaauagugucauugucugggagggacagggcuacaauuaucuac

SEQ ID NO: 4118861 - RNA, 90 nt, Human
guugauaggcaguauaguauaguguagugacugagaacaugaaugucaguguccaccugaauuccagucucugcucuauuucuuauuagc

SEQ ID NO: 4118862 - RNA, 70 nt, Human
guugauaucaauggaucuggaauucaggaaaagugucugagauauccaggagauucauuaggucaucagc

SEQ ID NO: 4118863 - RNA, 61 nt, Human
guugaucauucuuccagagugaacuuuaagaaacucauucucacaggcuggaaugaugaau

SEQ ID NO: 4118864 - RNA, 99 nt, Human
guugaucucagucuucugauggguggagucuuaaaaaucaaauggauggaguaaucaaguccugggugaggcuuuauuuuaggugagaaugagauuuac

SEQ ID NO: 4118865 - RNA, 66 nt, Human
guugauguugacgcuaagacuuagaacccuaauguuuuuggucuucauccgucacagcauaucaau

SEQ ID NO: 4118866 - RNA, 130 nt, Human
guugauguuggcucuuggcagggaccuugccuggugcugugguaggaucauagccucucuguguggcugcuugacuuugucacagcaugguggcaggucccaagagggaaccaagaggccagguggcaac

SEQ ID NO: 4118867 - RNA, 55 nt, Human
guugauuccggggccauuucaacgugcagaggcuugggaugggucugggaccagc

SEQ ID NO: 4118868 - RNA, 79 nt, Human
guugauugaaaucuacuagugauauaaucaaagaugaaucauugaacauaaaucacuggucaguaguuuccccaccagc

SEQ ID NO: 4118869 - RNA, 58 nt, Human
guugauuugaagagcagaaagucuuuuucauuacuacguuuugcucuucuaugucaau

SEQ ID NO: 4118870 - RNA, 102 nt, Human
guugauuugggguggagaguucuguagauaucuauuaggucugcuuggugcagagcugaguucaauucuuggauauccuuguuaacuuucugucucguugac

SEQ ID NO: 4118871 - RNA, 58 nt, Human
guugcaaaugggaagaugguuaacagcugaaaggagguucaucuuucaaauuugugac

SEQ ID NO: 4118872 - RNA, 79 nt, Human
guugcaaugcagggccucuggaacacugagggcuguccugugccacccccagccaccaguggccccugugcauggagac

SEQ ID NO: 4118873 - RNA, 102 nt, Human
guugcacaaguugugcacugcacaucucuagcaggcaugauuuauguggaauacuauguaaauggcaaccccuagagcugucaaauguacaguuugugcagc

SEQ ID NO: 4118874 - RNA, 83 nt, Human
guugcagagugaagcaguauggaaaagaaauuccacucauuuuuuggaaagucaguuucucaugcaugcucuuacuuuucaac

SEQ ID NO: 4118875 - RNA, 84 nt, Human
guugcaguuauucagaaggcccgcccugagcaagggcuccaaaccaggauuuccuucaggguugaggccgacucuaguggcagc

SEQ ID NO: 4118876 - RNA, 91 nt, Human
guugcauauuucugcauguuaauuaggaagaggaugucagcauucaauaauguuauuguuuugcuuccuagaaggucugcaaaaaggcagc

SEQ ID NO: 4118877 - RNA, 76 nt, Human
guugcaugacugauaagaaagauuccuauuuggacacugccauuucuuaggugucuuucuguccuuguucugccac

SEQ ID NO: 4118878 - RNA, 127 nt, Human
guugcauuuagggaaagcaacagcacagcaguuaagagaaagguguccaauccugguuggaucauuuacuagucauccggcuugguaugccuuaaccucucugugccucaguuuccucuucuguaau

SEQ ID NO: 4118879 - RNA, 75 nt, Human
guugccaaaacugugacugagcauucacauggguuuucaaggcagguucaguguuugcuuaaguuauaugguaac

SEQ ID NO: 4118880 - RNA, 60 nt, Human
guugccaaugucuuuagcaaauggugagauauauuccaagaaacugaagauaauggcaac

SEQ ID NO: 4118881 - RNA, 63 nt, Human
guugccagacuuucuuaccagugucauuuaagucaacgaauacaugguaaaaguuuuggcaau

SEQ ID NO: 4118882 - RNA, 65 nt, Human
guugccauugagguaaaauguucaugguuagacagugaacucugaauuaauugcucucaaucaac

SEQ ID NO: 4118883 - RNA, 73 nt, Human
guugccccaguacacacugaccugaacuuagcaucccggagaaugaaagggacaguuggggcaguggggcagc

SEQ ID NO: 4118884 - RNA, 99 nt, Human
guugcccuccaaucccuucccuugaaguagccagagggagguguccacuccugauucaagcccuuccuuagcuccucauggccugggguggaguccagc

SEQ ID NO: 4118885 - RNA, 102 nt, Human
guugcccugaugaugauuaauccagagccuucgauaagaagagucucagauucaaagauucccuguaagguucugagauuuggacauccucaaauucgcagc

SEQ ID NO: 4118886 - RNA, 79 nt, Human
guugccgcugcaaguacucgcagcuguuggcgcuggcuggccgcagccgggacagcaggugggcuuugcggauggugau

SEQ ID NO: 4118887 - RNA, 77 nt, Human
guugccuccauuuuuuaaccuguaaaaugggagaaguauuaccuguuuugcccaccuuauagguuuugaugcacaac

SEQ ID NO: 4118888 - RNA, 105 nt, Human
guugccucuggccuuucccuguccagcauugagccuguaauccuugggcccugaccagagggcccagcccuugcuggucucaguuguuggacuggccaagguggc

SEQ ID NO: 4118889 - RNA, 73 nt, Human
guugccugagucaggacaagguggucuccagagaaacuucaacuuuugggguaccacaaucuggaaugguagc

SEQ ID NO: 4118890 - RNA, 88 nt, Human
guugccugguacagaaucuguuauugaauaggugcuaccaauuaauguugguagcacugacuuucaugacaggacuguaaccaguaac

SEQ ID NO: 4118891 - RNA, 63 nt, Human
guugccuuuaucuugggccaaguuucuauccuggaagaggaaaguaagagaugaaguuguaau

SEQ ID NO: 4118892 - RNA, 61 nt, Human
guugcggaucuucauggccucaggagacuuguuucuccaugggcucuucuggacugcacac

SEQ ID NO: 4118893 - RNA, 56 nt, Human
guugcgguggcuggcuggcacuguccccaggggcagugccagcuccacacagcagc

SEQ ID NO: 4118894 - RNA, 65 nt, Human
guugcuaugggaggagauaucacaggggcuggcucagcuccagguaucuggcuuccacaucugac

SEQ ID NO: 4118895 - RNA, 77 nt, Human
guugcuccguuuugugggacacggaugaguuuucuuagguuagaaccucucaccuuccccaacgcauggaauaaaac

SEQ ID NO: 4118896 - RNA, 65 nt, Human
guugcucgcgcuguuccagcagcuggcgccgcguguggugcagcagcuggguccggcggagcagc

SEQ ID NO: 4118897 - RNA, 59 nt, Human
guugcugaaggcaugccagagaaggacccaaauacuauccaggcagcuugacuagcaac

SEQ ID NO: 4118898 - RNA, 76 nt, Human
guugcugccccugggugagcaguggggccacaguuagguccccucugcaaauagccaggcuuuccaaggcaggaac

SEQ ID NO: 4118899 - RNA, 60 nt, Human
guugcugcccguaccugugcacuuggccacaguccaaagugacuccauugcgggcacagc

SEQ ID NO: 4118900 - RNA, 82 nt, Human
guugcugcucuacucucuaguuguugaugaaugacugaaccucggucgucaguuuucucauuuaugagauguggauaauaac

SEQ ID NO: 4118901 - RNA, 70 nt, Human
guugcuugggcuggagugcaauggugcgaucucagcucaccgcaaccucugccucccagguucaagcgau

SEQ ID NO: 4118902 - RNA, 69 nt, Human
guugcuuugcucucuucucuccugcagaauuuuguguagcucccccaagaggaaugguuugcaaagcac

SEQ ID NO: 4118903 - RNA, 66 nt, Human
guugcuuuucuccaucacauggagagaucuuggcucuguggggauagcaaugguggggaggacagc

SEQ ID NO: 4118904 - RNA, 59 nt, Human
guugcuuuugucugucccagcuugugcaucccaugggucagggcuggggucagagugac

SEQ ID NO: 4118905 - RNA, 65 nt, Human
guuggaaaugaaaugaaguuggccuggcuuuugaagccugugccauuuucauuacacacucugac

SEQ ID NO: 4118906 - RNA, 108 nt, Human
guuggaagccaaguacuuuacauuccuucguuuagagauuucaugcuuuucgaaagucguggcgguucugaucgcuaaacaaaguagaaaugaagugugcucaccagc

SEQ ID NO: 4118907 - RNA, 80 nt, Human
guuggaaggcacaguuaaagggucaugugaccaaggagggaaaugccuuugucacaugacuuuuugguggccugauuagc

SEQ ID NO: 4118908 - RNA, 59 nt, Human
guuggaaguagcaagugaaagccaggaaaaauuaucugugcuuucugcaugguuccuac

SEQ ID NO: 4118909 - RNA, 59 nt, Human
gugucaccucuucugcgucccugggaggcaaagcacccugggcucagagcagguagcac

SEQ ID NO: 4118910 - RNA, 81 nt, Human
gugucagaaaccccugggccaggggccucuucugauagucagcauacauuucaagggguccuugcuugggggcucuugcau

SEQ ID NO: 4118911 - RNA, 76 nt, Human
gugucagggaacccugggcggguguuggccgagucacgugaagcaaggcagcuccugcccaggaaggcucuggggc

SEQ ID NO: 4118912 - RNA, 56 nt, Human
gugucagguugguuuucagagaacagaaaugacaguucuaugaaaucaacuugaac

SEQ ID NO: 4118913 - RNA, 55 nt, Human
gugucauaaauccacgugcaugaaggcaccaagccagcaccagauugagugacac

SEQ ID NO: 4118914 - RNA, 105 nt, Human
gugucaucaugguccuccuucugcccccgugagauuggaguuugaugaggccagguaacaaauaaaugccuguguaaauucuagcuacgguggguccauagacac

SEQ ID NO: 4118915 - RNA, 59 nt, Human
gugucaugacccugccauaugaucuuugccgcccaacagaaggaagcagggucaggcau

SEQ ID NO: 4118916 - RNA, 58 nt, Human
gugucaugcacacucaguguugcaaauuaauggucuggugaucuggguggcauggcau

SEQ ID NO: 4118917 - RNA, 72 nt, Human
guguccaaacuccuccacugauccugacuuuggagcagcccugaccaaggcccucagugggaggcgggacac

SEQ ID NO: 4118918 - RNA, 66 nt, Human
guguccaaguggaaguauaagaaugauagcugccccauauuaucagauauagcauucacuggaugc

SEQ ID NO: 4118919 - RNA, 55 nt, Human
guguccauguuguucagggugaguccaugugucucuccuugaaucuucaugacac

SEQ ID NO: 4118920 - RNA, 122 nt, Human
gugucccccaucgauggggcuggucacucaguuuuuggccucugcugcaucccuaacacuauaucaaguguggcggggaaauugagaggccccuccucaagcccuggucaugauggagguac

SEQ ID NO: 4118921 - RNA, 105 nt, Human
gugucccuguccccgcccaggaaagggcugccauuucuggcccaagacugcuccccuuggaaaggccugccuggaaggccagcccuuggcggcaucuggggacac

SEQ ID NO: 4118922 - RNA, 90 nt, Human
guguccuauucugcuacugaaugaugaucuagcaagggggaaaaauugcuucugaaaugcaggucuucauaagacaaaggaagaggaugc

SEQ ID NO: 4118923 - RNA, 60 nt, Human
guguccucuguuuccaucugacuuccacuccagguggggguucuuaugugcacagggcau

SEQ ID NO: 4118924 - RNA, 69 nt, Human
guguccuuauauggcagacagcagagagagagaaagaaggcucucuacugccuccucuuaugaggacac

SEQ ID NO: 4118925 - RNA, 83 nt, Human
guguccuuggagaagugacagagccucuaaacuuccugcugcagucaguuacaguguucuauuacucugcuggucaaggagau

SEQ ID NO: 4118926 - RNA, 74 nt, Human
guguccuuguaaagcucaugucuacucugcagcucagaauguggcuguguuggaaauagggucuuugcagacau

SEQ ID NO: 4118927 - RNA, 56 nt, Human
guguccuuuugaggguccacaggggacuuucucauguccuuggguuugaaggacau

SEQ ID NO: 4118928 - RNA, 74 nt, Human
gugucgcuucagggggcuagugugcuggaggcuacaggaagcaaagggcauggcugguguccugagggagacac

SEQ ID NO: 4118929 - RNA, 72 nt, Human
gugucuaagcucuuucugaauauuugaccucaccauugugacauuguagguuaagcggaggugucuggacac

SEQ ID NO: 4118930 - RNA, 75 nt, Human
gugucuagaagugggccacugaggguggucauuuuguuuuggaacagggauucucagccuuggcaccacugacau

SEQ ID NO: 4118931 - RNA, 129 nt, Human
gugucuaguguauuuuauuuuaccugucucuuuuuuuguaugggcagaaauuagaucuuuagagauuauuaaagcuacaucaaggagaggcaacauaauauaguggugaagaacacugacgcuagaucc

SEQ ID NO: 4118932 - RNA, 59 nt, Human
gugucuauaaugaaaugcacuugugauucuacacacacaggaugauuugauaugggcau

SEQ ID NO: 4118933 - RNA, 79 nt, Human
gugucucccagagguggggacaggugaugcaaggucuggcacagauugguaaucagaaguccaauaccaugggagaugc

SEQ ID NO: 4118934 - RNA, 71 nt, Human
gugucuccuggcauuugguugaguagaauucuaucucccuuauuagcuaagugucucugcugaggagucau

SEQ ID NO: 4118935 - RNA, 88 nt, Human
gugucuccuuggugccuuggcuaugcuuguguucaguuuugaagcaacaaaauguggagauaaugcuagcuuuauaguaaggguacac

SEQ ID NO: 4118936 - RNA, 130 nt, Human
gugucucuguguuugcagguguccagugugaggugcagcugguggagucugggggaggcuugguacagccugggggaucccugagacucuccugugcagccucuggauucaccuucaguaacagugacau

SEQ ID NO: 4118937 - RNA, 84 nt, Human
gugucugagucuaugacagcagcagagauacugguuucuuuuugggagggaagcauauccauguugcagccaaggagcaggcac

SEQ ID NO: 4118938 - RNA, 65 nt, Human
gugucugcucagcuugcuagaacuuuuuaccucccuauccucuagcugcuggggagggcagacac

SEQ ID NO: 4118939 - RNA, 88 nt, Human
gugucuggacagggguaccuggguuaccugucugucccagaagagagggcuggggggagcuacaggucccuuggagucaucaggauac

SEQ ID NO: 4118940 - RNA, 84 nt, Human
gugucuggagacauuuuuggcuguuauagcuaaggagaugcuaaugucuccugguggauagaagccaagguugccacuaaacau

SEQ ID NO: 4118941 - RNA, 66 nt, Human
gugucugucuuuugucuuugaaaugcugcuacugaaguggcacuuucaaaagagaagucaugacac

SEQ ID NO: 4118942 - RNA, 70 nt, Human
gugucugugcaacgguuagaugaagaugcuuugcgaggugagauauggacaucugaaguugcagagagac

SEQ ID NO: 4118943 - RNA, 128 nt, Human
gugucuguguuucucugcucuucucuguauuuaagggugucugccucuuucuuucugggucucugacuugugaauuaaaagguaguaguuagaagugcagugucugaguagggcaugguggugugcac

SEQ ID NO: 4118944 - RNA, 61 nt, Human
gugucuguuuacuuauugguaaagaguuuguuacuuaaagcucuuuauauaguaaagauau

SEQ ID NO: 4118945 - RNA, 85 nt, Human
gugucuucuacucaagauagggaaaguacaacuccccugguuauuaucaggaccaauugauuuugccugaucugagagaaaacau

SEQ ID NO: 4118946 - RNA, 71 nt, Human
gugucuuuccucuucuggcaggcagggacaugaacaaauccgugacucagcacugacccaggagaugacgc

SEQ ID NO: 4118947 - RNA, 61 nt, Human
gugugaaagagaauaaaaccaguggagguaaaccccagcucucucaguucugcuuucaugc

SEQ ID NO: 4118948 - RNA, 57 nt, Human
gugugaaaugguucucuuuguuguuaauaacaaaucauaggagucccauauucccac

SEQ ID NO: 4118949 - RNA, 89 nt, Human
gugugaacagaucugagguuuauugaucuaaaucaacgugggcugaggaacagcacaguaacugaugugaucaaacgagcuucucauac

SEQ ID NO: 4118950 - RNA, 80 nt, Human
gugugaagacagcacaggaccaaggaagcuguagucuucagggaguacacaguucaugguggcuggugguggaugcacac

SEQ ID NO: 4118951 - RNA, 87 nt, Human
gugugaagauccugggagugucagacuugcuucugcgcaucaucaaauccauaccauaagcaaaauagugacaccuccuacuugcau

SEQ ID NO: 4118952 - RNA, 61 nt, Human
gugugaagguaauggaaucuccugauucucaaagggucagaggacugagaguugcccaugc

SEQ ID NO: 4118953 - RNA, 98 nt, Human
gugugacagucaugacagaggagcuggaaugauucuguuuuucagaucuguucuuuuucucucugcauuugaacguugauaacccugacaaaucacac

SEQ ID NO: 4118954 - RNA, 80 nt, Human
gugugacccauucaaggaacugccaggugcuccaucugaaccaacaugucugagcugggggccuggcaugagggucaugc

SEQ ID NO: 4118955 - RNA, 72 nt, Human
gugugacccuuguccucaaggucaggauagaguuccagcugucauaucccauuggccaggacauaguugcau

SEQ ID NO: 4118956 - RNA, 60 nt, Human
gugugaguauaugcauguuuuagacuguauguauuuguguguauguacauguacucacac

SEQ ID NO: 4118957 - RNA, 79 nt, Human
gugugauucucaaggcaugaaaggagugaguguugaguuauaauuacgauuuauuucuuccuuuaauguggaauuguac

SEQ ID NO: 4118958 - RNA, 89 nt, Human
gugugcaauucuuuucucuccagguggggugaugucggucagcaacuucugagguuuucccaguucuggcgaggaugagccugguagac

SEQ ID NO: 4118959 - RNA, 80 nt, Human
gugugcagggccuuguugaugugcuccacaauccagccgaacaacugggcauagaugugcuucgccagggcguugcgcgc

SEQ ID NO: 4118960 - RNA, 55 nt, Human
gugugcaggggguccccaugccacccaacccugggcugagugggccccugcagac

SEQ ID NO: 4118961 - RNA, 76 nt, Human
gugugcauaugugugugugcauaugugcauguguguuuuuguaggcauguauaugugcacauguguguggcuauac

SEQ ID NO: 4118962 - RNA, 74 nt, Human
gugugcaucuuuucugcuugauuuucuguuuauggugacaccuaaguaagcuuuuaagugacuaaguugcacac

SEQ ID NO: 4118963 - RNA, 104 nt, Human
gugugcaugagugccugcauguguguacauuugugcacaugugcauggguguggaugucuaugcguuuguguauaaauuuauguguguggguaugugugcacau

SEQ ID NO: 4118964 - RNA, 62 nt, Human
gugugcauguauauacuuuuaugcguacauauauguauacauguagguauauacauguacau

SEQ ID NO: 4118965 - RNA, 90 nt, Human
gugugcaugugugcacaugugugugugugugugugugugugugugugugugcgggugcauaugcaugcaugcuugugagaggcaguacac

SEQ ID NO: 4118966 - RNA, 73 nt, Human
gugugccaucaaaguaucucaauaugguagaauuuuuucuccuuuguggaaauacuuguggugccauguacau

SEQ ID NO: 4118967 - RNA, 94 nt, Human
gugugcccagacagcugagccaggggaugguggggagacuugagcggcuuugucuguccaggcaccccaagugggcccaggcugcuggggacau

SEQ ID NO: 4118968 - RNA, 89 nt, Human
gugugcccuaaacugugacaccuuauuuggaaauauaauuauagcagauguaauuaguuaagauggggucuuacugcaguagggugggc

SEQ ID NO: 4118969 - RNA, 68 nt, Human
gugugccucugaguguuuuccccgggucgcuggauaugcagccaggauaggaaucacugcagcuacau

SEQ ID NO: 4118970 - RNA, 58 nt, Human
gugugccuguaucaugguaaccacuccauaaauguggcuuuuauuauggaagguacac

SEQ ID NO: 4118971 - RNA, 67 nt, Human
gugugcuagcugcuucacacagguaacuaauuuaacccuaacauucugugaaauagcuaugcuacau

SEQ ID NO: 4118972 - RNA, 72 nt, Human
gugugcuauuaaugaggcugcauuuuaaagcagguguuguuaagugcaaucagagcagcuuuauuaagccac

SEQ ID NO: 4118973 - RNA, 57 nt, Human
gugugcugagugacugucaucauaccacggcauaagugacaacagaacugggcaagc

SEQ ID NO: 4118974 - RNA, 56 nt, Human
gugugcuucagauucauuauuguuuaguucuuccuaagggaugaaaugaugcacac

SEQ ID NO: 4118975 - RNA, 58 nt, Human
gugugcuuccagggugucauccgccagggcaguggccucugagcuccuggaagcgugc

SEQ ID NO: 4118976 - RNA, 69 nt, Human
guguggaacaaugagguuugcagggagcagguuaacaaaauaauccauucugccaugcuucaucuacau

SEQ ID NO: 4118977 - RNA, 73 nt, Human
guuuaacaacuugcguucagagauguccuguaaggcauaggugugcacucuugaaugcugguuguucacaaac

SEQ ID NO: 4118978 - RNA, 74 nt, Human
guuuaacaauguaaucuacucugcucaaguugauugucuucauuuugcauggaggaguagagauugcauguagc

SEQ ID NO: 4118979 - RNA, 61 nt, Human
guuuaagaauaaaugguuguugcuaaucuaacauacuuagcacaccaggcaugucuugagc

SEQ ID NO: 4118980 - RNA, 60 nt, Human
guuuaagauuuguacccuguugacuucuuaaaggacuugcgacaguguauagauuagagc

SEQ ID NO: 4118981 - RNA, 101 nt, Human
guuuaagcaacauggaaugguugcauguggcguuucugcugacaggccaaauuaaggccccagccaacagccagcaucaaccaagauaccugugcaugagc

SEQ ID NO: 4118982 - RNA, 119 nt, Human
guuuaagccacucagucugugguauuuuuguuauaggagcccgaacuaagacaccacuauucugaucguagucucuugauguugccauaauaaaauaccauagucuaggaggcuuuuac

SEQ ID NO: 4118983 - RNA, 80 nt, Human
guuuaaggacaggugcugcguggcggagcugguauccaaacucaggacccgcuccaaagacuggcuccugauccuuagac

SEQ ID NO: 4118984 - RNA, 62 nt, Human
guuuaagguggaagaugugcuuuuuguauauaaaaaagcacaucucaaacuucaucucaaac

SEQ ID NO: 4118985 - RNA, 80 nt, Human
guuuacagaaaaguguuaacaucuuggacucgugaagcaauguuuucacacauucuagguauguugaccuaauaugaaac

SEQ ID NO: 4118986 - RNA, 68 nt, Human
guuuacaguggcuucauuggauuugguugaaaacacaaugguggcaauagcaguguagucucugugac

SEQ ID NO: 4118987 - RNA, 59 nt, Human
guuuacauuaaguauuagcauccuuagagaaaccaggaccagcugacuuaauuguaaac

SEQ ID NO: 4118988 - RNA, 125 nt, Human
guuuaccccaagagcccaccaagagcucccccagcucagagaauagggcuugaggggacccugagcccccucccuguccucggaggugucaucuuugggagcuccagggaggggucuggggaaac

SEQ ID NO: 4118989 - RNA, 78 nt, Human
guuuacccuuugucaccaguggcuuugguauuuccaugucuggcauugcauaaacuucucuggugugaaaggauaaau

SEQ ID NO: 4118990 - RNA, 74 nt, Human
guuuacugcacaguaagguaucccagugaauacccaguggucuucuaaauggggauccuuucugugucacaaau

SEQ ID NO: 4118991 - RNA, 57 nt, Human
guuuacuguuaaccaacgaauggggaaggagaaccacauuacaugguuuuagugaac

SEQ ID NO: 4118992 - RNA, 57 nt, Human
guuuacuuagaugcucaugcagagagguuaucaucaaagaugggcacuagaguagac

SEQ ID NO: 4118993 - RNA, 87 nt, Human
guuuagaagccagagagaaauggauuugagucccaaaccccuuauuuacuaaucaugggaacuuaaucauucucucugcuuucaaau

SEQ ID NO: 4118994 - RNA, 59 nt, Human
guuuagaaugaaacuuuugagcacagguuauuggacucaggcaaaccuucguucuaagc

SEQ ID NO: 4118995 - RNA, 66 nt, Human
guuuagagggcauaguuaaauaggaggaaaguacuuucaccagaauugcaaacuguguccuacaac

SEQ ID NO: 4118996 - RNA, 99 nt, Human
guuuagaucgcauugucaugaaucuucuugcugccuguuuuauuauaggucuuauuauggacuuuaauucucaggugcacauacaaugcuuucuaugac

SEQ ID NO: 4118997 - RNA, 65 nt, Human
guuuagaugggaggcauuucaggaaacaaauguguggggagaagcugccuuuuauaccuuuaaac

SEQ ID NO: 4118998 - RNA, 79 nt, Human
guuuagcucaauuguacauaaaccauuuggcccccaguaucaacuggaugcuuuguuuauguguaguuuuaugcugggc

SEQ ID NO: 4118999 - RNA, 67 nt, Human
guuuaggaaacauauuaauccagugaaaauaacaacuauuguuauuggauuaauauguucccuagac

SEQ ID NO: 4119000 - RNA, 114 nt, Human
guuuaggauuuuugauagugaagucauauaaauuuguggccacugauucuaagucucacuggagucaaaugaguaaauauauaagacugaucaccgaaguuuaauuaucugagc

SEQ ID NO: 4119001 - RNA, 57 nt, Human
guuuaguggaguagaaaccaaagaagccucuuuucugcuucucauaccccgcuaagc

SEQ ID NO: 4119002 - RNA, 92 nt, Human
guuuauaacgaggauacaaugucaugauuuuccauuagaaauauuuucaugauuuagggggauaaugacuuucugauucuauguccauaagc

SEQ ID NO: 4119003 - RNA, 57 nt, Human
guuuauacacaagacuauaugugugugcauguguguauacagugucuguauauaaau

SEQ ID NO: 4119004 - RNA, 79 nt, Human
guuuauauccugaauaaauuagcugucacucaacaacaaaguuuagugauaugucugguuugguucagugauuuugggc

SEQ ID NO: 4119005 - RNA, 81 nt, Human
guuuauaugcaaauacuaugacauuuuguaucagggacuugagucuguggauuuuaguguucaugggagugagaugugggc

SEQ ID NO: 4119006 - RNA, 82 nt, Human
guuuaucuagaacuuaaagucagucaacagcuauuuacugagcaucuacaauguuguuuggcuaaguaggugcuggaagaau

SEQ ID NO: 4119007 - RNA, 96 nt, Human
guuuaucucuugacuucuggauggaugcuucuuucuaguuuuugaauauuauaaagaaagcugcuaugaacauucuauuucaagucuuauauaaac

SEQ ID NO: 4119008 - RNA, 82 nt, Human
guuuaucugcagaucugcaggugagggcccuggaagcaugaacuguggccaggggaguuccccuccacugcacucagaauac

SEQ ID NO: 4119009 - RNA, 60 nt, Human
guuuaugguguuaauuuauauugugguguaacaaacuaccacacauauagcagcauaaac

SEQ ID NO: 4119010 - RNA, 66 nt, Human
guuuauugaacaccuggugugugccugggccuuuauaagagcugaggauacaucagugaacaagac

SEQ ID NO: 4119011 - RNA, 64 nt, Human
guuuauugagcauuuaaccauaugccaggcacugugcuuggcacugggacagaugcucucagac

SEQ ID NO: 4119012 - RNA, 92 nt, Human
guuuauuuucuuaagccucugcauuaucucucacacgucuugcuuaaaaaauagguuagugagaagauaaguauugcaaaagacaaagaaac

SEQ ID NO: 4119013 - RNA, 79 nt, Human
guuucacagaauaccagguucuuccaggugagaucacucuccaagaggcaguuucaucaggagaaaagauucgucaaac

SEQ ID NO: 4119014 - RNA, 63 nt, Human
guuucacagcaaaguucccuguuuuauuaaaauccaccaggggauguuuucaacuugugaaau

SEQ ID NO: 4119015 - RNA, 56 nt, Human
guuucacaugaaacuuggggaaccgauuucauucccccaguaucacccuguggcgc

SEQ ID NO: 4119016 - RNA, 104 nt, Human
guuucaccaauuagacggcuacuaauuucuucacuuauuuuacugagaauaaaugucugagaucagugucauaaggagaaauuacagcaaguuuuugguuugac

SEQ ID NO: 4119017 - RNA, 68 nt, Human
guuucacccacauuccacuggccaaagcaauuuccaugaccaagcucagagucagaggauggggaaau

SEQ ID NO: 4119018 - RNA, 58 nt, Human
guuucaccuccaaagaauugcucccaguguaggagcagcccugaaaucgaggugacac

SEQ ID NO: 4119019 - RNA, 80 nt, Human
guuucacuccagugcaaugcagaugacaccaagccaacacgcagaggcauggccggaguguugucacugugaguuggggc

SEQ ID NO: 4119020 - RNA, 57 nt, Human
guuucacugaauuaauuuccuucuuaaguucuaucucaagaaggauucaaguggaau

SEQ ID NO: 4119021 - RNA, 93 nt, Human
guuucagaaagucuggaaaugcccccaucucagucgugcuaagggcuugugcacuuagcccaaugcugaauggacaggguggcugccuggaac

SEQ ID NO: 4119022 - RNA, 79 nt, Human
guuucagacacucuguaaggcacuaagcauaugucagugaaaagaauuacuacaucuuugcucuuauagagcuuggaau

SEQ ID NO: 4119023 - RNA, 84 nt, Human
guuucagagaagaaagaaaaagcuaccuuuguguucauagcuaaacauuaguuucuuauauuggagucucucuuuuucugauac

SEQ ID NO: 4119024 - RNA, 81 nt, Human
guuucagcaaaacgggauugacugcgcuuuauuguuuguauuugcaguuuuaauugaagccagucaauguuaaguuauaau

SEQ ID NO: 4119025 - RNA, 79 nt, Human
guuucagcccagguggaguguguggggauuggggguuagaagcaguccccauggaaaacccaccuagggaacaggaagc

SEQ ID NO: 4119026 - RNA, 79 nt, Human
guuucaggcuacucuuuugagucuucagauccucuuaaaauugaagaguauuuuaagauugcaaggugagguguguaac

SEQ ID NO: 4119027 - RNA, 61 nt, Human
guuucagugaaguucaagcuugccaucuauuuucaguagaagcaggaagaaugucagagac

SEQ ID NO: 4119028 - RNA, 57 nt, Human
guuucaguucauguauuccgagugaauuucugguucacucguauuuucaacugaaac

SEQ ID NO: 4119029 - RNA, 111 nt, Human
guuucaguuuaggacugaccagcuuuuuucuguaggcuuacgcggcuucugugucuccaaacuacucuuagagcuguuugucuagagagugacuggcaggauuacugagau

SEQ ID NO: 4119030 - RNA, 58 nt, Human
guuucauuaaguauaaaauguggugauuuuucacaccuacacuaggacuagauggaac

SEQ ID NO: 4119031 - RNA, 72 nt, Human
guuucauuuauugguuaggccagcagaagacgguaaacguugguuuggugguguugacagauggugugaaac

SEQ ID NO: 4119032 - RNA, 69 nt, Human
guuuccacaacaguccagcucaucaguggcaccguuggagcugugucuaccccacggguuggaggaaac

SEQ ID NO: 4119033 - RNA, 63 nt, Human
guuuccagaaaacgcuuuauuuaggugcucuuugcauuuugaauccguucguucuuugggagc

SEQ ID NO: 4119034 - RNA, 55 nt, Human
guuuccagccaauccccucaggggucuagagaugccugggcugugguuuggagac

SEQ ID NO: 4119035 - RNA, 64 nt, Human
guuuccagcuugggcccggggauuggagauguccccacugagaguagggcacaagugaggaaau

SEQ ID NO: 4119036 - RNA, 55 nt, Human
guuuccaggcuaugauauagagaggggaaaaccucucugucugagccuggcagac

SEQ ID NO: 4119037 - RNA, 61 nt, Human
guuuccaugggagaagacaguguaaguuuacauuagagcuguguuucuacccaggggaggc

SEQ ID NO: 4119038 - RNA, 69 nt, Human
guuuccauggugcagaaauccaggcauggcccgacugggucuucugcugggggugucucaccaggcugc

SEQ ID NO: 4119039 - RNA, 92 nt, Human
guuuccauuuuggaaucauuguaaauaaugcugccaugaacauuuguguauguguuuguggguggacauauguuuucaaugcucuuggauac

SEQ ID NO: 4119040 - RNA, 62 nt, Human
guuucccagucugcagaguucuuuccuacuaugaagaagaggugauucugcaggcuggaaau

SEQ ID NO: 4119041 - RNA, 95 nt, Human
guuucccucacagugccccuucuuauagaagcaaccauuguuccuuauacaagcaaccguugcuucuguaaguagccauuguuccuccuggagac

SEQ ID NO: 4119042 - RNA, 70 nt, Human
guuucccuccacagaauguaagauccacaaaagacagaucuuguggucuuguucggucugugccuagaac

SEQ ID NO: 4119043 - RNA, 57 nt, Human
guuuccuauggcugcugcaggaaaugacacaaauuauccccuuauagucguggaagc

SEQ ID NO: 4119044 - RNA, 93 nt, Human
guuuccuccuggacuuucucagcuuuucccaccccagcgccagugggagggagguggccugacaagugggaagaggcuggggccagaggaaac

SEQ ID NO: 4119045 - RNA, 56 nt, Human
guuuccucuccggggccuccaggguucccgacuccugccggaccugguggggagac

SEQ ID NO: 4119046 - RNA, 93 nt, Human
guuuccucuuagaauuguuccuuuucuuaugcaucauuaccuggcauuccccguagucacaguacaggauaaagaaucgaaucgaagggaaau

SEQ ID NO: 4119047 - RNA, 93 nt, Human
guuggagaaguggaaaugcccuuucacucagcacaaacagcaacauucccaugagcugaggagaugggcuuuuuagggaguaguucauccaac

SEQ ID NO: 4119048 - RNA, 59 nt, Human
guuggagggugugucugugugagggcggguuccccugcugucgccagagccccaccuac

SEQ ID NO: 4119049 - RNA, 79 nt, Human
guuggagugauaauguguuucaagaggcuuaauucuggaugaaacaucuggaggcuaagucauuugcuaccacucuaac

SEQ ID NO: 4119050 - RNA, 67 nt, Human
guuggaguuaagagagaugacgcugacucugaauucagaggaggcucuaaacuuuccuuggcucaac

SEQ ID NO: 4119051 - RNA, 74 nt, Human
guuggauguuuauuauggcaguuuucuaggugagaguugauucugacuugggccagggucauagaaauauagau

SEQ ID NO: 4119052 - RNA, 79 nt, Human
guuggcaccuucuugcuuuaucuguucaggggaggaaaguuuuauccucccauuguggaaggcagaagagcaagcuagc

SEQ ID NO: 4119053 - RNA, 65 nt, Human
guuggcagaauucaguuccuugugauuguaggacugcagugccuacuuucuugcugucugucaau

SEQ ID NO: 4119054 - RNA, 59 nt, Human
guuggcagcccugacccaaugggccacuggcucagaggcaagcaaggagcugacccgac

SEQ ID NO: 4119055 - RNA, 70 nt, Human
guuggcauacaaagacugcauaacacaugaauuuccccaauguguucacaguguugugccuuuuguugac

SEQ ID NO: 4119056 - RNA, 85 nt, Human
guuggccaggccugaugucgugauccacccgccuuggccucccaaagugcugggauuaccggcaugagccacgcgccuggccaau

SEQ ID NO: 4119057 - RNA, 100 nt, Human
guuggccaggcuggucuugaacuccugaccucgugaucugccugccucggccuccccaaagugcuaggauuacaggcgggagccaccaugccuggccaac

SEQ ID NO: 4119058 - RNA, 111 nt, Human
guuggccaugcuggggccuucuagggucacagugcacagcaggcguggggccuucaucucuguggcauguugcacuuguaccuggagagucggccugggcaugaggccaac

SEQ ID NO: 4119059 - RNA, 105 nt, Human
guuggccuucaguccuggcgugggguguggccagggggccaugucccccaugggcccagcaggagggcagcgcucugccacaccgcauguguggauccggcccac

SEQ ID NO: 4119060 - RNA, 70 nt, Human
guuggcugcagagcauaaaucugaauagguucuccaaaguaagcuuuuucugcaugcauuugcucccaau

SEQ ID NO: 4119061 - RNA, 59 nt, Human
guuggcuggaugacuguguuaacuggcccuuaccaguuaaguggucaguuuuagacaac

SEQ ID NO: 4119062 - RNA, 55 nt, Human
guuggcuuccacuccccaaauggaacaauaguuccuccugagugagagugccagc

SEQ ID NO: 4119063 - RNA, 84 nt, Human
guugggaaauaugggggggcgugcagaggagcugggaagccauggugcugggucacugauuccccauuuuauauaaucucccac

SEQ ID NO: 4119064 - RNA, 56 nt, Human
guugggagaaguugaacugugauccggucacagcaaaggcuucggcugaucccaac

SEQ ID NO: 4119065 - RNA, 82 nt, Human
guugggauccugucacauuuauacuccauuugcagccauacucuuggggaugcauguugaaauaacugugcaaugucaaaac

SEQ ID NO: 4119066 - RNA, 87 nt, Human
guugggcaacuugaguuuaacugucucuucuuccaguggccaaguccaaauucugaaagcacaguucugaccaugucccuguccaac

SEQ ID NO: 4119067 - RNA, 57 nt, Human
guugggcgugguuuucugugucugcgcuuacuauucgucggcucaggcuauccuaac

SEQ ID NO: 4119068 - RNA, 75 nt, Human
guuggggaaaggcuugacuagaagggagagucacaagugaguuuucuggguuggugucacugccugcacccugac

SEQ ID NO: 4119069 - RNA, 130 nt, Human
guugggggagggauggggccuggcucaaggcggagaaggggguugcagucuagggucugcgggacgccugggagugugcggccggggcccucucucugcaaaugggucucccaagcccuugccccccagc

SEQ ID NO: 4119070 - RNA, 83 nt, Human
guuggggguguccccagucccggcggugggugugugagagacuagaccuccugcuguggccgggcccuggggucagccucggc

SEQ ID NO: 4119071 - RNA, 58 nt, Human
guugggguugccacaacagugagaagaagucggauggcgccucauguguggucccagc

SEQ ID NO: 4119072 - RNA, 67 nt, Human
guuggguccuucagggcugcauacaggagauauggaagccugucuuuugcaaguagcuggaccgaac

SEQ ID NO: 4119073 - RNA, 61 nt, Human
guugggugagggacaaaaguuucuucaacaaauuaccagaguacugcagcucucacugaau

SEQ ID NO: 4119074 - RNA, 88 nt, Human
guugggugucuggcagcaggucacacgcagauucaacuauuagcuauugagcuauguucuuugcugggcucugugccagacauuuaac

SEQ ID NO: 4119075 - RNA, 121 nt, Human
guugggugugggagggauccaggcccccaagcucuaaggccuugaaaggauguccuguuaaggcagcuacuuucaaugucuugggagucagguuauguggggcccccuccccuaccucaac

SEQ ID NO: 4119076 - RNA, 65 nt, Human
guuggguuucuccuguaggcugugagauggcaaggaguccuugcugccuccuacaaaagcccagc

SEQ ID NO: 4119077 - RNA, 68 nt, Human
guuggguuucugccagagauuuaaaucagguuuauaaagaguuaccugccuaaggcaagaaacuggac

SEQ ID NO: 4119078 - RNA, 90 nt, Human
guuggucaggcuggucucaaacuccuugugaucugguugccuuggccucccaaagugcugggauuacaggcuugagccaccgugcccagc

SEQ ID NO: 4119079 - RNA, 67 nt, Human
guuggucuuuucaagguuaaauaaacuagaggucuugcuucuugcuaugaagcuuugaaaagcuuac

SEQ ID NO: 4119080 - RNA, 72 nt, Human
guugguggauuuuuaagugaguugacugucgaaaagauuuaguacacaagacacauuuaaaaggccucugac

SEQ ID NO: 4119081 - RNA, 100 nt, Human
guugguguacaaauaucugaguucugcuuucaguucuucuggguguauauaaguaccuagcaguggaauugcagaaucauaugguaaugcugcauuuaac

SEQ ID NO: 4119082 - RNA, 71 nt, Human
guugguuagauuuccucacuuugcaagaauucccaaguaugcacagugauuacaaagaaaucagagccaau

SEQ ID NO: 4119083 - RNA, 79 nt, Human
guugguuuuaugauugcaguugcuuucuauauugaauuaucaaauucaaacagaggaacaauuguuuuguauaauugac

SEQ ID NO: 4119084 - RNA, 100 nt, Human
guuguaucaaucaguaaaggcuagguuaugcugugauaacaaagaauuccaaaaucucaguggcuuaaaaugacagguguuuauuucuuuuuguuacaac

SEQ ID NO: 4119085 - RNA, 87 nt, Human
guuguaugauuaaacaaguuauuauuuacugagugcuuagaauaguuccuggcacauaguuagugcuauauguguuuaguaaauaac

SEQ ID NO: 4119086 - RNA, 88 nt, Human
guuguauuaugaggcacugaauacuugaggguauaguacauagccuauuuuacucuuuugcuuauucuaaguguaucaaggauacaac

SEQ ID NO: 4119087 - RNA, 129 nt, Human
guuguauuucuuugggccauuuucuugugugauaacaguuuauguaaauguccagcaguccuuaauugcuguuuauuuuuauaaguguuaagccauauuuacaaaagucagugacacaagguuuucugc

SEQ ID NO: 4119088 - RNA, 63 nt, Human
guugucaagugauuagccauaauguuucuugcacuucaggcuugcauuauaaaucacgacaau

SEQ ID NO: 4119089 - RNA, 96 nt, Human
guuguccaaugaaaaugguuauggaguaaugagacuuugcaucuaguauaauuuguuuaauagucuuauggccaucucugauuuuuauccagaaau

SEQ ID NO: 4119090 - RNA, 60 nt, Human
guuguccugugccaccuuccugaguggcuaccacccaggaaguugaugcagaggaccugc

SEQ ID NO: 4119091 - RNA, 57 nt, Human
guuguccuuaaaaacucugcucccugaaugcucagggagacugaucugagugauaac

SEQ ID NO: 4119092 - RNA, 107 nt, Human
guugucugggagggugcaaggugugugaacaauguucuauauuuugaucagggugcugguuauacggguguagacacauguucaucuaacugcacccuuaggauuac

SEQ ID NO: 4119093 - RNA, 64 nt, Human
guugugaauagugccgcaauaaacauaugugugcaugugucuuuauagcagcaugauuuauaau

SEQ ID NO: 4119094 - RNA, 57 nt, Human
guugugagccacugggcaggauggcagccccacaccccaaccugccugagccauagc

SEQ ID NO: 4119095 - RNA, 55 nt, Human
guugugauuguagcuaaacuagguggcaacacucguugaauagcaauagcacaac

SEQ ID NO: 4119096 - RNA, 72 nt, Human
guugugcuagucacuuaacagguauuauuuuguuuauuccuuauaacaaccuuucaaaguggcuaucacugc

SEQ ID NO: 4119097 - RNA, 127 nt, Human
guugugugacauaagaagaucuuggauuaauuagcacuauuuuucacuauccuucuauuaguauuccacugaggaaaugaagaaaaguguuguauuaaauuguaaggauuuaggaacauuaggcaac

SEQ ID NO: 4119098 - RNA, 62 nt, Human
guugugugaggguuaauugcggucugaauauaaugcacuuggcccagugucuagcgcacagc

SEQ ID NO: 4119099 - RNA, 57 nt, Human
guugugugugagccuucaccacaagaacccugguucugugggaaggacacgcagagc

SEQ ID NO: 4119100 - RNA, 80 nt, Human
guuguguguggacaagaugccaauugaucugacucaaaagccauugaaguuccaucagugcauccugccacaaagaaaac

SEQ ID NO: 4119101 - RNA, 57 nt, Human
guuguguucuuguugugaagcucauuggacuuugacuucauaaacucagaaggcagc

SEQ ID NO: 4119102 - RNA, 64 nt, Human
guuguuaaggccuugguaaauuggcauuugagucacucagcagaggcccugccaggagcccaac

SEQ ID NO: 4119103 - RNA, 88 nt, Human
guuguuacagaguuggagcugagagccaggcuggcuuccaagucugugcucauaaacacggugccauccuggauucagaccaaacgac

SEQ ID NO: 4119104 - RNA, 96 nt, Human
guuguuacuggacagguaaagcuucaaaucacuugcugucauuucacagcacaugaaaaauguuugcaguuuucuuuucaaccuccagccugacac

SEQ ID NO: 4119105 - RNA, 120 nt, Human
guuguuaugaacugaauguaugugucuccuaaaacucauauauugaagccuugaccccuaaggugacaguguuggggguaaauuuuuugggaaguaauuagguuuagauuagaucacaac

SEQ ID NO: 4119106 - RNA, 76 nt, Human
guuguuauuaauuugcaggcuggugauggaauuucauucuuuugacuucuagauugccuguaaguaaauauuugac

SEQ ID NO: 4119107 - RNA, 59 nt, Human
guuguucuaagcaggggucaaguguacaaggcauagcuuugucaucugcauaggacaac

SEQ ID NO: 4119108 - RNA, 59 nt, Human
guuguucuguaggcacacaguuucaagccugggauggcuuggaguguuacagaugcauc

SEQ ID NO: 4119109 - RNA, 91 nt, Human
guuguugcaucaucaaagacagcagcccuuuggcugaacugugagcccauuucccgucaccauaugccgcgggcugcuguugagcaauaac

SEQ ID NO: 4119110 - RNA, 78 nt, Human
guuguuguuauuuugagauggagucuugcucugucguccaggcuggagugcgguggcaccaucucagcucacugcaac

SEQ ID NO: 4119111 - RNA, 76 nt, Human
guuguuguuuuugagauggagucuugcucuguugcccaggcuggagggcaguggcaccaucucagcucacuacagc

SEQ ID NO: 4119112 - RNA, 79 nt, Human
guuguuuauaaauuacccagucugugguauucuguuguagcagcccaaacagacuaagacgugggugaauuuaaauagc

SEQ ID NO: 4119113 - RNA, 130 nt, Human
guuguuucaaaugcuguucuuuuagguagaacucuaugaaauugcuguguucauuggucaaaaauggccaaauaccagucauuucauaugguucaaccuacuaucuaugaggacuauugcaauaaacagc

SEQ ID NO: 4119114 - RNA, 59 nt, Human
guguggcaaaacccugccuacuaaaaauacaaaaauuagccaggcaugguggugcgcac

SEQ ID NO: 4119115 - RNA, 116 nt, Human
guguggcagccaaguucaacucuacugggcaugccuguuugagaauagucaggggcacccaaggucccucugcuauuucuagauaacaagaacagaagagcagccugaugccauac

SEQ ID NO: 4119116 - RNA, 97 nt, Human
guguggccccccaggcagaugugugcagacagauauuacuuagcuaccacucugcuauuaguguacaucucacacgcaugccuguucuggcucucac

SEQ ID NO: 4119117 - RNA, 59 nt, Human
guguggccgauuaagcuuaucuacaaucccuguucuaagucauagauuaauggccacac

SEQ ID NO: 4119118 - RNA, 55 nt, Human
guguggcuaggauggcuuugcugucacagaagggacaguccacacuacccaacac

SEQ ID NO: 4119119 - RNA, 81 nt, Human
guguggcugggacacaggcagcugggugggugcugccccagcuccauccccaugcccagagccuggugccagcgcccacac

SEQ ID NO: 4119120 - RNA, 73 nt, Human
guguggcuugggugucucagcucuucaaggauuuuguaauuugaaggacugucuaaggccuccaagcugucac

SEQ ID NO: 4119121 - RNA, 63 nt, Human
gugugggcagcccucuccccagcucggugcacaccaggcucugugaaggguguugcucaccgc

SEQ ID NO: 4119122 - RNA, 59 nt, Human
gugugggcagcuggagcuguucagucaagaaggaagcugauucagcccagcucccacac

SEQ ID NO: 4119123 - RNA, 62 nt, Human
guguggggagcugcagccacauucccgcggacaggcugcucagugguggcaguugcccaugc

SEQ ID NO: 4119124 - RNA, 129 nt, Human
guguggucagggagaguguugggaaaugagggugggauacagagagaaggaugauuuaaagguuuagauggucugguuauuuuuaguuuuucuauucccauuucugcaauaguuuuuauuuuuccucau

SEQ ID NO: 4119125 - RNA, 71 nt, Human
guguggucuagcugcuucucacaugggcaacucugugcagucugcguuauugaaaagcagccagauuuuau

SEQ ID NO: 4119126 - RNA, 108 nt, Human
gugugguggcaggcaccuauaaccccagcuacuugggagucugaggcagaagaaucacuugagcccaggagguggagguugcagugagcuaagauucugccacugcac

SEQ ID NO: 4119127 - RNA, 103 nt, Human
gugugguggugguaccuguaaucccagcuacucgggaggcugaggcacgagaaucgcuugaacccacccgggagguggagguugcaguaagccaagaucgcac

SEQ ID NO: 4119128 - RNA, 83 nt, Human
gugugguguggcccugguguugugaaguagccguucucugauuggcaacggccugauucacaacaccagcugccccaccacac

SEQ ID NO: 4119129 - RNA, 105 nt, Human
gugugguuuucuagcaccuugaggaaauuuagugucuuucaaaagguuuauucuacuaauaagcucuuuugguugagggacuuugcaagguagagaaaaugucau

SEQ ID NO: 4119130 - RNA, 59 nt, Human
gugugguuuuuagauuucuacagucuuucucuuaagauuuaggaauauagaaaccaugu

SEQ ID NO: 4119131 - RNA, 124 nt, Human
guguguaggggcuggacuuggggagugugagcuguaaggauggguguauuuuguccuccaaguguggcaggaaggagggagaugcccauccuggcauuaccauuuucugcagccagauacaugc

SEQ ID NO: 4119132 - RNA, 62 nt, Human
guguguagugaggagugugaccaaaauuuaaauuuuauuuugauuaaauuuaagcuacaugc

SEQ ID NO: 4119133 - RNA, 74 nt, Human
guguguaugucuauaguuuuuaaauagaccaggaauuauacuaaaauuauuuaauaaaacuauggcaugugcau

SEQ ID NO: 4119134 - RNA, 57 nt, Human
guguguauuuguauuaugaaccuacauacguguguguacauauacacaaauacagau

SEQ ID NO: 4119135 - RNA, 61 nt, Human
gugugucuguuauuugucgcugcauccccaccacgcggcacaguaccugucacagaggcac

SEQ ID NO: 4119136 - RNA, 63 nt, Human
gugugugacagcugcuuaugaaccaacggcacaccugcugcuggcugcagugcugucaaaugc

SEQ ID NO: 4119137 - RNA, 63 nt, Human
gugugugacugauuguucugagcaccagauccuucugaguggcagggaguucguucacaacac

SEQ ID NO: 4119138 - RNA, 57 nt, Human
gugugugcaugcguguaugcacauguguauguuaugugcauauauaagugcauacac

SEQ ID NO: 4119139 - RNA, 61 nt, Human
gugugugcgugugccuaucaauaaaggcugucaaaguccuugcaggaagcagauggcacac

SEQ ID NO: 4119140 - RNA, 69 nt, Human
guguguggaugugagaaggaucaggcucaaauuuuaugagccaagccaugauuuucuauauuuuuaugc

SEQ ID NO: 4119141 - RNA, 62 nt, Human
guguguguauguagaacuauguauauagaacaauauguauguauagaacuauauauauauau

SEQ ID NO: 4119142 - RNA, 98 nt, Human
gugugugugcgcgcgcgcagggguggcuuugggggguggcugcugucucugcucugguacagucugcuugucuccauggugccuguugccacacacgc

SEQ ID NO: 4119143 - RNA, 72 nt, Human
guguguguggcuaggccucaggccugccuggcuggccuccagcugcaggagagcuggucuggccccagccac

SEQ ID NO: 4119144 - RNA, 83 nt, Human
gugugugugucugguguuuauguuuguguaggggacucaucuuugaccaaauucucugcauuguaaagagccagaacagucac

SEQ ID NO: 4119145 - RNA, 91 nt, Human
gugugugugugagguucugguuuaagaaagugcuggugcacucaaaaggugcugguucaggagacauucuuaaaguagaaugaccaugcac

SEQ ID NO: 4119146 - RNA, 72 nt, Human
gugugugugugcauauguguggcucuccucugugaagucacuugguuccucacaguaugcuaauauauucac

SEQ ID NO: 4119147 - RNA, 80 nt, Human
guguguguguguagcuuuaauaagcugcugaauuauugcugaauuaugcuuauucagaguuuguuuuacaaggucauuac

SEQ ID NO: 4119148 - RNA, 112 nt, Human
gugugugugugucuccccagaaugcccccugcgugucuuagcauggaacauguugcauaacaccagccccagagcuaaacacacaggcugggacugguggaagcaccaccac

SEQ ID NO: 4119149 - RNA, 83 nt, Human
gugugugugugugugagugugugcaugcauucgugcaugcgugggugugcauguaccaugcauauacacccaucuauacacac

SEQ ID NO: 4119150 - RNA, 106 nt, Human
guguguguguguguguguauguaagcaauggcuucugaagcacacuuuacaaaaguaugugcuuuaaagaagccagcugaagguuuuauguucacugcaugcucau

SEQ ID NO: 4119151 - RNA, 62 nt, Human
guguguguguguguguguauguguguguguguguguguguguguauacacacauauauguac

SEQ ID NO: 4119152 - RNA, 84 nt, Human
gugugugugugugugugugugcgugugcgcgcgcgcgugugugugcaugugugugugcacgugcgcgcgagcauaugugcgcau

SEQ ID NO: 4119153 - RNA, 65 nt, Human
guguguguguguguguguguguauuggggcaaggagaagacgggagcacacauagaaaugcauau

SEQ ID NO: 4119154 - RNA, 84 nt, Human
gugugugugugugugugugugucccuacaacagcuucacuuacaaaguaguugaaaaagaggggcugcuucaucacaagcagac

SEQ ID NO: 4119155 - RNA, 83 nt, Human
guguguguguguguguguguguguaugcauaugagugcaacuuucccaaaguugcauauacccgcauuuacauaaacauauac

SEQ ID NO: 4119156 - RNA, 68 nt, Human
gugugugugugugugugugugugugugugugaugguacacauguauggcacuuacauuuucacugagc

SEQ ID NO: 4119157 - RNA, 76 nt, Human
guguguguguguguguguguguguguguguguguguguuugcaugcacacauguuuacaagcaucuaaaaacacau

SEQ ID NO: 4119158 - RNA, 63 nt, Human
guguguguuuguguguguaucuaaugucucuucucacugaagguacacauuauagaaauagac

SEQ ID NO: 4119159 - RNA, 93 nt, Human
guguguuauuccuacuugcagaugagaaacugaagcuccgcuagguuaaguaagcuguuccaggccucauugcuaguugggauccaaacucac

SEQ ID NO: 4119160 - RNA, 67 nt, Human
guguguucaacaauccccucucccagaugugcugcucugugcagccagcugcucgggggaaacagac

SEQ ID NO: 4119161 - RNA, 78 nt, Human
guguguucagcccuacuguuauauauagcagcaguauucuuuucaauugcugaauaauauuccacuguaugaauauac

SEQ ID NO: 4119162 - RNA, 66 nt, Human
guguguuccaaacauggcacccagaucucaaaagcuucuucaacgcucccaugguuugggauacac

SEQ ID NO: 4119163 - RNA, 55 nt, Human
guguguuccacauguguuuggccauuaucuuauugucacacauaagugaacgcac

SEQ ID NO: 4119164 - RNA, 91 nt, Human
guguguuccaugggugaagggauuuuguuugcuucgaucucuccuguauucugagcagcuagauaaagcccuuccagcacauuuuacucac

SEQ ID NO: 4119165 - RNA, 61 nt, Human
guguguuuaaugcacauuguuuccugguuaaaccaguuuucaguguugauauuuaauacau

SEQ ID NO: 4119166 - RNA, 56 nt, Human
guguguuuuuauccuuugaaucacuguaauaguuauguugaagaauaaaaacacau

SEQ ID NO: 4119167 - RNA, 62 nt, Human
guguuaauauauccccuuggcagacaugaagaacaccagcuccaagggaaugugggcaaugc

SEQ ID NO: 4119168 - RNA, 68 nt, Human
guguuaauuuauucauuauuauuugcugaaugcccauaaugcaccaagcacaaagaugaguaaaacac

SEQ ID NO: 4119169 - RNA, 75 nt, Human
guguuacggacaggaagcugagcugcacugcagaacuagaaggcucucauugugggcaucuuccugcuauaccac

SEQ ID NO: 4119170 - RNA, 110 nt, Human
guguuagccauccaucauaugcucagcugugauaugccugccugagugccugucccacucacggggcagucagcauggcaagcaguuggugugguucggggaaggagcac

SEQ ID NO: 4119171 - RNA, 127 nt, Human
guguuaggggcgccagggaaacugcauggguggguucugggagcauagaguaggauggcccgcccacaauccaucugucucugucccagacccaccucucuugugucccagaauuuaucucuaacau

SEQ ID NO: 4119172 - RNA, 89 nt, Human
guguuaucagguuuaucucauagaaagaauguguaaaauuuuucauguacaaacauaaucuuuuagcaaugaguuaaaaaauuuggcau

SEQ ID NO: 4119173 - RNA, 110 nt, Human
guguuaugaggcacauccagacguuaagaaagguguugccuuggagaccugguacaaaugccggguccucgggaugacgcugcacacuugacaacauggagcccaagcac

SEQ ID NO: 4119174 - RNA, 71 nt, Human
guguucacgugaauugcacccuagcuggaaguuaacagacuaaacaauagcagcagcaauuaaguggauau

SEQ ID NO: 4119175 - RNA, 69 nt, Human
guguucacuuucuccuucucuauuugcuguauggaguagaaacagccagggucagggagagaggaacau

SEQ ID NO: 4119176 - RNA, 67 nt, Human
guguucagguagacuuccgggucucugaaauccacaccaacagaggggaaagaccaugcuugaggac

SEQ ID NO: 4119177 - RNA, 67 nt, Human
guguucaguccugccagaggcucaggccaaaucugauugauaccugggcucugucagaauuggguau

SEQ ID NO: 4119178 - RNA, 75 nt, Human
guguucauuuaauccguauuuauugaucacucgucuuacacaguguacuuaggaauacagagauaaauagaacac

SEQ ID NO: 4119179 - RNA, 58 nt, Human
guuauggcacuugauauuugauuugccccaauggcacauacuccaucaaggccaaaac

SEQ ID NO: 4119180 - RNA, 59 nt, Human
guuauguguguguauacauacaaacacacaugacuuuuguauguacacacacacaaagc

SEQ ID NO: 4119181 - RNA, 128 nt, Human
guuauuaaauauuucuugucuaagcuaagucgacaaaguuucuucuaacaucuggaauuuuuaauaucugagacuguuuuggggaacuucauuguauucuucugccgacaaguaaaaaaaagaauaau

SEQ ID NO: 4119182 - RNA, 65 nt, Human
guuauuacauuucugagcagggagcuguucauuagaaugaacacugaaucagaaauuguuggaac

SEQ ID NO: 4119183 - RNA, 91 nt, Human
guuauugaggauauaaaaagacuauuuggaagaaaucugaaacuaaacagagggcuuauuagucuagaugucuugauauguacccuaaaac

SEQ ID NO: 4119184 - RNA, 63 nt, Human
guuauugcugggccacaaaaaacuccugugcucauaagcacaagcaucagguucagcaauaac

SEQ ID NO: 4119185 - RNA, 74 nt, Human
guuauuuauugcauuuucaauuuguacaucagcuguuggcugugucagucacaaauuuggugagaguaaauaac

SEQ ID NO: 4119186 - RNA, 100 nt, Human
guuauuuccagagaugggcauucacuggcucgcauuauauuuugggaccauuguaauuguuccaaacgggagccaaaugagcaaaacuuugcgaaauaau

SEQ ID NO: 4119187 - RNA, 72 nt, Human
guuauuuguggcauccauguugguaguaacugauuauuugggguuuuaucacaaggauaagccacauauaac

SEQ ID NO: 4119188 - RNA, 95 nt, Human
guuauuuucuuagagaggguacaaaaaauuaucauaguuccugaugacuucugucucacagcucugucaauuuuauauuuguuuuucaagauagc

SEQ ID NO: 4119189 - RNA, 69 nt, Human
guuauuuuggagaaaugggacuuaaucuauaauaguuacuauguauuuggucuacauuuuccaaauaau

SEQ ID NO: 4119190 - RNA, 61 nt, Human
guucaaacugcuugaggccauuuagagccaaagcugcuaguggcugcagggcuguuugaau

SEQ ID NO: 4119191 - RNA, 60 nt, Human
guucaaacuggcagacuucuacuucuuacugagggaagaggagagagccaaguuuuaaac

SEQ ID NO: 4119192 - RNA, 55 nt, Human
guucaaaucucaggacuucagaggccacugaguuccacuaucuggggugcugagc

SEQ ID NO: 4119193 - RNA, 129 nt, Human
guucaacuuucaacucuuaacaugugcugcuugauuugaauuugaaacuuggcacuguguguccuccugugccugguuauuauucuuggaaugcaaaaagguacauguuuuuguaauucucugaggaac

SEQ ID NO: 4119194 - RNA, 85 nt, Human
guucaagacaaaagagcauuugccuuuagauaagaauauauuuauguuuaucaucuagcaccaaacuagcuuuuuuccaguggac

SEQ ID NO: 4119195 - RNA, 126 nt, Human
guucaagaugcauaaaacuuaaugggaaaacuuuuaaagccugaauuucaguacagaaaaaccuuuggaauguucucuacuugagauuuuaaugcugcuuagaaauuucuuuaggacaucuagaac

SEQ ID NO: 4119196 - RNA, 115 nt, Human
guucaagcucauuccauucaucauuaguuuuaaaauagagguuagagaauuuuguuauuuuaauucuaacuaaagucuuuguuuugagaaucugaagaacaggaaauucuugaau

SEQ ID NO: 4119197 - RNA, 68 nt, Human
guucaaggucacugucuaguuugcagaaagcgguucugccucguaugcaaauuaggccgggacucagc

SEQ ID NO: 4119198 - RNA, 65 nt, Human
guucaagucuaguuuugaugcaucaugcccuuugaaugccacaugcaucaugaaaacuagagagc

SEQ ID NO: 4119199 - RNA, 56 nt, Human
guucaaguucauaucucuuaacuguauuacauaguguuaagguuaugaucuuggau

SEQ ID NO: 4119200 - RNA, 76 nt, Human
guucaauacaggucaagugugacuauuuuuucauauuaccuuuauggugugagagagugcauuugcauauuugaac

SEQ ID NO: 4119201 - RNA, 60 nt, Human
guucaauggaucgcugaaguccagggaauguucccaaagggcagcugugguuaauugaac

SEQ ID NO: 4119202 - RNA, 69 nt, Human
guucaauuaccugucaucagaucauuuguuuuaucagacagaaaucauugugaugacagggguuuguuu

SEQ ID NO: 4119203 - RNA, 55 nt, Human
guucaauuucaugcaucucugcacuugaacuuccagccaggagcaggaguugaac

SEQ ID NO: 4119204 - RNA, 59 nt, Human
guucacaggacagccuuccacccgcuucaccagccguggagaaucgcuggccuuugaac

SEQ ID NO: 4119205 - RNA, 61 nt, Human
guucacaucacuucacugaaccacccaagcaaggauccugcugguuuagugacaugagaac

SEQ ID NO: 4119206 - RNA, 64 nt, Human
guucaccaguacccuuuuugcggauguggccguggagccaugagggggguaaucacuggguuac

SEQ ID NO: 4119207 - RNA, 64 nt, Human
guucaccaucucucuaugcacugaggacucacuacggggcuccagggaguggagagaaggaaac

SEQ ID NO: 4119208 - RNA, 85 nt, Human
guucacguggauauagugcuuuauuguuccugaaacacuguugcauaauuuucacugggguaguagagcacuuaagcaugagaac

SEQ ID NO: 4119209 - RNA, 70 nt, Human
guuugcuuucuguauguaccaaauuagucauuuuuuuaaagugugacauagucccauccgguaagcaagc

SEQ ID NO: 4119210 - RNA, 57 nt, Human
guuuggacaagguccucugaaaugcauuaaaaugcuaaucacagcaucugucugaac

SEQ ID NO: 4119211 - RNA, 130 nt, Human
guuuggauggaguaacaugcaagugugagggaaggagugacucaggcaaggcuuuucauagagaaagagucucugccagcuuguccucucucccaucucugcuccuuaccuccccugcucucuccacccc

SEQ ID NO: 4119212 - RNA, 66 nt, Human
guuuggcccuagaggcacuaauacuacugguaacuaccauuuguggacagcuucuaggugccagac

SEQ ID NO: 4119213 - RNA, 63 nt, Human
guuuggcuggcugucaguaggcuguggggcuuuuuccagagcaaauagagaagccagcugggc

SEQ ID NO: 4119214 - RNA, 63 nt, Human
guuugggauguggccaugguucucuccacacaucuggagaugggagcuguggagcucuugggc

SEQ ID NO: 4119215 - RNA, 104 nt, Human
guuugggcuuuucuauuccuuuaauacaacuguugucacuggguugggaggaccucgugugaaagcuggcaguugccuauucugauuugugggaaaacuuaaac

SEQ ID NO: 4119216 - RNA, 78 nt, Human
guuuggggaagaaucaucugaacuuugaggacugcagaguagacccuuaaaguggcagaauuagacgagcucccagac

SEQ ID NO: 4119217 - RNA, 66 nt, Human
guuugguccugcuccccugccuccucugcuacccagagcugcagagccuggagcccugggccguac

SEQ ID NO: 4119218 - RNA, 63 nt, Human
guuugguucagguaguuuuggaguggcagugaguuaguccacuucaucagccagaaaucaagc

SEQ ID NO: 4119219 - RNA, 63 nt, Human
guuugguuugccugaguacccucacuccuccugcguuuaauuggucugggguguagacuaagc

SEQ ID NO: 4119220 - RNA, 64 nt, Human
guuuguacagaguuuaaacacugucacagaggguccuuaguguuaauuuuaaacucuggcuaau

SEQ ID NO: 4119221 - RNA, 70 nt, Human
guuuguagcuuaucaaggcuguuuggggugcaagaaauagaaaaccauucaaacucgcuuaagcacaaac

SEQ ID NO: 4119222 - RNA, 80 nt, Human
guuuguagcuuuaugcugugucaggaauuugauacccccuaucuggggauguuauaugacaugguugaaccugaacagac

SEQ ID NO: 4119223 - RNA, 85 nt, Human
guuuguauaugcugauaaagaagugccauucauuagucgguagcuuguccauuugcuaauguaaagcauuuguucaguugcaaau

SEQ ID NO: 4119224 - RNA, 78 nt, Human
guuuguauguguuaucccauuugagccuucaaacaguccucuuacugcucauuuuucagaugaggaaugcauacuaau

SEQ ID NO: 4119225 - RNA, 83 nt, Human
guuugucucuggcacaaugguguuugccugacucacacucccuuugggagcuccucaugcaaauacuguuccagaagaucugc

SEQ ID NO: 4119226 - RNA, 59 nt, Human
guuugucugcuuuucuuugucugguaugauacuuuccaggcuguggaugcuuaacaaau

SEQ ID NO: 4119227 - RNA, 88 nt, Human
guuugugauuacuggguguauuaguuugcuauaaacuagacuauuuuagauugcuauagcaaaguacuaccaacucgguggcuuaaac

SEQ ID NO: 4119228 - RNA, 91 nt, Human
guuuguggcagaguuggacagcauuccaucugcagguuaguaggaaagccuguaccagccuuuguggaauguccuagucugccacacugac

SEQ ID NO: 4119229 - RNA, 62 nt, Human
guuuguggccuucagauugacuccuggggguuucucccuccuuuacucauaggaccacaagc

SEQ ID NO: 4119230 - RNA, 96 nt, Human
guuugugggaggaggacuggcaaaaauaugagaguaggaguuugggcucuugagcuugggccuggccuucaaauuuccacucuuucacucacuagc

SEQ ID NO: 4119231 - RNA, 67 nt, Human
guuuguuauuccaaaucaugguugcauuuguggacaagcugccuccugagauuugggcauguuagau

SEQ ID NO: 4119232 - RNA, 78 nt, Human
guuuguuuguuuugagauggagucuugcucugcagcccaggcuagagugucguggcuccaucucagcucaccgcaagc

SEQ ID NO: 4119233 - RNA, 74 nt, Human
guuuguuuuaaacaauugguuucagcauguuuguccauugaaaaugggaaugcugagcccauguauagauaaac

SEQ ID NO: 4119234 - RNA, 60 nt, Human
guuuguuuuuaaaguaauaauguauuagucucuagugcauucaauacaguaagaauagau

SEQ ID NO: 4119235 - RNA, 81 nt, Human
guuuuaaaaaauggaucuuugccaggucuggaaauucaguuuccuugaguucuucugagacagcaaagauucuucagagac

SEQ ID NO: 4119236 - RNA, 80 nt, Human
guuuuaaauaaaugaaaucaagguggauuuugggaauauauccugaaguuaacaucuugauguccuucuuguuguaagau

SEQ ID NO: 4119237 - RNA, 129 nt, Human
guuuuaaguugaagcacuccauuucuuuucugggagcagaugaugguauagcuggcgaaggaccugacaguuuccuuccaaacucauguucguucccaaggaacuuuggagauucucagccuaaaccac

SEQ ID NO: 4119238 - RNA, 83 nt, Human
guuuuaaugaugccuccaauauuaugaaagugugacauuugaugaaugucucauauaguuuugauaucugggcacaugucaac

SEQ ID NO: 4119239 - RNA, 61 nt, Human
guuuuacagcacuaggauauacauuucccaucuuuuguggguuuguaaccagugccaggac

SEQ ID NO: 4119240 - RNA, 73 nt, Human
guuuuacuuguuaucccuuacucuugauuugaauugacaggugcagggaagaggagguggccugagccaggac

SEQ ID NO: 4119241 - RNA, 66 nt, Human
guuuuacuuguuuaggaaagaugcuagagaacuacuguaguaucuauuaguaacaagagaugaagc

SEQ ID NO: 4119242 - RNA, 78 nt, Human
guuuuagagcuucaacgaauagcauaacauuucaauagguacugcuauuguaugcugaucaaaagcuucaucugagac

SEQ ID NO: 4119243 - RNA, 58 nt, Human
guuuuagaugcuuaaaauugagguuuuauaccucaacuuuaguguagcuauuuagaau

SEQ ID NO: 4119244 - RNA, 62 nt, Human
guuuuauaguucgggaccuguuccucuagcccaccaagcuucaguuccccuaacugugaaau

SEQ ID NO: 4119245 - RNA, 61 nt, Human
guuuuaucaucauuauaccauguugcuagguggagaguaacugagauaauguauguaaagc

SEQ ID NO: 4119246 - RNA, 80 nt, Human
guuuuaucuauauccuucagguaauuuuggaguugggcauauaagcugcuagaauaccuaccuggaggaggagaugaaau

SEQ ID NO: 4119247 - RNA, 72 nt, Human
guuuuaugaaggccucugguacaugccaggaaacucacaggagauggugcugccucagaugccuuagaagac

SEQ ID NO: 4119248 - RNA, 129 nt, Human
guuuuauuuaacauuucuuauaaauaauuuguguuuuacugagaaauuuccagacuugcagcagacuguauuuugguguaaggaaaugucaaguagcuaauaauacacuguagagauguauuuuggggc

SEQ ID NO: 4119249 - RNA, 56 nt, Human
guuuuauuuuaaaucccaaacgguaauuuucuacagugggaggacugagauaaaac

SEQ ID NO: 4119250 - RNA, 73 nt, Human
guuuucacucuguccucucaagcaauaaacuaaaauaugucuuuuuauugcaauuggcagagugcuaugaaau

SEQ ID NO: 4119251 - RNA, 67 nt, Human
guuuucagguucaauaaauuaucauccaucagucagguggcacucucccauuuaaugaacugaaagc

SEQ ID NO: 4119252 - RNA, 57 nt, Human
guuuucaugucuauugggcauaaaccuaaaaguggcauugcugggucauauggaaac

SEQ ID NO: 4119253 - RNA, 109 nt, Human
uaaagauaauaaagguauaguuaacaaugaucguacacacauuguagauuccauuacaguauuaaauugagcaauaguguuugcagcaaacuaugggcuuuauucuuua

SEQ ID NO: 4119254 - RNA, 73 nt, Human
uaaagauauuuaucaagguaggagaauaggacaugucuuguguaaugguuuguuagcuugauuuauaacuuua

SEQ ID NO: 4119255 - RNA, 130 nt, Human
uaaagauugauucaaggcaguguggcacagugauuacagauaagaagucagauggagcagguuugaaggucagcucugcuguucuuauguguccuguagccuaagaagcugucugguauacgauacauua

SEQ ID NO: 4119256 - RNA, 57 nt, Human
uaaagcaaggcaaauuguuggugucuugacaccaaauauaucuuuugaccuguuuua

SEQ ID NO: 4119257 - RNA, 58 nt, Human
uaaagcagccagggucuaagccagaagcaaucaaaggcugauucuggucuacgcuuua

SEQ ID NO: 4119258 - RNA, 98 nt, Human
uaaagcccauagcagagugaacuuuaccauuuuaagaacuuuucauaugcguuaagaauucacugguagagucaauucuaguuuuugauggaguuuua

SEQ ID NO: 4119259 - RNA, 64 nt, Human
uaaagggaagcugcaaggaagugugccagccuaguuauggguucauuaaugcagguuccaguua

SEQ ID NO: 4119260 - RNA, 68 nt, Human
uaaagggaggaggauuuauuguacugugugauuucacuccacuguauauuaguugucccuucuuuuua

SEQ ID NO: 4119261 - RNA, 81 nt, Human
uaaagguaacaugaugcuauauucaaaacuuuuguuuuacccagaguaaagcaaguguaagaaugcagaaucaugucuuua

SEQ ID NO: 4119262 - RNA, 60 nt, Human
uaaagguuaguagcagggaaacuguuuccacggucuugaaaucucugcuucugaauuuug

SEQ ID NO: 4119263 - RNA, 62 nt, Human
uaaagguugaaaacugacugccugauggcuggaucuggcucucagauuuguuuuaaucuuua

SEQ ID NO: 4119264 - RNA, 83 nt, Human
uaaagucauagaaucauagcacauuugaacuagaaagcuuuaguuagucaguuuuuagauguguaaaugguacuauguuuuua

SEQ ID NO: 4119265 - RNA, 62 nt, Human
uaaagugcgacccaguccccagaccuacccuagcgaacccuggggucacugcaucuauuuua

SEQ ID NO: 4119266 - RNA, 57 nt, Human
uaaagugcuggauuugaguaaaagacagagaaucaugucuguaauccuagcacuuug

SEQ ID NO: 4119267 - RNA, 74 nt, Human
uaaagugugcgauuuaguggcccuugguacacacacaauggugugcaaccaucaccacugacuccagaacuuua

SEQ ID NO: 4119268 - RNA, 60 nt, Human
uaaaguguuagagucuagcuucccuucucuugaagcaaggcuaguuugugacuuucuuug

SEQ ID NO: 4119269 - RNA, 76 nt, Human
uaaaguuagcagacuaugucauagucaagagacuuugcuuuaugaacuagcugauuuaguuugcucacaagcuuug

SEQ ID NO: 4119270 - RNA, 66 nt, Human
uaaaguugcuguccuagcuggcuuguacccaguuacuguaaccuagccagagaggacaguauuuug

SEQ ID NO: 4119271 - RNA, 126 nt, Human
uaaaguuuauuguuuuuggaaauaguuuuuuggcaaauauuuuguuuuguaaguuuuacauuucuaaaguugaauaaaauuaaauguuuagcaggugcuuguuguaauagaagcuauaauauuuua

SEQ ID NO: 4119272 - RNA, 95 nt, Human
uaaauaagcaaagaagaaauuaaugugccauuacugaugcugugcuuaauuucaaaucauagucuggucaucugauucuuuuaugccaauauuua

SEQ ID NO: 4119273 - RNA, 55 nt, Human
guuuguugauaugccccuuugugcuccguauucacaaaggggcaccucaacaagc

SEQ ID NO: 4119274 - RNA, 55 nt, Human
guuuguugugguagcuuuugcacuacaacagugaaguugaguaguuacaacagac

SEQ ID NO: 4119275 - RNA, 59 nt, Human
guuuguuuguagggaagccguggggauaauugcuaugaguguggucucuacagccagac

SEQ ID NO: 4119276 - RNA, 102 nt, Human
guuuguuuguuuguuuuuuguuguuuugagauggagucuugcucuguuauucaggguacagugcagugcgccaucucagcucaucaacagcacacaggaagc

SEQ ID NO: 4119277 - RNA, 55 nt, Human
guuuguuuuaagauaggauggagccuuauagcucuccccacauuucuaaacagac

SEQ ID NO: 4119278 - RNA, 90 nt, Human
guuuguuuuuugcugaucuaucuaggacuuauucacgcagcuauacuuaagcagcaggucagcuggugacugaguucagcugggacagau

SEQ ID NO: 4119279 - RNA, 112 nt, Human
guuuuaauauuaucucauugccugcaagguccaguauaacuuaagagagaggaaauuaaucuuugagguuaaguuuacuuaccauuugaugucaguguugugcuauaagaac

SEQ ID NO: 4119280 - RNA, 87 nt, Human
guuuuagaaaugcaugugggaaauacaagcuaaaaugcuauuggcauuuuuuucugauuuuccccagucauauguauuuauuagaau

SEQ ID NO: 4119281 - RNA, 68 nt, Human
guuuuagacuuguauguaaagccaggaaagaucuuccuauuguaagggcuuacauauagucauaaaac

SEQ ID NO: 4119282 - RNA, 67 nt, Human
guuuuagaguagagccauuucuguuuuagagcugcagaggcaaaaucaaauggcuuuccuuuaggau

SEQ ID NO: 4119283 - RNA, 130 nt, Human
guuuuaguaaauaauacuuaucguuuaucaagugcuuacuaagggcuaggcacagggcugaguguuucauggauauuuuaaucuccaguccuugcuaugacccugagugaaguguguuauuaucuccaau

SEQ ID NO: 4119284 - RNA, 96 nt, Human
guuuuauaaggaagagaugacccagcagguguagggcucauggcaagugcugucagaauggugggcuccugccuguccccucaugucccuguaagc

SEQ ID NO: 4119285 - RNA, 66 nt, Human
guuuuaucagaaugcagccaugugcaucuguuuaaguguugucuauggcugccuucugaguacaac

SEQ ID NO: 4119286 - RNA, 70 nt, Human
guuuuaucauugaaugcucugcagguuguccuugaauagaagguguaaguugcauuauucaugaaaagac

SEQ ID NO: 4119287 - RNA, 79 nt, Human
guuuuaugaggagucaaggcugugacauggagcccuuccaaggcgucuuucacacguccuugcuacuccucuaauaagc

SEQ ID NO: 4119288 - RNA, 65 nt, Human
guuuuauuuccaugagagaccgagaagcuucgagagcuggacauuuuuucagggaaagauaaaau

SEQ ID NO: 4119289 - RNA, 67 nt, Human
guuuucaaaaaucauucuuguagaaauugauuucucauuggcugauuucuacaggaugaaugaaaac

SEQ ID NO: 4119290 - RNA, 93 nt, Human
guuuucaauauaauugaugugauuguuaguuuauauaauguaguuuuuaauaauggcuguauuuaacaacuggcucacaaaauucuugaaaau

SEQ ID NO: 4119291 - RNA, 57 nt, Human
guuuucaauuauaagauggcuuuacuaauauuuugaggcuaucacugaaaugaaaac

SEQ ID NO: 4119292 - RNA, 66 nt, Human
guuuucacuggggcuggucacaugucugcauagcacaucucaaauuccaggcuccagaaggaaagc

SEQ ID NO: 4119293 - RNA, 81 nt, Human
guuuucagacaaaggcugccuaaaagcuggggcccacauuguggcucuguggcauucaugggcaguauuguuuuugaaggc

SEQ ID NO: 4119294 - RNA, 76 nt, Human
guuuucagcacaguaucuuuugaguaagcaugcaagguuuuacuguauuggaugcuuuuaagaauaugugaaaagc

SEQ ID NO: 4119295 - RNA, 73 nt, Human
guuuucaucuuuucauggucugcguugacacgacaaauaguggcucucaggcagaauuaucaaaagauguaac

SEQ ID NO: 4119296 - RNA, 123 nt, Human
guuuuccaaagaauguuuucuauuguucuguuauuuguuuucugagaaguaucaaguuuguuuauuuguaauacauauccacaggagauaaaaagcaagcaugaguacugaauuuuugaaaac

SEQ ID NO: 4119297 - RNA, 62 nt, Human
guuuuccagguaccuugguauucaaaaaagccuuagaauagcagauuuugguuuuggaggac

SEQ ID NO: 4119298 - RNA, 59 nt, Human
guuuuccaggugcauagaaaacaggcuuuuucauguaggucugcugagcccugggaagc

SEQ ID NO: 4119299 - RNA, 72 nt, Human
guuuuccugacacuggagucuaucuguaacauaaacugugggauacagguagagucucuaguuuauagaaac

SEQ ID NO: 4119300 - RNA, 91 nt, Human
guuuuccuguucugugaccucagguuuguaauggacacaaagaguuguguuggcguuuagugccuggggcagugccaccaacauggagagc

SEQ ID NO: 4119301 - RNA, 75 nt, Human
guuuuccuuuauggccucuagcugagaccaauggcccugaaguaauuggcuucuaaagagggcaaaaaggauaau

SEQ ID NO: 4119302 - RNA, 78 nt, Human
guuuucuaacacugugaaaaggcuucuugauuggaaaaaaguuaugaaucagugauguaacaaacagaguuagaagac

SEQ ID NO: 4119303 - RNA, 63 nt, Human
guuuucucugagaagaguucaaguaaagauaacuuucuuugucucauucuuguccagugaaac

SEQ ID NO: 4119304 - RNA, 65 nt, Human
guuuucugugguggguaguucagagguguauagggcagguuugagaaugucaaucacaagagaac

SEQ ID NO: 4119305 - RNA, 60 nt, Human
guuuucuguuauucaguauuugacauaugcucagguguggagggcagaauaacagacuac

SEQ ID NO: 4119306 - RNA, 76 nt, Human
guuuucuuuuguaaggaauauucuuggugaaguaaagacacuuaauagucaccaacggcuccuucucaaugagagc

SEQ ID NO: 4119307 - RNA, 74 nt, Human
guuuugaaacuuuuccugcucuuguccuugaggacaaaaacugggaggaaagagguggagaggugauauaaaac

SEQ ID NO: 4119308 - RNA, 69 nt, Human
guuuugaaguauguauacauuguggaauggcuaauuugagccaauuaacauaugcaugaccucacauac

SEQ ID NO: 4119309 - RNA, 94 nt, Human
guuuugagauccucaaauacaggauucuguaaucugugaaauuuaaaaauugauuuuuuuaagauugcaggauuauaucaaggggauucaaggc

SEQ ID NO: 4119310 - RNA, 65 nt, Human
guuuugaugcuuuuuuguuccuaaauaaaugagauagaguugaagagaagcaaaaguaucaaagc

SEQ ID NO: 4119311 - RNA, 67 nt, Human
guuuugauggaguguguuaaauauaaaaguaauccaaugcaauacuauuuagcacauuguacaaaac

SEQ ID NO: 4119312 - RNA, 84 nt, Human
guuuugcccugaaagggguuuuauuuguuacaugcaagcuaaauuguuguaacaaagacacuccaaaauauagggucuuaagac

SEQ ID NO: 4119313 - RNA, 73 nt, Human
guuuuggaucucaggcagucaugacuccagaucccaaagcccucuggagucugauacugaguuccucaugaac

SEQ ID NO: 4119314 - RNA, 68 nt, Human
guuuuggcucagugaagagauaacuugauccaaguuuugaacaagauggaauuaucacgagcaggagc

SEQ ID NO: 4119315 - RNA, 59 nt, Human
guuuugggcugagaugugggccgagccucaguggggcucccagcagcauagcucagaau

SEQ ID NO: 4119316 - RNA, 84 nt, Human
guuuuggggcugaguuuugaggucccucaacaugucauagcugaguugaagaggaugagagggcccagagcacaccaaaagagc

SEQ ID NO: 4119317 - RNA, 66 nt, Human
guuuuggggucuggccaucaguggggagggcuuuccccccaccaccaaggcucaguuuucuaaagc

SEQ ID NO: 4119318 - RNA, 84 nt, Human
guuuugguauguaauuggcauagcauacaauucacccauuuaaaggaggugagucaaugucauucaguauguucauaucaccac

SEQ ID NO: 4119319 - RNA, 64 nt, Human
guuuugguuggugcaaacauuuagccuccaugacacauguuuccaaaagcacccuggccagaac

SEQ ID NO: 4119320 - RNA, 81 nt, Human
guuuuguacagguagguuauuucagggauaauaauaguuaaaauuuauaaagugcuuaugauaaccaagcacuguacuaac

SEQ ID NO: 4119321 - RNA, 69 nt, Human
guuuuguagcugucagaaauagcuggaccauucaaguguaugugaaaccagcucuguaagcugugaaau

SEQ ID NO: 4119322 - RNA, 64 nt, Human
guuuuguggguuuuacccugaauaggccagggcaauggccaguggagacugaaacccauuccac

SEQ ID NO: 4119323 - RNA, 57 nt, Human
guuuuguucacugccguauggccaguaccuaggacgcugccuggcaguguacaaggc

SEQ ID NO: 4119324 - RNA, 58 nt, Human
guuuuguugcugcagagcucaaaaugaaaaccaaggccaggagcuucaguugcaaaac

SEQ ID NO: 4119325 - RNA, 67 nt, Human
guuuuguuuguguguguguguguguguguguguaugagcagcuguuuacauugacuacaaauaaagc

SEQ ID NO: 4119326 - RNA, 73 nt, Human
guuuuuaaaagagaagaaaauaagagagugaaaaugacaucuuagauuuucuuguauucacucauuugggaac

SEQ ID NO: 4119327 - RNA, 91 nt, Human
gugaggacagacauugucucagggcagcagcaggggagagccagaacuaaaugacagcaguucccucuccugccgcucucagacuucucau

SEQ ID NO: 4119328 - RNA, 64 nt, Human
gugaggacuaguggguuugugcacagccuggagucugcacaauagcuucccaguacuuucucac

SEQ ID NO: 4119329 - RNA, 67 nt, Human
gugaggagagaacauuccuccauauugucuaaccuuuuuugauuuuaggagauaguuuuuaccuggc

SEQ ID NO: 4119330 - RNA, 97 nt, Human
gugaggagaggcugaguggcaguucuaauugaccauuucuacccauguuccucuuagaaacauacaauaagagcugucacagcuuccugccaaucac

SEQ ID NO: 4119331 - RNA, 60 nt, Human
gugaggagggcuggucccaggcccugccaccuggggacccuggugucccaacccucccau

SEQ ID NO: 4119332 - RNA, 61 nt, Human
gugaggcagcaugggcccagagucccagcggccuggguucgaagcccagugcugcacccac

SEQ ID NO: 4119333 - RNA, 81 nt, Human
gugaggcaggggcagaagcgggugccagaagggacugggccgcccuccccagggucccugcuuccaugcuuccugccucau

SEQ ID NO: 4119334 - RNA, 70 nt, Human
gugaggcauccaggaaacaucuccgccuaaggacaaacaccugcuggagaagcuccugggacugguucac

SEQ ID NO: 4119335 - RNA, 74 nt, Human
gugaggccuggacugacauguucuuacauccagagauucaggaaugaucuggagaauaaauguccaagucuuau

SEQ ID NO: 4119336 - RNA, 68 nt, Human
gugaggcuggcgggugggugaaagacgugggguggagcuccugaucugguacaggccugcagccucac

SEQ ID NO: 4119337 - RNA, 77 nt, Human
gugagggacuggucucuucuuccaagauggcaccuuguugcugaaucuuccagaagggacaaauguuguguccucac

SEQ ID NO: 4119338 - RNA, 129 nt, Human
uaaauaauugauacgagaagauaauaguacuugacauaaagcagaggaguccugaccaccagagaauucugugucugccauuuucugccugcguguuuaggaauuagguguuuuguggacauaaguuua

SEQ ID NO: 4119339 - RNA, 83 nt, Human
uaaauagcuuauuuuuaacaugaggcaagucucaaucuuugaagguuucaaaguauaauugcuuuuuuggaaaaggcuauuug

SEQ ID NO: 4119340 - RNA, 75 nt, Human
uaaauauccuugagauuuucagcuugacugggagaagaauuuuuuccaccagcugaaaaucaguaagcccauuua

SEQ ID NO: 4119341 - RNA, 72 nt, Human
uaaauauguauguauauaguauguguguauauauguuguauauauguguacgugcaguauauauauuuuuua

SEQ ID NO: 4119342 - RNA, 80 nt, Human
uaaauauucagauucugaggaccuacugaagaguuauuaugucagaauaaucuugagcaaggccucagaaucuauguuua

SEQ ID NO: 4119343 - RNA, 88 nt, Human
uaaaucaacacuaacaggaaauggcugaauaaauucuaauagaucaaaacaguggaauuuaaugcagucauuuuaaaauguggguuua

SEQ ID NO: 4119344 - RNA, 76 nt, Human
uaaaucaggcaguucuacuuggaugucugcaagauuugggauuuugccagauagaugaaguggagcaggagguuua

SEQ ID NO: 4119345 - RNA, 93 nt, Human
uaaaucccccuuucuuguucucuugggaggaaagagagaaggaaaaaaagucuuuccucaauuuuuuccaagacaauuuuugggggugguuug

SEQ ID NO: 4119346 - RNA, 61 nt, Human
uaaauccuuuggcaaugugguugucuauucuuuguuuucaaagacauugaagaaggacuua

SEQ ID NO: 4119347 - RNA, 56 nt, Human
uaaaucugauguuaaauguaagguucucauugguugaaccuuuuuacucagguuua

SEQ ID NO: 4119348 - RNA, 103 nt, Human
uaaaugcacuuuaucaucuguuccccucuacucugugagcuagguucuauuauugugcccauuuuauagaagaggaaacugagguugaauaaugugcuauuua

SEQ ID NO: 4119349 - RNA, 56 nt, Human
uaaaugcaguuaguacuugccacuacacccuuuuggcaaguguuauugugcauuua

SEQ ID NO: 4119350 - RNA, 71 nt, Human
uaaaugcaucucaguggauagagauuuaaaaaugauugaaagaucauucugaucauucaagaugucaauug

SEQ ID NO: 4119351 - RNA, 70 nt, Human
uaaaugccuguagaacacuuagaucaguaccuaacaugauuagccuugguaagucuuucauaggcaauug

SEQ ID NO: 4119352 - RNA, 79 nt, Human
uaaauggagaagaacauguuuuuaucugugcuaggaucauguuauuucuuuguuuuagaaacauguucuguucuguuug

SEQ ID NO: 4119353 - RNA, 67 nt, Human
uaaauggauggaauaaugaccacagaaacacucugacagugcugaggaauaauuguuccugcauuua

SEQ ID NO: 4119354 - RNA, 80 nt, Human
uaaaugugggaaaauacauaaagguuguaccaguuaaacacuagggcugcuacucuuguauguguauuuccaaauauuua

SEQ ID NO: 4119355 - RNA, 76 nt, Human
uaaauguguaaaacugaauacauacugagggcaacaagcuguaggaguguauuucaguuaaaaagccauacguuua

SEQ ID NO: 4119356 - RNA, 95 nt, Human
uaaauguuauuagguuggugcaaauguaauugugguuuuugccauugaaaguaauggcccaaacugcaauuacuuguguaccaccccaauauuua

SEQ ID NO: 4119357 - RNA, 76 nt, Human
uaaauuaugcuuugguagagaguuguggaacuuagugccauaaaaugcauaacuuuuuuaccaagagcaaaauuua

SEQ ID NO: 4119358 - RNA, 117 nt, Human
uaaauucaaauugauuagcccauuuaccaaucuuccaguguagacaucugccuuguauccccagugauuaauacacggccugccuggaggguaagcaauaaauauuuguugaauuua

SEQ ID NO: 4119359 - RNA, 85 nt, Human
uaaauucucugcuucuccuuggagggcucaguuguucuuuggcauuccagaaaucaaugaagucugcuaagguauugggaguuua

SEQ ID NO: 4119360 - RNA, 71 nt, Human
uaaauucugauuauuaaacugaggcuuuaauugauguuaaugccuuaugucaaauguaaaguuagaauuug

SEQ ID NO: 4119361 - RNA, 66 nt, Human
uaaauugcugggucccacccccagaguuacugauucagcaggucugaggugggacccaggaauuug

SEQ ID NO: 4119362 - RNA, 117 nt, Human
uaaauuugcauuucagauaaacaaugaauaaugauuuaguauaagugugugccaugcaaaauucaggacauacuuagaguaaacaaguauuuguuguucaucugaaauuuaaacuug

SEQ ID NO: 4119363 - RNA, 75 nt, Human
uaaauuuuuacucuuaguuauuuucacuacauggguaaacauguuuucagugacagcugggaaggugaaaauuua

SEQ ID NO: 4119364 - RNA, 60 nt, Human
uaacaaagguugccaaacuaaguagcuuuuuuguuguugcuugguucuggccuauuguua

SEQ ID NO: 4119365 - RNA, 58 nt, Human
uaacaacaugcaauuuaaccuugaguguuauaauaucaagguggauuaacuguuguua

SEQ ID NO: 4119366 - RNA, 63 nt, Human
uaacaaggagauggugggucauagacuucuccugagucuuaauucaucugccaucucauguug

SEQ ID NO: 4119367 - RNA, 63 nt, Human
uaacaaguucugacagcauuguuaacugauuaaaaauaccuaauaaggcugcuggauuuguua

SEQ ID NO: 4119368 - RNA, 81 nt, Human
uaacaaugauacuccuugcagcucucugaagguugcagcugcaggcugagccuggcggaagcagcguggaauaucaaguug

SEQ ID NO: 4119369 - RNA, 62 nt, Human
uaacaaugguuuugcugauaaugugcuuucuguggaguuauuuuugaucaaaacuauuguua

SEQ ID NO: 4119370 - RNA, 66 nt, Human
uaacaauucucucuucauguaggaaaaaagugagugugauaaacuauuccucaggagaggauguua

SEQ ID NO: 4119371 - RNA, 70 nt, Human
uaacacuaaccauguucccaacagcuuagggcugucagcuuagggcugucaggaacaugccuugguuuua

SEQ ID NO: 4119372 - RNA, 130 nt, Human
uaacacugagcuaagccugaugagagaugaauaaaauuuuauuuuagauagaccaauauagucauuuuaaaacuaaugacagguugaaguaucaaagguggauuuuaucagauaucuucacuacagauua

SEQ ID NO: 4119373 - RNA, 63 nt, Human
uaacagcuggcguuauaggaaucagacagacuugccuuugaaucccugcugcaccacuuguua

SEQ ID NO: 4119374 - RNA, 84 nt, Human
uaacaucuugcuuuagugugguguauuuguuauaguugauaaaccauuacuguuacaauauuaucaacugaggucuuuauguua

SEQ ID NO: 4119375 - RNA, 86 nt, Human
uaacaugauccuacaugaauguuucaauauuguaauccuguaaguuacuuuuacauugacaguucugaaauucauguugaguguua

SEQ ID NO: 4119376 - RNA, 59 nt, Human
uaaccaggaaaaagauaugcaugugcuguaagucccuaggugcaagcuuuuucuuguua

SEQ ID NO: 4119377 - RNA, 78 nt, Human
uaacccagaauaauugcaugaccuuuagcgcccugcauuuauguaggugggggcaaggggcagcaaguuuugguguua

SEQ ID NO: 4119378 - RNA, 89 nt, Human
uaacccagggaccaaguccauacauugagaauaacagagaggaaagauaaaagaaaccuguguucucauugaugugaguuacugaguua

SEQ ID NO: 4119379 - RNA, 86 nt, Human
uaaccuaauugauguauauaggacugaucacauuuucagauuuuacuugagucacugagauuauuuuuguuguuguuuuuggguua

SEQ ID NO: 4119380 - RNA, 70 nt, Human
uaaccucugagcuccagcuucuaacucaagcccugucugggcauggaccaaaggcucgggcccagaguug

SEQ ID NO: 4119381 - RNA, 81 nt, Human
uaaccuguuccugccuucccugcccacugcauaaaggaagauggcaguucauugcagccaggaagcccaggacacaaguua

SEQ ID NO: 4119382 - RNA, 86 nt, Human
uaaccuguuucucauucucagcuauuccaauugucgauaauucucacaguaacaaauggccugaggacaaagaugaaaucugguug

SEQ ID NO: 4119383 - RNA, 116 nt, Human
uaaccuuuguuuuauuucuaggacccaaacaguuccugugguacuucucuuucuuccuucucacuagugacaguuguaguaucucauaggaccguuuuuccaaaagacaaauguua

SEQ ID NO: 4119384 - RNA, 83 nt, Human
uaacgucaccaaaugcuccacugacuuuggaacuugcaagagcagugucccugccgaggcaguuggugucauggggugaguug

SEQ ID NO: 4119385 - RNA, 122 nt, Human
uaacuaauuuaagccucauaacagcauuaugagaaaauuacuauaauugucaucauuuuauagaccaagaaaugaaagggcagaagguugaaguaauuugcucaaggucacacaguuaguua

SEQ ID NO: 4119386 - RNA, 63 nt, Human
uaacuauuguucuggugacuuuagucuacaaauugaggccaaaguuugaagcaacaguaguug

SEQ ID NO: 4119387 - RNA, 61 nt, Human
uaacucuagcaagaaucccagggcuaagauuccuugacucugauugccuuagcuuggguua

SEQ ID NO: 4119388 - RNA, 80 nt, Human
uaacugagugccagagaauuugagacuugcccaaggucauaauaaauuugugggagagcuggaauucacuuauucaguug

SEQ ID NO: 4119389 - RNA, 80 nt, Human
uaacugaugcacagugaccccuggugacucacuuugaaaaaaaaucagcauguuagucauggaucauggugcacauguua

SEQ ID NO: 4119390 - RNA, 95 nt, Human
uaacugauuggugcguccuuugaauugaggucuuugagcuauauccacauuuccuuagggaaaauuccuucagauugguacguucuaauuaguua

SEQ ID NO: 4119391 - RNA, 75 nt, Human
uaacugccgacugaucugccuguauguagcuugccccauccaaucuauucucuacaguagacagcaaggucuuua

SEQ ID NO: 4119392 - RNA, 78 nt, Human
uaacugggaagggacgccagugccucucuaugagguccagacagccuggccaggcaugccauugugucccccagcuug

SEQ ID NO: 4119393 - RNA, 62 nt, Human
uaacugugugaacgugaucauuugugugcaaaccaacaaaccagacagguuuacauauguua

SEQ ID NO: 4119394 - RNA, 73 nt, Human
uaacuuaccugaauguuucccuuuccugauuacaugccagguaauacugaaagggaaauguccagaaagguug

SEQ ID NO: 4119395 - RNA, 82 nt, Human
uaacuuacuggcucagugcaucauuccaggcucugauuaucaaagcuguggaucuugauuguguccucagugauaacaguua

SEQ ID NO: 4119396 - RNA, 99 nt, Human
uaacuuagcagacuguaccaagacaguggcauucaugaugaaucuuuauuucuaggauaucaacauuaauauuuucuggucaaaagaucuguuguauua

SEQ ID NO: 4119397 - RNA, 67 nt, Human
uaacuuagccuaagauauuuucauuaaagguuucccuuuuaaggaaaaaauguacuuagccugguua

SEQ ID NO: 4119398 - RNA, 58 nt, Human
uaacuucaagucuguggaucaguaguuaacaauaaaauuccuucagacuuuggaguug

SEQ ID NO: 4119399 - RNA, 102 nt, Human
uaaauuauaugagagaugauuaaaccucagagucuuuuucauuuugcaaacagguguuuaugaagcaguuacuggguguuaaucauuauuccacaugaauua

SEQ ID NO: 4119400 - RNA, 59 nt, Human
guucacugcuuucuuaguacucucuaaugcuacagucugugauacaggagagcaggaac

SEQ ID NO: 4119401 - RNA, 72 nt, Human
guucacuuagcuguuggcuguacguccuuaaaaaugacagaaaggugaccacagcuacaagggcaaggaagc

SEQ ID NO: 4119402 - RNA, 80 nt, Human
guucagaacagcuucuugggagcugggugucguggcacaugccuguagucccagcugcucaggaggcugaucgcuugagc

SEQ ID NO: 4119403 - RNA, 96 nt, Human
guucagaaucugaaucggcucauaucucucuuauacgucaacuuccacuuuucugcaaguugguguaugagacagaagccuacucagaaucugaau

SEQ ID NO: 4119404 - RNA, 77 nt, Human
guucagauuucuauuagaaagcaucuucuauaauauaucaacuuguuuaggggaaauuuuucucaaugggauugaau

SEQ ID NO: 4119405 - RNA, 65 nt, Human
guucagcaguugggacuugagcuugugucugccgacucccuagcccccagucuaaacuguuggac

SEQ ID NO: 4119406 - RNA, 86 nt, Human
guucagcuccuuuccucuuauauaacauccccacuggcaacuucagauaccaguggggaugucauauaagaggaaaggagcugagc

SEQ ID NO: 4119407 - RNA, 83 nt, Human
guucagcuuaagacuuuuugcauuuuugauuguugaaacauuguauuagucaugaaauguaugagucuggguucuuugugagc

SEQ ID NO: 4119408 - RNA, 67 nt, Human
guucaggacaauugagaguuuguugacauucuuucaagauuuguuauaaacuauuaauuuccuaggc

SEQ ID NO: 4119409 - RNA, 86 nt, Human
guucaggagccagguggcuugguaguggcaggaagcacagaugcaucuugcagaagaagcugccaagcccugacucuccugccagc

SEQ ID NO: 4119410 - RNA, 84 nt, Human
guucaggugaggccugggccgcaggagagggccaagugaauggacagcccuccagccauggacccaggugcagcucaccuggcc

SEQ ID NO: 4119411 - RNA, 103 nt, Human
guucaguaacauuuauacauucccagcauuaaugccugucagggcugaaauuccacuuaccaaaccauaggcuaaaugugggaagaaaauguuucuaaagaac

SEQ ID NO: 4119412 - RNA, 70 nt, Human
guucaguagaggugacuaugucaauuguuuaaaagguagguagauacauguguuggcucagaugcugaac

SEQ ID NO: 4119413 - RNA, 126 nt, Human
guucagucuuaaugaaguucuuaguucccagagugcgcuguauuaaaaguccagauugcuaaucacuuuaccaaaguacaggaguaucuuuaccugagggaaguaauaacgagcuugaaccugaac

SEQ ID NO: 4119414 - RNA, 58 nt, Human
guucaguguuuacaugauuguuaugcuauuuagagcuaggucauguaguucacuaggc

SEQ ID NO: 4119415 - RNA, 67 nt, Human
guucaguucagcuucaagcuaugaggaacauuguuagugauugucauagaagagguugcaguugaau

SEQ ID NO: 4119416 - RNA, 96 nt, Human
guucaguugcuuagcuugauauuuaaguaacuuggaacuauugugucuauagaucaauauggcuuguuacuauguuuauagagcuugcgauuuaac

SEQ ID NO: 4119417 - RNA, 68 nt, Human
guucaguugggcucauuacagccugcugggcccagaaaguuccagggguuggauuuggccuagagagc

SEQ ID NO: 4119418 - RNA, 56 nt, Human
guucaguuugcuacaagcaacaucuucagaaguggcagaauaguggcaggaugagc

SEQ ID NO: 4119419 - RNA, 68 nt, Human
guucaugccuguauuucugaucuauaccuauuuaccugguacgaucugauauuaugucagauaugagc

SEQ ID NO: 4119420 - RNA, 56 nt, Human
guucaugcuacccuuuccuaauuuguggaggcuaaacagaaggaauguggcggaac

SEQ ID NO: 4119421 - RNA, 66 nt, Human
guucaugguuucagccacauaaaaggcuccagacccauuuaugugucucaguugugauugaugaau

SEQ ID NO: 4119422 - RNA, 58 nt, Human
guucaugugucuaagugucagaagaaggauuugaaucuaggcacucugacugcagagc

SEQ ID NO: 4119423 - RNA, 57 nt, Human
guucauucugaaaagcagcuugcugacaggggugugugcuagcugcaauagaggaac

SEQ ID NO: 4119424 - RNA, 109 nt, Human
guucauugucuuuucaauucuaucacuuucccacuuaauguauuuauuucuuucacacauaauaagccuuaguaugaggaaaggagacuggcaggagagacaacugagc

SEQ ID NO: 4119425 - RNA, 62 nt, Human
guuccaagcagacaguaggccuagaaaugacuuccauuucuccccauacuuucuuuugaugc

SEQ ID NO: 4119426 - RNA, 81 nt, Human
guuccaauggggacugggacaccauggaccuacucccagaccgagaccugcacuguucaugcuuguuccuccaccuggaau

SEQ ID NO: 4119427 - RNA, 72 nt, Human
guuccacaggccagcguccagaacaagcucaucccccagaugugucuugcuggaccuggcugggugcagaac

SEQ ID NO: 4119428 - RNA, 62 nt, Human
guuccacccugccgugggcugcuuguggcacugcugccaccucgcagacaggcaggggaggc

SEQ ID NO: 4119429 - RNA, 56 nt, Human
guuccagagacagaaaauggaucuagaucucuccagauuuccuuuugucucuuaac

SEQ ID NO: 4119430 - RNA, 71 nt, Human
guuccagcuuauagguagauuuaaaauuugucugguuggcaauugguugaguuuaucuaaagaccugggau

SEQ ID NO: 4119431 - RNA, 55 nt, Human
guuccaggcaguggcaacagcuggugcaagcucugagguggccgcggccuggcac

SEQ ID NO: 4119432 - RNA, 107 nt, Human
guuccaggggguggcacaggagccaaaaacgagaccugaggcugaagcccaacagaagaugaaacuugggagcagccucagcuucgggaauccucacuuccuggcac

SEQ ID NO: 4119433 - RNA, 56 nt, Human
guuccaguggaauaacuuggggucacgauuuggccaguggugagauucccugggac

SEQ ID NO: 4119434 - RNA, 55 nt, Human
guucccaauuagugcuauuuacagacauguaacaccauggcugcugauuggggau

SEQ ID NO: 4119435 - RNA, 66 nt, Human
guucccaguugcugccaguuuuccuaucagugggcaccaccaggaaaaauaaggcagcagggcagc

SEQ ID NO: 4119436 - RNA, 67 nt, Human
guuccccugcuucuccugcgcaggcccagggaagacccccuuccugccugagcguggaggagggagc

SEQ ID NO: 4119437 - RNA, 74 nt, Human
guuccccuggcucugcucuugacuuaccaggcaauggaccuuccuguucaaguugcagggcugggcugaggaau

SEQ ID NO: 4119438 - RNA, 67 nt, Human
guuccccuucacacuuuauuuauuucaugcucccaaggcgggaagacaauggaggugccuagggaac

SEQ ID NO: 4119439 - RNA, 63 nt, Human
guuccccuuguguuguugcccauguguugcuaccaugguaauccugcucaguacgagaggaac

SEQ ID NO: 4119440 - RNA, 77 nt, Human
guuccuaauaucuaaugcagcagcaucuagauccugcaacuuggaccuggcaugaagcaugccuuagcacuaggcac

SEQ ID NO: 4119441 - RNA, 73 nt, Human
guuccuaguggauaauaaaacagaugcugaggguaaauguccuccagcauucaaguaauucacuuggauaugc

SEQ ID NO: 4119442 - RNA, 72 nt, Human
guuccucuggguuuuguuuguacaguguaauuugagggugauuaaaguuaaaaagaugaaucuaagagggac

SEQ ID NO: 4119443 - RNA, 79 nt, Human
guuccugcugggcaaaaccaggcguuuccuauuauucuugaauacagcaugaaggauggcuggcugcccugccaggaac

SEQ ID NO: 4119444 - RNA, 99 nt, Human
guuccugugcuggggcaggggguuauaggguuugaauuuccugcuagagcuaaggaggaagggcccaggcuuuauuaucucucuuuccagauguggggc

SEQ ID NO: 4119445 - RNA, 75 nt, Human
guuccuucaagaugccaucuuuauuucugaaucccccaugcccugugugaugacauucagagaugaaggaggaac

SEQ ID NO: 4119446 - RNA, 77 nt, Human
guucgaaagguaaaguaucugcccaaguucagcuaucaaauuaguuguaucuuuuacuggaauuuuaucuuuaaagc

SEQ ID NO: 4119447 - RNA, 90 nt, Human
guucgaggacucugugggugguagccaugggcaaaugcagagcugcugcuguugcuuugcagugccuauaggacuuagagggccuggagc

SEQ ID NO: 4119448 - RNA, 68 nt, Human
guucggcugcugcgggcuugacagcucccgccacuggggcuggagggggaggcugcggacugcuggac

SEQ ID NO: 4119449 - RNA, 80 nt, Human
guucgucauucuuuuguggcaaugguuaagagcuccuagaggcacgcggaugcuuauuuacugauccacagaugacggau

SEQ ID NO: 4119450 - RNA, 90 nt, Human
guucuaaagcuuuaaaauuuccccaccauguauauaaaggauugaagugucacaguacugaguuggggaguuuggaagacacuuugggau

SEQ ID NO: 4119451 - RNA, 106 nt, Human
guucuaagugcuauuuagaguuauaaugcuuuuccugugguguaugcagcauucccagcugcuggugcuaagaugagguagguaagacuuaugguggacuuuaugc

SEQ ID NO: 4119452 - RNA, 74 nt, Human
guucuacaggcucagggagcccucucuccuucagaccuccacugucuguaaauagauucucucugacuuggaac

SEQ ID NO: 4119453 - RNA, 67 nt, Human
guucuacccaaggagcuguuggaauuuuaaaucauuuuaggaaauugacaccugcuugauuaguaac

SEQ ID NO: 4119454 - RNA, 105 nt, Human
guucuaguauggccagcucaguuuuaucugugacaucuggcagggucaguuuucuaguccugaguuuccagauaagaccuuuuccugagcuucucaaacuuuaac

SEQ ID NO: 4119455 - RNA, 77 nt, Human
guucuauaacauauauaguaaugucauagcagaucuccacagggaugcugaagaguucaugauuaugaguguugagc

SEQ ID NO: 4119456 - RNA, 64 nt, Human
guucuaugcaaggguaaccccagacauaugcagcuccgucauaacugacuccuuugucuggaac

SEQ ID NO: 4119457 - RNA, 76 nt, Human
guucucaaaggcccauugucccguugauuuuaucaguuauucuuuguuaauaaggugguaauguggucuuaagagc

SEQ ID NO: 4119458 - RNA, 75 nt, Human
guucucaaauaggaucuguguaaucuggccugguaaggccaugcuggguaauuugcacugaucaauuugauaagc

SEQ ID NO: 4119459 - RNA, 71 nt, Human
guucucagcgugggaggcagagagauccuguuaugauauaagguggaucauguugccucacuguuuagaac

SEQ ID NO: 4119460 - RNA, 70 nt, Human
guucucaggcauaguuggcuuuuuugaugaaaacaaaagcuugauuaaauuagcaaacugugaaaagggc

SEQ ID NO: 4119461 - RNA, 94 nt, Human
guucucagggucacuuaaaaaugaaugugaguuaccuggauugaacagaauucuauuuaguguauucuaauauguggugauaaaacuugggaac

SEQ ID NO: 4119462 - RNA, 66 nt, Human
guucucauucuccuugccugguggaaguccauucauccuuuaagacccagccagguggaauggaac

SEQ ID NO: 4119463 - RNA, 85 nt, Human
guucucccaugaacugucuugcuguaguuuaaugcaccgaggugccuguaacauccagcaacauagucagcaucaguggggggac

SEQ ID NO: 4119464 - RNA, 78 nt, Human
guucucccuuggggucugcgccacugucugcgaagaaccuacuucaagacagaaaggagggugucaggcaggggaaac

SEQ ID NO: 4119465 - RNA, 106 nt, Human
guucuccuggaaagcacagguucucucagaggccaggguccuggaaccgucuucccggggcugcccggcacucucugcaggugcuccugucaacaccaggucaggc

SEQ ID NO: 4119466 - RNA, 64 nt, Human
guucucuccuuguagcuccccaaggcaaaaaauacccuuucuggagucacacaggaagaaggac

SEQ ID NO: 4119467 - RNA, 64 nt, Human
guucugaaugugccuguacucuguucgugcuucucuuugcagcugugcaaguucauucgcaaac

SEQ ID NO: 4119468 - RNA, 84 nt, Human
guucugaccuugguugagcuuccuaaucagcuaccucuugaaccaaaggagaaauaagaauaggaagucacaucaagggagagc

SEQ ID NO: 4119469 - RNA, 65 nt, Human
gugagggauugggacggacaaucuuuuauucaugaggcagauguacaacugucacaauaccucgc

SEQ ID NO: 4119470 - RNA, 87 nt, Human
gugagggcacuuccuucucagggcuccauuuccugguuugugaaauuaaggucuucagauauggagcagagaugggagcccaaaaac

SEQ ID NO: 4119471 - RNA, 57 nt, Human
gugagggcagaacccccaggccagcagcuuggacucuucacccugggggacccucac

SEQ ID NO: 4119472 - RNA, 125 nt, Human
gugagggcucaugcccugacucauagagagcaucuucuugcucuguccucacaggguggaaggagcaagguagcucucuggggcuucuuuaauaagggcacuaauuugauuuaugagggccucac

SEQ ID NO: 4119473 - RNA, 61 nt, Human
uacaauguuccuagcaggaaaggucaauuauuauucacaguuuucauguaaggacauugua

SEQ ID NO: 4119474 - RNA, 104 nt, Human
uacaauuggaauguuaauuuuuaaagagguacaagaaaguccaguggguuuuucaaggagaaucaucuguguuuucugugagccugagauuuacaucugcggua

SEQ ID NO: 4119475 - RNA, 75 nt, Human
uacaauuuauagauuuugcccuuuaagguuuuauugcuuaaucacaaugaaaguaggguaaaaucacauguugug

SEQ ID NO: 4119476 - RNA, 88 nt, Human
uacacaagugcugaggaaggggcccauuuggugcagagccuggcuuuggggucucccugaauuuggggccucccuggcacggggugug

SEQ ID NO: 4119477 - RNA, 79 nt, Human
uacacacgcuuuacauuuuuuuccuaagugauaauucaaaaucccagugggaauguagaauguaaaccaugugugugua

SEQ ID NO: 4119478 - RNA, 62 nt, Human
uacacacggaaaggcauaugcuguguacaguuuggugaauuuucagaguaaaugccugugua

SEQ ID NO: 4119479 - RNA, 66 nt, Human
uacacacuagaugguaggugcggggcucucccaccccaccuguucauuacccaucccaggucugug

SEQ ID NO: 4119480 - RNA, 81 nt, Human
uacacaggccugggguugagcggguguaguuucggucaggaagccauucuagucuguucuccucacuccucaggccuggug

SEQ ID NO: 4119481 - RNA, 57 nt, Human
uacacauaggaggguaauaaaaagcaaccgaggcuuauuuaacacucacugugugug

SEQ ID NO: 4119482 - RNA, 70 nt, Human
uacacaugcgguuugcacgauauuuccaugggacagcacuguucuaaagagaggcgugagaccuugugua

SEQ ID NO: 4119483 - RNA, 55 nt, Human
uacacaugugcacgcguguccugcguguguuguauggcaugugugcaggugugug

SEQ ID NO: 4119484 - RNA, 68 nt, Human
uacacauguuuggcaaguauguccaggcucaaaaccuugaaaccaagcaugcugcaaaaccauaugua

SEQ ID NO: 4119485 - RNA, 99 nt, Human
uacacucgccuaugaaugacuaugacccuuucaucccugaagacagugcaaaagagggcugauucagggcaaagggcagaguuugaggguagaagugua

SEQ ID NO: 4119486 - RNA, 64 nt, Human
gugcuuuaccuuauuggucucgguucugaguuuucuaaaccuggagacauugaggagagagcau

SEQ ID NO: 4119487 - RNA, 89 nt, Human
gugcuuuacucuuuuaagcauucaaugcuuagcacugugcuuugcaucugccaugugcugguuaguguuugaaugaaugaaaaaagggc

SEQ ID NO: 4119488 - RNA, 60 nt, Human
gugcuuuacuuugccugguuguuccuggacuggaagaccccagagcgagguaagacucac

SEQ ID NO: 4119489 - RNA, 78 nt, Human
gugcuuuaguauuagcgaaguguuuucacauauagaauuucaucuguaguaaagcagguuuugcugucucuauuucac

SEQ ID NO: 4119490 - RNA, 58 nt, Human
gugcuuuauauguggguauccaaaguaucuuccuauggcauagcuaugaauaaaguac

SEQ ID NO: 4119491 - RNA, 79 nt, Human
gugcuuuccguggaggcagugcaguggugccugaggaucucacaggcagcagggccacuggcugaccacuggauggcau

SEQ ID NO: 4119492 - RNA, 57 nt, Human
gugcuuugaaauguuagauccuaggcuucauugaccugaucuuacagagcagaguac

SEQ ID NO: 4119493 - RNA, 104 nt, Human
gugcuuugagauagcacauuuuggcugccuagugucugagcagaaccacuuuuccuccuggguugccucaagcucuggcgcuuaagugguuaaguuggaagcac

SEQ ID NO: 4119494 - RNA, 89 nt, Human
guggaaaaugagccaugaaccaaccaaugugaguaauguuuaguguuguuguuuugaaguugggugguugguugaugguuguuuauuac

SEQ ID NO: 4119495 - RNA, 80 nt, Human
guggaaaaugugcauggagucauagucauuuagaacugaagcuacccuagagaacuucuaaucuguucacauuguuucgc

SEQ ID NO: 4119496 - RNA, 57 nt, Human
guggaaagccagcucuggaagggaugguagaggucauuuaggccagaaguuuuccac

SEQ ID NO: 4119497 - RNA, 66 nt, Human
guggaaagugcucuagacuuucucauaauuauuaacugagaaaaaauaccacugggcauuuuguau

SEQ ID NO: 4119498 - RNA, 63 nt, Human
guggaaaugugugugguagaauauuugagacaagaacauguauucaagccacauacauugcac

SEQ ID NO: 4119499 - RNA, 64 nt, Human
guggaacugguucccugggcugaccggagccgggagaacaaccuggccucagggagagagacgc

SEQ ID NO: 4119500 - RNA, 76 nt, Human
guggaagagcgcucuccaagguggcccgcuuccuguugguguugccggagccgugccuggagaccugcuccucuac

SEQ ID NO: 4119501 - RNA, 70 nt, Human
guggaagaguccaggugggcuggaggcauggccugugugucuugccuccagucccugggcugagauuggc

SEQ ID NO: 4119502 - RNA, 55 nt, Human
guggaagcucucaacuuccaaccucaaaacagagagggacagggggagcuuuuau

SEQ ID NO: 4119503 - RNA, 76 nt, Human
guggaagcuuucaauuuguggcacugaaugaugaucuacacagggcauccuucaaaggcuacaauuaaggauccac

SEQ ID NO: 4119504 - RNA, 69 nt, Human
guggaaggaaaugauaguugcuguauuucuaaauagguugacuauuaacauugcugcauucuccuuccc

SEQ ID NO: 4119505 - RNA, 91 nt, Human
guggaaggaaggacuggccuuggagacaggacaggcagaaugggcuggacaaugcccauuagaugacuccacgucaguuuuccccuucuac

SEQ ID NO: 4119506 - RNA, 70 nt, Human
guggaagggaaaccgcacuggccuuggccugucuugggaccugaacuuggccugcuguucacccugccac

SEQ ID NO: 4119507 - RNA, 80 nt, Human
guggaauggaaaagugcagcugaaaacauccugggggaagcauucuuuccuagggcagccaagguacuuuucaucuucac

SEQ ID NO: 4119508 - RNA, 82 nt, Human
guggaauggaacagucagcaugccugaauucaugguuaacaaacugaucagauacauuaaaaugaugauuguuuuaugccac

SEQ ID NO: 4119509 - RNA, 55 nt, Human
guggaauggggcagagauguugugagcaggcaugacauuauaauucauauuccac

SEQ ID NO: 4119510 - RNA, 56 nt, Human
guggaauguaauaaaagcaugguuuauaaaaacuugcuuauauuauuacauugcau

SEQ ID NO: 4119511 - RNA, 94 nt, Human
guggacacugcgucugauguccaggguaagucucugccuuccaggcccagccuagagcaguggguaccauggcacaucugacagcauugcacac

SEQ ID NO: 4119512 - RNA, 77 nt, Human
guggacagagggcuaacugggaagcagggcaagggcuucucucccuuuccaccugccccgauuacucccaucuccac

SEQ ID NO: 4119513 - RNA, 57 nt, Human
guggacagugaacccagaggggugaguggaauccauccagccuggggguuuaaccac

SEQ ID NO: 4119514 - RNA, 59 nt, Human
guggacucauuucuccugccugcaaggaacugcuguccacaggucagggagauaggcac

SEQ ID NO: 4119515 - RNA, 73 nt, Human
guggagaaacagacuugguagccuuggagucaggacugaggacugacucugccaucccaggugcuguggcuac

SEQ ID NO: 4119516 - RNA, 62 nt, Human
guggagagaaaaaagacaguucuucggugucauaaagacauucuaucuuuuugcucugccau

SEQ ID NO: 4119517 - RNA, 73 nt, Human
guggagagaaaguaaacauuauucugggaacauguucaaauuaugugacuuucagugauuuaucuuuuuccac

SEQ ID NO: 4119518 - RNA, 92 nt, Human
guggagagaugggcuucacccugucugcaagugucaauucucuaugaggcuuuauggcacuauggaugagacugauuucccauuuuucuuac

SEQ ID NO: 4119519 - RNA, 71 nt, Human
guggagauaaagacagggccuggcaggggcaggauagaugcuaaugccuugccacugcucuuaaugucggc

SEQ ID NO: 4119520 - RNA, 67 nt, Human
guggagaugagaggaggggucagagaucuggaucuguggucuggaauuggaaucucuucaucucugc

SEQ ID NO: 4119521 - RNA, 94 nt, Human
guggagauuguuaacccaucacuuuacagcuaagguuguuacauuuucugagacugcuuugguuuguaaauguaacauuuugucauauuucuac

SEQ ID NO: 4119522 - RNA, 61 nt, Human
guggagccaggaucuccgcacaucccuaugcugugauagcuacaggggaucguggcuucac

SEQ ID NO: 4119523 - RNA, 68 nt, Human
guggaggaccuggcauauucauuggcacaugcuugcugcguaauaaaugccaguucuauuauauucac

SEQ ID NO: 4119524 - RNA, 56 nt, Human
guggaggaggacuuagacccauguaaggcagggauuuaaaauuuagaccucuccac

SEQ ID NO: 4119525 - RNA, 60 nt, Human
guggaggccaagucacugaccugggggcaaagacaucugaguucucaucuuggcuucuau

SEQ ID NO: 4119526 - RNA, 84 nt, Human
guggaggcccagagacgggagggauuaguucugccuggggagcccagaaaagcaucugguucuuucauuucuguauuccuuuac

SEQ ID NO: 4119527 - RNA, 67 nt, Human
guggaggccucuguguuuagccugaccauauuuggggcucaguuccaucagcaaaugccugucuccc

SEQ ID NO: 4119528 - RNA, 71 nt, Human
guggaggcuuucaaagaccuuggcaugggggcccaccuucuugcuuuacaauuuuugaaaccaaacuccau

SEQ ID NO: 4119529 - RNA, 127 nt, Human
guggagggagagaaagggaaucuggccugugcuuaacugacgugagagccagacuuugaacuccaguggcuucauuuaccacucaugucaucuugggccaacugagaucacuuuucuaagccucugc

SEQ ID NO: 4119530 - RNA, 65 nt, Human
guggagggccuggccuguguuguguaagagccaauggaguagagaaccagagccaggcucucagc

SEQ ID NO: 4119531 - RNA, 83 nt, Human
guggaggggcagagaugacucagaaagguagcccagcagacccuugcuuccaugaaauguguuaugcuucuagccucuuccac

SEQ ID NO: 4119532 - RNA, 73 nt, Human
guggaggggcugcccugggaguuggagcugcuggaaccagcuaguaacuggcuuccagaggggcccuugucac

SEQ ID NO: 4119533 - RNA, 72 nt, Human
guggaggguugaagucugguccucauccagcucuguccauucugagaugcugccuccucuucagccgcccac

SEQ ID NO: 4119534 - RNA, 86 nt, Human
guggagguuucuuuuugagucagagucucgcucugucgcccaggcuggagugcaguggcgugaucucugcucacugcaagcaccac

SEQ ID NO: 4119535 - RNA, 80 nt, Human
guggagucagcaguucuguacuuuagaguaauaugagaaucaccuggaacacuuacgaaacacagauugcugagcuccac

SEQ ID NO: 4119536 - RNA, 70 nt, Human
guggaguuaaugguccucaucuucugcugcuauugcccuuagaccaccaggaagugugggccaacgucac

SEQ ID NO: 4119537 - RNA, 70 nt, Human
guggauaaaccagauugggaguuucagauggcaacccauggagcauacuaacccacucugguauugcuau

SEQ ID NO: 4119538 - RNA, 63 nt, Human
guggauaauaccuuuuugauguuguuuugaagaguuaaugaaauaauuuagaagguauuccau

SEQ ID NO: 4119539 - RNA, 76 nt, Human
guggauaauucuaagacaugcccugcaugauaccuuaaugggauaucaccagagggauagucucugaguuauuuac

SEQ ID NO: 4119540 - RNA, 115 nt, Human
guggauaugggacugucaacugugaaggguuucacucagaugcuaaagauggaauuacacgguaacucgaguuuuaggucuggcucugcauacaguuacaugguuuuaggucugc

SEQ ID NO: 4119541 - RNA, 62 nt, Human
guggauauuugacgaaacaacaugcauggacaucuauguaagaacaacugucaaaugucuau

SEQ ID NO: 4119542 - RNA, 122 nt, Human
guggaugauguuuuuagccccuggggugggaugucacagacggcuguuuuuauguuguaggggagccagucaacaaaguagcugcuguucuuauuuugaauguugaacauuuguucauccac

SEQ ID NO: 4119543 - RNA, 87 nt, Human
guggaugcaccucuacaggagccccaggcugacaauaaccuuccugaucugguuucaacccuggaugcuuuuaccuggugcauccau

SEQ ID NO: 4119544 - RNA, 61 nt, Human
guggaugugagggcucaggcugacugaucuuuccucaucaaacaaaugcuuuuagauccau

SEQ ID NO: 4119545 - RNA, 87 nt, Human
guggauucauguacaaaaggcaaaugccucacauauguuaagcuugagguaaggguuauugccuauuguacugaugagagaguccau

SEQ ID NO: 4119546 - RNA, 67 nt, Human
guggauuucaggcuccccucagcccuguaaccuggcaucaggaucugagggcuggucugaagucugc

SEQ ID NO: 4119547 - RNA, 71 nt, Human
guggcaaagcagaggguauggccagguuugguuucuaccccaacccauuugccaucccuguugugucccgc

SEQ ID NO: 4119548 - RNA, 111 nt, Human
uacgugccaggaucgcaaacccuuucucucagcaggaaagcaugcaagucaaaugccaucauaaucacuuuguguuucccugcagagggaaaggagggcuccuugcaugug

SEQ ID NO: 4119549 - RNA, 88 nt, Human
uacuaaauauaauaaagaugauuucuauauaaacuuaaauucaguauaaagaauuuauauaaagagaucuuuggguuguccaguggug

SEQ ID NO: 4119550 - RNA, 76 nt, Human
uacuaaauaucagaacacauguuuugcagccuaaacuuuaaaugguggcuugugugugugugugugugugugugug

SEQ ID NO: 4119551 - RNA, 81 nt, Human
uacuagcuauucuaaagcugaccugauugcuuuucaguguuuugacccugcagagaccuaggucagguuuaguagcuugug

SEQ ID NO: 4119552 - RNA, 55 nt, Human
uacuaguaagggugguuuggcuccccaggcuguccugccaucacccuaacuagug

SEQ ID NO: 4119553 - RNA, 79 nt, Human
uacuagucuuuuaacauguuucaauuguuugauuuucuuuuaaagaacuucaaaaauaagugagagguaaaggacugua

SEQ ID NO: 4119554 - RNA, 130 nt, Human
uacuauccaggacucuccuggauagauacuauccaggacucuccuggauagauacuauccaggacucuccuggauagauacuauccaggacucuccuggauagauacuauccaggacucuccuggauaga

SEQ ID NO: 4119555 - RNA, 97 nt, Human
uacuaugguaaccaagcaaugugcugggagacagaagccuuuaauugcuuuaacaacuuccuggggcuccagcuaccaggcuuggauuugcuaagua

SEQ ID NO: 4119556 - RNA, 104 nt, Human
uacuauuuucccugugaucucaguuucuucuucccaucccucaaaugcuuuuuguguguguguggugggggaagagaguaaaauugaaauucguggaaaaugua

SEQ ID NO: 4119557 - RNA, 55 nt, Human
uacucaaucuagguggcuuaccuacuuccuguuuguaaggcaucaaguuugggua

SEQ ID NO: 4119558 - RNA, 55 nt, Human
uacucagaaugcuuuugagauucauccguguugagucuggugguauuuuguagug

SEQ ID NO: 4119559 - RNA, 84 nt, Human
uacucccuuaccacugcucccugccugugaacugaucauuccacacccucuagucuaggacuuuaugcagauggcaagggggug

SEQ ID NO: 4119560 - RNA, 65 nt, Human
uacucucacccacucucccaccgcccagcccuacgccaggcgagggagcagugcggugggcggua

SEQ ID NO: 4119561 - RNA, 101 nt, Human
uacucucuccuugucuaaaacuuuaauuggaauuuuuguaagggaacuaaaaucuguguuuaccugaaguaacaaugaauauuuuugauaaggauaaagua

SEQ ID NO: 4119562 - RNA, 74 nt, Human
uacugaaaaacaugugucuggcuagauuguaguagacuguacuguagcaaaagaaggcaaggcacaauucagua

SEQ ID NO: 4119563 - RNA, 101 nt, Human
uacugaaacaauucaacaggcaauggaugcccugaauuugauagaaacucaugaaaggcaaacucagagucaacuguugccuguuaauucuccaaacagua

SEQ ID NO: 4119564 - RNA, 57 nt, Human
uacugagauaucaucagauaauuguacaugagaaugacaagcuggugaaauccagua

SEQ ID NO: 4119565 - RNA, 57 nt, Human
uacugauaagaguuguaggagugcgaucucuaauuccucagcauguuuugucaugua

SEQ ID NO: 4119566 - RNA, 69 nt, Human
uacugcagugauucuuuuuaugccuugauagaccuuguuuuauagggaggaacugagucaggagcagug

SEQ ID NO: 4119567 - RNA, 71 nt, Human
uacugccagcugggccccagugcagggggugagugccccuaacucucugugauggaggccagcuggaagua

SEQ ID NO: 4119568 - RNA, 61 nt, Human
uacugccugggggagacagcugguuugccaccugcaaugucugugaccucuuaggcaagug

SEQ ID NO: 4119569 - RNA, 78 nt, Human
uacugcuauagauucaggagaucuuaggaauucuuaggagaauccuaagaaaucuuaggauuucuucuguggcuugua

SEQ ID NO: 4119570 - RNA, 72 nt, Human
uacugcuccuggccagcacagggcccuugggugaauuagaaguuauccucgggcaccuggcuagugacagug

SEQ ID NO: 4119571 - RNA, 83 nt, Human
uacugcucuaaacaauuucugauauacuguagaauccuguuacaggaaguagugaaguuagaauuaaguguucaggugcggug

SEQ ID NO: 4119572 - RNA, 63 nt, Human
uacugcucuagguccauugcgggaaauaauucuuuauguugcccaggguuucuaagagcagua

SEQ ID NO: 4119573 - RNA, 61 nt, Human
uacugcugggcuccugguggcugcugucugcucugcagcagaaagcccuuuccccacagua

SEQ ID NO: 4119574 - RNA, 101 nt, Human
uacugcuuaaaaagggaaacacucaauuuaguaauucgguugccuagaugaaaucgaguggcuauugauccgugauguuucuagauuuuuaagacuaugua

SEQ ID NO: 4119575 - RNA, 66 nt, Human
uacuggaauggaaguggcaggauguggaguccagacauagucuaccacucaugcuacuuacuagua

SEQ ID NO: 4119576 - RNA, 61 nt, Human
uacuggagacucacacaugguaucuugaucagcccagcauagccagugaauguuuccagug

SEQ ID NO: 4119577 - RNA, 95 nt, Human
uacugggaguuggaguuugcuucucuguaguugggcagcugcucuuggucuagugaccaccagccuggacagcuacggagaacccgccuuaggua

SEQ ID NO: 4119578 - RNA, 130 nt, Human
uacugguaggaacucucauauuaaaagggaacccaaaccagggcggcuugaggaggcagcuucccagaaaggauggcuuuuugagcugccuuguggggagacccugcuguguguccccaguucaccagca

SEQ ID NO: 4119579 - RNA, 60 nt, Human
uacuggucuuaccuaauuuuuaucaugccaccagguggcagcauguuauguaaggaagua

SEQ ID NO: 4119580 - RNA, 66 nt, Human
uacuguaaugagauuagcuuccccauauaaacuauuuugguauccugagcuauagcuuauacagua

SEQ ID NO: 4119581 - RNA, 85 nt, Human
uacugucacgcugcaguugacucccuguuugcagucagaccaguaugucagcguauacagaaagucaaaagcuagcuagauagug

SEQ ID NO: 4119582 - RNA, 104 nt, Human
uacuuaaauauauuugaucugguucaauaagucagaauguuuggaaauaaaagacugaauaauauuccaauuaauugaguauugaccagaaaauuuaaaaggua

SEQ ID NO: 4119583 - RNA, 96 nt, Human
uacuuacccucucuugcuucagauuccucuucuguaaaauggagcuggugcugggguuguggggaggauuugaugagacagugagagggugcagua

SEQ ID NO: 4119584 - RNA, 130 nt, Human
uacuuacuaggcuuggguauuaaguuuauauuagauuuauuaaauuauuugggaaacuuuucacuuacauauuuuggaacaguuugaauaauuuagauaggauuauaugauccuuaauaguuuaguuaga

SEQ ID NO: 4119585 - RNA, 67 nt, Human
uacuucaguaaccuugugacaacacgacccuuuauuuuguguguuugagucuuauaggauugaggug

SEQ ID NO: 4119586 - RNA, 73 nt, Human
uacuucaguuacaugaagguauucuggcauagcaauaaaacaaccggaaaguccuuugaguguguuugaagua

SEQ ID NO: 4119587 - RNA, 82 nt, Human
uacuucauacauuuuagguugcccuugcaauauuuagguuucauggggaucaaaagcuggguucuaaaauuaaagagaagua

SEQ ID NO: 4119588 - RNA, 68 nt, Human
uacuucauugagcuuuucugaaaugaauuuaucuaauuuaaacuguaggucaggaaguugaugaggug

SEQ ID NO: 4119589 - RNA, 70 nt, Human
uacuucucugcgaucacgugauaaguuagucacaugauuggcauuuuagacaugauggugcagagaggua

SEQ ID NO: 4119590 - RNA, 112 nt, Human
uacuucucuggaaagcuugcuacacauuggccaaaaguuuuuccaauuccaauuccaauuuguaucuauugaaagauuuugggcucauggaagagcauuagcuggggaagua

SEQ ID NO: 4119591 - RNA, 84 nt, Human
uacuucuguggguguuuguguugaugaggauuugagccauuuuauguacaggucuucauucaacaaauauucauuuuccaggug

SEQ ID NO: 4119592 - RNA, 78 nt, Human
uacuucuuacagacugugaguaugcauaguguugucauuacugaaauucauacucgacaguggggcuucaaagaagua

SEQ ID NO: 4119593 - RNA, 80 nt, Human
uacuucuucuggugcuauucuuuucauucugcugucugaguuuuccagcacugucuucugagagggcauuauaggaagug

SEQ ID NO: 4119594 - RNA, 75 nt, Human
uacuugccuucuucucuacaccagcagccccacugaaagcccagcagggguggcccccuggggagguggcaggug

SEQ ID NO: 4119595 - RNA, 69 nt, Human
uacuuguaagcuauuccugaagaagguugccucagcaggggaaaacuuucugaaaagcuugaucaagua

SEQ ID NO: 4119596 - RNA, 73 nt, Human
uacuuguuuaauuuugugcuuucuggacuucaauccauuuacaauacuuuagaaaguacuaaauuuaacugug

SEQ ID NO: 4119597 - RNA, 57 nt, Human
uacuuguuuuguguuccuaaacuuugaagcucauguuugggaaguuuaaaauaagua

SEQ ID NO: 4119598 - RNA, 76 nt, Human
uacuuuaaaugggaaaaauugcagccuguuaugaauggcaccgaacagugcugauuauuuuaccuuugacaaagug

SEQ ID NO: 4119599 - RNA, 79 nt, Human
uacuuugaauacaguaucuucuggcaagcauaggggacugcagucgacaaugcugcugaauauaccugaguacauagua

SEQ ID NO: 4119600 - RNA, 57 nt, Human
uacuuugcaugcuugugugaucagccaaaucuuaucgcaugucuaaugugcagggua

SEQ ID NO: 4119601 - RNA, 74 nt, Human
uacuuugugacuucucuguagugcugagaugccagaaaauauaauaguuuccagccaagggagguuacuaggua

SEQ ID NO: 4119602 - RNA, 57 nt, Human
uacuuuguuugauccaugggaaguaauauugguaauaucucaggguucagcaaagua

SEQ ID NO: 4119603 - RNA, 81 nt, Human
uacuuuguuuuugucuuuugcauuuguuggaagcugauugaaaaagccuuccacuuaguggaagggcaugcuacauuugug

SEQ ID NO: 4119604 - RNA, 72 nt, Human
uacuuuucccaucagcaacugugccugacacacaguagauacuguguguacuacuuguugaaugaauuugua

SEQ ID NO: 4119605 - RNA, 71 nt, Human
uagaaaaccaugaagguccuuuuuguucugugggcuccucauagaacagggcacugucaugauguauucug

SEQ ID NO: 4119606 - RNA, 61 nt, Human
uagaaaagaauuuuauuugauagcuugccuugccuaagcaaauaccaggaguucuuuucug

SEQ ID NO: 4119607 - RNA, 97 nt, Human
uagaaaaggaaaugaaggcuuacaaugauuagcuaacuugcccaaagguuauauagcuaauuauguagcagaacaaggccuuacauaucugacucug

SEQ ID NO: 4119608 - RNA, 61 nt, Human
uagaaaagggauucaggauuggaauucaaaucuguccaagucuuaauacagcucuuuucua

SEQ ID NO: 4119609 - RNA, 74 nt, Human
uagaaaaguuuguugcuuacaaagaagacggcauagaaagcugaaaguucuacuuguugcaacuuacuguugug

SEQ ID NO: 4119610 - RNA, 93 nt, Human
uagaaaaucaaauaguguucuuugccagugauuuaauuuaauaauaauaauuuuuagaaaugaaauaagucacugggaggagcucauuuucua

SEQ ID NO: 4119611 - RNA, 89 nt, Human
uagaaaaucaaguggcccccacauaagcugaccucacucaauagaagaauuuugguuauguaugggggccuuaugaccugauuauucua

SEQ ID NO: 4119612 - RNA, 60 nt, Human
uagaaaccagacuuggcccauuucccccuagacaggccacucuggucugguaauauucug

SEQ ID NO: 4119613 - RNA, 70 nt, Human
guuucgucaucuccaaaaugcagucaaucaucccagguggugcugaggacuaaaggagaugacaugaaau

SEQ ID NO: 4119614 - RNA, 77 nt, Human
guuucgugaucuuguaauugggcaaugauauaaacaaucauggugaaacagugccccaguuacaugggguuaaaaau

SEQ ID NO: 4119615 - RNA, 124 nt, Human
guuucuaaagcaagauauuuucaaacuacuuaucuugguguuuuaguaauucuagugucuuaauaucgauugcuuauacacaagaugaaagagguuauuuucagggugucauuguuuuaguggc

SEQ ID NO: 4119616 - RNA, 77 nt, Human
guuucuagcacgugacagacacucuguccagccugggauugaguggugggcagggucucuguuaucaggcagcuuac

SEQ ID NO: 4119617 - RNA, 88 nt, Human
guuucuagcuaauuucuaacaaguucccgaggaccacaguugaagaaccuuugcccuaugguauuguggagcaagaaauggaagaaac

SEQ ID NO: 4119618 - RNA, 125 nt, Human
guuucuaggucacacucucaguauuucuauuucaguaguaggucuggaauggaguagggguggagaaaaaggauuugcauuuuuaacaaguucccagaugcugcugaugcugcuggccuaggaac

SEQ ID NO: 4119619 - RNA, 76 nt, Human
guggccccauuuuucuggagccuggaguaguugugggggagcagggagcaggaaggcugcagaagaauagggucau

SEQ ID NO: 4119620 - RNA, 92 nt, Human
guggccgcugggcagagcuggagcaggucaccuugggguaaacgguauuacugccccaggacaggaguuggcuucgcugugcccacguccau

SEQ ID NO: 4119621 - RNA, 81 nt, Human
guggccggcuugcuggagccuucugcaggagcaccugucccauuggccccaguguggcugcguagggcucucaggcaccac

SEQ ID NO: 4119622 - RNA, 61 nt, Human
guggccucccugccuggaguuggguuccuaugccuuccagugacuaaggaggaaauuccau

SEQ ID NO: 4119623 - RNA, 87 nt, Human
guggccucuugcuuugcuggcacuccuggcuggcuggcuggcuggcuaugcugacaguguaagucaagggauuauuagauuggccac

SEQ ID NO: 4119624 - RNA, 91 nt, Human
guggccugaaggccuuuggcagccucugcuauugacaguaaguucuguagauuuugugaacugguugugaaagguuuuucugaggaguuac

SEQ ID NO: 4119625 - RNA, 55 nt, Human
guggccugccgcaccccaauauggcagaaacauuuucaggccccggcagguccau

SEQ ID NO: 4119626 - RNA, 67 nt, Human
guggccuuuaucuuagguauccacaggagaaaccaccucaggugguacauacacuaauauaaaccac

SEQ ID NO: 4119627 - RNA, 80 nt, Human
guggcgagggugcaggugggggucggugcaucuguucuggccgcgcgcaggugugaccucccuccuugaccuuggcacgc

SEQ ID NO: 4119628 - RNA, 99 nt, Human
guggcgcacgucaugcacauuuguuuacauauugucuguggcuacuuucaugcuacagugacagaauuaaacagucaugacagaaacuaugugucccgc

SEQ ID NO: 4119629 - RNA, 85 nt, Human
guggcgucagcuuucccauccagagagccucuccagugggcacauuagacaggaaacauuaggauggagaagaagccuggcacac

SEQ ID NO: 4119630 - RNA, 59 nt, Human
guggcuaaaguaauccuucauaaggagauaauuuuuucuuguaggugauuuuuuuccac

SEQ ID NO: 4119631 - RNA, 68 nt, Human
guggcuacaugguguauugauuauugcugucuuuuuggacagaacugggaaaugcacauaugcaucac

SEQ ID NO: 4119632 - RNA, 55 nt, Human
guggcuaucagcaauggcuucuggaaggaggacagcacaggaguugaaugggcau

SEQ ID NO: 4119633 - RNA, 68 nt, Human
guggcuaugaucccaguuuuggaauguucuaauuauggcuuugaauguuccugguauaucaugaccac

SEQ ID NO: 4119634 - RNA, 84 nt, Human
guggcucagagagcccggccacagccacugggguggggcucacugcucagcccuaggcugaggccagggugcuuugugucccac

SEQ ID NO: 4119635 - RNA, 75 nt, Human
guggcucagccuccauugggccuuugugucugggccagacccuccaggcaagcccccagugaggcucuugggccc

SEQ ID NO: 4119636 - RNA, 58 nt, Human
guggcucauccauuugacuuuuucuuucauaggaagaacaggacacugggauggcuac

SEQ ID NO: 4119637 - RNA, 126 nt, Human
guggcuccccaauagucucgaccuguucuugcuuaggaacucugacaaggcucauuucuuugguucucaggccaacuggccuuggacagagcgcuccuggcuugagcuccacuagugggauuccac

SEQ ID NO: 4119638 - RNA, 67 nt, Human
guggcucugaggcaucauggagaacaguugaaaaucacauugucagcucgaaaugcaucaaagcuau

SEQ ID NO: 4119639 - RNA, 64 nt, Human
guggcugaacugggacacacuagguaguuggacucacgccccauaccuugaacccgccagccau

SEQ ID NO: 4119640 - RNA, 75 nt, Human
guggcugcacaugugcagagaucuuguaacguaacuauggcuuuucucugcaccaugugugaaauaagcugccgc

SEQ ID NO: 4119641 - RNA, 80 nt, Human
guggcugcagcuggagaggaucccaaagccacgcucacuggggcuggcuuucucacagaccaccuccaugcagaucccac

SEQ ID NO: 4119642 - RNA, 77 nt, Human
guggcuggaacugcagguguggguggcugccaggcccagcucugugccugcacuucucacagcugcuguguguccac

SEQ ID NO: 4119643 - RNA, 65 nt, Human
guggcuggaacuggggauguuuacaaugcuguucacugugguuuaauuuccauuuccuuggucac

SEQ ID NO: 4119644 - RNA, 65 nt, Human
guggcuggaggaaggaacugaggaggaccuucagggcuuucugagucuauauucccacuagccac

SEQ ID NO: 4119645 - RNA, 98 nt, Human
guggcuggguccugaauuucuggcuugcuggcuuggucccagcuacagcugaggagaucuauguccaguaguaccccggggaagagggcucagcuuac

SEQ ID NO: 4119646 - RNA, 78 nt, Human
guggcuguaaucuuggcuacuuaggaggauuccuugaguccaggaguccaaggcugcaguuagcuaugauuacgccac

SEQ ID NO: 4119647 - RNA, 104 nt, Human
guggcuguugaagcugaagauaauagacacacaggcccaaagccuaguacauccugggcuccagcuaaugguuucuaucauucucccuuaagcuuuuaaguuau

SEQ ID NO: 4119648 - RNA, 70 nt, Human
guggcuuagaagcaggcuguguccccaggguccagcuuccucugggggagauuagagcuucuuaggccac

SEQ ID NO: 4119649 - RNA, 58 nt, Human
guggcuuccaugugcaucugacugggaccagaccuccagcaaaaccaugaaaggucac

SEQ ID NO: 4119650 - RNA, 66 nt, Human
guggcuucgcuuugccaugaguuuaccgcagaaaccggcucugaaaucaggcacagcgacugcagc

SEQ ID NO: 4119651 - RNA, 63 nt, Human
guggcuucggcauugcuacacccauugugcauuuuuaugugggaaguggggauuugaagucau

SEQ ID NO: 4119652 - RNA, 76 nt, Human
guggcuugcucagugaggccagggcugcacuuugagaggggauggcaaacuccucuccuggcugcacuguggccac

SEQ ID NO: 4119653 - RNA, 130 nt, Human
guggcuuuuugcauaguagacaauuuugaggcaucugcagaguuccacaaagcccuauacacauaacaucaaagcguugggaagauuucccguagcugugccucauguaaucucaauugcuuuuugccau

SEQ ID NO: 4119654 - RNA, 70 nt, Human
gugggaacaacucugagaaacuugcaguugagggugucauaagaacuccuuuuaacugguuucuucccau

SEQ ID NO: 4119655 - RNA, 61 nt, Human
gugggaagaacuuccggcauggggaaacuaauaugaaaucuauugcugggguagaauccac

SEQ ID NO: 4119656 - RNA, 67 nt, Human
gugggaagaauugaggauguuuaccuuggagaagcagaggcucaggguguacaugcucagcuucagc

SEQ ID NO: 4119657 - RNA, 75 nt, Human
gugggaagggauggcugguuggucauccugggagggagaccccuuuccuuagugacuucuagcuacuugcucuac

SEQ ID NO: 4119658 - RNA, 105 nt, Human
gugggaaucaaggcuaaaugaucaguguauguguguucaauggcagaaaaauuauugaauagaguaacguggacaaagaauacuccuuuugccuugaaaaccuau

SEQ ID NO: 4119659 - RNA, 77 nt, Human
gugggaaucguuuccuaccagugguuccagaucucaaaaaugcaauugguuguggaauuauuuaggaccauucccac

SEQ ID NO: 4119660 - RNA, 91 nt, Human
gugggaaugagccacacuaagcacagggagcagcaugggcaaaggcccagaaggcugggcacacucugcuccagcuuugguucauucccac

SEQ ID NO: 4119661 - RNA, 66 nt, Human
gugggacaaaggggauagcacuaugguuuaugaggauaaauaagcuggagcuucccccguccacac

SEQ ID NO: 4119662 - RNA, 67 nt, Human
gugggacacagugguuaacaccugugaucucagugcuuugagaggcaggagguugacuugagcccac

SEQ ID NO: 4119663 - RNA, 79 nt, Human
gugggaccgccuccugucgcacguuuccgccuggucccgcgcuuuaggagcuaggaaaugugacagaggcggugccuac

SEQ ID NO: 4119664 - RNA, 80 nt, Human
gugggacuagggaggcuacuucuuguaggcagugcugccuuucagcugcaguuuacccagagcagugacucccagcccau

SEQ ID NO: 4119665 - RNA, 62 nt, Human
gugggagacagaagagggcugggcuccacacucaggcaccuuagcccucucugucuguguac

SEQ ID NO: 4119666 - RNA, 74 nt, Human
gugggagagaccccgcuuagggaaagucgagggaaguuccucauuacuacuccuggugccuggagcucuccagc

SEQ ID NO: 4119667 - RNA, 61 nt, Human
gugggagccauuuccaguaugcucccaaugucuauggcaaauguggguaauuggcucccac

SEQ ID NO: 4119668 - RNA, 103 nt, Human
gugggagccuggaggcaguguguuucugagauauggccuccccauagguuaugcccagggauuuccauuaucuuuaagcagcacacacuccagagcaucuuac

SEQ ID NO: 4119669 - RNA, 70 nt, Human
gugggagguacggcuccuugagggcugccuguguaacaguccagccacaaaggcuugccucggaugccac

SEQ ID NO: 4119670 - RNA, 61 nt, Human
gugggagguagcaggguccagaggguggaagcacacauccaggcucugcuacuauuaccac

SEQ ID NO: 4119671 - RNA, 60 nt, Human
gugggaguggagcucagcaugucaaaagaagaauugaucgagugaugaugccacuccaac

SEQ ID NO: 4119672 - RNA, 57 nt, Human
gugggauaucuaauugaugauaugugcauuacaaugcaucagauuuagaaguucuau

SEQ ID NO: 4119673 - RNA, 66 nt, Human
gugggcacacaagcuuccugacuggugcucuuacaacccaguuugguggccucgggaagcucccac

SEQ ID NO: 4119674 - RNA, 87 nt, Human
gugggcacacacugaaggguugcccgcagggucuccagaugagggggagccugcaggaugggcagcaccuucuccuggcuuccccac

SEQ ID NO: 4119675 - RNA, 76 nt, Human
gugggcacucugccuagcgccaucugccucucccaccccaggcaggugucagguggcugcugcgcccuguguccgc

SEQ ID NO: 4119676 - RNA, 71 nt, Human
guuuuacaaggcucguaacauuucucugcagcucucugcacuuguggcagaaaguuugugccuugugacac

SEQ ID NO: 4119677 - RNA, 67 nt, Human
guuuuacucaauguauuuccagcuccuggccaguaccuggcacagagcuuguuuacauuuguaaagc

SEQ ID NO: 4119678 - RNA, 68 nt, Human
guuuuagaggucuguuucacaucacugcuuuaauuucuuguuugucaauguguauagauuucuggugc

SEQ ID NO: 4119679 - RNA, 89 nt, Human
guuuuagcaguggaugcaggaguugaugaacagacaagcaaguucugcuucuguccuguuuccuccugacagcuccauucuuuugaagc

SEQ ID NO: 4119680 - RNA, 55 nt, Human
guuuuagccguuugcguggaaugccaaacuguggacacugugcagaugcuagugc

SEQ ID NO: 4119681 - RNA, 81 nt, Human
guuuuaggaaagucauggaugaacacuacuucagcaugagucugaaaguugugugugugugugugugaugucuguaagagc

SEQ ID NO: 4119682 - RNA, 76 nt, Human
guuuuaguuauugcauuaucauuucaggugugcaucacaaauuuaacauuuuaaugagauggcaaugacuuaaaau

SEQ ID NO: 4119683 - RNA, 55 nt, Human
guuuuauacucauuuuguuuucuugcaauaagaaagcuuaacuggguaauaaagc

SEQ ID NO: 4119684 - RNA, 123 nt, Human
guuuuauauggaauuaaguuccaaauugcuuaaacacagauauuguacuugauccucacaccggccacagaggggauuaucaucuucuguuuuaaagauguggaaacuguaaaccagugagac

SEQ ID NO: 4119685 - RNA, 74 nt, Human
guuuuauccuuucauugauuuaacaaacaaguacugaacacauacaaagugcuaaucaauguuaaggcugugac

SEQ ID NO: 4119686 - RNA, 63 nt, Human
guuuuauuggaacacagccaugaccacuuguuuacauauugucuauggcugguuucauucaac

SEQ ID NO: 4119687 - RNA, 125 nt, Human
guuuuauuuauagauauucaaauagacaagacaaugcauuacuaagaagagagaaaaagcaagaagguaaacaauuucuucuuggaauucuaucugucucuggguaugugauccacuagcaagac

SEQ ID NO: 4119688 - RNA, 65 nt, Human
guuuuauuuucaggccguacuuuguauacauuguaaggcaauaguucgguccugaaggccaaaac

SEQ ID NO: 4119689 - RNA, 81 nt, Human
guuuucaaaaacucaguguguuucuuaguaucugguuagaccucuuagaauuaagaggcaucuagagauauuuuugaaggc

SEQ ID NO: 4119690 - RNA, 63 nt, Human
guuuucaagguagaagcagcuuauacuccaggccccuggcauuagacagagcuccuugagggc

SEQ ID NO: 4119691 - RNA, 84 nt, Human
guuuucagcaugaauguuacuagguguaauaauuaacccuagcggggugaguuacugccuaguaacuugacaaucauugaggau

SEQ ID NO: 4119692 - RNA, 62 nt, Human
guuuucauccucuaguacugaagugcccucaaggugguaggcacuguauagcaggagaaaac

SEQ ID NO: 4119693 - RNA, 86 nt, Human
uaauggcauaggagauaauuuucauuuuuguaaaaugucucaucgauaggcugcaaaauaaugaacgauuuuuuucuguggcauua

SEQ ID NO: 4119694 - RNA, 73 nt, Human
uaauguauaacaaauacucaucccaggaacuggcuccaaguagucauucaauaaaggguaucuguugucauua

SEQ ID NO: 4119695 - RNA, 72 nt, Human
uagcuauauuguuugggccauuguuuuugccuauagauaguaauccucuugcaaggcuuaaacauuaaucua

SEQ ID NO: 4119696 - RNA, 84 nt, Human
uagcuaugcagcuauguuugacagaaagugacaaugagagcauuucuugaaaucauuuuucucuuacacguagauauauaucug

SEQ ID NO: 4119697 - RNA, 75 nt, Human
uagcucaaaaaaaguaugaagauuauaauuuuuccaaaaacuuucugggaauuacuaucuugauacucagggcua

SEQ ID NO: 4119698 - RNA, 98 nt, Human
uagcucaucaccugacaggcagggucuugagaggcagccagguuuaaggacuuggaggucacuggaagaugcuguggucugaagcaggagaggagcua

SEQ ID NO: 4119699 - RNA, 58 nt, Human
uagcucaucuaggcuaccacaguuaagucugaagcagggcuguggcgugggugaacua

SEQ ID NO: 4119700 - RNA, 86 nt, Human
uagcuccuugauccuaggauggaagggagagcuuauauagaagcuuuuacuuggaagguuuuguauccuaaggucagacauagcua

SEQ ID NO: 4119701 - RNA, 69 nt, Human
uagcucugacauuugcaauuacaagucugucuuucuuucuuagaaauaguuacauuauugucagagcug

SEQ ID NO: 4119702 - RNA, 58 nt, Human
uagcucugccaaauggaggcugcucugagaagguggcagcucuuuuuugcagcagcug

SEQ ID NO: 4119703 - RNA, 56 nt, Human
uagcucuggucuugcuuccucaaacgugcuguucacagugaugcaagagugagcua

SEQ ID NO: 4119704 - RNA, 64 nt, Human
uagcucuuagacaccaugacuuugauguacaaaucagcucuuucuuggccucuagcuagagcug

SEQ ID NO: 4119705 - RNA, 56 nt, Human
uagcucuucaaucacugucuccauucuuuguacuuggggaucaggaaaggaggcua

SEQ ID NO: 4119706 - RNA, 61 nt, Human
uagcucuucauuucaucugauugguacugcccacuuaacacucagaacaguagaggagcua

SEQ ID NO: 4119707 - RNA, 81 nt, Human
uagcugcuauuuauuuuucaucuacagauggcuucauaaaagccauucuccuuauucugaaaaaaguccaagugguaguua

SEQ ID NO: 4119708 - RNA, 77 nt, Human
uagcuuaaggaagagucuagaacaggcaacucucuuaacugguuguuagccuuaguucagauucagccucaaggcua

SEQ ID NO: 4119709 - RNA, 101 nt, Human
uagcuuaccuggaugguguugcuuguuuuugucuuacagauccccuaugcagcaaguuugaucaggaaagaaaagcuuggcgcccaucucagcaaaagcua

SEQ ID NO: 4119710 - RNA, 65 nt, Human
uagcuuagggacaaagagcugaggccuuuacuauagcagagcuccugcucuuugucccuaagcua

SEQ ID NO: 4119711 - RNA, 96 nt, Human
uagcuucaguggcccuagacacauuuaaccuucuaagggauguucccuuaagaauaucccuuaggagguuaaaugugucuagggccacugaagcua

SEQ ID NO: 4119712 - RNA, 70 nt, Human
uagcuuccacacuucuauucagugaugcuuagaauuaacucaggcuucugucuuuaggaguugguagcug

SEQ ID NO: 4119713 - RNA, 75 nt, Human
uagcuucuaugauccacuccucugugucucauggguggggaagcagcuggggacaugggagggacauggaggcug

SEQ ID NO: 4119714 - RNA, 85 nt, Human
uagcuucuugcuguuugugcucuucaagggauuaucagaguugagccccacaucuggagcagcauucauccagcagucgaggcua

SEQ ID NO: 4119715 - RNA, 75 nt, Human
uagcuugacuuuucucagcugcacuguauuacaccugagucauuugaauugcagcugggaaagaaaaaucaguug

SEQ ID NO: 4119716 - RNA, 58 nt, Human
uagcuuggucaucguggcuguuggacaagaugcuaaagcagccacagccaccaagcua

SEQ ID NO: 4119717 - RNA, 82 nt, Human
uagcuugguugcuuaauaaaguuagauacugagaauugaugaaauuuuaaauccagcuucuaauuuagaguucccagaguua

SEQ ID NO: 4119718 - RNA, 73 nt, Human
uagcuuucuggagcaagugaccuuuacgcugauaucugaaaaucaagaaggaguuauuuauucaaaggagcua

SEQ ID NO: 4119719 - RNA, 56 nt, Human
uagcuuugcccgugcuggauuuaaacacaguggaaaccaaguuaagggcagugcug

SEQ ID NO: 4119720 - RNA, 79 nt, Human
uagcuuuuacuuacucuuuuauaaagcaucuugauguacacuuauucucaaggugcaauggaacugauagugaagggua

SEQ ID NO: 4119721 - RNA, 66 nt, Human
uaggaaaaauacagaauuauaugacacugugugugugugucuguguguguguguguguuucuccug

SEQ ID NO: 4119722 - RNA, 63 nt, Human
uaggaaagcaugagccuuguucuuaaugagcucaaucagaaagaggucauguugcacaaccua

SEQ ID NO: 4119723 - RNA, 94 nt, Human
uaggaaaggguucaugaagcuccagcccuaguacagcuggcguccauccuccgccugucgcugccaacagggcugggagauggccacucuccug

SEQ ID NO: 4119724 - RNA, 84 nt, Human
uaggaaaugcauuagcuacauaugucuuucuguggaugucugugauugucauccucuagacagauguggcuaugagguucacua

SEQ ID NO: 4119725 - RNA, 78 nt, Human
uaggaaauguuuuccccaaaugaucuucccuuguauagucaggaugaacggaagauugggcaaaagacauaaaucuua

SEQ ID NO: 4119726 - RNA, 55 nt, Human
uaggaaccagagcacucugggcacaggaauuuuuggccaguagccugguauucug

SEQ ID NO: 4119727 - RNA, 90 nt, Human
uaggaaccuuugcuccauucaacacuguauuccauuggacaaacacgcaguggccauuaaacauuguuuggaggagugagaggguuccug

SEQ ID NO: 4119728 - RNA, 80 nt, Human
uaggaagauaaaauaacuauggaauacuccuuuauauuuauaagccuaagaggaaccagaaguucauuuugugcuuccua

SEQ ID NO: 4119729 - RNA, 78 nt, Human
uaggaaggauaagggagaagaugcaaugagaggauauauuuuuucuucucuguagcagcuuccuuccugaccucucua

SEQ ID NO: 4119730 - RNA, 70 nt, Human
uaggaagguguuuuuaaggagcaguugcauucuuuccucuucugccuucuccuuccccugcgccacccua

SEQ ID NO: 4119731 - RNA, 66 nt, Human
uaggaauaugcaggguaaguuaggaagaauuuaaauauguugguuacuauuaucuugcuguuucua

SEQ ID NO: 4119732 - RNA, 55 nt, Human
uaggacaauuuauaaugaaugggugauguucauucugucacuuaagaauugccua

SEQ ID NO: 4119733 - RNA, 57 nt, Human
uaggaccaggggcugccaggaauucagcagggggcacuuugggggucccugguucug

SEQ ID NO: 4119734 - RNA, 59 nt, Human
uaggaccccugugguagaugggcuucauaauaucuauuuucauaaaacagaggucucug

SEQ ID NO: 4119735 - RNA, 61 nt, Human
uaggacuggguccccuuuggaggucacacugauugauuagugcucucuggggacaguucua

SEQ ID NO: 4119736 - RNA, 67 nt, Human
uaggagaggugaauggcacacuaaaucuuuuuggcuuccaugugaaauucuuuggcaaccucuuuug

SEQ ID NO: 4119737 - RNA, 57 nt, Human
uaggagcugcagucugacauacgaggacaaauggucacucuucccagacugcaccug

SEQ ID NO: 4119738 - RNA, 118 nt, Human
uaggagcuuacuugccuccccccugggcugagcacauacugacagcagggagccugccuuguucaacucuguauccucagccccugcugcagggccugggacauuuacauguucacua

SEQ ID NO: 4119739 - RNA, 66 nt, Human
uaggaggaauaugaaagggaggaaugaauguuauuagugcauuuacaccuucuucgauucucccug

SEQ ID NO: 4119740 - RNA, 88 nt, Human
uaggaggcugcuucucugcagaucucccaugugcuguccuagacaugucccuguggaagacugccagagucgcagauaacaccuucua

SEQ ID NO: 4119741 - RNA, 75 nt, Human
uaggagugaguuuuggauaaaaauguuuaaguguccuggugaccuuucaguuuuuguuuccaaagccauagacua

SEQ ID NO: 4119742 - RNA, 94 nt, Human
uaggagugauuagaaauaggacagugggauauagauuuaaggcuuuuggcaaaguugaaacuuguucucuugugccuauccccuagaauuccug

SEQ ID NO: 4119743 - RNA, 69 nt, Human
uaggagugcuaucggcuuagcuccugagaugaugccuaaaguugcaagagaauaucgauagcacucuug

SEQ ID NO: 4119744 - RNA, 60 nt, Human
uaggauaacccucacucagaggugguucccuaagaccucuauugcuuguaggucauccug

SEQ ID NO: 4119745 - RNA, 69 nt, Human
uaggauaauagaacucgggcuuuggaaucccucagaccaggguucaaguccaaguucugauacuucuua

SEQ ID NO: 4119746 - RNA, 66 nt, Human
uaggauagaugcugaauggguuaacuugaauuuuauuaugucauugaagacccaggcucuaucuug

SEQ ID NO: 4119747 - RNA, 55 nt, Human
uaggaucugguuacguaagagucuuuuauugaaggcuguauuugauugagaccug

SEQ ID NO: 4119748 - RNA, 56 nt, Human
uaggaugaaagugacugucagguaaagaagcaucuuccagugauuaauucaucuua

SEQ ID NO: 4119749 - RNA, 80 nt, Human
uaggaugccauuuaucacuguucagacuaaaaaaaaucuagaggcaaguuagucuguggcaugaggaaauaggcacucua

SEQ ID NO: 4119750 - RNA, 67 nt, Human
uaggauuauuuguucuauuucuguaagcaaugccacuggaauuuugauaggaauggaauuaauucug

SEQ ID NO: 4119751 - RNA, 76 nt, Human
uaggcaaggccuaaucauacugcuaagugacacauaguauaggugcuauuagauguuugacugggccuuaugucua

SEQ ID NO: 4119752 - RNA, 59 nt, Human
uaggcagaaaggaaggcaaguuuuuauaacuuugucuaaaugaacuuucuaaaugccug

SEQ ID NO: 4119753 - RNA, 63 nt, Human
uaggcagcugguucuuuccauuaaacuuuauuacuuugauguugcugaaagaauuauugucug

SEQ ID NO: 4119754 - RNA, 72 nt, Human
uaggcaucucagagauauagucccugcuuccgugaauggggaaacugaggcagagaguccugcaggagucug

SEQ ID NO: 4119755 - RNA, 58 nt, Human
uaggcaugagcuauuuguagacagaaggaaaaacagugaacuaaauggcuuaggcuua

SEQ ID NO: 4119756 - RNA, 121 nt, Human
uaggcaugcuugaguacugaguaaggagcaguguuuugauucugggagccagaucauccuaaacacauggagguagcugaggaugggaacuuggccuugacucacaaacuuaaugugcuua

SEQ ID NO: 4119757 - RNA, 59 nt, Human
uaggccacaaauaagauccuguggguauugguucucccuuaucauuauaauguggccug

SEQ ID NO: 4119758 - RNA, 62 nt, Human
uaggccagauuguuauccaugguugagcaugacucugcaauagaaacuaacaauuuggcuua

SEQ ID NO: 4119759 - RNA, 69 nt, Human
uaggccucuagguuguagccuuaauugccaugggcauuggcucaugcauggauauauacccuaggccug

SEQ ID NO: 4119760 - RNA, 57 nt, Human
uaggcucacauagcacuaagugucuuugaggcauugcaguugucuauguugagucua

SEQ ID NO: 4119761 - RNA, 58 nt, Human
uaggcuccaguguguggcgaguguucauuuauaggcagcgcucggcauggggagucug

SEQ ID NO: 4119762 - RNA, 120 nt, Human
uaggcugacuggcuuuuuuaggguaggugagaggagaagcacuuuacuuuggggugcccacauccacauuagaauguuuucucaauuucuuucucuuacuuuuuugagauuuuaggccua

SEQ ID NO: 4119763 - RNA, 67 nt, Human
uaggcuggaacuuaggcagaggcagucuagagaaaaaauuccuucuucuuucugaaaucucagucug

SEQ ID NO: 4119764 - RNA, 101 nt, Human
uaggcugggucagggucccccaggagcuggcauguggagagcugacacuuaaccaguucucacucuuugugcaggcucuuggcaaugccccacccacccug

SEQ ID NO: 4119765 - RNA, 77 nt, Human
uaggcuggugcaaaaguaauugcaguuuucgccauugagaguaauggcaaaacugcaauuacuuuugcaccaaccua

SEQ ID NO: 4119766 - RNA, 72 nt, Human
uaaugucuuuaagagcauuggguggaaaagagauguaccaacacacacaauguucugcacauggagucauua

SEQ ID NO: 4119767 - RNA, 104 nt, Human
uaauguucucuccaaacgugguuaauguacaauaagacaaagaggugauuuucagauccuuuuguuguuguuguuauucaaaccuaauguuugggauuucauua

SEQ ID NO: 4119768 - RNA, 79 nt, Human
uaauuacuggagcuagacuuuccagccugcugcuucuucuuacaucaagacagaggucauggagaguucucuggaauug

SEQ ID NO: 4119769 - RNA, 63 nt, Human
uaggguaguaaaggaguuacucauaaagcuuuauuaagugaugucaagacuccuuccucccug

SEQ ID NO: 4119770 - RNA, 84 nt, Human
uagggucuagaugaauucuggcuuggacagaaucugcaucucaugccucucaguucucucccggaacgucauucuggaauccug

SEQ ID NO: 4119771 - RNA, 65 nt, Human
uagggucucccuuuaaucuaacuaaggcucucuaagccccuguuggucccugaagagagaccuug

SEQ ID NO: 4119772 - RNA, 69 nt, Human
uagggugcuaagaugguggccagaguggaaaggacaccuuuuugucacccuggucaccaugguaugcug

SEQ ID NO: 4119773 - RNA, 66 nt, Human
uaggguggccuguaaccagcuugggaugugucuaguacaucugaaagggauugcagaaucacccug

SEQ ID NO: 4119774 - RNA, 69 nt, Human
uaggguuuauugucucucuugcuagauguuacuaaguaaacacagcuggcaucgagcauuugaacucua

SEQ ID NO: 4119775 - RNA, 101 nt, Human
uagguaaaauauauauugagaaugaaccauaguuaguuacacauggguagggaauuaaauucucacauugagugauuaucuguuucguucauaauaaccua

SEQ ID NO: 4119776 - RNA, 78 nt, Human
uagguaacuuggugcaaguaugacagccccaugguaucaccaggaucccagcuuuuuucauuuugcaucaccauccua

SEQ ID NO: 4119777 - RNA, 57 nt, Human
uagguacaaugucuuacagacccaguggaucuuggugugacuaaggcagugugaaua

SEQ ID NO: 4119778 - RNA, 71 nt, Human
uagguaccucauaaauacuacuaugagagauaaauaagauaguuacauauaaaguguuuauguagugccua

SEQ ID NO: 4119779 - RNA, 62 nt, Human
uagguauauuuuuucaguuuuaagcugcaucauggcagugaguuaacuguugaaauagcuug

SEQ ID NO: 4119780 - RNA, 100 nt, Human
uagguaucccaaggguuguuuuguccagaacacagacugacuucuucaacuacgcgggacugcaguggucugugcuucuguacacgacacccaccaccua

SEQ ID NO: 4119781 - RNA, 98 nt, Human
uagguaugcauacaugguuguugugccuguguacacacacacaaggguguguacaugugugcaagggcauguacauugaagugugugcuucagcacua

SEQ ID NO: 4119782 - RNA, 87 nt, Human
uagguauguuuugcguuuauuccaagacagcaggcuuuauuuuccuguaaacauaucagacuuucuugaaugaaugagaauaaccug

SEQ ID NO: 4119783 - RNA, 73 nt, Human
uaggucagaacaagcaguaucguugacauucugaaacaccagccaugucccagacacugcuuacucugaccua

SEQ ID NO: 4119784 - RNA, 86 nt, Human
uaggucagauaaagauggucuacagagagaaaugaagcagacuuuuucuguuucauuuacaucuguagguacucuugccccaccua

SEQ ID NO: 4119785 - RNA, 112 nt, Human
uaggucauagcaaagaaaugaaugguguagcugucagucauaagggaagucuggggaaaacagcccugguugcuggcaacugacuagaugcguuugcuuugugcugacauua

SEQ ID NO: 4119786 - RNA, 62 nt, Human
uaggucugcccuggguggaggcgcugcccuagguggugggucugcacuggguggcgggucug

SEQ ID NO: 4119787 - RNA, 57 nt, Human
uaggucuuagaacacaggaucagaacuaucuguugccugagcaacuucaagggccug

SEQ ID NO: 4119788 - RNA, 61 nt, Human
uaggugcccucugagaugauucacugcacccgugggugggauccucagcucagagcaccug

SEQ ID NO: 4119789 - RNA, 95 nt, Human
uagguguguccagccugagaguccaggcucuuccugaagaagaggucccacuccugcuguuuacggaaaagccuggggcucagcaacagcgccua

SEQ ID NO: 4119790 - RNA, 100 nt, Human
uagguguguugucaauaugcuauguauguaaaugaguuuuagcauucuuacaguuucccugcuucucuuucauuaaaguguuuuugauaacuaguuucua

SEQ ID NO: 4119791 - RNA, 70 nt, Human
uagguucagagaacugaaaauauuuuaguaaauuggcuauaaaaauguauguuuuccagucuugaacuug

SEQ ID NO: 4119792 - RNA, 62 nt, Human
uagguuccucaguuguaaaaaaugugccucucuggugggggauguugauaauggggaggcug

SEQ ID NO: 4119793 - RNA, 67 nt, Human
uagguucuaagccacagccauuuuuccuuauuuauuucuggcaaaauuugguguuguuuggagccua

SEQ ID NO: 4119794 - RNA, 78 nt, Human
uagguuggugcaaaaguaauugugguuuuugucauugaaaguaauugaaaaaacugcaauaacuuuugcaccaagcua

SEQ ID NO: 4119795 - RNA, 73 nt, Human
uagguuggugcaaaaguaauuugguuuuugucauuucagugacaaaaccugcaaucauuuuugcaccaaccua

SEQ ID NO: 4119796 - RNA, 59 nt, Human
uagguuggugcaaaaguuauugcguuuuuugccauuuacuuucaauuugcacuaaccua

SEQ ID NO: 4119797 - RNA, 79 nt, Human
uagguuggugcagaaguaauugcuguuuuugccauuacuuuuaaauggcaaaacccacaauuauaucuguaccaaccua

SEQ ID NO: 4119798 - RNA, 81 nt, Human
uagguuggugcugaaucuguuauuuucuggugguaugauaacaauauucaacuagauuuauacaauuccauaucuugcuua

SEQ ID NO: 4119799 - RNA, 78 nt, Human
uagguuugauguuauuucugaaagaucauuggcauauccuccagcuuguauuuucuuagaagcaacugauaaaaccug

SEQ ID NO: 4119800 - RNA, 59 nt, Human
uaguaacacacugguauuuggaaucucacuguuuugcuguuuugaagcuagguguacug

SEQ ID NO: 4119801 - RNA, 66 nt, Human
uaguaaggcuuaugaucagaagguucaaaguucucuacuagaucaucugaaaaugggucugugcua

SEQ ID NO: 4119802 - RNA, 56 nt, Human
uaguaaguacucaccacuuuacgugauaauaaucaucauuguuaugggugcuacua

SEQ ID NO: 4119803 - RNA, 67 nt, Human
uaguaagucauggagcugggauugagcccagggcaaucaguuccagaguccacaguccugacuacua

SEQ ID NO: 4119804 - RNA, 129 nt, Human
uaguaauauaucacaagucuuugccacuccugcauuuggaaagagacuagagaaagaaacugaaaguuguaguucauagccuuuucugugauucaggacaauaaaguaggcauaauuuggcuauguuua

SEQ ID NO: 4119805 - RNA, 55 nt, Human
uaguagcuagcauauugggcaguguggucauagaccuucagugugcuggcuccug

SEQ ID NO: 4119806 - RNA, 98 nt, Human
uaguagguguacaguuuccacuggcucugguaacagaaugcucacucacauagucugucccugagagcucaggagcugggagcugugcacgcugacug

SEQ ID NO: 4119807 - RNA, 78 nt, Human
uaguaguggaggagaucaagcacuuuagugagaauaagggcaaugucucuuuucucucaaauugcuugccuuaugcua

SEQ ID NO: 4119808 - RNA, 81 nt, Human
uaguaguucucuggauguuucucagucacucugauuggccuaguccuauuuaucugacuucuaaacauuagaguugcucua

SEQ ID NO: 4119809 - RNA, 70 nt, Human
uaguauauacguauauuccaaaggguauuuaguaaggaaaagacuugauccuaugugguauauguuacua

SEQ ID NO: 4119810 - RNA, 57 nt, Human
uaguaugucuuacucuaauacacacauucauauaucuguguguauguggauacacua

SEQ ID NO: 4119811 - RNA, 63 nt, Human
uaguauuauuugaaugauggcacaauuuuuaaagaagaauugugcauuuuuaaaucacggcua

SEQ ID NO: 4119812 - RNA, 62 nt, Human
uagucaaaccucagaauaccccugugcuaugcuuaugggugaucuuuuucugagauuuacua

SEQ ID NO: 4119813 - RNA, 85 nt, Human
uagucaauuuagaguucaauuaguuggauaaauaacauuuguaaugguuaucugucugacaggguaugaacuaaauaacugacua

SEQ ID NO: 4119814 - RNA, 68 nt, Human
uagucauuaaacaguaauuguaaaauguagugagauuaucagcccaugcaaacaacuguuuaaugcug

SEQ ID NO: 4119815 - RNA, 76 nt, Human
uagucauucagguguagguuguucaguuuccauguaguucugugguuuugagugagugucuuacuccugaguucua

SEQ ID NO: 4119816 - RNA, 60 nt, Human
uaguccacagacucuacagcaucauggccccaagucuauugcauggaauucuggggacua

SEQ ID NO: 4119817 - RNA, 71 nt, Human
uaguccugaccagcuggauguuucauuacacauuggaaucuguauuucagcuggcaucucaggagaaucua

SEQ ID NO: 4119818 - RNA, 72 nt, Human
uaguccugccccagguggauggcucgcauagcuccacaggcuuugugaacuugucuggcugggccagaccug

SEQ ID NO: 4119819 - RNA, 58 nt, Human
uaguccugggagaugggacccugaaguuccugccucaguucugccauccccagcacug

SEQ ID NO: 4119820 - RNA, 78 nt, Human
uacagggacaaaacucagugcagaagagcccucuugagcacucuccuuaacucuucuacacugaguuuuuucccugua

SEQ ID NO: 4119821 - RNA, 59 nt, Human
uacagggacaagauguuuagaaauguguacuugguuuuccucagacucugucccaugua

SEQ ID NO: 4119822 - RNA, 57 nt, Human
uacagggaccaauaauaacuauagaacagugcuguauaaauguugggcauccuugua

SEQ ID NO: 4119823 - RNA, 88 nt, Human
uacagggacuauuuaggggccaggccuucugggagccucuuuggaccaagugugucaggaggccugaguagcucuagaaagccaugug

SEQ ID NO: 4119824 - RNA, 103 nt, Human
uacagggguugagggaccaggccuggccggggcugauggacaguggggacuuuccuucucuccaugauggcuuugcaggggcuccaugguccuucucucugug

SEQ ID NO: 4119825 - RNA, 60 nt, Human
uacagguggucuuugcuccuuuuggccgggaguuggaccaaagggcagcuggcuucugug

SEQ ID NO: 4119826 - RNA, 83 nt, Human
uacaguaaaaguuacuuaugcagauucuagaagugggcuacuuggguuugaaucugaguuccaccauuuaggaucugucugua

SEQ ID NO: 4119827 - RNA, 59 nt, Human
uacaguagaaugcggugccaguggaaaaauccuacucagcauaucuaaauucuaaugug

SEQ ID NO: 4119828 - RNA, 61 nt, Human
uacaguagacaggaccacaggcaugaguguuagacugggcugggguuaaacugucacugug

SEQ ID NO: 4119829 - RNA, 59 nt, Human
uacagucaagcauaagaagucauacuaaaugaugauaucuaaaggaaugcuugauugug

SEQ ID NO: 4119830 - RNA, 69 nt, Human
uacagugaccuagaauaaauacaauggcaguaucuuuuuuguucuaagguuauuuuuaguuucacugug

SEQ ID NO: 4119831 - RNA, 61 nt, Human
uacagugaguggcagagccagagauucaaaccuaggucuuugugccccuaucacucaugua

SEQ ID NO: 4119832 - RNA, 56 nt, Human
uacagugcuagaaccugcuguaaugaaagaaguggcagcagaguaaugcauucgua

SEQ ID NO: 4119833 - RNA, 60 nt, Human
uacagugugcugugauguaguauacaauaauagaguguaauauagcauuguaugacugug

SEQ ID NO: 4119834 - RNA, 67 nt, Human
uacaguuguuuuuugguuguguuucugguuggauaauccagaucagacuuugugacuaggagcugua

SEQ ID NO: 4119835 - RNA, 61 nt, Human
uacaguuucucauuaugcucuccagucuaguccauguguugagcagagugagguagcugug

SEQ ID NO: 4119836 - RNA, 123 nt, Human
uacauaauaaaaacaagaggcugguuaauguucuuuguuauguguacaucugguugagcagaauauugcuuagcuuuuuaccaucaaaguuacacuuuugacucagcacaugcuuugaaugua

SEQ ID NO: 4119837 - RNA, 68 nt, Human
uacauauggaauuuggagauuaggcauugagucauuuaacucucugugcccauuuaagucuuugugua

SEQ ID NO: 4119838 - RNA, 77 nt, Human
uacaucugucuccucaucgccuguucacucacugagacacccguaagugccacuacagagaggaggagagagcugug

SEQ ID NO: 4119839 - RNA, 67 nt, Human
uacaugaagacaucuggaauccugaguaguuggcaagauugaaucaggaguacuggugucuacagua

SEQ ID NO: 4119840 - RNA, 116 nt, Human
uacaugauaaagaaacuguagagggaagagaaauuugaaauugaagauauuuacccaucuuccaaugguuucuagauuuuuccuacuuucuuucugaccugaaauuuuuucauuua

SEQ ID NO: 4119841 - RNA, 69 nt, Human
uacaugaucagcuaauuagaauuaggaucagauugagugguucuuuuucaggacugguugacucgugug

SEQ ID NO: 4119842 - RNA, 88 nt, Human
uacaugcagacaaagauuaagguauuguuagcucaaagaaggaguuuacuugagagcuaugaauuauuuuaauaacuuugcuguagua

SEQ ID NO: 4119843 - RNA, 120 nt, Human
uacauggugauaccauagcguguuuaacuguucauguauugaaaagcauuuuaauugcuuccaguuuugguuuuguuuccuaauaaugauuguuuccaagcugcuaugaagaaucaugua

SEQ ID NO: 4119844 - RNA, 67 nt, Human
ugaucuguuauacaacaaguaacagggccuugucagugcauuguuuucuuguauauagccucgguca

SEQ ID NO: 4119845 - RNA, 64 nt, Human
ugaucuuuucccuuuuagucuuuuuggaacacuucuuuggcgcccuaacaggggaaaaugauca

SEQ ID NO: 4119846 - RNA, 57 nt, Human
ugaucuuuuuggucauuuggguuaguuugcacuucucccaggagaagaaaagaugca

SEQ ID NO: 4119847 - RNA, 112 nt, Human
ugaugaaacugccacaccaagagguuaguaaaugaguucaaagucaaggaaacugugagugacagagccagacuuugaacucagcagccucauuccaucgucagugcuauua

SEQ ID NO: 4119848 - RNA, 76 nt, Human
ugaugaaguaauaaacucuuuuuaucucccuaauucccuucccucauagggcaagguaaagauuuauugaguguca

SEQ ID NO: 4119849 - RNA, 65 nt, Human
ugaugaauguuugauauguuggcuuccuccagaauauauggaaguuucuauuauuacauucguua

SEQ ID NO: 4119850 - RNA, 60 nt, Human
ugaugacuuaaggacaaacucaccuuucaaccaaagaaucgaguuucccuggagacauca

SEQ ID NO: 4119851 - RNA, 69 nt, Human
ugaugaggcauaugcuacacauuugugggaagaaugccacaagguagugugucacauugcaucucauua

SEQ ID NO: 4119852 - RNA, 69 nt, Human
ugaugaguuuggagucugagcuuuaaagcccacauucagaaagagaagccaggcuccugaggcugguca

SEQ ID NO: 4119853 - RNA, 78 nt, Human
ugaugauuacacugaguuaggccccugcugauggcagcacuccugcugcagcggcauggucuuuggggauaauauuca

SEQ ID NO: 4119854 - RNA, 61 nt, Human
ugaugcccugagccaccaaugccauuucccagcaggacuaguaggcauggcuggggcagca

SEQ ID NO: 4119855 - RNA, 72 nt, Human
ugaugccugauauuagaaagguaucucugcauacuuacuggguugcugagagugcucuuugaugucacauca

SEQ ID NO: 4119856 - RNA, 60 nt, Human
ugaugcgaacuuucugauggugcaaaggaacauccuucaccaugcacagcuguucuauua

SEQ ID NO: 4119857 - RNA, 55 nt, Human
ugaugcuucacgcugaauaugcuacaaaugauguagcaucaggugguuuggcaca

SEQ ID NO: 4119858 - RNA, 81 nt, Human
ugaugcuuuauucauucgauuuaaccuaguuccagucuuccagauucuuucuagugagucugaaugaguugcccaggguca

SEQ ID NO: 4119859 - RNA, 69 nt, Human
ugauggaaauguuccugaucccugauuucauggacaagcugaaaucaguguguaaauauuuugccauca

SEQ ID NO: 4119860 - RNA, 69 nt, Human
ugauggcacacaggagagugcuggagguuagugucaguuuaucuuaucucuguacuuccuguugccuca

SEQ ID NO: 4119861 - RNA, 65 nt, Human
ugauggccuacuuuccaggcaggaaugauauuaaaaauauuuagcaaccugugacagaggcauca

SEQ ID NO: 4119862 - RNA, 83 nt, Human
ugaugggagguaaaaugagucuccauuauaugccaccuuuauuaggcaaaguaauuuuuaguucauucuaucuuguccuguca

SEQ ID NO: 4119863 - RNA, 58 nt, Human
ugaugguuuaugauagaugggaaauaguuaacuuuuuccuauuaauguuaaccaguca

SEQ ID NO: 4119864 - RNA, 87 nt, Human
ugaugguuugggggaaaauacugguuuuggagaugcugauuguuuccaaucuaagcaguuuuguucaguguuuuccccaaauuguca

SEQ ID NO: 4119865 - RNA, 65 nt, Human
ugauguaagcacuuucaacucuggaucucccauucacaugucugguuggaggugcagugcaugca

SEQ ID NO: 4119866 - RNA, 59 nt, Human
ugauguaucugagcugcuuagguuuaugaaaggucaccuggauauuuucaguugcauca

SEQ ID NO: 4119867 - RNA, 91 nt, Human
ugaugucgguauuuacuuuguguuuauauguguaaguguauguucauauauacuuucaugucuauacauauuuauguacuucuaugcauca

SEQ ID NO: 4119868 - RNA, 67 nt, Human
ugaugugacucaggaauuccacagcuguuggucagccuggcaguucugggcauaucuagucacaucg

SEQ ID NO: 4119869 - RNA, 64 nt, Human
ugauguguaguuggcuaucauuuguuuuuaaaaguaaggaggaauacaauccagcagcacuuca

SEQ ID NO: 4119870 - RNA, 87 nt, Human
ugauguguugucagaucaaugauauguauguugucaaaaacauguauguucaagcaaugauuauggccuuuauacccuagcacauua

SEQ ID NO: 4119871 - RNA, 101 nt, Human
ugauguucauggauauuucgaugaagagugagauauuccucauuacaauuauucccaugcgauguuuauuucauucuuuaucaggagcuguuuugucauca

SEQ ID NO: 4119872 - RNA, 70 nt, Human
ugauguugcuuaauacaauggauagcagcuuuuuaaaacaggcaaagcucuuuuccaaguauugacguca

SEQ ID NO: 4119873 - RNA, 98 nt, Human
ugauuaaagcuuuuuagaaaccaaauguuacacauaggcauaaauggagcaaaauauuuuaaugcguguuuggcagguucagaaacacuuuauaguca

SEQ ID NO: 4119874 - RNA, 74 nt, Human
ugauuaacaaugugggauuuacaaagaaaaauaauaguaauaaucuacugaacuuggugaaugccacaugauca

SEQ ID NO: 4119875 - RNA, 77 nt, Human
ugauuacuuaagacaauaaucuuugaguagaguugagcuauagcuuaagacaggcucaaagauuaaugugguuuuca

SEQ ID NO: 4119876 - RNA, 59 nt, Human
ugagcaguggggccugcauucugccacccccauuugaaaaccaugcccuagcuagcuca

SEQ ID NO: 4119877 - RNA, 66 nt, Human
ugagcaucacaugagcuaagacauguaaagugcauaagagcagugucuggcucauggugggucuca

SEQ ID NO: 4119878 - RNA, 125 nt, Human
ugagcaucuagagaggggaguguuuucaggaagggauagacgguaauauaguagggcgcauagacuugccauauugcaaagugucugccaagaguccuccugaauaauucuucauuuaggucuca

SEQ ID NO: 4119879 - RNA, 130 nt, Human
ugagcaucugccucacuauggauuaugcuguauuugcuuucugacaaaagguaauguuagaaaauaucuaacauuguuuuucacagauuaugaacaaaccugcugcuaaaucauagacaaauugugcuca

SEQ ID NO: 4119880 - RNA, 90 nt, Human
ugagccacugcgcccggccugcucucuguucuuaagcuuguaaauaacaaaaccaggagaugugggcugaacgguuuaguguagugauca

SEQ ID NO: 4119881 - RNA, 61 nt, Human
ugagccagccuucuucugaggucaguggaaagagcucagaaugggagggguugacugcuca

SEQ ID NO: 4119882 - RNA, 56 nt, Human
ugagcccauguagcacuuccauugaugucuuuggagcggccuugcacaugggcuca

SEQ ID NO: 4119883 - RNA, 58 nt, Human
ugagccccaggaaauugaggagaggcagagauagcugcugcuccucccuaagggcuca

SEQ ID NO: 4119884 - RNA, 61 nt, Human
ugagcuagaagcaguaauagaaauaggagcauguauggaacucuccuuuauuguuugcuca

SEQ ID NO: 4119885 - RNA, 61 nt, Human
ugagcucaagccauccuucugccucagccuugugaggagcuagaacuauggcuaugugcca

SEQ ID NO: 4119886 - RNA, 61 nt, Human
ugagcuccugauucucagagauagagacuaaucaugucuuuguuugcugcuuuaggguuua

SEQ ID NO: 4119887 - RNA, 56 nt, Human
ugagcuccuggugagaggggauaccagugaagacuaucccagcacccaggagugca

SEQ ID NO: 4119888 - RNA, 58 nt, Human
ugagcugagaucgcgccauugcacuccagccugggugacagggcgagacucagucuca

SEQ ID NO: 4119889 - RNA, 58 nt, Human
ugagcugagaucgugccauugcacuucagccugggugacaaagcgagacuccagcuca

SEQ ID NO: 4119890 - RNA, 99 nt, Human
ugagcugagucuucacagacauugcagacugaacccauuaaaacuggguugcugugucuuaguuugcaggguguucagagugacaaggcacaugucuca

SEQ ID NO: 4119891 - RNA, 67 nt, Human
ugagcuucaggaccauuucaggcaaugguuaauuaacuauaggugucccuuuguguucugaaacucg

SEQ ID NO: 4119892 - RNA, 82 nt, Human
ugagcuuccaguggaauauauaggggauuugagucaacauuugaucuccuucuaaagucccuuccuauauugcagaggcuua

SEQ ID NO: 4119893 - RNA, 94 nt, Human
ugagcuugaggaauccacaauuuuaugauuuaggagccugcuuugcauaacacugguuucacuuuccugggaguugaagugauuuucaggcuua

SEQ ID NO: 4119894 - RNA, 67 nt, Human
ugagcuugcugaaagucccaaaucucaugaaguaaaaucuuucaugauugauucucugcagguauca

SEQ ID NO: 4119895 - RNA, 89 nt, Human
ugagcuuggcaaagccauugcuuguucuggcggccaguauucauuugugggccuguccuauacaggcggcugcugugcccugagguuca

SEQ ID NO: 4119896 - RNA, 76 nt, Human
ugagcuuuccuaucauccuccagugguuuauucauuuauuuauuuauuaaacuguuggcacagaaaggaaaguuca

SEQ ID NO: 4119897 - RNA, 117 nt, Human
ugaggaaacugaggcucagagaggguaaauugccuaaggucagacagcuauaaacagauggaacuggaguuugaaccaggaacaauuagcucuuuauuccaaaccucauuuucuuua

SEQ ID NO: 4119898 - RNA, 85 nt, Human
ugaggaaauuuuacuuuggauacaguacuuugcagugcagauaaaaacauuuaagcagguaaauuaucaaagguagagaauauca

SEQ ID NO: 4119899 - RNA, 63 nt, Human
ugaggaagagaacagucaccaugcacagagcauuucugugugccaggcacuguauucaccuca

SEQ ID NO: 4119900 - RNA, 88 nt, Human
ugaggaagggccucuacuuccuucagagccuuuaacaaagagccccagacaaccuaaaggcucuaacaaggagagagacuggucuuua

SEQ ID NO: 4119901 - RNA, 64 nt, Human
ugaggaaguuguuucucuucuaaaaccuggucaguagagacuggaggagaugacugcuucuuua

SEQ ID NO: 4119902 - RNA, 73 nt, Human
ugaggaauaauugucguagcugguauuuauugaacaauuacuacaugcuagguacagaucuaaauucuccuca

SEQ ID NO: 4119903 - RNA, 71 nt, Human
ugaggacaccucuucuguuugcuuuacucaucacagauucaugaauaaagacaaacaggggagccaccuca

SEQ ID NO: 4119904 - RNA, 64 nt, Human
ugaggagaccagggcuuacagcaguagcuaacuuaguagcuuugugaccauggccuaggccuca

SEQ ID NO: 4119905 - RNA, 65 nt, Human
ugaggaggcagccuaucccuuagcagagcucaagcacugugcuaggugauccacugcucucuuca

SEQ ID NO: 4119906 - RNA, 66 nt, Human
ugaggaggggccacagagcagaaggcuguaaguacuuggucuccaguguucugucgucuuucuuca

SEQ ID NO: 4119907 - RNA, 66 nt, Human
ugaggauauuuguuuuucuuucuuaaagcuacaguucagagcuugggaaugcuaacagaugacuca

SEQ ID NO: 4119908 - RNA, 69 nt, Human
ugaggaucauuuuagucuagucuccucagaaagcuuagcuccugagagaaguagcuugauuugagcuca

SEQ ID NO: 4119909 - RNA, 101 nt, Human
ugaggcacaauccauucauuuauucuuugucuuugcaauugaguuaacaaugugguaauuaacacugauuguagagacacuuagauaagauguguuacuca

SEQ ID NO: 4119910 - RNA, 68 nt, Human
ugaggcacauguguguauacguauuuauaagcauaacaauuuauagauacauuguuauauuugucuua

SEQ ID NO: 4119911 - RNA, 76 nt, Human
ugaggcaccacugcacugcauccugggcaaaagggucucacucuguugcugaggacgcagugcaguggugccauca

SEQ ID NO: 4119912 - RNA, 101 nt, Human
ugaggcaggagaaucacuugaaccugggaggcggagguugcagugagcugagaucaugccacugcgcuccagccugggggacagagugagacucugucuca

SEQ ID NO: 4119913 - RNA, 100 nt, Human
ugaggcaggagaauugcuugaacccaagagguggagguugcagugagccuagauugcugccacugcacuccagccugggugacagcagaacucugucuca

SEQ ID NO: 4119914 - RNA, 101 nt, Human
ugaggcaggagaauugcuugaacccacgggguggagguugcagugagccgagaucaugccacuguacuccagccugggagacagaacaagacuccgucuca

SEQ ID NO: 4119915 - RNA, 101 nt, Human
ugaggcaggagaauugcuugaacccgggaggcggagguugcagugagccgagaucgugccauugcacuccagccuaggcgacagagcgagacucugucuca

SEQ ID NO: 4119916 - RNA, 101 nt, Human
ugaggcaggagaauugcuugaaccugggaggcagaggucgcagugagccaaaaucgugccauugcacuccugccugggcaagaaagcaagacucugucuca

SEQ ID NO: 4119917 - RNA, 100 nt, Human
ugaggcaggagaauugcuugaacucggaggcagagguugcagugagccgagaucacaccacugcacuccagccugcgcaacagagcgagacucugucuca

SEQ ID NO: 4119918 - RNA, 75 nt, Human
ugagcccagaagaguauguguuugcugcgcugaaccuguacacagacaucaucaacaucuuccuguacauccuca

SEQ ID NO: 4119919 - RNA, 55 nt, Human
ugagcccagucugucugacaugcaaccuugcccuucacaggucagccuggccuca

SEQ ID NO: 4119920 - RNA, 100 nt, Human
ugagcccuagaugcacaaaaauacaugugugugugugugugauaugucauuuuuuaucucacugcaaauauuauguauauaaauguuuucuuuuuacuca

SEQ ID NO: 4119921 - RNA, 78 nt, Human
ugagccugaguuaauucccagcuccagcguggagagggcucuguucacaggcuuggaggugggggacacggaggcuca

SEQ ID NO: 4119922 - RNA, 79 nt, Human
ugagccugugagccccaacuccauccaaggccugccugcaaucuggugccaccugauggcaguuguucccuccagcuua

SEQ ID NO: 4119923 - RNA, 89 nt, Human
ugagcgagaguguaggaccagaggggugggccugguuuaugucuguggcuaugggccaguuauuucaccucugugccuuccuuuccuca

SEQ ID NO: 4119924 - RNA, 68 nt, Human
ugagcuagguuuuccagucgcauggagcacuuucucacauauuccacgcuacugauuuaucucgcuua

SEQ ID NO: 4119925 - RNA, 82 nt, Human
ugagcucaaggcugugugccccagaugaguagcuugagugcacugaaucugcuuccuaauggggaacaagccacuugacuua

SEQ ID NO: 4119926 - RNA, 90 nt, Human
ugagcucagagccuuuccugcucuggcauucaugcaauagagaaugcuggaagcugagaucugccaugacaggggcaggcugcuggcuca

SEQ ID NO: 4119927 - RNA, 86 nt, Human
ugagcuccaagaagccaggcacugugccucgcucccugcugcaaacucagcaccgggcacggugucuggugcagacuagaugcuca

SEQ ID NO: 4119928 - RNA, 87 nt, Human
ugagguauuuacaaaauaaaucuguuguaauguuuuuuaguacaguuaauugaggaauggcgcaaauagaugacaguauuuacuuca

SEQ ID NO: 4119929 - RNA, 55 nt, Human
ugaggugauguggaaaaugaucccucucugagagagcaugcacuacuucaucuua

SEQ ID NO: 4119930 - RNA, 100 nt, Human
ugagguggagaaucgcuugaacccuggagguggagguugcagggaaccaagauugcaccacugcacuccacccugggugacagagcgagacucugucuca

SEQ ID NO: 4119931 - RNA, 86 nt, Human
ugagguggauaggaaaugcugucuuauuguaguuuuaauuugcauuucuuugauuacuaguaagauuggguauuuuucauaucuca

SEQ ID NO: 4119932 - RNA, 61 nt, Human
ugaggugugucugauguuguccacaguucccucccacaucugacagcacagaaauauuuca

SEQ ID NO: 4119933 - RNA, 67 nt, Human
ugaguaagagaaugucuggugcucaagaaauauaaaugcuuaaccuugaaacacagauuucuuacca

SEQ ID NO: 4119934 - RNA, 90 nt, Human
ugaguacauguacugggaucuguguucuaggaagacaccauaucucuugggcuuugguagacacagauugauuaggugccauguaucuca

SEQ ID NO: 4119935 - RNA, 118 nt, Human
ugaguaccauaacauggcuucacaaucuacacuggcacuguguuuagaugggauuggagccaaauaauucuauuugaauugucacaggcuaaagagaaaaagaauagagauggacuua

SEQ ID NO: 4119936 - RNA, 88 nt, Human
ugaguacguugacauuucaagauugaauacaguauuuccaaaaccaacugggauacaaauucaugucugaauuaaacaaaugugauua

SEQ ID NO: 4119937 - RNA, 130 nt, Human
ugaguacucaaaaaaaaaaaaaaagaugucuugaaacagcagaguggagaugagcaccuccuuugaugguaccagccugggugcugaucuucacuuggcugccugagacccugagcuuuucugagauuca

SEQ ID NO: 4119938 - RNA, 79 nt, Human
ugaguacucacaagaucugguuguguggcacuucccuuccccccucucuuugcccugcaccugccaugugagauacuua

SEQ ID NO: 4119939 - RNA, 68 nt, Human
ugaguacugggaccaaaaguugggcucuacuuccugaacucaaagagcuugcuuuucccaguacugca

SEQ ID NO: 4119940 - RNA, 61 nt, Human
ugaguagaguuuggcaauguaauauagcucaagucuauaacaucucccugacuuuugcuca

SEQ ID NO: 4119941 - RNA, 71 nt, Human
ugaguaggagaagcaaaagaauggccaaguuucaugauuucuguucugauacuuguuucuauguuugcuca

SEQ ID NO: 4119942 - RNA, 79 nt, Human
ugaguaguaacacuucccgaccauauggcugucucuaaaccuucauccuuagcaggugugugugggagugugauacaca

SEQ ID NO: 4119943 - RNA, 55 nt, Human
ugagucaccuugguauuggcaggggcugcuuuguucugcauugagggcugucuca

SEQ ID NO: 4119944 - RNA, 118 nt, Human
ugagucaguagaauaagauugcauaggcggauuuguggcuccaggaaguggcuugaacucaggcagucagguuucagagccugcaaucccaauuggcguucuauucgucuacuacuca

SEQ ID NO: 4119945 - RNA, 68 nt, Human
ugaguccuuggugcaauguauacugaugaaagaaaauuaaucagcuaauacauucuauuaagcauuua

SEQ ID NO: 4119946 - RNA, 92 nt, Human
ugagucuauuuucacccaaaggagcuugcuauuauucauguucacuggcugcugagugauucauacgcugcuuuuugggggagauguauuca

SEQ ID NO: 4119947 - RNA, 76 nt, Human
ugagucucuuaauugugugugcaugcacuguguguucauguguuuguguguauguaugcaugcuacaguuuucuca

SEQ ID NO: 4119948 - RNA, 60 nt, Human
ugagucugaagaauuagagaaggcuucuauuuaaauccuuugcaaaguuauuuagacuca

SEQ ID NO: 4119949 - RNA, 67 nt, Human
ugagucuucagcauagcauauggcuaagagauccaguucagagccagauugccugcuuuggaacuua

SEQ ID NO: 4119950 - RNA, 87 nt, Human
ugagucuucugcucuggucauaaguuuacaaucaaagugucagacaggcugcauuaucaucuggaagcuugacugggguaaaguuca

SEQ ID NO: 4119951 - RNA, 81 nt, Human
ugagugacugucuucucaguuucucuaggaugugacauaauuaguuccauucuagaagaacgagaaauauaaguuaauuca

SEQ ID NO: 4119952 - RNA, 61 nt, Human
ugagugccaucuuugccccuauuuuagggauaaggauucugaaauguggagaugguaagua

SEQ ID NO: 4119953 - RNA, 73 nt, Human
ugagugccauuucuggguaguaugguuaguuuuauaagaaacuuucaaaauauuuucagcaauggcuauauca

SEQ ID NO: 4119954 - RNA, 77 nt, Human
ugagugccucugcagguccgaguucaucuaccuggggaacagcgucuucaucgacugggacgugcagauguacuaca

SEQ ID NO: 4119955 - RNA, 81 nt, Human
ugagugcuuacuaugcuuuaacccucuuauauuuguaauccaucauaauaugcagcaugaugaaguaaguacuugcauuca

SEQ ID NO: 4119956 - RNA, 62 nt, Human
ugagugggggugcaggcagggcauuguggggugcccuggaagcugcugcaugcuccuguuua

SEQ ID NO: 4119957 - RNA, 55 nt, Human
ugaguggguauuuuguuuccagcuauacagaaguugcauaauagcuacccacuca

SEQ ID NO: 4119958 - RNA, 88 nt, Human
ugaguguagaugcuguagaaguggcaacacucagaaaaaacaguugaggacuauuucugcuuuugcuaucuuaaaagcgauacacuua

SEQ ID NO: 4119959 - RNA, 62 nt, Human
ugaguuacuugagaacuaagccagggaccacaucuccuccaaauuauucuuaaaguagcuua

SEQ ID NO: 4119960 - RNA, 70 nt, Human
ugaguuaggaaugcagaugcauaauaaauugguugggauuuauuaauacaugcaccugcauuucugcuua

SEQ ID NO: 4119961 - RNA, 87 nt, Human
ugaguuaguucuucccauuugugguagugaauuuaguaauuaguucuuuuaccaaggcaaauggucuaauaauggaggaauaaauca

SEQ ID NO: 4119962 - RNA, 67 nt, Human
ugaguuauguuugcuuggaacuugugagcuguaacugcuucacauuuucuuaggaaacuuaaauuua

SEQ ID NO: 4119963 - RNA, 93 nt, Human
ugaguucaggacaguguuucugaguuccagcucccuuggaaguaauucaucuggguuugagcucauucagaaccaugcuguacugucgccuca

SEQ ID NO: 4119964 - RNA, 67 nt, Human
ugaguucauuguguguggucuucuuugcugcaacaaguaaaaagcccagcuucauaagaugccuuca

SEQ ID NO: 4119965 - RNA, 58 nt, Human
ugaguugaaagacugacuucugcugagggaauuuuaagcagaggaagcugguaacuca

SEQ ID NO: 4119966 - RNA, 55 nt, Human
ugaguugagaggagccugaagauagaucuggauggucaggcuccgcauuaacuua

SEQ ID NO: 4119967 - RNA, 59 nt, Human
ugaguugcuaucuagauccagaguugacacuuuuaaccacugugcuguauuguaacuca

SEQ ID NO: 4119968 - RNA, 68 nt, Human
ugaguuguagucuuuuaugugcaucucaggccauuguugguaacuggucacaugugagauuaaacuug

SEQ ID NO: 4119969 - RNA, 63 nt, Human
ugaguuucgggcucuagauggaauugagaagguccaacuugcucagagggcccuggaggcuca

SEQ ID NO: 4119970 - RNA, 125 nt, Human
ugaguuucuugaaaauaaaucugcauggcuuccuaaauugcugaccaaguauauuccagauggaagucauuuaucagcaauuuacugagcaaugcuucagccagaaguauuuccacauaaauuca

SEQ ID NO: 4119971 - RNA, 81 nt, Human
ugaguuugacaggaucaugaaccacuggaauuccaguccacccuggggaaacauguuguucagaccugugauauaugcuca

SEQ ID NO: 4119972 - RNA, 65 nt, Human
ugaguuuuugccuucugcaucuuccauuagaccaugaaacacuugaagacaguggcuaggacuua

SEQ ID NO: 4119973 - RNA, 91 nt, Human
ugauaacuaugauuucuugaaaggugugcauccaucucuuuacuguaaagaauagaagagaaauagugccacuguuuaaagaaugguuuca

SEQ ID NO: 4119974 - RNA, 74 nt, Human
ugauaagccaugccuaaauaauaaguguugucaaaguagucagcacuaaauauuugagagguguaggcugaaca

SEQ ID NO: 4119975 - RNA, 93 nt, Human
ugauaagguggaacaggugaaugacaaccacaauggugcugggguuaauuuccuuuaaccaguaggaugucacuuuccuuuuuacuguuuuca

SEQ ID NO: 4119976 - RNA, 77 nt, Human
ugauaaguauguauuguaugaaugagguuugggguuucugcucuccuaaugccuuucuguacuauaugaacuuuuca

SEQ ID NO: 4119977 - RNA, 69 nt, Human
ugauaauaucuaagauguauugagcacuugcuuucugccuggcaauguucuaagcacuuagauucauca

SEQ ID NO: 4119978 - RNA, 73 nt, Human
ugauaauauuuacuuuuuggcagcauugaaguaaugaaauguuuuucaaaggcauugccaauaaguagaauca

SEQ ID NO: 4119979 - RNA, 85 nt, Human
ugauaaugauugacucaauaugccagaggggaaaguagaaaucucagcauucccuuccucauguuguuuaucuuugacauuauca

SEQ ID NO: 4119980 - RNA, 75 nt, Human
ugauaauugcugggaggauguguguucuguggacugccauagcacaugggaaugcauuuugcccaggcaagguca

SEQ ID NO: 4119981 - RNA, 67 nt, Human
ugauacacaugacucuggcuacccagagauccauaacucucugggucaugcaaaguuauguuauuca

SEQ ID NO: 4119982 - RNA, 72 nt, Human
ugauacagcuugugaaaugucaccacuaggguucaaacccaagugcuguccaguuucacaggugaucuauua

SEQ ID NO: 4119983 - RNA, 85 nt, Human
ugauacaguaucuaggaguaucuaaaauauaaauacuuugauaaaguauuuauauuuugggagcuccugacuugauaaaguuuca

SEQ ID NO: 4119984 - RNA, 75 nt, Human
ugauaccuuccaagugcuugccgcuuuguacauuccaaaacacuuucaugcaaagcaacccuuggaaugguuuua

SEQ ID NO: 4119985 - RNA, 69 nt, Human
ugauagaaaggaaauuaauuggauuaccaaaggacaguaggugaccccaauuacuuuugcuuuuaauua

SEQ ID NO: 4119986 - RNA, 81 nt, Human
ugauagauaacuggagagagcaugagucaaauggagcaacaaggagcacgcuggcucagaugcucuuccagugcaauauca

SEQ ID NO: 4119987 - RNA, 87 nt, Human
ugauagaucgaucaggaagccugcacugagcuggcacaacuuuauauuuuaugucagguccagaggcuccuuauuacuuugcuauua

SEQ ID NO: 4119988 - RNA, 67 nt, Human
ugauagcagagaaaagguugugaauaacccucccugggagagccacuaacuuguucuaccuguuuca

SEQ ID NO: 4119989 - RNA, 71 nt, Human
ugauagcucuuuugcaaagugacuauuauaugauguguucauuauguucaugcuuaugcagaaugcaauua

SEQ ID NO: 4119990 - RNA, 67 nt, Human
ugauagcuguacacauuuugcggguacaugugauauuuuuauacauguauacaauguguaaugauca

SEQ ID NO: 4119991 - RNA, 66 nt, Human
ugcuauagauguuaagcuucuagaaggcagggaaccuaccugaucuuagcagcuagccuguaugca

SEQ ID NO: 4119992 - RNA, 65 nt, Human
ugcuauauaauugcuagaauucaucacugaguaucugaauuacaguguguagcaauaugcuggca

SEQ ID NO: 4119993 - RNA, 56 nt, Human
ugcuaucagauuaagcauuuuccuugugaaaaauggaaaguguuaaguaaguagca

SEQ ID NO: 4119994 - RNA, 68 nt, Human
ugcuaucagcacagggccuggcacauaagagacgcucaguaaaugccuuucugugaaugaugauggca

SEQ ID NO: 4119995 - RNA, 70 nt, Human
ugcuaucuuuaccccaaaauguaaccccuuaaugcaucaaagggguuacauuuugggguaaggauaagua

SEQ ID NO: 4119996 - RNA, 60 nt, Human
ugcuaugcuugacucuggaauaaaauguugcauucuugcaggugcaugagucaguaagca

SEQ ID NO: 4119997 - RNA, 57 nt, Human
ugcuauuaccugcuggacagucagcaguggggcaccaucacuguggcaggugaagca

SEQ ID NO: 4119998 - RNA, 80 nt, Human
ugcuauuugaaaagagucuagagaaaaugauagcaggaacuuauucuaugaccuuuauuaucucuauaucuaccaaggca

SEQ ID NO: 4119999 - RNA, 75 nt, Human
ugcuauuuuggucuacagcacuugggaacagggaaaguccggguaccugcucugugcugagaacaaaaguggaca

SEQ ID NO: 4120000 - RNA, 69 nt, Human
ugcuauuuuuuaucucauaggucaaguuacaggaaguaaagcacuugaaacccugagaugauaauagca

SEQ ID NO: 4120001 - RNA, 63 nt, Human
ugcucagauaacaguacaaggugacacgcagcaccuguuuguucuugcaacaguuauuaggca

SEQ ID NO: 4120002 - RNA, 82 nt, Human
ugcucagauaccaggccaacaaccauuugacaucacucaauuuccguaucugucaagucuaguugcuggcuuuucucuagca

SEQ ID NO: 4120003 - RNA, 81 nt, Human
ugcucagcacucuucagucucccagaguucccacaggcacccaaacaaaagccccuagagucuggagcugcaggcugggca

SEQ ID NO: 4120004 - RNA, 83 nt, Human
ugcucagccugguguguucccguuuccuucacuggguccuggaguuugucccacugaaugaggagccccagagugucugagca

SEQ ID NO: 4120005 - RNA, 66 nt, Human
ugcucagcugcagcaggcaccauuuacuuuguagucuuugugaaaggcgcccccuagagcucugca

SEQ ID NO: 4120006 - RNA, 59 nt, Human
ugcucagcugcucuguauucuuguagcagcuauuauuacauacugaagcagcugaagua

SEQ ID NO: 4120007 - RNA, 65 nt, Human
ugcucagguuucaguuccugaucaucuccucuguuuggauuugucagugaguuggguccugagua

SEQ ID NO: 4120008 - RNA, 129 nt, Human
ugcucauuaagggaugccagggccagcucuggugguuccuggggaggcugcguccuucccugcuucugcaugucaugaggcagcaggaagguuuccccugcaccugucuguccuggcucccucugggua

SEQ ID NO: 4120009 - RNA, 67 nt, Human
ugcucccaucuucuuucugcaaaguccccaaaacaagauguuugguguacaaaacaagaugggggua

SEQ ID NO: 4120010 - RNA, 58 nt, Human
ugcuccuggaugagguacuccacgauguugguguggcccgucacucuggccgggagca

SEQ ID NO: 4120011 - RNA, 107 nt, Human
ugcuccuucaccaguuaugcaaauuuucaacuuauuuaaugugaucugaagaggugagucuuccaucucuggguugcaguuagauagggcaugaugguguacaagua

SEQ ID NO: 4120012 - RNA, 78 nt, Human
ugcuccuucagagaagcaaaggcagauuguuuggaucaagagaauugcccaaggcuucauugacuguucagaggagca

SEQ ID NO: 4120013 - RNA, 73 nt, Human
ugcuccuuguauaugcuaauggugccauuccugcaguuuuuaaggcaggaaucgcauaguauauauuucauca

SEQ ID NO: 4120014 - RNA, 78 nt, Human
ugcucgcugccaggcuucagggaacgcagucuguagacaucuccaacugucaccuuucugugguuugucucagcggca

SEQ ID NO: 4120015 - RNA, 108 nt, Human
ugcucuaauuuguuuacccaaaugugacaacgagaugaacaguuuugcaaaagcuugacaagugcugauuuaucucccuuugauauuacuuuaugaacauaacaggua

SEQ ID NO: 4120016 - RNA, 57 nt, Human
ugcucuauuaauuuuaacgaugccauaaagugggugaucagaaaauguaauggagca

SEQ ID NO: 4120017 - RNA, 74 nt, Human
ugcucuauugccuaggcuggagugcagugacacgaucucggcucaccgcaaccucugccucccggguucaagca

SEQ ID NO: 4120018 - RNA, 60 nt, Human
ugcucucagagaggagugcgugugauuuccaccuuauugcauuauccucucugaagacca

SEQ ID NO: 4120019 - RNA, 82 nt, Human
ugcucuccagauacuaaaugcucuauaaauaugacauguccagacacuggauguuccccauacaauagaugcucuggaggua

SEQ ID NO: 4120020 - RNA, 80 nt, Human
ucuauucugagcugcaacacuaacaucugggcuucuuuuguuugcauuuucaaauguaguuuggggcuagauuuauuaga

SEQ ID NO: 4120021 - RNA, 76 nt, Human
ucuauugaauuuagaagggauaugacuguuuuugaaaacuuaaggcuaucaguccucucuggguuucuuauuuaga

SEQ ID NO: 4120022 - RNA, 60 nt, Human
ucuauugugaacaguaaaaaucauuuaguuggcacauugccaguuucugcucacaguuga

SEQ ID NO: 4120023 - RNA, 65 nt, Human
ucuauuuaaaaugucucugacugcagucugcccucuagaaugugucagaaguacuuuuggaaaga

SEQ ID NO: 4120024 - RNA, 75 nt, Human
ucuauuucuguaguagguuguaguucuugucaaaguccuacugacaaaguccuacuaccuauugugcagaagaga

SEQ ID NO: 4120025 - RNA, 64 nt, Human
ucuauuugguguuuucaggaauauacgugaaaagacaugccauguuuugguaaauaccaucaga

SEQ ID NO: 4120026 - RNA, 56 nt, Human
ucuauuuucuugccaaaacugcugcacaauugguuguagaggggucagagaaggga

SEQ ID NO: 4120027 - RNA, 58 nt, Human
ucuauuuuguuuccagcucuacuuucagguccauccauagagcuuggcacagaguaga

SEQ ID NO: 4120028 - RNA, 65 nt, Human
ucucaaaaacagugaccccaguuacauaugaaucccaaauucagaugcuggagucacuuuugaga

SEQ ID NO: 4120029 - RNA, 72 nt, Human
ucucaaaaccauuagucaaucagcaagaaacagaacccgugcuuuugcugugcaggcuggugacaaaugaga

SEQ ID NO: 4120030 - RNA, 71 nt, Human
ucucaaagggaguacagcccuggagacaugagagaaggcgucauucagacugcuggugcuucccucagaga

SEQ ID NO: 4120031 - RNA, 75 nt, Human
ucucaacccgcagggccuggggccgggccucggccucuuuuccccguggcagccgcaggcccuguguggcaggga

SEQ ID NO: 4120032 - RNA, 85 nt, Human
ucucaaucuacuuguuauguaaauguuaauauaaaacugacagaaauaugcaucugcagaacuuuaugagcaaagagaacugaga

SEQ ID NO: 4120033 - RNA, 74 nt, Human
ucucacaaccggaccauccugccagccucuguucccgccaaggagucugaagccagugguaguccggccagaga

SEQ ID NO: 4120034 - RNA, 58 nt, Human
ucucacacaacauguuacuuugcuuuuauuugcuuuugauuuugacaguuguguggga

SEQ ID NO: 4120035 - RNA, 100 nt, Human
ucucaccaggugaccuugggcucaaucgguauucuugucccugagccuuaguuucucuucugugcucuggggaaauggauauguaccuggucaugugaga

SEQ ID NO: 4120036 - RNA, 76 nt, Human
ucucaccucagugugugcugacucacacccaugccaggagagcagcuugggcagugagcagcaccaugaggcuaga

SEQ ID NO: 4120037 - RNA, 75 nt, Human
ucucacugcuaagugcucaugcacauuuauaguuccagcaggacuaugucuuuccaugggcacccaaguaggaga

SEQ ID NO: 4120038 - RNA, 74 nt, Human
ucucacugguucauccccuuccaggaagaacagaguggccuguaagguuucaggaaggaggugaacaaggaaga

SEQ ID NO: 4120039 - RNA, 94 nt, Human
ucucacuuccacaauuacuuguuagcugacuguguaguaggugaggauugauuacuuauuuaucaccaguuagcugacugugcaguaggugagg

SEQ ID NO: 4120040 - RNA, 73 nt, Human
ucucacuugugccucauaacacuccuggaguuaggauaacucuaguuaggggugucaugaggaguaagugaga

SEQ ID NO: 4120041 - RNA, 57 nt, Human
ucucagagaucuuucugcaugugaugaaaaucaaggcaguacaugaggaauuugaga

SEQ ID NO: 4120042 - RNA, 72 nt, Human
ucucagaguuugaaucuggaguuucugaaaccuaaaguaguuauuaaacuuucccuggucuagacucugaga

SEQ ID NO: 4120043 - RNA, 69 nt, Human
ucucagaucauggaucuauuacuuggaucaaaaaguacugcacagggaaguagauacuaugaucucuga

SEQ ID NO: 4120044 - RNA, 56 nt, Human
ucucagcaagagacuuuuaugucugccuuguggcugcaguuugucuuuugcuuagg

SEQ ID NO: 4120045 - RNA, 74 nt, Human
ucucagcaguauccaaugagugaagaacacuugacugacucuugggucaccucuauuacuuauuguacucugga

SEQ ID NO: 4120046 - RNA, 78 nt, Human
ucucagcgucucuuaggacugacuguucaaaggcuccucagcaaaugagcccuugaacaguccuaagagacccugagg

SEQ ID NO: 4120047 - RNA, 70 nt, Human
ucucagcucagucuugaagcacuggcaauauuuuagaauaugaaccuccagaugcaaaguugggaagaga

SEQ ID NO: 4120048 - RNA, 89 nt, Human
ucucaggaccccagcccuccugaggcugccgugcuuuaucauaaaggcaaggccaagccaucagugugugcgagcaggagguaaugaga

SEQ ID NO: 4120049 - RNA, 67 nt, Human
ucucaggccuuaauuaauuuggcacuauugguuaauuagcuggaggugucauuuaguuaaucagaga

SEQ ID NO: 4120050 - RNA, 72 nt, Human
ucucagguucuuggugagcauuugguccccucugccaggacugcaggauucagaacagcucacaaucucaga

SEQ ID NO: 4120051 - RNA, 61 nt, Human
ucucaguccuuggcaaguucucagucuaaacggaaagacagacauggaccaagcacuguga

SEQ ID NO: 4120052 - RNA, 57 nt, Human
ucucaguuucuuagucugagcaacagaaaggaugaagugcaguguggaagacugaga

SEQ ID NO: 4120053 - RNA, 70 nt, Human
ucucaucaucaacccugggacugggaauuacacuaucaccuccccugguucucaggccuuugggauggga

SEQ ID NO: 4120054 - RNA, 64 nt, Human
ucucaugguuugugauucaaauauauacuauucuuuauguuucaugaacccacaagcugagaga

SEQ ID NO: 4120055 - RNA, 58 nt, Human
ucucaugugaagaaagaauuucugucacuuuggugaugaaucuuugauuuacauggga

SEQ ID NO: 4120056 - RNA, 77 nt, Human
ucucauguugaauuaucguucccacaauucccauguguuguggaagggauccagugggagguaauugaaucaugggg

SEQ ID NO: 4120057 - RNA, 55 nt, Human
ucucauucaaucuugauagcuuaaaguugccauuaagcuaagaggaaaagugaga

SEQ ID NO: 4120058 - RNA, 70 nt, Human
ucucauuguggaaaugaaugcauguggauagcugugguauccauuaaugauuauuucugugccauguaga

SEQ ID NO: 4120059 - RNA, 65 nt, Human
ucuccaaauagugucacauugugaggaacugggguuaggacuucaacacaugaacuuuuggaaga

SEQ ID NO: 4120060 - RNA, 73 nt, Human
ucuccaagaugugcucugcaaucaguucuuuuuuacucuauaaaaaacacacugagaauagagacauugggga

SEQ ID NO: 4120061 - RNA, 79 nt, Human
ucuccaaugccuuuuccaucucaggcagccaagucucugcuucugacuccacugaagagacuggagggggcaucaaaga

SEQ ID NO: 4120062 - RNA, 68 nt, Human
ucuccacguccagugaucuagggagcuggacuuugagugguaaggucuuuggucacugguagugguga

SEQ ID NO: 4120063 - RNA, 62 nt, Human
ucuccagccagcccugucuucuaaacucauucauccaagugucagaaggcuccuguuggaga

SEQ ID NO: 4120064 - RNA, 61 nt, Human
ucuccagcccuuagauaaaccuggccguguacauuggcagccaggaccgggggcugcggga

SEQ ID NO: 4120065 - RNA, 62 nt, Human
ucuccagggcccccgagcguuggcugaggaccagagccagccagugagcggagccugggaga

SEQ ID NO: 4120066 - RNA, 55 nt, Human
ucuccagguagauaugucaggaaucauuugaaauacuuauaugucugcuggggga

SEQ ID NO: 4120067 - RNA, 65 nt, Human
ucuccaugaaggaauagaauggguucuccuugaaaaaggucaacccaucucuccugucaugcaga

SEQ ID NO: 4120068 - RNA, 55 nt, Human
ugcccucccacauuauggcugugaauagaucuucauaguugggugaggaguggca

SEQ ID NO: 4120069 - RNA, 57 nt, Human
ugcccucuguccucaaucuugcuuaccagcaacaacagcaaaugggacaggaaggca

SEQ ID NO: 4120070 - RNA, 69 nt, Human
ugcccugccugagagacaguaauuguguuuucaaccacauuucacagcacuuuucaaccuggcaaggca

SEQ ID NO: 4120071 - RNA, 93 nt, Human
ugcccuuaacuuguguguuuacaacaaugccaacagcaugcugggggacauuauagacucuuccaguuuugccaugguaacacuuguggggca

SEQ ID NO: 4120072 - RNA, 86 nt, Human
ugccggcaaacgcugcucuguuaauugcuguaauaaacagacuuuauuauaucccuuugcaguaaauggauuauguugucagggua

SEQ ID NO: 4120073 - RNA, 69 nt, Human
ugccuaauaauuugauuuauuuguagcauuugcaucuagagaaugcuuuaagucucaguuuguuagcca

SEQ ID NO: 4120074 - RNA, 58 nt, Human
ugccuacaaaauagcgugucuuuucacggggagaggauuuguugaguuuuagugggua

SEQ ID NO: 4120075 - RNA, 57 nt, Human
ugccuaccuggauuggcugaagcacaaaggacaaauuuuagaggacacagggaggca

SEQ ID NO: 4120076 - RNA, 78 nt, Human
ugccuacguuuacauguuuuucucuuacaggccacacagcauguccugugggacuggagaaauauggagaaugcagca

SEQ ID NO: 4120077 - RNA, 59 nt, Human
ugccuagcugugagcacccaggcugugggauuuacagccgggcguccgccgcugacgua

SEQ ID NO: 4120078 - RNA, 56 nt, Human
ugccuaguucggugguuuagagaauauggaguguuucugggcuuucuuauaaggca

SEQ ID NO: 4120079 - RNA, 64 nt, Human
ugccuauucugauuuguccauucaguggauuuucuccuccugaaugacugaagucacaauugca

SEQ ID NO: 4120080 - RNA, 74 nt, Human
ugccucaaauauuucauauauuuagaaccuuuuugggggccuuugaauaguguuuucaguauacuuuuggggua

SEQ ID NO: 4120081 - RNA, 72 nt, Human
ugccucaacauuccugccauaaauuuuuuaugggcgccugaaaauaauggauugguuggaauauggugggca

SEQ ID NO: 4120082 - RNA, 76 nt, Human
ugccucagugugguuucuuauuugcagguugcuuuuaacaauauagaugcuuuccuggauagagaacauggaggca

SEQ ID NO: 4120083 - RNA, 71 nt, Human
ugccucgucugguucuagaagcugucuguucacaaagaccauaacuaagucaguuuuucccagacgaggca

SEQ ID NO: 4120084 - RNA, 60 nt, Human
ugccucucucagcuugcugcaacugucuuucccaauggauaccugccacagagaaaggua

SEQ ID NO: 4120085 - RNA, 88 nt, Human
ugccucucucugaauuguuuaaguuauuuugugucuuuggaauaucaaucagucuuggaggggugacgcaacagauucggagaaggca

SEQ ID NO: 4120086 - RNA, 99 nt, Human
ugccucucuguuuggccagaccugugggccuagucuggccuagucuugacagaggacaagaaagaagaggcuuaugugugugugcaagagagaggggua

SEQ ID NO: 4120087 - RNA, 95 nt, Human
ugccucugcaguuguguuugcugaguuuucuccuaagagaaauguuucuuggcaagaagcuucagcuaaacaaauuaugccauggaagagaggca

SEQ ID NO: 4120088 - RNA, 84 nt, Human
ucuccuucucucgugaggucucuacuuaguccagaaaugccaggaaugggccccaguguggaccuucacacagagaugggcagg

SEQ ID NO: 4120089 - RNA, 73 nt, Human
ucuccuucucuuccccuuaguuuccuuuaagagugauaaaaauggaaaagggggcugagguggaggaaggaga

SEQ ID NO: 4120090 - RNA, 97 nt, Human
ucuccuugacuuauucuaugaagcauauauuuuauauguugucauaacuaugagggcauuuucuaaaaauaugugcaaugggaugaguaaugggaga

SEQ ID NO: 4120091 - RNA, 63 nt, Human
ucuccuugggacaugagaaauauugaccaaauuaugagauacuauuaacagucaccaaggaga

SEQ ID NO: 4120092 - RNA, 77 nt, Human
ucuccuuuuucuccuucuuucugguuaugcaguuccugucccugacuuuggauaagaaaaugagaaaaaucaggagg

SEQ ID NO: 4120093 - RNA, 68 nt, Human
ucucgcauguacacaccaugauuuauuuacccauuccacuguugaugggcacuggggugauuugcaga

SEQ ID NO: 4120094 - RNA, 119 nt, Human
ucucgccacccccagaggccauggggcagaaggccucccagcuccugaagcuuaagcaugcuuucugcagggggcugaggcuguucugaggacucacauuggccucauccguggcgagg

SEQ ID NO: 4120095 - RNA, 76 nt, Human
ucucggggccucaguuuccccaccuguagaaugaggguaacagaggccuaggaauggguaaauugggcacccgaga

SEQ ID NO: 4120096 - RNA, 123 nt, Human
ucucgguuugaugaaccuugauggcucaucugaucauugaacaggcacuggagcuggaaauacuuucagauauuuccacuggcuuucagugaucuugaaagcuagaaagaaaaaagaaagaga

SEQ ID NO: 4120097 - RNA, 55 nt, Human
ucucuaaacuuauaugaacuauagagcuuugcagugguuuguauaguuuugggga

SEQ ID NO: 4120098 - RNA, 55 nt, Human
ucucuaaaugauuguguacucccugauaauuuggggagcugcuaacauuuaugga

SEQ ID NO: 4120099 - RNA, 94 nt, Human
ucucuaacuguuuguauacucaucccagagcaugaauuaaauguuugugacuuccguuugacucuugcuuugguggcugaguguaauuuugaga

SEQ ID NO: 4120100 - RNA, 65 nt, Human
ucucuaaguggguacuggggcuugguggggcgggucccagagccuaaaacgacuccacuggaaga

SEQ ID NO: 4120101 - RNA, 75 nt, Human
ucucuaauguggucugcagaccaguugcaucuccugggaaacucagaaaugcagaaucucagaccccaccugaga

SEQ ID NO: 4120102 - RNA, 61 nt, Human
ucucuaccuuccuucagagcccacauccuuguccauguuuguugaaugaagaaaggagaga

SEQ ID NO: 4120103 - RNA, 81 nt, Human
ucucuacuggcaaggcuuagucagagggugcugggugaccaucagggcccuggugacuggggcuggccugacaguguuuga

SEQ ID NO: 4120104 - RNA, 70 nt, Human
ucucuaguauaaaagcaaccuaugacuuaguguugaaguuaaggauugucuggcuauuuaugcuuagaga

SEQ ID NO: 4120105 - RNA, 63 nt, Human
ucucuaugaguuaugaaguaaaugauuucuuacagaaaucagaucuuacacaauugugagaga

SEQ ID NO: 4120106 - RNA, 82 nt, Human
ucucuauggucugcagcauuucucagcuuuuguuuuaauuaguuugucuuguggaacacaguuuagaaaaugcugcuagaga

SEQ ID NO: 4120107 - RNA, 80 nt, Human
ucucucaaauguucuguaaaaguguggaugugggagcauaaacucagcaaagcagccacacuguuacagaaugaguaaga

SEQ ID NO: 4120108 - RNA, 64 nt, Human
ucucucaaauuuauccauuuugaagcuuacuuguaaaucuauuguauguauggauaaugagagg

SEQ ID NO: 4120109 - RNA, 58 nt, Human
ucucucaagaacagacgccacgccuucauccaaguguuugauuuguucauugaagaga

SEQ ID NO: 4120110 - RNA, 59 nt, Human
ucucucacaugaggggagcauucacgauugcauuuucucaacucuguucaagugagagg

SEQ ID NO: 4120111 - RNA, 82 nt, Human
ucucucacuauggguuuagaccugucuaauuucuauagggaauuauauagaaaauuauagaucuagugccugcccuggagga

SEQ ID NO: 4120112 - RNA, 72 nt, Human
ucucucacuggguauaaaugaguaaccauuagcacuaguugcuauaaggggguauucuauagccaugagggg

SEQ ID NO: 4120113 - RNA, 55 nt, Human
ucucucacuggugccucuguuggccgacgcuacccagaaggcagccagugagaga

SEQ ID NO: 4120114 - RNA, 62 nt, Human
ucucucauacauagacauuuuguucuguccuugguuagaacaaauggggccuuguaugaaga

SEQ ID NO: 4120115 - RNA, 89 nt, Human
ucucuccugauagcaacuuggacaagcccuguguguccagauagagguggugacaugacacagggggcauucuaggaguuggggaggga

SEQ ID NO: 4120116 - RNA, 57 nt, Human
ucucuccuggauuaagcugccucagaccugagugcagcaagugaauuccaagagaga

SEQ ID NO: 4120117 - RNA, 66 nt, Human
ucucucgauacuuagaugagccagggucaccaagaaugcuggcugacacaaagguaucgaaugagg

SEQ ID NO: 4120118 - RNA, 91 nt, Human
ucucucggccuggaggccccuggcggccucugcucccaagcggggagucgcagccaggcuacagcgggcuugauccucagugcugggugga

SEQ ID NO: 4120119 - RNA, 73 nt, Human
ucucucuaacucccuggguuaggaauguacagacagaauauugucuguaaucuuccccagcucagaugagaga

SEQ ID NO: 4120120 - RNA, 55 nt, Human
ucucucuauuucaucucaucugauuucucacuuucagugcucaggaauagagaga

SEQ ID NO: 4120121 - RNA, 64 nt, Human
ucucucuccagucaggaacucugacgagguacacuggugaggagaagguggcaggagaaugagg

SEQ ID NO: 4120122 - RNA, 77 nt, Human
ucucucucuucagagauaccuugcugcuuagagggaaacuugacacuacccaugccugcauaucuuugaaagagagg

SEQ ID NO: 4120123 - RNA, 61 nt, Human
ucucucugcaugacuucaguuaggucuuuucuuccaaagaaaagagaauccuguacagaga

SEQ ID NO: 4120124 - RNA, 112 nt, Human
ucucucugcuuccgggaaguccuauuccacugaccaccuacugugugcacaggcuugugcugaguggugcuguggaggggcagaagggagcuggaaccuggugauggagaga

SEQ ID NO: 4120125 - RNA, 61 nt, Human
ucucugaagccagcuuuggaagacaccguggggucuucucuaugagcuggucuggcaggga

SEQ ID NO: 4120126 - RNA, 61 nt, Human
ucucugagaaguuccuuugugaaaguacaaaagucucacagaauugauggaaaucucagga

SEQ ID NO: 4120127 - RNA, 58 nt, Human
ucucugagcaccuaagauauaucaugaauccugggugauaaucauuuuugcucagaga

SEQ ID NO: 4120128 - RNA, 90 nt, Human
ucucugauagauaauuuggcaucauauugaggagugacaaaaacaagcuuaaaauaguaugggaugcuaagagacaauuuuuaucagagg

SEQ ID NO: 4120129 - RNA, 74 nt, Human
ucucugaucagcaccacucuuauucccucagaaauaucacaaacuuggcagaugaggaaauagaggcucagaga

SEQ ID NO: 4120130 - RNA, 78 nt, Human
ucucugauugcuuuuuggggcuuggggcuugaaaaugccaggcauuucagacuccaaauucauaagaggcagugagga

SEQ ID NO: 4120131 - RNA, 85 nt, Human
ucucugauuugguagcucucagguagagcccaagaauguguuuccaacaaguucccaggucaugcugaaguugcuaauacagaga

SEQ ID NO: 4120132 - RNA, 92 nt, Human
ucucugcaaucaguauuucacauggaagcucucgagacauuuagcagcccacuaggauucuguagaacuucuguugagaaaacuuguugaga

SEQ ID NO: 4120133 - RNA, 58 nt, Human
ucucugccagccaaagucaucaccauaagacacugguugggggccuggcaggcggagg

SEQ ID NO: 4120134 - RNA, 66 nt, Human
ucucugcccucaggguaaugaucacauaugcaaugugagauaacaaaauuaucuucagggcaauga

SEQ ID NO: 4120135 - RNA, 60 nt, Human
ucucuggcugccuggcagcucugggcacauguucaacagcccaugggaggggccaagaga

SEQ ID NO: 4120136 - RNA, 75 nt, Human
ucucugggcuugaagucugagugucagugcaaguggagggguaccacugacuacuuuaggauuagcguucagagg

SEQ ID NO: 4120137 - RNA, 97 nt, Human
ucucugguuuaucuuucacagcauaaugaaauauacuuuuaucauuagagucaaguagaaucuuauuaagacuugcugugcaagguaacuccaggga

SEQ ID NO: 4120138 - RNA, 55 nt, Human
ucucuguaagagaggcuuucauguaguacuauaguaugaagccacauugcagaga

SEQ ID NO: 4120139 - RNA, 63 nt, Human
ucucuguacaguacaugccgugugugugugugugugugugugugugugugugugugagagaga

SEQ ID NO: 4120140 - RNA, 67 nt, Human
ucucuguagguuuuaaggagaguuaaaauggaaauuaacauuacacuuaucuagagccauggagaga

SEQ ID NO: 4120141 - RNA, 90 nt, Human
ucucuguccaugaacagcacaaucugagucccagacaccacuacuuuuggggaucuguuccucaaggucugugugaauuuauggcaguga

SEQ ID NO: 4120142 - RNA, 113 nt, Human
ucucuguuacucuccuuugcacuguccuucagcucuugguaaauguuugggucucacaauaaacauuucuuaaacaucuacuguaggcuggagguaguguuggauuccaggga

SEQ ID NO: 4120143 - RNA, 84 nt, Human
ugaguuaggugcccuaggucagugaugucauauaauauauacaggaacaauagaaaugcuacaacauuaucugggguugacuca

SEQ ID NO: 4120144 - RNA, 93 nt, Human
ugaguuagguuuguaaaugucauggugaaaaaauauuaauaucucaaaacgucuauuuuuaaaauugaucucauggcuuaacaagcccacuua

SEQ ID NO: 4120145 - RNA, 72 nt, Human
ugaguuguaaaagcacuuucuguauucuggauccaaguccucuguuagaaaugugcuugcuuuugcaacuua

SEQ ID NO: 4120146 - RNA, 67 nt, Human
ugaguuguagaguuaggauuggacauuagaaguuauccuuguucagucuccucauuuuacaaauuca

SEQ ID NO: 4120147 - RNA, 60 nt, Human
ugaguugugcuuccuccuuaaacugucauguugugagaguugaugagaggagcaauuuca

SEQ ID NO: 4120148 - RNA, 62 nt, Human
ugaguuguuaaagacauuucugguagaaaguaauacuggguugaaauuucuuugacaacuua

SEQ ID NO: 4120149 - RNA, 57 nt, Human
ugaguuuagugugagacuuaucugauuaaguauaguuucauaagccacuagaucuca

SEQ ID NO: 4120150 - RNA, 77 nt, Human
ugaguuuccugugaaaagagaaggcaguugaauuuugguuaguuguacugccuguagcucuucaucucaggaacuca

SEQ ID NO: 4120151 - RNA, 90 nt, Human
ugaguuugggggugggaagaugagaaguggggcucccuucucuaguagcaaagggugaggagacugagucuccuuucuacugccagguca

SEQ ID NO: 4120152 - RNA, 85 nt, Human
ugaguuuguccacaucugcuucacgugucucauucuccuuggacaaguggcaaugacaauggcagagguagaagagggcacacca

SEQ ID NO: 4120153 - RNA, 75 nt, Human
ugauaaacauuuguacauuggcaugucuccucucagaacucacccccaugaaaggcagccaccguacagauauca

SEQ ID NO: 4120154 - RNA, 60 nt, Human
ugauaaagacugcagaacuguacauuuucauauguguaauauguugcagacuuuuuauua

SEQ ID NO: 4120155 - RNA, 68 nt, Human
ugauaaagcagaaaguaaauguguauccaggaugcacuggauguaacacccacuuuuauagcucauca

SEQ ID NO: 4120156 - RNA, 98 nt, Human
ugauaagaggaaauaaaacucuuguaauuaacuagaaagauauaauguauugaucuguaaauuaaagaauuuuaaauaaugaguguuuucucucuuca

SEQ ID NO: 4120157 - RNA, 63 nt, Human
ugauaaggcaaauguguucuuuuaguucccgucaggaggaaggaucagaacaguuugcauuca

SEQ ID NO: 4120158 - RNA, 72 nt, Human
ugauaauucuccugugugcuuauggagaacaggccuacuuagccuaaacauuggagcauuaggagguuauca

SEQ ID NO: 4120159 - RNA, 82 nt, Human
ugauacagguguacacacaugcaaaaacuuccugagcuguacacuucagaucagcacucauugcauguaugugaucuguuca

SEQ ID NO: 4120160 - RNA, 118 nt, Human
ugauacgguguucucaguuuccauugcucauugaauugauucuucugaauuugcagauaauguuccaugcugacuuucugcacccaucgaggagucaguuagcugggacaauguauca

SEQ ID NO: 4120161 - RNA, 80 nt, Human
ugauacugcuguaggagccacaacaggaaggcugcaaguauccagcuucaugccagcccugugugguaacagcaccauua

SEQ ID NO: 4120162 - RNA, 82 nt, Human
ugauacuggaaaagagguuaaccagguguguuucguccucaauaaagaaacagaaacccagaaaaccucucuucagguacca

SEQ ID NO: 4120163 - RNA, 82 nt, Human
ugauagaaacaaagugagccauucugcucaguggacuuuuggcuuuaagguggcaaagaugguucucaccauguuuucuuca

SEQ ID NO: 4120164 - RNA, 78 nt, Human
ugauagaguaucgcuuuacagccugcuuccucaguagcugaucaccaggcaaaaugucagagcagcuggugcucauca

SEQ ID NO: 4120165 - RNA, 77 nt, Human
ugauagaugaaggugaugagaugguaagauauacauuaugacuaacucuuacaauaccacaucaccucauuauguca

SEQ ID NO: 4120166 - RNA, 56 nt, Human
ugauagguucucaaugaaugcugauguaugaacaauggcauuucauuuaaccauca

SEQ ID NO: 4120167 - RNA, 66 nt, Human
ugauaguuuauucaucaccaucuucuguuacuuggcagagcucagaaacuuuugaugaguguauca

SEQ ID NO: 4120168 - RNA, 88 nt, Human
ugauauagaauccuggugagugaauauguucccugauaucccuagauacaaagacaaaucucaaucuuuaaaacuuugauucuguuca

SEQ ID NO: 4120169 - RNA, 70 nt, Human
ugauaucuuucaaagccaaaaguaauuagaaauagagaaaucuaguuauugcuuuaugggaaaaauguca

SEQ ID NO: 4120170 - RNA, 80 nt, Human
ugauauguaaggaagaagggaaguuacuuaaggaaaucucaccaugaguuauuuaaaacuuuucauuaugggauauauca

SEQ ID NO: 4120171 - RNA, 74 nt, Human
ugauauguacauugauauuaaaaauauaggaugcugacuuuuggauuuuauguacaauguuaauguaaauauca

SEQ ID NO: 4120172 - RNA, 100 nt, Human
ugauauuuagcaacugccuggggucaggcacuggccagucagcacacaggcugcugugagcaguggcauggccgugcugcuaugggcuggcugcauguca

SEQ ID NO: 4120173 - RNA, 101 nt, Human
ugauauuugacuuuugaaccagacuagaugaggcagagcuucagcacauauuuuaccagugucuucagcaaaugccuuucucuuugcaaagcuccauauua

SEQ ID NO: 4120174 - RNA, 65 nt, Human
ugauauuuuuaauguggcagcauuuuaguauauuuuccuauuaaauggccaagguuaaaaauaca

SEQ ID NO: 4120175 - RNA, 81 nt, Human
ugaucacaguguagaccuuuuaaaugaacuguuuaguucacuuuuucaguguuuuguugaggaguuuuacaucuguguuua

SEQ ID NO: 4120176 - RNA, 57 nt, Human
ugaucacuguaugcugcaggauuugaaaagagacugugccacagccugcagugguca

SEQ ID NO: 4120177 - RNA, 129 nt, Human
ugaucagacaguaucuguuacguuuuacucuugggauacaaauuuuaagagacacuuugguaaauuagacagugucuagaaaaacaaaguaucugaaagagaagacagaagaaaugacugacuagauua

SEQ ID NO: 4120178 - RNA, 56 nt, Human
ugaucaguaaagucaguugucacuugguagaguggcagggcuggcugcugcacuca

SEQ ID NO: 4120179 - RNA, 66 nt, Human
ugaucaugcuuaaaguuggagucaugagcucacccaguccaagacuccccacguuaaggaauguca

SEQ ID NO: 4120180 - RNA, 56 nt, Human
ugauccaaugggagaagcuguucaguaaaugcauagaauauuucucauugucauca

SEQ ID NO: 4120181 - RNA, 57 nt, Human
ugauccagcggggcuagaggaaggcuggguugacaguguuuuuaaugggcuggagca

SEQ ID NO: 4120182 - RNA, 86 nt, Human
ugaucucacuccagugauuguuuuaauaacugagauuuccauauaaauauccucugaauaguugaggcauuacuguaaugagauua

SEQ ID NO: 4120183 - RNA, 62 nt, Human
ugaucucucugggagcugacagugaggauuagaugccuuaaggcagccgcucagagagguua

SEQ ID NO: 4120184 - RNA, 61 nt, Human
ugaucugacucaaggcccuggggugcagaaaaaggucacuaagccccugggugaguucuca

SEQ ID NO: 4120185 - RNA, 61 nt, Human
ugaucugggucaugacucagcgugagucugagggucggguugcaguccguggcccaaguca

SEQ ID NO: 4120186 - RNA, 79 nt, Human
ugaucuguggugauauucugauaauaagauuuugaucuaacggaggauacaguucuagucaaaaaucaccuauagauca

SEQ ID NO: 4120187 - RNA, 59 nt, Human
ugaucuucagcacagguucuagacaccgcuguucucaggcccacuguguugaaagauca

SEQ ID NO: 4120188 - RNA, 59 nt, Human
ugaugaagaaauguagagccuaguaaacgaaaguuuauaggaucucacccuucugagca

SEQ ID NO: 4120189 - RNA, 63 nt, Human
ugaugaagucguggcaggcuugcacgauguccgucaucugcaggaagcuggcggcugacauca

SEQ ID NO: 4120190 - RNA, 76 nt, Human
ugaugacuuguauguuauagauuugugauuacauuaaaacuuaaaauuucacaaaucuauaauaugcaggucauca

SEQ ID NO: 4120191 - RNA, 64 nt, Human
ugaugauugugcaggacauaaaggacagaaagcccaagccuauuuaagaccugcaucaucauua

SEQ ID NO: 4120192 - RNA, 83 nt, Human
ugaugcagccucuaucaaucagcuuguuggguuggcucuagcucuuuuaagcagcucuuaacaaagcauggagggaaacauca

SEQ ID NO: 4120193 - RNA, 68 nt, Human
ugaugccacauucaaauauuaugugaguuccugugaaacgagaugauauuugcaaugugcuugcauca

SEQ ID NO: 4120194 - RNA, 59 nt, Human
ugaugcugaugcccccaucacugagaacaagaauucucucccugagguuguuagcauua

SEQ ID NO: 4120195 - RNA, 77 nt, Human
ugaugcugcagccaugaggaugggggaguccaagggucgcgcccuucuccccugacccugaugaggcacuugcauca

SEQ ID NO: 4120196 - RNA, 95 nt, Human
ugauggaaaagcucguguuaguauuggcaaauuuguuuggaagaaaauauauuccagcaaaauuccaaaaugcuaauuuaaguuuuucucaguca

SEQ ID NO: 4120197 - RNA, 65 nt, Human
ugauggaaauuugggaagcuuucuuaaaauucugcuuaccacagagcuuuucuugguuuccuucg

SEQ ID NO: 4120198 - RNA, 77 nt, Human
ugauggaauauggcaguacguugaaaauuuucaccuuggggauuauucacugaaaauagcggauguccuuuuuauca

SEQ ID NO: 4120199 - RNA, 83 nt, Human
ugauggcaggaggauaucagggggucaccucaccagggccaggagggccucugugggccgggccugcugccuuccugaccuca

SEQ ID NO: 4120200 - RNA, 76 nt, Human
ugauggggagaaaaaugacuucugcaaggucauuuggaaagucugugacugagcugcagagugucacuucugguca

SEQ ID NO: 4120201 - RNA, 90 nt, Human
ugauggugaagcaugggcucugaagucagucugcuuguaucccagucuuaccucuagcugagugaucuagggccuaguuauguaaccuca

SEQ ID NO: 4120202 - RNA, 107 nt, Human
ugauggugagucauuuucacagaggccauugcaaaguuugccuccuguagcugauucugcagcacaggagugcugcuauuguuguuucauuuggugucuuaucauca

SEQ ID NO: 4120203 - RNA, 69 nt, Human
ugaugguuaaauugguuauuuauguuguguauaagguuugcaaggcuacuuaaccagcuugauucuuca

SEQ ID NO: 4120204 - RNA, 60 nt, Human
ugaugguuauuacauuccucuugccaguaauugguauaggaugugcauaugaccuaauca

SEQ ID NO: 4120205 - RNA, 74 nt, Human
ugaugguucauucugaagucuucagcacuuguauuggugauagcugaagauacucaguuaugacagaaucauca

SEQ ID NO: 4120206 - RNA, 112 nt, Human
ugaugguuugcuuaauuaggcagcauagcuguuggaaauccuauaguucagugauugucccuuuaacauaucugugagguuuuguugugaaaacuugauuaagaaacuguca

SEQ ID NO: 4120207 - RNA, 66 nt, Human
ugauguagaugacagacucgcuucaaguuaggacuaacacugugguguucuuuguccucuaaagca

SEQ ID NO: 4120208 - RNA, 69 nt, Human
ugaugucacaugcauuaaaaauacuugugagugccucuucuuuacaggcccuguugaugcuguauauua

SEQ ID NO: 4120209 - RNA, 67 nt, Human
ugaugucugcauuauuggaaaguccuucauguugagaugaaaguuucccaaaguaaugugaauauca

SEQ ID NO: 4120210 - RNA, 77 nt, Human
ugaugugcuaauuugggcaacuuaauuuacauucuggcagucaguguagauaaguaaaagcccaguuaaguauuuua

SEQ ID NO: 4120211 - RNA, 104 nt, Human
ugaugugugaaaaaauuagaguucagagaaacaagaaagaauuuccaaaguaaucuuuagaaaucagguuuuuagaaaguucccucugauauuuaagcauauua

SEQ ID NO: 4120212 - RNA, 121 nt, Human
ugauguuaagguaguguucaccagguuucucuacugcuaaguuaguauuuuucccuuuauaauuaauaaguaauuugugcagagauacuuugagacuauguaaauaucuauuuccucauua

SEQ ID NO: 4120213 - RNA, 71 nt, Human
ugauguuaucuggaggccugucuuaucccuaccacagagugggggguaggugggguguuccagaguuuuca

SEQ ID NO: 4120214 - RNA, 58 nt, Human
ugauguuuuccuuuggcuuccuugcugagucaugacuagauuugccugggaaagcuca

SEQ ID NO: 4120215 - RNA, 88 nt, Human
ugauuaaaauaugcauugcuugaggguaggaaccuaccuuaagguucuuuuuauuccccucaagcacuugcugcauggccuaugauca

SEQ ID NO: 4120216 - RNA, 65 nt, Human
ugauuaaaaugcauguauuaucuagaugagcuagcugcaccaaucuggaugguacagcagaguca

SEQ ID NO: 4120217 - RNA, 68 nt, Human
ugccugagaagcgcggcgucggcguggguccugcgcagccugccccgcgagcgcccgcugcaagugcg

SEQ ID NO: 4120218 - RNA, 64 nt, Human
ugccugccucuggcagcccugcccagcccaccucugucucugcagggcaucccggaggcaggca

SEQ ID NO: 4120219 - RNA, 58 nt, Human
ugccugccuugcugcuggacaggacacagaaaucucuuuccagauauuaagacaggca

SEQ ID NO: 4120220 - RNA, 73 nt, Human
ugccugcucucuuucuaauuuugauaccgcaaugauuaauucugugaaaaaaguucuagaaggauauaaggca

SEQ ID NO: 4120221 - RNA, 60 nt, Human
ugccuggaaaguacagugugucacacagaugccuguugaccuggaaggugcuuccuggca

SEQ ID NO: 4120222 - RNA, 74 nt, Human
ugccuggaaggcccaugggaagaggccaggaucuggacucagauaaaccaaguuccacugggcaaucuuaggca

SEQ ID NO: 4120223 - RNA, 63 nt, Human
ugccuggagacgaggcuggaccaucuugaaggaaaagagggugacgucagccugcuuuaagca

SEQ ID NO: 4120224 - RNA, 75 nt, Human
ugccuggagugccugugcccuggccaggccucucuuuggucagggaagagccccagggacagccucgcuccagca

SEQ ID NO: 4120225 - RNA, 70 nt, Human
ugccuggcacacaguaugaucuaaaguaaguaauuguuaucauuucucaguuccuacuguuuacuaggua

SEQ ID NO: 4120226 - RNA, 64 nt, Human
ugccuggcaggagcuguggccguagcuaggggauuacagcuacggccacaacucuggcccugua

SEQ ID NO: 4120227 - RNA, 57 nt, Human
ugccuggcccugacagcccugggcucccucugggagaggauaggggcaggggcagca

SEQ ID NO: 4120228 - RNA, 110 nt, Human
ugccuggcucugaccuccaaaagggaggggcugcccuggugucagggccuagggcguacagauggcuccacaaggcagcuccuccaggucaggcagcuggagcccgggca

SEQ ID NO: 4120229 - RNA, 58 nt, Human
ugccuggcugcugguucugaggauggggaugcuucaguccuggccagggcacuaggca

SEQ ID NO: 4120230 - RNA, 83 nt, Human
ugccuggcuuuugccugcucagguuggcguuuuucugacacacagauuucuguugccaugcucuggggaggucaagcagggua

SEQ ID NO: 4120231 - RNA, 100 nt, Human
ugccugggaggcaggccugaggccaccaucuuguccccagauauccagaucuugggggacuuuggcauggaaaggggccagagccugccuuucacaggca

SEQ ID NO: 4120232 - RNA, 64 nt, Human
ugccugggcuuuucuggaaacugcuggggcaggcccaccagaaguuugaaugagagccugagca

SEQ ID NO: 4120233 - RNA, 65 nt, Human
ugccuggguuugggagaugguaaugguguacaugcaucucuguuagaucugcuuaaacacaggca

SEQ ID NO: 4120234 - RNA, 89 nt, Human
ugccugguguuuagcaaggggagguggagugugguccucccccaggagaggcagcaggcgacuucccuauugaaaacacagcuguggca

SEQ ID NO: 4120235 - RNA, 55 nt, Human
ugccugugcccuuugcugggaggcuaaucagaauccaggaacgagaggcugggca

SEQ ID NO: 4120236 - RNA, 61 nt, Human
ugccugugggugccaccacccuuugagaacugaaaaaugcgugugcccccaccuccaggca

SEQ ID NO: 4120237 - RNA, 56 nt, Human
ugccuguguaguucagccugugaaggcucccuuucaaguaggccagcugcauggua

SEQ ID NO: 4120238 - RNA, 68 nt, Human
ugccuucccuggcaacaaacaaggucuuuccuuccccaggaagggugugugugagggacacaaaggca

SEQ ID NO: 4120239 - RNA, 58 nt, Human
ugccuuccuggagcugaaggcugcugggggaagugccuccacagcuccagggcaggca

SEQ ID NO: 4120240 - RNA, 56 nt, Human
ugccuucuuaaauuaguugaccaggcagguucugguuuggucaagaaaguaaggca

SEQ ID NO: 4120241 - RNA, 71 nt, Human
ugccuugagggaguaagaugagaagacuggggugguuguccaggcuuauuaucuucuccauuacucaggca

SEQ ID NO: 4120242 - RNA, 56 nt, Human
ugccuugcgggcguuucuguuguaaguggagggcagcagggccacgcuccaaggca

SEQ ID NO: 4120243 - RNA, 78 nt, Human
ugccuugguagugauuaauaguacagguucuuagauuuagaccauuuaggcucuuuaucaguuaacucuugccaggua

SEQ ID NO: 4120244 - RNA, 62 nt, Human
ugccuuuauggccauuuucauugcccucuugugguuuugcaguuauuuggcuauagauggua

SEQ ID NO: 4120245 - RNA, 56 nt, Human
ugccuuuggaaggcagagcucugugaacuauguauauuuucuucuuuccaaaagca

SEQ ID NO: 4120246 - RNA, 65 nt, Human
ugccuuuuaccuuguaauucuggugaucuuacauccauaaccucugggauugcuacagaagggca

SEQ ID NO: 4120247 - RNA, 130 nt, Human
ugccuuuuccuaacacuugucuuauuauuucgaaggucuuugccuagggagcacuagcugccuugcacaaguugaggcucuacugugcccuuggacaugagagcuaaggcauuuguugguucagaaagca

SEQ ID NO: 4120248 - RNA, 83 nt, Human
ugcgagcuucaggaaaccgcaucccagugggcacugcaguauugacugaccugcugggacgugugguugccaggagcaaugca

SEQ ID NO: 4120249 - RNA, 71 nt, Human
ugcgauaaagugcaugcaaauuacuguaaaguauuuuacauuaccauagcaacgugcaugauuaaauugca

SEQ ID NO: 4120250 - RNA, 101 nt, Human
ugcggagaauagucucugucccagacuauuuugcacaaaacaauuggcaaacaguuuaacauuuugcuagaauggcugauaggucagaguuguuuuuugca

SEQ ID NO: 4120251 - RNA, 59 nt, Human
ugcggcaggagaagguguuauggggagggugagccucccguaacucacuugugccugca

SEQ ID NO: 4120252 - RNA, 70 nt, Human
ugcggccuacugucaugugaugugaguuccuggagggcaggaguucugaccuacaugcagcaggcacgca

SEQ ID NO: 4120253 - RNA, 79 nt, Human
ugcggccuuuucaucuuccuuggcauaggucugaaggaauuucagagcuaugugggagggugagagcauccaagccaca

SEQ ID NO: 4120254 - RNA, 70 nt, Human
ugcggcuuuaaggcuugucuugcgguuuccuuaacuuaaaccuuaaaccaagcucuugagagaagcuaca

SEQ ID NO: 4120255 - RNA, 81 nt, Human
ugcgggcuggggcugcgguggaggagccaaggguugaugcacugccugaccugcccuccggcuccucgcccccagcccgua

SEQ ID NO: 4120256 - RNA, 61 nt, Human
ugcggggggaggaacaucuugcacucagaaauagccucagugcuuguucucuguccuugca

SEQ ID NO: 4120257 - RNA, 82 nt, Human
ugcggguaccaccugugccaggcccaugaacacuuacaggacagaguaugcaaccaaggauguucgggucacauagccugca

SEQ ID NO: 4120258 - RNA, 72 nt, Human
ugcgucaggcccuguugggggauuacaaacaucaacuacaugcacguaaacaucgacccaacaggggaggca

SEQ ID NO: 4120259 - RNA, 67 nt, Human
ugcgucucuguccucaaagaccuccauggccucucuucauaucaggacaucaggagacacagacgca

SEQ ID NO: 4120260 - RNA, 78 nt, Human
ugcguggcagugaagcaguccuuguugagcuauggcauguucuaauuuagcaagaaagauugcagcacuuggugugua

SEQ ID NO: 4120261 - RNA, 59 nt, Human
ugcguucaccucuggcuucuguguugagagugaacuguagagaggcaaggguggaagua

SEQ ID NO: 4120262 - RNA, 75 nt, Human
ugcguuugagauggcauucacauuuccagagaggaauaaaagaaaccaucuuggaaauguugggggccccaugua

SEQ ID NO: 4120263 - RNA, 74 nt, Human
ugcguuuucuugugguuacauuuuaagaaauuaugugcaauguuuugauuucuuuguacccacaauccaagcca

SEQ ID NO: 4120264 - RNA, 56 nt, Human
ugcuaaagcuuccuguucuuauuuucuuuccauucuaaggaaagguggccuuagca

SEQ ID NO: 4120265 - RNA, 75 nt, Human
ugcuaacaaagucuaaaucauagaaacaaugaauaauuaucaauuuacagaauauugauuugggcuuugguagca

SEQ ID NO: 4120266 - RNA, 83 nt, Human
ugcuaacuuauuugccguuuuuuaaucauguggagguagaaaaaccucagcauggagggagaacaaguaggcagauaggagca

SEQ ID NO: 4120267 - RNA, 73 nt, Human
ugcuaauuugcauggccgacuugcucuaauuuuuagaagggaugggaacuugguagggcaugaugaaagagca

SEQ ID NO: 4120268 - RNA, 62 nt, Human
ugcuacacuuaaaucagucacccaguguuagagucuggguaguuggaaaugcaaguggagca

SEQ ID NO: 4120269 - RNA, 78 nt, Human
ugcuacagggaacucaguaucugucaguaaucagguucucuuacagugaacugaucacauagauauauuccaaguaca

SEQ ID NO: 4120270 - RNA, 74 nt, Human
ugcuacucaacagggccaagcugcagcaucuguccuaaccaugcaagggucugguccugcagugaguuaaagca

SEQ ID NO: 4120271 - RNA, 75 nt, Human
ugcuacuucuaaguauucagauaguugugagucaaacugagucaguaaugcugucuggauaucuuggaauuagua

SEQ ID NO: 4120272 - RNA, 55 nt, Human
ugcuagaagcugaaaccucuugauacugcauguguagagaugacgagcucuagca

SEQ ID NO: 4120273 - RNA, 80 nt, Human
ugcuagauuucuaccuggcuggggaauagccagcccgacagagccgggacugggccaugggccagcgaggcaguuucgca

SEQ ID NO: 4120274 - RNA, 59 nt, Human
ugcuaggacucccuuguuggagucuacauguaggacacacaacagaggggucuggagua

SEQ ID NO: 4120275 - RNA, 57 nt, Human
ugcuagggcacuaggacucaugugcuuucuacuccacagguuucagaugccacugca

SEQ ID NO: 4120276 - RNA, 87 nt, Human
ugcuaggucuuaugucacggcuauuuguguccuuuuguuuauccuaugagagggaaaaacccacugaagccugggaguaagacagca

SEQ ID NO: 4120277 - RNA, 103 nt, Human
ugcuauaagauuaggugcauuguucagcauggaaucuauguaugccauuuuauuuuaaaaagguuauauaauucagugcuuuccagaguugaauuuaauagua

SEQ ID NO: 4120278 - RNA, 70 nt, Human
ugcuauagcacauucuuuaguuacugugggugccacagaaggcugccucagagaaagguauggcugagca

SEQ ID NO: 4120279 - RNA, 87 nt, Human
ugcuaucguagcagcagaugcaaacuuaccuugagagcugaacguccacaggcaccucagggcuggcuuuugcagagcuguuuagua

SEQ ID NO: 4120280 - RNA, 102 nt, Human
ugcuaugugccuaaaaggacaugcaccuuauuuaaaugauguuuuaauaaaaauaaggcauuacugaagguucaugguccuuuuuuuuaaaagguacauaca

SEQ ID NO: 4120281 - RNA, 89 nt, Human
ugcuauguggucuucuccauaggcaguucauaacauagaagcaagcugcuauguuaugaacugccuauggacuugcaaguccacuagca

SEQ ID NO: 4120282 - RNA, 64 nt, Human
ugcuauuauugucaccacuguauagaugguaggaaacugaggcuagagaggugacacaguggua

SEQ ID NO: 4120283 - RNA, 78 nt, Human
ugcuauugugaauagugccgcaaugaacauacgugugcaugugucuuuacagcagcaugauuuauaauccuuugagua

SEQ ID NO: 4120284 - RNA, 108 nt, Human
ugcuauuguuccacugagguuguauucaaaguuuaggugggugacauaaugaaggaugcaauaguuaaagcccuaaauugauagacccagaggaaaugucuaauggca

SEQ ID NO: 4120285 - RNA, 80 nt, Human
ugcuauuguuuugaauauggcugugagacaaagagcugcuuaggucaagcgcuauaaauuacaguuuucauacaauagua

SEQ ID NO: 4120286 - RNA, 61 nt, Human
ugcucaaaacccagccaucaggacuuaugaaugugagcuauuuggacagaggguuuuggca

SEQ ID NO: 4120287 - RNA, 59 nt, Human
ugcucaacagcaauaguaccagaauaaaagaaaaguuauuauguucugggcugugagca

SEQ ID NO: 4120288 - RNA, 55 nt, Human
ugcuguuucuugcaugcccacaaacaugucugcucaaugggcacaaugaacagca

SEQ ID NO: 4120289 - RNA, 122 nt, Human
ugcuguuuuguugcaucaucaugucaaagugcuguuguucaucaucugucauucaacauugaaugccagagcuccugaguaacccccaaagcacucaucaugaaguauacacagaaauagca

SEQ ID NO: 4120290 - RNA, 96 nt, Human
ugcuuaaaaaagaccugcacacugugcucuguaaggguggugguaguggugguggcuuuauccgcuugacccuuacugugcaaaaggccuuuggca

SEQ ID NO: 4120291 - RNA, 88 nt, Human
ugcuuaaagugaagaaggagcuacuaauaagagggugucuauuuagggcuuuuuaauugaacguagucuccaaucagucacccaagca

SEQ ID NO: 4120292 - RNA, 85 nt, Human
uggcaauugcauuuuacuuuuuucaacucaucuuuggaaagauuauuuuucugacgucuugaagaguagaaaaugcaaauuggca

SEQ ID NO: 4120293 - RNA, 82 nt, Human
uggcacaauaaaaacuuuuggaaucauagauauauucacuaucuugauugagugaugauuucaugagugcacgcguguguca

SEQ ID NO: 4120294 - RNA, 76 nt, Human
uggcacacaguucugcaggcuguacaagaagcauggugccagcaucugcuucuggugaggccucaggaagugucca

SEQ ID NO: 4120295 - RNA, 73 nt, Human
uggcacaguucuugaucaaccacuuguucccaacucuugaggaacaggaaacaaguuguuaggauaccuguca

SEQ ID NO: 4120296 - RNA, 59 nt, Human
uggcaccauguuggcaaauguuucgauguagcgcacaauuucaccacaugauggugcca

SEQ ID NO: 4120297 - RNA, 93 nt, Human
uggcacccaagagggcccaggaugcaagaacugaacccaaccuguggguuuggagcugagaugucacugcuggccuuacugggagcagugcca

SEQ ID NO: 4120298 - RNA, 130 nt, Human
uggcaccuaacagauguuccaucuuuguugaauucauacacgaaaaugcaugcauguguauuugcuuguguguguguguguguguguguguguaaaagagagagggagagagacagaaugguuugugugg

SEQ ID NO: 4120299 - RNA, 56 nt, Human
uggcaccugaacuuagaggugugagcgaauaucucacuuugacugggaagguguca

SEQ ID NO: 4120300 - RNA, 96 nt, Human
uggcacugagcacccauccugcucccucugccugagcugagcugccuuucaggaagcucugguuuagaaggggaaagaugucauaugcucaguuca

SEQ ID NO: 4120301 - RNA, 122 nt, Human
uggcacuggagcuggguuuccuggugacuuuacucucugucuuggcauuuggucuguguuuauagucaaagcaacagacaugagguaaugaagcagagaagggaaucacagaauaaugacca

SEQ ID NO: 4120302 - RNA, 88 nt, Human
uggcagaacuggaaucuaacacuguaaacugucuuugucuuugacaaaguugcauaaacaauagugguagaaaaggccaguguuguua

SEQ ID NO: 4120303 - RNA, 66 nt, Human
uggcagaaugaagacuggggccucaggguuucccccaucuuuccaccuuucccacuucauuuucca

SEQ ID NO: 4120304 - RNA, 112 nt, Human
uggcagaccccagccacccuccaacuaguguuuacccagugccuaauacgugcaauuagcauucuucuggggggcaccuauaguuuagugguuccguacacgggcucugcca

SEQ ID NO: 4120305 - RNA, 59 nt, Human
uggcagacuuuagggucuacauguuucaaaauggaaaauguagcucagugaaguuguca

SEQ ID NO: 4120306 - RNA, 64 nt, Human
uggcagagaugaagaguuguuuugauuaugacauaacagcugcuucuaucuuuucaaugagcca

SEQ ID NO: 4120307 - RNA, 77 nt, Human
uggcagagcugggauuuguacugggaagucuggcuccaaacuucguaccauuaaccaguauacucuccugcuuucca

SEQ ID NO: 4120308 - RNA, 57 nt, Human
uggcagagucaggauuccaucccaggcugagcacuccuggaucucugcucugagcca

SEQ ID NO: 4120309 - RNA, 79 nt, Human
uggcagaguuauauagugucagugauaaauaucaugaagaaaaauaaaggucaagagaugcugucuacagaucuggcca

SEQ ID NO: 4120310 - RNA, 122 nt, Human
uggcagcaaaccuugagcuuggggaggucuucagcugccagucucacccuggguccuccagcccuaggaugggccaguggugggaauggggauguggaccagacauccuuagcacagggcca

SEQ ID NO: 4120311 - RNA, 64 nt, Human
uggaaacuugccuguuacauuucuaguauauuauuauuauacuagugagggcuccaggcuucua

SEQ ID NO: 4120312 - RNA, 67 nt, Human
uggaaaggagggccugaaacaacacuugauggagggcccacuggaugcuugauggcucuucuuucua

SEQ ID NO: 4120313 - RNA, 55 nt, Human
uggaaaggcacuaugcaaaauuggacucagcaucacuguagcuagugucuaucca

SEQ ID NO: 4120314 - RNA, 61 nt, Human
uggaaagguguaaagcagaaccaucauuuuauccccggaacugucugaugcaccuuaucca

SEQ ID NO: 4120315 - RNA, 61 nt, Human
uggaaauagggucggaucucucguuguggauuugcgcaauuuauccuaaauccaguuucua

SEQ ID NO: 4120316 - RNA, 59 nt, Human
uggaaauauguagcaauuacaaggagcuggaaaguuuuuuugaaagcccuauguuuuca

SEQ ID NO: 4120317 - RNA, 75 nt, Human
uggaaaucaaaauaaaaugucuccacugggcucauuaccugagaucuuuuuguugaccuuuucuugaguuuucca

SEQ ID NO: 4120318 - RNA, 87 nt, Human
uggaaaugaacacaaaauaccaucuaaugcuuacuuuggggaacgggaagagagccucaaacagagagauguauguggagguuucua

SEQ ID NO: 4120319 - RNA, 72 nt, Human
uggaaauguuugucaggcugccagucuuuauuguguucuuuuaugcacaagaugugccuggcagaaugucua

SEQ ID NO: 4120320 - RNA, 59 nt, Human
uggaaauuacuaacacuuagaggaagaaaaauauuacuuuagggucauugugauuucua

SEQ ID NO: 4120321 - RNA, 59 nt, Human
uggaaauuccuaauuaacauggagagaauauuuucucuuuacuggaauggaacuuucua

SEQ ID NO: 4120322 - RNA, 65 nt, Human
uggaacaaacauggugauggcuacaagugacuugggaaucacaagcguccuaugauuuguucaca

SEQ ID NO: 4120323 - RNA, 66 nt, Human
uggaacaaggguucauuuaaauuguaaggcaguauacaagcagcaauuaaaugauaucuuuuucca

SEQ ID NO: 4120324 - RNA, 58 nt, Human
uggaacaauucuugaagggaaucaucaaggaacuggguuccuuucaauuucuauucca

SEQ ID NO: 4120325 - RNA, 84 nt, Human
uggaacauuaagggggaagaaagaacauggcauacaaaaauauguguaaaugcaacgggcuuuccuuauccucuugaguuuuca

SEQ ID NO: 4120326 - RNA, 90 nt, Human
uggaacuugucaagggaaugaauuuuggauggugaaguuaccacagcagugaaucuguugcuuucauuugaaguccauucacagguccca

SEQ ID NO: 4120327 - RNA, 63 nt, Human
uggaagaacuugugaaaugccagauaaucuuaaaggagggcaucagguauuuuaugcuuacca

SEQ ID NO: 4120328 - RNA, 86 nt, Human
uggaagacaauguaaaguagcuuuuaugauuuacugcaaagaauccugcuuguuuaaaguccuggcugucuuauguugaacuuuca

SEQ ID NO: 4120329 - RNA, 86 nt, Human
uggaagacucuggacaggcagagaugagaaggagcauguaacugaaacuacaaguugucuccuaaugucuguuuccucuucuucca

SEQ ID NO: 4120330 - RNA, 67 nt, Human
uggaagagggagcuggguggcccuuacuuuccuuugcuuaaagguggcccugacuuuccuuuucaca

SEQ ID NO: 4120331 - RNA, 69 nt, Human
uggaagccauagauagagguuccuaauagaaguaccuuugguuaugagucuguuuuuuauggucuuuca

SEQ ID NO: 4120332 - RNA, 82 nt, Human
uggaagcugaggcaaguaauucaaagcuguggcucaaagaaauugacagggccaggcugugggugauuuacuguggcaucca

SEQ ID NO: 4120333 - RNA, 79 nt, Human
uggaaggagagcagcggcauuugguuugguggugggcagauuuucuuuuacgacugcuaaaugccugccuuucucccca

SEQ ID NO: 4120334 - RNA, 62 nt, Human
uggaaggccugugaccauccauccuguccucucuccagaugguugguccauaggccuaacca

SEQ ID NO: 4120335 - RNA, 60 nt, Human
uggaaggcgucucgaaggccuagucuguucuguucacaguagugucuuaagagccuugca

SEQ ID NO: 4120336 - RNA, 58 nt, Human
uggaaggcuuugcuguccuugcuguguguaagaucggagaaggcaaggaaaccuucca

SEQ ID NO: 4120337 - RNA, 68 nt, Human
uggaagggagugacagucagaggcuaguuauuauuguuuuugcuucucuuauugugacucucaguuca

SEQ ID NO: 4120338 - RNA, 78 nt, Human
uggaaggggcuggaaggaagcugucuggaugugugcccuuacacauacaucuuaacgcgcucuuggguuuuucuucca

SEQ ID NO: 4120339 - RNA, 97 nt, Human
uggaaggggcuuaggucucugaaguauuauaugaaaauauuccaccaaccaggaauaauuacauuauacuguuagaggauaagcaaccaacuuacca

SEQ ID NO: 4120340 - RNA, 92 nt, Human
uggaagugacuuuugagcaaaucagauuguaauuacuaacuugguaaucaauugaucauuguucagggagauuaguguaagauguccuucca

SEQ ID NO: 4120341 - RNA, 57 nt, Human
uggaagugauuuugcuucugccuauuucuauuugcuagaagcuagucacuaaaucca

SEQ ID NO: 4120342 - RNA, 89 nt, Human
uggaagugcacaggcagccaaguccugggcauuugaacaggaaggauguuccucaguagcucacaaggacccuaacugcugcauuucca

SEQ ID NO: 4120343 - RNA, 58 nt, Human
uggaaguggcagaggaagugguauaggaaaauuaaaucacuuugacggccaacuucua

SEQ ID NO: 4120344 - RNA, 64 nt, Human
uggaaguuccaccagagcccucuuugcggguucuucaagagggacuuucucugggguuccucca

SEQ ID NO: 4120345 - RNA, 59 nt, Human
uggaaguugguagagugacagagcucagccccuuuuuggcacucugcucugccaaucca

SEQ ID NO: 4120346 - RNA, 57 nt, Human
uggaauaacucaccaaggucaucuaugagaauagccgaccuggagagauuauuacca

SEQ ID NO: 4120347 - RNA, 78 nt, Human
uggaauacacguagauuguuuaaacugguuuaaagcccuuucgcauuuacacugcuugaacaaucucucuguguuuca

SEQ ID NO: 4120348 - RNA, 103 nt, Human
uggaauauguaacuguggcuaauaauuaguauuuaucuuuucacacuucauuuucuaugugcaugaaugcaaguauuguuuguuuagccaacaagugcuucca

SEQ ID NO: 4120349 - RNA, 78 nt, Human
uggaauauuauacagcuguccaaacacauuaacugcagcauaacuucagugauguagguggauucuggcaauaucaua

SEQ ID NO: 4120350 - RNA, 58 nt, Human
uggaaucauaagaugccccuaauucagucuuaguaaagagacuggcuucuuauuucua

SEQ ID NO: 4120351 - RNA, 127 nt, Human
uggaaucauuuggggagcuuucaaaaguucuaaugucuagaucagaccucgagcaggauucugguuuaauugauuuggggcauggccugggcaucaggauucuuaggcacuucuccaggcaauucua

SEQ ID NO: 4120352 - RNA, 80 nt, Human
uggaaucuggagaugggucugucaccaguggagagaugauaagagccauauccuggguggcuuugacccacuagaagcca

SEQ ID NO: 4120353 - RNA, 75 nt, Human
uggaaugcagguagugaucgagggugacaggauuggggccccaaaugccacccucgucacuagcugcgaauaccg

SEQ ID NO: 4120354 - RNA, 58 nt, Human
uggaauguucccaaaaucccuguagauacgaaagucaguaucugaaggaaugauucca

SEQ ID NO: 4120355 - RNA, 88 nt, Human
uggaauguuuaagagaacuugagaguccucaguaaguuuuauuugugagauuuacuagggcuguuuaaguacuugcaagagcuuucca

SEQ ID NO: 4120356 - RNA, 65 nt, Human
uggaauuaccaggucauaugguaaaucuauguuuaacauuauaagaaauugccaaccuguuucca

SEQ ID NO: 4120357 - RNA, 70 nt, Human
uggaauuauauauauuuuuugccaucaucugcuguagacuauggcucccaaagaaucauggguaauuuca

SEQ ID NO: 4120358 - RNA, 83 nt, Human
uggacaagucugcuguucucaugcugauuuucuguuaucccuuuacauucugaaaacaacacugccagcagaagcgcugucca

SEQ ID NO: 4120359 - RNA, 75 nt, Human
uggacaaucacucugcaacauuccugagaauugaauaauauaauaaucuugaaagucagcagaguggauuaucca

SEQ ID NO: 4120360 - RNA, 69 nt, Human
uggacaucuggaggagaugaauggcagauugaacacaagcaucuaauuauacuccucccagaaacucca

SEQ ID NO: 4120361 - RNA, 66 nt, Human
uggacaugaaaguagauuggauuuggaauuggguuucccagguucugccauuuacuuguauaucca

SEQ ID NO: 4120362 - RNA, 57 nt, Human
uggacauguccggccagacaaugggacagaaggaaaugugucagcuggacauguuca

SEQ ID NO: 4120363 - RNA, 70 nt, Human
uggacauuuccccaguggagaaguauuugaaauacugcauuuccuguugcuuuugccacugcugcugcca

SEQ ID NO: 4120364 - RNA, 100 nt, Human
uggaccaggugucuguguguauuuaugcauguauguauguaugcauguaugaauauaugcauguguugguuuaugcaugugcauguaggcugccuaucca

SEQ ID NO: 4120365 - RNA, 88 nt, Human
uggaccaugccgugccucaguuucuccauaugaacacauaggggcaucucucuacuucaggggacuauugaauccaugagcaaauuca

SEQ ID NO: 4120366 - RNA, 77 nt, Human
ucuuaucucuaaaauggggcaaagucacccugccuuacacuugagacaguggcucagccccagucuugagaugcaga

SEQ ID NO: 4120367 - RNA, 81 nt, Human
ucuuauuaguucuguuaccuuugugaguuucaccagcagcuaaugaacuccacagugagguaacuugagaacagaugaaga

SEQ ID NO: 4120368 - RNA, 55 nt, Human
ucuuauucaccucuauuagacucagucagcugagaguuuuuaauuggugaaggga

SEQ ID NO: 4120369 - RNA, 57 nt, Human
ucuuauugggaagaaauugugacaagugaaauugugacaagucucagccaaugcaga

SEQ ID NO: 4120370 - RNA, 64 nt, Human
ucuuauugucuagauugagauggggaauaaaaaagagacccucaugucuauguaugaaguggga

SEQ ID NO: 4120371 - RNA, 100 nt, Human
ucuuauuuugcaucugaaauuugucauugaaaccacaguaugacuuaaaaccacauugugauccgacugauuaauguucuucagaaacuggcagaaaaga

SEQ ID NO: 4120372 - RNA, 69 nt, Human
ucuucaaagcugcaagcuccugaggaaucugcugagguucuuaauuggccauugcaggugcuuugggga

SEQ ID NO: 4120373 - RNA, 58 nt, Human
ucuucaaggaagugaugucuucuguaagucaagagaaggcaagaaacuuucugggaga

SEQ ID NO: 4120374 - RNA, 100 nt, Human
ucuucaaguacuucagugaguccaggccuccucuuuuccugcucauccauugauaucuguguaugggaaagggggcuggacagagggggguaucugagga

SEQ ID NO: 4120375 - RNA, 97 nt, Human
ucuucaaguucuagguagacucuuggggaaaucugcagaaaagaguugugucuauuauucuggagagucaucugcuacaaccuaaggaacaugagga

SEQ ID NO: 4120376 - RNA, 85 nt, Human
ucuucaauagcuuuucuguucuuuccaacaagacaguguauuugcuucugccaaggagagaagguauguaaaaagcugaugauga

SEQ ID NO: 4120377 - RNA, 83 nt, Human
uggagacuccaggaaagugggauguguguuuuguguucuucuggccguccuucaauauacuuccaauuuccuguggguuucca

SEQ ID NO: 4120378 - RNA, 85 nt, Human
uggagagauuuggauuccagaauaccggcaagauguauuuuuuuagagcuuuuguuucacucuauuuuggaacucauuucugcca

SEQ ID NO: 4120379 - RNA, 59 nt, Human
uggagagcacugucucauuuuggaaaauuaucuauuucugaaaugugcacuguuuucca

SEQ ID NO: 4120380 - RNA, 91 nt, Human
uggagagcuguuaguugggcagggcugaagcguagguggcgaggaacaggaggcuccuacugcagauggccuuguucuucggauccuccca

SEQ ID NO: 4120381 - RNA, 55 nt, Human
uggagagguuuaaacaaaaguuggcuacaacguagugaaauuagacuucuuacca

SEQ ID NO: 4120382 - RNA, 64 nt, Human
uggagaguaauuucugaagaccauuuauuacuauuaucauuagguuuugagaaguuauuaucua

SEQ ID NO: 4120383 - RNA, 72 nt, Human
uggagaucucaaaggcuucuuugcuccaugucugucuagaugggaagaacggggaugccuuggauaucucua

SEQ ID NO: 4120384 - RNA, 61 nt, Human
uggagauggaguuacuguugagagucacuguugugagccacucugcugagcuccauuuuca

SEQ ID NO: 4120385 - RNA, 73 nt, Human
uggagcaaggagggcaaacguaagguugaauaacgaagaguuuauagcuuugggaaugcucuccugggaucca

SEQ ID NO: 4120386 - RNA, 67 nt, Human
uggagcaaggaggguggggccuuugaugaaaaccagaugucuucaaacgccuugccccuccccucca

SEQ ID NO: 4120387 - RNA, 71 nt, Human
uggagcagaguucagcggggagcugaagggaugugcaaacacggacaagauuccugcugagguuuuuucca

SEQ ID NO: 4120388 - RNA, 99 nt, Human
uggagcagggaggagcugggaugaggagcauccuuaccugggcaaucuguccagacccaucucagggaucuccuccuccuguaccccccaccaccucca

SEQ ID NO: 4120389 - RNA, 61 nt, Human
uggagccugcucucuugcauuucugccauugccauagguagaauaugccuuagcaagccca

SEQ ID NO: 4120390 - RNA, 55 nt, Human
uggagccuugggugcaagggaucagaaaggcaggucccacuggcccagggcucca

SEQ ID NO: 4120391 - RNA, 73 nt, Human
uggagcgagaaagccaagguuuuggucacagcuguguuuccuaccgccaugugacccuuggccacuugagcca

SEQ ID NO: 4120392 - RNA, 61 nt, Human
uggagcuaucagaguuauagucauuggacuggcaguccagcugcucucauagauggcuuca

SEQ ID NO: 4120393 - RNA, 94 nt, Human
uggaggaggaaguaaagcuggaggcugggguaguggcaagauaugagcauucaggucuacaaagcuucaagucucucauuacuucacuccauca

SEQ ID NO: 4120394 - RNA, 62 nt, Human
uggaggagugugaguucauccagcaggcuugaagccaggccucugggggcucagaccuguca

SEQ ID NO: 4120395 - RNA, 62 nt, Human
uggaggauacguuuuuuguccucauggagccuacuauauagaggggaaaaugcguauuaaca

SEQ ID NO: 4120396 - RNA, 73 nt, Human
uggaggcagagaagggacaggaaagaagguggccaaugacucuguggccuugcugugccuuugucugccucca

SEQ ID NO: 4120397 - RNA, 103 nt, Human
uggaggcagcacgcacuggucucccagcuguccauccacuucccagcggggcuggcugugcguggggacagcuggguggaggguggagggccucgcuccucca

SEQ ID NO: 4120398 - RNA, 71 nt, Human
uggaggcagggcugagggugggcgggcagauuuauugcagccauuccucuccccugcagcgccugcuucua

SEQ ID NO: 4120399 - RNA, 55 nt, Human
uggaggcauuucuuuuuggucgggacagaagacuaucaaucagaaagugccugca

SEQ ID NO: 4120400 - RNA, 67 nt, Human
uggaggccgaauuagagcguuggcuuuaggaaugggaauucagugccuguucugguucuucucucca

SEQ ID NO: 4120401 - RNA, 66 nt, Human
uggaggcuuucagauuaaugcugugguaagagaugacaucacauuuugagaaaugacaagcuucca

SEQ ID NO: 4120402 - RNA, 58 nt, Human
uggagggaacaaaggagucccagagcacaggcagcuuaggcacguccuugauccccca

SEQ ID NO: 4120403 - RNA, 79 nt, Human
uggagggacuuaaagagaugaugaugugaugauagcuaacauucagugguuacauacauuaccucauuuagucccuaca

SEQ ID NO: 4120404 - RNA, 68 nt, Human
uggagggaugacaaggaaagcaaaccaaauguaaucauaaaauugguugggcuucuguucucccuuua

SEQ ID NO: 4120405 - RNA, 69 nt, Human
uggaggggaggagacggagugauuagugucuucugaaaggccugugguuacgccuguuuccaaacucca

SEQ ID NO: 4120406 - RNA, 63 nt, Human
uggaggguagcuacccaacuccagagcagcacacaacgcuuuguccagguggcuaaccuucca

SEQ ID NO: 4120407 - RNA, 122 nt, Human
uggaggguccccacaagacacaucagcuuccugucuagguagaagccaagaaacaccugcucacaaggggcuuucuuaggcucuaaaaugacuugcagaugccaugggaugggggagcccca

SEQ ID NO: 4120408 - RNA, 88 nt, Human
uggagguaaguggcaggagccugcggggaggugggcugugcauugccgaccugguguccugagcgcagccugggcccgcuugccucca

SEQ ID NO: 4120409 - RNA, 83 nt, Human
uggaggucuuuguauauucugccaagguccuggggcuuuauccuaugggcaacaggagccaugagcaggaggcaaugccauca

SEQ ID NO: 4120410 - RNA, 59 nt, Human
uggaggugcuagcccuguagucagaaacugagcugggagcagaaguggcuacaucucca

SEQ ID NO: 4120411 - RNA, 63 nt, Human
uggagguggaguuggaaacugacaucugugauuuuacucucuuacuuuccagcucuagcuuca

SEQ ID NO: 4120412 - RNA, 101 nt, Human
uggaguaaggauaucauugucacauucaaguuuuauauccauggcuugauaaaauuggguuuuagaauaauaacugaugacaauguaggucauauuuuuca

SEQ ID NO: 4120413 - RNA, 66 nt, Human
uggaguagcgcaacugcagagaaguaguuuguaaaaggacaucauguugucaguugcccuucuuca

SEQ ID NO: 4120414 - RNA, 64 nt, Human
uggagucccaggauaugugcuguucagacauuguugaaacaagagacagauucugggaccacca

SEQ ID NO: 4120415 - RNA, 64 nt, Human
uggaguccuucaaucuuaagucagcccagcaauucaguuguauugaccugauggaggccauccg

SEQ ID NO: 4120416 - RNA, 57 nt, Human
uggagucguguuugggaucggagcugccugugguucugaaccauugagcacugccua

SEQ ID NO: 4120417 - RNA, 58 nt, Human
uggagugacucacagcugggacaaagguccacucgcucuugccccugcagucuaccca

SEQ ID NO: 4120418 - RNA, 71 nt, Human
uggaguggcugcugacuuuaauacaugaaaaaaaguguugccaucuguacuugaaaucagcugucacccca

SEQ ID NO: 4120419 - RNA, 72 nt, Human
uggaguguguauaggacacucugagcuguucaguccaauuagagggcaggaguguccuacugauacaaccca

SEQ ID NO: 4120420 - RNA, 89 nt, Human
uggaguuacauagaaugaguuuucagccucucaucaugaaaauucacaaagggugauggugggucugaucucauauauaugaaucucua

SEQ ID NO: 4120421 - RNA, 72 nt, Human
uggaguuagaagcaggccugccaccucgggguucccagcgccauugggaccauccccaggccacugaagcca

SEQ ID NO: 4120422 - RNA, 85 nt, Human
uggaguugagagucauguaagggagggaggugaugcuuggcugugguaccccagcaagucucuuacccucucuggcucuacuuua

SEQ ID NO: 4120423 - RNA, 105 nt, Human
uggaguuucuauuugaguauuuauaccauagaaaggaagcuacuuaggggcaaaaucugagucuuuaauguacuuucuuucacagugacucauauugcuacuuca

SEQ ID NO: 4120424 - RNA, 63 nt, Human
uggaguuugggugagguauaagaaaugggcugaucccugauuccauacuuuauucccccucca

SEQ ID NO: 4120425 - RNA, 84 nt, Human
uggauaaauagguggauuuguggaaguugaacaucauggaaagggugauuccagauuucuacacaagaccacagccauagucca

SEQ ID NO: 4120426 - RNA, 76 nt, Human
uggauaguaaacugugugccuuugacuaaaucgacuaggagucuagggaagggaggaggugagcaguuuacauuua

SEQ ID NO: 4120427 - RNA, 95 nt, Human
uggauauagccugauuucuucauuccuuuaugcacugaucuagaagagcguccuucauguagacagauuuaaaggaauggauuaaugaauaucca

SEQ ID NO: 4120428 - RNA, 59 nt, Human
uggauaugggccauggaaaaaaagugaaucuggaaaauuucauucauggccucuaucca

SEQ ID NO: 4120429 - RNA, 130 nt, Human
uggaucacugcaggcccauggucaggguucaaggagccagauucucucacuuucaacaagaaauugagaaaugaagcuggugauucagggacuccaaaaucuggccaggucguauaaugcaagugagaua

SEQ ID NO: 4120430 - RNA, 81 nt, Human
uggauccagcgugauggggccuccugccacccaggcccugcugccuauccccagguguccagguggccucugcugcuucca

SEQ ID NO: 4120431 - RNA, 119 nt, Human
uggaucugagugucauuaggagccuugcagacaaguguuucuggguaacuucucaguaacaucuuugacauuuguuuaguugcagaccuaaauggccacugauggauacugcaguuuca

SEQ ID NO: 4120432 - RNA, 85 nt, Human
uggaucuuaaaggacaaguaguauuugcaucagaaaauaagcaacaguguauuccagauaaaggcaacagcuugucuaaggucua

SEQ ID NO: 4120433 - RNA, 93 nt, Human
uggaugaaaggcuugcaagggaaaagcaaucuauccuaggguucgcucuguggacuugaaauuacuuuucaaccuuuucuucuuauuuaucca

SEQ ID NO: 4120434 - RNA, 124 nt, Human
uggaugaacuaaugaaguauauaucuuugagcuuacaauucugagagaaauauuugcccaucugucccacuagaugacaaacucuuugagaacaaggacugugucucuuaucucaguuuuucca

SEQ ID NO: 4120435 - RNA, 91 nt, Human
uggaugaagaaagccugcauaaggagauaucaugaaucauuacauggauauuuauugagccuuuccuaugugccagaugcucuauuagaca

SEQ ID NO: 4120436 - RNA, 77 nt, Human
uggaugacacugggacuauguguuucuguacuuuucuuacagaagacauacuaugaauacauguguccuggaaucua

SEQ ID NO: 4120437 - RNA, 75 nt, Human
uggaugaguuacggcaccaagcugggcccucuccgaauuuccaggaggaggcuuuugcaggugccacaaguacca

SEQ ID NO: 4120438 - RNA, 73 nt, Human
uggaugcaaagugaaauggggcagagacaccaaaaccaaauaagcggguuugccccagcucuuuuacuuucca

SEQ ID NO: 4120439 - RNA, 61 nt, Human
uggauguuggcaggucuuguugggacuuuauaauaauaaaaucuuacaaucguuacaucca

SEQ ID NO: 4120440 - RNA, 76 nt, Human
uggauuaucuauucaguauuucaugacuuucuucaucuauaauugaccaagaaagugaugagcuacagauggucca

SEQ ID NO: 4120441 - RNA, 60 nt, Human
uggauucaucucucaguguccagaaagaaucagccuucuggacucuaagcagaggaucua

SEQ ID NO: 4120442 - RNA, 76 nt, Human
uggauuccacacauaagugagaucgugcaguauuuguccuucugugccuagcuuauuuuacuuaguguaaugucca

SEQ ID NO: 4120443 - RNA, 121 nt, Human
uggauugaugauaagaagaagagcagaagcaggaggagcauuaacugagcaucuccugauugccagacacagcucagagcuugaaguuccacuuauauuugcucugauccucacaacgcca

SEQ ID NO: 4120444 - RNA, 67 nt, Human
uggauugcagauagcuauguaccugucaauggccauugcugucaggacacagcuuucugugauacca

SEQ ID NO: 4120445 - RNA, 57 nt, Human
uggauugccacuguguuuuugaaucuguaauucuagauguagcuacaaggcaguuca

SEQ ID NO: 4120446 - RNA, 87 nt, Human
uggauuguugaaaaugguuuggcucugucagcacuugccauggagauacaggccuugucacuuuggccaagccauugcaauauccca

SEQ ID NO: 4120447 - RNA, 90 nt, Human
uggauuuaauacucaaaaggcagagauuagcagaaugauuaaaaagucauccagcuauauuuugccuguaagagacaucuauuggauuca

SEQ ID NO: 4120448 - RNA, 84 nt, Human
uggauuuaauacugaaaguuggauaaaauuugaucuuguuaagaagacaaggaagauauaucaagcuuaauguaauggaguuua

SEQ ID NO: 4120449 - RNA, 63 nt, Human
uggauuuaaugcuuucuuuguauugcugauccuuaagcaugauuagagaaagaauugagucua

SEQ ID NO: 4120450 - RNA, 69 nt, Human
uggauuugugagggucacagugcaccacaccaucccucccugcaccggguggcccugccgcagugucca

SEQ ID NO: 4120451 - RNA, 95 nt, Human
uggauuuuuuccugggaaaacagagaacuacuuuuuauauguguaucuuuuuaugcaauuagcauuguauucuuaguucagggaaaauauaucca

SEQ ID NO: 4120452 - RNA, 64 nt, Human
uggcaaaagaaucacauccuucagcaaguccaugggaacaacuagggcuaggggcugugagcca

SEQ ID NO: 4120453 - RNA, 92 nt, Human
uggcaaaaucucuacaaaucaauuugauuaauaccauacuugguuuaaaagucuaagaaaugugaauauugaauagauauuugauuuugcua

SEQ ID NO: 4120454 - RNA, 118 nt, Human
uggcaaaauuaauuuuuccaucauauuggagugagccacaugucaaacacaaguguacacuucaguuguguacaaauuuugguccaaguuuuacucuuuuggaagaauaagcauguca

SEQ ID NO: 4120455 - RNA, 65 nt, Human
uggcaaagaugaagcauuucgucucuucgagguaauguugaauuggcuucaucuauauguugcca

SEQ ID NO: 4120456 - RNA, 78 nt, Human
uggcaaaguaucugucccagcuccauaugaaagaaagacuugucaucaucugaacccuuugggacacuugcuuugcua

SEQ ID NO: 4120457 - RNA, 57 nt, Human
uggcaagaaacugaggccugcugucaacaguuagcagggaaccaagaccuuuugcca

SEQ ID NO: 4120458 - RNA, 81 nt, Human
uggcaagagaaaccuauugcauuugcaagauuagagcuaauugguuuugcagagugcaauaaaucaguuuugaaaaugcca

SEQ ID NO: 4120459 - RNA, 59 nt, Human
uggcaauuucagaaaauagaauaaagauuagucuuaguuuaguuuugaugaaaaugcca

SEQ ID NO: 4120460 - RNA, 69 nt, Human
uggcacagugauuuuaggauagauggacuuccugcaugguggccaacuccuccaagggugauuguucca

SEQ ID NO: 4120461 - RNA, 85 nt, Human
uggcacaugccuguaaucucagcuacuugggaggcugaagcaagcgaaucgcuugaacccaggagguagagguugcagugaccca

SEQ ID NO: 4120462 - RNA, 59 nt, Human
uggcacaugguaagugcuuaacaaguguuagcacauguuauagcaaauagugugugcca

SEQ ID NO: 4120463 - RNA, 67 nt, Human
uggcaccugcucaucuggacucagcgccugccuccauccaaguugagugucccaaagcagguaguua

SEQ ID NO: 4120464 - RNA, 73 nt, Human
uggcacuaauagagucauuauuauuguucucacagauuagauggcagagccagugaugaagacucuggagcca

SEQ ID NO: 4120465 - RNA, 56 nt, Human
uggcacugucaagaacuuaauaaaucagagauaagugaguuaaaaugucagugcca

SEQ ID NO: 4120466 - RNA, 69 nt, Human
uggcacuguggauuucacaaguuuccugacuucugugagcuguuauguaacguggagauugacauguca

SEQ ID NO: 4120467 - RNA, 55 nt, Human
uggcagaagguaccugaccccaaguguuuuugccaccaggaaacaccuacugcua

SEQ ID NO: 4120468 - RNA, 88 nt, Human
uggcagaauuguacuaguuauucuuuguaugguacaucuaaaacucaggguguuaguauuaaggaguaaaugucaacaucucuagcca

SEQ ID NO: 4120469 - RNA, 58 nt, Human
uggcagagcccagacuccagucagauuugccuggccccagaguggguguucugaacca

SEQ ID NO: 4120470 - RNA, 72 nt, Human
uggcagaggagcccacccaggcaccuugugcacucacagaaaucugggcucugggaaauggucuuccugcca

SEQ ID NO: 4120471 - RNA, 81 nt, Human
uggcagccccuccagggaggguccugaggccggcaguggugaagcagcaggcaccggguugcuccccuccgaggggcucca

SEQ ID NO: 4120472 - RNA, 87 nt, Human
uggcagccuaauagaggugacccaccugccucacccugguuuguucuuauagauguaacgguagguggcauuucaaauggguuucca

SEQ ID NO: 4120473 - RNA, 129 nt, Human
uggcagccuaauauuuuguuaugcuuuauacagguaggaaggagacuaggcugauugaagagauucauuauaauauaguuucagcuccuucauccugucugauggggaaaagugaagaagaaucugcua

SEQ ID NO: 4120474 - RNA, 57 nt, Human
uggcagccucugguugcuucaggaugggaacuagucaccagagagaccaaggcgcca

SEQ ID NO: 4120475 - RNA, 76 nt, Human
uggcagccuuauuuacagaugaugcuauuugaaaucuaguguuuguaaauagaaguuggugaugguaaggcugcua

SEQ ID NO: 4120476 - RNA, 64 nt, Human
uggcagcucaugccuguaaucccagcacuuagggaggaagagcugggaagauagcuugagccca

SEQ ID NO: 4120477 - RNA, 62 nt, Human
uggcagcuccggguaggggcugaauuaggguggccagcccuccuuuacccagcuggcugcca

SEQ ID NO: 4120478 - RNA, 62 nt, Human
uggcagcuggagggcaauggcccccaaccccuggcacggccaucccacccgccagccagcca

SEQ ID NO: 4120479 - RNA, 87 nt, Human
uggcagcuggggcugaagacacccaagggcuugacugcucacuaacuuggcugacaguuaaauuuggcuguuuucucaaagcuguua

SEQ ID NO: 4120480 - RNA, 61 nt, Human
uggcaggaaaguaacagagcacagcggaugguacaauaaagugcuaguuaacuuuuagcca

SEQ ID NO: 4120481 - RNA, 79 nt, Human
uggcaggaagcccugugauggagacuagaggccaagaggucuaaagacacuuuuuacagggggcucuuuguauccucca

SEQ ID NO: 4120482 - RNA, 58 nt, Human
uggcaggaguuaggguaaaaaugaccuaauaggucuuuuccaacucugauuucuauca

SEQ ID NO: 4120483 - RNA, 93 nt, Human
uggcaggaucaguugcccacuggcuguuggucagaggccucuucugguuccuggccuugugacccucuccaaugggcagcucacagccuggca

SEQ ID NO: 4120484 - RNA, 59 nt, Human
uggcaggcaggcagccuucugagcugggguccuuuugagauggcuuagccuggcuccca

SEQ ID NO: 4120485 - RNA, 61 nt, Human
uggcagggagccaccggucaugucccacuuaaaggacacacaaccgagaagcuucuuguca

SEQ ID NO: 4120486 - RNA, 59 nt, Human
uggcaggucaugaguggccaccucacucuccaccuggucacccccaccaucaccuccca

SEQ ID NO: 4120487 - RNA, 60 nt, Human
uggcagguggcucuggcauucugugcaaaucaaacagaauuaaccucauaacccuugcca

SEQ ID NO: 4120488 - RNA, 76 nt, Human
uggcaguaccauuugucacacauaguuuauccuaaauucaccacugagaaugaacuacaugugacaauugaaguca

SEQ ID NO: 4120489 - RNA, 62 nt, Human
uggcagucacaucaguaggaaggaugcagaaaaaugacagagucgucgucuuucuuaugcca

SEQ ID NO: 4120490 - RNA, 60 nt, Human
uggcagucgaucauauucagcaggagagaccaggauguuugcuauuugauggauugcaca

SEQ ID NO: 4120491 - RNA, 66 nt, Human
uggcagugaaagacaauugggccaguugagauucacaacuccagccugaaaauuuucuuuacguca

SEQ ID NO: 4120492 - RNA, 64 nt, Human
uggcaguggcuccuuucauggguccaugaaaucuuaagcagggccaggaagugcagcccugcca

SEQ ID NO: 4120493 - RNA, 106 nt, Human
uggcaguguuagcaugaucccaggguggaguuuucagcccucugacauuaaaaggugaagcagaggacaugaaaacucgcucugugcauccucuguacgcuggcca

SEQ ID NO: 4120494 - RNA, 74 nt, Human
uggcaguuaagagaucauugcugccuuuuucuauaauuggauauuuauaauaaagaagauagaaugagcugcca

SEQ ID NO: 4120495 - RNA, 76 nt, Human
uggcaguuccugcugcucaccuuuuugucauccucuucucuuuucaggggcaaacaggagaguaaagagagggcca

SEQ ID NO: 4120496 - RNA, 88 nt, Human
uggcauaauaaaguauaagcauuggaguauuccaugcacuugucuaucaaacagugguccauacucccaacccuuuugcauugcgcca

SEQ ID NO: 4120497 - RNA, 97 nt, Human
uggcauagaucugaaauuuagagagccaguugucauaguucuaacaugccccuucaucaugugacugcagcuucucuuuccaaauuaucuccugcca

SEQ ID NO: 4120498 - RNA, 109 nt, Human
uggcauauagggccucagaagggugagugacauguuacuggaguucaagugcacugaauaaccuuccagccauucauuaugacaccuacugggaaucuauuaugugcca

SEQ ID NO: 4120499 - RNA, 56 nt, Human
uggcauauguuccaaauaauccucauacagggaagauuuggcaaaggcgaugcaca

SEQ ID NO: 4120500 - RNA, 80 nt, Human
uggcauauugcugagugaccaauaaauauuuucugaauaaauaaugagaguaaacaugcuguguacucagcacugagcca

SEQ ID NO: 4120501 - RNA, 74 nt, Human
uggcaucugaggcaguuuaauuuuugaagcggagacacagaagcuuuagcaaauuagcaccucuaaggauggca

SEQ ID NO: 4120502 - RNA, 73 nt, Human
uggcauggaagaaaggauauauagaugaaagagguuaauaaaaguucugucaucaaauaugcuuucucugcua

SEQ ID NO: 4120503 - RNA, 81 nt, Human
uggcaugggaggcuggaaagagaaccugggggcccugcgggaggaggcugugccccagcuugucugauucagccugugcca

SEQ ID NO: 4120504 - RNA, 57 nt, Human
uggcauguauuuguggugaauuaugaauagaaauaauuuuucaugcauacaugcaca

SEQ ID NO: 4120505 - RNA, 56 nt, Human
uggcauguucucuuagcagcucccuuaacagggugagguagggcagguacgugcca

SEQ ID NO: 4120506 - RNA, 60 nt, Human
uggcauguuguuuauguuucuggagaauaaaaucuuaccagaucaauaaacgcaugucca

SEQ ID NO: 4120507 - RNA, 59 nt, Human
uggcauugcuagugacccagcaggucugacugccuuucugcucuauugcuggcgaucua

SEQ ID NO: 4120508 - RNA, 68 nt, Human
uggcauuguccugccucuccaugcuaacuaccuuuuagcgcauguacugagugccaggcacuaugcua

SEQ ID NO: 4120509 - RNA, 65 nt, Human
ucuucaauuucucaauaggcaugugaucucagaaaaaagguccugugucccagagaaagagaaga

SEQ ID NO: 4120510 - RNA, 60 nt, Human
ucuucacagaugcauauacuucauccuggcuuccacccacagagguugcaucugugcaga

SEQ ID NO: 4120511 - RNA, 56 nt, Human
ucuucacagcuuuguccagaagcccacaugguguugcuggcaugcaugcuguagga

SEQ ID NO: 4120512 - RNA, 56 nt, Human
ucuucaccauaaugcaaagugggauuuagugggauuuugcuuuaagauggagagga

SEQ ID NO: 4120513 - RNA, 61 nt, Human
ucuucacuggaacuauuuuaauaaaaugagcuauaagcuuuuaacauaguccagagaacga

SEQ ID NO: 4120514 - RNA, 76 nt, Human
ucuucacuggccaaacugaagaaugaaggggaaauugauaaaaucaccaccccagaauuuuucaaggccgugauga

SEQ ID NO: 4120515 - RNA, 59 nt, Human
uggcaggcucugaguagcaccuguguccuuuagaucaagcaucugcugccaguuugcca

SEQ ID NO: 4120516 - RNA, 62 nt, Human
uggcagugccagagguacuaguggagggccuaacaucccacauccacuggauuggcaagcca

SEQ ID NO: 4120517 - RNA, 57 nt, Human
uggcagugggcauauuuucuguuacgaccuugcuuuuagcagaaacaguucaggcca

SEQ ID NO: 4120518 - RNA, 65 nt, Human
uggcaguugaguuacugggugaaaaguuuaaugugcaucggauuuuuuaaaaaguagcauugcca

SEQ ID NO: 4120519 - RNA, 73 nt, Human
uggcaucaguguuaacaugaaugguuuccuggacagcaacuacugucaguaaacuguccacauguggcaccca

SEQ ID NO: 4120520 - RNA, 74 nt, Human
uggcaucaguuucuagccucacuguuuagaauguugcaguucugaaucagugucugggcuggagaaagaaucca

SEQ ID NO: 4120521 - RNA, 91 nt, Human
uggcaucaucacugucuuaaacaugcuugcuuagaaucagcuuccucccagaugcugaagcuaacggcuaugucuaaaaccagaugggcca

SEQ ID NO: 4120522 - RNA, 76 nt, Human
uggcaucucauuuggccauuccagucacaugcucaaacccagagccaaugugggagaggauuagacaaggcugcca

SEQ ID NO: 4120523 - RNA, 61 nt, Human
uggcaucuccgacagucuugaugcgacuuaacgcaugguaagaacccaucagagaaggcca

SEQ ID NO: 4120524 - RNA, 75 nt, Human
uggcaugaaccccggaggcggagcuugcagugagccgagaucgcgccacuguacuccagccugggggacagaucg

SEQ ID NO: 4120525 - RNA, 56 nt, Human
uggcaugcaugggacagaaacaucaggcagacgucagacugacuccuuugcugcca

SEQ ID NO: 4120526 - RNA, 81 nt, Human
uggcauggauggccugagcacagcuggcauggaggucaggccaagcuaagcugagagcccaggccacagggaguccugcua

SEQ ID NO: 4120527 - RNA, 61 nt, Human
uggcaugguuuccugcaacguucugccucuggggcagagcagcuuuucggaaccacugcua

SEQ ID NO: 4120528 - RNA, 71 nt, Human
uggcaugucucuacacugacaguaggugcauugcugcagaccggugugcuguuguucagguagaagugcua

SEQ ID NO: 4120529 - RNA, 77 nt, Human
uggcauuauguagcuaaaaauuguguccugucucuaccuauuuuugaagaccauccuuuaguuugcguuuccugcca

SEQ ID NO: 4120530 - RNA, 64 nt, Human
uggcauuucuggccauuugugucugugacagucucucagcccaggaguggugcaggaccugcca

SEQ ID NO: 4120531 - RNA, 59 nt, Human
uggccacagccucugccaguucaauucuugaaggccugcucugugccagggcugggcca

SEQ ID NO: 4120532 - RNA, 90 nt, Human
uggccacuucccuccucugcacggggccucugcugggccgugguggugcccacagcuggccccacaguagaggcaggcagaggguggcca

SEQ ID NO: 4120533 - RNA, 67 nt, Human
uggccagaacgggaagcugaaauucugaaacaagcaaaauuuuucacaauuucccuucaucaggcca

SEQ ID NO: 4120534 - RNA, 58 nt, Human
uggccagaccugacugucagggugcagucacccugggauggauuggcaggaaugguua

SEQ ID NO: 4120535 - RNA, 85 nt, Human
uggccagagcuuaguacaggcccauccgucacggggcugauuugguucagcagguguuggcugggccaucgcucauuucaggcua

SEQ ID NO: 4120536 - RNA, 62 nt, Human
uggccagauucaugcauguaucacccagcaguuagcgaugagcacucaugagcucugggcua

SEQ ID NO: 4120537 - RNA, 95 nt, Human
uggccaggauggucucaaucuccugaccuugugaucugccugccuuggccucccaaagugcugggauuacaggcgucagccaccgcgccuggcca

SEQ ID NO: 4120538 - RNA, 76 nt, Human
uggccagggaagcuggucacgcagguaaucuggcuauuucuccuuacagacccagcugaccacuuuccuugagcca

SEQ ID NO: 4120539 - RNA, 66 nt, Human
uggccagguagcugauuucaauacuugaacccaauugggaaagaauuggucacaugcuacaagcca

SEQ ID NO: 4120540 - RNA, 55 nt, Human
uggccagguguggguucucagaaauguucuuuuugauuccccuucacucuggcca

SEQ ID NO: 4120541 - RNA, 67 nt, Human
uggccaugggugggagugaaggggcucagccuuaggggcgggaagucuuuucuuccacccaaaucca

SEQ ID NO: 4120542 - RNA, 56 nt, Human
uggcccaggcgaggugggcagacaugacucucgcgucagcaucuucccuggugcca

SEQ ID NO: 4120543 - RNA, 57 nt, Human
uggcccauguaugugucaggguuugcuuagggacccccaaacaugaucauggugcca

SEQ ID NO: 4120544 - RNA, 76 nt, Human
uggccccagccaugaagacucagaagcuaagauaccgacgguguuccucugaacuucuuccaauggcuaaaagcua

SEQ ID NO: 4120545 - RNA, 80 nt, Human
uggcccuguucuacuucauuccuucccuaagcaacuagcaugaagaagcuaugauuacaagggcaaugaacaaagggcca

SEQ ID NO: 4120546 - RNA, 65 nt, Human
uggccuauugucugggaaaaggaauguccaaggaugcucacuacauuuuagacaguaaagagcca

SEQ ID NO: 4120547 - RNA, 96 nt, Human
uggccuauuuuuucuuauggggggaguguugacaagauuuuguggcauuacuuacuggcccacaucaucugcauguccccauggaucccaaggcua

SEQ ID NO: 4120548 - RNA, 63 nt, Human
uggccucagaauugccucugugagcagcugguguggcugcacuuuggaaaauuuugaguucca

SEQ ID NO: 4120549 - RNA, 64 nt, Human
uggccucagccucaucacucugacccuuccaggucuccaguggcacaaaugggugcucaggcca

SEQ ID NO: 4120550 - RNA, 122 nt, Human
uggccucugaugacaggaggggagccauccuuuaggagugaggaccgagcagauuuagaaaaaccuucaauuccugcuuggcuuuacuagggggacauccucucucuagcagcuggagguca

SEQ ID NO: 4120551 - RNA, 78 nt, Human
uggccucuggccacuuuaaguuaccaguggaaagagcccaccucuuuucaaguuguugcauuaaaugucucaaggcua

SEQ ID NO: 4120552 - RNA, 61 nt, Human
uggccucuugcuguagaagcaaagugaccuucugucagguuaaccugcagcuggagggcca

SEQ ID NO: 4120553 - RNA, 60 nt, Human
uggccugaguugucugcaggccucaucucugucugagcucguccccaaccaaccaggcca

SEQ ID NO: 4120554 - RNA, 122 nt, Human
uggccugaugcacgccaccagccucccgcugaaaggugacacucugccagcuggguucccuuagucacccugugggcgccugucagccucacucaagaauggagcugguggcugcaucccca

SEQ ID NO: 4120555 - RNA, 59 nt, Human
uggccuggcagagcaaggccugccccacuggguuccugccuuggugucugguaguguca

SEQ ID NO: 4120556 - RNA, 56 nt, Human
uggccuggcucacagugagauucauggggcagccacgaaucugccugagccagcca

SEQ ID NO: 4120557 - RNA, 66 nt, Human
uggccuggcucaugauaaucagauuuauaggaggcucacuuacaaaucagaucaugaguuuauuca

SEQ ID NO: 4120558 - RNA, 56 nt, Human
uggccuggugcucaggcaguaguagauuuugccugcugacuucaguaucaaggcca

SEQ ID NO: 4120559 - RNA, 59 nt, Human
uggccugucuuguugugcuagauauacccauccccgcagccacugcagacagaaagcca

SEQ ID NO: 4120560 - RNA, 101 nt, Human
uggcgguaggcaaccugucuagugaaaguucaaggaggucucacuaaaaacacagugaguucuaccuccuggcuuaucauggacaggcucuguuuauucca

SEQ ID NO: 4120561 - RNA, 60 nt, Human
uggcgucucucauaaguaugugccuuuugcagguccacaaacauaugaaugauagagcca

SEQ ID NO: 4120562 - RNA, 66 nt, Human
uggcuaacauuuuaguuuuagguagaaauguagaauugacaauaucuugaaauuggaugguagcua

SEQ ID NO: 4120563 - RNA, 78 nt, Human
uggcuaagaaucauagagccacugauagagcaauagcacugauuauuaguuaucaaaggcuaugugauuuuuagguca

SEQ ID NO: 4120564 - RNA, 68 nt, Human
uggcuacccagagccucacccugugcacagaggagugugucaaaacuggggcagguucuggucagcca

SEQ ID NO: 4120565 - RNA, 79 nt, Human
uggcuacuggaaguccaagaacaaggugcuggcaggauugauuucucuugaggcucucuccuuggcuuucagaaggcca

SEQ ID NO: 4120566 - RNA, 72 nt, Human
uggcuacuuuccuuugaucuucugcuuccuuugaacaaaguagcagaaggucuugaagggcaaaaguggcca

SEQ ID NO: 4120567 - RNA, 126 nt, Human
uggcuagaaacgugcuaucuuucagugauaaagacgcucuaguuuccuccuggcauggugccugucagaggcuaucauccuagaaggaagcuaggaucacaggguuauuagcaacaucuuuggcca

SEQ ID NO: 4120568 - RNA, 64 nt, Human
uggcuagcccagagccugaguagggaaggcuugauuuuacgucugcuuuaacucugggaagcca

SEQ ID NO: 4120569 - RNA, 95 nt, Human
uggcuauuucuuuaaccuuuggcccaucucuuuuauaauaaaagcaggccaucaaaugaagugcugguucuuaggagagagauggcgucaagcca

SEQ ID NO: 4120570 - RNA, 74 nt, Human
uggcucaaggaaacagauuuuagacucuuggccuccagaauuuugagagaauaaauuucuguuguuuugagcca

SEQ ID NO: 4120571 - RNA, 59 nt, Human
uggcucaagugauccuccugccacaaccuccgaguagcugggacuucaggcaugagcca

SEQ ID NO: 4120572 - RNA, 55 nt, Human
uggcucagccagcccuaggaacagcuugcuuuguuugugcugcuucuuugagcca

SEQ ID NO: 4120573 - RNA, 92 nt, Human
uggcucaggacagguguucuagaucagcugacagcucugcuccacaauucaauucagagaacuggucuaaagauacuuggccuucaaaguca

SEQ ID NO: 4120574 - RNA, 62 nt, Human
uggcucaucuuuuuagacuuaucgaaaccauauagcaggaggauggucuuugaggugaacca

SEQ ID NO: 4120575 - RNA, 64 nt, Human
ugccagucacaguucucaaagagcuauucucuuccucccuuccucauucaggcugugccuggua

SEQ ID NO: 4120576 - RNA, 66 nt, Human
ugccagucagcuggccaggcuggcagccugccagagaaagccagccagccagccaguugcucagca

SEQ ID NO: 4120577 - RNA, 56 nt, Human
ugccagucggcacuuuaucuggccggacauuggucccucaggaggucgaccuggca

SEQ ID NO: 4120578 - RNA, 59 nt, Human
ugccaguggccugugugguggccucuauucucaggcuccaggcaagagaggcucuggca

SEQ ID NO: 4120579 - RNA, 66 nt, Human
ugccaguugggcccaggaaauagccaggagguggggagcaccaggucuuggguuuucugggaggca

SEQ ID NO: 4120580 - RNA, 84 nt, Human
ugccauaagauuguaugccuucaagucuuuuggcaagccuuccuuuugccaggccaaugaaggcagggaaugcaauucuaggca

SEQ ID NO: 4120581 - RNA, 76 nt, Human
ugccauauaaguguguggcuguuaguucccggcuugugcagugccuaaguaugcugacugccuuaccuauauggca

SEQ ID NO: 4120582 - RNA, 69 nt, Human
ugccaucccuucucuggccagcagagggaagcagaugcccagacugugaccuccaggaaggggugugcg

SEQ ID NO: 4120583 - RNA, 64 nt, Human
ugccauccuagcaucagaugagaagcugugaggccagacaccuacaguugcgugaugugaggca

SEQ ID NO: 4120584 - RNA, 75 nt, Human
ugccaucuccaucauccagggccggugguccacuuugagaugucugugcugucugccucaggaugagggugagca

SEQ ID NO: 4120585 - RNA, 88 nt, Human
ugccaugcuagaaggaagcccagcacuucucugaagauggcaccaaaaagguagaacuaggaaggcagguuccuaacucuggcaugca

SEQ ID NO: 4120586 - RNA, 124 nt, Human
ugccauguccagcucagcaaaguggcaaagguuucacuaggguauggcuucucaugaugcaguacccugcacacagaaccucauagccucucuaaacgucuuuacacucuggcugggacuggca

SEQ ID NO: 4120587 - RNA, 67 nt, Human
ugccauguggauggucuccucaucacacacaggcugugacucuugaugacaggccacccaccuugca

SEQ ID NO: 4120588 - RNA, 69 nt, Human
ugccauuacuuggggaggauaaaaggagagggaagaaaacuagcuuccuuaaauaucuacccuguggca

SEQ ID NO: 4120589 - RNA, 69 nt, Human
ugccauuagaguauaucauguugugcuucagcauuuacuuaugcauaacaaauaugcuuuaaauaggca

SEQ ID NO: 4120590 - RNA, 58 nt, Human
ugccauucucuggcuaugggcuucugcacagugcugaucaccagugccaagaguggca

SEQ ID NO: 4120591 - RNA, 59 nt, Human
ugccauucuugucucuucagcagagcugcugugcuacugaaaugauguacaagaaggca

SEQ ID NO: 4120592 - RNA, 65 nt, Human
ugggcucagugggagaaagggcaaaugcugaucagcccuuuucuaagucuuccauuuccuuucca

SEQ ID NO: 4120593 - RNA, 101 nt, Human
ugggcuccccaggcuuuggguguccucugggccuggucucauggaguaguucaggcuggagacucaagacugcagaagacgcuauggcgaggggagaucca

SEQ ID NO: 4120594 - RNA, 59 nt, Human
ugggcucucacacauguucugacggcuacauggagacaccagaacagucugagaggcca

SEQ ID NO: 4120595 - RNA, 60 nt, Human
ugggcucuggggaaacugugaugaacagaacagacaaaaauuccaguuuucuugagcuua

SEQ ID NO: 4120596 - RNA, 114 nt, Human
ugggcugagcuagcaggugccuuugggauuugggucugugaugagagguugugaaggagaaauuccggaaagguuacaaacucaggugccaaaagcaacugcacagcucuucca

SEQ ID NO: 4120597 - RNA, 58 nt, Human
ugggcugcuguuacaggggcugguggggagagccccagcugccugugcugggagccca

SEQ ID NO: 4120598 - RNA, 82 nt, Human
ugggcuggaaacugucagcaggacagagaugcaaaaauagaauaggacagugccaucgagccugcugagguugacaugccca

SEQ ID NO: 4120599 - RNA, 64 nt, Human
ugggcuuauccguccuuacaucaccuccucuuguucaaagacugaaggguaaugugggagccca

SEQ ID NO: 4120600 - RNA, 77 nt, Human
ugggcuugcugagauuucaggccaaggagugccugcauaauagaccacuuaaaacuccuggaauuguagugagcuca

SEQ ID NO: 4120601 - RNA, 58 nt, Human
ugggcuugggauauuggguuaacucguggguaagggucauucauaucucucaagcuua

SEQ ID NO: 4120602 - RNA, 92 nt, Human
uggggaacacucaggaaauugagauaauggcaaacaguaguauauuuuuuguaaucuauuauuaaauuucuagagugucuacuguuacccca

SEQ ID NO: 4120603 - RNA, 56 nt, Human
uggggaagaauaauguauguacucugagaguauuccugcaaaccauucccucccca

SEQ ID NO: 4120604 - RNA, 77 nt, Human
uggggaaggaaucagaugcacugcaguauauacuguaggauucuauuuauauaaaguauuguauuaguccauucuca

SEQ ID NO: 4120605 - RNA, 80 nt, Human
uggggaagggaugguagaauggugauguguggagagccuaguucugagcuguggccauucuuccuacucuuaauucccca

SEQ ID NO: 4120606 - RNA, 71 nt, Human
ugggagguauggucuuugagaggugacugagucaugaggacucuucuuucaagaauggauuaggucucuua

SEQ ID NO: 4120607 - RNA, 106 nt, Human
ugggagguggaauccacuggagaagccgcugcuacccagaaccuucccauacgugccugggcuccaaacugggagcuggcggauuccccaggccuggaaaccccca

SEQ ID NO: 4120608 - RNA, 56 nt, Human
ugggagugauacaguauggaauuuucuauuugguacaauuuagaauguagcuccca

SEQ ID NO: 4120609 - RNA, 75 nt, Human
ugggagugggguuacucuaugaacauccucuuacagccaugauggcuugggcaggcacauagaguuuaauuccua

SEQ ID NO: 4120610 - RNA, 62 nt, Human
ugggaguuauagcaagaaaacacaagaauuaccuagguaagugaguucuugcuagauuuuca

SEQ ID NO: 4120611 - RNA, 66 nt, Human
ugggauauaaucugaaaaguauuugugaaucagucuauggauucaccuuacuuggauuguuuucca

SEQ ID NO: 4120612 - RNA, 102 nt, Human
ugggauccaagacugaauuggcaagcaaguuauccaguucaagggaaauacaguuccaucgugcuuugugauacugagcuuggcauucagacuuugaggcca

SEQ ID NO: 4120613 - RNA, 69 nt, Human
ugggauccggggagggcagaggcucccucagccaggccugggcuccgccugcugcccucccccagccca

SEQ ID NO: 4120614 - RNA, 55 nt, Human
ugggaugaaagguuguagauuaucccugugguaacugcacugauuuaucauccca

SEQ ID NO: 4120615 - RNA, 129 nt, Human
ugggaugacccagaucauguuugagaccuucuacaccccagccauguagguggccauucaggcugugcuuucccuguaagccucuggcuguaccacuggcaccgugauggacucuggcagggucaccca

SEQ ID NO: 4120616 - RNA, 59 nt, Human
ugggauggccuuugaaagccagcugagacaccagcuuagaguugauagauggcguccua

SEQ ID NO: 4120617 - RNA, 78 nt, Human
ugggauggugcaaaaguaauuaugguuuuugcuauuaagacuaauggcaaaaacugcaauuauuuuuguaccaaccua

SEQ ID NO: 4120618 - RNA, 78 nt, Human
ugggauguucuuucuucugagaucagggagaauuggaacauagauauuuggccuuaguccagaagaagcaacaucuua

SEQ ID NO: 4120619 - RNA, 130 nt, Human
ugggauguuuaauagcaagggaaguaacugugcgucuguuuuaaacucaaccaugauuaaauagggagaggaagcaggccgcuucuaaagcuucccuuuaguucuccaaucuuaugcuauuuacucuuca

SEQ ID NO: 4120620 - RNA, 78 nt, Human
ugggauuaucuagauuauucaugagucugcuuaaaaggaaauuuuuuaaggcaggacuggauagcuauggcuuuccca

SEQ ID NO: 4120621 - RNA, 94 nt, Human
ugggauugggagggggcaugacuuuuggagugggagcgcagggcccugaccucccauucugccaaggacauugcccucacuuucaacagucuca

SEQ ID NO: 4120622 - RNA, 89 nt, Human
ugggauuucuucuagggaugucugucauuaugcuuucuuguguagagccauuaggaaaaguaaacacagucauccguggucaaauuuug

SEQ ID NO: 4120623 - RNA, 63 nt, Human
ugggcaaacugucaaccaugucagaacauacggaauacucuggauggcucaaaguguugccca

SEQ ID NO: 4120624 - RNA, 55 nt, Human
ugggcaaaugcuuuuuagucaauccuaggauucuauucuaagaggucguuucuca

SEQ ID NO: 4120625 - RNA, 56 nt, Human
ugggcaacuacugugugucaggcuggauuccagcugcugggauacaguagugaaca

SEQ ID NO: 4120626 - RNA, 61 nt, Human
ugggcaagaaaagagccuucagugguguacauuuccaccguuuggggcuguuucuuaccua

SEQ ID NO: 4120627 - RNA, 65 nt, Human
ugggcacauacagaaagauucuucaaauaaaagcuaacauaaauugaggauuuauuaugugcuca

SEQ ID NO: 4120628 - RNA, 78 nt, Human
ugggcacggagaagcccuggggucagugucgugcacggauggcggcaguguugaacccaggaggcugaacccggccca

SEQ ID NO: 4120629 - RNA, 60 nt, Human
ugggcacugaagcuuugagcagagauccuuuuuuccacuuucuccuggugacaguaccca

SEQ ID NO: 4120630 - RNA, 56 nt, Human
ugggcagacugagcccuguccccucugggaucccuggagagagcuucagucgcuua

SEQ ID NO: 4120631 - RNA, 59 nt, Human
ugggcagagucauacaggagaccaccgacaugguuaacucacacacugugaccugccca

SEQ ID NO: 4120632 - RNA, 64 nt, Human
ugggcagauguccucugaaguggcaugggcugcuugcucacuggccuucccaggacccugccca

SEQ ID NO: 4120633 - RNA, 56 nt, Human
ugggcagggccagggugcuaugggagcauauaagaauggcacagaacccuugccua

SEQ ID NO: 4120634 - RNA, 63 nt, Human
ugggcaggugcuauuuuccauggucauuuuugucacuugacuucauaaauauuuacuugcuua

SEQ ID NO: 4120635 - RNA, 81 nt, Human
ugggcaguggcagagugggggcagagaaauggacaguugggcuguugcuuggauucugggucuuugcccucuggcagccua

SEQ ID NO: 4120636 - RNA, 59 nt, Human
ugggcaguugcuccucagacccuucugggccaccagcacugggcagggagggacuccca

SEQ ID NO: 4120637 - RNA, 73 nt, Human
ugggcaucucuguggcaguucugguucaucucagauguugacuggugaccaggcugcggcuggcuggugccca

SEQ ID NO: 4120638 - RNA, 64 nt, Human
ugggcaugagguuaccuaucucacaggauuguugugaagauuaaaugaagugaccugugcauca

SEQ ID NO: 4120639 - RNA, 84 nt, Human
ugggcaugaugaagggcaagaggcauuugguuuugugacuuuccuucacauaaaugguaaugucuuucuguuuuuaugaugaca

SEQ ID NO: 4120640 - RNA, 92 nt, Human
ugggcauguuucgauauucaauacaaauguacuguagaauagcaaaugccaucugcgugaauuugcauugugggauggaggaacgugaccua

SEQ ID NO: 4120641 - RNA, 93 nt, Human
ugggccacucaguggaaccaggaaguaugacccaacagaccacagagacuuuguucccugccuccguugagucagcuucggacccacgguuca

SEQ ID NO: 4120642 - RNA, 60 nt, Human
ugggccagcauauagagugaaguagauauguaacuccuuugcccuguauucuggaccuca

SEQ ID NO: 4120643 - RNA, 64 nt, Human
ugggccauucugcuugguucuugguaugacugcuuccugucacuaccuccacgguaguggucca

SEQ ID NO: 4120644 - RNA, 66 nt, Human
ugggcccucagcgcugguaucuugcuucaccuggggauggugaugaaaugaugcagagcugacuca

SEQ ID NO: 4120645 - RNA, 79 nt, Human
ugggccgagaugaugcaucuguuuaaggcuggaaggaagagaaauagaggccuugacaaaaaccucauuucaccgccca

SEQ ID NO: 4120646 - RNA, 60 nt, Human
ugggccggacugggguaacagcaugagucuccugaugcccauccauggggucauggccug

SEQ ID NO: 4120647 - RNA, 60 nt, Human
ugggccgggcacuguacugggcauugggaguaaagacugagcuaggcuguguccugccca

SEQ ID NO: 4120648 - RNA, 55 nt, Human
ugggccucccaugucuuagggacgcagaggccagccuggguagaaugggagccua

SEQ ID NO: 4120649 - RNA, 55 nt, Human
ugggccuccugcccuggccuaggaaagugcucuaggcagccauccaggaggcuca

SEQ ID NO: 4120650 - RNA, 55 nt, Human
ugggccucugggcuauucagacucaacaucuuggaaaccugaggcccagggccca

SEQ ID NO: 4120651 - RNA, 60 nt, Human
ugggccugauucaguggaaugacuuuggaugggaauucaaagucugagcagaauuucuca

SEQ ID NO: 4120652 - RNA, 74 nt, Human
ugggccugcagucacugaauacaggccaggauuccaucucuugcauuggcuguagaaucagagacuugggucca

SEQ ID NO: 4120653 - RNA, 82 nt, Human
ugggccuggagccagccuccgccucucucccuucaagagccuugccaaggcuggagagagcgggggucaggcucuggggcua

SEQ ID NO: 4120654 - RNA, 61 nt, Human
ugggccuggggcagcccaaauccuacagaugagggaauuggggaagugugccacaggucua

SEQ ID NO: 4120655 - RNA, 82 nt, Human
ugggcgaggugaggccacccuuggguucggaggccggcgcgggaggcggcgguggcggaggcgggggugguggcgccgccug

SEQ ID NO: 4120656 - RNA, 64 nt, Human
ugggcgggcaggaggcagagagaagcugaggacgugagcugugauugugccuccucgucuccua

SEQ ID NO: 4120657 - RNA, 129 nt, Human
ugggcguccacagccucuguuccugcccacuccaccaagagccccuuaggcuguuccaggauacagaggagcaugcaaggaccaagggagcaucuuggaaggacaggagaagcgguaucaaggagccca

SEQ ID NO: 4120658 - RNA, 62 nt, Human
ugggcguggggccuucugcccgcuggccugcaccaggcggaagauggccccauagaggccca

SEQ ID NO: 4120659 - RNA, 56 nt, Human
ugggcucugaaauucucacuuuuaggaaacugguuucugcagaguuucagggacua

SEQ ID NO: 4120660 - RNA, 58 nt, Human
ugggcucugaagggucccggaugaaacucucugcaggccucugggucucucaggucua

SEQ ID NO: 4120661 - RNA, 58 nt, Human
ugggcugcagagcccggccuuccacugggcuaauggagggaggggugaccgcagccca

SEQ ID NO: 4120662 - RNA, 124 nt, Human
ugggcuggacuuuuagccucuauucugcugaccagccccagcacugcaaacaucuuuuaaacucucuuuggaaacaaggggaggcagaugggagcuggaaguugcaggacaagaauccagccca

SEQ ID NO: 4120663 - RNA, 87 nt, Human
ugggcugucagucucuuucagguuccguuucugacuucaugugauuuuguaaggcagauauauucgugaaauaggcugauggugcua

SEQ ID NO: 4120664 - RNA, 97 nt, Human
ugggcuguggggaagggcugggguggugcaguagagcugucugggguuaggaacucugcagaaguggcugggccaccuccuccuagcucagagccca

SEQ ID NO: 4120665 - RNA, 63 nt, Human
ugggcuuccagggggccacagcgugguccugugcaggacaggcuggcaaugcccugcugccca

SEQ ID NO: 4120666 - RNA, 59 nt, Human
ugggcuuggccaagugggugugaaguguuccauugacucaggccugcagugccaaccca

SEQ ID NO: 4120667 - RNA, 59 nt, Human
ugggcuuuugaacuugguuuguaaaaauaagauggaacacucagccagguacaagucca

SEQ ID NO: 4120668 - RNA, 65 nt, Human
ugaccauaagcugccuuagagggagugguucuuugauuaaggcggcucucuguggcagcagguua

SEQ ID NO: 4120669 - RNA, 111 nt, Human
ugaccaucuggagaaaauugcuguugggugacucuucagacuauccagggcaaaaguagccaggagagcagucaguuaugcauguauauuuuucccaagguaaauagguua

SEQ ID NO: 4120670 - RNA, 58 nt, Human
ugacccagcuaacccuacccuggaugccugagcccuccccaccugguuagcuggguca

SEQ ID NO: 4120671 - RNA, 92 nt, Human
ugcucuccagcccaaaugggaggccucugucccaccagggagcuuuagguuccccgggugcuucucggaggcugacaagggcguggagagca

SEQ ID NO: 4120672 - RNA, 113 nt, Human
ugcucucccuacugacucugaaaauuggacguagcuacuccauuaccagaaaggauuugguuuaguccccucuuggaucucuaguuuccaauuuaaagucuggggcaagggca

SEQ ID NO: 4120673 - RNA, 85 nt, Human
ugcucuccuucccuuccccucacggagacgccucucugagcuggggagucuuguuugggauguggauggaagggaaggcugggca

SEQ ID NO: 4120674 - RNA, 60 nt, Human
ugcucucgguucuauauucaauguggcuuuuggauugccucagaaguucagccuagagua

SEQ ID NO: 4120675 - RNA, 57 nt, Human
ugcucucugguuccagucaggaaccacgcauuggugguuccugaugcaagagagaca

SEQ ID NO: 4120676 - RNA, 72 nt, Human
ugcucucuuaaagaauguuccagcugcuuuacuuaauuguagucagcuugaaauuacauuuguuuaacugca

SEQ ID NO: 4120677 - RNA, 78 nt, Human
ugcucugaaaagagaguugccagucuguacaccaaagaagaaugcaguaugauuaauauucuuaaaauuuuuagagua

SEQ ID NO: 4120678 - RNA, 57 nt, Human
ugcucuguaucuuacaacagggugcucugaguaucagcaugggaagaucgcggagua

SEQ ID NO: 4120679 - RNA, 59 nt, Human
ugcucugugagucucugugcuuuucuacugggcugugggcagcagaggcuugacagaca

SEQ ID NO: 4120680 - RNA, 64 nt, Human
ugcucugugggugaagacaagggagagugucucauaccucuuuggugaauggucauccagagua

SEQ ID NO: 4120681 - RNA, 81 nt, Human
ugcucuguuuccuuucuggugagcauacaggcagguuuacuuguuaauauacuacgcaccaaacaaaggaggaucugagua

SEQ ID NO: 4120682 - RNA, 56 nt, Human
ugcucuucacaguuucagcauccagcucacucugggggcacugaaagggaauagca

SEQ ID NO: 4120683 - RNA, 55 nt, Human
ugcucuucaccauuacaucauguuaacuucuuugcuugggauguuugguagagca

SEQ ID NO: 4120684 - RNA, 68 nt, Human
ugcugaaaaguaaauaggccuaaccacauuuucaagccccugugcgugggucuuuugugcuuauagca

SEQ ID NO: 4120685 - RNA, 62 nt, Human
ugcugaaauauuuaugggucaagugucaugauaauugcaacuaccuuucaaaugauucagca

SEQ ID NO: 4120686 - RNA, 66 nt, Human
ugcugaaguccaagagcuccaaggaucagaagcgugguccuguuuaagaauuuuaggacuucagca

SEQ ID NO: 4120687 - RNA, 62 nt, Human
ugcugaauagaagucuucaaagggagcuuaauugcuuucaccuuuccgugauucuauuugca

SEQ ID NO: 4120688 - RNA, 79 nt, Human
ugcugaauuaguaguaguuagcagccuccuagaggaagugaggucuagcauauuacuagaaaagaauaaauauucagua

SEQ ID NO: 4120689 - RNA, 72 nt, Human
ugcugacuccuggcugugacacaaagcccucuauugcucccccugggucccucaccugccaggauuuacuca

SEQ ID NO: 4120690 - RNA, 110 nt, Human
ugcugacugagguguguugggggguuccagggugacaaguggcaaggagcuggguuugcccuucuccccagcccugguauucugaucaccuccuaugaacuccauuggcg

SEQ ID NO: 4120691 - RNA, 118 nt, Human
ugcugagauauuugaugauguuucaaauaucugaaauuauugaaggugcauuuucuauuagcccgguuaguuauuuuucagauauccaaauuuuggaaagucauuugguauacuugca

SEQ ID NO: 4120692 - RNA, 69 nt, Human
ugcugagccuuagaaacuacuagaauaagagauacaucgagauucucuuaugaaguggauucucucgua

SEQ ID NO: 4120693 - RNA, 68 nt, Human
ugcugagcuuauuagguuauuucaaggaugaaaucagacagcuccugagaagcacuuaauacacagca

SEQ ID NO: 4120694 - RNA, 68 nt, Human
ugcugaggcaguccuaacaggagcagaaaggauaacagcugccucugugcagguguguuugaucagca

SEQ ID NO: 4120695 - RNA, 75 nt, Human
ugcugaguaaaagaagcuuuauauaaaagaguacauacuguaugauuccauuuauaugaaguucuacaauaggca

SEQ ID NO: 4120696 - RNA, 78 nt, Human
ugcugaguacauuguugcgugagauggcauuuuugucauuuuguggacauugaucagccucccaugcaguaguuggca

SEQ ID NO: 4120697 - RNA, 72 nt, Human
ugcugaguucuggaggagaacuccaaucugaauucuacucaguauuagcuaccuauccuucagggccucaca

SEQ ID NO: 4120698 - RNA, 61 nt, Human
ugcugauuuuuaagugcugucuguccuucugcaacagaucagugcugggagaugucagaca

SEQ ID NO: 4120699 - RNA, 91 nt, Human
ugcugcaccguggggcugcugccaccagguggaugcuggugccuaggugauggucaccuguccacacuggagggcacucgaugaugcagca

SEQ ID NO: 4120700 - RNA, 68 nt, Human
ugcugcaggccaggucguugucccaccccaccccaucccaucccaguguccaccuaccuccugcagca

SEQ ID NO: 4120701 - RNA, 62 nt, Human
ugcugccagccaggccauggaggcuauucauucugccucuccuagcgcugaguuggucagca

SEQ ID NO: 4120702 - RNA, 65 nt, Human
ugcugcgugucuccuuggggcagaccauuuaucacaggucuaagccaggacugagagacgcugca

SEQ ID NO: 4120703 - RNA, 70 nt, Human
ugcugcuagccaugucaguuucauuuuaagucauguuucucucauggcaaugggauggcugcugguagca

SEQ ID NO: 4120704 - RNA, 58 nt, Human
ugcugcucaucagauuuuaaaacuagguagaacuaaggauaaaacgugcauggcagca

SEQ ID NO: 4120705 - RNA, 77 nt, Human
ugcugcucucucugguuugcauucuaguacugucccacugaccaggcugcugcaggcacagaugcugagcaugugca

SEQ ID NO: 4120706 - RNA, 120 nt, Human
ugcugcugccaccaaacaugcuguguguuccacauaacacaucuacaacaugguauaauuucaguucuugagugacuguguggaucacaaucuacuagcaacccuugcgggcauguagca

SEQ ID NO: 4120707 - RNA, 63 nt, Human
ugcugcugccuucuucugacucuauuacauugcucagugaugucucugacuaaggcaguggua

SEQ ID NO: 4120708 - RNA, 62 nt, Human
ugcugcugcuguggggccucaaggacagcccacugcuaacuucuagagccagggcagcugca

SEQ ID NO: 4120709 - RNA, 58 nt, Human
ugcugcuguuaucauuuuaccagcaaaccaccugccaugcaaugcauugacagcagca

SEQ ID NO: 4120710 - RNA, 112 nt, Human
ugcugcuuccucaccacugucccacugaggguuaaugccugcauaggacuuaaucugguucuuuucccagcggaguuugauccagugcuuggaccaggagaguaagccagca

SEQ ID NO: 4120711 - RNA, 55 nt, Human
ugcuggagaggaagguggggucaaaccuuuguugcccgcaucuuccucuccagca

SEQ ID NO: 4120712 - RNA, 56 nt, Human
ugcuggagauuagugaaaauaaccaagaaaauauuauuuaaaauagugcuccagca

SEQ ID NO: 4120713 - RNA, 64 nt, Human
ugcuggagcagcuaagccucugagaaguuaaugaaaguguccaggccgcauaguuacucuggca

SEQ ID NO: 4120714 - RNA, 57 nt, Human
ugcuggagucagacaauugaguucaagucucacuugcaagcucugugaccuugagca

SEQ ID NO: 4120715 - RNA, 60 nt, Human
ugcuggagugcaguggcuuaaccauagcucacuguagccuuaaacuccugcacucaagca

SEQ ID NO: 4120716 - RNA, 130 nt, Human
ugcuggaguggcuccuucccuguggugagaugaagggaccaccuccaggaggucugaguguggacacuggggccuggucuucacacacaguccucuuucucuucagcaccauucacaugcagccuccaug

SEQ ID NO: 4120717 - RNA, 75 nt, Human
ugcuggauugugaauggauuauuuuuguaugugucaaauauguagcauucaaacauuaauuuauucauccaugca

SEQ ID NO: 4120718 - RNA, 55 nt, Human
ugcuggcaccauuuucggacaugagggaaaagcccaucugggaaugaugccagca

SEQ ID NO: 4120719 - RNA, 64 nt, Human
ugcuggcaugguguauuuguucaacuccaaaaaguuaaaugcagaguuaccauaugacccagca

SEQ ID NO: 4120720 - RNA, 59 nt, Human
ugcuggccaauggcagaggcggaagcuguuuaugggggcggagcgucgccauggcagca

SEQ ID NO: 4120721 - RNA, 58 nt, Human
ugcugggcuucaacugccugagacacccugagugagaacuacauagcugagcccagua

SEQ ID NO: 4120722 - RNA, 93 nt, Human
ugcugggucaaaugguagcucuguuuaaaguucuuugagaaaucuccaaacugcuuuccacaguggcuagaccaauuuacauucucaccagca

SEQ ID NO: 4120723 - RNA, 56 nt, Human
ugcugggucccuugagagcucaugggauuaccugacuguugagcagggcccagaca

SEQ ID NO: 4120724 - RNA, 66 nt, Human
ugcugguauuugcagccugucaucauauuaguacaaugaugaaauuugcugcuaaguuccucagca

SEQ ID NO: 4120725 - RNA, 56 nt, Human
ugcugguccaugaggccagaucaaaggcugauacugcacuggcuucaggcugagca

SEQ ID NO: 4120726 - RNA, 63 nt, Human
ugcugguuuaaccauguauccuggggaccuagaaggagcucagggaacaucguuaaacuagua

SEQ ID NO: 4120727 - RNA, 75 nt, Human
ugcuguaccuccaggauguuagacguccagaaugcacugcccuuuggauacuauauauaccucaaggaggcugua

SEQ ID NO: 4120728 - RNA, 74 nt, Human
ugcuguacuucucagaacuuuuaauaugcuaauguacauuguacagcucugagagggggaauuaguaugcagca

SEQ ID NO: 4120729 - RNA, 60 nt, Human
ugcuguauuuuaguuagcuggaguugguugcaaccaagauucuugacuagaaugauugua

SEQ ID NO: 4120730 - RNA, 66 nt, Human
ugcugucaguuauacgauugguuuuauuuaacaaauacuuacauagcacuuauuguaugcugagca

SEQ ID NO: 4120731 - RNA, 76 nt, Human
ugcugucgcuuucucuucuuccuccuagcucagcuuccagagcauggggcacagcugagaaagcacaaagauagca

SEQ ID NO: 4120732 - RNA, 71 nt, Human
ugcuguggcaguuuauguauagcagucucauuaaggaacuggggaaaaauaacaucaacuagucacagaca

SEQ ID NO: 4120733 - RNA, 67 nt, Human
ugcuguggcugcccucaugggccugauauccacagagggaugacagcuaugaugggggagccaggca

SEQ ID NO: 4120734 - RNA, 60 nt, Human
ugcugugggauauauguucaaagugcuuuaugaacaguaauuuauugaauacucauagca

SEQ ID NO: 4120735 - RNA, 75 nt, Human
ugcuguggugauguuaggguuccuacuuuugugggcaggauccauuuaaguaaaagcuuuaccaugcgcuaugca

SEQ ID NO: 4120736 - RNA, 58 nt, Human
ugcugugugaggugaaaaaaggacacagaaaccugugcccuucagaacuuacauagua

SEQ ID NO: 4120737 - RNA, 56 nt, Human
ugcuguguguaccauguauguacuccucucuguauccuuuauguguguuugcagca

SEQ ID NO: 4120738 - RNA, 55 nt, Human
ugcuguguucaccaauauguguaccuuggcuuggggccacacuggaggaacagua

SEQ ID NO: 4120739 - RNA, 83 nt, Human
ugcuguuauaaaauccagcugugucacaggugauguaggauguugauuauuuacauuggucacuagcuggaucuuaaacugua

SEQ ID NO: 4120740 - RNA, 87 nt, Human
ugcuguuccaaacuuuuuccuucagggcaguauuuucugaaaucuauuaggcuacuucuagagggacaaucguuuugguaagcagca

SEQ ID NO: 4120741 - RNA, 81 nt, Human
ugcuguuuagagcaggcuugcagagaaggggcugagacuuacuagccccaccucccuucaggccugcagaaaugaacagua

SEQ ID NO: 4120742 - RNA, 76 nt, Human
ugcuguuuuccaugugucuuucaauguguaauugacaaaauacaaauuuauugaagggcauauuggauuuuuagua

SEQ ID NO: 4120743 - RNA, 72 nt, Human
uggggaauucaaaaaugggcacuaaugacuuuugagcagugcuuuccaggaggucaaaggccuguuuccuca

SEQ ID NO: 4120744 - RNA, 74 nt, Human
uggggacuaaguggaccuuagcauugggcacuuggacuacagaaaggcccaggacucagggugucgcgucccca

SEQ ID NO: 4120745 - RNA, 80 nt, Human
ugguaccugaaauagguugccugugagguguucacuuucuauaugaugaauauuauacagucaaccucuuuccgauaucg

SEQ ID NO: 4120746 - RNA, 80 nt, Human
ugguacuaacccaauuauccaacaaauaaauauaaaauuacaguuauaauuauugcuauggugagagggaugugguacca

SEQ ID NO: 4120747 - RNA, 80 nt, Human
ugguacuuaaaucuuaugugcugugagauuuuucuccuccagggaguuuagagauaauuggcacauggagaagauuacca

SEQ ID NO: 4120748 - RNA, 60 nt, Human
ugguacuuauacauuugcuugauacaaagauggauguguacaaguaaauuguagauacca

SEQ ID NO: 4120749 - RNA, 82 nt, Human
ugguacuugaagagaaguuguucgugguggauucgcuuuacuuaugacgaaucauucacggacaacacuuuuuucaguacca

SEQ ID NO: 4120750 - RNA, 114 nt, Human
ugguagaaacugaaguugagagaauauagugacuugcucaacacugcauagaaacaugguagaaacaggauauaagcauacaguccuuguauucuucuccuuuauuuauugcca

SEQ ID NO: 4120751 - RNA, 66 nt, Human
ugguagaguagaaagacaugggccagcagcugggcaacccaguuucccuucuguucuauucuguca

SEQ ID NO: 4120752 - RNA, 59 nt, Human
ugguagcaaagagggugaaggcagguaaaagaccugcaagcaaaucaacucuuugccca

SEQ ID NO: 4120753 - RNA, 88 nt, Human
ugguaguaagauugauuaaauuugguguuucucacuuuuugcccuagagaaaugaaaugaagauaugaucaguucuuaaguuuuacua

SEQ ID NO: 4120754 - RNA, 55 nt, Human
ugguagucuccaugggcaaggcugugacagucagugccacuuaaugaggcugcca

SEQ ID NO: 4120755 - RNA, 71 nt, Human
ugguagugggugaccuugagcgagaacugacaagcugcguccuugcaguccucguaaaggucgaagcgccg

SEQ ID NO: 4120756 - RNA, 56 nt, Human
ugguaguguuaacggggccaguugucacauugacagggccaauguuagcauugaca

SEQ ID NO: 4120757 - RNA, 62 nt, Human
ugguauaugcauggagguaucaaagcucgaggauagagcacacaccaguugaugcauagcca

SEQ ID NO: 4120758 - RNA, 121 nt, Human
ugguauaugucuccgugauuugaguuucaguuauggcuuaacuaaagagguuuugugaaacuguuuucaauuucauucuauuaguuaaguagcuaaguuaauuuucuaagauauaaaauca

SEQ ID NO: 4120759 - RNA, 67 nt, Human
ugguaucacagaaagcuguguccugacagcaauggccauugacagguacauagcuaucugcaaucca

SEQ ID NO: 4120760 - RNA, 77 nt, Human
ugguaucagagccaucuguauuuauguuugcugugugacugucacuuguauacaaucaugcagagacucugauauua

SEQ ID NO: 4120761 - RNA, 76 nt, Human
ugguaucaucaccuuguucucuaagaaaagaagcaugauaucagcuuuguugggggagggaggaugggggauauua

SEQ ID NO: 4120762 - RNA, 69 nt, Human
ugguaugaaagaaggguggaaaauguaggaacacuuuagucucuguuuacuuuccuucucacagggcca

SEQ ID NO: 4120763 - RNA, 63 nt, Human
ugguaugcaauguuacagaauguacugaauucuaauauagacuuucuguagcaucuguaauca

SEQ ID NO: 4120764 - RNA, 114 nt, Human
uggucaacauauaguagauaauuuauuuaauaugguuuuagugaaugcuugacuuaauaugagugaaguauucauaaggacauauguuuuaggugugcacaaauauguuagcua

SEQ ID NO: 4120765 - RNA, 95 nt, Human
uggucagaggcccuggccccuguggcuaaaaucaggauuaugucuguacugauuuacuucccagcuggguuucaggaaaagccucaaaaagacca

SEQ ID NO: 4120766 - RNA, 66 nt, Human
uggucauaaucaagucuugaugagacaaaccuggcaggucaggucagucuugcuaagauugaacca

SEQ ID NO: 4120767 - RNA, 81 nt, Human
uggucauauaucuguucccugguacaaugguucauuuuaugugucaacuuggcugcgucauugugcccagguauuugguca

SEQ ID NO: 4120768 - RNA, 89 nt, Human
uggucaucuaagcggcccugcugagcuugucuggguugcucacauaucugggggucagcaggcugucagcaggggccacugggugaugg

SEQ ID NO: 4120769 - RNA, 55 nt, Human
uggucaucuacauuuacaugaagaauucuguacauguuaaaagugaggauggcca

SEQ ID NO: 4120770 - RNA, 58 nt, Human
ugguccauguccuccaucucuccugcuuaugaacaggagggcugggcucuguggauca

SEQ ID NO: 4120771 - RNA, 88 nt, Human
ugguccuggaggggagccuggacacaaacaucuccucuggccaagaccagaggcagguguccuuuguucuuucuugucuccaggucua

SEQ ID NO: 4120772 - RNA, 66 nt, Human
ugguccuggcugcccauggacccucugaccuugaacccucauagcagcuccagggcaguuauucca

SEQ ID NO: 4120773 - RNA, 69 nt, Human
ugguccuguagcucucuaaguuccagaagaagcccuuuagugcacggggauugagagcuacaaaggcca

SEQ ID NO: 4120774 - RNA, 58 nt, Human
ugguccuuugcugccucagcaguuguuagcugcagcuggcugaguguuccaaggagca

SEQ ID NO: 4120775 - RNA, 69 nt, Human
uggucuaagaaguagauuuacagugaagcuaaugaaacuuuagcuuuauggugccucacuugaaggcca

SEQ ID NO: 4120776 - RNA, 65 nt, Human
uggucuaagagccuaacugcuggccaaauaaauucucaagucugccagcuuuagaucuuugauua

SEQ ID NO: 4120777 - RNA, 63 nt, Human
uggucuaggagguuaccuaugcucuggguuagauagaagagggcauggcaggucacuggggca

SEQ ID NO: 4120778 - RNA, 76 nt, Human
uggucucgaucucuugaccuugugauccacccgcuuuagcuccccaaagugcugggauuacaggcaugagccacca

SEQ ID NO: 4120779 - RNA, 65 nt, Human
uggucugauucuguugaacaccuuccuuaugacuuuaagcaaacuguuggaguagagucuugcca

SEQ ID NO: 4120780 - RNA, 55 nt, Human
uggucugauuucuuucuggaguucacuuccuccauggggugcugaaguuagauca

SEQ ID NO: 4120781 - RNA, 129 nt, Human
uggucugcagugucuaagggggcauggaggcagagccaggcugggauugaaucuuuguagaggaacgugaccuugcaaagagauaauccuaggcugcuguuauccuggugccagcccucccugacucca

SEQ ID NO: 4120782 - RNA, 61 nt, Human
uggucuggggucagcugggccuuugccugcuguuuggugcccagugcaggcccgcagguua

SEQ ID NO: 4120783 - RNA, 57 nt, Human
uggucugugcagggaccccaagaguuuaaaaaggugaauccuuccuugcagggucca

SEQ ID NO: 4120784 - RNA, 78 nt, Human
uggucuuacaugauaugugaaugaaucauaaguuauuccucaaacucuuaacaaguauuuauguaucuguguagauca

SEQ ID NO: 4120785 - RNA, 76 nt, Human
uggucuugaucuccugaccuuguaauccaccugacuugaccucccaaagugcugggauugcaggcgggagacacca

SEQ ID NO: 4120786 - RNA, 82 nt, Human
uggucuugaucucuugaccucgugauccgcccgcuuuggccucccaaagugcugggauuacaggcuuguaauuucuggacua

SEQ ID NO: 4120787 - RNA, 59 nt, Human
uggucuuggagucugaagaccuggguuuguggcccaguaacacaaccacuccgugacca

SEQ ID NO: 4120788 - RNA, 64 nt, Human
uggucuuuucccagaaugaaucuugcaucagcagaggugagauucaguugugagagaagacaca

SEQ ID NO: 4120789 - RNA, 128 nt, Human
uggugaacacaauuuaauucauagcaucuauuuauguggaguuuuaaaugaugauaaaauuagauggucuauaucaaggcauggaaaaugcuagauaaaugacugcugugcuuaauuauuaccuacca

SEQ ID NO: 4120790 - RNA, 101 nt, Human
uggugacuauagaaugguuauggcgaucuguguguuucacucugagcuguaaguagagauguguucgcuagauugcuguuaauuaaucguuuaguuuguca

SEQ ID NO: 4120791 - RNA, 68 nt, Human
uggugagaaguuuugagauucuggaaauauugcuuucaauggcaaaaauuucaauuacuuuugcacca

SEQ ID NO: 4120792 - RNA, 71 nt, Human
uggugagacacuucugaagguuccaagaguucagaagucugggcacuugaaauauuaggggugauuuacca

SEQ ID NO: 4120793 - RNA, 118 nt, Human
uggugagauaguaauuauauucuucaauuuaugugugggcaaacugucagaaagagucuaagugaaauucugucucaguuuaccuauauguaaauuugaaaauauauuuauuucccca

SEQ ID NO: 4120794 - RNA, 89 nt, Human
uggugaggcuauuugcuccuguugauuuuagggcaauuguguagcucuaacagccccugagcagucugcagagagcagccauuucacca

SEQ ID NO: 4120795 - RNA, 64 nt, Human
uggugauaucaugggaagguguacuuccggugaugccuagaggucacguccugugaugucauua

SEQ ID NO: 4120796 - RNA, 67 nt, Human
uggugauguaagguuucuuccuguucccagcucagacagaggagggagacaagguaccacguuaaca

SEQ ID NO: 4120797 - RNA, 61 nt, Human
uggugauguugccauuaacccuugucugaccaaaagucuagaccugaggcaaccaucacua

SEQ ID NO: 4120798 - RNA, 57 nt, Human
uggugcaagucucugaggagggugggcagaggguaccucucguuagaaacugcagua

SEQ ID NO: 4120799 - RNA, 81 nt, Human
uggugcaggaaaaacauaauuuagcaacagauuuaaaagguagucuggaguguuucuaauuacuguuuguuuaguucacca

SEQ ID NO: 4120800 - RNA, 67 nt, Human
uggugcaggugaugugaugugagcaucuuucauugcuaaggacucacuuccacuuuuaucuccacca

SEQ ID NO: 4120801 - RNA, 72 nt, Human
uggugcaugccugguaugaagcaaggaaggagugagcugaggaaucuuccaaggccagacagggcaguacca

SEQ ID NO: 4120802 - RNA, 77 nt, Human
uggugcccaugccuggagcacagcccagucccacccugccccugaggguggcucacauguucuuaaggcagguacca

SEQ ID NO: 4120803 - RNA, 72 nt, Human
uggugcuccugcugccuugucccccaagucaacugagguuguccagggcccaaaaggcagcaguagcaucca

SEQ ID NO: 4120804 - RNA, 79 nt, Human
uggugcuugagauggugaagaagacagcacacgcauuuacacagcauugauguuucugcugcucuucacugcuuuacca

SEQ ID NO: 4120805 - RNA, 59 nt, Human
ugguggaaggcagagcuacaccucuuucucucuuauaggccuguucuuugucuuuccca

SEQ ID NO: 4120806 - RNA, 95 nt, Human
ugguggaagucugagguaucccacagcccuaaugguaggcuggaguuuucugccuugaggagguugugggacuauuuuuagcacguuuuccacua

SEQ ID NO: 4120807 - RNA, 70 nt, Human
uggggagagauugaggaguuuuaagccaggagaguaaugugauggcaaaacuccugaaauuguuucccua

SEQ ID NO: 4120808 - RNA, 70 nt, Human
uggggagcagcagggcugggauuugagcccaggcagccuggcuccagcguccacguccugugcucacuca

SEQ ID NO: 4120809 - RNA, 64 nt, Human
uggggagccacaagugcugaugaaaacagaagugagcuguguuauguccucauguuguucucca

SEQ ID NO: 4120810 - RNA, 83 nt, Human
uggggagcucuccccccacugggccccacccugaggggagccgggggugguggccagcagugggcagggggcagugcccacca

SEQ ID NO: 4120811 - RNA, 72 nt, Human
uggggagguuaguuucaucaaguugucagacgccagcaggcugggagcugguggagaagcagaccucaccca

SEQ ID NO: 4120812 - RNA, 74 nt, Human
uggggagugaugccucggauaacacacccaacaaguuccccaccauggcacugaugucccagguagcgccccca

SEQ ID NO: 4120813 - RNA, 65 nt, Human
uggggaugacucucagguacuccgagacugggggaggccaagucucagaguaccugagggaccca

SEQ ID NO: 4120814 - RNA, 67 nt, Human
uggggaugccaucucugcaaugccugggagguuuccuuuuaugcacacuuagacauggcugggccua

SEQ ID NO: 4120815 - RNA, 58 nt, Human
uggggaugugcuacacuucaaugaaaauggcuuuuuaaaggaagaucuauacacccca

SEQ ID NO: 4120816 - RNA, 90 nt, Human
uggggcaaugcuggaagcggacguugugggguguuugguggcuucucagaacucauuggccauguccaacccccuucucuucaugcccua

SEQ ID NO: 4120817 - RNA, 66 nt, Human
uggggcagagcccggugccugugagggauaggaagcuccaguucaaagcaggcuugggucucccca

SEQ ID NO: 4120818 - RNA, 71 nt, Human
uggggcaggagcccuucuucagcugguggcugcaaugucccucgcugcugcugcuaagcguuucuguucca

SEQ ID NO: 4120819 - RNA, 93 nt, Human
uggggcauggucugccugggaaggggaagguccucuccagcccccaggccucaguggaguagucggcucccuccuuucugcagccaugccuca

SEQ ID NO: 4120820 - RNA, 57 nt, Human
ugcuucggggucaugggccaucauuccuagggcuuugggaggcccuggccucgaaca

SEQ ID NO: 4120821 - RNA, 67 nt, Human
ugcuucuagacacugcaauugacaguccagguaaacaugauuguaaaaguguagauguuuagaagua

SEQ ID NO: 4120822 - RNA, 62 nt, Human
ugcuucuauaccuauaaucagccucagguuccagcagcccccagagaaugagguacgaagca

SEQ ID NO: 4120823 - RNA, 71 nt, Human
ugcuucuccuuccaucaugugcugaaaguaguugcuucuuuagaacuauugcauagaaggaaggaguuuca

SEQ ID NO: 4120824 - RNA, 74 nt, Human
ugcuucugaauuucuguguaucuuaauuugacacuuuaagaaaacaaaauaagucaugccugaaauuuggagua

SEQ ID NO: 4120825 - RNA, 55 nt, Human
ugcuucuuuagccauacucuagugcagcuguuuaagauccuguggcugagaagua

SEQ ID NO: 4120826 - RNA, 78 nt, Human
ugcuugaaucugcuacaucuaccuauauaguauacgcaguauacaaaguagucaaaguagaugaugguggaauuagua

SEQ ID NO: 4120827 - RNA, 72 nt, Human
ugcuugagaauguguugcccuucucuugaguuaaaccaucaaucuuuggaaaagagacauuucucaucagca

SEQ ID NO: 4120828 - RNA, 74 nt, Human
ugcuugagcccaggaguucgaggcugcagugagcuaaaauugugucacugcacuccagcccgggcaaaagagca

SEQ ID NO: 4120829 - RNA, 68 nt, Human
ugcuugaucuucuggucaaauuuuugcaagcaguagagcccuuccagaaaugacagagaagaaaugca

SEQ ID NO: 4120830 - RNA, 68 nt, Human
ugcuugggccccagagaaagucagcagcaucuaaagccaaaacacgggauguuuucuggaguccugca

SEQ ID NO: 4120831 - RNA, 58 nt, Human
ugcuugugagaguuuuuucagauuucucugaaaaaaaucugaaagacguaacagugca

SEQ ID NO: 4120832 - RNA, 77 nt, Human
ugcuuguggauccaguagugacuuuuacauuuuauaucuaaauagaagcuggaggcuuuguuggguacucauaggca

SEQ ID NO: 4120833 - RNA, 79 nt, Human
ugcuuuacgugaggugguacaauauuaacucaaaauagaccacgaugaguuaagaauacacaucauaauuccuagagca

SEQ ID NO: 4120834 - RNA, 129 nt, Human
ugcuuuagaaugaccuggguguucauucaaaauucuaggcuccauccaagaucuucugaauccaaaaggugugcugugagaccuggugauuggaagauacagcaaauccccaggugauuugauugugca

SEQ ID NO: 4120835 - RNA, 84 nt, Human
ugcuuuauaagcaaacuaacagauggcugaaucuggauauaacugcggagaccauuuucagcauuucuguuguuggcuaaagca

SEQ ID NO: 4120836 - RNA, 55 nt, Human
ugcuuuauguuaucagaaggguggugugauaaaacaaggcugguugcauaaggca

SEQ ID NO: 4120837 - RNA, 104 nt, Human
ugcuuuccuuauauacauuuauuuacuauuagguuggugcaaaaguaauugcaaaaacaauaauuacuuuugugccuaccuaauaacagaugcuagggaaaaca

SEQ ID NO: 4120838 - RNA, 62 nt, Human
ugcuuucuccauuuaaaucuuaugucuucagaaaugcucaagaacugcgaauggagaaagua

SEQ ID NO: 4120839 - RNA, 65 nt, Human
ugcuuucuuuccaucaugaagacgauuaggucgugcuaagacccagucauccuggugugagagua

SEQ ID NO: 4120840 - RNA, 56 nt, Human
ugcuuugacugccgaccauaacauguccuaauaugcuaugacaacgcagcaaggca

SEQ ID NO: 4120841 - RNA, 72 nt, Human
ugcuuugcccaagggcccuacccucucagggacauggcaagugcagccaggaaggggagggucugcaaagug

SEQ ID NO: 4120842 - RNA, 74 nt, Human
ugcuuugucaccgaggcuggagugcaguggcacgaucucggcucacugcauccuccaccucucagguucaagca

SEQ ID NO: 4120843 - RNA, 55 nt, Human
ugcuuugugaguguguaaugacagaaaccaaggaucuguacacaaagucaaagua

SEQ ID NO: 4120844 - RNA, 61 nt, Human
ugcuuuuagccacugagcagagguaaagauaauaggaaucugcagaaagcggcuugaagca

SEQ ID NO: 4120845 - RNA, 70 nt, Human
ugcuuuucauaacuguuaagauaauuuuuaaaggaaaaccugagagacugucacauaacagaggaaagca

SEQ ID NO: 4120846 - RNA, 78 nt, Human
ugcuuuuuucuuauuuacuuauuucucagaaauuauagaagcuuuaaaaaugcagaucuuugagaaaugggaaaagca

SEQ ID NO: 4120847 - RNA, 97 nt, Human
uggaaaauagcagucuggguuacuaaaggauucuugauugucauggaugaguaucacaugaacaacagauguccauuguuacuaacugccuuagcca

SEQ ID NO: 4120848 - RNA, 82 nt, Human
uggaaacaaugauaaaaaguucacuauguagcagcgucccuaucucuuggacauuguuccugagaacuuggguuuguuucca

SEQ ID NO: 4120849 - RNA, 58 nt, Human
uggaaaccuacugauacaggaguuaaguacagcuggcucucuguauccauggguucca

SEQ ID NO: 4120850 - RNA, 86 nt, Human
uggaaacucgugggaaaucauuacaguguuuauaugucucccuugucggacggcguuauccugugauauuuuaccaguguuuucca

SEQ ID NO: 4120851 - RNA, 115 nt, Human
uggaaacuuauuuccuagugaaauggaugacuguguccuguaauagaauauuuacuauauuuaguaacagauuuauacagucucauuuguuuuaguuaagaaguuugaguaucca

SEQ ID NO: 4120852 - RNA, 128 nt, Human
uggaaagaaagugggaaccuuggcaguuuagauaauucacuucaucugguggccagcuauguuaacaaucacaucauaugccagcacuuagaugagaugaaaggagccccaggggcacugaagcuaca

SEQ ID NO: 4120853 - RNA, 55 nt, Human
uggaaagacuucauuuuggaaucugaugcaaaaagcucuugaugagguuucucca

SEQ ID NO: 4120854 - RNA, 104 nt, Human
uggaaagaggugaacuggaaauauuugauaaacagcauagugacuaccagcggccacuauucugauuaccagauauugguucaauugguucacacucuguucca

SEQ ID NO: 4120855 - RNA, 64 nt, Human
uggaaauagccuaaaauugccucccuacccaacuuggaggaggggcaaugauagucuggcucua

SEQ ID NO: 4120856 - RNA, 62 nt, Human
uggaaauauuugcucauuaucuccuuaaauuuucaguggagucacaaaugaauauguuucca

SEQ ID NO: 4120857 - RNA, 63 nt, Human
uggaaaucucagguguuugcggggagaaaacauagcuucauuugggccagaucugaguuucua

SEQ ID NO: 4120858 - RNA, 69 nt, Human
uggaaaugagcuggagcugaguggcugcccccuuggaaaagggccugcugucuccaguuuauucuucca

SEQ ID NO: 4120859 - RNA, 113 nt, Human
uggaacagaauaauagagggagcaugucaggaggcuguaggcuuugcuuagacacucaaagauagacaaaaaacaguuugcccugacauucuccuauuuauuuccaaguucua

SEQ ID NO: 4120860 - RNA, 56 nt, Human
uggaacaugcauaugugggucacuggagaaauccugagugaucuuucaugauucca

SEQ ID NO: 4120861 - RNA, 72 nt, Human
uggaaccaacaaugcgauucccaugccccuugugaggggugggaugggagccaucgcauuugcugguagcca

SEQ ID NO: 4120862 - RNA, 76 nt, Human
uggaaccucagugucucaaaacaaguugcuucccaauuuggggaccaggcugugaagugagacuagugacguuuca

SEQ ID NO: 4120863 - RNA, 84 nt, Human
uggaacuaacaucugacuguuugcugaaaggucuggacuuuuggccaugacaggaggcagcugggcagagucagagaaguucca

SEQ ID NO: 4120864 - RNA, 104 nt, Human
uggaacuaucagcucuuaucucagugaucaacuuguccuugauguuaaaggugggccuuugaugauacccaauguugugucccuggauauuaguuucaguucca

SEQ ID NO: 4120865 - RNA, 90 nt, Human
uggaacuggaggagcuguccugugucagccugaaauaaucaaaaggaucaaaaauccuguuuuaggcaacauaggaagacuccaacucua

SEQ ID NO: 4120866 - RNA, 69 nt, Human
uggaacuuuaaucccuugggcuuagauaucaaguuuaggacaggcuaaaagggauaauuagggcuucca

SEQ ID NO: 4120867 - RNA, 56 nt, Human
uggaagacauuuuggaccuugggauacugcacacuucauuuccauuuugucuuuua

SEQ ID NO: 4120868 - RNA, 57 nt, Human
uggaagaggccacgaaggauccucuacuggggcuucagagggagaguggcccuucca

SEQ ID NO: 4120869 - RNA, 71 nt, Human
uggaagauggcuguccuggagacacaaggugguugaccguugaccagcucuucugcucuaguugccuucca

SEQ ID NO: 4120870 - RNA, 84 nt, Human
uggaagcaaguaacuaaaggccaaaguuuucaggcuaaaaaacaacauugagaugagaacuuuggcuuuauuuacuugcaacca

SEQ ID NO: 4120871 - RNA, 80 nt, Human
uggaagcaaguauugugcugcuuacucagauugcuacaguugcuagcugcagcccuggaagccacaguccuacgcuuuca

SEQ ID NO: 4120872 - RNA, 65 nt, Human
ugacccccaguggcugauugccaggauggccuguggaaagcacaugaguuaagcuggggcaguca

SEQ ID NO: 4120873 - RNA, 56 nt, Human
ugaccccugacacaggcuacacagacaugggauuguggccagaaguuaagugguua

SEQ ID NO: 4120874 - RNA, 57 nt, Human
ugaccccuucucaaucaggcaaggcacauggaagcccagcugucuugagaggaggca

SEQ ID NO: 4120875 - RNA, 96 nt, Human
ugacccucggggauccauccacguggcccacccaaguaaugcaccuuuuagaauauuugcugaaauaacugccaccugguggcaucuucuggguca

SEQ ID NO: 4120876 - RNA, 62 nt, Human
ugacccucuuccccaugcgcucauuccucuuguagaugagcuccuggcggaaguagcuguca

SEQ ID NO: 4120877 - RNA, 130 nt, Human
ugacccuggcuuccccuucugaaagagcaguguagugguuguaaggaauaggggcuaagaaaacaguuaggcuucuaaucccagcucuacuacuuauuagcugugcagcuuuggggaaguuauuuagucg

SEQ ID NO: 4120878 - RNA, 55 nt, Human
ugacccugguguccagguccugcccuggugcuggagggcagagcaucaaggguua

SEQ ID NO: 4120879 - RNA, 57 nt, Human
ugacccuuccccucuggguucugagucgccucggaaggagugggaggugagggguua

SEQ ID NO: 4120880 - RNA, 111 nt, Human
ugaccggauggaccgcggccugagagccucucccagcggucucauugucacagugguccugcuacaggggauuagaaguuccaguuuugcucgaggucacccuccagguua

SEQ ID NO: 4120881 - RNA, 117 nt, Human
ugaccuaaauucuuccugcucugcacucggugagucuuccccaugugcagcccucccauggaucucacacauggaagagauacagugagguccuggggagcaugagaaucuagguca

SEQ ID NO: 4120882 - RNA, 77 nt, Human
ugaccuaaccucucugugccucaguuuccuuuucugugaaauggauuuacugauaacaaucucaaaaggucugguca

SEQ ID NO: 4120883 - RNA, 61 nt, Human
ugaccuaggagguugagggugcagugagcugugaucacaucacugcacuccagccugggca

SEQ ID NO: 4120884 - RNA, 129 nt, Human
ugaccuccagaugcccguuuuaccagguuaccaggcauccugaggcccacccucuauuaaggaagucagggcggggguccaggagccugcauuuaacaagacuuucugguaaugcuaaugcugggggua

SEQ ID NO: 4120885 - RNA, 87 nt, Human
ugaccuggcggacaggugggagccacagcguacaccccaggguucccucugugcugugcguagugccuacugcuugcuuccagguua

SEQ ID NO: 4120886 - RNA, 59 nt, Human
ugaccuuggcuccaaucccagcucugcaauuuacucgcaguuugauuuggaccaaguua

SEQ ID NO: 4120887 - RNA, 64 nt, Human
ugaccuuucuggcugggauuguaggauugguacucacaagaucuuacagcagcaaggaaguaca

SEQ ID NO: 4120888 - RNA, 62 nt, Human
ugaccuuucuuugagauuccugggcaguuuaugugacuacuagguugucaucaaagaaguca

SEQ ID NO: 4120889 - RNA, 81 nt, Human
ugacgccuauuaaggcaacugagaggcccguguuggggcugagccucauugcgagccucugguugucuagcgauggugcca

SEQ ID NO: 4120890 - RNA, 55 nt, Human
ugacgucaacugcaaaggccuuguucuccaagaggacuugugcaguucacgcuca

SEQ ID NO: 4120891 - RNA, 96 nt, Human
ugacuaacagccaccccugguguggaugugauuggcaguuccgagagaaauauggggacgucuucacgguacaccugggaccgaggcccgugguca

SEQ ID NO: 4120892 - RNA, 69 nt, Human
ugacuaccauccuuaggcugaagugauugugaaggaaaagacaucuauuggaguauggggcuggaguca

SEQ ID NO: 4120893 - RNA, 73 nt, Human
ugacuaugaggauacaagucucagaaugcuggaauacaccagaaguguucuagagaauaucaauccauaguca

SEQ ID NO: 4120894 - RNA, 130 nt, Human
uguagcaauuuuguaauuauuauuugguuucccauguaagucugucuacagggagaaugauaugcaaauuuggaguaugucaggucucugugaugguaauuucucauggggaauuaacaaauugccugca

SEQ ID NO: 4120895 - RNA, 114 nt, Human
uguaucauuuagcuaagcaugucugaagauauuuucuuuaaccagcaugaacuaugcauuguaugaaaggaaauauaucaugaaauuguauuauguguuaugcuauaauauaca

SEQ ID NO: 4120896 - RNA, 59 nt, Human
uguauccuggccauuuuagaauccuggugaguuggaacauucuagaaugcccagggaca

SEQ ID NO: 4120897 - RNA, 64 nt, Human
uguauccuuuagaugaucucuuggacauugagcuagugucuacgaaaauaucuuaagaauuaca

SEQ ID NO: 4120898 - RNA, 104 nt, Human
uguaucuaagaaguguguugugagcaaaaauaacuuagaguaggcaaaaguguuuuguaaauuauacugcagacucuacaguuauaaguugauaaauugauaca

SEQ ID NO: 4120899 - RNA, 74 nt, Human
uguaucuagguauucauguuucguggccauaaugaaguacaauuuaagccauaggaugggauacuuagguaaca

SEQ ID NO: 4120900 - RNA, 124 nt, Human
uguaucucuaccauuuggcuuccuucuaggcauccgauuuguugcaaugaagaucaauuaugucucuauugucaucuucaucauaaguaaaagauguccagucuacuuuccagagacagguaua

SEQ ID NO: 4120901 - RNA, 57 nt, Human
uguaucucuaucuaucuaucuaucuauaucugcauagaaaagggcaggagggauaca

SEQ ID NO: 4120902 - RNA, 84 nt, Human
uguaugaugucaugguaacaaagaagacuuucagaauuuccuagggacugaaggaaacuuuuguguuuuaccagggcauuuaca

SEQ ID NO: 4120903 - RNA, 61 nt, Human
uguaugccuuuuucuguuguaaccagaucuaauuuuuuuuaauuaagagaaaaagcaugca

SEQ ID NO: 4120904 - RNA, 105 nt, Human
uguaugcguaaagguaggauaucaggccaaguaacggaccugugagagaguaguuuaagggcagggcugggacuuacugguauccuuucaaucacacagcaugca

SEQ ID NO: 4120905 - RNA, 79 nt, Human
uguauguagggaaaucacaaaucauuuuaucugugugcagcaaccaauuauuuaaugauuuggggucuacuggcguaca

SEQ ID NO: 4120906 - RNA, 90 nt, Human
uguauguauguguguauauauauacacauauauguguguguguauauauauacauauauguguguguguauauauacacacacauauaua

SEQ ID NO: 4120907 - RNA, 77 nt, Human
uguauguauugaguagcuguuaugugccaagaucuguucucagugcuuuucauacauuaccuaacuuaaugcucaca

SEQ ID NO: 4120908 - RNA, 84 nt, Human
uguaugugaguguguauuugugcaugugugugugugcaugcauaccugugcgcacacacucaauugcauaagcaccuccaaaua

SEQ ID NO: 4120909 - RNA, 83 nt, Human
uguaugugggcuagcugacuguagugggaacauggacucacugaauuaugggaguucccugcaguaggcagcccuccauugca

SEQ ID NO: 4120910 - RNA, 59 nt, Human
uguauguguguaugcaugcacauguauguauguacauguguauagccuguauagauaca

SEQ ID NO: 4120911 - RNA, 62 nt, Human
uguauguguguguguguauauguguauauaaauauauguguguguauauacacacauguaca

SEQ ID NO: 4120912 - RNA, 76 nt, Human
uguauucuuucugcuguucauucuuuuagcucugaguauuuauaagagacuucaccaugaauauaggaaugguaca

SEQ ID NO: 4120913 - RNA, 74 nt, Human
uguauugauauuuaugguacuauagaauucuuggcacacagcugagagauaaagugcucauaaaaauggauuca

SEQ ID NO: 4120914 - RNA, 68 nt, Human
uguauuuagucauggaauuuccagaaccacuggaguuuagggaagaagcccauggccagugagucaca

SEQ ID NO: 4120915 - RNA, 84 nt, Human
uguauuuagugauuuuuuagcccuguacugugauacuaagaaguagggcuuaaauagggccuaaaaaguauugcuaaaauuaca

SEQ ID NO: 4120916 - RNA, 86 nt, Human
uguauuuccacaagcaaauuacuacaacaaacuugccugcugaguucaggucaucagacaauuguugaguacugggcuggaaguca

SEQ ID NO: 4120917 - RNA, 77 nt, Human
uguauuucuuucuggauaugcuuggccauuucgguuccugauauaauaauggcuucaugucuguggaaagcaaaaca

SEQ ID NO: 4120918 - RNA, 107 nt, Human
uguauuuguuuaauuuccucaucugagucucugacagcauguuuugccugaauucacaaaggaaacacaguucaagacaucaguaugaucucuauuuuauauguaca

SEQ ID NO: 4120919 - RNA, 95 nt, Human
uguauuuuaccuggcaacucuaguuauaugcaaauaccuuggacuaucucuaaagauaaucuggucuuuguaugaguuaacagaugauuuuuaua

SEQ ID NO: 4120920 - RNA, 74 nt, Human
uguauuuucaugcugugggaauucucggaaguuggcugaauugagacuuaggaauauccacagcagguuuuaca

SEQ ID NO: 4120921 - RNA, 79 nt, Human
uguauuuucuucauugacaaggaaaaaucauuaaugaauuuuuuuuccuaagcaguggagcuggcauauuaaagguaca

SEQ ID NO: 4120922 - RNA, 109 nt, Human
uguauuuuguagcaguuggacuagauucaguucuggaaauuguuuuauaaccuuuuggcaguuuugaaaugaaauguaguucaacauuuuuauuuuucugugaaauaca

SEQ ID NO: 4120923 - RNA, 71 nt, Human
ugucaaaauggagaggacauuaaguguuugcuaauauauuugacuuuaguuuccuuggauucaauuuggca

SEQ ID NO: 4120924 - RNA, 58 nt, Human
ugucaaacucaagggcuugaucaaaugauuagugaugacuagacuuuuguguuuggca

SEQ ID NO: 4120925 - RNA, 105 nt, Human
ugucaaagaugacugauauacacaguuuaaacgauuaguacuguaauagauauauucgggaaacgagcuaguauuuaguugaaaauugugugucauuuuuaggca

SEQ ID NO: 4120926 - RNA, 91 nt, Human
ugucaaauguguguuuuauaauugcuucauaagaugaguuucagaacauucacuguuucuuaaagcagcuuguaaaauguagguauuguca

SEQ ID NO: 4120927 - RNA, 74 nt, Human
ugucaacaauguagcugcagaugauaaugcuggcauuuuauucaugaggaauuaucaaugcagguuacuggaca

SEQ ID NO: 4120928 - RNA, 68 nt, Human
ugucaagaacuugggagaaccugauucugucaucuagaauauuugcuaacagucccaaauucuuguca

SEQ ID NO: 4120929 - RNA, 55 nt, Human
ugucaagagugcacacaucugcuuuccuucugaguugugcuuucugcccuugaca

SEQ ID NO: 4120930 - RNA, 63 nt, Human
ugucaaggccuuggaaagauacccagcucucuggagccucgguuuccuccaagguagaagaca

SEQ ID NO: 4120931 - RNA, 72 nt, Human
ugucaauauagguuucaaacaugacucuuggggagaugauuugaaugucuuguuugauaucaaauauuggua

SEQ ID NO: 4120932 - RNA, 78 nt, Human
ugucaauuuccccagauaggaaaagcuaggcauagaaccccaaaguucuauuuuagccauguuccauuuggggugaca

SEQ ID NO: 4120933 - RNA, 67 nt, Human
ugucacaugaucugauaaucauccacuagugagucugugggugaugaguaucagagcaguaaugaca

SEQ ID NO: 4120934 - RNA, 60 nt, Human
ugucaccaaauguuuuccuggagccagacucaugacugguuucuaagguuuuggugcaca

SEQ ID NO: 4120935 - RNA, 113 nt, Human
ugucacucgagcauucuugucucccaaacucugaugguccgcaguggguacugggcucccugggcccugggaggaagacggaggaguuugggugaaagaucagacggugcgca

SEQ ID NO: 4120936 - RNA, 73 nt, Human
ugucacuuaugcccuguugucggacgucaagguuuuuuccaaucuuaaauggacuaacagugcuaagaugaca

SEQ ID NO: 4120937 - RNA, 64 nt, Human
ugucacuuuggggagaguuuugggaaggucuggucaucccuaagggcucuuccugaaagagaua

SEQ ID NO: 4120938 - RNA, 122 nt, Human
ugucagcuauuguaaagguacugagauccuguuuuaugaagggaaugagacauccggucuuuaaaaaaaaugcauauuucuuauuucccauaaggcaguuagaagucugcacaauaaugaua

SEQ ID NO: 4120939 - RNA, 78 nt, Human
ugucagggagaggucuggcccagcaauuugcucacccaaggaagaggagugucagagcaaggccaggccagccacgca

SEQ ID NO: 4120940 - RNA, 105 nt, Human
ugucagguaauuaccagaguggccuucagagaagaaccuauaugcugaugaauucuuaugugaaggucaguguagugguuugggcgacucuuucuaauucuggca

SEQ ID NO: 4120941 - RNA, 92 nt, Human
ugucagguuauccaccucgggcagcucgucaggcugcggcgcccuguucagucuguugcagcugagaucgagcacucugagcuuggcuggca

SEQ ID NO: 4120942 - RNA, 67 nt, Human
ugucagguuauugccaugcaaaagagugguaacuuccagguguugccauagcaaugguaagcugaca

SEQ ID NO: 4120943 - RNA, 59 nt, Human
ugucagguucagugauuuuacuguggaauaguucaucagugagucaaaaaacuuagaua

SEQ ID NO: 4120944 - RNA, 60 nt, Human
ugucagguuuggaggggcagaagcaaaauuuaaaaaauuguuuauaccugcaaccuguca

SEQ ID NO: 4120945 - RNA, 61 nt, Human
ugucagucacugaaucucuguacucaaagaagaagucuuggacauagaucagugauugaca

SEQ ID NO: 4120946 - RNA, 55 nt, Human
ugucauauuugggcuaaaagugagcaguauuguucucauuuuucccagauggaua

SEQ ID NO: 4120947 - RNA, 62 nt, Human
ugucaucccugcuguggccugucuccugucucccaggagcuuaggccagggacagggacaca

SEQ ID NO: 4120948 - RNA, 70 nt, Human
ugucauguuuuucucuuagccuguaugagaacaaaaaguuuucagagucuaaauagaagaauaccagaca

SEQ ID NO: 4120949 - RNA, 65 nt, Human
ugucauucuccaagaacccgcugcugcgacgcaggccaaacagcuggguuuagugggguguggua

SEQ ID NO: 4120950 - RNA, 72 nt, Human
ugucauuuuagugcaucacucaauuuagcauguagaauaauguucucuggugaaugaugcaguauaaugaua

SEQ ID NO: 4120951 - RNA, 75 nt, Human
ugucauuuuuugaagaaguaauuuuaagucuccuaucaugggagauugugucaauuucucuuuaaaauucuguca

SEQ ID NO: 4120952 - RNA, 69 nt, Human
uguccacauccaucauguucacagcuauauccccaaggacuuugagcaaugucuggaacaguguggaca

SEQ ID NO: 4120953 - RNA, 86 nt, Human
uguccagaugacaugggagcaagcacuacaggaaaggugagggaaagguccuggcaggccaggcuaguuccugugcauccagggca

SEQ ID NO: 4120954 - RNA, 77 nt, Human
uguccagcuuuguagaaaauucucuuggauagcccuggccuaagugaugucuaagauaacuuucagcuaguaaaaca

SEQ ID NO: 4120955 - RNA, 55 nt, Human
uguccagggaaggugugaggcugggcaaguuuauuucccccuuccucccugggga

SEQ ID NO: 4120956 - RNA, 58 nt, Human
uguccagggauggggucagggacggguuuggcuguugccuagaugcugcccugggaca

SEQ ID NO: 4120957 - RNA, 65 nt, Human
uguccauaaugggauguaaaugugauaacauaaauguguuguacaauuguuucacaugcaggaca

SEQ ID NO: 4120958 - RNA, 61 nt, Human
uguccaugagcuagcuuuccaaaggcaauugauugcuuuaaaaaaauguuagcuuugcaca

SEQ ID NO: 4120959 - RNA, 77 nt, Human
uguccauguuuuugaugguauggccuuuuuuacuacaaacaccguaauuauaaagaggaaccaagagcacguggaua

SEQ ID NO: 4120960 - RNA, 72 nt, Human
ugucccaaaacuacauuuccugaccccugugucaccuuggugccagggaaacagcccagugugaugaggaca

SEQ ID NO: 4120961 - RNA, 69 nt, Human
ugucccccaggcuggagugcaguggcgcgaucucggcucacugcaagcaagcuccgccuccuggguuca

SEQ ID NO: 4120962 - RNA, 83 nt, Human
ugucccugagaguugaacacauuggggaaaaauugggcacagcccauuacuuuuacaaacuccagugagugagccucaaugca

SEQ ID NO: 4120963 - RNA, 67 nt, Human
ugucccugcuauccucugcggagcccagcugacagcucagggcugcguguggaggauguaauggaca

SEQ ID NO: 4120964 - RNA, 59 nt, Human
ugucccugucuucuuugcaguguugcuucaagcuagugcagacuucgaggagggggaua

SEQ ID NO: 4120965 - RNA, 73 nt, Human
ugucccuguuuuaaagauuaggcaaauugcuucccuucuaacucuuaguaucccagucuguaaaauggggaca

SEQ ID NO: 4120966 - RNA, 120 nt, Human
uguccuaauauaucuuauagugcuugcaaauuugauuuucuuaaaccauacauggaauacaguuguuugucaaggguuaaaaagcauugcaaguucugaaguaaacauguacaaagguca

SEQ ID NO: 4120967 - RNA, 70 nt, Human
uguccuacacugggcucucgcccgcucucaugcagaaauaagggccuggaacuggagaccacagaggaca

SEQ ID NO: 4120968 - RNA, 64 nt, Human
uguccucagggagucccagucaugauuugagcaugaugacagaaggccucccugacacaggaca

SEQ ID NO: 4120969 - RNA, 113 nt, Human
uguccucauacguaaaauagagauguaauugcauaaauuucauagcauuguuauuagguacagacaaugcuaauauacaugaagugcaugucuccuggcauauugugaagaca

SEQ ID NO: 4120970 - RNA, 84 nt, Human
uguccucuuacauugcugauggagggaaugcucaaaauauguuaauucucuggcacuuccgucugccuugugcauuggaggaca

SEQ ID NO: 4120971 - RNA, 72 nt, Human
uguccucuuguggccaaaaguugcugcugcaucuggaaaagcuggcaauuucaaugaggccacagggggaua

SEQ ID NO: 4120972 - RNA, 64 nt, Human
uguccucuuugcaugcauuuucccuuacauuuagaugugaggaaagaaauagcaaggauugaca

SEQ ID NO: 4120973 - RNA, 67 nt, Human
uguccugacaggggucccucugggcuguggugcugugguaaacagcagugggggaacccugcagaca

SEQ ID NO: 4120974 - RNA, 67 nt, Human
uguccugaggaaaauggaguguaauuaagggugagcacccuuaauucuugagcugucuuuccagaua

SEQ ID NO: 4120975 - RNA, 82 nt, Human
uguccugaggccuggcugggcccccaccugccuccggggucuccaagagaagacaguauggggcccagcggugaccaggaca

SEQ ID NO: 4120976 - RNA, 72 nt, Human
uguccugagugcuggugauaaagaccgaaaagauaaacguuaucugguccuugcuacccagcaagcaagaca

SEQ ID NO: 4120977 - RNA, 107 nt, Human
uguccuggagccccugcaccugucuccaaaugguauccgcugugccgccaggacgcgcuucacuggcagcaugggugccuuugugaagauugugaggcgcuaggaua

SEQ ID NO: 4120978 - RNA, 59 nt, Human
uguccuguaggaggcagaacaaggauuagacugccuaucuguacugucauccugggaca

SEQ ID NO: 4120979 - RNA, 61 nt, Human
uguccuuacaaggucccuuucgugggcauuucuagcuuuuaggacgaugguguguggggca

SEQ ID NO: 4120980 - RNA, 78 nt, Human
uguccuuagggauauaaaauauucaaaaguccaaaaaguggaagucuaugugguuuuauuuuguugucucugaugaca

SEQ ID NO: 4120981 - RNA, 71 nt, Human
uguccuucuuauaucuuuauccuggacuacccaucaagugaauauuucagaaaggauaauuggaagguaua

SEQ ID NO: 4120982 - RNA, 58 nt, Human
uguccuuggccuggguagaguggcaccuaguugguggugcccauauuagccagggaca

SEQ ID NO: 4120983 - RNA, 96 nt, Human
uguccuuguugacauuguuguugcucugcugacuuguuuuucuccuggagcggagccugccugcagcacagcacagcggugacucagcacuggaua

SEQ ID NO: 4120984 - RNA, 82 nt, Human
uguccuuguuuaaacaaaauggaauauuuuccccuuaauaaaacucuugggaagaauugcccauuucugucuuucagggaca

SEQ ID NO: 4120985 - RNA, 62 nt, Human
ugucgacucucuggucagaauuugcuccggacucucuuauggcagaaucaggucaggugaca

SEQ ID NO: 4120986 - RNA, 65 nt, Human
ugucgcccaggcuggagugcaguggugcaaucucggcucacugcaaccucugccucccggguuca

SEQ ID NO: 4120987 - RNA, 61 nt, Human
ugucgugggugcaggagagcuuuuggcacacauaccaguuacuagucucacaucccuggca

SEQ ID NO: 4120988 - RNA, 108 nt, Human
ugucgugguuguugaauuuaagucacaaguaaugguuuuauaauaguguaauaauauuuuacagcucaaagcuguuacauuguagucugaagcacaugcaaucaugca

SEQ ID NO: 4120989 - RNA, 59 nt, Human
ugucuaacccaguggcaggaggggugcuuccuagaggaguaucugccaguggggaggca

SEQ ID NO: 4120990 - RNA, 130 nt, Human
ugucuaaggcaaccaucacaaaaugguauuuuggaaagauuauuauuaugaagagaauauauuuuccuccauuaucucuuuguuuuuaucuuuuuaaagguaaucauagccuccugguaucgcacaucca

SEQ ID NO: 4120991 - RNA, 80 nt, Human
ugucuaauuauguuuggaaacacuggcagaaauucauugaaaaaguuucauuucaacagugcuuccagcaggguuagaua

SEQ ID NO: 4120992 - RNA, 70 nt, Human
ugucuaccaaguguauuaugcuuuguuuggaaauguuggaccucgguacuauugcauuugguaaaaggca

SEQ ID NO: 4120993 - RNA, 87 nt, Human
ugucuaccguaccccaugacccuucuguuucaaggugcuacugccaagaagccagauuuggggcauaucauguggacauuguggaca

SEQ ID NO: 4120994 - RNA, 72 nt, Human
ugucuacugaagcaugcuuauaugucuugugucuucugcugcacuugagcauuagguguguuucagaggaua

SEQ ID NO: 4120995 - RNA, 55 nt, Human
ugucuaucaacagguaaauggauaaacaaauugugguguaucuguaugauggaua

SEQ ID NO: 4120996 - RNA, 63 nt, Human
ugucucacagccuuaacaaggagccagcuggccaacaucucagaccuccagagcugugagaca

SEQ ID NO: 4120997 - RNA, 80 nt, Human
ugucucacuguacaugcaucuugucuaugucuuccacuagagaccaugagggcagagaucagaccuauguacguugcaca

SEQ ID NO: 4120998 - RNA, 61 nt, Human
ugucucaggaaaaacuuugucaagacuguugccagucuugacauugcaaucuucagagaua

SEQ ID NO: 4120999 - RNA, 93 nt, Human
ugucuccaaagccuguuccaucaguuuuugguugaagcccuacagaucuccuaauuuggucaaugaagugcugauaacauuguuauguggaca

SEQ ID NO: 4121000 - RNA, 71 nt, Human
ugucucccaggaacgggccucacaucccugcagugcugucagcagccuguggaaggccuguccugaaagca

SEQ ID NO: 4121001 - RNA, 69 nt, Human
ugucucgcaagccccaccugagccugacugaacuuagcagagccaugguaugggcuugugcucuagaua

SEQ ID NO: 4121002 - RNA, 91 nt, Human
ugucucggcacacggugucucagauacgccaucaagggaagaucuccgguucuugcuuuguuguagucucugagcucuugcuuuagagaug

SEQ ID NO: 4121003 - RNA, 74 nt, Human
ugucucucuaagacauuacuggaaucugacuguaauugggugacuguuggcaaagaccuaggaugagggagacg

SEQ ID NO: 4121004 - RNA, 63 nt, Human
ugucucugguuaugucauuaagcaguuuggugaacguuuuguaugaggcauacaucaggcaca

SEQ ID NO: 4121005 - RNA, 71 nt, Human
ugucucuucucucaggaaggacagggcuuccacaaucuggagggucaccccuugcugaggcagaaggaaua

SEQ ID NO: 4121006 - RNA, 56 nt, Human
ugucugaagcacugggcguugccccacucuguccucgucaucugugcucucggaca

SEQ ID NO: 4121007 - RNA, 71 nt, Human
ugucugagcccuggagcccucuguuauuaauaaacaaguacaaaagaucacaaccugcucaggcugagaua

SEQ ID NO: 4121008 - RNA, 68 nt, Human
ugucugaggucauuagcucucuucaggauauuuacaggacugaaugaggugaggaaggccucagcaca

SEQ ID NO: 4121009 - RNA, 72 nt, Human
ugucugaguuugcagaucugcugacuucauauuucagugauaucuugcagcuucaucugcaauucucuggca

SEQ ID NO: 4121010 - RNA, 72 nt, Human
ugucugcaauacucaucauuggagauagcuuacugcugaaguuaaaguacaauauugagauugauaaagaca

SEQ ID NO: 4121011 - RNA, 77 nt, Human
ugucugccaggcccaaaugcaaccuucuugugaaaggagacgggagggaaggcuaggguuuagagagaaggcagaua

SEQ ID NO: 4121012 - RNA, 58 nt, Human
ugucugcugguugggagcuuaaagacacaaaugugguagagcuucaacucagcaaaca

SEQ ID NO: 4121013 - RNA, 68 nt, Human
ugucuggagaaacaucaggcauaggcauacauuagauaaauguuuguguuuuccuuucaucacggacg

SEQ ID NO: 4121014 - RNA, 64 nt, Human
ugucuggcccuuucugucucagcugccaaggggaugaccuuuguggccaggagagggugggaca

SEQ ID NO: 4121015 - RNA, 62 nt, Human
ugucugggauguuggcagccacuucaaaaucagaccucuguggcagcauuuuuuccagaaca

SEQ ID NO: 4121016 - RNA, 62 nt, Human
ugucuggggucacuuaggauagaggcaaaaaucucuguacaagcaaauagaccuucaagaca

SEQ ID NO: 4121017 - RNA, 71 nt, Human
ugucuggguugcuucguugcucacuugcugauuggaaucccaggagacagaaacagagguaguccagcaca

SEQ ID NO: 4121018 - RNA, 73 nt, Human
ugucuguguccagugagagagaacgcauucauacucaauaaguuauaugaagcaaauuuauuacuuacagaca

SEQ ID NO: 4121019 - RNA, 91 nt, Human
ugucuguuaauaacacugacaugaucauucaaguuacugcuguuuuggugaacagaguagcucaagaagauugugucuuagauuaauuuca

SEQ ID NO: 4121020 - RNA, 90 nt, Human
ugucuguuacauaguagauccuaaagaaauauuuauuaaaccaccacuuauuuagccaauguugauugggaaucuucucuaugcuaggca

SEQ ID NO: 4121021 - RNA, 68 nt, Human
ugucuguuccugcagccuccuccagcuacgugcagcucagcugccaccgcgaggcugcagagcgggca

SEQ ID NO: 4121022 - RNA, 78 nt, Human
ugucuguuuugcacuagucucagaggcaaaagcugaacagaacagccuuuuaccuacccaguauuaugaacacagaca

SEQ ID NO: 4121023 - RNA, 55 nt, Human
ugucuuauuccuucuguucagcaggugugugcaugucuuaggcaagaauaagaca

SEQ ID NO: 4121024 - RNA, 57 nt, Human
ugucuucaaauacagucauauugagaguugagcuuucaguauaugaauuugggggua

SEQ ID NO: 4121025 - RNA, 64 nt, Human
ugucuucacaugauaagccauuccuaucagagaaauaaaacauuagggaggcauuuugaagaca

SEQ ID NO: 4121026 - RNA, 112 nt, Human
ugucuuccucugggacagugaacuagcacaauccacaccucaugaaagacuaaggcugauguggguuugugagauggauuggguugguucccaccuuguuucaacugguaca

SEQ ID NO: 4121027 - RNA, 67 nt, Human
ugucuucucacguggguuccugugcuucaguaagaacucagaaagcacaguucaugagacaaagaca

SEQ ID NO: 4121028 - RNA, 80 nt, Human
ugucuucugcuggcauuuaaccuguaaaauaugugaguucuaaaucugugccuugcuuaacaagauggcaguaaagggca

SEQ ID NO: 4121029 - RNA, 61 nt, Human
ugucuugagauguauaaaucaucccuucgaaagaaguccuuugagguaucaauucaaggca

SEQ ID NO: 4121030 - RNA, 57 nt, Human
ugucuugaggcgcaguguagauuacaugggucagaauuuguaaaugugcuuaggaca

SEQ ID NO: 4121031 - RNA, 72 nt, Human
ugucuuuaaaauuaaacacaucggucauaacuuuaaugaagguguaaaaguguuuuuaguuuuaaacaggca

SEQ ID NO: 4121032 - RNA, 57 nt, Human
ugucuuuacuuaauaaauauacgagcaccucucguguuucagguauggguaaaggca

SEQ ID NO: 4121033 - RNA, 62 nt, Human
uguagcacuagauguuucucuucugaggcaauggaaugcuugaggaaaugcucugguguuca

SEQ ID NO: 4121034 - RNA, 75 nt, Human
uguagccacugaaaugguauuuacucuguauuacuuuucaucaguuguauagaauuuacucuuuuguggagcgca

SEQ ID NO: 4121035 - RNA, 86 nt, Human
uguagcuggugacuuuaguucuaaugcauugaaauucuaucuaauaaguguuuuucuugugcuggaucuaaucacagaagguuaca

SEQ ID NO: 4121036 - RNA, 73 nt, Human
uguaggaaauccuuccuccagaaaagauggcucauucaccaucagagagugcacccuggagagaagcuccacg

SEQ ID NO: 4121037 - RNA, 64 nt, Human
uguaggcaucacuuucucuugggcaguuaucacauuggcagacugaagggaagugauuucuaca

SEQ ID NO: 4121038 - RNA, 55 nt, Human
uguagggacugaggcuggagaggccacugcugcacucucagccccauccacugca

SEQ ID NO: 4121039 - RNA, 88 nt, Human
uguaggggagauggucugaugucugauuucacuauuuguuuauuaaaaagcaguugggaguuauagacucuaucucucuaccccuuca

SEQ ID NO: 4121040 - RNA, 129 nt, Human
uguaggggauguaaaucacaugaguucuguuucaggucaccgcaugacugucugcagccuuuuuuccggacuuaguacauucacugugguaggcacucggucuccaugugacugcuaacccuuuccaca

SEQ ID NO: 4121041 - RNA, 70 nt, Human
uguagggguuucugauggaugauaaaguagcuuuuuuuggccuacucugaaaacccagaaacuccuguca

SEQ ID NO: 4121042 - RNA, 72 nt, Human
uguagguccuguugucccauuuuuuauauauuggggaaaauugaguaauagaugaaacaauguggagcuaug

SEQ ID NO: 4121043 - RNA, 91 nt, Human
uguaggugaccauuuggcagggaggaggugaaagugagcacaucauaguccucauacaccuaucucucugugcagauacgugauagagaca

SEQ ID NO: 4121044 - RNA, 78 nt, Human
uguaggugcccagggagaucuuggcuccuggugcugagaggauggugaccaagggcccucgaccucccuggcucugca

SEQ ID NO: 4121045 - RNA, 97 nt, Human
uguaguaauaaagauccacauuuaucuucugcaguucuggcuuugguauucuuacuuugaacuggaauagcacaggaaaaguggauugaggaccgca

SEQ ID NO: 4121046 - RNA, 66 nt, Human
uguagucccagcuacugaggaggcugaggcagaaggauuacuucagcccaggagguugagacuaca

SEQ ID NO: 4121047 - RNA, 66 nt, Human
uguagucuuagcaacuuaaggggcugaggugggaggaucucuugaguccaugaguuagagacuaua

SEQ ID NO: 4121048 - RNA, 86 nt, Human
uguaguuaaaucauguugugcaugcaguaaguguuuuaaaugaaaguaauuuaaaacaacucuguguguuuaacucuggaauuaca

SEQ ID NO: 4121049 - RNA, 73 nt, Human
uguaguucauaccuggugcaagaggguccuuggacauugccaagggaaauccucagcccaggacuugauugca

SEQ ID NO: 4121050 - RNA, 93 nt, Human
uguauaagaaguuaauuugcaagcgacuugacuagcaugagaauuuuugacucuuucagcaaacacgaugcuuguuuauguacuuuuuugaca

SEQ ID NO: 4121051 - RNA, 86 nt, Human
uguauacuaaucuugauaggaaugauucaagacuuggcuuauuauccauccaugacuggguuccccuauucccaaauugguauaca

SEQ ID NO: 4121052 - RNA, 56 nt, Human
uguauacucaugaagccagcccuacauuguggucuuugguuuucugagucuguaca

SEQ ID NO: 4121053 - RNA, 103 nt, Human
uguauaguugguuaccucugaauaaaaauguuuuugugugguaauuugugaacuguuuuagugcauaccuaacauuuuugcuuauacagguauucuuuuuaca

SEQ ID NO: 4121054 - RNA, 60 nt, Human
uguauauauuuauguguguauauacacaggcauauguguguguacacacagauauauaca

SEQ ID NO: 4121055 - RNA, 88 nt, Human
uguauauauuuguacauacauguauauguaugugugauuauauguagauacacaugcaugugcauguauguaugcaaaaaauauguca

SEQ ID NO: 4121056 - RNA, 67 nt, Human
uguauaugcaagaaggcaauaaacucuuucuauauaauaaagacauaguaagagcuucgcauauaca

SEQ ID NO: 4121057 - RNA, 56 nt, Human
uguauauguuuguauguacacauguucauguauacauguguguacuaacauauaua

SEQ ID NO: 4121058 - RNA, 84 nt, Human
uguauauugcauugaaaagaaaacaagaauaguuuacuugguucuguguaaacuaggaaguucaucuuauuaguaugauauaua

SEQ ID NO: 4121059 - RNA, 58 nt, Human
uguaucacacuagccuauaguggauguuuguguuucauccaaugagagugugaaugca

SEQ ID NO: 4121060 - RNA, 107 nt, Human
uguaucauuucuguaauucaagcuguuugaacugaauaacauaguguuaggaucacuguuuaauuguucuaguuuugauagauacaaugcuuuauguaagugaaaua

SEQ ID NO: 4121061 - RNA, 72 nt, Human
uguaucauuuuaauuauuuuuccaguucauucccagggaaacuggcugauggggaauuaauuaaugggucca

SEQ ID NO: 4121062 - RNA, 57 nt, Human
uguauccucacuaauuaggagggaaauuauucuccucacacuauagaugaggauuca

SEQ ID NO: 4121063 - RNA, 67 nt, Human
uguaucuaugugggaaucauaauaguuauggagucuccagacaaugguugguaccuauauagaucua

SEQ ID NO: 4121064 - RNA, 59 nt, Human
uguaugaaccuuuaauauagugcugccaucagacauucuauuaagaagguaaucguaua

SEQ ID NO: 4121065 - RNA, 73 nt, Human
uguaugaugauugauguguucauugauugugguaaucuucacaauguauguguauaucaaaucaaguuauaca

SEQ ID NO: 4121066 - RNA, 76 nt, Human
uguaugcaucuccuggagcacagggagcuuguccuguucucugggggcugcccugugguccagcaggugccugaca

SEQ ID NO: 4121067 - RNA, 60 nt, Human
uguauggcuuggaaauaguuuagcugaacauuaugcuuuaauauuuuacuggccauugca

SEQ ID NO: 4121068 - RNA, 57 nt, Human
uguauguuguaugcuggcaucauguauaauaacuuugugucuguaugcagucauaua

SEQ ID NO: 4121069 - RNA, 68 nt, Human
uguauuaaagccuuuucuguuuaacacaccuagagugguuucuguuuccugcaaagaggucuaauaca

SEQ ID NO: 4121070 - RNA, 84 nt, Human
uguauuagagugaaaaccuaaucaugcaguuguucauccucauuaauauggauaagucauguguucaucuuucauucuaauuua

SEQ ID NO: 4121071 - RNA, 77 nt, Human
uguauuagcuucugguuuuguucuagucugaagugcauuauauuaugcaaaauccagaacaaaauuagaggagugca

SEQ ID NO: 4121072 - RNA, 60 nt, Human
uguauuaguuuccuguugcugcuguaacaagugauugcagaugcagugguuaacaauaca

SEQ ID NO: 4121073 - RNA, 105 nt, Human
uguauuauauauuauuuugaaauacacaaauuuaguaaguuuuaauaucaaaauaaagcacagagcauggugaaguugguguguuuaaaacuaaugucuacuaua

SEQ ID NO: 4121074 - RNA, 87 nt, Human
uguauugagguauaauugacaagcaaaaauuguuuauauucaagauguauaauguuucguuuuguuguaauauaccuauccagugca

SEQ ID NO: 4121075 - RNA, 59 nt, Human
uguauuggcucauuuauuugcaaaguuagaggauugcaaaaugcuaugugcccaaugca

SEQ ID NO: 4121076 - RNA, 95 nt, Human
uguauuguuuauucauacauucauugagcucuuccugugugccagguuucaaccuggguaggugcuggggauucaguggagaauaaaacagugca

SEQ ID NO: 4121077 - RNA, 67 nt, Human
uguauuuaauugcugauaaaauaaaccaagaugguugcuuuacuucaugguuucagugucagcugca

SEQ ID NO: 4121078 - RNA, 55 nt, Human
uguauuucaauuuuagcaccaauuuauuuauugguugcugcuacuuuggaaggca

SEQ ID NO: 4121079 - RNA, 64 nt, Human
uguauuucaucuucuuaagcuguuuguguugauguacacuguuaaaaugguuugaugaaguaua

SEQ ID NO: 4121080 - RNA, 93 nt, Human
uguauuucaucuuuuuuauucaucccuagauacagguuaugaaggcaugugcuuggacauucuaggaagugacuaaguagaagauaaaagaca

SEQ ID NO: 4121081 - RNA, 64 nt, Human
uguauuuccaugagcucugaguucacaguugggaacuugaacuuaaacugggaucugggaugca

SEQ ID NO: 4121082 - RNA, 74 nt, Human
uguauuucuguugcugaguuugcccacuuggggaggguugacaccuccuggggcugugcugaguaggaggugca

SEQ ID NO: 4121083 - RNA, 99 nt, Human
uguauuuguguuucuaaguaucuugcaguuuucucauugaccuguucuuagccagcauuuucuuuagguuuuaagacuguaguaagaaaucgcuauaca

SEQ ID NO: 4121084 - RNA, 64 nt, Human
uguauuuuaguuuccaccacacauguucuuuucuguagggcuuguauguuggaaauuuuaucca

SEQ ID NO: 4121085 - RNA, 99 nt, Human
uguauuuucugaaaauguuuaaaguauuuuaucauuuguuugauucuaucccuggugaugucucauaugauauaaaugcagacuggauuaggaaauaca

SEQ ID NO: 4121086 - RNA, 106 nt, Human
uguauuuuuaguagagaagggguuucuccauguuggccaggcgggucucaaacuccugaccucaggugacccacccgccuuggccucccaaagugcugagauuaca

SEQ ID NO: 4121087 - RNA, 66 nt, Human
uguauuuuucuauuuguaugcugcuccuaaaaggaucuaagacagcuaacagaucgacaaaguaua

SEQ ID NO: 4121088 - RNA, 79 nt, Human
ugucaaaacuuucagggauacagaaaugaauagguuaugguuuauguuuguuucugguuuuauucugggguuuuguaua

SEQ ID NO: 4121089 - RNA, 64 nt, Human
ugucaacaaguucaguuguacgucuuucccccaggacagcugcacacugaacuugguauggaca

SEQ ID NO: 4121090 - RNA, 57 nt, Human
ugucaacauuggcugacaguuguaacaaauguaccacgcuggugggggauguugaua

SEQ ID NO: 4121091 - RNA, 116 nt, Human
ugucaagauaaacgcuauuaagguugggacaaaagcaauugcggguuuugccauuacuuucaauggcaaaaaccacaauuauuuuugcaccaaccuaauaacaucuucaaucgaca

SEQ ID NO: 4121092 - RNA, 76 nt, Human
ugucaaggugcugaacaaagaaauagucauggcauuggagccagagaugaccaugaguagacuuuuucccuggaca

SEQ ID NO: 4121093 - RNA, 55 nt, Human
ugucaauaacauuuacuucuauuuggaacgugaugauaggguggaguuauuggca

SEQ ID NO: 4121094 - RNA, 67 nt, Human
ugucaauuuccagguauuaauacuguauuauaguuaagcaugauauuaauacugggaaggcuagaua

SEQ ID NO: 4121095 - RNA, 84 nt, Human
ugucacaagaaguauuucauuaggaaaaaauguacuaauaauaugccaaaguuuucaugaggaaauacugcccauauugugaca

SEQ ID NO: 4121096 - RNA, 96 nt, Human
ugucacaaggcuacacaugaucgucaugugaaaguugcauauuuaauaaagcaacauucaugccauuauguuguuucauguucauuggccuuugca

SEQ ID NO: 4121097 - RNA, 67 nt, Human
ugucacccagguuggagugcaguggcgugaucucagcucacugcaaguuccaccuaccggguucaca

SEQ ID NO: 4121098 - RNA, 72 nt, Human
ugucacccaguuagaagaauauauugaguauuucugaaugagucucaaaaugguuaauuuuaauaagugaca

SEQ ID NO: 4121099 - RNA, 80 nt, Human
ugucaccccagagccugagugcugccuccccuacaucccguugugcuguggggggaggcaggaccgggcagaugggggca

SEQ ID NO: 4121100 - RNA, 69 nt, Human
ugucaccugcggagugcugggagccauauuguacugaaagcuucaagguucacagcuucuuaggucaua

SEQ ID NO: 4121101 - RNA, 66 nt, Human
ugucacugauuucuuagcucuuuaagacuuaaugaaagaacucugcaggguggcaaguuagugaca

SEQ ID NO: 4121102 - RNA, 60 nt, Human
uggccuggaagagaggucgaggauacaaucacccccuuaugccucuggagccaaggacca

SEQ ID NO: 4121103 - RNA, 89 nt, Human
uggccuggagccuggggccgccauugaucagcaucuucacugaggaagccagcuuggccaguggccagugggcacccaggucggggcca

SEQ ID NO: 4121104 - RNA, 56 nt, Human
uggccuggaucugcagagcagggcuucagaggaggcaguggagcuggaauaggcca

SEQ ID NO: 4121105 - RNA, 114 nt, Human
uggccuggucagcucacugaagagcugaaggagaaagcaggggucauagaggccaucaagauccacccugcuuuugucuuugaauaucagcuccuguguguccugaaagagcca

SEQ ID NO: 4121106 - RNA, 73 nt, Human
uggccuguacuguacacagugguguacuguacacagugguguacuguacacagugguguacuguaaauggcua

SEQ ID NO: 4121107 - RNA, 60 nt, Human
uggccuuauucuacuaaacuagcaggugauugauaccaccgcuggugcuugagugaguca

SEQ ID NO: 4121108 - RNA, 58 nt, Human
uggccuucauguggacaaugugucucuguuccccaaagcacaggcuauaugagagcca

SEQ ID NO: 4121109 - RNA, 86 nt, Human
uggccuugcugaguaaauuaaauguauguucaagugcuauuucuuuauggcaccagggaacaagcauuucaaauaguauuaggcca

SEQ ID NO: 4121110 - RNA, 71 nt, Human
uggccuuugaaagauuuacuuucuuuguaauaccuguuugguguaaagagaagaaacgugagccucugcca

SEQ ID NO: 4121111 - RNA, 68 nt, Human
uggcgacaucucagccaaaagacccggcagacaccaucuuggccaagggaucgagguuggcaucgcca

SEQ ID NO: 4121112 - RNA, 71 nt, Human
uggcgaugcaagugcuguauccaauuagaaguuuuacuucucaauaaacugcucaauugcaucaauagcca

SEQ ID NO: 4121113 - RNA, 65 nt, Human
uggcgcuggagugaugccugugucucugagagccacuugggacauagcaucuccuccaugggcua

SEQ ID NO: 4121114 - RNA, 78 nt, Human
uggcguuugaaagccuuuguacacuuccaaaagguaaaugguccacuuggucagugaaggagucuuugcugagcgcca

SEQ ID NO: 4121115 - RNA, 61 nt, Human
uggcuaagcugaggagaggaugcccucauuuugcaaagagacgcuucucccaucuuggcca

SEQ ID NO: 4121116 - RNA, 129 nt, Human
uggcuaaugaccuguaaccacucccuugcuugcuggagucacuuccauuguauuucagaaacaaauaucuuuucaagaaaauacagaguugcuuaaaagcuauaggggauuccauuacuccauuaacca

SEQ ID NO: 4121117 - RNA, 118 nt, Human
uggcuaauuaaaggguaaaguugaaaguagacaugagcaaugauaauuuaucaguucuauuucugaauauuuccaugaaguuuaguuauauuuuuagaaagcuucuuuuuuuuuucca

SEQ ID NO: 4121118 - RNA, 69 nt, Human
uggcuacagcuuggccacagagaagggaggcagagaaguuagauucuauucuguguguuacuguaacua

SEQ ID NO: 4121119 - RNA, 130 nt, Human
uggcuaggcaagccaggcucugcccauguguugagugaucauucagaauugguauuauaauuuggcaaacaaaaaugcuuugauugauuaaaacaauggaucccauuuagaguuuuuugggugucuggaa

SEQ ID NO: 4121120 - RNA, 68 nt, Human
uggcuauauaugauuuguugcauuuaggucacuuaugaaaauuccaaugucaguucauguauaggcca

SEQ ID NO: 4121121 - RNA, 122 nt, Human
uggcuauguucugucauuagucuucaggguuaucaacugcagguuuauuuucuuaccugauuuucucaguaggccuaaauagaacuugccuuggcuuuguuucuaaugcuagaaaacuucca

SEQ ID NO: 4121122 - RNA, 85 nt, Human
uggcucacaccuccuggggcugcaaggccugucccuggcucuggcagcgagaugacagggcuguugccccggcagggugaggcca

SEQ ID NO: 4121123 - RNA, 84 nt, Human
uggcucacgccuguaaucccagcuacuugggaggcugaggcaggagaaucgcuugaaccaggagguggagauugcagugagcca

SEQ ID NO: 4121124 - RNA, 82 nt, Human
uggcucacugcaaccucugcuucccggguucaagcaguuuccugcuucagacuuccaaguagcugggauuacagacaugcca

SEQ ID NO: 4121125 - RNA, 59 nt, Human
uggcucaggcacagacgcaaacuucuugauaaugucuucaagcgccuggagcccagcca

SEQ ID NO: 4121126 - RNA, 60 nt, Human
uggcucaggccacuucuuuuauggcacaaguuuuuauaauggaacaugguuuugaugcca

SEQ ID NO: 4121127 - RNA, 78 nt, Human
uggcucaguguuggcauucagaaauguuaaauaacaauaauaauaauaauacaucugagugugacgcuuuaauagcca

SEQ ID NO: 4121128 - RNA, 58 nt, Human
uggcucauucuggggaagucagccaccaaguaaaagucugacucuccugagaugacca

SEQ ID NO: 4121129 - RNA, 56 nt, Human
uggcuccagaagggagggcgccagaaaagaugccugggaaacucucuucggggcca

SEQ ID NO: 4121130 - RNA, 81 nt, Human
uggcugaaaaucauguuauguacaaauaugacuugauucaauacaauuuauuguuuggguauaauuugaauuagaaagcca

SEQ ID NO: 4121131 - RNA, 64 nt, Human
uggcugaagcugaauuguugcagacuaaugcuuuucaaacuucuguacacaucagcaucuccca

SEQ ID NO: 4121132 - RNA, 57 nt, Human
uggcugaccauggaggcaacaucugugauguuuuguugcugaucugugaaucagcca

SEQ ID NO: 4121133 - RNA, 62 nt, Human
uggcugagcacuuggaggaagagagugguccacacuuucugagcuuucuugugcucaaguca

SEQ ID NO: 4121134 - RNA, 107 nt, Human
uggcugauuguguuuucauuagaauggagagcuuggaugucuuuuguucauaccucguggcaauuuccuguccagguaucuuggucuaguacaucuuauuucagcua

SEQ ID NO: 4121135 - RNA, 74 nt, Human
uggcugcuggucggggucagggagaugaagcagugccagcuccguggucugcacugauccugaccagugaacca

SEQ ID NO: 4121136 - RNA, 68 nt, Human
uggcugcuuuaagaugacaaagaagguaggugcugcuccugccacuguuccaccaucuugauuagcca

SEQ ID NO: 4121137 - RNA, 101 nt, Human
uggcuggacugcaguguguguacaguuuuaacucugagggguuaaaauauucucauuggcccccaagacuaugacuuuauuacuauuguucauccaugcua

SEQ ID NO: 4121138 - RNA, 63 nt, Human
uggcuggauuauuggcuaguacaacucugaguccuucuaucugcucccaaucaauuccagcca

SEQ ID NO: 4121139 - RNA, 91 nt, Human
uggcuggguaaaaugguauuucuaggucuagaccccugaggaauccccacacugacuuccacaaugguuaagcucguuuacagucccacca

SEQ ID NO: 4121140 - RNA, 85 nt, Human
uggcuggugccuguaauccccgcuacuugggaggccaaggugggagaaucgcuugaaccugggaggcggagguugcagugagcca

SEQ ID NO: 4121141 - RNA, 77 nt, Human
uggcuuaaagaugauuauguagauugggaguuaaaagagaauauucauuucacagugguagugcauuuagugagcca

SEQ ID NO: 4121142 - RNA, 67 nt, Human
uggcuuaagauuuaugcuuuuauggaauauuagucuuguccacugaugauagcaauaaaucaaguca

SEQ ID NO: 4121143 - RNA, 68 nt, Human
uggcuuagaaagcagcauuuaugaucucacaguuucuguggguuagcaauccgaaugcaguuuagcua

SEQ ID NO: 4121144 - RNA, 70 nt, Human
uggcuucaggagcaccuggcuuuccucuaguucagagcccccaggucggaguguauucacugaauagcca

SEQ ID NO: 4121145 - RNA, 60 nt, Human
uggcuucaggguugucuucagcuaccugggacugacgauuagcccuggaacugaccgcca

SEQ ID NO: 4121146 - RNA, 57 nt, Human
uggcuucucuggcuuggaggagaggcucugcuucucacaaauccauccaggaggcua

SEQ ID NO: 4121147 - RNA, 76 nt, Human
uggcuugaauuuuucauguuugaugcauaaggccaguggcauucaaacaggaagaaaucauuucuacaguaagcca

SEQ ID NO: 4121148 - RNA, 57 nt, Human
uggcuugaggauauaacuugacuuacaaagaaauucugagaaguaugucuucagcca

SEQ ID NO: 4121149 - RNA, 81 nt, Human
uggcuugaugcugcuaucuuucugcaccauaauuaguugcauguauaguuaauuauuaugagaaaagcagaacaucuccca

SEQ ID NO: 4121150 - RNA, 68 nt, Human
uggcuugcuacugaggugucaggaaauuguacacucaagucucaccuugacauuuaguagcauuguca

SEQ ID NO: 4121151 - RNA, 68 nt, Human
uggcuugguccuggcccuuccccacgagcccaguggacacagcuggagcagggcggggcccaggcaca

SEQ ID NO: 4121152 - RNA, 86 nt, Human
uggcuugucucccacucuggaccgucagccggccucgcggagacccgaggggcuggcacgauggcugcagcggcggcggcaaccca

SEQ ID NO: 4121153 - RNA, 64 nt, Human
uggcuuuauccaucaucgccaacauuuucucuuuugcagcuuugagggugauggggauagguca

SEQ ID NO: 4121154 - RNA, 68 nt, Human
uggcuuucccgaaauguauuagaccugagcauugaugccacauauuccauuguugggauccaaggcca

SEQ ID NO: 4121155 - RNA, 123 nt, Human
uggcuuuggcugugcuguuccucuuggaggugaguggggucuccagggugagcgaggcauuggccaucuccuggggcuugucgcuggccagaaagcggagcagguugugcagggccuuggcca

SEQ ID NO: 4121156 - RNA, 62 nt, Human
uggcuuuggcuucuccuggcaggaagucaucaggcauccucuccaggugagccgaaauucca

SEQ ID NO: 4121157 - RNA, 82 nt, Human
uggcuuuuccgggaaagagaccgaccagcuaggaucuugcuugcuuggaccugccuggacagcucuuaccuugggggcgcca

SEQ ID NO: 4121158 - RNA, 58 nt, Human
ugggaaagaguuguuguauaacaggaauccuaccuaggccuccuauugcucauuccca

SEQ ID NO: 4121159 - RNA, 61 nt, Human
ugggaaaguaauugucauccuuucgaaaacacgaccuugaaaggguugcuaacuuguccua

SEQ ID NO: 4121160 - RNA, 68 nt, Human
ugggaaauuguaacaagucuguuaccuguauauugugucuuccacaaagcagacugaauacauucuua

SEQ ID NO: 4121161 - RNA, 57 nt, Human
ugggaaccauguagcugagauguauuuguuuagaugaaaagucuacacugguucuua

SEQ ID NO: 4121162 - RNA, 68 nt, Human
ugggaagagggaugcuuaggugagagugggguggaaaaaacuucuugaaaguggugacccucugcuca

SEQ ID NO: 4121163 - RNA, 76 nt, Human
ugggaagcaauuuagaaucagaagcacagggguucaaaucccagcucugggacuuucuaaaugugcucuuuuucca

SEQ ID NO: 4121164 - RNA, 74 nt, Human
ugggaagcagccugaagccaagggcuggcugacuuggaauauaaaagcugggccccuugcaaagugcuuuccca

SEQ ID NO: 4121165 - RNA, 63 nt, Human
ugggaagcuuuaaaugggugucugguuuguuacuuugagucauuuucacccgaagccuucuua

SEQ ID NO: 4121166 - RNA, 63 nt, Human
ugggaaggggaucagaggaggacucaaaaccaacagucuucagagacucugagccccucccca

SEQ ID NO: 4121167 - RNA, 85 nt, Human
ugggaagucgccguccuggggcgcucgcucugucccccucgccucggaccaccaggcagagcagccccaggguuuggacuugcca

SEQ ID NO: 4121168 - RNA, 74 nt, Human
ugggaagucucaugaacucucaagucaggccacaacgugcaagggccauucuugaugagguaugaaccucucca

SEQ ID NO: 4121169 - RNA, 75 nt, Human
ugggaauaaagauaugguuugaauuuugugaauccuuaccuguuucacaagcucagaucccugucucuauuuuca

SEQ ID NO: 4121170 - RNA, 78 nt, Human
ugggaaucuagauuuuuacaauucucuaccaguguuucuaaaagcugcuggccuggguugaaaacagcugaguuccca

SEQ ID NO: 4121171 - RNA, 60 nt, Human
ugucacugugggucccagacuggaguguuucauuucauuuguucaucuauagacaagaca

SEQ ID NO: 4121172 - RNA, 84 nt, Human
ugucagagaucaccaaggcauuuucacagcauugaagaugauuuguuuuucccugguguggauugcuuuuuggagaugaugaca

SEQ ID NO: 4121173 - RNA, 79 nt, Human
ugucagaucuagcuggucuuaaauguguccagccacaacuguguugcuauggacaaaagagacugguggacaacuggca

SEQ ID NO: 4121174 - RNA, 61 nt, Human
ugucagcacaucuguaaucacagcuaagcuccugcuguaugugauuuuggucugcgugaua

SEQ ID NO: 4121175 - RNA, 76 nt, Human
ugucagccacaaugguguacucugaacugggcacaugcuuuaacuaauguucagagacacuuauuggaaauugaca

SEQ ID NO: 4121176 - RNA, 56 nt, Human
ugucaggcaagcgggugcccugcuugauccccccggcuuggccccggagccugaca

SEQ ID NO: 4121177 - RNA, 57 nt, Human
ugucaggccugaggcuggaugucaggccaaagcuggcuccagcccagcagccugaca

SEQ ID NO: 4121178 - RNA, 57 nt, Human
ugucaggcuuuucuucccagguuguuuugcauuuccugggccagauccagccucaca

SEQ ID NO: 4121179 - RNA, 70 nt, Human
ugucaguagugccaagguugagaaacuguaggauauaaagauucucaaguuuugcuuugggauaauugca

SEQ ID NO: 4121180 - RNA, 66 nt, Human
ugucaguauuuucaaccauagccugggaggcaucuacgccuccuaggguuauuagaaaguaacaca

SEQ ID NO: 4121181 - RNA, 57 nt, Human
ugucagugcacagaugguugauacauaaguaucaguuguaauuaucuuuggguggca

SEQ ID NO: 4121182 - RNA, 91 nt, Human
ugucagugcucuccagucaaagaccuaguuuguucaauuaggaacauaucugugguugaacaaguuggguauauugcugcuuguagugagg

SEQ ID NO: 4121183 - RNA, 59 nt, Human
ugucaguucaauuauaguaauucaacuaaaugaguuauucuacagucauugaagugaua

SEQ ID NO: 4121184 - RNA, 62 nt, Human
ugucaguucuauaauguggcaguugcugccuuaaauagcugaacugcaaaucuuagacugca

SEQ ID NO: 4121185 - RNA, 71 nt, Human
ugucauaucacaguaucacauccucuaaggcaaaaaccacuuuugcugaaaacaguggguauugauaggca

SEQ ID NO: 4121186 - RNA, 62 nt, Human
ugucauaucuauuaaaugucuagcacagugguuggcacacauuaggcaauuaguagauaaca

SEQ ID NO: 4121187 - RNA, 61 nt, Human
ugucauaugcugucauagccauacaauuuguaagucccguggcugguguuuagcugugaua

SEQ ID NO: 4121188 - RNA, 76 nt, Human
ugucauauguucguagaucuuugguuggaaacacaaugcaaauaacuauuccaaucagcuccuaugagaauagaca

SEQ ID NO: 4121189 - RNA, 98 nt, Human
ugucaucagagcaucuaagacuguaucaagaucagcagcuguucucacuagaauggugcaucuuucaauauucaggucuucccagggguucuuugaca

SEQ ID NO: 4121190 - RNA, 76 nt, Human
ugucaucagcauuuuggggaugguguuuauuucuucaacgagaauaagauuccagaucccaaaaaugauauugaua

SEQ ID NO: 4121191 - RNA, 62 nt, Human
ugucauccugucuuuguuuuaaauaugcuaaaugcauauuuuguaacuuggaauagguaaca

SEQ ID NO: 4121192 - RNA, 64 nt, Human
ugucaugcuaaacuaugaucauuuucugagagagagacucagaaaauugucucuuuagauggca

SEQ ID NO: 4121193 - RNA, 71 nt, Human
ugucauggcuugucuaugagugcucuggucaucucgccagaccaugagcucaccacaggcagaaccuggca

SEQ ID NO: 4121194 - RNA, 86 nt, Human
ugucaugggcucuuucgggggaguuccggacagcaccacugugcaaaagauuguccuggccuccagaaagucggcuccaaaugaca

SEQ ID NO: 4121195 - RNA, 94 nt, Human
ugucaugggucccucugugcccccugcucuccgcaggcaaagucuacccucucccccggugugccugcaagaguuggggcuacagggccagaca

SEQ ID NO: 4121196 - RNA, 76 nt, Human
ugucauguaaugcugggagcugggcuaggggcuuuacauccguuauucuaacgccucaccccagcacuacgugaua

SEQ ID NO: 4121197 - RNA, 88 nt, Human
ugucauuaauaagcagacaauuaaguaauugaggugauguaugggaaaaaucacugggguuauuggauugaaucaacuauuagcagca

SEQ ID NO: 4121198 - RNA, 104 nt, Human
ugucauucauacuucuaguguagagcuguucugugauugaucuacccuuagcuugggauaaugcuuuauuuauaaaauagcaauuucugcauuuucuguaggca

SEQ ID NO: 4121199 - RNA, 78 nt, Human
ugucauuccggucaucacagugacagccaauguuuucaguuauuuugaguaagugagucacugugcuggaauccgaua

SEQ ID NO: 4121200 - RNA, 67 nt, Human
ugucauuuacaauguacagguugugcccugcacaaucaccaaaggguaccauuugcaucguaggaca

SEQ ID NO: 4121201 - RNA, 84 nt, Human
ugucauuuuagagcacaagagaaagguuaaagcuggaauauauguagguguuaucagcauauuuacuuucuugccugauugaca

SEQ ID NO: 4121202 - RNA, 67 nt, Human
uguccaagaacccaagcgaaugcccacaucugcaagucccugggcaugugucuuggggcucugggua

SEQ ID NO: 4121203 - RNA, 61 nt, Human
uguccagaacacaguuaguaagggaaauauugccaauauuccaucuauuguguuuuugaca

SEQ ID NO: 4121204 - RNA, 56 nt, Human
uguccaggaguaaaaagaccugaauucuacuuuggggcuuugacauuaccuggaca

SEQ ID NO: 4121205 - RNA, 55 nt, Human
uguccauagugccuggcauaccaaagguggucaauaaaugucugugcacuggaua

SEQ ID NO: 4121206 - RNA, 130 nt, Human
uguccauuaaugucauuuuucauuuucauuuuuuaauguaugggguugagaugauacuaugggauugaguauaauugccuuuuauagaaugcgugggacugauauuuucuaaaaauggacaaaaauccag

SEQ ID NO: 4121207 - RNA, 85 nt, Human
ugucccaagguaucuuagggagcucuggcagaaggaauaagaugguauuucuaguaaaggccuuuaggaaauauuuuaggugaua

SEQ ID NO: 4121208 - RNA, 57 nt, Human
ugucccagacacaguaugcgcuuguggucacucacucaccauuccugugcugaggca

SEQ ID NO: 4121209 - RNA, 71 nt, Human
ugucccaucacuagcugaaagcaauucaaccuaacuggcuuucuaauugaccuuaggcugugcuggugaua

SEQ ID NO: 4121210 - RNA, 72 nt, Human
ugucccauucaagaguauagagaccaggaguucacagcaacuccaguccuaucugcccuuggacuuaagaua

SEQ ID NO: 4121211 - RNA, 57 nt, Human
ugucccugcagccccugagccuucauagggaauggagaggcaggagcuacagguaca

SEQ ID NO: 4121212 - RNA, 79 nt, Human
ugucccuuaugaaucuguucccgaaauggcucuggacucuuuucccaggagaauauuuuugggucauagacuuuagaca

SEQ ID NO: 4121213 - RNA, 92 nt, Human
ugucccuuccuuuuuuggcacugcgucuacauggcaucuuacaacucuuugauugcugugaugacaggcagggccaaacuagucaggagaca

SEQ ID NO: 4121214 - RNA, 60 nt, Human
uguccuacauuuucuuucauuuccccacccucauaaugaaauggcuuugaggguaggaca

SEQ ID NO: 4121215 - RNA, 78 nt, Human
uguccuccuucccagccuccccacacaagaggcacacagcugugugugggagcacgggcuguugggggagaggggaca

SEQ ID NO: 4121216 - RNA, 57 nt, Human
uguccuccuucggcaaggaagccugcagcaaaggcgggcuccaggucagagaggacg

SEQ ID NO: 4121217 - RNA, 61 nt, Human
uguccucugcuggucucuggcuagguccccaucuccagccaguggcguaaacuagaggaua

SEQ ID NO: 4121218 - RNA, 63 nt, Human
uguccuguucauggcucuggacacccucacagucccagugcccucaucuaugaaaucgggaua

SEQ ID NO: 4121219 - RNA, 62 nt, Human
uguccuguucuugcuguguccucagugcuuagcauaguuuccggcacacaguagggcuggca

SEQ ID NO: 4121220 - RNA, 81 nt, Human
uguccuuacagcaauuuccaucaucauuaggccuagaaguauaaaguacaguugcuugguguguguggaagaaauaggaua

SEQ ID NO: 4121221 - RNA, 57 nt, Human
uguccuuauaaaugaggcccuggggcauugcuuugucccuucugccaugugaggaua

SEQ ID NO: 4121222 - RNA, 81 nt, Human
uguccuucugagacugaggguaaccuggagcugcugcaggcgcuguugcaaucacggguacccauuugucugagauugaca

SEQ ID NO: 4121223 - RNA, 61 nt, Human
uguccuuuaaguagaagagauauuuuuauaaguaggaauauuacuuugcuuuuauuggaug

SEQ ID NO: 4121224 - RNA, 57 nt, Human
uguccuuugggagggcacagcucuuggcagacaauugguugugaccugccagaggca

SEQ ID NO: 4121225 - RNA, 83 nt, Human
ugucgacuuuguuuccaaccccaccaaagugccauccuucagugaaguacaaggaggggcuugagagguacgaagucacgaca

SEQ ID NO: 4121226 - RNA, 70 nt, Human
ugucggugcaagccagcuugaugaccugucggacaucacagaagaaguuguccagcugguuugggccaca

SEQ ID NO: 4121227 - RNA, 64 nt, Human
ugucgucagcuuugugcugcuucuugucacuuuaaugcaaagagacagcauggagcugauaaca

SEQ ID NO: 4121228 - RNA, 102 nt, Human
ugucuaaaguauguucuggaaauugcaggcaccagcaggagcaggggggaaaaaaggaaagccuagcucaaugcucaaugcugcaaaaguagaaaauggaca

SEQ ID NO: 4121229 - RNA, 90 nt, Human
ugucuacagugcugaguaucuugaugaauuugaaauguucaguuaauuaaaacauuucaaaacagcuagauauuggaugucacugagaua

SEQ ID NO: 4121230 - RNA, 79 nt, Human
ugucuacauaugcuuuuaggcuaugauggcaccacugcgucacugcaacagagguuaucuagaccaaaagccuaagaua

SEQ ID NO: 4121231 - RNA, 98 nt, Human
ugucuaccuuccagucauuuaucuagucucuaguugaggacugagcagcgaacgugcguugucugucuggcagggaccaaggacugcagggcgugaua

SEQ ID NO: 4121232 - RNA, 58 nt, Human
ugucuacuugggcucuacagcagaacggcgaauucugaguucggcccucuaguggaca

SEQ ID NO: 4121233 - RNA, 68 nt, Human
ugucuacuuuaagaucauuuguauuaucccuucauuuggguuuacaacuuggguuuuaacauuaggcg

SEQ ID NO: 4121234 - RNA, 119 nt, Human
ugucuauuacagcacuuagcauaggguggagugggggaaggaguguuauuuagcagaguggaccaagcacagcuugcauuccaguccccacuguguccuaagcugugugauuuuggaca

SEQ ID NO: 4121235 - RNA, 63 nt, Human
ugucucaagaaaggauggggcuggaggcaagcaacugccagagcuucauaauuccuugacuca

SEQ ID NO: 4121236 - RNA, 77 nt, Human
ugucucagagaacacugagagucuuagaaacacauaguguuuauguuuucuucauggagucuuauuguuuagaaaca

SEQ ID NO: 4121237 - RNA, 59 nt, Human
ugucucaggcccaagccaguaagcacaucacguuccccuggccuuggugcuugcagaca

SEQ ID NO: 4121238 - RNA, 73 nt, Human
ugucuccaaauagcuggaugauggugucauauuugcaaugcauagauuaugccaucaugucagauuugggaca

SEQ ID NO: 4121239 - RNA, 61 nt, Human
ugucuccagaucucacagaggcccaccaggaacugaaguucugccacugugauaggaaaca

SEQ ID NO: 4121240 - RNA, 66 nt, Human
ugucuccauucuucuaucccuuuccucggggagcccugugcacugguugacagaagaaggaugaca

SEQ ID NO: 4121241 - RNA, 65 nt, Human
ugucucccauagcauuuuaaauagugccuuacucaugguaucuacgcagauguugcugguuggca

SEQ ID NO: 4121242 - RNA, 58 nt, Human
ugucuuuacuuagaaguucaggguacagggcugacuuuguucacuccugggaaagaca

SEQ ID NO: 4121243 - RNA, 57 nt, Human
ugucuuuagccacuugccucuuucauuuuguugggagagugcacauggcugaagaua

SEQ ID NO: 4121244 - RNA, 66 nt, Human
ugucuuucuauaacacuggcuguaauaauuugaaacuguguggccauuuuguguuuuggagaaaca

SEQ ID NO: 4121245 - RNA, 80 nt, Human
ugucuuucucuguguuucacaugcuggccuugaucauggguggcccacacuaaguugugagaaacagaaugagcuaagca

SEQ ID NO: 4121246 - RNA, 86 nt, Human
ugucuuuggagaauauuuuuagcuuuccucacucugauaguugcuucuguuuuagggguuugcugcaguauugaucccaaagaaca

SEQ ID NO: 4121247 - RNA, 63 nt, Human
ugucuuuuaagaaggguuacugccucacugaaauuagcaggcagucaucuuucauauuugaua

SEQ ID NO: 4121248 - RNA, 116 nt, Human
ugucuuuucuuccagaguaaguggguagcuucuuccuacuuuuuuucucuuuucuucuauaaaugggaggaaaagugugaaguauggagacugcucuuucauuugaaggaaauuca

SEQ ID NO: 4121249 - RNA, 79 nt, Human
ugucuuuuuugaauuauuuguuugcaagcuagagaaauaggcuaccuuuagcaaaauaagguaauuuauuggaaagaua

SEQ ID NO: 4121250 - RNA, 92 nt, Human
ugugaaaaacugugugaucuaggaggaagcagcccuaggcaugaggaagucuuagccuugcuuugcuucuggacagcugcaugauuguugca

SEQ ID NO: 4121251 - RNA, 57 nt, Human
ugugaaaagggcuuuguacaaaccucucaugggguuuuauaaaagcucuuuuguaca

SEQ ID NO: 4121252 - RNA, 74 nt, Human
ugugaaaaguagcucaaguuguuucacucauuauuuuaaucagugaaagugcuuagagugugguauuucucaua

SEQ ID NO: 4121253 - RNA, 82 nt, Human
ugugaaaguacuuaaugccacugaauuguaaacuuaaaaaugguuaaaaagguacauuuuagguauuauauauuuuaucaca

SEQ ID NO: 4121254 - RNA, 62 nt, Human
ugugaaauauuuauauacucaacauggcuuuucuccccuguggaagauuuuaauguuucaca

SEQ ID NO: 4121255 - RNA, 82 nt, Human
ugugaaaucaaugucuucugucucuuccuuccagagaaaaauuauaauaauucuuuuaaucagggcagcaagacauuugaca

SEQ ID NO: 4121256 - RNA, 64 nt, Human
ugugaaaugaguauauuugaauugauguuauucugccaggacaucuuuucagcuacucaacaca

SEQ ID NO: 4121257 - RNA, 59 nt, Human
ugugaaauuucucugagaguuccuuaacauuuaaaggaauuucaguaugaaguuucaca

SEQ ID NO: 4121258 - RNA, 64 nt, Human
ugugaacugugaggcucuugcauauugggagcucucugaaggcagcagugucuccagcaucaca

SEQ ID NO: 4121259 - RNA, 100 nt, Human
ugugaagaauaaauuucuguugcuuucaagccucucagucugugguguuuuguuauagcagcccaauggacugagacagcauaagagguuccucuucuca

SEQ ID NO: 4121260 - RNA, 58 nt, Human
ugugaagauauugugaucaggugaauauuggaaaguacacuuuaaaaauaucuuuaua

SEQ ID NO: 4121261 - RNA, 74 nt, Human
ugugaauaaguaggaugaauaacugaaauggugcuguuuaguaguugccacuauccauucauccuauucucaua

SEQ ID NO: 4121262 - RNA, 60 nt, Human
ugugaauagugccgcaauaaacauacgugugcaugugucuuuauagcagcaugauuuaua

SEQ ID NO: 4121263 - RNA, 130 nt, Human
ugugaauauccacuuaaaaugccaugugaugcuaaucaucucugugggagcagcucaugucucuaguaaauugcauuucacaguaaagugauuucacaguucucauguauuuuuuguguuuagugcaaua

SEQ ID NO: 4121264 - RNA, 95 nt, Human
ugugaauggacauuauguaugggaagaggcauggaaaguagucauuucacuuucuuuguuguacuuuccuacagucagcauguuuuucauucaua

SEQ ID NO: 4121265 - RNA, 96 nt, Human
ugugacaucaugggaggagcaccugguccuugacgcgugggaggcgggcuuuggcccgugucgucaugggaggcgggucugguacgugacgucacg

SEQ ID NO: 4121266 - RNA, 60 nt, Human
ugugacccagacucaucuucuuacucuuaacuaaguaggaaacagaccuuugggcuuaca

SEQ ID NO: 4121267 - RNA, 55 nt, Human
ugugacccccgucacggcugcuaccuaacgguggcugccauuuucaggggucgca

SEQ ID NO: 4121268 - RNA, 70 nt, Human
ugugacuauugcuuuggucuuacauguggcugauaucagcuuguuuugaaaauccaaacacuaguccaca

SEQ ID NO: 4121269 - RNA, 90 nt, Human
ugugacugcuaagaaguauugugggcaaagauuuuaacaaacaaaaauaugaaaaucacaacaagcuauacacauuucuugguagucaca

SEQ ID NO: 4121270 - RNA, 64 nt, Human
ugugagagcagaagacacauagaacucauauuuauaguagaggguuagauuuucuugcuccaca

SEQ ID NO: 4121271 - RNA, 96 nt, Human
ugugagaguggcugagguuaugcugguuguauaguuugggauuagguuucuucagaauccucuagguuguuauaacuguucucuccacucugcaca

SEQ ID NO: 4121272 - RNA, 66 nt, Human
ugugagaugauagauauguuaauuugcuuuaaaguagcaaugauuuuacugucuguguaucucaua

SEQ ID NO: 4121273 - RNA, 66 nt, Human
ugugagcacuauggcuaggcucugagaacacauugaauguuuauugagcacuugcugugugccaua

SEQ ID NO: 4121274 - RNA, 68 nt, Human
ugugagccacaaauaaccacuggucugcuucccaucaugacacuuuggugcuuugugguuacauuaca

SEQ ID NO: 4121275 - RNA, 61 nt, Human
ugugagccaggggauucaucagggacgcuuugguggccaggagcagaaucgccugcuaaca

SEQ ID NO: 4121276 - RNA, 107 nt, Human
ugugaggggugucaguuauagccuugguccuugcuccacuucuguggugaggugcugccaagagcuguggggaaaggaguggggcucagagcugaugcccauuugua

SEQ ID NO: 4121277 - RNA, 102 nt, Human
ugugagggugugacauuuauuuaagggauuuggagaccaaggcuucauacacaugcaaucagaggcuucuggugucaguauucuuugaauuauccccuggca

SEQ ID NO: 4121278 - RNA, 122 nt, Human
ugugaggugagaacaaaaauaggaauaugaaaacuagaggagaugaaaucugaccuagauaucuuuucugguacacauuaugcuucucuaaaauuuugaauucuugauugaaacagccucca

SEQ ID NO: 4121279 - RNA, 94 nt, Human
ugugagguugggagguagagcagacauggcuuggauguggcagggucagaugcuguggccugggcagaugugguggcuuccacgaaccucugca

SEQ ID NO: 4121280 - RNA, 113 nt, Human
ugugaguacacgugcuaacauucacauccugggcagugugucacucugcuguucgucucagccagaaucuaugccagagucacacugugugaguguugacagugcuguucaca

SEQ ID NO: 4121281 - RNA, 82 nt, Human
ugugaguaggcaaccauacaauaguguuuguuuugaggacaauuaugaguagguuuuuuagauacauuguaugucacuugca

SEQ ID NO: 4121282 - RNA, 73 nt, Human
ugugagugaugugggacaggaagaggcacaagggccuggucuuucagccacuuaccugucuaggauccucaca

SEQ ID NO: 4121283 - RNA, 70 nt, Human
ugugaguucuuagaaagucaguuggacccuucuaauugccuggguauuagggauuuugcugaaacccaca

SEQ ID NO: 4121284 - RNA, 62 nt, Human
ugugauaauauuuugaaucauaaguuucucaggagauucugauagauuugagaauuauugca

SEQ ID NO: 4121285 - RNA, 82 nt, Human
ugugauagauagcugaccaugaauuaagcaucuuaauuucugagaguuuaccacuauuuuuggucucacuuaucuuuguaca

SEQ ID NO: 4121286 - RNA, 82 nt, Human
ugugaucagagagauaauaggagccaggucacauaggccuuacaugccauugugaauaacuuggcuuuuacucugagugaca

SEQ ID NO: 4121287 - RNA, 58 nt, Human
ugugaucugcacaauuguguagguagguacuauuauuauucacaauuuacagaugaca

SEQ ID NO: 4121288 - RNA, 61 nt, Human
ugugaugacagugccagucuguucugagcagcucugggcuccuggcuucacugacaucaua

SEQ ID NO: 4121289 - RNA, 63 nt, Human
ugugauggcaacucaauuucuacaagacugaaacagucuucaugaaauugauugcuuaucaca

SEQ ID NO: 4121290 - RNA, 130 nt, Human
ugugaugugcauaagguguuugaaugcaugccagcaagagugcugugggggaagaaagagagagaaaaggaacagcuuuuauucucuccccaaucuugcuucacaguauuguguuuuucaccuucauuca

SEQ ID NO: 4121291 - RNA, 84 nt, Human
ugugauguggggagguugcuaggcagugucacagauuauggcacccagccacugagcugugacaaugcuuaacuccauaaugca

SEQ ID NO: 4121292 - RNA, 77 nt, Human
ugugauucuguagccaucauucucacauucuuguuauuagucagaaaaggaauguaauaguguggcucaguuaaaca

SEQ ID NO: 4121293 - RNA, 114 nt, Human
ugugauugcgauauuucaaggugaguagugagagaauaaagcaaauaauucaccugccagaauuuccaguacuauuuucugcuauagcuucucuugaacuucucuguuuucaua

SEQ ID NO: 4121294 - RNA, 72 nt, Human
ugugauugcuuuguucuucgucuuuuauguucuuccuagaugggcucagaacauacaagaauuaaguacaca

SEQ ID NO: 4121295 - RNA, 114 nt, Human
ugugcaaacacacucuuucagaguuuggaaacucuguaucaucuuuggccacuugaaauaaaagugguuauuuugaucuagaauucugaaaucuaaagguugaugcuuugaaca

SEQ ID NO: 4121296 - RNA, 79 nt, Human
ugugcaaaguacagaacugaaguagugaaaaauaucauuuuccaucauauuucuguucagauuugccugucuuuucaca

SEQ ID NO: 4121297 - RNA, 62 nt, Human
ugugcaaaugauucuaauggguagucaagaucaagaaccacugcuuuagacucauuuguuca

SEQ ID NO: 4121298 - RNA, 94 nt, Human
ugugcacacacgugugagagcuguggcaguggcaggcguguagcugcagcaugcacacaggucuaggacauggagacccacaugugugggcgca

SEQ ID NO: 4121299 - RNA, 76 nt, Human
ugugcacauuauuggauaugauaucucaugguauuuaauuaauuaagcaccuguuuuccuaucuagauugugcaca

SEQ ID NO: 4121300 - RNA, 67 nt, Human
ugugcacguaccucuguuuccucugccccucauuugcagaccuacucuggauccagaggaucugcca

SEQ ID NO: 4121301 - RNA, 124 nt, Human
ugugcagagacgcugggagcccgaagaggucguggcuguggcuuccgcugcagguuagggcuauugacuugcauggaggaacauggcccacggacuguguugcaaacccucagucuguugcaca

SEQ ID NO: 4121302 - RNA, 61 nt, Human
ugugcagcuacuccuugguccuagaaucaaauucucucucucaggccagaguugcuccaca

SEQ ID NO: 4121303 - RNA, 57 nt, Human
ugugcaguucaaacccguguuguucaagggucaaccuuauacuuaaugaacuguaca

SEQ ID NO: 4121304 - RNA, 65 nt, Human
ugugcaguuguggacaugacaacuuaagauuaauaaaaagcugucucaucuuccacaucagcaua

SEQ ID NO: 4121305 - RNA, 67 nt, Human
ugugcauauguuucaucucuaugugucugguguauuagaaggagcagaaagaugaaagcaaaugaca

SEQ ID NO: 4121306 - RNA, 70 nt, Human
ugugcaucuaucuccugguacccuuccuagcaucaauucuguauuuguaggaguccaaucaggagacaca

SEQ ID NO: 4121307 - RNA, 129 nt, Human
ugugcaugccugugucuuaaguuuuuauauauguauauaaauguuguagcauaugaaauauaugccuaccuauguguuuauguaauagcauuaaaauuugcauguauggccugugaacauacuugcaua

SEQ ID NO: 4121308 - RNA, 75 nt, Human
ugggaauggaaauuuauuagcuuuggauugcauuuaguucccaugaagugaccugcuuugaagcuaccauuucua

SEQ ID NO: 4121309 - RNA, 61 nt, Human
ugggaauggugcuugaugcauucaacuaauaccuuauuuguagacaucuguaucauuuuca

SEQ ID NO: 4121310 - RNA, 80 nt, Human
ugggaauguuuaaggaaggcguggcuucccccuagaucauggugcuuacagucuaggccaugguuucucaaauauugaca

SEQ ID NO: 4121311 - RNA, 94 nt, Human
ugggaauuaaaugaaagucauggaaaaucuuggaaccaucaugauuaugaaagaaaauucuugagauaauucuaugucugcaguuugcuuucca

SEQ ID NO: 4121312 - RNA, 76 nt, Human
ugggacaaaauuacccagaaccguacagacgugcgcgaaugaguauguguugguagaucugaggucuauugugcca

SEQ ID NO: 4121313 - RNA, 65 nt, Human
ugggaccugcuccuggaaugaggccgcccaugggaggccacaugcccgugaugccugggugccca

SEQ ID NO: 4121314 - RNA, 58 nt, Human
ugggaccuugaacucuaagcaccguauuuccagugucccuuuuauugucaagguucca

SEQ ID NO: 4121315 - RNA, 65 nt, Human
ugggacucaaggcagcagaagaagacuacugucuaaggaucuguuagcuuuuacccaggguccua

SEQ ID NO: 4121316 - RNA, 81 nt, Human
ugggacuggaagaucgcgcgcguuggaccuguggcuuguugcgcucagagcuggcccaggaagacgugucccggcuacccg

SEQ ID NO: 4121317 - RNA, 64 nt, Human
ugggagaaaauugaugaaguuggcugcuuccaguagaucagauaauccaugaauuugucuccca

SEQ ID NO: 4121318 - RNA, 88 nt, Human
ugggagaagaggcuggaagguguggguuugggagagagcugugagcccaggucuggcuguuaggccugaccuuccaccucuucuccca

SEQ ID NO: 4121319 - RNA, 130 nt, Human
ugggagaagggacuucccgcgccagcggcugcgcguccacucuagggcagcucucgcgcggggcaacacggcaggcagagcggccacuagagggcgcgccagccacacgcaccgcgcggcccagagcccg

SEQ ID NO: 4121320 - RNA, 64 nt, Human
ugggagaagggauaccaacauauucuguucaauaaugccaggaaauaaaaaguaucuucuucca

SEQ ID NO: 4121321 - RNA, 70 nt, Human
ugggagauaugaaauggguaaaccuggcuaccacuuacuuaacccugagcuaguccaggcauaucuccua

SEQ ID NO: 4121322 - RNA, 72 nt, Human
ugggagcugaauaggacugucaucucuuugcugugucacacacuagugauggaagccugcagaauucuccca

SEQ ID NO: 4121323 - RNA, 122 nt, Human
ugggaggaacaaggugaggcugugaaggaccuacugauaucuuagcagggggcacagccuccuucuagcaauggcagagugucugugcacaccaggccucaccuguuggacaggaaccccca

SEQ ID NO: 4121324 - RNA, 57 nt, Human
ugggaggaagugcuaaugggaggaaacaggcagagucccggucccagcuuucuccca

SEQ ID NO: 4121325 - RNA, 56 nt, Human
ugggaggagcccucugggaagggacaugauuuccacuugccagggagcugcucuca

SEQ ID NO: 4121326 - RNA, 55 nt, Human
ugggaggcagaaguugacuggaggugacacagguguucagugaacucuaccccca

SEQ ID NO: 4121327 - RNA, 55 nt, Human
ugggaggcuccuuagcccaugcaaaauaaauuuugcaaggcuuuuguguuuccca

SEQ ID NO: 4121328 - RNA, 106 nt, Human
ugggaggcugaggcaggaggaucacuugagcccaggaguucaagaccagccugggcaacauagugaaacccccuggcucaaaaaaaaaaaaaaaaaaagacucuca

SEQ ID NO: 4121329 - RNA, 55 nt, Human
ugggagggcaggcaggggcccaccccggggccacagcugcagcugcaccauccca

SEQ ID NO: 4121330 - RNA, 55 nt, Human
ugggaguagacauccuggacugaaauucagugcaucacuagggcuguggcucuca

SEQ ID NO: 4121331 - RNA, 75 nt, Human
ugggagugagaaauuuucagcaaguaguuauuugggaugauaguuuuugacagcugcuuguugaaauccaaaccg

SEQ ID NO: 4121332 - RNA, 68 nt, Human
ugggaguggaugggggcuggagaagaggggcuugccaggugaagcuccaggcccucaauccauuucca

SEQ ID NO: 4121333 - RNA, 60 nt, Human
ugggaguguucuuggcuugcuuggagaagguaaagacaagguaauccaaggcugcucuua

SEQ ID NO: 4121334 - RNA, 76 nt, Human
ugggaguuagaaggcggcccccagguuucagaguuucuccuuaagcugagauaaauccagcuccuucuaacuucca

SEQ ID NO: 4121335 - RNA, 56 nt, Human
ugggaguuauuggcuguuuugagagacucaccuucuugaugcaguugguacucuca

SEQ ID NO: 4121336 - RNA, 130 nt, Human
ugggauaagaaaaauuuauauggagaaguagcuuaugcucauucugauacugcuuuauuaacuauauuagcagcauguugggaugugaaaauaggauaacugccauucuauuacaauauuuguuuacaca

SEQ ID NO: 4121337 - RNA, 87 nt, Human
ugggauagagaauggugcugaaauggaccucaggaauagaguuuacuuucugaagcucucauuuggcauaaaccauucuagugcuca

SEQ ID NO: 4121338 - RNA, 59 nt, Human
ugggauauuuugagcuuuccucccuccccuagguggaacuguggcuguaacguauccca

SEQ ID NO: 4121339 - RNA, 78 nt, Human
ugggaucuugaaaagcacuaauuucuaggagcaucuauccugagauuugaaacuugcuucauaaaguucaagaucuca

SEQ ID NO: 4121340 - RNA, 77 nt, Human
ugggauggccacaucugagacuuuaaccuggggccacugggguuccugaauggguuucagagguccaugaacuccca

SEQ ID NO: 4121341 - RNA, 58 nt, Human
ugggaugggaucucgcugugucacccaggcuggaguauaguagcgagaucucagcuca

SEQ ID NO: 4121342 - RNA, 119 nt, Human
ugggauuuagucucaguuguguaauuuaggggcugagugaccucaggccaaacaucucaugucuuuuugccuuaguuuauucauuugccaacuaaauggcuuguuaagacuucuuccca

SEQ ID NO: 4121343 - RNA, 67 nt, Human
ugggcaaguuaauuaaccucuccaucaaggagcaugaucuuugaacuggaaagagaauuaaagccca

SEQ ID NO: 4121344 - RNA, 78 nt, Human
ugggcaaucaggcucggauggaccagcuccaagaacugagaguccuggagcuggaauuucugggccucgaucuuucca

SEQ ID NO: 4121345 - RNA, 74 nt, Human
ugggcacaguugagguaggcggacuccuccaucugcuuagauggggacugcgaggcccugccuguuguguccca

SEQ ID NO: 4121346 - RNA, 61 nt, Human
ugggcaccuagcaacccuucuccaugguguacuuugacuccaucuuguugcuaguugucca

SEQ ID NO: 4121347 - RNA, 105 nt, Human
ugggcacucacacaugacacaugguggcuggacuauaguggggcagugagaguacaaguaagagucuccuaaaguccuuaucaaguguaaucaggaguaaacuca

SEQ ID NO: 4121348 - RNA, 85 nt, Human
ugggcagagaggauggaacccugauuucuccauugcugcuugccacuggggaaaagcguuaggaguucagugcccuuuguguuca

SEQ ID NO: 4121349 - RNA, 58 nt, Human
ugggcagccaucccagccucucugcagccuggggagagaggcugggguguuuugccca

SEQ ID NO: 4121350 - RNA, 80 nt, Human
ugggcaggaagaugaaaaggauuggagauguuuucaagaaugguugaauagauucauucuauuucuccgucuccucccca

SEQ ID NO: 4121351 - RNA, 60 nt, Human
ugggcagggcccauggcucagguagggacagguguccaagccuugcaaggggccucccca

SEQ ID NO: 4121352 - RNA, 60 nt, Human
ugggcagggugugucucauacaguuggcuacaucagcuuuauuuuucaccucuugcauca

SEQ ID NO: 4121353 - RNA, 57 nt, Human
ugggcagguuguuauuugacauaauguuuucuacuaugucuguaacccacuugcccg

SEQ ID NO: 4121354 - RNA, 102 nt, Human
ugggcauaccucaaacaucuuaggaacauaugugcuuauauccaugagcaaacacauucguggauugaguauagauguauauagauuggagaaacaugccca

SEQ ID NO: 4121355 - RNA, 70 nt, Human
ugggcaugccuuaguugaaugguguauaaauuugagggcuauacauugauucaggauauaggcaguucca

SEQ ID NO: 4121356 - RNA, 88 nt, Human
ugggcaugguucgguucuuagagcaaaauggagcauuaaaauagaagacggcucugggaauaaaacuagggacuagaaccucugccua

SEQ ID NO: 4121357 - RNA, 55 nt, Human
ugggccacgugacccuuacccuggcaggacagggcaggggguuacuguuggccca

SEQ ID NO: 4121358 - RNA, 57 nt, Human
ugggccagggcacccaguccagaaggagcaauggcaccugggcagugccagggcuua

SEQ ID NO: 4121359 - RNA, 83 nt, Human
ugggcccuggcuggagggacccacucagaaggaaaccccauucucugcuuucagagcugggucccucccaagcaucuggccca

SEQ ID NO: 4121360 - RNA, 58 nt, Human
ugggccucaagauauaaguaaaacagagugaaaucuguuccacaguccugaggauuca

SEQ ID NO: 4121361 - RNA, 73 nt, Human
ugggccucucaguuaagacugcacuggacuaucaauauucgugcuccagauaacuacuuggcuaagaggacca

SEQ ID NO: 4121362 - RNA, 110 nt, Human
ugggccugccuccacuggcugaagacaguauccagguggugaagagcaugcgugcugccuccccgcccucuuacacucuugaccugggagagucucagcuggcaccccca

SEQ ID NO: 4121363 - RNA, 69 nt, Human
ugggccuggggugacguaccccugcgggggaagggaggcugcugcagggggcugggugcugaaggccca

SEQ ID NO: 4121364 - RNA, 70 nt, Human
ugggccuguguguucaggagccuccaaacccucaguacugagggguguaggcccuauucaauggggccca

SEQ ID NO: 4121365 - RNA, 71 nt, Human
ugggcggacccaggcagugcugaucccucagcuuagauaccugcuggggcucaugccugcuggaacccuca

SEQ ID NO: 4121366 - RNA, 76 nt, Human
ugggcgucaggcucagcagcuacaggauucgggguccgucgucguccuccgggccggcuugcucagcacuagccca

SEQ ID NO: 4121367 - RNA, 88 nt, Human
ugggcguucagagggggguagccagagaagagcagggaucugagcaguuggggccucuggguucuggccugcacccccucucagcccg

SEQ ID NO: 4121368 - RNA, 63 nt, Human
ugggcuagguaaacugaauuggauacugugugaacucauucauacaucaguuuucuuggcuca

SEQ ID NO: 4121369 - RNA, 62 nt, Human
ugggcucaggggucucugcucagaugccacuuccuaggaggggccucgcaggaccgcuccca

SEQ ID NO: 4121370 - RNA, 58 nt, Human
ugggcucauagcccaaguccacuacuuauuagcugagugaacuugggcaaguggcuua

SEQ ID NO: 4121371 - RNA, 76 nt, Human
ugggcucucaggcugaguuuguacucaaaugaagaguagaucuuuauugguaggacucagcugagaaguaaguuca

SEQ ID NO: 4121372 - RNA, 61 nt, Human
ugggcucucuuuaccucauaacccugaucccucauagaguucugagacaauugagagucua

SEQ ID NO: 4121373 - RNA, 62 nt, Human
ugggcugcuggggucacaugguaaggaauuguuuucuuuucccagccuccuugagcaaacca

SEQ ID NO: 4121374 - RNA, 72 nt, Human
ugggcuugaguucgcaggcagaggaggccuucuccuuuggcuggccugccguaggcucugccugcaggccca

SEQ ID NO: 4121375 - RNA, 93 nt, Human
ugggcuugcaggcccuggugccaccagcuccuugugugaugggggagucaccuucccugagugggcugguaguauccugggucaucuugucca

SEQ ID NO: 4121376 - RNA, 62 nt, Human
ugggcuuugaagagauuacugugcucuuggugcaauccagggccaauaaggucuuaaaucca

SEQ ID NO: 4121377 - RNA, 77 nt, Human
ugggcuuuucucugugcacuaacauuccugguccaaauuuccucuuuguauaagggcaccagucacauuaaagucca

SEQ ID NO: 4121378 - RNA, 65 nt, Human
ugagcucuuuugccagucacugcacuguuuugucaaccaaagugcaaagguagccaaggagcuca

SEQ ID NO: 4121379 - RNA, 60 nt, Human
ugagcugacacccaaucauacuuccugagcaccugggauuuguugauuggugucaucuca

SEQ ID NO: 4121380 - RNA, 62 nt, Human
ugagcugcaagaaaauuucaguuccuccuguguucuagcugaagucagguucugcagccuca

SEQ ID NO: 4121381 - RNA, 57 nt, Human
ugagcugcuuagaguccucaggauuagccacaaguccuuuaaccuccaggcaucuca

SEQ ID NO: 4121382 - RNA, 130 nt, Human
ugagcuugagcuagaacuuggugagaggugguggggaucagucucagaggcacccagaacuugcuccucucuggacuggaaugcugauccucucucaccaccuccccacgcccaaggacugucagcauca

SEQ ID NO: 4121383 - RNA, 81 nt, Human
ugagcuugugcaaugugcuucgugccaugccacugguaaguugugaagguggaacugaagccuugacaucugccaagucca

SEQ ID NO: 4121384 - RNA, 73 nt, Human
ugagcuuuaccaucauguuaaauauuucaaucuauuuggguagguggaaauggacuauggaaaugugagcuca

SEQ ID NO: 4121385 - RNA, 60 nt, Human
ugaggaaaagagagaauaagggaggauagauuaaucaccuuccagaaaucucuuucuuca

SEQ ID NO: 4121386 - RNA, 89 nt, Human
ugaggaaaguuuaugcucuugaggcuaaagacauaacagauguaauguaaaaguauucaggauguaaacccaauaugaauauuuccuca

SEQ ID NO: 4121387 - RNA, 61 nt, Human
ugaggaauguuauuaaaggagcuguacaaaacuuacccuuggaauuagcugacauuccuca

SEQ ID NO: 4121388 - RNA, 57 nt, Human
ugaggacacagucaagaguggaggaauuaaguuuugcugcugcuugcuguguuccca

SEQ ID NO: 4121389 - RNA, 82 nt, Human
ugaggacacagugggauaucagggcccagucugugcaucucucauuccagggaggccggggcccugaauccacugucccuua

SEQ ID NO: 4121390 - RNA, 66 nt, Human
ugaggagaaucauuuacagaaugauuuauuacagaaucauuugcuguucaugauucagcaaacuca

SEQ ID NO: 4121391 - RNA, 68 nt, Human
ugaggagcagcucugagcucuguggcuuuugugaccauggggucacagcagcuaaaggugucuccuca

SEQ ID NO: 4121392 - RNA, 58 nt, Human
ugaggaggaaggcuucauuagguugugcugauucaauugcuugacauuuuccuuuuca

SEQ ID NO: 4121393 - RNA, 55 nt, Human
ugaggaggauggcagugaggaugaagauaaugaauccaccagcucuuccucuuca

SEQ ID NO: 4121394 - RNA, 65 nt, Human
ugaggaguuuagauauagggaauagcacagaaagagcagaaaauuccuuauauuugaauacuuua

SEQ ID NO: 4121395 - RNA, 57 nt, Human
ugaggauggggagauggugucucucaauagaugaaugaagccaacugcccauuuuua

SEQ ID NO: 4121396 - RNA, 55 nt, Human
ugaggaugugauuaugcacauugaucaguaaguggucaauguaaucauaucauca

SEQ ID NO: 4121397 - RNA, 55 nt, Human
ugaggauuuucuagugcuccguugguaucugaugggccacuauagaaaucucuca

SEQ ID NO: 4121398 - RNA, 72 nt, Human
ugaggcaaauuacuuuaaccucuuuaagcucuagcuucuugauuuguaaaagaaggauuaauaauugccuca

SEQ ID NO: 4121399 - RNA, 102 nt, Human
ugaggcaagagaaucaccugaacccaggagguggagguuguggugagcccagacagcaccacugcacuccagccugggugacagagcgagacucuugucuca

SEQ ID NO: 4121400 - RNA, 101 nt, Human
ugaggcaagaggaucauuugagccucugaguccgaaguugcagugagccaugauugugccauugcacucuggcuugggcuacagagugaagcccugucuca

SEQ ID NO: 4121401 - RNA, 102 nt, Human
ugaggcacgagaauugcuugaaccuggaaggcagagguugcagugagcugagaucgugccacugcacuucagccugggcgacaagagcaaaauuccaucuca

SEQ ID NO: 4121402 - RNA, 101 nt, Human
ugaggcagaagaaucacuugaacccaggagguggagauugcagugagccaagaucaugccacugcacuccagccugggcaacagagugagacucugucuca

SEQ ID NO: 4121403 - RNA, 77 nt, Human
ugaggcagaggaguagacaaggaugcguugcagggcucagggcccugagagguuggccuguccagccucuugccuua

SEQ ID NO: 4121404 - RNA, 74 nt, Human
ugaggcagcaaugaaaauuuaaguugcagcuauuaguugauugcuguaacuuuuucauuuucaaaccauguaca

SEQ ID NO: 4121405 - RNA, 59 nt, Human
ugaggcagcaauuguauuguaugaccagaaucaaggucauacaaaacgauuguguuuca

SEQ ID NO: 4121406 - RNA, 101 nt, Human
ugaggcaggaaaaucgcuugaacccaggagauggagguuguggugagccaagaucacgccacugcacucuagccugggcaacagagcgagacuccaucuca

SEQ ID NO: 4121407 - RNA, 102 nt, Human
ugaggcaggagaaucacuugaacccgggaggcggagguuguggugagccgagaucacaccacugcacuccagccugggcaacaauagugaaacuccgucuca

SEQ ID NO: 4121408 - RNA, 98 nt, Human
ugaggcaggagaaucacuugaaccgggaggcggagguugcagugagcugagaucaugccacugcacuccagccuaggagagagugagacuccaucuca

SEQ ID NO: 4121409 - RNA, 101 nt, Human
ugaggcaggagaaucauuugaacccaggaggcagaaguugcagugagccaagaucacgccauugcacuccagccugggugacagaaugagacucugucuca

SEQ ID NO: 4121410 - RNA, 101 nt, Human
ugaggcaggagaaucgcuucaacccgcgagguggagguugcagugagccgagauugcccuauugcacuccagcccugcaacaggagugaaacuccaccuca

SEQ ID NO: 4121411 - RNA, 101 nt, Human
ugaggcaggagaaucgcuugaaccaaggaggcagagguugcagugagcugagaucaugccacugcacuucagccugggugacugagugagacucugucuca

SEQ ID NO: 4121412 - RNA, 101 nt, Human
ugaggcaggagaaucgcuugaacccaggaggcagagguugcagugagccgacaucaugccacugcacuccauccugggcaacagagugagacuccaucuca

SEQ ID NO: 4121413 - RNA, 102 nt, Human
ugaggcaggagaaucgcuugaacccgggagguggagguuauggugagccgagaucacgccauugcacuccagccugggcaauaagagcgaaacucugucuca

SEQ ID NO: 4121414 - RNA, 101 nt, Human
ugaggcaggagaaucgcuugaaccugggaggcggagguuguagugagcagagauggugccauuguacuccagccugggugacagagugagacuccaucuca

SEQ ID NO: 4121415 - RNA, 101 nt, Human
ugaggcaggagaauggcgugaacccuggaggcggagcuugcagugagccgagauggcgccacugcacuccagccuaggggacagagcgagacuccgucuca

SEQ ID NO: 4121416 - RNA, 101 nt, Human
ugaggcaggagaauugcuugaacccgggaggcggagguugcagugagcggagaucacgccacuguacuccagccugggggacagagcaagacucugucuca

SEQ ID NO: 4121417 - RNA, 101 nt, Human
ugaggcaggagacuugcuugaacccagaaggugcaggcugcagugagcugagauugugcuacugcacuucacccugggugacagagugagacuccaucuca

SEQ ID NO: 4121418 - RNA, 100 nt, Human
ugaggcaggagauucacuugaaccugggaggcggaaguugcagugagccgagaucgcgccauugcacuccagccuggugacagagugauacuccaucuca

SEQ ID NO: 4121419 - RNA, 102 nt, Human
ugaggcaggggaauugcuugaacccgggagguggagauugcggugagccaaaaucaggccaucgcacuccacucuaggcaacaagagcgaaacuccgucuca

SEQ ID NO: 4121420 - RNA, 68 nt, Human
ugaggcagucauauuuugguaaagaauuuguagacuuugcagaggucucuucaaaauaaucuggcuca

SEQ ID NO: 4121421 - RNA, 102 nt, Human
ugaggcaugagaaucgcuugaacuggggaggcggagguugcagugaguugagaucgugccauugcacuccagccugggcaacaagagcgaaacucagucuca

SEQ ID NO: 4121422 - RNA, 57 nt, Human
ugaggccagggauuccaucauuaguguccugaaacgccuaugacagugccuggccca

SEQ ID NO: 4121423 - RNA, 63 nt, Human
ugaggccauggucuucccagucaucucauugggcaugcccggguuggggauggccaggcuuca

SEQ ID NO: 4121424 - RNA, 65 nt, Human
ugaggcccugcucugaauaaccauccaaucugcagguguuuauugcagccgcagggcgcugcuca

SEQ ID NO: 4121425 - RNA, 56 nt, Human
ugaggccucauaaugagauuuccuuagaaaacucaauuagacauuguuaggccuua

SEQ ID NO: 4121426 - RNA, 104 nt, Human
ugaggcggagucucgcucuguuguugccuaggcuggaguguagugguaccaucucggcucacugcaaccuccgccucccgggcucaagcaauucuccugccuca

SEQ ID NO: 4121427 - RNA, 104 nt, Human
ugaggcggggggaucgcuugagcccaggagguugagggugcagugagcuaugaucgcgucacugcacuccagcacucagggcgacagagcgagacccugucuca

SEQ ID NO: 4121428 - RNA, 100 nt, Human
ugaggcuacagaaggagaacaaaguuuucagcauuuuauagccugugagugaccagucuauuuaauuccagucuguacuuugcucuguucuccugccuca

SEQ ID NO: 4121429 - RNA, 55 nt, Human
ugaggcucagagaagucaugguauggcccucagugcuuucauuuuuugugucuca

SEQ ID NO: 4121430 - RNA, 70 nt, Human
ugaggcuggaggaucacuugagcccaggaguuugaggccaguaugggcuauauagugguaccccaucuca

SEQ ID NO: 4121431 - RNA, 56 nt, Human
ugaggcuggucccugugcuucggcuuccccauacagcagugcagggagcacccuca

SEQ ID NO: 4121432 - RNA, 68 nt, Human
ugaggcuguggugaugauugggucaauggguaaaauccccuuccugugacaaacauuucauagcuuua

SEQ ID NO: 4121433 - RNA, 70 nt, Human
ugaggcuguguguguccagguccuauuaauucauguuaaaaaauuaaggagggcugggcaugauggcuca

SEQ ID NO: 4121434 - RNA, 72 nt, Human
ugaggcuuuauucuggauccagagcugcuaucuggggcccagagcagcaggugcuucuggaucuugcacuca

SEQ ID NO: 4121435 - RNA, 60 nt, Human
ugaggcuuuuggcauuccuuagacucacuuaucaaaggugggccagggccagaagcauca

SEQ ID NO: 4121436 - RNA, 69 nt, Human
ugagggaaggcuuccuggaggaagagguacaggcacugucucauuauuaauucaacagggucuccuuca

SEQ ID NO: 4121437 - RNA, 59 nt, Human
ugagggaauggugugcaagagguuacuugaauccaaauuaauugacucaccauuuccca

SEQ ID NO: 4121438 - RNA, 68 nt, Human
ugagggacaccagggcuggagcucagugcugggcagagcagggcgugcucccuaggccuugguccuca

SEQ ID NO: 4121439 - RNA, 72 nt, Human
ugagggaggucagggugccugcugguggcaagaugauguuauccaguguuacggcuugaacuaugucccuca

SEQ ID NO: 4121440 - RNA, 74 nt, Human
ugagggaguccucuugcaagagcugauucagauauaugauuuucuguggcaagaaucugcagaggaauucuuca

SEQ ID NO: 4121441 - RNA, 57 nt, Human
ugagggcugucauuugacaucuuagcgcagauuaauuugucagauaacuagcuguua

SEQ ID NO: 4121442 - RNA, 56 nt, Human
ugagggcugugagggcccagguauggugggcaccuucccugggucugcagcauuca

SEQ ID NO: 4121443 - RNA, 73 nt, Human
ugaggggcagugggggggccaugcugcagguacaaguuaaucucccuguaucgccucugcccacuuacccuua

SEQ ID NO: 4121444 - RNA, 70 nt, Human
ugagggggcuucggggccgucucugccccuggcuucggcaaggccuggccugggcggcauugaccccuua

SEQ ID NO: 4121445 - RNA, 77 nt, Human
ugaggguagaaucacagauuuaggacuguagcgaucccauuugggguucuggggcucuggauuuuaggacuccuuca

SEQ ID NO: 4121446 - RNA, 79 nt, Human
ugagggucaucucaggugugcuugauucuguugcuccuucagcuauuaaggcacuugagcaugaugccauauuuccuca

SEQ ID NO: 4121447 - RNA, 65 nt, Human
ugagggucucacgagggcccugggcagcugccguaggcauugcuuacaggguuucguuucucuca

SEQ ID NO: 4121448 - RNA, 63 nt, Human
ugaggguucaagacucuugaguaucucaacccacauguccccauucugagucuuggggucuca

SEQ ID NO: 4121449 - RNA, 76 nt, Human
ugagguaacagcauuuaccucaaugcaucuguuagcaaauagcacugacgagcguugaugugaagguuuauuccca

SEQ ID NO: 4121450 - RNA, 90 nt, Human
ugaggucaauucuguagguagaaaaugagcauauugauccuuuguuaguaccuuaugauaagaggguccucucaacuaucacaaaucuca

SEQ ID NO: 4121451 - RNA, 77 nt, Human
ugaggucacaagauauuucaguccuuugaaaaaggugugaaccccagcuaaaggggaggaaguguuuugagagcuca

SEQ ID NO: 4121452 - RNA, 91 nt, Human
ugaggucaguauuagcagacuguauucaaaaugugguuauugaaaagcuaacuucucauuaaugauacaguuuggaagcccuguaaccuua

SEQ ID NO: 4121453 - RNA, 86 nt, Human
ugaggucccacugucaccggcucacugacgaggaagcugagauucagcaagguccagcacucgcccagggcuuguacagggccuca

SEQ ID NO: 4121454 - RNA, 55 nt, Human
ugagguccuccacucagcccuagggcacuccagcgcugagagguugggaaguuca

SEQ ID NO: 4121455 - RNA, 89 nt, Human
ugaggucuccuaaauuaaugaguuaaacaggacaggauauagcaucagaagagaguuccugcuguuuaccuacaaugguugcauccuca

SEQ ID NO: 4121456 - RNA, 62 nt, Human
ugaggugacaauucauucuccaggagagcucguuacuucccaagaggcaaauucucacuuca

SEQ ID NO: 4121457 - RNA, 102 nt, Human
ugaggugagagaaucaccugagcccugaagguugaggcugcagugagcugugaucaugccacugcacuccagccuuggcaacagagugagacucuuaucuca

SEQ ID NO: 4121458 - RNA, 103 nt, Human
ugagguggagucucacucuaucacccaggcuggagugcaguggcacaaucucagcuaacugcagccuccuccaccucuggguucaagugauccucccaccuca

SEQ ID NO: 4121459 - RNA, 101 nt, Human
ugaggugggaggaucacuucacccugggagguggagguugcaaugagccaagauugugccauugcacuuccggcugggugacagagcaagauuccaucuca

SEQ ID NO: 4121460 - RNA, 73 nt, Human
ugagguucaguucuuggccacaauccuggagaggcaauaguaugcaacgagaagugugccagaaucugcuuca

SEQ ID NO: 4121461 - RNA, 75 nt, Human
ugaguacaguaaaggcuuugagaaguccugcagcgaagaaacuuguuuaauguagcauuuucucaagcuuauuca

SEQ ID NO: 4121462 - RNA, 56 nt, Human
ugaguagucagugggcaggaaggggaguuuuuaccuuccucugcaacugaugcuca

SEQ ID NO: 4121463 - RNA, 103 nt, Human
ugaguagugcauauacgggcaaaacugcaccuuuuagaagucauuuuuaagacacaguguccuagaaugcaucuaaaagcagagauagcuuguguaggacuua

SEQ ID NO: 4121464 - RNA, 66 nt, Human
ugaguauaaccaugugccagguguuguguuuaacacugauaauacaaagcuaaauaugguuucuca

SEQ ID NO: 4121465 - RNA, 57 nt, Human
ugaguauauuuucccugggugguaguugauuuccacucagcuuugggagaugacuca

SEQ ID NO: 4121466 - RNA, 129 nt, Human
ugaguaugauaaaaaaugaaacuugauuuagugcuuugaauguaaauaaaaggugacauauuaacugauuuuaucaucuuuauguuugaaaguacaaucucaggagauuugaauuuaauaucacuacca

SEQ ID NO: 4121467 - RNA, 77 nt, Human
ugagucacauuugggguaaguuugucaagcugcuccuaucucuuucugcagcacauuuacucagcccucaugacuca

SEQ ID NO: 4121468 - RNA, 74 nt, Human
ugagucaugcgccaggcacaggcgugggucugaccugucccuuggcaccaggcuugguguguggucagggcuca

SEQ ID NO: 4121469 - RNA, 73 nt, Human
ugagucauuuuguaaagguauacuuagcugaauugagaugccucauucaguggauaucuucacuuuugaguca

SEQ ID NO: 4121470 - RNA, 66 nt, Human
ugaguccaaaguuccacguggguuagaggaggauuuaaaaacauugugaggacauuggaggacuca

SEQ ID NO: 4121471 - RNA, 128 nt, Human
ugagucuccacccaagagcggacagagccagcaugaggcagggccugcaagagaccugggucuggucuguagugacuccacagguacggauugaggaccuacuaagugcugggcauaggcuggagaua

SEQ ID NO: 4121472 - RNA, 61 nt, Human
ugagucugucagucugacuuucuugugaaugagaauggucagguagcucugacaggccuca

SEQ ID NO: 4121473 - RNA, 59 nt, Human
ugagugaauguguaucccuugugaucaguuauuugcauuugcaguuacaccuucauuca

SEQ ID NO: 4121474 - RNA, 57 nt, Human
ugagugaggugcuuagggcacagaauuuaauguugucucggauuguaccuuaccuca

SEQ ID NO: 4121475 - RNA, 96 nt, Human
ugagugauuaacauguuggcuugauucucagccagucucuguccucaugguggcaagauggcugcagcaauuccaaccaauacucuuccaagcuua

SEQ ID NO: 4121476 - RNA, 62 nt, Human
ugagugcaugcucucccacuaaaagagcgaacaguguucaugugugaguagcaugugucuca

SEQ ID NO: 4121477 - RNA, 58 nt, Human
ugaguggagaucgugccacugcacuccagccugggugacagagcaagacuccgucuca

SEQ ID NO: 4121478 - RNA, 71 nt, Human
ugaguggcaaugguugauuaaaauuuagccuuaggaacagaauuaaauuaaggguacagccaaccuacuca

SEQ ID NO: 4121479 - RNA, 72 nt, Human
ugaguggcccuuguucaaauaugucacauacauguauguggccuauguaccaggguuuaauaagccuacuca

SEQ ID NO: 4121480 - RNA, 66 nt, Human
ugagugggccaguggccugucagaagccguggggagcccucuccagacauacugccaccccacaca

SEQ ID NO: 4121481 - RNA, 67 nt, Human
ugagugguguggccucuuagguuuuagcaacauuacuacugccuucaaacagcgccaccccugcuca

SEQ ID NO: 4121482 - RNA, 80 nt, Human
ugaguguacuggagcuggugugugcccaagcacagacuaauuaaugucugugugcugcccaacucgcagauucacacuca

SEQ ID NO: 4121483 - RNA, 58 nt, Human
ugagugucaacucggaauaaggauugugauugacaauucccaucccagucuguacuua

SEQ ID NO: 4121484 - RNA, 57 nt, Human
ugaguguccuuuuaugugacugguuuuguaaagccuuacacugugaauggaccguca

SEQ ID NO: 4121485 - RNA, 91 nt, Human
ugcaaagcuuaaaaguauuucuaguugguucuacuauugaaaauuucucuucucauaggagugggcauagcagggaauacaagcuauugca

SEQ ID NO: 4121486 - RNA, 67 nt, Human
ugcaaaucauucagccuaagcaaguacagaaaaugcaagcugugugcaaggggugaagauaggggca

SEQ ID NO: 4121487 - RNA, 58 nt, Human
ugcaaaugggugaggguuaggauuauuuauucaaugauuucauuuuuuccuauuugua

SEQ ID NO: 4121488 - RNA, 68 nt, Human
ugcaaauguaucucaguacaucccauuggaacauacagacuauuuggauaucacugaauacaugagca

SEQ ID NO: 4121489 - RNA, 89 nt, Human
ugcaaauugccagcucccauucuucaccuguucccauacccaccucccaaucauggucaccagagguaaaaggaggagagcccaagaca

SEQ ID NO: 4121490 - RNA, 108 nt, Human
ugcaacauacagauuuuauuggauugagcuguucaccaaguagcacuauugauuaaauucuaagauaaaugcuuugaugaaaucuugaaaucaauaaaucuauuugca

SEQ ID NO: 4121491 - RNA, 69 nt, Human
ugcaacaucaugcauggcucauuugguaaauauugcuucacugaguuaugccuguucuauauguugaca

SEQ ID NO: 4121492 - RNA, 129 nt, Human
ugcaaccaggaaagcugauuuuuaaaauucgauauuaacuacauuuuacagaagaugaaaccagagcucaaggucauguuuuaguaaagugaagguuguggaauucagaaccagauuuaucugacucca

SEQ ID NO: 4121493 - RNA, 60 nt, Human
ugcaagaucaagguguuggcagaauugauuucauucugcagcaguguuccuuggcuugca

SEQ ID NO: 4121494 - RNA, 66 nt, Human
ugcaagcaguuauauucaaaaugaggcugugcaauuaugcacaucagaugaaaauggcagucugca

SEQ ID NO: 4121495 - RNA, 67 nt, Human
ugcaagccaccuggucuguuacaacuauuuaccuuuguccccucuaagcagccauggaugguaugua

SEQ ID NO: 4121496 - RNA, 56 nt, Human
ugcaaggcacccacucugcuuuuuuugugaugagauggagcaugacuggccuugca

SEQ ID NO: 4121497 - RNA, 59 nt, Human
ugcaaggcugccucugaggacccuggcaaggugagagggaccacagggaaggucuugca

SEQ ID NO: 4121498 - RNA, 55 nt, Human
ugcaaggguagaagugauggcauuaagaaaagagugccagcuuugaauacuugua

SEQ ID NO: 4121499 - RNA, 90 nt, Human
ugcaagguuauuacauuauuauuuauuaugugaaaaauuagaaagaacuugauugcccaauaauaaaaugguaaaaguaaugauggugua

SEQ ID NO: 4121500 - RNA, 61 nt, Human
ugcaagucuggaguaauguuugugauuauguuuaaugcaaauucacaugauugcuucugca

SEQ ID NO: 4121501 - RNA, 60 nt, Human
ugcaagugucaaugcucuguuaaaaauucauuuugcauuuuuaacacaguccugauagca

SEQ ID NO: 4121502 - RNA, 109 nt, Human
ugcaaguuaacaucuugguuuuguguuauugcaagaugaugacagcauguguaugcuacauuacaacaaucugccauggcauuaauagcuuuggugugugauaaaugca

SEQ ID NO: 4121503 - RNA, 64 nt, Human
ugcaaugccaguauaguuaaggucuuaaugucauccacauuaaacaaggguuacugagcaugca

SEQ ID NO: 4121504 - RNA, 74 nt, Human
ugcaauuaguuuuuacacuguuaaugacagguucccauaaaaugccuugcauugaaauauggaaacugauggca

SEQ ID NO: 4121505 - RNA, 63 nt, Human
ugcaauuccucuggagccuauguugucaacagcucacuggccugaagaggacgaacuguugca

SEQ ID NO: 4121506 - RNA, 110 nt, Human
ugcaauuucugaauuugcauucuaugaaagccuauuugcucuaucuucaccuuauuugaaugaaugagugcuagguuugucuagaaacuguaacgauuuuaagaaaugua

SEQ ID NO: 4121507 - RNA, 62 nt, Human
ugcaauuuuaauacauuagaggcuaacagaguuaucuugagcucauaauguuugacuuugca

SEQ ID NO: 4121508 - RNA, 94 nt, Human
ugcacaacuucaggggacaucauccauauuguaauagauugugauggacauauucugagaggcacaauguggaugguaccccuggaguucugca

SEQ ID NO: 4121509 - RNA, 128 nt, Human
ugcacaauuuauacucggauuuuugagacaguuugggaauaguuuauccuguuauuaucuucaggagucuauaguccuccuacaggaaauuguaucaaaauuaaagaagacugaguuaauuuauugua

SEQ ID NO: 4121510 - RNA, 77 nt, Human
ugcacacaccacacccgcaugcacacacuuucucacuauuugauauggcaacaaggaguugcagcugagugugagca

SEQ ID NO: 4121511 - RNA, 59 nt, Human
ugcacacacgcggcacaucuguggagccauuauugcugcuggauagcuguguuugugua

SEQ ID NO: 4121512 - RNA, 107 nt, Human
ugcacacauauauguggguguuuuugugugugugcguguacaugggccuggccugugaugggggugcaugcugcacacaugcguaggcauucaugugugugugugca

SEQ ID NO: 4121513 - RNA, 67 nt, Human
ugcacacugugcucuguaaggguggugguaguggugguggcuuuauccgcuugacccuuacugugca

SEQ ID NO: 4121514 - RNA, 57 nt, Human
ugcacagaugcuaggaggugaaacgcaguuagaaaugugcaguuuuuauaucuggca

SEQ ID NO: 4121515 - RNA, 90 nt, Human
ugcacagaugcuuggcagagcccacguugggggagugaagacuucagguuugagcucuuugggaugggcucugcuggagaaucuccagua

SEQ ID NO: 4121516 - RNA, 72 nt, Human
ugcacagaugugacuucagucuucuuacauauuaauaagguggagggggcuggauuuuacuccuuguuagca

SEQ ID NO: 4121517 - RNA, 64 nt, Human
ugcacagcuggcucuccuuuucugagaauguuuuaucuuaagaggggauaaguggguaugugca

SEQ ID NO: 4121518 - RNA, 77 nt, Human
ugcacagguuagaacaguagaagaaagggugaggccuugcuauaagccaucuuucuucacuguccuucccuaaggca

SEQ ID NO: 4121519 - RNA, 55 nt, Human
ugcacauacaagauucggggucaagugggacaaaaaccucaucuuggugugugca

SEQ ID NO: 4121520 - RNA, 64 nt, Human
ugcacaucuguccugucugcuuuuaauuuggaagcaccaguuuuaauuuagcggcaggacugua

SEQ ID NO: 4121521 - RNA, 57 nt, Human
ugcaccaagucuggcacugaauggcuauuuucccagccucaugccaggccuugggua

SEQ ID NO: 4121522 - RNA, 68 nt, Human
ugcaccauuuccaacuaccccuccauuugggagcacuaauccaagcuggagagcuugaaagugaugca

SEQ ID NO: 4121523 - RNA, 66 nt, Human
ugcaccauuuugucaggcuacuggaacccauuuuucuccaacucaagcagaggcagaauguaugca

SEQ ID NO: 4121524 - RNA, 78 nt, Human
ugcacggggaauaugguugaucuggccaagacguggaaaugugcuuguucaucugcauaccaagugauuccuugugca

SEQ ID NO: 4121525 - RNA, 87 nt, Human
ugcacggguguguguacugcaugggugcaugcugcuugggugugugugggcagcauugccuuugcagugagugcagaccucugugua

SEQ ID NO: 4121526 - RNA, 55 nt, Human
ugcacuagccacauuucaaaugcucaacagccacaugggagugguggcuacugua

SEQ ID NO: 4121527 - RNA, 64 nt, Human
ugcacuauauaguaugguauauauacuauauacaugcuauguauacacuaugcuauauggugua

SEQ ID NO: 4121528 - RNA, 105 nt, Human
ugcacucacacaggguuuaugcugaacuuguuaggggccuccaggacucaggagaccuggacucaaguccaaguucacgucuaacuguugacucugggugaguca

SEQ ID NO: 4121529 - RNA, 99 nt, Human
ugcacucauccauccacuuagucacacacucaacuuuucaucuugggugauggagguugggaugcuugugauuuuggugaggauagagauugagaugca

SEQ ID NO: 4121530 - RNA, 88 nt, Human
ugcacugcagccagcagcauguggaaucucuccaugguuccucccccgguauaccaaggaagagauucucaguuaguuuuccagugca

SEQ ID NO: 4121531 - RNA, 57 nt, Human
ugcacugcaguuccccagugcgcaaucauuccauguguguugacggacugcagggca

SEQ ID NO: 4121532 - RNA, 82 nt, Human
ugcacuggcuuucccuuaaauaguucuccagugauucuuuccagcuggagccacuuuuuauccuuuggugggaagucuugca

SEQ ID NO: 4121533 - RNA, 72 nt, Human
ugcacuguaaaagaaggucuuugcaaacgugguagcuuucaucugcugaguguacuuucuucuuauacugua

SEQ ID NO: 4121534 - RNA, 59 nt, Human
ugcacuguaugguaucuggacauaagcauugucaaaaguagacauagagccagcaggca

SEQ ID NO: 4121535 - RNA, 70 nt, Human
ugcacuuacuuuuaaggggccuugauuuaggagucugguauuaccuaaaugcucuuuaaaagugcuugca

SEQ ID NO: 4121536 - RNA, 126 nt, Human
ugcacuucuguucaggcaucucuagggcuggcuggaccaccccucccugcuccucaacuggcaggaucugcaaggugcuggcgaggguggcggggccagccaucuccagggacaggacgcagugca

SEQ ID NO: 4121537 - RNA, 69 nt, Human
ugcacuuugcaggcauggaaaccuuguuccacacauugccuggugcccuguccagcgcugcaaggugca

SEQ ID NO: 4121538 - RNA, 57 nt, Human
ugcacuuuuauaucacucuggcuauagcauauaugauggcuggcggugagaaaugca

SEQ ID NO: 4121539 - RNA, 55 nt, Human
ugcagaacaaugagagcugagagccacugcuuuaaaacagacacucugcucugca

SEQ ID NO: 4121540 - RNA, 64 nt, Human
ugcagaagacacaagguaacgucuacuuauccccgugcuucgaaaccguguguuucccuuugca

SEQ ID NO: 4121541 - RNA, 62 nt, Human
ugcagaagcacaggugacgggccuaggguugcucaccauggccugagccagugucuucugca

SEQ ID NO: 4121542 - RNA, 62 nt, Human
ugcagaagucagaccaucugaauuacuguuuccacagcaacuacaauucagucggcucugca

SEQ ID NO: 4121543 - RNA, 60 nt, Human
ugcagacaagugcaucuaacccaaaucauauccagggccccagcuguacaauuguuugua

SEQ ID NO: 4121544 - RNA, 65 nt, Human
ugcagaccggaaaauugagauuuacagagguuaagucuuuagucuuaaguaauucauggaaugca

SEQ ID NO: 4121545 - RNA, 63 nt, Human
ugcagagagauccucaggguuuuacaaccaaaaagaaacaguagauuugauggccucucugca

SEQ ID NO: 4121546 - RNA, 63 nt, Human
uguggcucccgcuugcaccuaagaucaccuucuccauugucuaccaggcuagcgugagccaca

SEQ ID NO: 4121547 - RNA, 66 nt, Human
uguggcuccugggcugucggcgcucugccaggcaugacggggugcaccaugcgcucggggcccgca

SEQ ID NO: 4121548 - RNA, 113 nt, Human
uguggcuuuccucuuucuuucucuucauugaauguucuugcaaaucauuaccaaauugaaaagauuuacaagucauuggaugaggaauugaucuagaagauauucaagguaca

SEQ ID NO: 4121549 - RNA, 76 nt, Human
uguggcuuugcaggcuuuagccccauggcugcucucaugggcugggcugguguugagugccuguagcuuuuccaua

SEQ ID NO: 4121550 - RNA, 65 nt, Human
ugugggagccacagugaggugcaugguugcgggguacagcuggcuucucugugguggcuccccca

SEQ ID NO: 4121551 - RNA, 87 nt, Human
ugugggagccuguccugugcauugucagauggcuagcagcaacccuagccucugcucuauaaaugccaguagcaccuccucccaaca

SEQ ID NO: 4121552 - RNA, 65 nt, Human
ugugggcuacacacagcaguaaugggguuauuuccuuccacaaacuggcugaguuuauguucaca

SEQ ID NO: 4121553 - RNA, 55 nt, Human
uguggggccaaagcccagccacaacaggaaggaguggccagcuggagucuccaca

SEQ ID NO: 4121554 - RNA, 129 nt, Human
ugugggugucagucaggcuguaaauggugugggugucagucaggcuguaaauggugugggugucagucagucaggcuguaaauggugugggugucagucaggcuauaaauggugugggugucagucagg

SEQ ID NO: 4121555 - RNA, 84 nt, Human
uguggguugguuaacacucccaggcuuguggauuggagcgaguuuguguuuaauuggcugucuuuccaaagcaaguggcccaca

SEQ ID NO: 4121556 - RNA, 65 nt, Human
ugugguaguuaaagaaaaucgaacuaaaauuauguccuguucaagauuuuaaagagacugccaca

SEQ ID NO: 4121557 - RNA, 68 nt, Human
uguggucaaggcaaucucauggcuucuuguuugggugauugagaagauaaauugagauugggaccaca

SEQ ID NO: 4121558 - RNA, 70 nt, Human
uguggucaucaacugagaaugguccgucucaucuuugaguaugcaauuaccuuuauagcugauuaugaca

SEQ ID NO: 4121559 - RNA, 55 nt, Human
uguggucauugcuugaaagaucaagaaugaaagucccuugaaggccaugaccacg

SEQ ID NO: 4121560 - RNA, 55 nt, Human
ugugguccagguuugcaauguuaaguggaaaagaacgacuaaaucugugaucaca

SEQ ID NO: 4121561 - RNA, 55 nt, Human
uguggugacgaccaggguggacuaggggccugucucccauucugucucugccaca

SEQ ID NO: 4121562 - RNA, 69 nt, Human
uguggugcaaaauuuggccaauaacaguuaaaaaaggaaaauuugauuguuaaacagauauugcccaca

SEQ ID NO: 4121563 - RNA, 64 nt, Human
uguggugucaaugcucccaccuuggcagauuguaagcugccaauaugagaucacugacaacaca

SEQ ID NO: 4121564 - RNA, 84 nt, Human
ugugguuaagaucauaugcuuugggauuagaucauccugggcuugaggauuaaaugagacaacguauauaaaugauuuagcacg

SEQ ID NO: 4121565 - RNA, 64 nt, Human
uguguaaagcuuguuccagaaacagugagaaaaccauuuggauuggagcuuaagguuugacaua

SEQ ID NO: 4121566 - RNA, 86 nt, Human
uguguaaaggagugauugaagauauagcaauaaucauuuccaaagaaauguuaguaacuugaguauuugcagucauuuuagaaaca

SEQ ID NO: 4121567 - RNA, 92 nt, Human
uguguaaggaaagaacuguuaacuuuuuacagaaaugaagccucgucugcaugguuuuuaugccuuggaaagauugauuuuuuauuacuaca

SEQ ID NO: 4121568 - RNA, 60 nt, Human
uguguaaugcugacuuuuccuuaagauaguagguuauuucacagcugucaguguuacaca

SEQ ID NO: 4121569 - RNA, 61 nt, Human
uguguacagcauuagaaacuauugcugcaagguuuaccugugcugcauucuaacgcacaca

SEQ ID NO: 4121570 - RNA, 65 nt, Human
uguguacauauaugcccucuggguggcuguuuacuaugcggcauacaagagaaauauaagauaca

SEQ ID NO: 4121571 - RNA, 58 nt, Human
uguguacuucccccugaccuguuugaagcaggccuccacaagguuugguggaaacaua

SEQ ID NO: 4121572 - RNA, 92 nt, Human
uguguacuuuauuuaucuugaaacuuuuugggaacagcuguauaacaggaaguaguauuucugaggcccaggaagugaguaagggcuacaca

SEQ ID NO: 4121573 - RNA, 94 nt, Human
uguguagaagugauauaggaaacuaacuuaucuuuauauguuguuauguacaguuguuugauuugguugguuuuuuaaauuucuaauuuacaca

SEQ ID NO: 4121574 - RNA, 80 nt, Human
uguguagcagguuucuaguucuaagaauauuauuaaaguagcuauuuagucauagaacaaggcagaaaucugguuaagca

SEQ ID NO: 4121575 - RNA, 95 nt, Human
uguguagggacucuggagccauguauagccuaugaauccuuucaaguuuauucgaacuuauaguguuuuauauuggcucuaauaguuuaaacgca

SEQ ID NO: 4121576 - RNA, 64 nt, Human
uguguauacaugucugugugcacaugugugggugugcauguguaugugcaugcaugugugaaca

SEQ ID NO: 4121577 - RNA, 66 nt, Human
uguguauguguguguguguguguauauauauauauauauaugcacgcauacacacauaaauacaca

SEQ ID NO: 4121578 - RNA, 72 nt, Human
uguguauuuccuaaaaacaaggacacucucugacauaaacaccauagaauccuucaaguuaggaagugaaca

SEQ ID NO: 4121579 - RNA, 76 nt, Human
ugugucaaagaggcagguguuacuggaaacugcacuaaauuaaaaguuuuccuucaaacagcuuuuuuuugacuca

SEQ ID NO: 4121580 - RNA, 66 nt, Human
ugugucagcacaguaucaauuacccagaccauaucugaaggccuaauauaugcaugugcuggcaua

SEQ ID NO: 4121581 - RNA, 66 nt, Human
ugugucccaggccucuggaauuagaaucugcauuguaacaagaucuucaagagaccuguggacaca

SEQ ID NO: 4121582 - RNA, 84 nt, Human
uguguccugugcauaugguuacagcaccgcuuccugugaaggaguugagcuagggguugugcugaaugcagagaacaagauaca

SEQ ID NO: 4121583 - RNA, 67 nt, Human
uguguccuuucccccuacuuaaaaauaaugauagguucuucuggaaccugcuuaaguaagugacaca

SEQ ID NO: 4121584 - RNA, 77 nt, Human
ugugucgccaaggagcugcugcucaguucuagccaggacagcagggugagcuggauccaacuccguuugguggcaua

SEQ ID NO: 4121585 - RNA, 59 nt, Human
ugugucuacugaucugauucagacaaagccuggaugucuauuagaaaagauuagauaca

SEQ ID NO: 4121586 - RNA, 55 nt, Human
ugugucuggauagguaauggaucggcgaauuggucaucucuuaccuacagacacg

SEQ ID NO: 4121587 - RNA, 110 nt, Human
ugugucugucuugcaaauuaagcuguguccuucucgaagguagggaugauacccuucauuucucaucaccuagaauuuaaaacauugcugauauauggcaggcagucaca

SEQ ID NO: 4121588 - RNA, 63 nt, Human
ugugucuguguuuguggccggucugccucugugccugggucagaccccagaccagcagacaca

SEQ ID NO: 4121589 - RNA, 57 nt, Human
ugugucuguuuuuguaccaguaccaugcuguuuugguuacuguagcacugcaguaua

SEQ ID NO: 4121590 - RNA, 80 nt, Human
ugugugaaacaguggccaauucuggagaugaaauauaauuucagcugcuauguuccuagguaugccaauuguuucauuca

SEQ ID NO: 4121591 - RNA, 65 nt, Human
ugugugaagugauuuuaagucuagauuuauuuacagguggaggauagacaaaaugacuucaugca

SEQ ID NO: 4121592 - RNA, 130 nt, Human
ugugugaaugugcagaaaaccaggauguugcuacuugauugacaguugacuauguacauauaaaaacacagaguuauggacuuaaugcagguuaagcaagguguauuugauggcauguauacaucauaca

SEQ ID NO: 4121593 - RNA, 83 nt, Human
ugugugaauuccauaaaacaugaaauuuuauuggaaugugaagugaaaauuauggaaaugaaauuuuauuggaaugugaagca

SEQ ID NO: 4121594 - RNA, 57 nt, Human
ugugugacagcggcugcaggugcccagugcccuggcacagggcagugauuguccaca

SEQ ID NO: 4121595 - RNA, 79 nt, Human
ugugugcaaugagaauauauuaaccagggguagaaaaaggaaaaagggucucugguggguauacacucuauugagguca

SEQ ID NO: 4121596 - RNA, 55 nt, Human
ugugugcacuuaaugcaaucaucuucuuccugaucauugcuuuggcugcaucaca

SEQ ID NO: 4121597 - RNA, 63 nt, Human
ugugugccccucccagcacacagccugagcccuagcacagagcuggccgcagagagggcagca

SEQ ID NO: 4121598 - RNA, 73 nt, Human
ugugugccgagaccccaugaauguagcuuuaaugauugaucagggcuccaggggcugggugacucauagcaca

SEQ ID NO: 4121599 - RNA, 73 nt, Human
ugugugcguauguauucuuuguguguugcauguauguuauacaugugaggugugagugauacauguguauaug

SEQ ID NO: 4121600 - RNA, 81 nt, Human
ugugugcgucuaucuccugguacccuuccuagcaucaauucuguauuuguaggaguccaaucaggagacacaaaccacuca

SEQ ID NO: 4121601 - RNA, 70 nt, Human
ugugugcugaacagagucugggcacugggaaugcuguggugaacagauucccugacauccagagcacaca

SEQ ID NO: 4121602 - RNA, 59 nt, Human
ugugugcuuauagucuaguaguaacaggagcaguuuuuacauugacugugugcaucaca

SEQ ID NO: 4121603 - RNA, 62 nt, Human
uguguggggagagaaugggucuuggccuccucagaggagcaaaccuguucuccccacaugca

SEQ ID NO: 4121604 - RNA, 91 nt, Human
uguguggucagggugaggcuggcucuaucuccaaggcugggcacacgguccaggcuuggccaauuggaguuuuccaucuucuuggcugcca

SEQ ID NO: 4121605 - RNA, 63 nt, Human
ugugugguucggguuaaugagggucugagucaucaaguuagaaacucaccuuuccagccauca

SEQ ID NO: 4121606 - RNA, 65 nt, Human
uguguguauauguguauauaggugucuauacauaauugucuuauuuguaugcauacauacacaca

SEQ ID NO: 4121607 - RNA, 66 nt, Human
uguguguaugugcguguguacauauauauguacacacauauauauguacacacacacacacacaca

SEQ ID NO: 4121608 - RNA, 62 nt, Human
uguguguccucauaagauggaggggaaaagggcucccccacgccuccuuuauaaggacacca

SEQ ID NO: 4121609 - RNA, 69 nt, Human
ugugugucuugaccaggaucggauauaaauucuauuauuggaaguuuccaggacccugguagacacaca

SEQ ID NO: 4121610 - RNA, 65 nt, Human
ugugugugcagcuguuacuagagagauugauuugggacuuggucucagugccgauugcauacaca

SEQ ID NO: 4121611 - RNA, 74 nt, Human
ugugugugcucaagggcaggaaccuggcauuaccaaagggauuagccaccucugguuugccuuuagcacggaua

SEQ ID NO: 4121612 - RNA, 91 nt, Human
ugugugugggauucauccucuaugauauguauggguaguggugcauuaucccauaggguuaucauagggacuaagugaguuauuucacaua

SEQ ID NO: 4121613 - RNA, 130 nt, Human
uguguguguauauauauguguguguguauauauauaugucauuuguauauaugugcauauauguguguguguguauauauguuuaagucauuuguauacauguguauauauguguguguauauauacaca

SEQ ID NO: 4121614 - RNA, 60 nt, Human
uguguguguauguauguguguguguguguaugugugcagacacguguguguaaacacaca

SEQ ID NO: 4121615 - RNA, 78 nt, Human
uguguguguauugaagacaagggcagggguuccagaccucccugcauuugagccccaugcccucucuuagcauacaca

SEQ ID NO: 4121616 - RNA, 55 nt, Human
ugcagagggacagccacagcucagagggcagcugaggugcugguucuucccugca

SEQ ID NO: 4121617 - RNA, 63 nt, Human
ugcagagguguugcugagauaaaagagccuaaugguggguauucauuuccagcagucucugua

SEQ ID NO: 4121618 - RNA, 59 nt, Human
ugcagaugaaugcugagacacucugcuggaaguagauuaaaaacuuagacaucucugca

SEQ ID NO: 4121619 - RNA, 69 nt, Human
ugcagcaauuuuuuaggcauuccauauggcuaucagaacuauuagcaaaacaugcaaaaaauuguugua

SEQ ID NO: 4121620 - RNA, 66 nt, Human
ugcagcacauucccaccuguacuucuguuuaucuaauugaaaacauggagggaauuuagugaagca

SEQ ID NO: 4121621 - RNA, 89 nt, Human
ugcagcauguggaaauccagcgugugcaccuuagauggcaacagucuaaagagaguggguacaugucucaggaauccacacuagcugua

SEQ ID NO: 4121622 - RNA, 128 nt, Human
ugcagccccaagaugagccugcaguauuuuccuuacaugaucugguccuacugugggcagcgcugcugcccagagccugagaggauuaugaaaacauggcaacggaagugaggccaggggacacagca

SEQ ID NO: 4121623 - RNA, 130 nt, Human
ugcagccugcuuuccgacuguaucugugcuuaugaaaaacuggaaaaaggcuuuguaauuguccuucuuacacugagccuuacauaaacagccuuauaacuauucacaggagcacucacugcaccaugua

SEQ ID NO: 4121624 - RNA, 75 nt, Human
ugcagcggacagaggccaccccugcagguggugugugcaggacagugcccugagggguggugucuguacucugca

SEQ ID NO: 4121625 - RNA, 130 nt, Human
ugcagcuaaguuuuuugcugugugaagaaaguuauucuguacucuuugagaagaaugaugcgaaaugcugagauucaacaaggaggauggagaaaguuucuaacuucaucuggacuucaucuggccugca

SEQ ID NO: 4121626 - RNA, 61 nt, Human
ugcagcuagcagcaucacaggaagacuucgcaggccugaggacuuugaacacugcucugca

SEQ ID NO: 4121627 - RNA, 58 nt, Human
ugcagcucagaagggaggaaaugaggaguagaaucuccuucccucucuccugggugua

SEQ ID NO: 4121628 - RNA, 92 nt, Human
ugcagcucugcuugacaaccugucucuucuuauggccguggcugagggguugccccucacggaccuaagaggaagauuuuccgggugcugca

SEQ ID NO: 4121629 - RNA, 93 nt, Human
ugcaggaagaggggauaaagaaaaguuugaaaaauauaacaauauguccauaaauauuucguaugcucucuguguccuguuuucuuuccugcg

SEQ ID NO: 4121630 - RNA, 68 nt, Human
ugcaggaccagguuucauucaagaggcaguaagcaauuuuccugcagcuuuggaaaccuguuuccgua

SEQ ID NO: 4121631 - RNA, 55 nt, Human
ugcaggagcgcguggccaacgcucccaccuuucugccuggcuccugccuccugca

SEQ ID NO: 4121632 - RNA, 70 nt, Human
ugcaggagcuauuugucacaacugguguuuucugaagacuuggcauguggcaaguaaguccuuuccugca

SEQ ID NO: 4121633 - RNA, 78 nt, Human
ugcaggauauuaguuuucuuguuaugacaacaaaccaaaauauugucacaaugacaggaaacauuucaguuuucugca

SEQ ID NO: 4121634 - RNA, 55 nt, Human
ugcaggccaaccugugucuggagauaaugcaagccagugcagggguuagcgugua

SEQ ID NO: 4121635 - RNA, 69 nt, Human
ugcaggccggcccuaggccucacuuuccaacaguuucuucuagcccaggccuggugacuggcuucugca

SEQ ID NO: 4121636 - RNA, 68 nt, Human
ugcaggccucuggaggguagacagugggcccucaucaucccugaacccaccccacagaguccauugca

SEQ ID NO: 4121637 - RNA, 62 nt, Human
ugcaggcuaggccuugcccuggaacauggaggcccugcccggggcuggggccuaguccagca

SEQ ID NO: 4121638 - RNA, 60 nt, Human
ugcaggcugaaguugccuauuuuaauauaugacucuucauuuauucauuuucagccagca

SEQ ID NO: 4121639 - RNA, 55 nt, Human
ugcagggaauccagucuagggugaauguuacacagccuucagaucauucugugca

SEQ ID NO: 4121640 - RNA, 84 nt, Human
ugcagggagaggccagcugagcugcugcacagaccugcugggaucaucacagcugugcgcuucaggccagugccucuuccugua

SEQ ID NO: 4121641 - RNA, 62 nt, Human
ugcagggaggaaguugaagaagcucuuggagugccccagcucuguuacugauuuuccugaca

SEQ ID NO: 4121642 - RNA, 58 nt, Human
ugcagggccuugggauguguccuguacacaaauaacugauaccuccugaaaccuugca

SEQ ID NO: 4121643 - RNA, 76 nt, Human
ugcagggcuguucaggaggguggguugugcuugggcuugcaugccucugaccuccaugcccuccuccaucccugca

SEQ ID NO: 4121644 - RNA, 55 nt, Human
ugcagggucccgaagggaagacgaacacuccucauccucugauccuggauccgca

SEQ ID NO: 4121645 - RNA, 83 nt, Human
ugcaggugcaggguagcgacggcaggacucuaagagugagucucuuuccuccccguuuccccguccuacuuucacucuaagca

SEQ ID NO: 4121646 - RNA, 57 nt, Human
ugcaggugcuacaagaacucacagaucagugggccuaguauuuuuguagccauugca

SEQ ID NO: 4121647 - RNA, 74 nt, Human
ugcaggugguccuuccucugcuguguauuaaugcuguaaagaaugcugacugagaggugggaaacacucaugca

SEQ ID NO: 4121648 - RNA, 64 nt, Human
ugcaggugugguuccucagccacuggucuaguagaagccuguggggagggaagucauuucugua

SEQ ID NO: 4121649 - RNA, 58 nt, Human
ugcagguucugaccagccaacuccucuccuuggaggucugguuugugagagcugagca

SEQ ID NO: 4121650 - RNA, 59 nt, Human
ugcaguaacuuuuagacuuggguauaaacacuuguugguguuuguuggaaguuauugua

SEQ ID NO: 4121651 - RNA, 78 nt, Human
ugcaguagagauauauuuuaaugagaaaugacuuaaguuauguuguaacugguagcugauuaaguauaguucccugca

SEQ ID NO: 4121652 - RNA, 74 nt, Human
ugcagucacagugacaggaugugguucucaucuuggccaagaacaacagcuccauauucugccauugcauugca

SEQ ID NO: 4121653 - RNA, 93 nt, Human
ugcagugaauaugccacaguagauagaaaagggauuugucuucuggucugucuuccacagagacuaagcuuuucaucaacgugcuuuacugca

SEQ ID NO: 4121654 - RNA, 81 nt, Human
ugcagugagaaaugaguuaaaucagcucucacugucaacuggaacagccuuggagcugaguuaauucaucacuuacugaca

SEQ ID NO: 4121655 - RNA, 56 nt, Human
ugcaguggaaucuggagagcaguuuguguacugcuuuuggcuggaguucuacugua

SEQ ID NO: 4121656 - RNA, 58 nt, Human
ugcaguggaggccgugagacagacauggguucuguuuguucuuauggacuucccuuca

SEQ ID NO: 4121657 - RNA, 63 nt, Human
ugcagugucuuguggacuugaggcgugcucuaccaggaaagcccacaggccccaagaccugua

SEQ ID NO: 4121658 - RNA, 82 nt, Human
ugcaguguuacugggccuggguguaauguaaauggaauuauuugccgugaaaauacccaguccaaucucuuagcaaauugca

SEQ ID NO: 4121659 - RNA, 59 nt, Human
ugcaguucuaucacccaccccguaaauaguuuucuguugaugguaggugguggaaugua

SEQ ID NO: 4121660 - RNA, 75 nt, Human
ugcaguuguguuaagaucaguucaaacauguguauguugcugaauauauacacaaauuggcauugauaaccugca

SEQ ID NO: 4121661 - RNA, 69 nt, Human
ugcaguuuuaagggcuggccacauucuggguaguuucuggucagaauauacagagcucaggaaacugca

SEQ ID NO: 4121662 - RNA, 61 nt, Human
ugcaguuuuagacagaaguacuaauggguaauuucuauuuaaugcuuucuaaacacaugca

SEQ ID NO: 4121663 - RNA, 76 nt, Human
ugcauaaaaaaugagaacugugauucuauugcuuugcaauauuugcugauucacaguuuccucauauucuugugca

SEQ ID NO: 4121664 - RNA, 84 nt, Human
ugcauagugagagcagagcuuuuuggacucagaccuaaauucaaauccuaggucuuguauuuacuugcucugugacuuaaugca

SEQ ID NO: 4121665 - RNA, 57 nt, Human
ugcaucacuuagcugcacaacuguggcucucucucuucacuggcagauaaugaugca

SEQ ID NO: 4121666 - RNA, 76 nt, Human
ugcaucagaaucagaaucucugggaguggaucaagcaccuacauuguuaccaagcucuugggguucaccugaugca

SEQ ID NO: 4121667 - RNA, 72 nt, Human
ugcaucaguaagucaguagaacuguggucaguuaauaguguauuuuaaaugacagcaggaacugauuaugua

SEQ ID NO: 4121668 - RNA, 56 nt, Human
ugcauccuagggaaggcacugauuucagaguaaccaguauucucugcuaggaugca

SEQ ID NO: 4121669 - RNA, 67 nt, Human
ugcauccugcuagagacaaugcuguuuauaaugucaauuacagccagucaucucagcagggaaagca

SEQ ID NO: 4121670 - RNA, 56 nt, Human
ugcaucucacacuuguauuuccaaagaauaaacaggcucagcaaaggugaggugca

SEQ ID NO: 4121671 - RNA, 55 nt, Human
ugcaucuugagacagggacuguaucuuuucuuuguagucucugcaacauagugca

SEQ ID NO: 4121672 - RNA, 66 nt, Human
ugcaugaccguguuuuuggugacacaacucccgccugcccuguguccuccagcagcaugguaugua

SEQ ID NO: 4121673 - RNA, 124 nt, Human
ugcaugauuuguagauguaaauuugacuuuauuaucauuaacuguugaauuaucaaguguaugaugcagugcaaucaaguuuaacagcaugguggguaagagcaucuagauuagaaucauugca

SEQ ID NO: 4121674 - RNA, 63 nt, Human
ugcaugcuggccucagaaaaauggguuuacuaaacaccugugacccuugaugguugacgugca

SEQ ID NO: 4121675 - RNA, 60 nt, Human
ugcaugguggaggaggcucuugcauucauuucugcccagccucuuuucuccugcccugca

SEQ ID NO: 4121676 - RNA, 58 nt, Human
ugcaugguggguguaguuuccgccaaaaaugaugacgagagacuccauccaccacaca

SEQ ID NO: 4121677 - RNA, 69 nt, Human
ugcauguggaucagaugaauggacauuuuaguauuucccuugcucuucaguuuguauaauccauaugca

SEQ ID NO: 4121678 - RNA, 70 nt, Human
ugcaugugugacaaggacaguuuuccaaacaauaguccuugaagagaaaauuuacuccuuggaaugugca

SEQ ID NO: 4121679 - RNA, 92 nt, Human
ugcauuaauauaacacccccgaaaucucagugguguaauuaacuaaaguauauuuccugcucauugaauucuggggguugagauucugagca

SEQ ID NO: 4121680 - RNA, 68 nt, Human
ugcauucagaaacccauugggucucuugaacaaaggcauuugagagaauccccagguuaucugaagca

SEQ ID NO: 4121681 - RNA, 60 nt, Human
ugcauucauuugacauccuggugcauggggaagcucaggaagccgguuaaauagauugca

SEQ ID NO: 4121682 - RNA, 59 nt, Human
ugcauucucaacccagaguuucugguucaggggaccuggaaugggguugagagcuugca

SEQ ID NO: 4121683 - RNA, 68 nt, Human
ugcauugaucauaauuaucuugucauaugucacuaaaggcagugacaaggugguaaugaagcuuugca

SEQ ID NO: 4121684 - RNA, 64 nt, Human
ugcauugaucauauccuuccugggcuccacuuuaucauccuucugggcuagguggucaguagca

SEQ ID NO: 4121685 - RNA, 55 nt, Human
ugcauuggguugacauacuaaagacugagucucuaggacuuugucaucuaaugca

SEQ ID NO: 4121686 - RNA, 58 nt, Human
ugcauuguguacuuuacaugccaucauuauagguauguaacaauuucauauacaugca

SEQ ID NO: 4121687 - RNA, 80 nt, Human
ugcauuugcauguuauccauggccaaucaaauacaaacagggcuuuauguuuguggaagccggugggaagcagagaugca

SEQ ID NO: 4121688 - RNA, 66 nt, Human
uguucuucuugccagaugugguggccuagaucgcugaaagcccacauuuuuggcuuagaggccuca

SEQ ID NO: 4121689 - RNA, 72 nt, Human
uguucuuuccagcaucccaguucuggcagcaccgagcggcagggaacacaaaugggagagcugggcugggcg

SEQ ID NO: 4121690 - RNA, 65 nt, Human
uguucuuugcauccgaaacaauuucucuuguuugcauaggguucuuguuucagaugcaagaaaca

SEQ ID NO: 4121691 - RNA, 93 nt, Human
uguucuuuuguucaaagcuguaugaguuauucuagguccuuuguauuuuuauauaaauuuuagaaucagcuugucaguugcaacaaaaaugca

SEQ ID NO: 4121692 - RNA, 78 nt, Human
uguugagcagucugcuagaguguuagguauuugugugacucucuguaaucucuuagcagucuagugaccauuuuaaua

SEQ ID NO: 4121693 - RNA, 72 nt, Human
uguugaggcagcugggauacaagggauacuuuggccauuuaucccuucucuuucccucugucucuaaugaca

SEQ ID NO: 4121694 - RNA, 60 nt, Human
uguugaggugucuacaucuucagugcagucuuuaucugccucugagagaugcuucacaca

SEQ ID NO: 4121695 - RNA, 82 nt, Human
uguugagguuaaguuugcugaaugguaaagaaguauaauuuuugaaauuguuuucugucgucaguuaguaaaucaaucaaca

SEQ ID NO: 4121696 - RNA, 129 nt, Human
uguugauaugaacaaaggaaaccaagucucagagaaaaagcuuuguccaaggccaugcaggucuccauuggccaugcaggucuccauuggcagacuccacacuggauuugguucuguguuucuccggca

SEQ ID NO: 4121697 - RNA, 78 nt, Human
uguugaucugcccaggugagccuaagccaaucuugagagcagcugucucaggccaggcugcccugggagcagaccaca

SEQ ID NO: 4121698 - RNA, 104 nt, Human
uguugaugcacuccaguuagaagacuguuuguagaggaagaucaguugagaaaaaaugagaacuucuucaacauaauggacacuuucuguagacuaaaucaaca

SEQ ID NO: 4121699 - RNA, 83 nt, Human
uguugauuauaacacugccuugucaccauuguguucuuucuaagcacagacacagcuugguccccuggcagugauauacagca

SEQ ID NO: 4121700 - RNA, 63 nt, Human
uguugccagagaaacuugagcacuauguaauuaagcuucugcuuuaaaguauuucucgcaaca

SEQ ID NO: 4121701 - RNA, 77 nt, Human
uguugccaggugccacugagagagcgccugggaucauucaucgaauaauccugcccgucucuccgcacuuuuaaaca

SEQ ID NO: 4121702 - RNA, 81 nt, Human
uguugcccagcucuggcaguuugccaggagcucggccguggggcgcggugucuggcgaagcaugccggggaggaggcagca

SEQ ID NO: 4121703 - RNA, 65 nt, Human
uguugcccaggcuggagugcaguggugugaucucgacucacugcaaccuccaccucccggguuca

SEQ ID NO: 4121704 - RNA, 93 nt, Human
uguugccuugaggccuagagcucugcuuuaucuaaauuuaaaaggagauggaaacuuagagaagaguagaggguucuguagucuugggcagca

SEQ ID NO: 4121705 - RNA, 65 nt, Human
uguugcuaaaagauuaauugcagaaggugggucgauuugauuaaggcaauuaauuuuugguuaca

SEQ ID NO: 4121706 - RNA, 61 nt, Human
uguugcuaggcagcaguauaaucagcagccauauagcuaauuacacacugcuucuagaaug

SEQ ID NO: 4121707 - RNA, 62 nt, Human
uguugcuguguggacauucagugcauugcuucuaagggcugcccuguguuccacagcagaca

SEQ ID NO: 4121708 - RNA, 63 nt, Human
uguugcuuugagacucaccguggucuagaaacuccuuuaggugccaagaugucacagacaaca

SEQ ID NO: 4121709 - RNA, 130 nt, Human
uguuggaauguauauuagauuaaauugauagaugguugugugaaaagaacugcaauauucaaacuugacuguaugcauaaaauuauuuacagaacuauaccacauuaauaccaucuuauuucauuucaga

SEQ ID NO: 4121710 - RNA, 66 nt, Human
uguuggauuagaaaauuugcuucuuuggagagcuauuaucuuuagggagaauuuuuuaagaaugca

SEQ ID NO: 4121711 - RNA, 80 nt, Human
uguuggcauagauuucuuuagguuuauccuguuggagcaucuuucagcuucuugaaucugcagguuuauguaucuuaaca

SEQ ID NO: 4121712 - RNA, 65 nt, Human
uguuggccccauucuccccugccacagauagguucuuuccacagaggggaugauggcagcuagca

SEQ ID NO: 4121713 - RNA, 65 nt, Human
uguuggguaaacagugaaaguaagcauguuauaauaauauauguacaagcuguuuuacugcagca

SEQ ID NO: 4121714 - RNA, 90 nt, Human
uguuggguccgggugcucugugggacucugaggaaaagcucgcaccagguagaugcuguucuguccccauggguaaaggacaccccaaca

SEQ ID NO: 4121715 - RNA, 63 nt, Human
uguuggucaaacaaaacccaucccugagggguagcuucaaagauggguuuuguuugauccaca

SEQ ID NO: 4121716 - RNA, 62 nt, Human
uguuggucacuaguacaucccagcaccuugcagagggccuggcagauaguaagugaucaaua

SEQ ID NO: 4121717 - RNA, 77 nt, Human
uguuggugcccaauuuguaggcugcagggagcacauuuuguaucuauuugccaggagacaaagugggcccaccaaua

SEQ ID NO: 4121718 - RNA, 67 nt, Human
uguuguagcccaugaugguggaaggcagucccaucccauugccuccauuuguguguggccacuaaua

SEQ ID NO: 4121719 - RNA, 62 nt, Human
uguuguagcuugacagcagccauagacaauagccaaugaaugggcuuagcugaguugcaaua

SEQ ID NO: 4121720 - RNA, 79 nt, Human
uguuguauagagucuugcuuuugcugaugauuaagccaacaggugucaggagugcuaaagcaaguuggcuuugugccca

SEQ ID NO: 4121721 - RNA, 127 nt, Human
uguugucugaggucaguuucccugggcaacagauucugagcugguguuuuacgugcagaaaaauugcugagaugugccuucaggaucaacaccuauggaagagugaacaaagaaugaucaggcagca

SEQ ID NO: 4121722 - RNA, 55 nt, Human
uguugucuucuccaggugaaaggaaagguauucacuguccuggucuagaggcaca

SEQ ID NO: 4121723 - RNA, 85 nt, Human
uguugugacugacugaggcagggagaguggauauguagucaauauuuucucuuuccuuuccuuuuacuuccaaagucuucacaca

SEQ ID NO: 4121724 - RNA, 98 nt, Human
uguugugucacuugagcuuggccagcucuggaaagugguagauucuuccugaaggccagcgcuuguggagcuggcaggggucaguguuguguguagcg

SEQ ID NO: 4121725 - RNA, 101 nt, Human
uguugugugaaacuguuauguuggccgcuuuaaugcaauuucaccucauuuacaugaauuuugauguugcuuagggauauucaauacaacagcacccaaca

SEQ ID NO: 4121726 - RNA, 58 nt, Human
uguuguuugccaugcuguuggaaauuaaaaacuucaguccaaggauuggcaagcagca

SEQ ID NO: 4121727 - RNA, 81 nt, Human
uguuguuuuuguuguaagaauaugaauacaaauguuaauagagcacagcauuguguuaaaaauguucuuaccaaguuaaca

SEQ ID NO: 4121728 - RNA, 84 nt, Human
uguuuaaaagcagcauaauucuucugcccuauauaaguuacugacaucuucuguaguccaggaauugugucugaaccuuaaaua

SEQ ID NO: 4121729 - RNA, 62 nt, Human
uguuuaaugcauugaccuugggcuauaagagucuguccagugcucaggguccacauuaaaca

SEQ ID NO: 4121730 - RNA, 58 nt, Human
uguuuacacaauagucucucucagcuccgaggggccauuagaguuaauugggugaaua

SEQ ID NO: 4121731 - RNA, 66 nt, Human
uguuuacauauuuggucucagagccaaaaauacgcacagauaggucccaggccaaacuuguaagca

SEQ ID NO: 4121732 - RNA, 76 nt, Human
uguuuaccuuugaacuagcauuucugggccauggugaaaaauuacacaugagcauuuuggucuaguuuaagagaca

SEQ ID NO: 4121733 - RNA, 84 nt, Human
uguuuagcucaugcugaagagagaacuacucagcucuuggaaaaugcugagcuggguauuccugccucuuggcugagcuaaaua

SEQ ID NO: 4121734 - RNA, 77 nt, Human
uguuuagugauuacuacauagaugaccauguuggguaauaauugaauuuaucggugucuguguuguaaaacugaaua

SEQ ID NO: 4121735 - RNA, 67 nt, Human
uguuuaguuuuucuaaguagcgauauuugggggaauuuaaauuggcauuucuuggagaaacugaaua

SEQ ID NO: 4121736 - RNA, 56 nt, Human
uguuuaugcuuuguguucauuuucauauuuagaaaauagaacaccaggcauauaua

SEQ ID NO: 4121737 - RNA, 88 nt, Human
uguuuauugcuuuaucccuaagcuucuaacaccaagaccagaaaaugguagacauggaaaggaggcuuguggaauaaaugaauaaaua

SEQ ID NO: 4121738 - RNA, 69 nt, Human
uguuucacuguguguguaucugccuaucacauaugugugugcacauagguauacacauauacagagaca

SEQ ID NO: 4121739 - RNA, 64 nt, Human
uguuucagauuuguuuuuguuucuguucuaacucuaagcagacagagcucacaagucuuuggca

SEQ ID NO: 4121740 - RNA, 61 nt, Human
uguuucaggaagcucaaguuuauuucugauacuugcagccaaacugaccuugccugagaca

SEQ ID NO: 4121741 - RNA, 73 nt, Human
uguuucauuuucggugcauaauauccuaugcaaagaacaaaagguauugguauaggcauugaaacuugaagca

SEQ ID NO: 4121742 - RNA, 74 nt, Human
uguuuccaggccagcccucaccuguguucuggccuccaagccgagggcugggcuucugggcuggcuugucaaua

SEQ ID NO: 4121743 - RNA, 70 nt, Human
uguuucccucuugcugacucuuaaaggcuuucugaucacccagaucugaagagucuugcaagaaagaaca

SEQ ID NO: 4121744 - RNA, 56 nt, Human
uguuuccugauuguuuuugaaguucagguagaccugccucaagacaucaugaaaua

SEQ ID NO: 4121745 - RNA, 57 nt, Human
uguuuccuggaccuugacugauauaaaaauuaucaccaggaguugucucaggaaaca

SEQ ID NO: 4121746 - RNA, 81 nt, Human
uguuucucccagaggcaguggucugaugcaaggucccagaauuuauuuucugucuuuaucugaccugucucugucauuuca

SEQ ID NO: 4121747 - RNA, 70 nt, Human
uguuucucuagcuauucauuaaauuccuccauuaucuaaacuacuggaauuuggaauagcuguagaaaua

SEQ ID NO: 4121748 - RNA, 56 nt, Human
uguuucuuaugguggagagauauuuauuuggacccaagucucuaccagaagugacg

SEQ ID NO: 4121749 - RNA, 65 nt, Human
uguuugaaguucuucugugacucucgauuaaccuugauuuaaaguuccagaaaaaugcucaagca

SEQ ID NO: 4121750 - RNA, 78 nt, Human
uguuugagguaauugcuuagagaauccagguaggagagacacuucugccuggauucccuuaguaauguagccaaaaca

SEQ ID NO: 4121751 - RNA, 89 nt, Human
uguuugccauuacauucuuggaaucuuguuuauagggcuacaauggauuagcuagaaacagggccuucaggaugggaaugaacuagaca

SEQ ID NO: 4121752 - RNA, 55 nt, Human
uguuugcuuggucaguaaguaguaaaguugagacuuggacacagacaggcagaca

SEQ ID NO: 4121753 - RNA, 63 nt, Human
uguuuguacauauauaaaaucuguguacaacauaugcagacagaguuuauguguguacaaaua

SEQ ID NO: 4121754 - RNA, 67 nt, Human
uguuuguaucucucucuguggcaaaccaguuugaaaagaaucaggacuccagagcagagguggagcg

SEQ ID NO: 4121755 - RNA, 61 nt, Human
uguuugucucacgcugugacccuggcuuguagcacagugccaggcacaugguggacacgca

SEQ ID NO: 4121756 - RNA, 66 nt, Human
uguuugugugggggaaacaagguacagguuaguaacaucuuguacuuugguuuuugccaacaaaua

SEQ ID NO: 4121757 - RNA, 94 nt, Human
uguuuguucuucagcugagguauuuuauugggcuagcagucaucuggauagguggaaaguuugguuccaauaauuuacuucaguuuuauaaaca

SEQ ID NO: 4121758 - RNA, 76 nt, Human
ugcauuuuagcaagaccaauauguagauauauuaaagguugcacagcccuguccuauguguuggucccuccuugca

SEQ ID NO: 4121759 - RNA, 57 nt, Human
ugcauuuuggucauucuauagcauuuagucuuacuguagaaucacuaauaagaugua

SEQ ID NO: 4121760 - RNA, 107 nt, Human
ugccaaaaaaacauuggauucuagcauacugggucuugagcaacagggauaaaguggcuugaggcagggaucaggaugguguggaggaaauagggaagacaguggca

SEQ ID NO: 4121761 - RNA, 60 nt, Human
ugccaaauaaguggaaucacacaauauagucuuuuguugucugguuucuuuuauuuagca

SEQ ID NO: 4121762 - RNA, 96 nt, Human
ugccaaccucagaugccuggccugugcaggaaaugagcuaguuuuuguaacccccuacuacugugccuggcacacgguggcauucaagacauggca

SEQ ID NO: 4121763 - RNA, 79 nt, Human
ugccaagagccuuugaaaaguguuugcuuucuuuucaucccuuaugauacagagcaagcaucuuuuccaugccuugaca

SEQ ID NO: 4121764 - RNA, 60 nt, Human
ugccaagucacuagcaagugggucucuucaagggcugaggcucuccuugccgacuuggca

SEQ ID NO: 4121765 - RNA, 129 nt, Human
ugccaauaugaauuugucaauauuaauucuggaaugcucauauaaguuuaaaacuaucugucauucuuauuuguugacuucugggauagguguuauggaggcauuccaagaagaaucagauacauauca

SEQ ID NO: 4121766 - RNA, 72 nt, Human
ugccacaagcuuuauggcuuuaaacaacuuagguguaucaccuuacuguuugccugggccacagucugggca

SEQ ID NO: 4121767 - RNA, 77 nt, Human
ugccacacuaggagaggagugucuguguucccaagcuuaccaauucccauaugccucccugucuaccuguuguggca

SEQ ID NO: 4121768 - RNA, 74 nt, Human
ugccacccgcauuccaguucuaugaauucaagagauuuuucuuucaauuuccaggcuagaauuucaugguggua

SEQ ID NO: 4121769 - RNA, 70 nt, Human
ugccaccuccuuccucuuucaaauuuguuucucuuacuguugggaaccaagaguccaagugagguuggca

SEQ ID NO: 4121770 - RNA, 74 nt, Human
ugccacugagguuuugugguuauguguugcacaguauugugauggugagauauaacucauacagccagguggua

SEQ ID NO: 4121771 - RNA, 93 nt, Human
ugccacuucuucccaaacuacuagguuuuccuaaaauucugguuugucaugggccaggguccugaagaccaaguuuugggcagaaugugagca

SEQ ID NO: 4121772 - RNA, 71 nt, Human
ugccagaaucuagguauuuuauuguugaaagauacuuccgguaucaacuuaaagaaaagauacuucuggua

SEQ ID NO: 4121773 - RNA, 57 nt, Human
ugccagagccaggcuuuaggaaguggccacucugggaagucuguggguucaaaggca

SEQ ID NO: 4121774 - RNA, 70 nt, Human
ugccagcacaccaggucccgucuguaccugaggccaacuccggaguguggagaggacaugggugggggca

SEQ ID NO: 4121775 - RNA, 69 nt, Human
ugccagccagggagggcaaaugagaguugaaagccagcccacacuccauuugccaagccuugcgcugca

SEQ ID NO: 4121776 - RNA, 113 nt, Human
ugccaggacuucauuggggcuuuccugcaaugcacuucaagcaucucucuguuggaggaauuuugauagcagguacuugggguuauggaugggggagguaucugagccuggca

SEQ ID NO: 4121777 - RNA, 65 nt, Human
ugccaggagauaaaagagaugcuuuggcacuuuggggagaaaaaaagcuacucuuuuucucggua

SEQ ID NO: 4121778 - RNA, 61 nt, Human
ugccaggcgauugcuaucagcaacaaugccucuaaauugcugaaaaugcagcucccuggua

SEQ ID NO: 4121779 - RNA, 66 nt, Human
ugccagggagagagggcugccuggugugagguggaccccaccugcccaggagucucucugugggca

SEQ ID NO: 4121780 - RNA, 70 nt, Human
ugccagguaacaaggccgauagaaacaggaauuaucccuuugucuucuagauguuuuaauugcacgggca

SEQ ID NO: 4121781 - RNA, 128 nt, Human
ugccaguaucuguuagauuuuuggugaaaaaugguguuugugugggaguauacaguuucaggaaaucugguuuuaagcucuuaugauauuuauuuauauuuccuauaaaucuaauuugcuuccaggca

SEQ ID NO: 4121782 - RNA, 105 nt, Human
ugccaguaugacugcauuaucuagacaauuccauccuacgugggcacucgauacaaagauacguccacagugguggaauuguucaggcagagcagcagcacggua

SEQ ID NO: 4121783 - RNA, 98 nt, Human
ugccaguccguuuuuaauuauccaccuuugcaugauuuggauuauccuagcucagcuacuuacagguggcuccacugauggaaaaauggaccaaggua

SEQ ID NO: 4121784 - RNA, 56 nt, Human
ugccagucugccuagugggacagcagccuaugggcuugagggcuaggcagggggca

SEQ ID NO: 4121785 - RNA, 79 nt, Human
ugccagugagagaggucggggacacugcaaauggauucugauucucugccccauuuguauguccuugggccuccuggua

SEQ ID NO: 4121786 - RNA, 65 nt, Human
ugccagugcuuucuuauaucaggcggauuccauguguggaacauccaugugagaauagacuagca

SEQ ID NO: 4121787 - RNA, 75 nt, Human
ugccaucagggaggaagagagaagaugguguuuccuccucugggaauguccuucuccucuuaccugccugaggca

SEQ ID NO: 4121788 - RNA, 80 nt, Human
ugccaucaguaggccugucagagucaaugcuucaguuucauaacuguaauuggauugucugacuuccuauucaauuggua

SEQ ID NO: 4121789 - RNA, 55 nt, Human
ugccaugcccaccucccuucugacaguguguagguugacagaaggaagcauggca

SEQ ID NO: 4121790 - RNA, 77 nt, Human
ugccauuuauuagcugggcuucaggguguuacuaaaccuguaugcuccuguuucaucagcuauaaaaugaaggggua

SEQ ID NO: 4121791 - RNA, 60 nt, Human
ugccauuucucaggcuauuucacaguaaaaccaaauuacagaucagcagaggaaauggca

SEQ ID NO: 4121792 - RNA, 58 nt, Human
ugcccacauaaaacuuuagagaacugccuuuuuuguucucuagagcaugugcugggca

SEQ ID NO: 4121793 - RNA, 62 nt, Human
ugcccacuagaaccaaugacauuucuggauuauucagauggcauuaauuucuagugauggca

SEQ ID NO: 4121794 - RNA, 56 nt, Human
ugcccacugugucaaagaaauagcaauggggcaagugugacuaagcagagugggca

SEQ ID NO: 4121795 - RNA, 129 nt, Human
ugcccagaaugcagagugacccaggcuuggaacgcacugugucuucucagauuuccugcagcagugcuagcagagaggggacaguggcaagauguguccaccaccauccguuccucaguaucugggaca

SEQ ID NO: 4121796 - RNA, 86 nt, Human
ugcccagcaggcagagacugauguuagauccuguacccagcugcugcugggagaagggacagacucagcuucugacugcaggggca

SEQ ID NO: 4121797 - RNA, 59 nt, Human
ugcccaugcaugacagauggcucugacaucacagaucccacccugugcaggcgugggua

SEQ ID NO: 4121798 - RNA, 64 nt, Human
ugccccaggaacuccagagcuccucucagcagugccuugaagagggcucugagugcuugggcca

SEQ ID NO: 4121799 - RNA, 80 nt, Human
ugccccaggaguuucagaaauuguuauuauucucaaaacaguuguuuaaagaauguuuuugauacugcugaagaugggua

SEQ ID NO: 4121800 - RNA, 92 nt, Human
ugccccaguguucuggcaugagagaugggggugucccagcguauguuccaaaggauaucccugugauugugugcagaaguacauguuaggca

SEQ ID NO: 4121801 - RNA, 74 nt, Human
ugcccccucugaggugagcccagcuggcccuuuaagaagcuggggccacugcuggcgccgcuuggagaugggca

SEQ ID NO: 4121802 - RNA, 73 nt, Human
ugccccgguggcuuauguccagcagauauuugugaaguccucaguguuucccuggcacaagaaccuccuggca

SEQ ID NO: 4121803 - RNA, 71 nt, Human
ugcccgucugccugcuaguggcugccucggcucaccagugggcaccaggagguggcagccaggcagaggca

SEQ ID NO: 4121804 - RNA, 77 nt, Human
ugcccuagcaugaguaacuauccacuggguagguucacugugaaucacgugguuugagaguacgcgugcuuugggca

SEQ ID NO: 4121805 - RNA, 57 nt, Human
ugcccucaagcaacagagaggagcuacuaccaggggcucuucuagcuucugagggua

SEQ ID NO: 4121806 - RNA, 70 nt, Human
ugcccugcaaugcagaggcugccugaggaacgucuguggccuccauuuggccucuguauuguacgaggca

SEQ ID NO: 4121807 - RNA, 77 nt, Human
ugcccugggcauuuuucucuguuacagcauuucacucuugaaaugaauggcacuuagcagggaaggugucuuuggua

SEQ ID NO: 4121808 - RNA, 130 nt, Human
ugcccuuagcagugggggcagcagagccacuuggagcgccggcucaggccacaggacggcagcccgaaaccugcccggccgcuggugcuggucagugcgacaguguugccgcccccacuggcagucagca

SEQ ID NO: 4121809 - RNA, 98 nt, Human
ugcccuuggcuuuaugccucuguuccacauuuguaaaaugaggaugauaauaguauauaccucauaauguuggaguaaggauaaaaauaaaugaggca

SEQ ID NO: 4121810 - RNA, 62 nt, Human
ugcccuuggguaacuugcugauaugugaagcaugcuucaguucacacacguuuccaagggca

SEQ ID NO: 4121811 - RNA, 111 nt, Human
ugcccuuuauggaaucaaguaaacaaagcaguaguuuucaaauaguuauuucaguucaaccacagagagcucagagaauuuacugcugccuacucccuuuagagauuagca

SEQ ID NO: 4121812 - RNA, 60 nt, Human
ugccgcauuguuggaaauuuaguuuuuaaaauuuuuaacauuauuuugaacaaugcugua

SEQ ID NO: 4121813 - RNA, 76 nt, Human
ugccuaggaugccuaggacaugcuggcgcucucccccaggcaggccagcuguuacuagagccacucugcauuggca

SEQ ID NO: 4121814 - RNA, 85 nt, Human
ugccuaggauugucauaagcuagcugcaccauauuuuucccaugcuuaaauugagauaguauguuucuggcuuugucuccuggca

SEQ ID NO: 4121815 - RNA, 66 nt, Human
ugccuaggcuggagugcagugacuugaucguagcucgcugcauccuugaacucccaggcuuaagca

SEQ ID NO: 4121816 - RNA, 91 nt, Human
ugccuaguacugagccuuguacuagaaaggaugucaaaucaguucaaaggaugauagacaucuaucuaguugcgaaaacaaguacaaggca

SEQ ID NO: 4121817 - RNA, 57 nt, Human
ugccuaguaggguuguuguagggauucacaaaaaggcccuaugcccagacuaaggua

SEQ ID NO: 4121818 - RNA, 69 nt, Human
ugccuauuacacaguaaaugguaaauacauguacgcaugcaagcauguaacaaugagcuguguagugca

SEQ ID NO: 4121819 - RNA, 79 nt, Human
ugccuauuauuucacauaauccuccaguggcagaugucuuuaucccuauuuaccagggaaauuaagugauuugggggca

SEQ ID NO: 4121820 - RNA, 85 nt, Human
ugccuauugguuugggagcauuuuaaauggcagaugcuuuugauccaccuuucuucugucucugagaugacucccacccacugca

SEQ ID NO: 4121821 - RNA, 85 nt, Human
ugccuauugguuuugaagcaacuguauuaauggaagcucucugacauggugaguucucaguaaaguucuuugaaauggauuuuca

SEQ ID NO: 4121822 - RNA, 78 nt, Human
ugccuauuuccagaugaggaaacugaggcacagagagcuuaaguaacaugcccaaagucacucagcuaggaaguagca

SEQ ID NO: 4121823 - RNA, 84 nt, Human
ugccucacuaauuuugaccauuauacacuggcuuguauuauacuuagcacacagcaggugcuuaaugauuacuuacugaaggua

SEQ ID NO: 4121824 - RNA, 123 nt, Human
ugccucagccucccgagaagcugggacuacaggugcuccaaggugcuugaguuuggaaacaugagacaaaaccagaaacagagacccugggagagucuguggucuccauuuuuccgcugagca

SEQ ID NO: 4121825 - RNA, 61 nt, Human
uggugaacugguaaucaguccacuuugaccagggaggaaaugauuucugccaaguucacua

SEQ ID NO: 4121826 - RNA, 63 nt, Human
uggugaaggguggcauggcaggcagugcucaugcccugcuuguggcauugcuaucucugacca

SEQ ID NO: 4121827 - RNA, 56 nt, Human
uggugacccugacuucuggccagcgcaggacgccccaggccccagccaggguauca

SEQ ID NO: 4121828 - RNA, 57 nt, Human
uggugagauaacuuucggcaagaucaugaaagacugaugcggaaaguaucuucauca

SEQ ID NO: 4121829 - RNA, 57 nt, Human
uggugagcgaugcugcauguuccucccccaccagggugcaucaagguacgcucucca

SEQ ID NO: 4121830 - RNA, 67 nt, Human
uggugauaugauauuuagucuauuagagcuguaaugaaagugguaaugacuaagcaucauuaaacca

SEQ ID NO: 4121831 - RNA, 55 nt, Human
uggugauauuacucaauggucacuccuaguuuuugaucagaagugauauuaacca

SEQ ID NO: 4121832 - RNA, 76 nt, Human
uggugauauugaaucugagaauggcuugccucaguucugugaggcuucaauguauucacauucaguucuuccacca

SEQ ID NO: 4121833 - RNA, 106 nt, Human
uggugauggaugaacugggaugaaugagagauuggauaugugacucaggaucauccucugaggagaaucuaucccaguuuaacucauuugauccaggcaauuacca

SEQ ID NO: 4121834 - RNA, 67 nt, Human
uggugcagcgguaaggagagccugaagggggcagugucacccccuggcucuggcuuccuguugucca

SEQ ID NO: 4121835 - RNA, 77 nt, Human
uggugcauguacuggaccaaaauuacagucgcuccuauuugggggccuauucuaaggcugguuaaugccuggcacca

SEQ ID NO: 4121836 - RNA, 57 nt, Human
uggugccacccuccuucagcugauuaaucaucucuucugcugggggcguggucacua

SEQ ID NO: 4121837 - RNA, 98 nt, Human
uggugccaggccucuagucuacuggccugagccaggcugaugcuggcaccaccgggccgccacccugagcugggccaggggaaugagcccucucacca

SEQ ID NO: 4121838 - RNA, 69 nt, Human
uggugccauucaccuguagaccauucaguuacaccacugagggagagucuuagguuggagucuucacca

SEQ ID NO: 4121839 - RNA, 81 nt, Human
uggugccuguaaucucagcuacuggggaggcugaggcaugagaauagcuugaacccaggaggcagagguuggagcaagcca

SEQ ID NO: 4121840 - RNA, 64 nt, Human
uggugcucugccuaugccagcuuggcacccgaagaugugugaguggacgugaggcugaguauua

SEQ ID NO: 4121841 - RNA, 59 nt, Human
uggugcugagaugaagugcuccaaauagcuaauggccugggcuuguucacucaguacca

SEQ ID NO: 4121842 - RNA, 82 nt, Human
uggugcugccuugcuuacuccacugcaaaaguuaauacgcaacauaagcaguaauuggggagugaaguaugguuguuaacua

SEQ ID NO: 4121843 - RNA, 62 nt, Human
uggugcuucacagcaugagcuuuggaguuaagccaacuucaguuguaauccuggauccacca

SEQ ID NO: 4121844 - RNA, 79 nt, Human
ugguggagauuugaauaaauugagagcgaauguccagucuuaaggagacauuuauuacucagguuguugauuuuugcca

SEQ ID NO: 4121845 - RNA, 60 nt, Human
ugguggagcaggacuagcugagaauccagagacuguguucugcuuccugcuucucuccca

SEQ ID NO: 4121846 - RNA, 57 nt, Human
ugguggaggcgcugcuggccaggcucaggcugcugcgaggucggcuccccuccauca

SEQ ID NO: 4121847 - RNA, 72 nt, Human
ugguggcccugucccaggccuccucuaggcuccgcccccgcgcccgaggacggcgggaggcgggguccgcca

SEQ ID NO: 4121848 - RNA, 57 nt, Human
ugguggcucacgccuguaaucccauaacuuugggagcccgaggcaggcagaucaccg

SEQ ID NO: 4121849 - RNA, 60 nt, Human
ugguggcuuucuuuacauggcuguauuaucugcuuucacaccuuagagagaaagccauca

SEQ ID NO: 4121850 - RNA, 58 nt, Human
uggugggagugacguugccuucuaugcauagcaguguugcaaaguuuagcucccacua

SEQ ID NO: 4121851 - RNA, 63 nt, Human
uggugggaguuauuuacaaaagauguauuucauuuguuacuguguguguaacaacuccuauua

SEQ ID NO: 4121852 - RNA, 87 nt, Human
uggugggccauaaaugugcagaugaauaaacaaauucuauauuuguauuugugaguuuucauuuguaaauuuuugucauguacacua

SEQ ID NO: 4121853 - RNA, 71 nt, Human
uggugggcccgcgucccgccgccgagccagagccaaagacgaggucggugcgcgaggcgcggucccacaca

SEQ ID NO: 4121854 - RNA, 61 nt, Human
ugguggggauacagacaugaaauuuuuucucaguagaaauaguuuucccugguucuugcca

SEQ ID NO: 4121855 - RNA, 90 nt, Human
ugguggggcugucaggcguggggaaccuuuccugagagaagaaaggagccgcucuccagguggguucccgacucuggcuggcucccacca

SEQ ID NO: 4121856 - RNA, 130 nt, Human
uggugggggccggggagaagcaguccuuguaacguugggcugggguccacugccuggaaaugacacacugggggaggagacaccggaagccucaaucugcagggacucacagacuccucucccccuucca

SEQ ID NO: 4121857 - RNA, 81 nt, Human
ugguggguaauauggaaaguguuuucuucuguugugcauuucugugcuacugagguugaauaucuuugcaaauguuuauua

SEQ ID NO: 4121858 - RNA, 58 nt, Human
uggugguguauuuuucauuuuuggaacuacuuguguuggaauuuuaugaacacuacca

SEQ ID NO: 4121859 - RNA, 59 nt, Human
uggugucagugugaggucuuccacccgggucuccuggcuaugacuucguacugucucua

SEQ ID NO: 4121860 - RNA, 125 nt, Human
uggugucccugugggaagugccucaugcauggcacugucugcaguaugagcuacccaggugucccugucaccugcucugguccagcuguuccagugccucaaggucccuuacaggccaaaagcca

SEQ ID NO: 4121861 - RNA, 58 nt, Human
uggugucuagugaaggccuacuaucugacuuauguaugauggcuucucacugaccuca

SEQ ID NO: 4121862 - RNA, 62 nt, Human
uggugugaggaacccggaauguggggugucugcgggugcugcaaguuccaguguuccuccca

SEQ ID NO: 4121863 - RNA, 63 nt, Human
uggugugggcagcagcagguaccucccaagcauaggcccugucuggugucccugucuacagca

SEQ ID NO: 4121864 - RNA, 88 nt, Human
uggugugguuauauagaagaauauucuugaucuuagaugacaggauacauuuaggagucaaauguuuuaggaucuguaagcuauuuua

SEQ ID NO: 4121865 - RNA, 56 nt, Human
ugguguuaauggugugaaagccgguaccaaggcugcucaauagaccauaauaucca

SEQ ID NO: 4121866 - RNA, 64 nt, Human
ugguguucucauuuucaaaaggagaauagccacagacuauucccuagagugauugagagcauca

SEQ ID NO: 4121867 - RNA, 86 nt, Human
ugguguugcaaagaaacuuucuccuucuagaggugaauuccagcuuuuacagucagaggagccaaaguucugagccugcagcgcca

SEQ ID NO: 4121868 - RNA, 104 nt, Human
ugguguugccauugauaguaauggacaaacuugggaaguaugccauuuugagggugagaaucaugaauccaaaguuuacuauuauaguguugaugggacaacca

SEQ ID NO: 4121869 - RNA, 74 nt, Human
ugguguuggugaguuucugaucacaagacuguuccgcgguccucuuguugccggaaagaucucgaccaccacua

SEQ ID NO: 4121870 - RNA, 119 nt, Human
ugguguuguuaucauaagggaauaaaaaguaucucuuguuuugucugauuuggggcacaauccccuuagugugugaagcauuaagugccucuaaaacaagccucuuauugaccacacca

SEQ ID NO: 4121871 - RNA, 57 nt, Human
ugguguuuuguuauggcagccugagcagacuaauacagcugccuuuagagagaacca

SEQ ID NO: 4121872 - RNA, 58 nt, Human
ugguuaauggcagccauuuauguaagggcggcuucuuaauuauggcuuccauugacca

SEQ ID NO: 4121873 - RNA, 60 nt, Human
ugguuacacagcauguggacuugaacaggaauagucugagccccgagucugugcuaacca

SEQ ID NO: 4121874 - RNA, 93 nt, Human
ugguuacuuguaaucauagucaagagcaucuauuucacaguggcaaugccaaaccuguuugauaauguuuacugacaauuacaggcuuagcua

SEQ ID NO: 4121875 - RNA, 86 nt, Human
ugguuagagaaaagcagggaucaggaauccuauuagcagaugagggcuuucacggaucuugguucccuuucaccucuauuucucca

SEQ ID NO: 4121876 - RNA, 55 nt, Human
ugguuaguguauauuuggacuguggccaaauccccacuaaauuguauauuaauca

SEQ ID NO: 4121877 - RNA, 66 nt, Human
ugguuauuaguuaacauuuugaaaggcaauugugaacaugucuuuuagaaaaguugaauguaguca

SEQ ID NO: 4121878 - RNA, 67 nt, Human
ugguucaaaaaguuaggcuuaguugagauuuguuggugugaacaaacucagcucuccuaaugaacua

SEQ ID NO: 4121879 - RNA, 65 nt, Human
ugguucaaaagcaccugguuuauauaaucauacauccuguaacauuguuaugaaucaggucacca

SEQ ID NO: 4121880 - RNA, 62 nt, Human
ugguucacagguccugggagcaggugggcagccaagccuuuugccccaggccccuggaguua

SEQ ID NO: 4121881 - RNA, 57 nt, Human
ugguucagauauggagcugggauuugaauccuaucaccagacucagaaguuuaacca

SEQ ID NO: 4121882 - RNA, 84 nt, Human
ugguucguugaggauguuccaacugauucaccaugguaggugugauugaaccauggaaaugauggaacauuaaaucaauagcua

SEQ ID NO: 4121883 - RNA, 71 nt, Human
ugguucuggaggagagccuggugugaacuacaaacaagccacugugaauaccaaugaaucccugagaauca

SEQ ID NO: 4121884 - RNA, 78 nt, Human
ugguucuucaucucaaggcauaaccuuuuuagaaucucaacugaaucuucaaaauguucugcuugggacagaagucca

SEQ ID NO: 4121885 - RNA, 83 nt, Human
ugguucuuuaaucuguaugacuaagaguguggauuggcugacauuaugagaugcaauuaauuuacaugcuuaaguuaggacua

SEQ ID NO: 4121886 - RNA, 73 nt, Human
ugguucuuucugguccuucuuuucuagucacccagauggccugacacuugagagggacacggaauaagcacca

SEQ ID NO: 4121887 - RNA, 78 nt, Human
ugguugaagaugaugaagaugugaaggcuggauuugauaaugaagagucuucuuuguguucucucauuauuuaugcca

SEQ ID NO: 4121888 - RNA, 66 nt, Human
ugguugaugcuggcuguuggcuggggccuuaauuuggccugucagcagaaacgccacaugcaacca

SEQ ID NO: 4121889 - RNA, 74 nt, Human
ugguugauggccguggccagggucagggaugagcguuccacagacccaugacucucauucacagucuucagcca

SEQ ID NO: 4121890 - RNA, 58 nt, Human
ugguuggcuuuucaaugccuguaaagagaauuagagauaggccacugaaugccaauca

SEQ ID NO: 4121891 - RNA, 60 nt, Human
ugguuggugugagguuucuuagugugaugcauacaagauuaaaacuuauaccaugcacca

SEQ ID NO: 4121892 - RNA, 91 nt, Human
ugguugguuuuuggaucauuaguaacucauggauauaaguauauuuguuuuguuuuaauccauggcaguuauuaaauuuaaaaauguucca

SEQ ID NO: 4121893 - RNA, 58 nt, Human
ugguugugguccuccacaucgcugcuguuguagcaggggugugggauggacugaacca

SEQ ID NO: 4121894 - RNA, 99 nt, Human
ugguuuaaaagagauccaguauauucuucagacuacugaugauugcuaacauuuaguacaucagaaacagagucaugaaauuguauugauauuaaacua

SEQ ID NO: 4121895 - RNA, 107 nt, Human
ugguuuaagccucuaaguuuugcgugugguuuguuguuauauagcuugcagauaagcagcaggcugccuaacccuuaagugucacaugcggaagaggcaaggaacca

SEQ ID NO: 4121896 - RNA, 59 nt, Human
ugguuuauauuuugugugaucucuuaaagaaauagagaucagagcaauggauaaaauca

SEQ ID NO: 4121897 - RNA, 82 nt, Human
ugguuucaguuuugcacaugugccuguggcacauccauagggaaguauguaggagguagauggauaugcagcuuggaacgca

SEQ ID NO: 4121898 - RNA, 68 nt, Human
ugguuuccccauucacaguauggacgaaaugaguuccuagaguacucagaguuggaauggggaaggca

SEQ ID NO: 4121899 - RNA, 55 nt, Human
ugguuucucagacucuuugcaguuuuucauuguacaaugugggcaugagaaacca

SEQ ID NO: 4121900 - RNA, 88 nt, Human
ugguuucugguuguuggcuguauccugaaccuuacuguaaaaugguaacaauaguguuugcuagucacaauuuuaaauuagaaggcca

SEQ ID NO: 4121901 - RNA, 73 nt, Human
ugguuugacacaagugagugaccagaguuggugucuucuuggaacugaccuuguguuaccauaugacaaacca

SEQ ID NO: 4121902 - RNA, 56 nt, Human
ugguuugggugugccauuuucauuuaguuuauuauugaauauggaaugccuggcua

SEQ ID NO: 4121903 - RNA, 75 nt, Human
ugguuugucccuagagaaucaaauuuuuucuucacucccauauuucagaacuugauacauuuuuaggauaaacca

SEQ ID NO: 4121904 - RNA, 59 nt, Human
ugguuugucggucugcaguguuguaccacccuggugcucauuaggacugcaaauuccca

SEQ ID NO: 4121905 - RNA, 59 nt, Human
ugguuuugcuaaaauagaaagauuaguuugaaguucauccugcuguuuugguaaaauca

SEQ ID NO: 4121906 - RNA, 67 nt, Human
ugguuuugugagcccauaaaugccaggaagccuccaagauuucuagcuuugugaaguuuacagacca

SEQ ID NO: 4121907 - RNA, 72 nt, Human
ugguuuuuaaguaccaaaguaggaauuugacccuaagcauuuuaugucagaguccaugguacuuaauuauua

SEQ ID NO: 4121908 - RNA, 130 nt, Human
ugguuuuuuugaggucaugugaguaaguuuguuacauauucuauuuauuucauguccguacauaaaggggauguuagaaauuauuaguaauaucaaugagguuugaaaaccacugacuccaagaagagca

SEQ ID NO: 4121909 - RNA, 90 nt, Human
uguaaacuguuuguucuucagaggggaaagaaccuguguaaucaccugaagacaaacggucuuaacuuuccagaagaugacagcuuuaca

SEQ ID NO: 4121910 - RNA, 77 nt, Human
uguaaacuugccaggcaccaaaguaugcuuuaggauaucaccaugacuagugcccuuugcugccugccaugguuaca

SEQ ID NO: 4121911 - RNA, 68 nt, Human
uguaaagacugaagcaauucaaccaguguuuauauauauauuuauagggaauugcuuaagucuauaua

SEQ ID NO: 4121912 - RNA, 66 nt, Human
uguaaaguuuuauuguuccuucuauaacuagugaauaucuuggaggagauacuuugaaacucugca

SEQ ID NO: 4121913 - RNA, 83 nt, Human
uguaaauagugacugcagugucaaugccaacaguauauagggcacuugccaugugccaggcauuacauuagguaacugagaca

SEQ ID NO: 4121914 - RNA, 79 nt, Human
uguaaauuaauggacaaugccaauacaguuuuauuuacagaaacagaguaagccuguaggccauuggccagaguuugca

SEQ ID NO: 4121915 - RNA, 68 nt, Human
uguaaauucagaagcacaaaaccuagaguucaccaagacucuuagagugacauguugcugaauggaca

SEQ ID NO: 4121916 - RNA, 85 nt, Human
uguaaauuuucagaugcuuacauagcccaaguguggaagacugaauucuguguucaacuauuuggcuguuguuagcaaugaugca

SEQ ID NO: 4121917 - RNA, 72 nt, Human
uguaacacugguauuucauuuagugagaauauuuacuccauaauagcuaaugagugcucgguguuugauaca

SEQ ID NO: 4121918 - RNA, 60 nt, Human
uguaacagagcuuuuuuauagcagcacacuuguagcagcuguugagugguuuuacuuaca

SEQ ID NO: 4121919 - RNA, 67 nt, Human
uguaaccugcagguccccggaugcgcaccccaacggcgccugcgccuacgggggccucagccuugca

SEQ ID NO: 4121920 - RNA, 91 nt, Human
uguaacucuuugcacaggggaguuuuaugcaacagacagaaacuuucugaguuguucugauugccugaagaugcccuguuuuagaggagca

SEQ ID NO: 4121921 - RNA, 74 nt, Human
uguaacugcuuagaagguuuuaguuaucacuuccuaucauauagaagcuuacuuuagauuuuuuuccaguugca

SEQ ID NO: 4121922 - RNA, 56 nt, Human
uguaagaaaaguaaauagugacccagaagaauuugggucacggucugauucauaca

SEQ ID NO: 4121923 - RNA, 90 nt, Human
uguaagcacagagauagcacaagcaacuacugaaguuagcaaaauugaggugcagaacucggugagggcuuagcuaacuguuagcauaca

SEQ ID NO: 4121924 - RNA, 58 nt, Human
uguaauauaccaaacuguaauuuuucuaccuuacaagaagaacgguuggguauuuaca

SEQ ID NO: 4121925 - RNA, 80 nt, Human
uguaaucgaauucuugaaagacagaaucugucaaucuaaaauuuugugaaaagauaagcuguuuuucaagaaugaggaca

SEQ ID NO: 4121926 - RNA, 77 nt, Human
uguaauugcuuguaaagcccugaaaguagcuuagauguuuuuaacaaauuguguauucagguuuucaaauaauuaca

SEQ ID NO: 4121927 - RNA, 83 nt, Human
uguacaaaauuaggauuucagagacccagaucuuuuggcagauagcuagguccugacgcccuuugaaaucggaauauaguaca

SEQ ID NO: 4121928 - RNA, 129 nt, Human
uguacaaaugaggaaauaguggcuucauaggauaaacgguugcucauaguuacauggcuagcuagaguuuugcugggaugugacuccaggcaguuuuguuccagagucauuauuuuuuucuuuucuaca

SEQ ID NO: 4121929 - RNA, 61 nt, Human
uguacaaugcugagguuugggguaugaauaaucccgucacccaggcacugagcauuguaca

SEQ ID NO: 4121930 - RNA, 103 nt, Human
uguacagaaugagggaaauugcaucaguuuauacuuauaaaucuuagugauucuccugggcauuuugagaugaucugacugauagugaucccuuaacuuuaca

SEQ ID NO: 4121931 - RNA, 95 nt, Human
uguacagaugagaguacaaauuagcuucuuacauuucauccucaugaaaacccaaggauguggauggaguauuuauuauucucauuuuaaguaug

SEQ ID NO: 4121932 - RNA, 76 nt, Human
uguacagggagccaaguccuccaugugacuaggucaucugaccagguccuuuugagggcuacuaguuuuuucugca

SEQ ID NO: 4121933 - RNA, 64 nt, Human
uguacuaaauguuuuaucuuccuggcauuggaaaaaaauggggaagaaauagaacauuuugaua

SEQ ID NO: 4121934 - RNA, 58 nt, Human
uguacuaaggcuguguagaugucaucucaauugauucuuucaacacaguuuuaaggca

SEQ ID NO: 4121935 - RNA, 69 nt, Human
uguacuacaugguuaagaugguaaauuuuaugcuacguauauuuuaccacaauuuuaaacaauggugca

SEQ ID NO: 4121936 - RNA, 64 nt, Human
uguacuauagguaauguagaccaugaaauuuguuuccguuggucugcauuaucuguaauggaca

SEQ ID NO: 4121937 - RNA, 60 nt, Human
uguacucacucucucaaggccucugagguuauuagcucaaaggcucagagcaguaguaca

SEQ ID NO: 4121938 - RNA, 70 nt, Human
uguacucugaggaugcugacuuccagauagccauuuuuggguuaagggaaguucaagucuccugaguaua

SEQ ID NO: 4121939 - RNA, 62 nt, Human
uguacuguaugccaggcacuauuuuaguauuccaugagaaaguaaagcagaguugcaguaca

SEQ ID NO: 4121940 - RNA, 89 nt, Human
uguacugucaguccccagcucccaguguuguuuucugaugccggcucccucucuguauugaacggcaaugggaacaagaaugacuauca

SEQ ID NO: 4121941 - RNA, 87 nt, Human
uguagaaacaguuggguuguaaaauaucacaucucuuuggugacagugcugugauguggcuuuucuaacccuuccaacuauucuaua

SEQ ID NO: 4121942 - RNA, 62 nt, Human
uguagaagacacucugcagaguuaucucccugaggaugaagucgcuggaguguucaucuaca

SEQ ID NO: 4121943 - RNA, 71 nt, Human
uguagagacacugucuucaguuucacugcauccucuucacagcuguaauuaaacugaagacagaagcuaua

SEQ ID NO: 4121944 - RNA, 72 nt, Human
uguagaguuccuugcccacaauaggucauuaauaaaucuuugauaagugggugaagaggaaauauuuccacg

SEQ ID NO: 4121945 - RNA, 64 nt, Human
uguagaguuguuguaggaauuaaaugagcuaauucauuugaaauucuuagaacaaaaacucaca

SEQ ID NO: 4121946 - RNA, 61 nt, Human
uguagaugagucagggugcaccgggguaccagcauuccacaugcacccugacucaucuaca

SEQ ID NO: 4121947 - RNA, 61 nt, Human
uguagaugagucagggugcauguggaaugcugguaccccggugcacccugacucaucuaca

SEQ ID NO: 4121948 - RNA, 75 nt, Human
uguagcgguucccucugccagcuauuuuuagcauuguugcugccagcugacagcagagacaaaggcaccgaggca

SEQ ID NO: 4121949 - RNA, 61 nt, Human
uguagcugucagcaaucaagugguuaccagcaaagugaaaacgauggucauugcagcaaca

SEQ ID NO: 4121950 - RNA, 71 nt, Human
uguaggaagccuuauggggacaguuuugcucuauugacaacaucaguccucaugagacaagugaaacuaca

SEQ ID NO: 4121951 - RNA, 57 nt, Human
uguaggaggcagagagggaaagagcagucuuaggucucuuuacauuugccucuugca

SEQ ID NO: 4121952 - RNA, 55 nt, Human
uguaggccccauuccucaaagauuguaauucaguaaguuugaaggauggccugga

SEQ ID NO: 4121953 - RNA, 77 nt, Human
uguagggcccagagcagguuaacaguaaacaucacagaaaaaaugaauggauccugugcucuuuccacggccccaca

SEQ ID NO: 4121954 - RNA, 56 nt, Human
uguaggguucacccagcuaccucccuuucccgagaguucaaauggguagauucaca

SEQ ID NO: 4121955 - RNA, 65 nt, Human
uguagguaccuaaauggauaucauuucagggauaaguugacccuuuucauuugggaaaaucugcg

SEQ ID NO: 4121956 - RNA, 65 nt, Human
uguagguuuucuuauacuuuucauaguccacauuuuaugaaagcacgugggaagauaaaucuaca

SEQ ID NO: 4121957 - RNA, 80 nt, Human
uguaguaaccuaaggaggccuuugugcuccauuaagugguuuugcaaguuggaauacagggccuuugauggauuauaaca

SEQ ID NO: 4121958 - RNA, 70 nt, Human
uguaguccuccaagugaaagauauaugucacaucuccaggugagagacaggauaucugcucaugguuaca

SEQ ID NO: 4121959 - RNA, 55 nt, Human
uguagucuguuaaaguaagagcaagcaagcuuugaacucuuacagaauagacaca

SEQ ID NO: 4121960 - RNA, 65 nt, Human
uguaguguggccuaucuuugccagaggugcuugagaggucggugugcaggcaaagaugcauugcg

SEQ ID NO: 4121961 - RNA, 77 nt, Human
uguaguuaccauagaugguuagcucugggguugccaauccgaugcugacagagcagguaucuuuggugaaugaagca

SEQ ID NO: 4121962 - RNA, 88 nt, Human
uguaguugcuuuuuuaaaaauauagcggguccauagaaaauuaucauuuucauuugcuguuuacuguguuuugauuaaaaagcaaaca

SEQ ID NO: 4121963 - RNA, 66 nt, Human
uguaguuuucuucccucaaggcauguuuuaucuaacacuguuuuagggaagaaaauaaaagcugca

SEQ ID NO: 4121964 - RNA, 104 nt, Human
uguauaaaagcuuucccacauucauuacacucauaagguuucucucuaguaugaauuuucugguguguaaugaaguuuuucuuguggcugaaggcuuuucugca

SEQ ID NO: 4121965 - RNA, 74 nt, Human
uguauaacauuauacagagaggacagugguaaacuuaggacugcugcccuuucuauaugauguaauuuuauaua

SEQ ID NO: 4121966 - RNA, 78 nt, Human
uguauaagucacagguccuuauaagagcacucaggaauugucucucacuuguaguacuucagaccuggugaugauaca

SEQ ID NO: 4121967 - RNA, 65 nt, Human
uguguguguguauaaaagggaugaauaaaauuauuuaccugaucaucuguuauugcauguacaua

SEQ ID NO: 4121968 - RNA, 76 nt, Human
uguguguguguguguguauguguguguugaugucauaagaggucaguaucuugcuuauagacacauuuuccauaua

SEQ ID NO: 4121969 - RNA, 81 nt, Human
uguguguguguguguguguguguggucaugacugcccuccuuucacucuagcucaaucccuuacagccuauucaccacaua

SEQ ID NO: 4121970 - RNA, 72 nt, Human
ugugugugugugugugugugugugugugguguguguguguguguugugugcaugcaaacacguaaacauuca

SEQ ID NO: 4121971 - RNA, 88 nt, Human
uguguguuagaguuguuuuuagauccuuucauuugguuauaauaaagcagauggagaccuuggaugaacuggacacaacuugcacaua

SEQ ID NO: 4121972 - RNA, 65 nt, Human
uguguguuauuuucagccauuaaguucauagugaucuuuuacgauguauggaaaauaaacacaca

SEQ ID NO: 4121973 - RNA, 67 nt, Human
uguguguugauaggcauucauuggagaaaauuuguguuuccucuuauacaguguuuauuaaaauaua

SEQ ID NO: 4121974 - RNA, 81 nt, Human
uguguguuguguauguguguguguguuugucaugguacuggaggacgacaaaauaauuacuaacuuguacacagccuaaca

SEQ ID NO: 4121975 - RNA, 73 nt, Human
uguguuaaggugcaucuagugcaguuagugaagcagcuuagaaucuacugcccuaaaugccccuucuggcaca

SEQ ID NO: 4121976 - RNA, 55 nt, Human
uguguuaccugcacuggauuucugcucugcuugacuaaaagucccagcuaacaca

SEQ ID NO: 4121977 - RNA, 66 nt, Human
uguguuacugacacauuuuuguccccaauaagucuuuuucuuauagauuaguguuucaguugcaua

SEQ ID NO: 4121978 - RNA, 66 nt, Human
uguguuaguaacuaccuuuauugcauggacaagacaggucuauuaauugcuugaguuaguaauaca

SEQ ID NO: 4121979 - RNA, 74 nt, Human
uguguuaguuacucucaugccuaagacaaucauaaaaaucccaaguuugaaaagcaaaugaguuaacuaacuca

SEQ ID NO: 4121980 - RNA, 75 nt, Human
uguguuccaguucucguucggaacgcacguggagagcggaguaaaauguguguaugaacgaaagaauggauggca

SEQ ID NO: 4121981 - RNA, 55 nt, Human
uguguucuggcugugacagcugauuacagaggggcagcugggagggcagagcaca

SEQ ID NO: 4121982 - RNA, 126 nt, Human
uguguugcuggguuucuuuuguuguuguuguuuuacuugucuuguguguuuggggugauucaggacacuggauguucaucaacacauuacaaggcguagaacuuuuucugcuuauccugugacaca

SEQ ID NO: 4121983 - RNA, 72 nt, Human
uguguuggcuuauuuugcugaugacccaggcauugucaugugccucucauccuagugaaaaugaguggcaua

SEQ ID NO: 4121984 - RNA, 89 nt, Human
uguguugucuguagugugugacgugauuugaugugauggaaaagggaagcacauauauauauagucacacuuugcaggcacuuuacaca

SEQ ID NO: 4121985 - RNA, 63 nt, Human
uguguugugucaccuaucaugcgcagggcugcuauccaugaccugauuuucugaaacagcaca

SEQ ID NO: 4121986 - RNA, 106 nt, Human
uguguuuaggaauauccuggggguuuuguuaaaaugcagauucugacaaaguuaaucugggauggguuggagaugcugcauuacuaacaaacucccaggugauaca

SEQ ID NO: 4121987 - RNA, 58 nt, Human
uguguuucuugacgcugcucuaaggucucaccacagccuggcagucucaagcagcaca

SEQ ID NO: 4121988 - RNA, 66 nt, Human
uguguuucuugagcaauauagguuguaaaugucuuuauauauaaauuaaugugcccaugagacaua

SEQ ID NO: 4121989 - RNA, 72 nt, Human
uguguuugauagaugcagaucucagugugcuguuguuucauauaauuaagcaccuguugcacuucauaauca

SEQ ID NO: 4121990 - RNA, 60 nt, Human
uguguuugcagcagaaaagcagacacuaaacugaaauguguaaugccugugauaagcaca

SEQ ID NO: 4121991 - RNA, 73 nt, Human
uguguuuguauuugucuauguguaauagcauguguguacaguacaugcaugcacauauacacacauuaacaca

SEQ ID NO: 4121992 - RNA, 70 nt, Human
uguguuugugugugcauauguguuuuccuagugguuacaugcuuacuaggcaauuauguaaauaagcaca

SEQ ID NO: 4121993 - RNA, 87 nt, Human
uguuaaaacacaaauuguugggacucagccccaaaguuccugaugcaguaggucugggcuggggcucaauaauuuguauuuaucaca

SEQ ID NO: 4121994 - RNA, 82 nt, Human
uguuaaaaugcagacuccagggcuccaccccagauugagucagaaucugaagagguaaggcccuggacacagcauuuuaaca

SEQ ID NO: 4121995 - RNA, 125 nt, Human
uguuaaauagcaucaauguuagucuacucuguuuuugcacaugaaacuaggccaaucaaauuauuguuccaagcugaauaauuugugguuuagguuucauggccugacagugaugucuaaugaua

SEQ ID NO: 4121996 - RNA, 101 nt, Human
uguuaaauauuaagguccaagagguaaagguuuagguguacgauguugcuauuuuauaccucauucuuagcaaaaggcuuggcacauuguauauguuaaua

SEQ ID NO: 4121997 - RNA, 90 nt, Human
uguuaaauuaggcaugacuuuaacuucugacaugauggcucguauauuuguguggaacaaaauguugggagaaaguuguggaguuuuaca

SEQ ID NO: 4121998 - RNA, 67 nt, Human
uguuaaccacucaaggauucuggaacagaagcuaacaguuuucugcaacgagucuuugacuuaaaca

SEQ ID NO: 4121999 - RNA, 130 nt, Human
uguuaaggaaaugucagcacccugccauucauggugacugccucaguuucccugcagcccaggaagagggucgcagcuaauauagauggaggcaggauucagauggcuuucuuugcuacacucuggaaca

SEQ ID NO: 4122000 - RNA, 57 nt, Human
uguuaaguugccaguguaugacggaagcagcguuauuaaacgaacgcagcuuguaca

SEQ ID NO: 4122001 - RNA, 80 nt, Human
uguuaauaagcuggaacaucuugaggaagucacuaaagugcauuaguuucuguaucuauaagauguucauagcaauaaca

SEQ ID NO: 4122002 - RNA, 57 nt, Human
uguuacaaagcgcuuuaccucugaagcaugucucaggggcagcugugcuuugugcca

SEQ ID NO: 4122003 - RNA, 57 nt, Human
uguuacaguacuacaauucugccacaacuuuaagccucauuuguggagacuguagca

SEQ ID NO: 4122004 - RNA, 65 nt, Human
uguuacaugagcccagaaaucucccuuugauggcuugcacuagugggaguugggucucugucaca

SEQ ID NO: 4122005 - RNA, 119 nt, Human
uguuaccuggauuaucucauuucuucccucuucaaguaugagaaaggggacugaggagaaaggaacaaucugcagucaggcugacaggcuaggagggaggaaagauagacuugggaaca

SEQ ID NO: 4122006 - RNA, 126 nt, Human
uguuacucaaaaugugauugcagaucaauggcaucagcaucaucugggagguucuuagaacuacagaaacagaccucuccagaucugcugagccaggcucugcauuuuaucaaaaucaucagagca

SEQ ID NO: 4122007 - RNA, 77 nt, Human
uguuacugagggcacugggucuucuuuugaacauaucuuuaucagaccaaaggaagaugccaggacucuguguggca

SEQ ID NO: 4122008 - RNA, 66 nt, Human
uguuacuguguacuuaaucuguacuggacaaugguguaugugcauggauaaaaguauauuauaaca

SEQ ID NO: 4122009 - RNA, 65 nt, Human
uguuacuuaucucacgugaugcaaguaaaaaucucuguuaucaugacaucugaguuuaaguaaca

SEQ ID NO: 4122010 - RNA, 101 nt, Human
uguuagaaaaggaagaacacaugcgauagagagguaggaaauagaaucaacaugguuagaucugucauuucauuauuucauguguuuuacuacaguuaaca

SEQ ID NO: 4122011 - RNA, 73 nt, Human
uguuagaaugcucugagugaaaguuggauguguucuucuacaaauaaaaugugugaacuucagagcaucgaca

SEQ ID NO: 4122012 - RNA, 97 nt, Human
uguuagagaucugacuggcagcuucaggacacucggaagcaagggggacacucuauuaaggaucgcugaaguaugcccacaugucagguuucucuca

SEQ ID NO: 4122013 - RNA, 123 nt, Human
uguuagccuuccauaacacauuaaacauuuuauguauggauggcugaaaguauugagaaaagcugaaaaacuguuagccuuccauaacacauuaaacguuuuguguauggauggcuuaggaca

SEQ ID NO: 4122014 - RNA, 83 nt, Human
uguuaggcuggugcaaaaguaauugcuguuuugccuguacuuuuaauggcaaaaaauccaacugcuuuugcaccaaccuaaua

SEQ ID NO: 4122015 - RNA, 68 nt, Human
uguuaggcuuguuacaaaacagucaucucuugcaaagcaccugaagguugauguggaaagucugagca

SEQ ID NO: 4122016 - RNA, 83 nt, Human
uguuagggcagauauugggaaagaaacugacuaauugacccaggcuuucauuucaggcucaguuugguuuccauugccuaaca

SEQ ID NO: 4122017 - RNA, 84 nt, Human
uguuaguauuccuggauuccuaaccuuucacacgugcagccaucacugugggaacacugaggacuucaggaauggcucuugaca

SEQ ID NO: 4122018 - RNA, 87 nt, Human
uguuauaauuaauucaguagaaggggggcuguaguucucaaaugaucauuacagccucacauuuacuuacaagaguaaauaaugaca

SEQ ID NO: 4122019 - RNA, 89 nt, Human
uguuauacccuuugucaagcacagaagaaauaauggaaacuacauucaccuuuauuuucuaugcuugauagaacuagugguguauagca

SEQ ID NO: 4122020 - RNA, 74 nt, Human
uguuauagccuuauaugaacuauuagagcaccugccaaaucugcucucagugcagagaggcuaucuuuccaaca

SEQ ID NO: 4122021 - RNA, 67 nt, Human
uguuaucacucacagugcuauugacucaguccaggcacugaacuggacaccaggcgcucugagaaca

SEQ ID NO: 4122022 - RNA, 81 nt, Human
uguuaugacaaguguucuucauauauaaaguggaauaguaauggcuaagugacauaauguauaugaagugcuuggcaaaca

SEQ ID NO: 4122023 - RNA, 65 nt, Human
uguuaugcuaagugagaaaagacagucucgaaagguacauacuguaugguuccacuuauaugaua

SEQ ID NO: 4122024 - RNA, 67 nt, Human
uguuauuuaacuuuguagcaugggaaagauaguuccugucaagucauguccacaaaauugaauuaca

SEQ ID NO: 4122025 - RNA, 108 nt, Human
uguucaaagucuggcauuuagaaggugcucagcauacaucuguuaaaugaaucagguugagaaugaagcuggguggugcugagccuugcuguuauugcugcgggaaca

SEQ ID NO: 4122026 - RNA, 78 nt, Human
uguuccacugguuuuggaaaucaguacaagcugcuauccaguuugcaguaccucaguuccaaaaagcuuagugaaaua

SEQ ID NO: 4122027 - RNA, 55 nt, Human
uguuccaggcugcaagcaucaugggaucaucugauauacagcaaagucuggagca

SEQ ID NO: 4122028 - RNA, 74 nt, Human
uguucccacgugucuacugugcauuugaagaugaagauuauuuauguuuagagagcacuguagacacuuagaua

SEQ ID NO: 4122029 - RNA, 77 nt, Human
uguucccaguguucccugaacauauguugucuugagcagcuguguguccugggagcccuuuuguuaccaagggaaca

SEQ ID NO: 4122030 - RNA, 106 nt, Human
uguuccuaguagcccuuuagccauagagaugguagaacagucauaaggacuuguuuaauuccuuauaucuuuuuacaucucuccuucggguguuacuaccauaaca

SEQ ID NO: 4122031 - RNA, 56 nt, Human
uguuccuguuuaaugugcucaucauaaugcagugaaugacacuccagcggagaaca

SEQ ID NO: 4122032 - RNA, 76 nt, Human
uguuccuuuaaaauaauggugacuauauuguaucuaaaaauaaauaucaaaagaucaaagucccuuagugggagca

SEQ ID NO: 4122033 - RNA, 130 nt, Human
uguucgaugguuugggggugcuggugguccaggugccugggcaugagcuuguuggagucgaugcccuggcugaacagcaacugcucaauguccaggcucagguacugcuguuuccuccuggucaagggca

SEQ ID NO: 4122034 - RNA, 66 nt, Human
uguuuguuuguuuggaauauguggccuguguggaacuggacacugaagucacuaagcaggcaggca

SEQ ID NO: 4122035 - RNA, 79 nt, Human
uguuuuaaaagcagcucaagacuuaaauuugaguugaaaauuucuuauagcaaaugugacuuuugggcuucuaaaaaca

SEQ ID NO: 4122036 - RNA, 95 nt, Human
uguuuuaaauaguagggcuuacuuuucuauucgauaugugugguuuauaaaaacucgccuguauggagaagcaaggccugugauaaucuugaaca

SEQ ID NO: 4122037 - RNA, 96 nt, Human
uguuuuaauugaugguagaaaauuauugaaaauggcucuaaaaauaaauucaguagaguucauaauaauuuuaaaauaagcauuaaugauaaaaca

SEQ ID NO: 4122038 - RNA, 60 nt, Human
uguuuuacugaaaaugauuacuugauaaaaacauugucuagaaauagguuucagaaaaca

SEQ ID NO: 4122039 - RNA, 69 nt, Human
uguuuuauauauauguaauauguguguguauauauauauacacacguauauauacguaugugcgaaaua

SEQ ID NO: 4122040 - RNA, 60 nt, Human
uguuuuauuaaagguguuuuucuaggaggaaaaucuguagaaaagcaagggaguagaaca

SEQ ID NO: 4122041 - RNA, 80 nt, Human
uguuuuauucaugugagugaaaggacagaaaauuguacuuaauacugcacagaucugucaccauucagcuugaauugaua

SEQ ID NO: 4122042 - RNA, 70 nt, Human
uguuuucagaaccauuaguucauuauugcuuucuuuaaaagaaggcaacuguuugauaauguugaaaaua

SEQ ID NO: 4122043 - RNA, 64 nt, Human
uguuuucauguugcagcucagucagaaauauuuuuuacuggccuuuugcugaacaaggaaaaua

SEQ ID NO: 4122044 - RNA, 90 nt, Human
uguuuuccacuuucaacuguacgcuucauaagacauucauuauuucccaagauguucaaaaaagauacagugaaagggcauugggaaaua

SEQ ID NO: 4122045 - RNA, 119 nt, Human
uguuuuccgagucugcucugcggauagugagagaggaugcccucauauuuuaccaugagaguaaaguguuagugaaagguguuuauuucugcuuugccucagagacagagcuuggcaca

SEQ ID NO: 4122046 - RNA, 72 nt, Human
uguuuucugucacuuuuuuggaaucugugguuuauuauuauaauaagauuaacgaaaaagugacaccuaaca

SEQ ID NO: 4122047 - RNA, 64 nt, Human
uguuuucuuccuuuuaggucuguuaugcuucuguuauuggcaggacagccagaggaggcagaca

SEQ ID NO: 4122048 - RNA, 74 nt, Human
uguuuucuuuuaucuuuauuuugauaugauuucaaacuuauagaaagauuggaagaauaggauagaagaacaca

SEQ ID NO: 4122049 - RNA, 86 nt, Human
uguuuucuuuuucuucuuaguacauuugggacaauaagagaagacuuauuugcuuuuuaauguuccaugugagauuuaagggaaca

SEQ ID NO: 4122050 - RNA, 63 nt, Human
uguuuugggguauuuucaucauuuuaaucuggaugauguuauuuucagaaacauccuaaaaca

SEQ ID NO: 4122051 - RNA, 67 nt, Human
uguuuugggugugcuaagagcacuuucaaugauucuaaauugagaugagcuucagacacacaagaca

SEQ ID NO: 4122052 - RNA, 56 nt, Human
uguuuugguuuucaccgagucccccuggccagaguggagcuaugaaaaccaaagca

SEQ ID NO: 4122053 - RNA, 62 nt, Human
uguuuuguuagcaaggauaauuaugauucagaugcuguaauuuuaaccuugacuaacaugca

SEQ ID NO: 4122054 - RNA, 85 nt, Human
uguuuuuaaagccagauauacagcagugaauaagauaaaugaaucauuuugagcuuauaauugauguguggauauggcaaaagca

SEQ ID NO: 4122055 - RNA, 79 nt, Human
uguuuuucuagagacaucaucaugaaucauaacuucacuucauuauggucccugaucuaaugucucaucagagagguca

SEQ ID NO: 4122056 - RNA, 72 nt, Human
uguuuuuuagagauggggucucucuauguugcucuagccugugcaacagggaaaucucagcucuaaaauuca

SEQ ID NO: 4122057 - RNA, 79 nt, Human
uuaaaacucgaacuauauuuuucugagcaguguuuggagaaaagccuugcugaagaaaaaauauguuagauuguuuuga

SEQ ID NO: 4122058 - RNA, 85 nt, Human
uuaaaacugacggucuucauucucauagcccugggaagacauuuagguguuuuaauggggguugcagaaguacucucaguuuuaa

SEQ ID NO: 4122059 - RNA, 57 nt, Human
uuaaaagaauccuguuauccucaggccucugccuuguaggaagauccuuucuuuuaa

SEQ ID NO: 4122060 - RNA, 63 nt, Human
uuaaaagagacuuccuuuguuuccuagccaagggcacauaagacaaaagaagcugccuuuuaa

SEQ ID NO: 4122061 - RNA, 95 nt, Human
uuaaaaggaaaagugaucugugcagauagugauuucagaagcguccuuugaagugcuucuguuuauucugcaggauuuucucacuugccucuuga

SEQ ID NO: 4122062 - RNA, 87 nt, Human
uuaaaauaauugugggcagugugauauugacccuugcaagccacauucuugcccugcagauacacugcugccacacagcuggguuag

SEQ ID NO: 4122063 - RNA, 57 nt, Human
uuaaaaugguaccuauagaugucuaggucuuauagaaguguuuggggaucauuuuaa

SEQ ID NO: 4122064 - RNA, 125 nt, Human
uuaaaauuauaugggagcucauuaaaaaauauauaugccaggaugccucccaggagugagccugauugaauaagccugggaaggucuuagcaucuauauuuuaacaagcucaccaauaauucuga

SEQ ID NO: 4122065 - RNA, 67 nt, Human
uuaaacaauuaagacuauugauauuuacaaauauuuuuuagugggcaucagugucuuauguguuuga

SEQ ID NO: 4122066 - RNA, 55 nt, Human
uuaaacaccaagugcaaaccacuguucuaggcacuggguaccggaagguguuuaa

SEQ ID NO: 4122067 - RNA, 79 nt, Human
uuaaacagcuauuuuuuacacaucuguuuggcccuuuugcacgacaugcagucaggagguguaacgaauacagguuuga

SEQ ID NO: 4122068 - RNA, 68 nt, Human
uuaaaccaccagaagccauuauugcucaugacccugugaguugcauggggacuuccuggcugguuuaa

SEQ ID NO: 4122069 - RNA, 65 nt, Human
uuaaacugcagacucaguguucagaaugggaaaacuauaaaguucgagaacugagaugcguuuga

SEQ ID NO: 4122070 - RNA, 74 nt, Human
uuaaacuucugagcucaagcgauccucccacuuggaccuagccaggugcugggauuauggguauuagaguuuaa

SEQ ID NO: 4122071 - RNA, 61 nt, Human
uuaaagagaacucaaugaaugaauaugugaaugaaugcaugagucagugaguucuccuuga

SEQ ID NO: 4122072 - RNA, 89 nt, Human
uuaaagcuguaaacuuuccccaagugaauguuugguagcaguguucuaucucugcgaccacuaugcccuguucacuuuuacgguuuuaa

SEQ ID NO: 4122073 - RNA, 66 nt, Human
uuaaaggcuaugauauuauugagacaagcauaaaaaugagugucuucuucauucaucgguuuuuaa

SEQ ID NO: 4122074 - RNA, 68 nt, Human
uuaaaggggaguuagugauaaaaccaaggcagcacuuuuguguaucaaagcacagacuucaccuuuga

SEQ ID NO: 4122075 - RNA, 84 nt, Human
uuaaagugguaaaugauaccgaaacugcccggauuaucacuagauauucaggcaaggcuggucucauacucugguucacuuuaa

SEQ ID NO: 4122076 - RNA, 83 nt, Human
uuaaaguuugacuguacucauugaacugugcuugaucauuaguaauggcagcuaucuuuaaugagaugcaugucacccucuag

SEQ ID NO: 4122077 - RNA, 80 nt, Human
uuaaauauuagacaacucaaucacacucugcucuuuguagguaagacagacguagugugagaguaaaaugaaauaauuga

SEQ ID NO: 4122078 - RNA, 77 nt, Human
uuaaauauuggaaaacacaagugacugagcaguauggucacuuuacagcuuuucauauuuguguuauauaauuuuga

SEQ ID NO: 4122079 - RNA, 69 nt, Human
uuaaauuuuaucugcugucuguguaaacagaccaaguucucacucuauguagcagcagaaagaacuuag

SEQ ID NO: 4122080 - RNA, 60 nt, Human
uuaacacagggggagacaaaguuguaguuuuucuacuccuuugccuucacuccuguuuaa

SEQ ID NO: 4122081 - RNA, 83 nt, Human
uuaacagauuguaauaugguuuuucuagagcauacauugguaauauagcuuuugcucuagaaaaccaauauuacaugaguuaa

SEQ ID NO: 4122082 - RNA, 63 nt, Human
uuaacaggaguaacucuagaaagcugacccugaggauucuagaacuguuuacucacugauuaa

SEQ ID NO: 4122083 - RNA, 55 nt, Human
uuaacauuguccuuagcagauuucuaauuuuugguuuguucaggggcaaaguuaa

SEQ ID NO: 4122084 - RNA, 71 nt, Human
ugugagcuucaucuauugccagguguccuauagaugucuuagacacuucaaaugguuggaaaaugcucaca

SEQ ID NO: 4122085 - RNA, 58 nt, Human
ugugaggcgaggccagugagcuuuccuggugaggugccacuggcaaccccgccucaua

SEQ ID NO: 4122086 - RNA, 61 nt, Human
ugugagggcagaggcugugggucgcuguggagcaacuucaguguuuacucccugcccucca

SEQ ID NO: 4122087 - RNA, 66 nt, Human
ugugaguuacauuuggugacacuucaaacuaauuuugaagauucacugaguauaaucaagaucaua

SEQ ID NO: 4122088 - RNA, 64 nt, Human
ugugaguuugugcaauggugucaccuacgguaugaauacuggaggaacaauugauaaacucaca

SEQ ID NO: 4122089 - RNA, 69 nt, Human
ugugauauaaugacagagcacugaacuuggggacuuuggcucaauucacagcucugcuauuuaugcaca

SEQ ID NO: 4122090 - RNA, 80 nt, Human
ugugauauugcuaauuuaacuaccuuguuuaaaagcauuagugaaguccaguguaauaagugguauaaguuggggucaua

SEQ ID NO: 4122091 - RNA, 81 nt, Human
ugugaucagaagacauucucauaaggauucauauugaaugaaauaggauucugaucuauaguguuauauuucugaugcaca

SEQ ID NO: 4122092 - RNA, 87 nt, Human
ugugauccaaaucaugucagaagaacagacucacauguggucaaaaauguguuggaucggguacucugguguuugguuuggaaaaca

SEQ ID NO: 4122093 - RNA, 59 nt, Human
ugugauccaagaucaaauuaugccauagcuuugcaugcacugagagauguuggaucaua

SEQ ID NO: 4122094 - RNA, 56 nt, Human
ugugaucugaaggagcucugaacccuccagugagacaucagcccaucagacucaca

SEQ ID NO: 4122095 - RNA, 63 nt, Human
ugugaucugaaucaauagaauaacucaucauuacucugaguugcgaggcaagauuuagacaca

SEQ ID NO: 4122096 - RNA, 62 nt, Human
ugugaugcugacuguuuaguggagugauaccaaacaaccauggacaggguuucagggucaca

SEQ ID NO: 4122097 - RNA, 59 nt, Human
ugugauucagaauaugaaugguauuuaauuucuuugaaaucauuaauugcugagugaca

SEQ ID NO: 4122098 - RNA, 66 nt, Human
ugugauucaguguggcccaugaagaggauaaaguuaaaugccuuugauacggugacacgaaauaca

SEQ ID NO: 4122099 - RNA, 70 nt, Human
ugugcaaucuguugacuggacuucauagguuuguuaagaaugucagggaggguccaucaaggacugcaca

SEQ ID NO: 4122100 - RNA, 123 nt, Human
ugugcacacagcagcugcgugaucuauggaguuggcugagcaguuuggcgcguuggucagcaacuuccugcagcuucucagcccacgcagauccucaggucugcagugcugggcuuguguaua

SEQ ID NO: 4122101 - RNA, 60 nt, Human
ugugcacagcaaguugguagugagauaucaccugcugggacacugaagacuucuugcuca

SEQ ID NO: 4122102 - RNA, 66 nt, Human
ugugcacaugguagguauugaguaugugaauuauugaacauguacuuuagauaaauuaugugcaca

SEQ ID NO: 4122103 - RNA, 65 nt, Human
ugugcaccugguaaacacuuuguauaugguacuuaucauuauuaguguugauauuaggauggaca

SEQ ID NO: 4122104 - RNA, 87 nt, Human
ugugcacgggcgugcaaagacaugugcaggcacauuugaaugugugcgacauagugugcacauaugugucugcacaugcccuguaca

SEQ ID NO: 4122105 - RNA, 66 nt, Human
ugugcacugaugaggcaauagguacuaugcugagugcguuacaaggauuguuucauuuaauguaca

SEQ ID NO: 4122106 - RNA, 130 nt, Human
ugugcagauuugauccuaucaucauguuguuauuuggcuguuauguagacuucauuguuuacuugcuuuauagugucaauggucuauguacucgaguauauuuuugugauggccaguauuggucuguaca

SEQ ID NO: 4122107 - RNA, 61 nt, Human
ugugcagcccaugggggauagagaugaauaaacugcaguuucugcccuccaggagcucaua

SEQ ID NO: 4122108 - RNA, 125 nt, Human
ugugcaggagcccuggcccuggccccugccucuccccgacucuggucagcgccuggagcgagccucaggugcuguuggcagcgggcagagaucaggcaggggcaucccagggccaggcucugcca

SEQ ID NO: 4122109 - RNA, 79 nt, Human
ugugcaguguguccucagaauauauaccuaagaguagaauugcugaauuguagcuauguauucucagauuuacuaagca

SEQ ID NO: 4122110 - RNA, 126 nt, Human
ugugcaguuuggcgaagccgugcagccaccgcacccugugccuuuguagcugugccugccugugggcaaagcgcacucccaaggccaggcugccccaggugcaggccucuuugaccucacugggca

SEQ ID NO: 4122111 - RNA, 73 nt, Human
ugugcauggaggauaauaauugagaaagugcauaagaugaaauaauugcuuccuuaggucuucuuggugcaca

SEQ ID NO: 4122112 - RNA, 71 nt, Human
ugugcauggcugcugcagagcuggaggggguaaagcaacaguguuuucucaguugugcgagcagcauuaca

SEQ ID NO: 4122113 - RNA, 82 nt, Human
ugugcaugugugugguuugcauuaugauuuugugugauuauaaagauacguuugugcaagagauucaaaccauaaaggcaua

SEQ ID NO: 4122114 - RNA, 56 nt, Human
ugugcauguucucauuucuaacuuauuuuuaaugauagagaugagcugauagcaua

SEQ ID NO: 4122115 - RNA, 69 nt, Human
ugugcauugcgaugcagacgaccauauagauauauuaacauuuuggcaagguuuuucuuugcaggcaca

SEQ ID NO: 4122116 - RNA, 69 nt, Human
ugugccaugaggcucugauaugugcccugcacuguggggggugccaaaaauuagagcuacauggcuaca

SEQ ID NO: 4122117 - RNA, 93 nt, Human
ugugcccucuuccuggccagcugagagccccugcccugugucugccuccaccagccauagggcuccagcugucaguugccuugaaagggcaca

SEQ ID NO: 4122118 - RNA, 65 nt, Human
ugugcccuuugugucuggcugggguggaaagccaugcugccauccacagucagaacgggccuaca

SEQ ID NO: 4122119 - RNA, 70 nt, Human
ugugccgucagugccuuauacagagccaaccacaucauaggugcucaggaaauaaugucugugcggugua

SEQ ID NO: 4122120 - RNA, 61 nt, Human
ugugccuacuggagcuugcagugagccaagaucgugccacugcaauccagccugggcgaca

SEQ ID NO: 4122121 - RNA, 72 nt, Human
ugugccuagugauacaguuaauuaacauuaagggguaggccccuuguauuaguuugcugucgcuauauaaca

SEQ ID NO: 4122122 - RNA, 59 nt, Human
ugugccugcccugaaaacugcccauggcccugggugaggcagcauuugggcagggaaca

SEQ ID NO: 4122123 - RNA, 75 nt, Human
ugugccugucccgcauucuggucacauaugagccuucugcucuuuugcaaagacugaauugaugggaugggcuca

SEQ ID NO: 4122124 - RNA, 56 nt, Human
ugugcgaaaaccacaguagagguuuugugaagaagagcauuuguggcuuuugcaca

SEQ ID NO: 4122125 - RNA, 91 nt, Human
ugugcgcaucugagccuccuuuuccucaucuuuaucaaggaauuaauaauucccaccugaaaaagguagggccugaggcaaaugcgauaca

SEQ ID NO: 4122126 - RNA, 74 nt, Human
ugugcgccaauuugugacuggguucgugccuucaggaauucucuguagggcauguaagucaccauauuguaaca

SEQ ID NO: 4122127 - RNA, 61 nt, Human
ugugcuagagcuuguuucaguccuggcccagcugguuggaauuugugacuggcucugcaua

SEQ ID NO: 4122128 - RNA, 55 nt, Human
ugugcuaggugcuuguucuccucuggcaaccacagagcccagugacaucagcaca

SEQ ID NO: 4122129 - RNA, 57 nt, Human
ugugcuauuuuugcauauguguguguauauccacgcacauguacacauguaugcaca

SEQ ID NO: 4122130 - RNA, 73 nt, Human
ugugcucugacaguaagaccuuaccagccugcugcucucauuccuguagguugauauagaugcugucuggcca

SEQ ID NO: 4122131 - RNA, 66 nt, Human
ugugcugaagagaggaucuggguggagaucuccuuagugugccccauccagcccucaugucgcuca

SEQ ID NO: 4122132 - RNA, 56 nt, Human
ugugcugcaugacuugcuccugagcauaucugagcuaugaaaguccugcaugccca

SEQ ID NO: 4122133 - RNA, 68 nt, Human
ugugcugcccagccauaggaaaauguuuggguuucucauauuucaaaauggcuggagccugcaguaca

SEQ ID NO: 4122134 - RNA, 80 nt, Human
ugcuggggcaggcugggggcuggcuaggggcacggagagacaggcacucagcccagcagucuuagccugcagcccagaca

SEQ ID NO: 4122135 - RNA, 55 nt, Human
ugcugggguauggguguggccuggugggggcucaggggccaucucugccccagca

SEQ ID NO: 4122136 - RNA, 63 nt, Human
ugcuggggucugugaggagggcugcaccggcugugaggccugacugaccugauucuaauugca

SEQ ID NO: 4122137 - RNA, 81 nt, Human
ugcugggguguuuuggccuggguuuuuguugugcuucuuuggcugcaaacugggcugaucuuuagccaagacacaccagca

SEQ ID NO: 4122138 - RNA, 68 nt, Human
ugcugggugacaagaagagcauuugcaggguuucugguucuagugccuucauucuucccacccuggua

SEQ ID NO: 4122139 - RNA, 88 nt, Human
ugcugggugaccacaacuuguuuagaagagguuacuuagguauuuuuuucagaaaguaagagcucuugaacaauguggaaaucuagua

SEQ ID NO: 4122140 - RNA, 61 nt, Human
ugcugguagaguagguacaggaggggcccgcugcccucagcugccaccugcuccaucagca

SEQ ID NO: 4122141 - RNA, 86 nt, Human
ugcugguaucuuuucuauuauuaucuuugaaugggacucauuauugucugagcuauuuauuaaaauagugaaggaaaagaucagua

SEQ ID NO: 4122142 - RNA, 74 nt, Human
ugcugugcugcacguaauucuuacuguauaaagcucaaaauuuacaucagcaagaguguauguguggaucagca

SEQ ID NO: 4122143 - RNA, 129 nt, Human
ugcuguggccaaagacuucccucugcuccugggauccuguguugcuacuggaggaaacagggguaccaaccauuccgagguggccacacugggucacugccuuagcagagggcacacugagccacauca

SEQ ID NO: 4122144 - RNA, 120 nt, Human
ugcugugggccucgcagaccaugugaagggcuuaggauuuugcugugccugugauaggaagccacugggggaucuugagcaacuuccaauuccagcgucucucugggagguccagcugca

SEQ ID NO: 4122145 - RNA, 61 nt, Human
ugcuguguagaagagcuauccucauggcuuaagaauagaaagcuaagucauuuugccagca

SEQ ID NO: 4122146 - RNA, 80 nt, Human
ugcugugugaguuuaacacuuggagaaaaggaagcaacacaauugcacacuuugcugccagugccuaaacuaacagugca

SEQ ID NO: 4122147 - RNA, 69 nt, Human
ugcuguucggcagcaccuggagcuagaccagcuuugaugaaugggagcccaugcuguugggcccgagca

SEQ ID NO: 4122148 - RNA, 130 nt, Human
ugcuguugaguguagaaaauaaaaugugugaauuucuuuaucuugaguauugagauucuccccuuagaauaaaacaagaauuuuucucucaguguaaaaaugucaaguuuuauucuugaaaugaauagca

SEQ ID NO: 4122149 - RNA, 86 nt, Human
ugcuguugcgauuagaugaugacagcuagcuggcuuuuaaaauugaucaggaaguauucuggcagucauucaguguuguaauagca

SEQ ID NO: 4122150 - RNA, 55 nt, Human
ugcuguugguccucuuuggaccuggugaggccaccaggagccauugacugcagca

SEQ ID NO: 4122151 - RNA, 76 nt, Human
ugcuguugucacugcugguugcacagagcuaggaacugacaagacaucagagcuucugacagcugcugcaaaagca

SEQ ID NO: 4122152 - RNA, 66 nt, Human
ugcuguuuagcaauaaaaacacaugaguacaaucagcuuacuguaacccauuauugcugcauagua

SEQ ID NO: 4122153 - RNA, 100 nt, Human
ugcuuaaagauucauugccacaguuugcauaggaaaaacacucuuuuagaagacaaguuaguuuuccuaaguaagcaguaugaauaugaauuuagaagca

SEQ ID NO: 4122154 - RNA, 63 nt, Human
ugcuuaagcaaaguuuauaaggcucuuggugucccaaccaagaauacaggcuuuguauaggca

SEQ ID NO: 4122155 - RNA, 78 nt, Human
ugcuuagaaauuaaugugagcaagugagccuccucuuuuuaaagccauuuuggauugagaguauuuguuuucugagca

SEQ ID NO: 4122156 - RNA, 71 nt, Human
ugcuuagaguauucuuguauuuauaguuuucucuaugaagggaaugaguauucuuuauaggauucugggca

SEQ ID NO: 4122157 - RNA, 56 nt, Human
ugcuuaguaggcuaucugaaauauuaacuauauuaaggaacaaagccuuuugagca

SEQ ID NO: 4122158 - RNA, 99 nt, Human
ugcuuauauauaguuuaagaaaguacaguuucguauggaagaccagauuuuacuggucucacacauugugcuuuaauugaacugccaaccaauaaugca

SEQ ID NO: 4122159 - RNA, 66 nt, Human
ugcuucaagacaauuggcccaucuuuacuccaaguggcuguuaaugguuuauguuguugugaagca

SEQ ID NO: 4122160 - RNA, 76 nt, Human
ugcuucacgacaagauucaaguuaagcauuucuggcaaggucuugugcaauugacauugaaucagaucaugaggua

SEQ ID NO: 4122161 - RNA, 93 nt, Human
ugcuucaggggacaacaacgcacuucucgggggcgcugucugaucauuuagguggacuguugcccaccaggagacugucaguuuccuggagca

SEQ ID NO: 4122162 - RNA, 58 nt, Human
ugcuucaguaguaaauuguuauugaagcuucagucaauagcaaauugcuauuaaggca

SEQ ID NO: 4122163 - RNA, 63 nt, Human
ugcuuccuuggaaauucugacuucagggucuuaaauaguauuggggcacuauuucuggaagca

SEQ ID NO: 4122164 - RNA, 66 nt, Human
ugcuucucaggugaggcugaggcuguuggucuggagaccacaccuuaagaaacacuggacgaagua

SEQ ID NO: 4122165 - RNA, 77 nt, Human
ugcuucuccaguauuugcuguuuuccuuccccacugggcaaagccaggggaucugaguaggcagaagcugaagagca

SEQ ID NO: 4122166 - RNA, 129 nt, Human
ugcuucugagucgggaggugcauggguuggcggcaggaggaagcgucauggagccucuguuucugagcccauguguugagauuccagccucuagucagaaaauuccccuugcagcuucugccuggucca

SEQ ID NO: 4122167 - RNA, 58 nt, Human
ugcuugaacaacauggccuuuuccuaccucuugggauucugccuuguugcuucaauca

SEQ ID NO: 4122168 - RNA, 89 nt, Human
ugcuugaugacaccuacuuaguaggcauuuaagauggauaagguuaugauccucaugcaguugaauguuuaguaggggauuaacaagua

SEQ ID NO: 4122169 - RNA, 77 nt, Human
ugcuugcacaggcuuuauggagugacacaaugggaaaguccccuuucagucauuuacaugaaguugauuccacagca

SEQ ID NO: 4122170 - RNA, 75 nt, Human
ugcuugcauaacuuucuucacccuugcuguuaaagucaaaauaucaggggaaaaggagagaaaauuaugcaagua

SEQ ID NO: 4122171 - RNA, 83 nt, Human
ugcuuggcauuagccgaggugaggccagcagagggcugaugagccggggcuugcccucuggcagccuuggcuggaugccagca

SEQ ID NO: 4122172 - RNA, 98 nt, Human
ugcuuguagaccauccccccagaagaugguaugugcuccuggggaagucaagaauggcaucucaguggacgugucugucuuaggucaguuuacaagca

SEQ ID NO: 4122173 - RNA, 58 nt, Human
ugcuugucccucuuuaugauggcauuuaccccuuugcauaaagaugugggggccagca

SEQ ID NO: 4122174 - RNA, 130 nt, Human
ugcuuguuaggacaccaccagaaacaccaggccggguuuuuccuuucaaauuugggauccccuggaggguuaggagguaacaacugaaaugagaaagggguuuaauguguuucaaauguccauuaaugca

SEQ ID NO: 4122175 - RNA, 73 nt, Human
ugcuuuaagccaguuccacuuuuuuaucccugcucugauacagucagaggacaauagaauggaaaggcgggca

SEQ ID NO: 4122176 - RNA, 63 nt, Human
ugcuuuagggaauagaagaucugaaagacuaucauguuuuuuaauuuuccucuuccuggagua

SEQ ID NO: 4122177 - RNA, 60 nt, Human
ugcuuuauaaccauuucuguggguucagcaaucaccaaccagagagagguaaauugagca

SEQ ID NO: 4122178 - RNA, 86 nt, Human
ugcuuuauaauuauucuuuaaacauauauguuuuauacagccuucuaaauaaguaauguuugacaauguguugaaagggaaaagca

SEQ ID NO: 4122179 - RNA, 107 nt, Human
ugcuuuauacaacuuugaaagggaagaguuccucaauguaguuuuuguuuguaacaucauaaaugcuacacaggaauucucauuuguauucaguugguguuaaggca

SEQ ID NO: 4122180 - RNA, 61 nt, Human
ugcuuuauaucucucuucuuagggaauaugcaaacuccccaagaagaaaaggcauagagca

SEQ ID NO: 4122181 - RNA, 55 nt, Human
ugcuuucagccagugucuggaugcuaaaaaucagacugacuagucaaugaaagcg

SEQ ID NO: 4122182 - RNA, 119 nt, Human
ugcuuucauccccaucuggcauucaguguuccagguccuuccccaccucuaccccuagcaccugccuucucaaggacaugaaagcuagaauuugaaaugaaauugaggacugauaagua

SEQ ID NO: 4122183 - RNA, 69 nt, Human
ugcuuuccugauucaguggcaggcuggaccccaguggcagggcaagugucuguggugagcaggagagua

SEQ ID NO: 4122184 - RNA, 87 nt, Human
ugcuuucugcuuccucaggcuuguuauuuuauuaucauuuuaugaaauauccugugacuguaaaauacauaaguauugaagaaagua

SEQ ID NO: 4122185 - RNA, 61 nt, Human
ugcuuucuuuguggcacaaauugcuuuucucaaaagaagaaauuugcuaagcaaaggagca

SEQ ID NO: 4122186 - RNA, 59 nt, Human
ugcuuugcagugucuaacagaaaugggugcuccauaaauauuuguagaacugaaaagca

SEQ ID NO: 4122187 - RNA, 72 nt, Human
ugcuuugcuucuuucaucuuccccuugaggcuggcucccaaggccauacaaugaaaggggccugaaaaagca

SEQ ID NO: 4122188 - RNA, 68 nt, Human
ugcuuugugaaguugauuguuaucgucauguccaagaggaggucugacauuuuaucaauaucacagca

SEQ ID NO: 4122189 - RNA, 55 nt, Human
ugcuuuuaagaacaaugcugcuaagaauauucuuguaagcauugcuuagggugua

SEQ ID NO: 4122190 - RNA, 75 nt, Human
ugcuuuucuuuguuguuaucacaucaugggacucuugcacaaugcaugauggcucuccauuaacaagggugagca

SEQ ID NO: 4122191 - RNA, 68 nt, Human
ugcuuuugcugcauuccuugguuuaaaacaagucaggggccauuccagauucaaggaauggggaagca

SEQ ID NO: 4122192 - RNA, 75 nt, Human
ugcuuuugucacccaggcuggagugcaguggcgugaucucagcucacugcaaccucugccucccggguucaagca

SEQ ID NO: 4122193 - RNA, 92 nt, Human
ugcuuuuuuaaauugugccagcugagaaguguaaagugauauuucauuguuauuuuaauuugcauuucucggacuguuagugaaucugagca

SEQ ID NO: 4122194 - RNA, 103 nt, Human
uggaaaaagaucugaaaacacaaucuuggugcagaagaaagcagucauuuccuuaaugggaauuacuguaauuuucuacagcagacauucagagucauauccg

SEQ ID NO: 4122195 - RNA, 104 nt, Human
uggaaaaaugcagcauuaucagguuauaguuuuggaaaaucauagaugaaaacaguagacauuuuaagacauauacccuauauaaugcucagcaaauuuuuuua

SEQ ID NO: 4122196 - RNA, 89 nt, Human
uggaaaacucugcgcgggugagucagagugccagcgccaaguuuccuggcaugcaagaggaggcucccccgcucaggcagauuuuuuua

SEQ ID NO: 4122197 - RNA, 130 nt, Human
uggaaaagaagggcuuucuuuuaucuguuugaaaguggucaccuucucauuucaaggauuggccucauaaauuccaaggaaggacaaagaagauggcuaccagcaggagggagacagcagaagaaaggaa

SEQ ID NO: 4122198 - RNA, 65 nt, Human
uggaaaagcugacuguacuaaauaaagguggucaguugccuuuaucugauauucagcgauuucua

SEQ ID NO: 4122199 - RNA, 58 nt, Human
uggaaacaaagucauaagcucagaguucuccuuuguuccauucuguacuuaguuucca

SEQ ID NO: 4122200 - RNA, 84 nt, Human
uggaaacucuucucugaagugucauuuacauuucuacuugcuugcaugguggaaauguuucuugagcucagaacagaaagucca

SEQ ID NO: 4122201 - RNA, 111 nt, Human
uuaaauauauuuuuaccacaauaaugacuacaaaagcacuggguauuaauauuguucuuauugcugcuauugccauugcuuuuaugauguauuaggucuaaaucuauuuga

SEQ ID NO: 4122202 - RNA, 74 nt, Human
uuaaaucguugggagcaaauaggaaagaggaagagugggagcaaagccucuuccgguuugcuuuuaaauguuaa

SEQ ID NO: 4122203 - RNA, 79 nt, Human
uuaaaugagaauaauuuucauaguaaugaugaaagccaacauuaacacagcacuuauuaugggcuaggaacucauuuaa

SEQ ID NO: 4122204 - RNA, 62 nt, Human
uuaaaugugcaaacgugcaaagugucgaaugcagucuggcaaauagcauguaguacauguaa

SEQ ID NO: 4122205 - RNA, 86 nt, Human
uuaaauuacuaaaagcucugagaagcacugcaacagagaaaucuaauaguuuuuuguguauuccagggcuuuuuaaguuuauuuga

SEQ ID NO: 4122206 - RNA, 61 nt, Human
uuaacaaggugacugcauuaaaacauuuauuagucuguuuaugcuuuggcacucuuguuag

SEQ ID NO: 4122207 - RNA, 72 nt, Human
uuaacaauugaauuguacgcuuuacauaggugaauuuuaugauaugugaauuauacuuaguaaagcuguuaa

SEQ ID NO: 4122208 - RNA, 55 nt, Human
uuaacagaugucauuucggcggcggcuggcccacugcugcugggccauuuguugg

SEQ ID NO: 4122209 - RNA, 119 nt, Human
uuaacauaguuauuuugaugaauuuuuuaagaagugauuuuccucauucuguacuuucuuccaaagagugaaaaagaaaucgauuuugcugaguuuuuggaauaaaucaaauauguuag

SEQ ID NO: 4122210 - RNA, 84 nt, Human
uuaaccuuuuguuuuguuuuccuugcucacuuugugcaauagucacuagagucaguuagcgaauacuuaacaaauauugguuga

SEQ ID NO: 4122211 - RNA, 75 nt, Human
uuaacugcaccucuagguccagcacgguguagcuugaccuaucuuaagcaccucauguggaccagguauauuuaa

SEQ ID NO: 4122212 - RNA, 59 nt, Human
uuaacuucaacacucucuuguaacauguuacuuucuguuauaggugauguugagcuuga

SEQ ID NO: 4122213 - RNA, 111 nt, Human
uuaacuucuguauuugggagagcgguugagaaauaccuacuuagcucuggcaauaugacugaguuaaguaaacauuucccagacuguucauaucucaagcucccaaguuaa

SEQ ID NO: 4122214 - RNA, 83 nt, Human
uuaagaaaaaggucacuucauucacugucagguaaugagcccuagagguagaggcugcccaaugguagugucuuuuuucuuga

SEQ ID NO: 4122215 - RNA, 93 nt, Human
uuaagaaaaauucagaaacagcauaccaauguacauauaagauaaauaagcuuaugugguacaguaaguguucuguucugagaaauaccuuga

SEQ ID NO: 4122216 - RNA, 79 nt, Human
uuaagaaucugcuaugguguuuuuagaagauuaacuuuaaaauagauucuucauuaaaaugcacaguauugauuuuuaa

SEQ ID NO: 4122217 - RNA, 106 nt, Human
uuaagacauugaaagagagagugcuauuauuaauguggggcuuugggauaguuuccucaaaauguaaacacaaguaacuggcuucuuuuuguucuuacagucuuaa

SEQ ID NO: 4122218 - RNA, 97 nt, Human
uuaagacuuuggaguucuuuugggauagaauaugcaaccagguuuugaaaauuuggcauagcucuuuguuccuugaaggccaucuaagauguuuuaa

SEQ ID NO: 4122219 - RNA, 61 nt, Human
uuaagagacaggagaaugauguuccaaggacugggaagaaguucagaauucugucucuuga

SEQ ID NO: 4122220 - RNA, 58 nt, Human
uuaagagggugaugcuagcauuuccugugugcagauuuggcagccgucaucuauuugg

SEQ ID NO: 4122221 - RNA, 98 nt, Human
uuaagaugauuuuccuucagcaguagugugguaaauaaauguuuugugguaaauagacaacguauauuucuacauucuagaaaggugaauuauuuuaa

SEQ ID NO: 4122222 - RNA, 80 nt, Human
uuaagauuuaaaugcuuuaagcaaggguucaugguuuaucaugcuacucugccacauaaagguagauauuuaauuuuuaa

SEQ ID NO: 4122223 - RNA, 87 nt, Human
uuaagcaaugagacaaacaugauuuaguauaaugcagggugaauuaucacaugccuguuaggugcugauuauuuuacuuaaguuuaa

SEQ ID NO: 4122224 - RNA, 59 nt, Human
uuaagcaucacagauggcacuuuauagacagcuauuuuuguguacguguggguguuuaa

SEQ ID NO: 4122225 - RNA, 56 nt, Human
uuaagccacucaagagauagagcacuuccccuuugcucuguguuucagcugcuuga

SEQ ID NO: 4122226 - RNA, 70 nt, Human
uuaagccucacagguuuugauuugccagaauauaaaccguguacucuggccccaggaucuguguucuuga

SEQ ID NO: 4122227 - RNA, 73 nt, Human
uuaagcucuugcccuagugccuggugcacaguuaaguguucaagugucagcugguucauagucaagagauuga

SEQ ID NO: 4122228 - RNA, 84 nt, Human
uuaaggaaaaaacuuaacagcagucagugaauauuuaaaggauggccauauuauauaucuuauggauugcuuuaguuuccuuga

SEQ ID NO: 4122229 - RNA, 72 nt, Human
uuaaggauucaugagguuagaguggguccaccuggauaaucuaggcuaauccuccaaucucauggcccuuaa

SEQ ID NO: 4122230 - RNA, 126 nt, Human
uuaaggccuugucuuccugauccacccuugguucuguuuuuuucauguugguucuauuucuagacaggcuccauucaugugaaggcagcauagccauugguuucuucagguccacaugguccuugg

SEQ ID NO: 4122231 - RNA, 101 nt, Human
uuaaggcucuuuuagaaagagagacugagggcuaccccggggcaaacacugcaugacucuggcaguagauccagucucucugcuucagacaugggccuuaa

SEQ ID NO: 4122232 - RNA, 92 nt, Human
uuaagggauaccuuuugccagucuguucucaccucugaguucuaauaacauagaaucaggugaaauagucuggcuacauuaauauuccuuga

SEQ ID NO: 4122233 - RNA, 65 nt, Human
uuaaguaacuuguccaaaugagcaggucauagaacaagcugugcaacucugggcaagucacuuaa

SEQ ID NO: 4122234 - RNA, 79 nt, Human
uuaaguacuggggauacauuagugaacaaaagagacaaagacuguuuuccauaugaagcugaugcucuagauuacuuaa

SEQ ID NO: 4122235 - RNA, 56 nt, Human
uuaaguacuucccuguuggacaagccauuuucccagacaggcaaggagucacuuag

SEQ ID NO: 4122236 - RNA, 96 nt, Human
uuaaguauuuuaagaugucuucagggaagaaaugggacuuuacugaaaaugccuugaauuucaguuucagaucuucuuuggguuaaaaugacuuaa

SEQ ID NO: 4122237 - RNA, 73 nt, Human
uuaagucagaaguuucaaucccagcugauuaauaagagaaccaguugagauugccaaacuuguucagacuugg

SEQ ID NO: 4122238 - RNA, 62 nt, Human
uuaauaagguuuccuaaaguggcaacauuaacucucugucagccacaagggaauauuguuga

SEQ ID NO: 4122239 - RNA, 129 nt, Human
uuaauaauaaagaugaguuuuuggaugcuugagcagaggguagcuguccaccaaaauggauuagccugguccaccggguguggcccuggagggacagcugcucuauguuccuccaggaaccuuguuuag

SEQ ID NO: 4122240 - RNA, 60 nt, Human
uuaauauguugaaauuuauuagacuagcaccuggaucuuaguaagugcucagcaaguuga

SEQ ID NO: 4122241 - RNA, 94 nt, Human
uuaauauuucaggcagaaaaagcaccauuuaucaucuagguacaaugcucuguuacauuauuaccuaugaagaugguucuaaaugaauguuuaa

SEQ ID NO: 4122242 - RNA, 83 nt, Human
uuaauccaauaacaagguucaaauugaaggacuaacagcucaaaaauaagucaucuauggaucucaucuuguuuuuggauuaa

SEQ ID NO: 4122243 - RNA, 56 nt, Human
uuaaucuuuauucuuucuuagauaugcuguaguauauuauguagaguaaggguuaa

SEQ ID NO: 4122244 - RNA, 84 nt, Human
uuaaugcgagcgacucgggugguuuaugagaagugacacuuaauacccagcuucuuguaucugccgccgagcaguuaacguuaa

SEQ ID NO: 4122245 - RNA, 100 nt, Human
uuaauguuaaaagcuacaaggagagacuauaccaguacucuaggaauacauuaaaagggauacuugaguauagucgcuucacaaagucuuaccucauuaa

SEQ ID NO: 4122246 - RNA, 92 nt, Human
uuaauuaauugguuuaugcuguacucuugggaaguggguaaccagacccucuucccaagacuguauugcaagauuagacagggagugauuga

SEQ ID NO: 4122247 - RNA, 73 nt, Human
uuaauuccuacuuccugaaacugaagccguuuaugagaaacaguguguuucagagaggcuguaccagaauuaa

SEQ ID NO: 4122248 - RNA, 70 nt, Human
uuaauuuacauguaguucacugguggcauuaugaaaugcuagagguacaaacuacaucauaagggauuga

SEQ ID NO: 4122249 - RNA, 70 nt, Human
uuaauuuauacauaaucacagggauacugaaagcaaggauucucagaaaucugugaaugugcuagauuga

SEQ ID NO: 4122250 - RNA, 64 nt, Human
uuaauuuuaaccuguuugugucuuugaauacaaaguguaucuuuuguagacagguuauaguuga

SEQ ID NO: 4122251 - RNA, 66 nt, Human
uuaauuuuaugacaguguauuuuaggaauaaaugcauuccccaaaggggcacugacauauaauuag

SEQ ID NO: 4122252 - RNA, 69 nt, Human
uuaauuuucaugacaacucugugagauugguaacaaucacuauucccauuuuacagauguggaaauuga

SEQ ID NO: 4122253 - RNA, 129 nt, Human
uuaauuuuguuaagugccuauauauauaugaaagcauuggcaaaaugagcauuugaagaaauauuucuaugucauauuacuaaugcuggccaaugauguaagguguuauuaaaguauuuuuaauugaua

SEQ ID NO: 4122254 - RNA, 130 nt, Human
uuacaauaauuagcuaaaaagaugugagcacauuauuucaagauaguaaaaaccuggagaagaggggauggggcaggugacuacuauuuuaaaauauuaguguacuaauacuauuuugcuuuuuaaguaa

SEQ ID NO: 4122255 - RNA, 60 nt, Human
uuacaaugggagcccuuggacuuaagaaaaaacauguagugcaaggaguugcuauuuuaa

SEQ ID NO: 4122256 - RNA, 130 nt, Human
uuacacaaaguuguuuauuuauuuuugguccuaagaguuuugcacugugaaugcauuuaaaguauuuugaaauuugagaauuaguguaaugacauuuagacgaacuuaaaauuuuuaacuuuccuuguag

SEQ ID NO: 4122257 - RNA, 59 nt, Human
uuacacaggcacuuaaaaugcaguuuaaugccacaaccacugccaaagccccuguguga

SEQ ID NO: 4122258 - RNA, 63 nt, Human
uuacacaugcuuuguguguauguacaggugucuguuuugaggcguguccaugugcauguguaa

SEQ ID NO: 4122259 - RNA, 78 nt, Human
uuacagauguuuaaaugucacauacaauggcaagucucuccagauuugcuuuacaaugggcauuccguggaucuguga

SEQ ID NO: 4122260 - RNA, 119 nt, Human
uuacagcaauuugacauugcuaugauauucaagcaccaaauuaguaggcucaucucguugaauaggguagagaccaguuugaguguuguugaacuugugugaugaauuacgugguguga

SEQ ID NO: 4122261 - RNA, 78 nt, Human
uuacagcuugauguuuguguguucuaauucuaagaguucuuuauuccagaucauauagaguaguuaagacaacuguaa

SEQ ID NO: 4122262 - RNA, 61 nt, Human
uuacaggcucaacuaauguauuaauaacucuauggauguacauuucuugaugccucuguga

SEQ ID NO: 4122263 - RNA, 73 nt, Human
uuacagucagugaauggaagggucuggauuccaaaccagaacgcucauucuuuaccauucugcuguacuuuaa

SEQ ID NO: 4122264 - RNA, 78 nt, Human
uuacagucauuccuuggucaugcaagauaucgaugccuaugaugggucaggauaucacaugaauaaguauggcuguaa

SEQ ID NO: 4122265 - RNA, 93 nt, Human
uuacauagaauaguguaugauuucacuggaauuuuaacauuucugcaaaaagaguaaagaguccaagugggccacaauuacuauuuuauauaa

SEQ ID NO: 4122266 - RNA, 76 nt, Human
ugugcuguaauguuuauuuagcucagauuugcaauaugaaauguacauucugaauaggcauuuuaugagcaguaua

SEQ ID NO: 4122267 - RNA, 81 nt, Human
ugugcuguuauuucuacuucugucuaguuauuacaacaaaucaggauguauuaauguaaagaagauguaggaaagaguaua

SEQ ID NO: 4122268 - RNA, 67 nt, Human
ugugcuugaauuaagguaaugcuugauaugauuuaaaugaugucugugugaucuuggauaagguaca

SEQ ID NO: 4122269 - RNA, 93 nt, Human
ugugcuuucauucagcaggaucuguuucuucuagugaagaauuauucauucagauuaauucaacuuacaaaggagaagaguuccagagacaca

SEQ ID NO: 4122270 - RNA, 56 nt, Human
ugugcuuuggagaugaggacaugccucgugggcuaugcuccuuggcuucaaagcca

SEQ ID NO: 4122271 - RNA, 87 nt, Human
ugugcuuuggggguccaguccugugaguugccucccgucuaguaacgggcaggccugcccagcaggauggagagggcucccagcaca

SEQ ID NO: 4122272 - RNA, 57 nt, Human
ugugcuuuuuauaaggcagacugugugagcuauacuguuagaguuuuaaaaagcaca

SEQ ID NO: 4122273 - RNA, 84 nt, Human
uguggaaaaaggaggcuuugcgugugugcauguguaucacacaugcauguguguauucagagacuauccuuggacagauccaca

SEQ ID NO: 4122274 - RNA, 72 nt, Human
uguggaagugcaaaaccacaugguaaacaauugauauguuuuuguuuauuuuucuuguuugucauuaccaca

SEQ ID NO: 4122275 - RNA, 64 nt, Human
uguggaauauuagauuagguugauuaaucggucauucauaauuaacuagugauaauguucuaca

SEQ ID NO: 4122276 - RNA, 62 nt, Human
uguggaaugagcacaggcuuugaaaucacugaauacugacuucagacuugagcucuucuaca

SEQ ID NO: 4122277 - RNA, 85 nt, Human
uguggacagggauggggaggcuggggggcagaggcuugcugaugaguuuggugucuccccacuggucuuccagugcccauuugua

SEQ ID NO: 4122278 - RNA, 78 nt, Human
uguggacauuucccagggagcuuugucuucucauuccauugagugauaaggugaaagguuccuagaauaggucagaca

SEQ ID NO: 4122279 - RNA, 77 nt, Human
uguggaccaagaaaacaaugauaggguuugaaggaagaaauguuuugcaacagacucaucauugacuuugaaccaca

SEQ ID NO: 4122280 - RNA, 67 nt, Human
uguggacuuuguaauaguuuaaggucaaguaaaguuuccacuuuccuuaggcuguuugcagugccca

SEQ ID NO: 4122281 - RNA, 55 nt, Human
uguggagaugugagcaaggggauacagaucauguuuuccuucccuuucucugaca

SEQ ID NO: 4122282 - RNA, 89 nt, Human
uguggagcaacucccaauguuggggcuuacaggagagcuggggaaccaccugagacuuccugaugaggcccgaguugaccucuuccaca

SEQ ID NO: 4122283 - RNA, 61 nt, Human
uguggagccaagaucaugcucugcugauggaagcaagaugcaugauccugagcaacccaca

SEQ ID NO: 4122284 - RNA, 75 nt, Human
uguggagccagcagggucugagcucagcagcuucucaaaaaagccccccugagcugcuuugcuuuuggggccaca

SEQ ID NO: 4122285 - RNA, 58 nt, Human
uguggagcuguguggccuugggcaagugacuuaacugcucugagucucagcuaccaca

SEQ ID NO: 4122286 - RNA, 125 nt, Human
uguggaggccugaggggugcgccuguaugggaaguguauuaguacguguuucugcguccuuuucugucugugggugugcagagguuugugguguugcuccgucugcagguguucaggggucugca

SEQ ID NO: 4122287 - RNA, 65 nt, Human
uguggaguagcucuuugguacagaugacccuacucccggguacaauuccugucaagcuggccaca

SEQ ID NO: 4122288 - RNA, 62 nt, Human
uguggaguuagaauauaauuauguuaaugcuaaaaaaagguggcauuuguauucuaaccaua

SEQ ID NO: 4122289 - RNA, 59 nt, Human
uguggauaagacaagucagguauauagguaacgcccauguccuggaggcuucauccaua

SEQ ID NO: 4122290 - RNA, 58 nt, Human
uguggcaaagauuguguacaacuuaauaagagaaguguuguuacauucuuauggcaua

SEQ ID NO: 4122291 - RNA, 64 nt, Human
uguggcaagugacacagacggggacucccagcugggggucccuggaauuacuugacaucccaca

SEQ ID NO: 4122292 - RNA, 57 nt, Human
uguggcaauuuucuagcagauggcaguuaagugccuugcuuugacaaaauugguaua

SEQ ID NO: 4122293 - RNA, 72 nt, Human
uguggcauaagcucgguuugacacugaggguagugggagacaggucagugugaggggcuggguccugccaca

SEQ ID NO: 4122294 - RNA, 66 nt, Human
uguggcauguuucaucacaucaagauaauuaagccaauuuucacugaugcuuaugaaagugugaca

SEQ ID NO: 4122295 - RNA, 65 nt, Human
uguggcauuuaugacaaccaaagagugaaacaauuuuauuaagugguaauguucauggggcugca

SEQ ID NO: 4122296 - RNA, 69 nt, Human
uguggccaggccccugaugguggggacagccagggugaguggcuggagggagucagggggcuggucaca

SEQ ID NO: 4122297 - RNA, 63 nt, Human
uguggcccaaacggguccagugaaagucaguccugggacuuuggcugggacuauuggggaaca

SEQ ID NO: 4122298 - RNA, 129 nt, Human
uguggccuuaauuauagugcuauaagauaugaagucugaaacgcauuguuaucgauauaaaauggaaagacauuguguauucauaaaaucgaagauuauauuuagugugaaauuguuucgaaggucaua

SEQ ID NO: 4122299 - RNA, 61 nt, Human
uguggcuccacuccacauuaauggggcucucaauguuccacugauaugcaaaugggccaca

SEQ ID NO: 4122300 - RNA, 94 nt, Human
uguggcugauguggccuguguccuugugacauucuggcuugcaggucaacuggaagcuggagaguuucacagaugaugcuaacuacaaagccca

SEQ ID NO: 4122301 - RNA, 85 nt, Human
uguggcuugauuaucuuaaggaaacauuuuuccauagucacaaccuaguuuuaugcuggaauguucuuaaagauuuucuggucca

SEQ ID NO: 4122302 - RNA, 70 nt, Human
uguggcuuuuaaucuagauucggaucaaaggggggaacuucagugggcaaaauuuagcauuaauuccaua

SEQ ID NO: 4122303 - RNA, 55 nt, Human
ugugggaaucagccaggggggcccuuaacugcccaaggcugaucauuuucccaua

SEQ ID NO: 4122304 - RNA, 55 nt, Human
ugugggaucaaagcagcuuugcuguagucccagugcagcuuugcucuggucccca

SEQ ID NO: 4122305 - RNA, 60 nt, Human
ugugggcacuaaugacaugcaggcacucugucccaagcguuaaaucauucaguccccgca

SEQ ID NO: 4122306 - RNA, 70 nt, Human
ugugggcagagcagagccugcauuggccaucuccaucuggcccaggccaacaggccuugcucugcucaca

SEQ ID NO: 4122307 - RNA, 56 nt, Human
ugugggcucccccucacucuguucuggggauccuugcagacuaggaagagcucaca

SEQ ID NO: 4122308 - RNA, 75 nt, Human
ugugggcucuuaaacucugggaccagauggaucuggcuuugagaucuggcuggauucuuagcguucagggccuca

SEQ ID NO: 4122309 - RNA, 129 nt, Human
uguggggcaggacucagcuucccaugggcauugaugcugagggccucaguucccaguugacuguuggccagagguguccucaguucucugcuacaugggcugucugacacuuggcaucuugcuucauaa

SEQ ID NO: 4122310 - RNA, 74 nt, Human
uguggguucuggguguugauuuuacacuaaaaaaauuauuuuuggagucgaugaacacacaguauuugcucaca

SEQ ID NO: 4122311 - RNA, 71 nt, Human
ugugguauacaucucaugaaugauaaaucauugugccauugcugaucaauuacaaaugggacuguauuaca

SEQ ID NO: 4122312 - RNA, 72 nt, Human
ugugguccaggacuggugguacccuucacucugcaaagccccuguaagggagacccaccguccuggacugca

SEQ ID NO: 4122313 - RNA, 58 nt, Human
uguggucugcuccacggggugaguucugcuauuguucugacccuucuagcagaacaca

SEQ ID NO: 4122314 - RNA, 69 nt, Human
uguggugaguaacaucuggaaccgacacugaauucuuuuagcugauguuuaguugauguuacccacgca

SEQ ID NO: 4122315 - RNA, 66 nt, Human
uguggugauaaggguagcucucuucauccugguucaggagagggaaaaacucaugucauuuucaca

SEQ ID NO: 4122316 - RNA, 92 nt, Human
ugugguuauugauucaaauugcuuucuuuggggaacuguacuggaaccucacuaacacaguuaacuggagagcgaguucaauauaaggccca

SEQ ID NO: 4122317 - RNA, 68 nt, Human
ugugguuuaguuuugcaaaaguugggcucaaaacauugaaaacagcauuugaaaacuauuuaauuaca

SEQ ID NO: 4122318 - RNA, 56 nt, Human
uguguacagcaugguccagcagguucgcaggugaaggcugggcuuugacugacaca

SEQ ID NO: 4122319 - RNA, 124 nt, Human
uguguagcuggaaaacuaaggcagaagcuguaauauuauaucaucugugggcuuuuauaaugcuuuuauaaaagcagcacauggauaucaguguuuuaguuuuuuccauauguguagguucaca

SEQ ID NO: 4122320 - RNA, 92 nt, Human
uguguagcuuuuauugaucguuucguggccuuugacuccaaguccgugaaucaguuacaggucuaacuaaaugaauucaguauaggccagca

SEQ ID NO: 4122321 - RNA, 84 nt, Human
uguguaguauguauucuuuucucuaaaugaugaaaugcuaaagaaucauuucacguuguugaagaaaauaccguugcuacaaca

SEQ ID NO: 4122322 - RNA, 55 nt, Human
uguguauauguaaauauaguuguguucauaauagcacuucguuugcauagacaca

SEQ ID NO: 4122323 - RNA, 130 nt, Human
uguguaugcacugccuggauucuucaagcaagagaaggacauuucuauagugcaucuguuauggugacagguuacaagacagagcucugugaagcuccugcucccuuugggaugaaagcgugcaugugca

SEQ ID NO: 4122324 - RNA, 72 nt, Human
uguguauuccuuuuucaauugugaugucagaguuacauuagccuugcagaauaauuugaagagguuuucaua

SEQ ID NO: 4122325 - RNA, 71 nt, Human
ugugucaaggcaucagcccagccugccuuccuugucuuggcccuuggugcugcugcugugucucuggcaca

SEQ ID NO: 4122326 - RNA, 76 nt, Human
ugugucaauguaucuaacccggaacuaaguuuuccugagucccuuucucugugugguucugaguuagaguuggcca

SEQ ID NO: 4122327 - RNA, 79 nt, Human
ugugucacagugucugugcuuugcagcaaauugcuugacuugaguuuuuuccuucuaagaagcaaagauauuggaaaca

SEQ ID NO: 4122328 - RNA, 60 nt, Human
ugugucacuguuccuccagcuacaggcugauugauguacuauggaaagacaguagacaca

SEQ ID NO: 4122329 - RNA, 62 nt, Human
ugugucaggagauagcaaaggguucacauauauuuccuuaguguucaaauuuuuccuguaca

SEQ ID NO: 4122330 - RNA, 58 nt, Human
ugugucaugugugaggcucccuucuugguccuuggcuggcuguaucagauaggacaca

SEQ ID NO: 4122331 - RNA, 89 nt, Human
uguguccaauaacaauaaugcuguuaagaaucucuuccuuugcauuuuggcuuuuaggggugguuuuagcagcauguguucuggaggca

SEQ ID NO: 4122332 - RNA, 65 nt, Human
uguguccagugucagcucuggugugcuuauuaagggauaaaugacccaugcugaccucacacaca

SEQ ID NO: 4122333 - RNA, 65 nt, Human
uguguccuaccaugaauucacuccaugcuagccacauuggccuguauggcuauuccuuggacaca

SEQ ID NO: 4122334 - RNA, 64 nt, Human
uguguccucuuaccucugaccccagagcauguuugcugugggcuggauggagcugaaggacgca

SEQ ID NO: 4122335 - RNA, 77 nt, Human
uguguccuggcuuucuugcugcaugguggcuggauuccaagaaucagcaucguaagaaagaaagccagguagaagca

SEQ ID NO: 4122336 - RNA, 66 nt, Human
uuagguuuuggacauacuuuguuuaaugugccuuugagacaugcuaauggagaugccaagaaguga

SEQ ID NO: 4122337 - RNA, 83 nt, Human
uuaguaacucuuuaagccacuauuaaauaaugauuguauagcuacagcaguuucaauuuuaguguuuauaucagggucacuga

SEQ ID NO: 4122338 - RNA, 59 nt, Human
uuaguaauuggcagagcuggguuuaaaccuaguugacuuagcuuuagagccauuacugg

SEQ ID NO: 4122339 - RNA, 63 nt, Human
uuaguacaaaggcccuugauuacuuuuuuacgcugugauucggugacauaggucuugugguga

SEQ ID NO: 4122340 - RNA, 68 nt, Human
uuaguauauacugaugaguccuucguuacuguuaccaagugcauaacugguauaucaguguacacuaa

SEQ ID NO: 4122341 - RNA, 58 nt, Human
uuaguaugacaugcugucuugcugcacauccguauuuuggcacaguuugucauucuaa

SEQ ID NO: 4122342 - RNA, 76 nt, Human
uuaguauuugcccauucguuuaguccacaaaugcaucugugcuaggugcuggggauagaauugugaguaaagcuaa

SEQ ID NO: 4122343 - RNA, 77 nt, Human
uuagucaccucuguacaaauggcaguugaguucaguucucacugaacucuuuucccuuuuguaauaguuauuacuga

SEQ ID NO: 4122344 - RNA, 63 nt, Human
uuagucacuagaugccguauauauaggauaguuagcuaucgaauggcuucucaggugcacuga

SEQ ID NO: 4122345 - RNA, 61 nt, Human
uuaguccccagugugcagcucuucuccacuuuaaaaggaggaggccugaaacugaggcuga

SEQ ID NO: 4122346 - RNA, 75 nt, Human
uuagucgggaaagcuacugguguccucugccaagcagguuacaggggacaaggguagcauccauuaccugacuga

SEQ ID NO: 4122347 - RNA, 81 nt, Human
uuagugacaggaauuacauuuguguuacugcagauuguauucacaguguggaagugauuacaauguaguauaugucccuga

SEQ ID NO: 4122348 - RNA, 78 nt, Human
uuagugacuuuuguaaugagagcuccugguagcaagcaaccaauugcuacacuggcuguuuugcagaaagaacauuga

SEQ ID NO: 4122349 - RNA, 94 nt, Human
uuagugacuuuuugauuguccuuggaugaagcugggaucugugugaaaaaugaaauguacuaucccuauuccuagggauaaucacuaucacuaa

SEQ ID NO: 4122350 - RNA, 66 nt, Human
uuagugagagcgauaggagaaaguagugcuccaccuuucccgugacauccuggugcuugacacuga

SEQ ID NO: 4122351 - RNA, 57 nt, Human
uuagugauuucuaaggagagaaguagaacccaacugauucuccaaaggagacacuag

SEQ ID NO: 4122352 - RNA, 69 nt, Human
uuaguggcaauuauaauagcugugggaaauaaaaguaugaaaaaaucuuacuuccuacaguucuacuga

SEQ ID NO: 4122353 - RNA, 60 nt, Human
uuaguggcagcaguuauuaaugugaugcuagucuaugugucacaaaugauguugcacuga

SEQ ID NO: 4122354 - RNA, 67 nt, Human
uuaguggcaguuuuauauuucauguguaaucuguguuuauauuugcaaguaucaaacaugucaguag

SEQ ID NO: 4122355 - RNA, 77 nt, Human
uuagugguauuauuggguaguauaguaaauauauguuuagcuuuacaaagugcugcaccauuuuaaucucccacuag

SEQ ID NO: 4122356 - RNA, 74 nt, Human
uuaguguaugcuuagccagagauuuuauagcuauaauaucagcacagauuuauaggguauaagugauauacuga

SEQ ID NO: 4122357 - RNA, 69 nt, Human
uuagugugacagcuucucugaaauucaugugaucauuuacauauuguuucccaggagcuuuggcauuaa

SEQ ID NO: 4122358 - RNA, 89 nt, Human
uuaguuaauuacauauggguccaguuucaucugagguucuagagaucgugaaucagauaauugggcuggaguuauaaugguugaauuaa

SEQ ID NO: 4122359 - RNA, 59 nt, Human
uuaguuauauaacucaggugggcucagcagcaaggcugggaccucaguuauauggguag

SEQ ID NO: 4122360 - RNA, 68 nt, Human
uuaguucauauugaaagcaggugacaccagcauucugcuaggcaguuaacuacuuuuaguagaaguga

SEQ ID NO: 4122361 - RNA, 130 nt, Human
uuaguucuauucauagugccuucucaggcccagguucagcacaggugcucagacaaugaugguugguugauauuugcaugugcuaaggcuacgaggccaugaaaagaaaguaaucaagaaggaagauuag

SEQ ID NO: 4122362 - RNA, 57 nt, Human
uuaguugagauuugccaugaauuuucuggaccagacagugguggcaaugucagcuaa

SEQ ID NO: 4122363 - RNA, 87 nt, Human
uuaguugcuuuugaaggggcugggaaugagcaugugggaagagggauagacaugcaugucaucagcccuuuaauaaugaguagguga

SEQ ID NO: 4122364 - RNA, 56 nt, Human
uuaguuggaagaaaaacaaaugaaauaugcaagauguuuguauuucuaacagcuaa

SEQ ID NO: 4122365 - RNA, 91 nt, Human
uuaguuuugauagccaggaagaaaaguguuaaauuuuuacacuaacucuaggaugugacaugugcucaucuuggcuauucuaaaugacuag

SEQ ID NO: 4122366 - RNA, 130 nt, Human
uuauaaaucacucuugcagguauuuggagaauggacgaaugaggcaaaaauagagacaagaaagcaaauuucauuacugcaucucuccaggugaaacuugcagggcaaauggagaaaaaugaauuuguaa

SEQ ID NO: 4122367 - RNA, 77 nt, Human
uuauaacguaguuauagguacucugcagcauuuccccaaaguuagcaguaucauguuuccugugacuaucuuuguaa

SEQ ID NO: 4122368 - RNA, 60 nt, Human
uuauaacuuguauauguuauucagaguucagucacacuggauauacauagcaggaaauga

SEQ ID NO: 4122369 - RNA, 77 nt, Human
uuauaagcagccagccagaucaaacucagaugucaucccaugauuacauaguuuggauguuugguuuguugaaauaa

SEQ ID NO: 4122370 - RNA, 108 nt, Human
uuauaaggauugaguguggcacaaagaguucgauuuuuaguauuuaaauugaguaggaaacucaaauacagaagauccuuuccugggucacaccuuugguuuuuuuaa

SEQ ID NO: 4122371 - RNA, 61 nt, Human
uuauacuugauccuggcaggguaagaaguaguaguuuuaagcucccugaagggcaagauaa

SEQ ID NO: 4122372 - RNA, 80 nt, Human
uuauagacacauagauaggcagaagaacauuuuguaacaaugaggcaauuguuaacauguguauuguaugauguuuauaa

SEQ ID NO: 4122373 - RNA, 85 nt, Human
uuauagcaacuuaggaaacaaauacacccagucaauaucuguugaaugaacaaauggugcugcuuguguuccugaugagucaugg

SEQ ID NO: 4122374 - RNA, 74 nt, Human
uuauaggaaucugcaugugugauaaagugcuuagaaugagacacacgugcgcacauggaggaccguucuuauaa

SEQ ID NO: 4122375 - RNA, 129 nt, Human
uuauagguaacugugggucaucaccuuugagcugucagucuaccauggaggauugugcucuguucugggcaccccauuuaaagugguagauuggcaguagggaagauacacagauguggcauucuguga

SEQ ID NO: 4122376 - RNA, 72 nt, Human
uuauaguuaaauuguccuccuggcagggccuuugaaaucuguuggccuguguaaaagauuaguuuacuauga

SEQ ID NO: 4122377 - RNA, 87 nt, Human
uuauauaaagggaaguuaagggucccagucuguuuggggcaacagugggagcaggcuaagggaccuguuuaaaacuaauuuauauag

SEQ ID NO: 4122378 - RNA, 84 nt, Human
uuauauagcauuuuucaaggaggcaaagcaucaguagaaauguucucugggauuuuuuuaccugauguuuuaaugcugugauga

SEQ ID NO: 4122379 - RNA, 110 nt, Human
uuauauuaaaaccuauauaucagagauuuuuuguauauaaaagauaguuggaauuaauuucuccagcuuaaaguguacauagaauugugcuuugauuugcuuuaauauaa

SEQ ID NO: 4122380 - RNA, 118 nt, Human
uuauauuaggaaaacaauguauguaaccuuuuuugugagcugagaaauguauagucuaccaacaagauaagugcagauuagagcucuaaaauaaauacaugaaauagugcuaauauaa

SEQ ID NO: 4122381 - RNA, 102 nt, Human
uuauauuucucagaaugaaaguguugauuuuauagugcauuagaguuuguuuucauaaccugcuuugcucuuuagauuuaauauuuucucacuaguuuauaa

SEQ ID NO: 4122382 - RNA, 81 nt, Human
uuaucaaaagcguggaagcugacaggauggcauuauuagcguggcucugagcuaauccuguugccgauuuguugaggauga

SEQ ID NO: 4122383 - RNA, 69 nt, Human
uuaucaauauuauguuuugguguaauguaguaccauuucuaacuuacacuuuacagaauguuuugauag

SEQ ID NO: 4122384 - RNA, 83 nt, Human
uuaucaauguccagcccaguuuggugaauugcucuaucugggaauucgauuuuccaacagggcuucucaaaggagguuguuaa

SEQ ID NO: 4122385 - RNA, 90 nt, Human
uuaucacuuaauuguuuccacuuaucuuuuaagagagaaauuuauuuagcaucuuucucucuuuuggguaggaggucacagagcagauga

SEQ ID NO: 4122386 - RNA, 107 nt, Human
uuaucacuuuuuuuuuuuuuuuuggugcaaagcuuaacauucugcaaacuuuuuuuccccuugaguaugcauugcauuugucaugaagaguaaaaagaauguaauaa

SEQ ID NO: 4122387 - RNA, 99 nt, Human
uuauccaaauaauuuuaacuauaaaaggucagugcacuaaaaugagaguuucuuuaagaaauaucauucuggugcacagaacaacuccuuuuaggauaa

SEQ ID NO: 4122388 - RNA, 79 nt, Human
uuauccacucucccauucaugcauuuaauauuuauuaaccaccuaguauuaagcaaaauguauggaaagaaguggaugg

SEQ ID NO: 4122389 - RNA, 74 nt, Human
uuauccaguaccagaguccuucccaauugcaaaauguuuuauagacagguggcagagggcucguggauggauaa

SEQ ID NO: 4122390 - RNA, 82 nt, Human
uuauccucuucucucauguaggagggaauuguguaaauaagacuaaaaaccaguucuuuaaaauagugagaaagaaggauaa

SEQ ID NO: 4122391 - RNA, 117 nt, Human
uuaucgcuaauggaaucagauuauuugggaaauauuaaucuaugcauauucagacucagauacugagcuaaggaauucaaauaguuaguauuccuacauggauuugguuagugauaa

SEQ ID NO: 4122392 - RNA, 81 nt, Human
uuaucuaacagucauucauagaaucaguuugggaaggggaauuuucacugaacucucauagagaaacuguguuuuagauaa

SEQ ID NO: 4122393 - RNA, 55 nt, Human
uuaucucuaaguuccuuuccaagcaagggaggcaguauaaggagcugagagaugg

SEQ ID NO: 4122394 - RNA, 63 nt, Human
uuaucugcucuugaaaauguugaguuuguagccaacauuugaaaaucaagaaucuucagguaa

SEQ ID NO: 4122395 - RNA, 85 nt, Human
uuaucugguacgcugcauuacacauucuagggcacaguuauuucagaugaucuugauuaguaguggugaaacagauuccagauga

SEQ ID NO: 4122396 - RNA, 77 nt, Human
uuaucuugauguccuauuucucugugcaugauucuaccuucagacacagaugagacaaggaguggucugugugauga

SEQ ID NO: 4122397 - RNA, 90 nt, Human
uuaucuuuaugguuuuaaccacugucuguuagauuuucuguuguggcagaaaaaugaauucuucaguggcaagggacaugaugaaggugg

SEQ ID NO: 4122398 - RNA, 76 nt, Human
uuaucuuuuggguaguuauucugcacaccuuuaaaaugcauuuuacuuauuugugguggguggaguagaaagauga

SEQ ID NO: 4122399 - RNA, 112 nt, Human
uuaugagcaaauaugugauaagaggcucaucgcugacucuuugacaaaaugcagcauuuucuuuuaagcuacauuauguuaagagcagaauuuccucucuacuagcugauaa

SEQ ID NO: 4122400 - RNA, 88 nt, Human
uuaugauaguuuacugagaaugaugauuuccaauuucauccaugucccuacaaaggaaaugaacucaucauuuuuuauggcugcauag

SEQ ID NO: 4122401 - RNA, 78 nt, Human
uuaugauuuccagcaaacucuaauaacaaaauucaaauugcucuugcagaugagaauuuuuagagugcugggacauaa

SEQ ID NO: 4122402 - RNA, 130 nt, Human
uuacauaucuacugguugcaaggcaggaaauauuggugaaaugcuagcaaagucacaauuucuacucugaacaugauuugcaguguucaucaguauuuuucugaacccugcuuuaccauuuucuauauug

SEQ ID NO: 4122403 - RNA, 72 nt, Human
uuacaugacaaagcuuuggcucagagauguggagugaacugugcauagcaagcuuaaagccaguccauguga

SEQ ID NO: 4122404 - RNA, 130 nt, Human
uuacaugaugugcgacacuucaugaaaugauucuucuauuaucagauauuuaaguuaucaacagcauuuuguuguuauaaauaugacugaugaaggucuuuugcagaaauguuauaaacaugucugguua

SEQ ID NO: 4122405 - RNA, 74 nt, Human
uuacaugauugccuccaggcugaauaucuagaauaauauuaggggucugauagccuggaagaguuaacauguag

SEQ ID NO: 4122406 - RNA, 64 nt, Human
uuacauuaaagcaucuguaaagacccuuauuccaaauaaggucacauuuugaggugcuguguga

SEQ ID NO: 4122407 - RNA, 78 nt, Human
uuaccaaaaucuacugugugcuaggaacuacaccaggcaccaaaaugcaauguucucucuggcugccaguacugguga

SEQ ID NO: 4122408 - RNA, 76 nt, Human
uuaccacuuucagguccagucacuggucugcaguaaccauuuugugcaagacacuguccugggcaugaagggguga

SEQ ID NO: 4122409 - RNA, 129 nt, Human
uuaccagaggcaacuuagcagacguuaacagucuacgcuaaggcagccaaacuuggguuuugguuugaaaccuggcugugugaccuuggcaauucuuaauucugcuaaguuuauauggucucauaugua

SEQ ID NO: 4122410 - RNA, 78 nt, Human
uuaccaggauggcugccccaaauuguugcugguaucauuaaaauagucaacaaaaauguggagccuacagccuuguaa

SEQ ID NO: 4122411 - RNA, 99 nt, Human
uuaccagggugcuaaauagcuuuuguaugaugaaauuuuggcaaaauaauuuuaugucucuauuauuuaugucauaugaaaguuggaguuuucuggugg

SEQ ID NO: 4122412 - RNA, 60 nt, Human
uuaccauguuuuguugaugcuggacagucuuauccagaguaugcaggaaaauaugaguga

SEQ ID NO: 4122413 - RNA, 106 nt, Human
uuaccauuuuuuauuuucaauuuuggaggauuugucaucugaagauaaggugguauuaaauguauugauaaugggaucuuuagcagguuuuuuugggagaugguag

SEQ ID NO: 4122414 - RNA, 71 nt, Human
uuaccucuggggcaugggcuacuugaaguuugaguaacuuucuaggucucaguccuuuaauuaugggguaa

SEQ ID NO: 4122415 - RNA, 101 nt, Human
uuaccuguuuaaccacuugaugggcuggggaagcucacuccugugguuccagcaggagggcgcaucaucccauuaugucagaguggcaaggaacuggguga

SEQ ID NO: 4122416 - RNA, 129 nt, Human
uuacggcuucugacccagggcuucacuuuguagcaguguuuuucuucuguuuuugccuuuggcugauaccacugcuagagugcagauaagagaauguuacuaccagggggcuugagugucgggcuauga

SEQ ID NO: 4122417 - RNA, 89 nt, Human
uuacguuagaagcccugagucaucauugcggaaguuggccuaagcuuuugaaauacaguggugcacugagauaacuuuccaauuaguaa

SEQ ID NO: 4122418 - RNA, 68 nt, Human
uuacuacaagggcccuaaaagguagugccuccuagacuggagaagggaccuuugagagccccuaguga

SEQ ID NO: 4122419 - RNA, 71 nt, Human
uuacuacugcuuuacuacugggaaaagggaacauuaaggguuccuagcauccaugucaaguacugugguga

SEQ ID NO: 4122420 - RNA, 66 nt, Human
uuacuagaaaaacacaugcucuguaguuaagauggaugaaacugcaguuuguguugauuuugguaa

SEQ ID NO: 4122421 - RNA, 91 nt, Human
uuacuagaaagaacacugcugagaugccaggagcucuaaagaccugggugcgaagagccccgaggcuccuggcucuaagucuuucugguag

SEQ ID NO: 4122422 - RNA, 64 nt, Human
uuacuagcugagggaacuugggcuugccauauaauuucucuaagacuauuguccucagcuguaa

SEQ ID NO: 4122423 - RNA, 56 nt, Human
uuacucaaggcuccaggagcacagcauugcagucccugagcuccaggcgugaguga

SEQ ID NO: 4122424 - RNA, 76 nt, Human
uuacucugucacccaggcuggaguguaguggcacgauuucggcucacugcaaccucagccuccuggguucaaguga

SEQ ID NO: 4122425 - RNA, 63 nt, Human
uuacugaaaauucuucaggauuccuacaugugagcuauuggaaucagaaguuuuggucaguag

SEQ ID NO: 4122426 - RNA, 66 nt, Human
uuacugaacacauuucuggccaauuuagacuuaauguguauguuugcauuaaaucuguucauguga

SEQ ID NO: 4122427 - RNA, 58 nt, Human
uuacuggagugagcuguucuugaaguuauuucaaguucuaguguucacuucuaaguaa

SEQ ID NO: 4122428 - RNA, 67 nt, Human
uuacuguggcuuugcagggcuuguuauuugggaccacacccacagcuuccaaccaaggccaaaguaa

SEQ ID NO: 4122429 - RNA, 61 nt, Human
uuacugugugacccuggguagguuacucuaccucucugauccucccuuucucauacgguaa

SEQ ID NO: 4122430 - RNA, 58 nt, Human
uuacuguuccucucucaaagaggcuuucucuggaagccucucugcuuaugaauaguga

SEQ ID NO: 4122431 - RNA, 60 nt, Human
uuacuguuuucguugauuauaaagguaauacacacuuggcguaaugaauguaaacaguaa

SEQ ID NO: 4122432 - RNA, 81 nt, Human
uuacuucaggccaucugggcguauaggugcaagucacaggagaugcgauggcuuggcuugggcucagaggccugacaguga

SEQ ID NO: 4122433 - RNA, 58 nt, Human
uuacuuuaagggugucuuauuagaugaugaaaaguuggcugagacacccuucaaguga

SEQ ID NO: 4122434 - RNA, 56 nt, Human
uuacuuuauagaacacugggggauagauugcccagaaaauauguacuauaaaguaa

SEQ ID NO: 4122435 - RNA, 72 nt, Human
uuacuuuuuaugauaagaacugaaguaaaauauagcaaaauauuuugguucuuaggaguggaaaccuuguaa

SEQ ID NO: 4122436 - RNA, 63 nt, Human
uuagaaagauggaaaauggaacuugucuugaugacagugucugcuagguucaucaacuucuga

SEQ ID NO: 4122437 - RNA, 78 nt, Human
uuagaagauaaugacaucagaauggcauagaaaaguucucauucacuuugcaguauuuggauguaauguaucaacuga

SEQ ID NO: 4122438 - RNA, 97 nt, Human
uuagaagccugucaagagcucuuacuggaugugguaaugacuuugaacuugcuuucuucuguguuauuucugaauccauguuaugacaggcgucuaa

SEQ ID NO: 4122439 - RNA, 79 nt, Human
uuagaaggaaaaaaauuaaugugagucaaauuuggaacauugcuaaauuggauuaaaauaucuuuuuuuuuuuuuuuga

SEQ ID NO: 4122440 - RNA, 77 nt, Human
uuagaaguuuacaacugggcuugucagcuuuaaaagcacccuggaaggcuugacaauuuuacauguauuaauucuaa

SEQ ID NO: 4122441 - RNA, 59 nt, Human
uuagaaucuuguaucagaaguuguggaauuccagaguuucugaaguauauggguuuuaa

SEQ ID NO: 4122442 - RNA, 72 nt, Human
uuagacaggauguaugaaagcuggguaaaaauaguucccuaaaugauguuauuucauacaacuucugucuaa

SEQ ID NO: 4122443 - RNA, 73 nt, Human
uuagacauugagcuccucaagagcaggaacugcuuuaucuccacaguccagcucaggguuggcucaagucuga

SEQ ID NO: 4122444 - RNA, 81 nt, Human
uuagacuauaguauugguugcacacucuguuaauauacuaacugaaccguauacuuuaacguggcgaaccuuauaguauaa

SEQ ID NO: 4122445 - RNA, 76 nt, Human
uuagagacccagaugcugugauuguacaaccugauuucuuaaucugucaccugcaugcagcauaugaggccucuga

SEQ ID NO: 4122446 - RNA, 77 nt, Human
uuagaggcacagucuauguagaggagaaaacagaaugaguacccuuuccccugcuucuauauagcugcugcuuuuaa

SEQ ID NO: 4122447 - RNA, 56 nt, Human
uuagagguagaguuacauuagucuuaguauaaaggcaauuuuagaccugccuuuaa

SEQ ID NO: 4122448 - RNA, 56 nt, Human
uuagaguauagcuaacuguauuagguggaagcucaccuauauuuagcuaucucuga

SEQ ID NO: 4122449 - RNA, 57 nt, Human
uuagagugguccuuggagcccuuuuauacaaguaugggcuucucagggcuucucuga

SEQ ID NO: 4122450 - RNA, 80 nt, Human
uuagaguugcaguggcaagagggucuauuguugaagaucaucuuugugacauuauuuuauucuugcuaugaggauucuga

SEQ ID NO: 4122451 - RNA, 75 nt, Human
uuagauaaggaagugaauuggaaugaaguaacaguucuauauuagguaguuacacuaagcuacuucuauauuuaa

SEQ ID NO: 4122452 - RNA, 104 nt, Human
uuagauuaacaaggaauaucgugaucuuaacuguguguuuugcuauuaguaucccuuaguacuaggagaaaacuuacacugagauuaauucuuugucuuuuuga

SEQ ID NO: 4122453 - RNA, 60 nt, Human
uuagauucuaagauucuaagaaucucugcgucuagagguucuaagauucucagagucugg

SEQ ID NO: 4122454 - RNA, 80 nt, Human
uuagauugaaauacauaaaauugccauauuuguggguaaaaauugcucaaauauuggcaauuuuaggugguuuagucuaa

SEQ ID NO: 4122455 - RNA, 82 nt, Human
uuagauuggugcaaaaguaauugcgguuuuugccauuaaaaguaaugcggccaaaacugcaguuacuuuugcacccaccuaa

SEQ ID NO: 4122456 - RNA, 70 nt, Human
uuagauuggugcaaaaguaauugugguuuuggcugaaaaguaaaugcacaaagauuuugcacuaaucuaa

SEQ ID NO: 4122457 - RNA, 55 nt, Human
uuagauugugauacccagggacuaaauggaaacauucaggguuucacaauacuaa

SEQ ID NO: 4122458 - RNA, 78 nt, Human
uuagcaaaauaugacaugugaucucaagagguucccaaagcagaaccuuuaguccauuuagugucauucuugugcuag

SEQ ID NO: 4122459 - RNA, 111 nt, Human
uuagcaagaaaugauaggcugugauauauuuggaccagagcauuuuauagucauuuucaguauauauaguucugugaguuuaauguaucuauacuggacuuuucuuguuaa

SEQ ID NO: 4122460 - RNA, 71 nt, Human
uuagcacacaugcuucaugcaaaauucugagcaaaagaacugcagagcgaccuggagcauuuuacugcuga

SEQ ID NO: 4122461 - RNA, 122 nt, Human
uuagcagcuggaaagagagaguggccuuugacugagauagugugugaggaugucuucugaaaccauccuaagaaggaauuacaguuuauccaggaagagcgaguucuugagagagcuguuaa

SEQ ID NO: 4122462 - RNA, 65 nt, Human
uuagcaguuuccauuuuggucacauuacaaucaaugaugagcaacagggggauggccacuguuga

SEQ ID NO: 4122463 - RNA, 113 nt, Human
uuagcauauuuguauuuacuuugguacacucuucucacagucaguuuucagaucagaaauaauuaaaagaaagacuaaguaguugggagguaaaaguaaagacacguaguuga

SEQ ID NO: 4122464 - RNA, 70 nt, Human
uuagcaucucugggcuuugaguuuguucagcccuaaaacaggcaauaauaucuaccucagagggugcuga

SEQ ID NO: 4122465 - RNA, 66 nt, Human
uuagccuagcaggucaaaccagcugaugacuagccagcuccaauuacugaccugaccugcuucuaa

SEQ ID NO: 4122466 - RNA, 57 nt, Human
uuagcuaacucccaguucaauccacagcuugccacuugggaucuggaagcuagcuga

SEQ ID NO: 4122467 - RNA, 56 nt, Human
uuagcucacuauuucaggcuuuuaugccaguaacauaagagucuuuacugagcuaa

SEQ ID NO: 4122468 - RNA, 61 nt, Human
uuagcucaggcagugcccucuggccguggcaggcacugcaaugggcaccugcuugagagga

SEQ ID NO: 4122469 - RNA, 83 nt, Human
uuagcucauuuuccucaucgauaaaaugugggauaaugaggacacauucuccacagcauuauuagaaggaucaaauggacuaa

SEQ ID NO: 4122470 - RNA, 66 nt, Human
uggaaacugugggagaaggcgaugugaccagggacauuguuuagaauagccugcucauggugacca

SEQ ID NO: 4122471 - RNA, 77 nt, Human
uggaaacuuaccguuuggggaaauaagucauuguuugaaacaucccucaauuaucuccucaaagcagcaaguuucca

SEQ ID NO: 4122472 - RNA, 91 nt, Human
uggaaagaauauuaggaaguuauccauaguuuguuuacaugcuugcuaagugcauuauaaauuaugaauggcccuuuuaugguaauuucua

SEQ ID NO: 4122473 - RNA, 61 nt, Human
uggaaagaauugugacauuuaaggugcuuaguauuagguaccugaaguaagcauucaucca

SEQ ID NO: 4122474 - RNA, 70 nt, Human
uggaaagcucuggagcuuuaauugcuuuccuucuguuuuuggagaacaaagcaccacugagucaguucca

SEQ ID NO: 4122475 - RNA, 58 nt, Human
uggaaaguucugcuccaccgagcuuuuguaggcguugucagagagcagagcgguucca

SEQ ID NO: 4122476 - RNA, 78 nt, Human
uggaaauaaaucauuuagaggaaucugaaauaaaauuguagcaguugauuuauggcuucugugaagaauuuguuuuca

SEQ ID NO: 4122477 - RNA, 64 nt, Human
uggaaauaaccaucagccuucuucccaaguguuuucaacucagcauacugauggauuuuuucca

SEQ ID NO: 4122478 - RNA, 59 nt, Human
uggaaauagcuccaguuaagcacaucgaaaagauguuguuuuaaaugagauuaucucca

SEQ ID NO: 4122479 - RNA, 78 nt, Human
uggaaaucugaauaaauuagggacuuuaguuaauaacaauguauugauaucaguuugcugauuguaacagaugcgcca

SEQ ID NO: 4122480 - RNA, 71 nt, Human
uggaaaugcugacagacuauuaacuauagcagcacugcucuaauaaauggaauggccugucauaaucucua

SEQ ID NO: 4122481 - RNA, 64 nt, Human
uggaaauugugaugacagcugguggugggaaacaucacugaaauacugaaauuacuagugacca

SEQ ID NO: 4122482 - RNA, 66 nt, Human
uggaaauuguuaaaauggaguaaguuaucuauuugaggguaaacuaaccauuuuaauuucuuuuca

SEQ ID NO: 4122483 - RNA, 70 nt, Human
uggaacaaauuacaauuaacuuuguaguuauaaguuaauaugaagugguuaauauguaaauuugugacca

SEQ ID NO: 4122484 - RNA, 66 nt, Human
uggaacaacucccucggagccuccaagaggaaccaaccccacugaugcuuugauuugggauuuccg

SEQ ID NO: 4122485 - RNA, 79 nt, Human
uggaacagauaaggcucaggguuuaaguuucuugcucaaagacagacuguguuugaauccuaaguuucauuuuguucua

SEQ ID NO: 4122486 - RNA, 55 nt, Human
uggaacuaaguuucugguaccauaaauacaggaauggugcugagaugugguacua

SEQ ID NO: 4122487 - RNA, 76 nt, Human
uggaagacgagggaaggcaucacagaggcugugaggugaaccgacuucaaggaauggguccuucccuucagagcca

SEQ ID NO: 4122488 - RNA, 66 nt, Human
uggaagagcccaggcagagggaugcuugguuuucucuguaucguaaucaugucugggaugauuuua

SEQ ID NO: 4122489 - RNA, 97 nt, Human
uggaagaugucucugaauucagauauggagucuaaaaccacagaaugaaguagagcucaaugguuugggaaacauauuucugcaagacauccaacca

SEQ ID NO: 4122490 - RNA, 61 nt, Human
uggaagcaacaacuauggaccagaauguaaaucccauggaugguuuuacuugaugcuuuua

SEQ ID NO: 4122491 - RNA, 61 nt, Human
uggaagccaggggcugcuuaggagauaguauaaaugucuggaugguaaguggcuuggccca

SEQ ID NO: 4122492 - RNA, 58 nt, Human
uggaagcuggcugaucugacuugcuugcagaugucuguaacagcauuagcagcuucca

SEQ ID NO: 4122493 - RNA, 59 nt, Human
uggaagcuuccugaaugcucauuuacuaaggaguagaugagugaauuauggggcaucca

SEQ ID NO: 4122494 - RNA, 58 nt, Human
uggaagcuucugaccauuuuuggaauuuuuuggauaacucuuauggucuagguuucca

SEQ ID NO: 4122495 - RNA, 63 nt, Human
uggaaggcaugggaacuguucuccauuauggaaauauggguggaauauuucauaugucuucca

SEQ ID NO: 4122496 - RNA, 129 nt, Human
uggaaggcgggagcugaugagucacugagugugcuauugcaccaucauaauuguuagcaucauaaacaaugguauaugacgggguagagcagauuaaagagaaugaagugucuugugcaguucccucua

SEQ ID NO: 4122497 - RNA, 69 nt, Human
uggaagggcaugggaauguuuuugcuuuccagagaaagccacaguucuaugucugcuuuaaguuuucca

SEQ ID NO: 4122498 - RNA, 88 nt, Human
uggaaggucuugcaccuuucaucccccacaaggcugaggaacuugggcucugcccuguggacagugagaagugucgaaggaguuuuca

SEQ ID NO: 4122499 - RNA, 63 nt, Human
uggaaggugucagcaagucaaagccuucacauaucuguggcuuuuuauuacugacaacuaaca

SEQ ID NO: 4122500 - RNA, 75 nt, Human
uggaaguaauuuaucccuguaccgccuugugggguuggguguuucuugcccacugcaugaguugguauuacucua

SEQ ID NO: 4122501 - RNA, 88 nt, Human
uggaagucugguuuugaaguugguguggaaaguagcugcuguaugauucggaggcccauuuuauauccagccacuuccuggacaucua

SEQ ID NO: 4122502 - RNA, 129 nt, Human
uggaagugggagauagaaaauaaaggguggggucagguuccuuucuaaaaaccuaaaugcaugucaggcaaguagggcuuagaaaagaauuuacccuccuucaccucugucaccucaucccuccuucca

SEQ ID NO: 4122503 - RNA, 79 nt, Human
uggaaguguuuuagagguuagaggcugauaguggagaugauguuaccuccucuguuugugauuucuacgauuuucucca

SEQ ID NO: 4122504 - RNA, 57 nt, Human
uggaaguugaaucucagucauguacaccagaauaugaaugcgagaugacagcuccca

SEQ ID NO: 4122505 - RNA, 66 nt, Human
uggaaguugacuuuucugcgggaacuggcacuuuaaaguccagucaaaaggaagucaauguuuuca

SEQ ID NO: 4122506 - RNA, 100 nt, Human
uggaaguugauguacauaugcuguguuaauucuaucuugacuaucauuuccugaacagcaugauuaaguuaagcagcagauuauggucuacauuaaucca

SEQ ID NO: 4122507 - RNA, 67 nt, Human
uggaauaaagagugacuuuucagcugugacuauauuguuaaucauagaguugaucuuacucauuuca

SEQ ID NO: 4122508 - RNA, 70 nt, Human
uggaauaaauccaguguucaaaguuugaagaaauccggucggcuucaagcaagcgucuagauuuauccca

SEQ ID NO: 4122509 - RNA, 72 nt, Human
uggaauacaguguuuauguacagauuguuucgucuuuagacuuuaaauauccagucaaaacacuguuuucca

SEQ ID NO: 4122510 - RNA, 98 nt, Human
uggaauaccacuugaaaauagguugauuugaggaagcuaauugguuucuucuaagcuccuugaauuaaugcugcuauuauuuuucaacuaaaauucca

SEQ ID NO: 4122511 - RNA, 71 nt, Human
uggaauaucagacugagagaguaaaguagaauuaagaguugguugugcuuggcuacucuuaugagcuucua

SEQ ID NO: 4122512 - RNA, 59 nt, Human
uggaauauguggaagaacuuggugucagucaacuugccuccuggaagucacauguuuca

SEQ ID NO: 4122513 - RNA, 57 nt, Human
uggaaucuaaaaacgggcuugguuuuuuaccuaaaaucagucuugauuagauucaca

SEQ ID NO: 4122514 - RNA, 70 nt, Human
uggaaugaagcuggaaguuagguagacucuauccuuccugguguuuccuccaacucuccagcuuaugcca

SEQ ID NO: 4122515 - RNA, 120 nt, Human
uggaaugcuaggauauguaggauccauagggcaaauaguucuucugaaaugucuuaucugugacauuugaugacauuugguugagcuguugucaaaccuuuagcaaucuagagcauucca

SEQ ID NO: 4122516 - RNA, 88 nt, Human
uggaauucugaccuccugcaggcaggcucaaggcugacuuccaugggaacauggggagugccuugggcccccuaagauucagauacca

SEQ ID NO: 4122517 - RNA, 107 nt, Human
uggaauugcugagucaugugguaauuguguguguaacuuuaugagaaauugucaaacuguuuuucacaggaguuguaccauuuuacuuuccuaccagcaauguucca

SEQ ID NO: 4122518 - RNA, 59 nt, Human
uggaauuucucuguacugggaugcaaacaagagcugaaaauccuuaaagagaauuucua

SEQ ID NO: 4122519 - RNA, 65 nt, Human
uggacaaucagaccguucuggcuguccagucauuauuggauggccaaggagcagucccugauccg

SEQ ID NO: 4122520 - RNA, 57 nt, Human
uggacacauaucuuugauucccagaucuuuauagggagcuacagaguuugguguuca

SEQ ID NO: 4122521 - RNA, 68 nt, Human
uggacagagcgggacccugagggagcauagaauuggccaccacgagcccccaguguccagccuugcca

SEQ ID NO: 4122522 - RNA, 79 nt, Human
uggacagauggucaucguuucaggucgcccugaucuggacaagaaccaaaugagggauccagaggcagugguguguuca

SEQ ID NO: 4122523 - RNA, 62 nt, Human
uggacauaaaauucaguauuuagaguggaucgugcacauaaaugcugaaucuuuacuguuua

SEQ ID NO: 4122524 - RNA, 103 nt, Human
uggacauacagcucauacuguuuacucagcucauugaagccugccucccaugagauuugagaagcaggcucugguuggcaaguaaaggagagcaguuggccca

SEQ ID NO: 4122525 - RNA, 77 nt, Human
uggacaugucacacugaccacaucuguaagcaucuuaaguuguaacugcagauggggaucaguggcucccauuuuca

SEQ ID NO: 4122526 - RNA, 70 nt, Human
uggacauuaguagcuugcugugugauuguuaauuccaaucaguuuacauuaggucaagcugccaaguuca

SEQ ID NO: 4122527 - RNA, 119 nt, Human
uggacauuuugggcuggauguuucuuuguuguggggcggcuguccuggcauuggaggauguuaggcagcauuucugcuuauccaccagacaccuguagcaccaccccuaaguugugcca

SEQ ID NO: 4122528 - RNA, 129 nt, Human
uggacccaacacaagugguucccaguuuucaugugcccugccaagacugagugguuggauggcaagcauguggccuuuggcauggugaaggcaugaauauuguggaggccauggagcgcuuugggucca

SEQ ID NO: 4122529 - RNA, 58 nt, Human
uggacccaggcaggucuguccugcaaagucuuggugggacaccucaacucugggucca

SEQ ID NO: 4122530 - RNA, 77 nt, Human
uggaccuauguacugcccaguuagauaaaacuuaauccgugucugggauuagcaauuguuucauugaucagugucca

SEQ ID NO: 4122531 - RNA, 65 nt, Human
uggacgucgcacgucccuccugucacgaaacacacaaagaggacagagggcgaaggcgggguccg

SEQ ID NO: 4122532 - RNA, 86 nt, Human
uggacguggaaaagcagcccuggggaaccagaagaguugagguagagcuccucuaucagcuggcaguucagaggcuguuuccucca

SEQ ID NO: 4122533 - RNA, 87 nt, Human
uggacuacaacucccagaagacuuugguggagcuccccacuaucuucaugcucuauuacccugaagcuuccugggaguuguagucca

SEQ ID NO: 4122534 - RNA, 74 nt, Human
uggacuacuugaguucucauaauuuaucuaugucaucagcacucaauugacaauuuggaauucgaguaauucca

SEQ ID NO: 4122535 - RNA, 64 nt, Human
uggacugcagugcagcuguuaggcugaaauuaaacuugugagccuggagaaaagcugcaguuca

SEQ ID NO: 4122536 - RNA, 62 nt, Human
uggacuucauaauauugagcauguuugcuggagccacagcuuaaucaguaugagccuaucca

SEQ ID NO: 4122537 - RNA, 81 nt, Human
uggagaccugggugugggucaagcaaccagguaaucugaguuuuggcacuuuggaaagcuugaucugacgcuccuuuucua

SEQ ID NO: 4122538 - RNA, 61 nt, Human
uggagacugugcuaagggaguuaauagagaaauaccacuauuuccuuagccaguuuuucca

SEQ ID NO: 4122539 - RNA, 55 nt, Human
uguguccuuccaguuuuuccugcuaauacagguuggugcuuuuaggaaggacaca

SEQ ID NO: 4122540 - RNA, 95 nt, Human
ugugucucaucuucuuguauuuccuauaaccuuucucuuaugucucggcaaaagccaugcacaguagggguuacagggaguuacacugaggcaua

SEQ ID NO: 4122541 - RNA, 97 nt, Human
ugugucugggacugccugggggccagccugucucugcuccagggucccaggggucccuggcagagggggcaggugcuuggggaggacucaaggcaua

SEQ ID NO: 4122542 - RNA, 56 nt, Human
ugugucuuaguuuaggauucugacauuuaauucuucagaaccuaaguuaaaacaca

SEQ ID NO: 4122543 - RNA, 85 nt, Human
ugugucuuggagucuggaaugaugaagaccuugugcucuuaggcagguccuuccucuuuauuauuuuagaauucuucuggacuca

SEQ ID NO: 4122544 - RNA, 63 nt, Human
ugugugaagcacucugggugaucccuuacaagggagguaaauacaaccuguguuaucaaugca

SEQ ID NO: 4122545 - RNA, 79 nt, Human
ugugugacccgugcugugugauccaugcuggccaugugacccaugcuggccgugugacccaugcuggccgugugaccca

SEQ ID NO: 4122546 - RNA, 58 nt, Human
ugugugaggugguucugagaagagacauuugaaaguuuucauaaaccauucucaugca

SEQ ID NO: 4122547 - RNA, 57 nt, Human
ugugugauugcaggagauguggcuguagacaaagccugccuccccaucaguuauaca

SEQ ID NO: 4122548 - RNA, 57 nt, Human
ugugugcaagugacauuagaaaagcaaaagcucaggauaaacugugacuuguggaca

SEQ ID NO: 4122549 - RNA, 110 nt, Human
ugugugcaauugccagcaucugcuuugguguugcucuuggugcuggagcuuacuugcugcccaugugacaggagcagcucuaaaccaguggucgugagcucuguuucgca

SEQ ID NO: 4122550 - RNA, 56 nt, Human
ugugugcagcugaaaagcgcuguccugagcugagggugagcgcgcgcgcgcacaca

SEQ ID NO: 4122551 - RNA, 73 nt, Human
uguguggaaggaagugauuuucaugucaagguacgucaaaucagguugauaggaaaacacuccuuugauuaca

SEQ ID NO: 4122552 - RNA, 58 nt, Human
ugugugguuuucauauaaucacuccaagcaaaugcgcugaucacaugaaaaccaugca

SEQ ID NO: 4122553 - RNA, 66 nt, Human
uguguguauguauguaugugugugugugugugcgcauguacaugcacaccuauauacaugugcaua

SEQ ID NO: 4122554 - RNA, 59 nt, Human
ugugugucagggcuagagcugggaccacaaccugcucccagcgcugagcccugcaggca

SEQ ID NO: 4122555 - RNA, 59 nt, Human
ugugugucagguacugugcuagggacuaagaauguggcccuaaacaagacugacacaca

SEQ ID NO: 4122556 - RNA, 59 nt, Human
ugugugucagucuuguuuagggccacauucuuagucccuagcacaguaccugacacaca

SEQ ID NO: 4122557 - RNA, 72 nt, Human
ugugugugcacacgugcgugugcaugugugugucugcacaugcaaaugugcaugcauguuugugcauacaua

SEQ ID NO: 4122558 - RNA, 89 nt, Human
ugugugugcugaaaccugggccucagagauggucagugagaaggacuaggucauucauugccucucugggcccucuuagcuaccacaca

SEQ ID NO: 4122559 - RNA, 82 nt, Human
uguguguguguauaaauguguguauguacauauauauguauacauauauguauguauauguauuuauuuguauaugcauaua

SEQ ID NO: 4122560 - RNA, 57 nt, Human
ugugugugugugcacgcguguguguguguguaugugugugugugcccucaccacaua

SEQ ID NO: 4122561 - RNA, 65 nt, Human
uguguguguguguauguguguguauauauuuauaugugugucuauacaugugcacacacaucaca

SEQ ID NO: 4122562 - RNA, 81 nt, Human
ugugugugugugugugugugugugcauguccaugaauguucuucaccucaugaacaucucaaauaaccaugcuuccacaca

SEQ ID NO: 4122563 - RNA, 81 nt, Human
ugugugugugugugugugugugugugugugugugugugugaugguacacauguauggcacuuacauuuucacugagcagca

SEQ ID NO: 4122564 - RNA, 75 nt, Human
uguguguguguguguguguguguguguguguguguguguguguguguaguuauaccuuauacacauaugaaaaca

SEQ ID NO: 4122565 - RNA, 65 nt, Human
uguguguuacaguuuauguaugcuguacauguauggguauagacauaaacuuacugaaauacaua

SEQ ID NO: 4122566 - RNA, 61 nt, Human
uguguguuaucuuaguucaucucacaaaagcccuaggaagagaugacuacgaugaugccca

SEQ ID NO: 4122567 - RNA, 59 nt, Human
uguguguucccggagaugcugucuggggcccuuuuccugaacuucugaggaacugcaca

SEQ ID NO: 4122568 - RNA, 74 nt, Human
uguguguucuauucugauucguguggauuuguucaaguaaauaauaacuuugauaagaaucagggaggccacca

SEQ ID NO: 4122569 - RNA, 71 nt, Human
uguguguuuuucagggaacaucugacuacauucagaagcacgucaggaguuccuaugugggcagagacaca

SEQ ID NO: 4122570 - RNA, 74 nt, Human
uguguuacagcugcuuuugugaaauaaagauuguccauuucuuuuuaugauuauuuuaaagcagcuuuuaugca

SEQ ID NO: 4122571 - RNA, 65 nt, Human
uguguuaggcuuuuaucugaagccacagaccaaaucuuggaaucauucuuaaaggucugacugca

SEQ ID NO: 4122572 - RNA, 59 nt, Human
uguguuauuugguuauuguaauugggauuuuucccauugcauuuaucaaauauuuaaca

SEQ ID NO: 4122573 - RNA, 55 nt, Human
uguguuccagagcauccaggucuucuucggaaccuucccgggcuuuggugacaca

SEQ ID NO: 4122574 - RNA, 58 nt, Human
uguguucuggaaagcucacugaaucuugaaggagacaggggagccaggcuaggaagca

SEQ ID NO: 4122575 - RNA, 76 nt, Human
uguguuguaaggggauggauagcugugaagcuagccuaugguuucagggucuagaguaucuaccucuucuaacacg

SEQ ID NO: 4122576 - RNA, 76 nt, Human
uguguugugugggguuuuuuugguguguguguguggaaugacagauacauauagaaaacaucaacaaagugucaua

SEQ ID NO: 4122577 - RNA, 118 nt, Human
uguguuguuuucgucuugcuuuacacauguaagccuuucuguucaccugcucaaaaacuuauuuggcucugugagaacaaaggcuauaccugucaaguauucuccacagcccagcaca

SEQ ID NO: 4122578 - RNA, 118 nt, Human
uguguuucauaugucuuucauuccuuuaagauagcauacauguuguuacuuguuuugcacagaagaaacuagggcuuggcaauuuguaugucgguaaugucagauaagugaugucaca

SEQ ID NO: 4122579 - RNA, 105 nt, Human
uguguuucuucucaugauucuaggcauugaagauacagcagagaacaaaacauaaaaaaaucacuuaucuucugcagucuguguucucaugaggggaaacugaca

SEQ ID NO: 4122580 - RNA, 55 nt, Human
uguguuucuuuguuccuuguggggcagcccuuucccugaacacagaauaagcaca

SEQ ID NO: 4122581 - RNA, 61 nt, Human
uguguuugaguccucacagugccccaggaguuccuacccaccugugaacugcuuaaagcca

SEQ ID NO: 4122582 - RNA, 86 nt, Human
uguguuuguuuacacagaaauuaauaugcuuuaucauguacaauucaaaagaugaggcaauuguuuguguaauagggcuuaacaca

SEQ ID NO: 4122583 - RNA, 82 nt, Human
uguuaaaaugcuguguccagggccuuaccucuucagauucugacucaaucugggguggagcccuggagucugcauuuuaaca

SEQ ID NO: 4122584 - RNA, 80 nt, Human
uguuaaagagcucuuacucuaguguacuagugugucuaaguuuguagcugguaucauuccgaaguggagcucugaaagca

SEQ ID NO: 4122585 - RNA, 76 nt, Human
uguuaacaaugucagaauuacaguugauuuuuacuuccuccuuuggaauuuucuguguuucugaaguugucagaca

SEQ ID NO: 4122586 - RNA, 72 nt, Human
uguuaacacagaguaaguggucaauaauauuugcuaagaacaaagcuccauugaugcacugcuuguuuaaca

SEQ ID NO: 4122587 - RNA, 68 nt, Human
uguuaacauguggcugguaguugacaacuucacuguugaggaguucccaguccccagccacagagaca

SEQ ID NO: 4122588 - RNA, 98 nt, Human
uguuaauguuguuuguuuugcuuuguuguuuauucuaauuucuucaaaagagggaauauuagguaagauaaagcagaggaucuggaugacaauggaca

SEQ ID NO: 4122589 - RNA, 82 nt, Human
uguuaauuugauuguaggagcuaaaauauuuuauauguauaauauguagaaaguuauuuuacucuuaucagguaaauaagca

SEQ ID NO: 4122590 - RNA, 62 nt, Human
uguuacacauuaacaggcagcuaaugcagucucuguucgcauuuuuauccucguguguggca

SEQ ID NO: 4122591 - RNA, 60 nt, Human
uguuaccaaggcugcuucuaguggccuucggcggucuccuugggaguuuccaugguaaca

SEQ ID NO: 4122592 - RNA, 129 nt, Human
uguuacccaccacguugacauuugagucaguguacucaagagccagguaagcacagggaaacaaucauuuccuguagcaugaguggucuuaagacaucuagcuuccuguugagcaagguaagaaugaca

SEQ ID NO: 4122593 - RNA, 102 nt, Human
uguuacccagaugacagguaaccgccaacucaggguccuucacuucaggcggaaaauauuaagugcaaagggaucagauugggaagcugucaucuaguaaca

SEQ ID NO: 4122594 - RNA, 76 nt, Human
uguuacgccagaguguuaaaguacugugcugucuuccacagauccucaggcacagaauaacacucugggcugcaca

SEQ ID NO: 4122595 - RNA, 57 nt, Human
uguuacuccugguugagcuuggugcugaugaccuguuuacccagcccaggaguggca

SEQ ID NO: 4122596 - RNA, 74 nt, Human
uguuacuugacacagucaacuugauuuuucucugaaacaauaaaaggcaaagagaaaagcaacacgugucagca

SEQ ID NO: 4122597 - RNA, 75 nt, Human
uguuagagcaauaguuguccaucagcagaugaaauagaauucagcugucagaugcgauaaacuagugaauauaca

SEQ ID NO: 4122598 - RNA, 60 nt, Human
uguuagauguuccacauauauauguagaagaauggcuuucuagguguggaguuucuagca

SEQ ID NO: 4122599 - RNA, 75 nt, Human
uguuagauuggugcaaauguaauugccauugaaaguaauggcaaaaacugcaauuacauuugcacuaaccuaaua

SEQ ID NO: 4122600 - RNA, 104 nt, Human
uguuagccaggagggucucgaucuccugaccucgugaucugccagccuuggccucccaaagugcugggauuacaggcgugagugaccgugcccggcuggcaaca

SEQ ID NO: 4122601 - RNA, 76 nt, Human
uguuaggaagcuauuaaaaggcaagaguaugcuggcaaaaugauuucagugugugccuuuggauaccugcuuagca

SEQ ID NO: 4122602 - RNA, 78 nt, Human
uguuaggcuggugcaaaaguaauugugguuuugccauuaaaugacaaaaaccacaauuacuuuugcaccaaucuaaua

SEQ ID NO: 4122603 - RNA, 119 nt, Human
uguuaguagacaaaagugcugcagaauaguaaaagguaagagacauaaagcucauuaacgauuagaauugacaaguguugcauuuugccauuauuuuguuucauuauaguauuuuaaca

SEQ ID NO: 4122604 - RNA, 93 nt, Human
uguuagucuacauaccauuauuuguguucaagauuaguucuagugguugcuaauuuuacuuuuaauacuugaagcaauguaaugugauuuaca

SEQ ID NO: 4122605 - RNA, 73 nt, Human
uguuaucauguucaucguauuuaggcuggcuaccacugagaaagccuggauaauggugguacuuguggucuca

SEQ ID NO: 4122606 - RNA, 57 nt, Human
uguuauccucagcaagugaauuuucauaauaugaaaggccauuucugaggguuugca

SEQ ID NO: 4122607 - RNA, 57 nt, Human
uguuaucugagcaacgucgacgggggagaacaccccugcccgagguuaaagauagca

SEQ ID NO: 4122608 - RNA, 72 nt, Human
uuaugcaaauauucaagacuuuuccaucauuuaugauaacaguguugggaaagcuaggauauucaaguauaa

SEQ ID NO: 4122609 - RNA, 62 nt, Human
uuaugcacacaggcuuaauucaugggauguuaaaaucuuacugaacuaaaucuuguguauga

SEQ ID NO: 4122610 - RNA, 72 nt, Human
uuaugcagauggcaugaggaggaauugucagcgguugucacugaggaacugcucucucaccaucugacauag

SEQ ID NO: 4122611 - RNA, 73 nt, Human
uuaugcaguaauuguaaacugauuuggaaaaaaaggaaaucuaaaucugugaagcguuuacauuacugaauag

SEQ ID NO: 4122612 - RNA, 72 nt, Human
uuauggaucuuacugguaagugauguguaacacuuuugcccacauucuacuggccagaacuaagucacauga

SEQ ID NO: 4122613 - RNA, 121 nt, Human
uuauggguugguuuauagugcauugcccauagaugggcccaucuguccaacagucugugugauaccauaccuucuacagacaugggccgcucuugaggagugccuauaaaccugcuguuaa

SEQ ID NO: 4122614 - RNA, 83 nt, Human
uuaugguauucuuuuaugugagacaugaaaauuccaaacauccuguacuuacuaagguucugucuggcaaaggauuaccauga

SEQ ID NO: 4122615 - RNA, 68 nt, Human
uuaugucucccagaggcaguugguaacuuauuuacaacuuuagguuccucucagcucugggaacauag

SEQ ID NO: 4122616 - RNA, 88 nt, Human
uuaugugauuacagauccaagugaugaaauuuacuccaccucuugaugagaaggcagcaaagucacauggaaaaggguaggcauauaa

SEQ ID NO: 4122617 - RNA, 90 nt, Human
uuaugugguuagagagaaggggcuggugaauucuaggauggcuuugacuuccugaacauuaugcaagcuucauuuuuuucuaucauauaa

SEQ ID NO: 4122618 - RNA, 76 nt, Human
uuauguuauauuggcagaagagaagaugauagcugugaaaaauguagccuucuuugauuuuguuacuaagacauga

SEQ ID NO: 4122619 - RNA, 80 nt, Human
uuauguuuuaaaaauugcuauaugugaaugugaauguucaugcauuuacaugcauauauguguguguuucugugauauga

SEQ ID NO: 4122620 - RNA, 126 nt, Human
uuauuaaaaagaaccaccuuuauugggggaauuuggagugguauuugaaucaaauauuuccauguauuguauucauugcuuacccaauugaaaaguuuaguuucuccaugauuuucuuucaaauaa

SEQ ID NO: 4122621 - RNA, 86 nt, Human
uuauuacauuggugcaaaaguaauugugguucuugccauugaaaguaaugguaaaacccgcaauuacuuuugcaccaaccuaauaa

SEQ ID NO: 4122622 - RNA, 77 nt, Human
uuauuaguuuacuguagucuaaauauagucuuaguuuaccauauucuaaguuaauagggauuuuagugaauuuguaa

SEQ ID NO: 4122623 - RNA, 129 nt, Human
uuauuauauacaagauguagcuuaaguguucuggaaaugaguaaaagugaaucuuaugucucagauagaauguaggaguacuuuugcaugacaggaacuuggcagcuugcauuucuugugucaauauaa

SEQ ID NO: 4122624 - RNA, 92 nt, Human
uuauuauuacucauuccauaauaacaaugccagaugccuaucagccgcaaacuaugagauaugcacuguuguuauuggauaaguugugauaa

SEQ ID NO: 4122625 - RNA, 56 nt, Human
uuauuauuuccauuucucagaguaagaaauugaggcucugagagucugagugauga

SEQ ID NO: 4122626 - RNA, 81 nt, Human
uuauucacccauucauuucauucaacaaacuuuuauggaaugccaguguauguaaaggauugagaugaauaaagugaguga

SEQ ID NO: 4122627 - RNA, 63 nt, Human
uuauucacucauuuaacauuauaagccuggcacagggcauggugugagucuugagcuggauga

SEQ ID NO: 4122628 - RNA, 70 nt, Human
uuauucaucucugcauauagagucaggccugugguaggugcucaaggacuucucugcaugagauaaguga

SEQ ID NO: 4122629 - RNA, 63 nt, Human
uuauucuguuugccgaccaguaagaaggucacguggcuggagcugaguaagcaaggggaauaa

SEQ ID NO: 4122630 - RNA, 69 nt, Human
uuauucuuuucuccagaaucccagccuagccagaauccccaggccucccacuucuugaggagagauuag

SEQ ID NO: 4122631 - RNA, 58 nt, Human
uuauugaguaucugcuuggugucaggcucuauucuagguauuggggauacuacaguga

SEQ ID NO: 4122632 - RNA, 80 nt, Human
uuauugaucugcuacugugucccagccgccguggagcccucggucuaguggggaaggaggacaagaagcaagauuaauaa

SEQ ID NO: 4122633 - RNA, 59 nt, Human
uuauugccucaucugcauagguaaaucagaguggucagcagugcagggugaggcagcgg

SEQ ID NO: 4122634 - RNA, 57 nt, Human
uuauugccugauugaggucauuacccuauggugguaaugacaucagcaauguaauaa

SEQ ID NO: 4122635 - RNA, 70 nt, Human
uuauugcuguuguuauggcacuguccuugaaauugcagagaaaauacaggucaacgagagcaggcaauga

SEQ ID NO: 4122636 - RNA, 81 nt, Human
uuauugggcuccacacuccuuuuucucaucugauguuuuacaaauauuuuucuaauugccugagacagugugguccaauaa

SEQ ID NO: 4122637 - RNA, 90 nt, Human
uuauugucuccauuuauuuaggaggaaacugagguuugggaagguuagucacuuuaccgaaguuucuuccuaaaccagcggggacaauaa

SEQ ID NO: 4122638 - RNA, 55 nt, Human
uuauugugcaucuacugugugcaggcccugccuggacacuggggaugcgcagugg

SEQ ID NO: 4122639 - RNA, 66 nt, Human
uuauuuaaacucuuugaaccucaguguucucaucugugcagaugaugcucacuucagagaagauga

SEQ ID NO: 4122640 - RNA, 116 nt, Human
uuauuuaaucuuuauuaaauuaaauucuuuauuuguaaggcagggccaguaaaaccauaaauauuacuggcucugcuuuacaaacagggaagcacauguuccaagaaguuaaauga

SEQ ID NO: 4122641 - RNA, 129 nt, Human
uuauuuagagaucaaacuggcagaaugucagugggaaucugucgcguguuugguuuucugaagcacagaaagcuuaugaaugggcaagaugcugaauuccgcugugaugcccgaaacuuucuaaaaaua

SEQ ID NO: 4122642 - RNA, 64 nt, Human
uuauuuaguccucacaacaacuuuaagagcuagauaccuuuuaaggcacagagagguuaaguaa

SEQ ID NO: 4122643 - RNA, 69 nt, Human
uuauuuagucuuuuauucaaggcuaagucaguugcugcuuuggcuugcauauuggaaagacucagauga

SEQ ID NO: 4122644 - RNA, 93 nt, Human
uuauuucacuauggcacagugggaaaugaccuuuguaacaaaugccacaucagguaaaugggucauuuuacuuaaauugccuauaugagauaa

SEQ ID NO: 4122645 - RNA, 95 nt, Human
uuauuucaucaaagauguuuuuaaacugggagaauaacuuauuguauuggauuugaugcauuagaaccuauaaaaagcaucuuugcgacagauaa

SEQ ID NO: 4122646 - RNA, 91 nt, Human
uuauuucucuucuagacacugagcuuccaagauggggacuauguccuauccacauauuccagacaccaagcuuagugccugauugaaauaa

SEQ ID NO: 4122647 - RNA, 68 nt, Human
uuauuucuuuuucuuauuuuaugagauugacugaaaaguccaguacaauguuaaggaaagagagauag

SEQ ID NO: 4122648 - RNA, 124 nt, Human
uuauuugacuguagagguuaauccuuaacuguagguuugugguugggggccuucuuagaaaagcuguauuuuggcaggaaccuuaaccacaaauauuuaggggguuuucuuuguaguucaauga

SEQ ID NO: 4122649 - RNA, 87 nt, Human
uuauuugagacuaauuaaaggacugaugacugcaugcccgauuuuaugauuaagucaguuauucaauugguuuaaagcaucaaauaa

SEQ ID NO: 4122650 - RNA, 73 nt, Human
uuauuugcauucugcucauccugacaucucuuccucccacucuugauguuuggcaguuuuagagugcaaguga

SEQ ID NO: 4122651 - RNA, 110 nt, Human
uuauuuguuuaccuuuauauaucuugauuuguuccacaaagaauuuggaguggcuuguaagaauuguuagcucaacagugggauagauugauggauagagauauaaauaa

SEQ ID NO: 4122652 - RNA, 62 nt, Human
uuauuuuaccuguccauuaugugcugcuuucuauagacuaugcacaagggcaggcaagguga

SEQ ID NO: 4122653 - RNA, 55 nt, Human
uuauuuuaccuuccucugagcugcuaaucgccugccucugagcugggugagauaa

SEQ ID NO: 4122654 - RNA, 80 nt, Human
uuauuuuauguuuuccucauaugaguuuagaaucacuacaugaaaauugauucucugauggagaaagacauugaaaguaa

SEQ ID NO: 4122655 - RNA, 86 nt, Human
uuauuuucugauuugauaguguaaaauuuccaucugcuuucacuuuggagcaguuuggaaaauacuagaaaaaaauuaggagguaa

SEQ ID NO: 4122656 - RNA, 130 nt, Human
uuauuuugccuguuuuagauucuuccggaggaccccugggcuugguuccaaccuguauccaucagcuccugagguuggccaaccagaacggaggucuagcuguucagugaugaaaccggccuuugaaugg

SEQ ID NO: 4122657 - RNA, 57 nt, Human
uuauuuugguggcagcauuuucuaguuuuccugccagaaugucugccuucacaauga

SEQ ID NO: 4122658 - RNA, 64 nt, Human
uuauuuuuauggcauuuggugugacuacccucccauccuggagacaucagaguugugaagguag

SEQ ID NO: 4122659 - RNA, 64 nt, Human
uucaaaauguacagcugucuuuccucccaugaaagcccagggauggaguugguuuacuuuugaa

SEQ ID NO: 4122660 - RNA, 72 nt, Human
uucaaaauuguaagaagaaaaaugcugcaaaguuacaagauucuaugcaguguuacuugguuugcagaugaa

SEQ ID NO: 4122661 - RNA, 65 nt, Human
uucaaacaaaacucuuuccuauaaugcaaacucaggcggcaggaaauaucauggguuuuguugaa

SEQ ID NO: 4122662 - RNA, 63 nt, Human
uucaaacauuuucuacuuccaggacucaucuccaugcuguguccaguagagacuaugcuugaa

SEQ ID NO: 4122663 - RNA, 123 nt, Human
uucaaacuugacuauuuggcagacauuaucuggaaaaugaacaaauuaauucugucacuuccaagaaaauaagugacaguauuuguugccaaugaugaaacucaagcuuucaagaauuuugaa

SEQ ID NO: 4122664 - RNA, 92 nt, Human
uucaaagauuuggggaguuaaugccaaagauauguuagcagguaagaaucccacauccucuagacguuugcguugguccucaagacuaugga

SEQ ID NO: 4122665 - RNA, 76 nt, Human
uucaaagcgaauacaagccugccaccuggaggaaggacugcaccccuucagguacuaagugcugauucacuaugaa

SEQ ID NO: 4122666 - RNA, 57 nt, Human
uuccacuuucccugccuggguacucacaccuugugugcccaugugggagggguagaa

SEQ ID NO: 4122667 - RNA, 63 nt, Human
uuccagaaucuuguuucuuguguguuucugguuaggagaggccacaagagagauucuccugaa

SEQ ID NO: 4122668 - RNA, 57 nt, Human
uuccagaguugggggagugguuggagaaauaaacaacuaauuaccuaacauugugaa

SEQ ID NO: 4122669 - RNA, 64 nt, Human
uuccagcagccucugaccaggaaggccaaguacacggucagucucuggccagagccugcgggaa

SEQ ID NO: 4122670 - RNA, 72 nt, Human
uuccagcccugccuggcuaaacucaagucgcucaacuccugauugacucauagucuagguauuugguaggaa

SEQ ID NO: 4122671 - RNA, 130 nt, Human
uuccagcuagaauugagaaaacaucugagucaaugucauaaaguaggcaagcauuccauuuaauaguuuguaauauguuggcuaugguuugcuuuguuuuugcuuugcuuugauuuuguuuuuguuggaa

SEQ ID NO: 4122672 - RNA, 76 nt, Human
uuccagcugcuguaacagaauacuuuauaucaguuaauuaacaaacaacagaaguuuacugcuugcaguucuggag

SEQ ID NO: 4122673 - RNA, 94 nt, Human
uuccagcugucugugcucccuaauugguuuccacacugcagccagcaaagggucucuaagcugcugaugggugggauacggagggaagcuggga

SEQ ID NO: 4122674 - RNA, 55 nt, Human
uuccaggaagauucaacaaaagccacggcuucucugaguuuguuguuuccuggag

SEQ ID NO: 4122675 - RNA, 55 nt, Human
uuccaggaagcucucggccucuagcugaccgcguugcugcugagcuucccugggg

SEQ ID NO: 4122676 - RNA, 62 nt, Human
uuccaggaggcauucuuaguuuaaagguuucuuugucuuuucuaagugaucuccaguuggaa

SEQ ID NO: 4122677 - RNA, 67 nt, Human
uuccaggcaugucagacauaggcaaaauggcucuaauugccucacuuuuccuucugacgcuugagaa

SEQ ID NO: 4122678 - RNA, 71 nt, Human
uuccagggagcucugggccggacuccacuuucugggaauagaguuagguggccagugcucucagacuggaa

SEQ ID NO: 4122679 - RNA, 57 nt, Human
uuccaggggaagcagggaggagccaaauaacaggccuuuccagcauuuccuugugaa

SEQ ID NO: 4122680 - RNA, 66 nt, Human
uuccaggugacuuuuaaucuauauauguuugguaaaacuauauuuggaaagaaaaucauugaggaa

SEQ ID NO: 4122681 - RNA, 61 nt, Human
uuccaguucacuccauuucuggaaacaacucacccaucuccaggaaaaauggaaacuggag

SEQ ID NO: 4122682 - RNA, 63 nt, Human
uuccaguucccaugaggauuaaaaggaagaaguggacuuuaacuccagcgaugggacugugga

SEQ ID NO: 4122683 - RNA, 84 nt, Human
uuccaguuggcuguauuuucaucuuguccuuggaugacaggcuguguuaucagcagggaugguugaggugcagcugagauggag

SEQ ID NO: 4122684 - RNA, 63 nt, Human
uuccauaauaggcuuaagugaaguagguagugagacacgcaucauaugaugccuaugauagag

SEQ ID NO: 4122685 - RNA, 56 nt, Human
uuccauauuggaaggcacaggccuagagcaaugccuggcacacaguugacauggaa

SEQ ID NO: 4122686 - RNA, 87 nt, Human
uuccaucagcaagaccuuauuuuuaccuaauuuaugagagguauuucucuguucagaagaggugaaaguucuggcuucuggggggaa

SEQ ID NO: 4122687 - RNA, 77 nt, Human
uuccauccgcgaauguuuagcuuguuggaacaauugauuugucgguuccagaagcgaguaaacugaccugcgaggaa

SEQ ID NO: 4122688 - RNA, 58 nt, Human
uuccauccugacuuacaaagggguggcuuagagccccuggaguacuaaggggauggaa

SEQ ID NO: 4122689 - RNA, 80 nt, Human
uuccaugagaugaugguggguaauguguaaaagcugaacugcuucuugcugccaucaccacaccauguuauguuaaagaa

SEQ ID NO: 4122690 - RNA, 59 nt, Human
uuccaugaugaauucagcauugaggaaagaacagguaaccucagcuggguucucaggaa

SEQ ID NO: 4122691 - RNA, 87 nt, Human
uuccaugcccagagaaaguaauaugguuuuccucugcugcuuaacauauaguuacaccucagugagaagaucuuucuguucauggaa

SEQ ID NO: 4122692 - RNA, 91 nt, Human
uuccaugucagacauccagacauugaaguauuuuugucgauaaagugucaaggaaauugaccaaaguguucaguuugcggaugauauggaa

SEQ ID NO: 4122693 - RNA, 100 nt, Human
uuccauguguaguaacggggucuccauuucuaaguuggagaaguucaugguaucacuuggaagacuccuaggguuggagacagugacaccucauauggaa

SEQ ID NO: 4122694 - RNA, 67 nt, Human
uucccaacaaugcacuaucguaagugguguugcauaaacaucucauacuucgcugugcaugugggag

SEQ ID NO: 4122695 - RNA, 59 nt, Human
uucccacccccaaaugggcucuacuuugcagauaguaagagccccugguggagugagaa

SEQ ID NO: 4122696 - RNA, 73 nt, Human
uucccagaaucuuuggaagagcaaaaacucucaucuucaaagacaauugcuuaaaauuuuccaaggauuggag

SEQ ID NO: 4122697 - RNA, 60 nt, Human
uucccagagauaagacgucuuauuccuuucacuuagaggguguguguaugucucagggaa

SEQ ID NO: 4122698 - RNA, 66 nt, Human
uucccagagcagaugugcuaaagaaaggguaagcugaggcguuccuacucagaucagcuuugggag

SEQ ID NO: 4122699 - RNA, 65 nt, Human
uucccaugcccgguggguggaauucacagaauucuuccuguuuccuugaaagcuggacauggggg

SEQ ID NO: 4122700 - RNA, 64 nt, Human
uucccauggcaucuaaucccagugagugcuccaaagccaggcuguguaucagaugccacgggaa

SEQ ID NO: 4122701 - RNA, 80 nt, Human
uuccccaauuaccaauauuuuagagcugagcuuacagucaaauaacucuacuugcuuaggaaaaugguggaguugaagaa

SEQ ID NO: 4122702 - RNA, 99 nt, Human
uuccccacacucucuuauaauucaggauucaaaugugguucaggucaucaaucagcuacacuugcaugagucuugaauccagaagugagucagguggag

SEQ ID NO: 4122703 - RNA, 85 nt, Human
uucccccaacgaggcacacauuuuguauguguuuacaauuaagaauuugucauguauaagacacuguguucaaugcuagugggaa

SEQ ID NO: 4122704 - RNA, 72 nt, Human
uuccccgugguaauauaucaaagacauucauuacaggcuacuguggcucaggugauauauuacucaggggaa

SEQ ID NO: 4122705 - RNA, 98 nt, Human
uguuguugugagcuuugauuuuaaggucuuuguuauugccggauaaucaagcaaaaucugacuaauacagggcacuuugagugaggcucaucccaaca

SEQ ID NO: 4122706 - RNA, 78 nt, Human
uguuguuucaguaagcaaucuaaaagccuuaccuaauacauuagauaggugagaguguuuuuagguuagcagacaaua

SEQ ID NO: 4122707 - RNA, 79 nt, Human
uguuuaaaccaaaacucuuccuuucuuuaaaguauggucugcucuacugccagagacaaggaugaguaaaguuuagaca

SEQ ID NO: 4122708 - RNA, 130 nt, Human
uguuuaaacuagcauuaaaucauggaagucaaguuucucuuugaugggagucagugggaaauaaacucuacuuguucuuucaagagauagcaaaauauuuguuuccaauuuaaaugcaggaaguuaaaaa

SEQ ID NO: 4122709 - RNA, 106 nt, Human
uguuuaauauaugcuuuacauuuuggaaaggugaaguguacauugauuuuucuguuguuuuucuuguaguguuaccucuuucaaagguguaacaugcuauuaaaca

SEQ ID NO: 4122710 - RNA, 83 nt, Human
uguuuaaugguuuaguggaagugggagggaagauauugcaaaagguaauaugcuagugugcuuauacuuggacuuuuuagaca

SEQ ID NO: 4122711 - RNA, 72 nt, Human
uguuuacauaagccuuaaauguuucuaauauucuuacagggugggcagaacauuuguaggcuuaacugagca

SEQ ID NO: 4122712 - RNA, 81 nt, Human
uguuuacuguggagagaggugaaaagagauggagcagguaggguucugccaucaggacagcuucuuuucacuguagguuca

SEQ ID NO: 4122713 - RNA, 104 nt, Human
uguuuacuucauacuaaaacauuugcucuuuucuaaaacuuuuuuaguauaccauuggcuaccaggcuauacaaguguagaauagagaaaaggaugaaagaaca

SEQ ID NO: 4122714 - RNA, 68 nt, Human
uguuuacuucuuuccauggcuugcaaaccucuucuacugacaagucuacugggaaaggggggugagca

SEQ ID NO: 4122715 - RNA, 85 nt, Human
uguuuagcucugagaccauuaacaugauuuuggggaaucauuuugauuuucaggaaacauuuaauggcauuaaaaagacugaaua

SEQ ID NO: 4122716 - RNA, 82 nt, Human
uguuuaggcaagagugacuacgugaaagaaauauuuuagggcgagcaaauucuuuuaaaggauacucuugucuacaaagaca

SEQ ID NO: 4122717 - RNA, 97 nt, Human
uguuuaguuugcuggccugugggucuccaugaguucuguugcuuugggcugcacaaaugcugggaaccauuggaucagccaccccagccacuagaua

SEQ ID NO: 4122718 - RNA, 71 nt, Human
uguuuauaccuugguauaaccacucuccuguuuuggggaacuagguuucugguuuugcuccaguauaaaua

SEQ ID NO: 4122719 - RNA, 61 nt, Human
uguuuaucugugcuuauguuuaaauaauaguuuuguuagauaugguuugcauaaauaagca

SEQ ID NO: 4122720 - RNA, 79 nt, Human
uguuuaugggccuuacuuggggcugacuccaucacugaauccaggaguagucacagaaacccagguguggcagucaaca

SEQ ID NO: 4122721 - RNA, 66 nt, Human
uguuuauugagugccuacuauaggccuggcaagucuucuagguacugguuagcauugagcaagaca

SEQ ID NO: 4122722 - RNA, 59 nt, Human
uguuuauuuaacaggaagucuggagauaggcauccuaggccuggccugguggaucaaca

SEQ ID NO: 4122723 - RNA, 62 nt, Human
uguuuauuucuuuguuacugagguuauguaucuagacauguuucauaaagaggaaauaaaua

SEQ ID NO: 4122724 - RNA, 57 nt, Human
uguuuauuuuauuuagagagcugggaccuaccaugcucagauucugaauaauaaaca

SEQ ID NO: 4122725 - RNA, 77 nt, Human
uguuucaagaauuucugcaucucuggagaucuaugggauggcucugggcuccagauugcagcgaucacuguggagca

SEQ ID NO: 4122726 - RNA, 67 nt, Human
uguuucauggagagcugaauauuccuauuuccuuucuggcauuaaaauaucagcauuccaugguaca

SEQ ID NO: 4122727 - RNA, 110 nt, Human
uguuucauuuagaaaucugaaugauggaguguuggcagagggccaccagaauucaaaagagguugaguuuaauccuccagcccaacuguccacauuuagaaaugacaaca

SEQ ID NO: 4122728 - RNA, 57 nt, Human
uguuuccagaaggacaaagaaaagaaauacuuuucuccccagucuaaucuggauaua

SEQ ID NO: 4122729 - RNA, 83 nt, Human
uguuuccagcugcagccgagugacauuggugucaucaaugaccuuguggagcccacggaugucgcuuuccgcagacuggcgca

SEQ ID NO: 4122730 - RNA, 65 nt, Human
uguuuccauuguuuuugaaaugcuuugguuaucccaaucccaagaaauauuucccaauggaaaca

SEQ ID NO: 4122731 - RNA, 77 nt, Human
uguuucccuuugugaacaauacagcaugaaauagccuaguuccacccauauggaaggcuguuguuucacaacaaaca

SEQ ID NO: 4122732 - RNA, 79 nt, Human
uguuucuaaaugcugauuuagauaaaugcuuuucuaaccaaaaugaagcaguaugguauuuaagucaaccauggaaaua

SEQ ID NO: 4122733 - RNA, 87 nt, Human
uguuucuaauuuuaguucagccaaaggagcgagacauguguucaacauguuuucucuauuuuccuuugguucucuaagaugcugaca

SEQ ID NO: 4122734 - RNA, 97 nt, Human
uguuucuagcuguuucuuaagucaucugaaugaauguuccuuggcaguuguugagaagauuaaacauauuuaguguaugacuugaguacaagaaaua

SEQ ID NO: 4122735 - RNA, 82 nt, Human
uguuucuagguuuauguggucauugacauauuuguauauaagcacgcucaucuguaaauggucagauaaaccuaccgaaaua

SEQ ID NO: 4122736 - RNA, 81 nt, Human
uguuucucaauccuguuggcaguuauauugcaaugaaaauuaauuaacucauucaauaaauaugcuacaugguggggauca

SEQ ID NO: 4122737 - RNA, 119 nt, Human
uguuugaaaguugaacuggagacuugcauguuccaaagaauuuugcuccucgagagcucaaucuuccaggcaauuucuaacauuccauggauguucuuuaguuuuguucuuuucaaaca

SEQ ID NO: 4122738 - RNA, 101 nt, Human
uguuugaauuagauuguguucauuuaacuguucuuuaugagcuggacgccagguacugugcuagcaugggggaacacaaaugaauaaaaaauaagcagaua

SEQ ID NO: 4122739 - RNA, 88 nt, Human
uguuugaauuauuuagcuuuuguauucuucuggucugcuaauguuuagauacaaaucuacagccagaugcagaaaguuaacccaaaca

SEQ ID NO: 4122740 - RNA, 57 nt, Human
uguuugaggagggagcuggucuggugccaccauuuuccagcugucuguccuuaggca

SEQ ID NO: 4122741 - RNA, 124 nt, Human
uguuugcauuaccuguuaagaaagccagagugaaguucuaggaaauuaggagacaugcaaaacacagcacucuucuuaaaccacacaugugcucucuuaacauuauuggaauaauguauuaaca

SEQ ID NO: 4122742 - RNA, 74 nt, Human
uguuuggccauuguuuguaacuuuagaauugauccuaaaauaggucucagauagggagguuacauggucaaaua

SEQ ID NO: 4122743 - RNA, 73 nt, Human
uguuugggaagcaagugggaggagagcaggccaaggggcuauauaacccuucagcuuucagcuucccugaaca

SEQ ID NO: 4122744 - RNA, 58 nt, Human
uguuugggcagaagcugaaugucugugucuccaagcagccagccaucaugcccgguca

SEQ ID NO: 4122745 - RNA, 71 nt, Human
uguuugguaguuggggucggguuuguaguauugcagugugcuuuaacaagcaugggcuuugacaucagaca

SEQ ID NO: 4122746 - RNA, 57 nt, Human
uguuuguaaagcagagccaguaauauuuaugguuuuacuggcccugccuuacaaaua

SEQ ID NO: 4122747 - RNA, 59 nt, Human
uguuuguacucaaagccaugagaggcagcgcauagcugcagacuggaagagugcagaca

SEQ ID NO: 4122748 - RNA, 57 nt, Human
uguuuguagaaacaaaagagcuauccaucacuggggcagcuuauacuuucauagaca

SEQ ID NO: 4122749 - RNA, 59 nt, Human
uguuuguauguaucaauuaucugucugcauguacacaugcuugcauguacauauacaca

SEQ ID NO: 4122750 - RNA, 63 nt, Human
uguuugugagugcacaugcccacacuuacaugcacacauguuguguguguguacuucuaaaua

SEQ ID NO: 4122751 - RNA, 73 nt, Human
uguuugugcugccuggugggcagagaccuugauuuuaaacuugcuugucacauguccagcuacagcacaggca

SEQ ID NO: 4122752 - RNA, 130 nt, Human
uguuuguuuuaccauagaagcugaguucccauugcccuagcuuguaucacaugcccaucccucaaccauacacuagugcugcaguggugagcugguguauuauuaauaguuucuuauggcucccauaaca

SEQ ID NO: 4122753 - RNA, 78 nt, Human
uguuuuaaaagaauuugacauuucauaggugcucaaugaaugcuggagucuaugaaaugucagauucugcaauaggca

SEQ ID NO: 4122754 - RNA, 127 nt, Human
uguuuuaaugcuuucuuuucuaccugucugacauucucucucuaugaaaacugaucaaauguuggaagguaaguuucaaguguggagagagaccaagggagauggcaagaaggaaguugguaaauca

SEQ ID NO: 4122755 - RNA, 79 nt, Human
uguuuuaucauguguuuguaccuuuaaauaucauaugguuuaguugugcauguuuuugagauacaaacagauagaagca

SEQ ID NO: 4122756 - RNA, 79 nt, Human
uguuuuaucuucauuuuugauguuaaguagacaggagcugcuaauacugucuguaggacagagaaaugggguuugugca

SEQ ID NO: 4122757 - RNA, 103 nt, Human
uguuuuauuaguggccuauaucccugauauugguguuaagucuaaaauuaacaacuuugaauuagacuuugcuacaggucuuauggaucacauagauagaaca

SEQ ID NO: 4122758 - RNA, 107 nt, Human
uguuuuauuuaaugaggauaaagauuucuuuagcucaucagaucaucuuuggugacagaaccaggauaaauggcugaagaaauaguuuauaaacagaccuugaaacg

SEQ ID NO: 4122759 - RNA, 91 nt, Human
uguuuucaacuuuuccucuauugucugaaaguuugacgauaggaauuucugaaguaaacuugacaguagacagauuaaauagaagaaaaca

SEQ ID NO: 4122760 - RNA, 57 nt, Human
uguuuucuacuuuguguauugggacaggaacaugacagaauuacaauguagaaaaca

SEQ ID NO: 4122761 - RNA, 66 nt, Human
uguuuugauuuuuccaaauacauuuacuguauuugcugagugccuacuguguguuuggacaggaua

SEQ ID NO: 4122762 - RNA, 72 nt, Human
uguuuugcacuaggcucauuaaguccccagggcucuaguccauauggcgaugaaugaguuucagguaaaaua

SEQ ID NO: 4122763 - RNA, 55 nt, Human
uguuuuggucuggcuuuauaucuaucauugagguuauaggccacacuccagaaca

SEQ ID NO: 4122764 - RNA, 86 nt, Human
uguuuuguaauucauuuuggcuugagucgagauuggccgugggaaccuggcuuuauguacucaagucacuaugaggaaugaaguca

SEQ ID NO: 4122765 - RNA, 76 nt, Human
uguuuuguuuggcuugggcacuacaugucaugguuaacccaugucauuuuuacuguaggcuaagucccauaaauca

SEQ ID NO: 4122766 - RNA, 75 nt, Human
uguuuuguuuguuuagaugauacgcugagaaccaaaucuacccugucagcuuacucuucaagaacaagccaagca

SEQ ID NO: 4122767 - RNA, 82 nt, Human
uguuuuucaaauugcagguuguagcccauuaguggguccugaaaucaauuuaaugaguugcaaccaguauuuuuuaaaaaua

SEQ ID NO: 4122768 - RNA, 87 nt, Human
uuaaaaagauaacagaauccuguuauugccaagaaauuuggggguaagaccaugguggcaauuuaagcagguuuuguuuuguuuuag

SEQ ID NO: 4122769 - RNA, 71 nt, Human
uuaaaaaugcuuguaaauuuuccaugugaugucuucuuugacccauggguuauuuggaagcagcuuuuuaa

SEQ ID NO: 4122770 - RNA, 83 nt, Human
uuaaaagcuguguguucaauaaugugauauguauugauacauuuuggcaagugaaaucauaauauaaacauaacaguucuuga

SEQ ID NO: 4122771 - RNA, 105 nt, Human
uggccccacagccacagacucagcacauuugcaggugucgauuagucuaaccagcacuucacaggggacugggucauuuguagugcugauguuuucugucugcca

SEQ ID NO: 4122772 - RNA, 65 nt, Human
uggccccacugccaaggcuguuguacuagaaggaaaugggcauucagcccagagcaguggggcca

SEQ ID NO: 4122773 - RNA, 76 nt, Human
uggccccuucucugaggaaccugcccugguucccugguccaccucccagcuaguagaguucccugggaagggguua

SEQ ID NO: 4122774 - RNA, 62 nt, Human
uggcccugaaaauguuuguccggagcugauacacaucaauucugcauacauuucacuggcca

SEQ ID NO: 4122775 - RNA, 55 nt, Human
uggcccugacugauguggagggagcacaugaaagcgacuuucggauccaaggcca

SEQ ID NO: 4122776 - RNA, 82 nt, Human
uggccgauaguuucuucugucuugcuuccaggaaccuuuucuugguuugaagccaccgaaccagaagagagaauuuuuacca

SEQ ID NO: 4122777 - RNA, 55 nt, Human
uggccuaaaucucaugaucuuuucucauuuguaaagauacugaugauguaggcua

SEQ ID NO: 4122778 - RNA, 60 nt, Human
uggccuaggccuucauaggcauggaagcuucugcuuucagccucuuuggagccuuagcca

SEQ ID NO: 4122779 - RNA, 67 nt, Human
uggccuauuuaaauaaaucuccuuugaacucacguuauauuaaaugguggcucuuuuaaauuggcca

SEQ ID NO: 4122780 - RNA, 63 nt, Human
uggccuccucgcugcaucccauuccuccacacacagaggagacauggaauagugaggcuguca

SEQ ID NO: 4122781 - RNA, 70 nt, Human
uggccucuggagguggccagugguguggcagcuacagucuucaucauugaacacuucuuccuggaggcca

SEQ ID NO: 4122782 - RNA, 79 nt, Human
uggccucuggggaggcaguuucugauauuaguuugugucuguccuucccaggcacaagaaacugcuccccacaccucca

SEQ ID NO: 4122783 - RNA, 66 nt, Human
uggccucuuaaggaugacacaauaucaccuagcuggaggcuagguaugcaucuaguaagaguguca

SEQ ID NO: 4122784 - RNA, 58 nt, Human
uggccugcucacagucagauggcuaaucagcccagagccagaagcugcuugcaggcua

SEQ ID NO: 4122785 - RNA, 62 nt, Human
uggccugcugcugguuagauggggcacucccuggaauggcccaucacugcagcaaauggcca

SEQ ID NO: 4122786 - RNA, 76 nt, Human
uggccugugacugccucugggcagaugguagaucccucugauggggaacagggaggcccagagggagccaagccca

SEQ ID NO: 4122787 - RNA, 73 nt, Human
uggccuuaauagauaugccucuagaguuuuacccguaagcauaaugaaggcuguugguauauuuauuacguca

SEQ ID NO: 4122788 - RNA, 61 nt, Human
uggccuuccuggugacucaugagcauuacccagaguaugaccugugaguguccagagacca

SEQ ID NO: 4122789 - RNA, 65 nt, Human
uggccuugagaugcagcagccagucuaaggccacuauauguggagguugguguguccaguggcca

SEQ ID NO: 4122790 - RNA, 111 nt, Human
uggccuugccaugagggcacagcugcugcggaaagaugccaccgagaucagcuucaugacccgucuguguuuuccacagcagcuggagcgcaccccauggacgcugggcca

SEQ ID NO: 4122791 - RNA, 66 nt, Human
uggcgaucuccuugaauguugcugugagaauaccagccucacagaaguguguuucaggaguggcca

SEQ ID NO: 4122792 - RNA, 69 nt, Human
uggcggaguugggggcacuucgaggucgccuuggggcgagguggucgugagggggucccagauaugcca

SEQ ID NO: 4122793 - RNA, 63 nt, Human
uggcggcuugggggucuucacaggcucaaguuucugugucugcacugagcucucccagcccca

SEQ ID NO: 4122794 - RNA, 56 nt, Human
uggcggguguccagcggguggagccagagagcucccagccaugggccaccuagcug

SEQ ID NO: 4122795 - RNA, 85 nt, Human
uggcguuauaaucugucguaguaaaaagcagagaaguaaauacaauccugcucuccaaauaugacaagcugauuauaacaagcca

SEQ ID NO: 4122796 - RNA, 71 nt, Human
uggcguugucuauacauaaaagguagucagaauaaaaagaauucuagcaacauguguuagacaauagacca

SEQ ID NO: 4122797 - RNA, 69 nt, Human
uggcuaaaaauccacacuaggugaaagcucuugaaagacugauucauaacccagggugguuuuuaucca

SEQ ID NO: 4122798 - RNA, 76 nt, Human
uggcuaacaauagaugguaugcuauuccauagacuccugcuaucagagucugcauucacagcaauuaucuuuacca

SEQ ID NO: 4122799 - RNA, 77 nt, Human
uggcuaacagaagaaaacauauuggagaaaaaauuucugaagcacugauuuguacuccaauuugaucucugaggcua

SEQ ID NO: 4122800 - RNA, 80 nt, Human
uggcuaagccuggcgcccagugaaucagccaaggaugcagucaaccagcucuuuggcccuggggccagcuucgaggcaca

SEQ ID NO: 4122801 - RNA, 71 nt, Human
uggcuaaggaauuuuugaggauaauguuaauuacgugugauuuucaucuucagugauuaccuaaaaggcca

SEQ ID NO: 4122802 - RNA, 127 nt, Human
uggcuaaggugaauauggaggcugggcuucagacagcaagauuauuuuagaucccaugugcuggaaggacaaagucucuaauaaucuucugggcuuguagucuagacccagugacuacaucaggcua

SEQ ID NO: 4122803 - RNA, 125 nt, Human
uggcuaauaaaugauuucuauuaggagcuugggaggugggggaugugugaauguucuaaguacuugccauucugugucucuccacagccccuaaaccugucuuuccuagaaucacuugaaaguua

SEQ ID NO: 4122804 - RNA, 76 nt, Human
uggcuauccacagggaacaugacagccuuauaucuguuggauauauuggccuaauuuguuuuucucuguuuugcca

SEQ ID NO: 4122805 - RNA, 60 nt, Human
uggcucacaccuguaauccuagcacuuuggaaggcugagauagguggaucauuugagcua

SEQ ID NO: 4122806 - RNA, 65 nt, Human
uggcucagagaaucucuccuuaguuuaacuauuguucaagacucuccaggagguuguuggaguca

SEQ ID NO: 4122807 - RNA, 57 nt, Human
uggcucaguggcagccgcagcuaggaaggacuagaaaguggcuagaccgcggagcca

SEQ ID NO: 4122808 - RNA, 62 nt, Human
uggcucaugacuguaaucccagcacuuugggaugcuggcagggggcagaucacuugaagcca

SEQ ID NO: 4122809 - RNA, 60 nt, Human
uggcucauugagcuguuuuguaggauaaaaauauuuuguuuagaauuuaguuuugaguca

SEQ ID NO: 4122810 - RNA, 80 nt, Human
uggcucauuuguccucagcccugcauucugguuguugagggagaucauucacagagccagggcuaggaacuggugaggca

SEQ ID NO: 4122811 - RNA, 59 nt, Human
uggcuccauccaaggccuucuaggggaaaccauuagccuccagaagguaggauggaaca

SEQ ID NO: 4122812 - RNA, 76 nt, Human
uggcucgcacaguugccucgggaggcagggaacucauagagaagggccacacugcagcugaggccagcuaugcccg

SEQ ID NO: 4122813 - RNA, 82 nt, Human
uggcucuaacugugguucuauucuagaauuccugaacguguuccaggaguuauggcagaaucaaauaaguuccuuuuagcua

SEQ ID NO: 4122814 - RNA, 83 nt, Human
uggcucucaggaaccaaauagagacuggccuuguggaaauauuaaacuucuauuugcugguugcuucuguuuuccugaaguua

SEQ ID NO: 4122815 - RNA, 72 nt, Human
uggcucuucaaacuggggaacuuauuuauuaaauaguucuauaaugaaagcacuucccuagucuugugacca

SEQ ID NO: 4122816 - RNA, 63 nt, Human
uggcugagaaguucuggugggaaggaaccauggagggcccaucuggauauccuuccucagcua

SEQ ID NO: 4122817 - RNA, 56 nt, Human
uggcugagagucauccuguguggggagaagcggggccacgcguggacucucaguca

SEQ ID NO: 4122818 - RNA, 61 nt, Human
uggcugagugauauuugcaaagaguuccagccuaauaucucuuuuuguaaaucagcaguca

SEQ ID NO: 4122819 - RNA, 59 nt, Human
uggcugaucaauaggcuugaggaaacugacaaauacaauaagaucuguuugaugaguca

SEQ ID NO: 4122820 - RNA, 68 nt, Human
uggcugcaaaugauauuuagagcauaaaaaaaucaaaucuagcuuuaagugauuagaauuugcuguca

SEQ ID NO: 4122821 - RNA, 79 nt, Human
uggcugcaguuugaccuuguuuucuuaguuuuggguugcauggaacaauaggaagagaaaacaaauggaucacuguuca

SEQ ID NO: 4122822 - RNA, 74 nt, Human
uggcugccacagugaacauucugucagggguguugugcuccaaauauugucccuggcagaaugucucugggcca

SEQ ID NO: 4122823 - RNA, 58 nt, Human
uggcugcccuuucugagguguaucauugcugagaugaagcuagcaggaagagcaggca

SEQ ID NO: 4122824 - RNA, 101 nt, Human
uggcugccuggcucuggccguagagaugcugucaggcuaucugucuggaagaguagaugauggagcugauagaauuuaaaaauggccaagcucuguagcca

SEQ ID NO: 4122825 - RNA, 67 nt, Human
uggcugcugagaaggcagcugucccaugcccagauuagguuucuugcagacagugcuucucaggcca

SEQ ID NO: 4122826 - RNA, 77 nt, Human
uggcuggagaugcugggagaggacccauuaccaagcucaacugagcauuugcuagcaggccuuuuauuuccuugcca

SEQ ID NO: 4122827 - RNA, 81 nt, Human
uggcuggcugggaucugucuggaggccuggcaugaguacugagcugugugccacaaagucugccacacagaccaaccaaca

SEQ ID NO: 4122828 - RNA, 93 nt, Human
uggcuguaucuuuagaggcauaccagaguguggggaugcucaggucucaauaaaaucccugggcuucauaauugguccuagaagacacagcua

SEQ ID NO: 4122829 - RNA, 77 nt, Human
uggcugucuaugagccaggaagaaggccuuacuagcaaccaaaucugcuagaaccuugaucuuggacuucucggcca

SEQ ID NO: 4122830 - RNA, 72 nt, Human
uggcugugcauucucugauuuucacaaauaagaacuuuuacaucauuagugaaaugagaauguaugacacca

SEQ ID NO: 4122831 - RNA, 101 nt, Human
uggcuuaaugcccugaagacucucugauggucaauuuucaggcaguuuguguaggaaacauggccuggcaauggccucaggaagccuggcugugauuucca

SEQ ID NO: 4122832 - RNA, 80 nt, Human
uggcuuagcuacuuggguuggcaucagcugggcaguuuuucugcuggucuuaccuggagucacucauguagcugcaguca

SEQ ID NO: 4122833 - RNA, 108 nt, Human
uggcuuagcugggacugaggcauaaucaggauugggacucagaguugguacuuagccugaggucagaguuuagucuggaguuggugccaagucugggaucggggguca

SEQ ID NO: 4122834 - RNA, 76 nt, Human
uggcuucaauuuuccuucuaagaggaaggucagguuauuaaccugaccauuguuuccagagggugaaauucagcca

SEQ ID NO: 4122835 - RNA, 130 nt, Human
uggcuucaucuuuccuuacugguugucauccccugggccaccugcuuuuuugcauuuuccuuucucuugugagaugaugaagcucugugccccgauggggaugagagacagcacucugaguucaagucua

SEQ ID NO: 4122836 - RNA, 79 nt, Human
uggcuucugaugcuugaagccuacauucgucacugaggaaguuacccaggugacuguguaccagguuugcacgaagcua

SEQ ID NO: 4122837 - RNA, 80 nt, Human
uggcuucuggaaauuccagcuaggaaaagcuucccuuuguggcccguuuggaagcacucaggcugggauucacagaaaca

SEQ ID NO: 4122838 - RNA, 64 nt, Human
uggcuugccauaguuaccaggaaaugagugucuaugcacauucauuucagguugcaugguacca

SEQ ID NO: 4122839 - RNA, 91 nt, Human
uggcuugcucacauaguugaugacaccaugggaccagaacccuggcaucaccagacagccuggcuucauggcugugcaaucugagcagcca

SEQ ID NO: 4122840 - RNA, 58 nt, Human
uucaguaguugcuucccugacugcaaaggcaagcuuauuuaguugaguagcuccugaa

SEQ ID NO: 4122841 - RNA, 56 nt, Human
uucaguauauuacucuugucaacgcuuaaagauuuugucaggaggaauuugcugaa

SEQ ID NO: 4122842 - RNA, 87 nt, Human
uucaguauucauuucaguucagaggccuuucaccugcggcauguagauucuaaagggaccugggauugaguuucaagaaucacugaa

SEQ ID NO: 4122843 - RNA, 107 nt, Human
uucaguccaaagcauaugugcuuucauaguauuuauuuacauggaguucuggcuaaagcuauucugcaugaaaauaaacagauuuaugaaagguacuagugccugaa

SEQ ID NO: 4122844 - RNA, 73 nt, Human
uucagucuaaauuaucuuucucagauuuacuaccuaccacuggugaggcugacaaaagaugagguuagcugaa

SEQ ID NO: 4122845 - RNA, 66 nt, Human
uucagugaacuugaguacuucauuccuuuggcaggcuggauaaaugagaagccuagguguacugga

SEQ ID NO: 4122846 - RNA, 78 nt, Human
uucagugguuauugccuuguacauuucauuuaaaugauguuuuauuaugacucuaaaagugaagugugguccacugag

SEQ ID NO: 4122847 - RNA, 73 nt, Human
uucagugucaucuagugccccucucccuugaggcaggcggcuucgucuccauuuugggggggcagucacugag

SEQ ID NO: 4122848 - RNA, 82 nt, Human
uucaguguucuggaaaucugacugucacuaacuaagucuaguuccacucacagacacagucaguuucacagucugcauugaa

SEQ ID NO: 4122849 - RNA, 69 nt, Human
uucaguuguuuaguuauuguuacaguaugaguguuugauauuuaguuuguuauuuuaacuacaauugag

SEQ ID NO: 4122850 - RNA, 69 nt, Human
uucaguuuccuugagaaaggcacaaguuguuacuucugguaauuuugcuuuuacuuagaguggacugga

SEQ ID NO: 4122851 - RNA, 64 nt, Human
uucaguuugccaguauuucacugaugauuuucacauugauguucaucagggauauuggccugaa

SEQ ID NO: 4122852 - RNA, 64 nt, Human
uucaguuugccaguauuuuauugaugauuuucacaucgauguucaucagggauauuggccugaa

SEQ ID NO: 4122853 - RNA, 90 nt, Human
uucaguuuuaagagacuagagagauauaauauggcauggucuaaaauauacccauauaggaucucuucuaagaacuuccuaaggauugaa

SEQ ID NO: 4122854 - RNA, 70 nt, Human
uucauagacuugaguuuuugguauggcuaaauuuaauuauaugguacauacaagcauucaauuuuaugaa

SEQ ID NO: 4122855 - RNA, 56 nt, Human
uucauagggagcaucuaccuauuuauuauuaccacauaggugaugugacucuagaa

SEQ ID NO: 4122856 - RNA, 103 nt, Human
uucauauaaugcccuugaggucuauccauguuguguguauaguuuuuuccuuuuuauuauaaguagcauuccaugguauagauauaccacaacuauuaaugga

SEQ ID NO: 4122857 - RNA, 80 nt, Human
uucauauacuagaugccauuaagcaauuguugcuaauuuuuagguaugauaaugcuuuaauugcauguagugaaaaugga

SEQ ID NO: 4122858 - RNA, 66 nt, Human
uucauauauaugugugugugugugcauguguguauauguauccuuauacacauuuauauuagugaa

SEQ ID NO: 4122859 - RNA, 90 nt, Human
uucauauccccagggccugucacgacgcucaugaaaugguugcugaaugaaugacugaccggccgaaugagugagugagucuugugugag

SEQ ID NO: 4122860 - RNA, 62 nt, Human
uucauaucuucuugagauacuuacuaauuucaagucccaucuuggucacaaggaguugugaa

SEQ ID NO: 4122861 - RNA, 77 nt, Human
uucauauuggaguuuguuucugaccugugacaguuuguaccaggaaaaaaccucagaagcagauauuucaaaaugga

SEQ ID NO: 4122862 - RNA, 85 nt, Human
uucaucaguucaguucucugagugugcuugguaaccaguuauuuagcuugcaaacacucaaagccaucauugaaguuuuggugaa

SEQ ID NO: 4122863 - RNA, 129 nt, Human
uucaucuauucauuuauucccauugauuuccucacuaacauccauccagucaggcuuagaaagcagcagguggguuggugacagagaccagugggcugaguguaaccgugaaagucaguaggugacaag

SEQ ID NO: 4122864 - RNA, 99 nt, Human
uucaucucauuuagcaccgugucuguaugucaaucagcugcauauaucguaaauuguagccgcaugauaccagaucuccugcuguaaaugagcaaugaa

SEQ ID NO: 4122865 - RNA, 55 nt, Human
uucaucucuggguccauagaagagaacaguguuucugcaucuccccagaugugag

SEQ ID NO: 4122866 - RNA, 101 nt, Human
uucaucucuucuucaaaccuuuguugcaauauccaugggauucaacugugcagcugagucagugaaugguguaugcuaauccagguuuacugagaucugaa

SEQ ID NO: 4122867 - RNA, 72 nt, Human
uucaucuggcuguguucauccugcccaggucccggccccuggccacuuggucguggugcagcauggcgugaa

SEQ ID NO: 4122868 - RNA, 81 nt, Human
uucaucuguaaauggaagugucucugggaccugcucagcucugaccugcuuuggguccuuuuuggacuucuucaggaugag

SEQ ID NO: 4122869 - RNA, 56 nt, Human
uucaugaauacaaugagacaauauuuguauuauuguuuuaaccuaguguuuaugag

SEQ ID NO: 4122870 - RNA, 96 nt, Human
uucaugagcagggauuugugugugcuuuguuuaccaugacauccccagugccauggcuggcacacagcaaccacuaauaaauaccuguugaaugaa

SEQ ID NO: 4122871 - RNA, 57 nt, Human
uucaugagguaaaguuuaagcuaaguucucuggauuuagcuuauaaaugcuuuugaa

SEQ ID NO: 4122872 - RNA, 68 nt, Human
uucaugcugcaagcauucccugcaucugccuugcucaggcuuugugcugggugcugcagacaggugaa

SEQ ID NO: 4122873 - RNA, 81 nt, Human
uucaugcuggugaaaugacaugacggauguuagaguguuuugaagauauaaagcacagggugucugcauucagugguagaa

SEQ ID NO: 4122874 - RNA, 60 nt, Human
uucaugcuuuuaccgcuguuaaucaacugugggguucacaguauaguggcaggaaaugaa

SEQ ID NO: 4122875 - RNA, 124 nt, Human
uucauggcuucucagugugccaguauggccguuauuaaaguauuugauguuagaauaugacuuuuuaauguguugaugcuugaauagagcuauucucaagcuggaauaacugagacugaaugga

SEQ ID NO: 4122876 - RNA, 73 nt, Human
uucaugguggagcagauuugcuuuuagauucuugccuccucaauaauaacaaagccaagucagucuacuggaa

SEQ ID NO: 4122877 - RNA, 78 nt, Human
uucauguacguccucacccuggcuucuuucaaguuuggcugacuuuaucucaagccaggguuuguggaucuaugugga

SEQ ID NO: 4122878 - RNA, 60 nt, Human
uucaugucuuugauucugauaauuggauuuuccccaaucaucagaaucucuagauuugga

SEQ ID NO: 4122879 - RNA, 92 nt, Human
uucaugugugaaacuuucaugaauauaagaugcuccuaaaauugacuuuaauaaguagaaaucuuuguacaguuugaaggcauacauaugaa

SEQ ID NO: 4122880 - RNA, 58 nt, Human
uucauguuuccauauuaaugagaagaagcagcugaacauuaacaaauggaagcaugaa

SEQ ID NO: 4122881 - RNA, 58 nt, Human
uucauguuuugagccauucugagugaaacaauacuugugagaggcguucgaagcagag

SEQ ID NO: 4122882 - RNA, 130 nt, Human
uucauuacucacagaaacagcaguggccaaaguacaaacauuugcccugguucuuugagucucaggaaguugcacaggaaccagggcaaauguuuguacuccggccgcugcugaugcugugaauaauaaa

SEQ ID NO: 4122883 - RNA, 70 nt, Human
uucauuaucuguuccccuaugcucucuauuuuuaucagaaaucugagcaggaaagagcagagagaaugag

SEQ ID NO: 4122884 - RNA, 57 nt, Human
uucauucagguguauuuauggguuuauauuuacccaauaaauauaacaauggaugaa

SEQ ID NO: 4122885 - RNA, 80 nt, Human
uuccugaaucaccuucauucuuuuguguucacacuggcagaacuugcuguuucuaccagaagaaucauuuugauugggaa

SEQ ID NO: 4122886 - RNA, 56 nt, Human
uuccugaaucccaaggagagcuucagaaauugagccaggucuaaggacaucaggaa

SEQ ID NO: 4122887 - RNA, 59 nt, Human
uuccugagaaauuuguaccuggaauuucucuguacuucugguaugaagauuaucaggaa

SEQ ID NO: 4122888 - RNA, 62 nt, Human
uuccugagcuuuuaaccuagucuauuccaauuuuaagcugacaauagguaaaaagagaggaa

SEQ ID NO: 4122889 - RNA, 77 nt, Human
uuccugauguaauuauucuaaauccucuuagaggcaaauggaugcuucuggcagauugagugaguauauacuuggaa

SEQ ID NO: 4122890 - RNA, 79 nt, Human
uuccugcacccauguucaaagagaaauuguauuuucucauauuaauuauuauuuagaauuuucuuuguuauggcaggga

SEQ ID NO: 4122891 - RNA, 77 nt, Human
uuccugcagcgaggccagguguuccugggccgacggacugaguugucuggacagcagcaccucggccccuggagggg

SEQ ID NO: 4122892 - RNA, 82 nt, Human
uuccugcaggcuuuuugguugacuuaaaugugggcuuuggggcagggcagcaacacgagugagcuaaagaggccagcaggag

SEQ ID NO: 4122893 - RNA, 83 nt, Human
uuccugcaguuucugguaugggaaauuucaagaagacagaguuucuauuuuugaaguucccccauaucagaaacugcaaggaa

SEQ ID NO: 4122894 - RNA, 73 nt, Human
uuccugcccucgaggagcucacagucuaguaugucucauccccuacuagacugaagcuccuugaggacaggga

SEQ ID NO: 4122895 - RNA, 130 nt, Human
uuccugccugugucacagggguuguaaaagccaguacaauuuuacaaaggacgaauucccccaaggaagaucuugccugaguaaaauuguucaauauuuuggcuguuauuacugcucugacauccaggaa

SEQ ID NO: 4122896 - RNA, 58 nt, Human
uuccugcucaaugcugucgucgcuguccacggagcuacugucaccaucagagcgggaa

SEQ ID NO: 4122897 - RNA, 61 nt, Human
uuccugcuucucgaggugcagacugcaugaagcccguggaagaugcccagaaaagcaggga

SEQ ID NO: 4122898 - RNA, 83 nt, Human
uuccuggcauagagaagagcuugugggugugugugugugugcaugugcgcacacaugcaugcacaggagugugugucuagggg

SEQ ID NO: 4122899 - RNA, 57 nt, Human
uuccuggccuaagguaggugaccauggagagugaucauuauuccgaaaggucaggag

SEQ ID NO: 4122900 - RNA, 56 nt, Human
uuccugggguacuggagaaaauaaguauaauacugaacuucacagauccacaggaa

SEQ ID NO: 4122901 - RNA, 57 nt, Human
uuccugguaguaagacaucuggaauccauuuggaugugugguuuuuacaccaaggaa

SEQ ID NO: 4122902 - RNA, 59 nt, Human
uuccuggucagacuucuagguuugccccugcagaggccaggcccugaguaagcuaggag

SEQ ID NO: 4122903 - RNA, 84 nt, Human
uuccuguccccgcucccuucucugucacucacucuuucaucauaggaagcacagaugcaagggggaccugacugggcacaggaa

SEQ ID NO: 4122904 - RNA, 83 nt, Human
uuaaaaguuuaucagacaaacugugagauuguucuugucagagagaauugagaauaagauuacugguugucugagaugguuga

SEQ ID NO: 4122905 - RNA, 59 nt, Human
uuaaaauagccagugccccucugaagguuuaaaacucagaggggcacuggcuauuuuag

SEQ ID NO: 4122906 - RNA, 77 nt, Human
uuaaaauaugcucagcagaucucaggagaucucaggagaagggauccucagaguauuuguugaagucaaacuuuuaa

SEQ ID NO: 4122907 - RNA, 75 nt, Human
uuaaaauugcuugaaauguuugucaacugcuucauuaaagcccaaaggcagcauauauucagugggcaauuuuga

SEQ ID NO: 4122908 - RNA, 129 nt, Human
uuaaaauugcuugagggaacuuguuauaaugcagauuccugaguccuaccuccugagcuucugauucaguaggucuggaagcuggaguccaggaauaugcauuuuaacaagcuccccaagugauuuuga

SEQ ID NO: 4122909 - RNA, 64 nt, Human
uuaaacauggagagcucgggaucuuuuuggacagguucaaguucccuggcacugcugugauuag

SEQ ID NO: 4122910 - RNA, 68 nt, Human
uuaaagaaagacccaaggcccuacauggguacuuucuuccccaugcagggccuugggucuuucuuuaa

SEQ ID NO: 4122911 - RNA, 90 nt, Human
uuaaagaaauaaguuacauuucagaaugagaauggauggguccuacugaccauccucaucuuggauuugaagaauguagagaaucuuuaa

SEQ ID NO: 4122912 - RNA, 109 nt, Human
uuaaagaagcccauucacuguuuacuuggagguguuuccuguugagguccugcuggcugugaucacaauuuagacuuuuuaauuauaggugaacgggaugggucuuugg

SEQ ID NO: 4122913 - RNA, 60 nt, Human
uuaaagaguaaucauaggucaaaauuuaaaauugccuauuagaacaugauugcucuuuga

SEQ ID NO: 4122914 - RNA, 100 nt, Human
uuaaagauugacacaguagaaaguucacugguauauuuugcauuuuaaauagccugcuaaaauguaccgugugaacugcacaaaugcucuuagucuuuag

SEQ ID NO: 4122915 - RNA, 69 nt, Human
uuaaagcauaaugaauaucuagagacuuauaaauaucagugaccaucugggaauuuauuggcacuuuaa

SEQ ID NO: 4122916 - RNA, 61 nt, Human
uuaaagcauccugucagucuguucuuaaguaugaaaguguucggaaaucaggaugcuguaa

SEQ ID NO: 4122917 - RNA, 67 nt, Human
uuaaaggcaauaguauuaaacuggaaaaucaugguguaguccugaauccaguuuauacugucuuuga

SEQ ID NO: 4122918 - RNA, 66 nt, Human
uuaaaggcuuugauuccauugcccuuuuccuagauggggaagaaauggaaauccaagcaacuuuga

SEQ ID NO: 4122919 - RNA, 65 nt, Human
uuaaagggcuggccacaugauuugguaagggcaaagcugaacuacuuuaaagccaggcccuuuga

SEQ ID NO: 4122920 - RNA, 58 nt, Human
uuaaagucacaguuagacuacccaagucuauaaacuuggguauaaaacuuggcuauaa

SEQ ID NO: 4122921 - RNA, 66 nt, Human
uuaaaguucauuaaaugagccauccaguguaauuuaacugaauaaaaauggcucagauggcuuuaa

SEQ ID NO: 4122922 - RNA, 78 nt, Human
uuaaauaaauuaauacacaucauacacugggauuagugucuggcccacaggagugugugaguguuaacuaauauuuga

SEQ ID NO: 4122923 - RNA, 85 nt, Human
uuaaauagaguguucauuuggggaagaugguuggucuucauuauuucuaucuuucuaauucucccauagucuacauucuuuguaa

SEQ ID NO: 4122924 - RNA, 129 nt, Human
uuaaauauacuucaagggagaauaggucaauggaaugcagacaugggagaguugaggaaugcaacguuuuaagacucccgaugcugcauuuuccccacuaaguaugauucaugcuuccuucaagaacag

SEQ ID NO: 4122925 - RNA, 70 nt, Human
uuaaauccaaguugguagcugguguuuucagucccugccugaaaacagcagcuguuuaauuugcauuugg

SEQ ID NO: 4122926 - RNA, 83 nt, Human
uuaaauggaaaucgaugucuaaguuacauacucaggaguuaaauaauuaaugguaacuagauauagacuuucuacauauuuga

SEQ ID NO: 4122927 - RNA, 59 nt, Human
uuaaaugugccuaaaccuguaacuugucauaguucgauacauagguuggcuauauuuaa

SEQ ID NO: 4122928 - RNA, 100 nt, Human
uuaaauuucugauaaacaguggacaauuuugaguauaaguauguccgaauauugcauggaauauacuuauacuaagaauguacuugggauucaaauuuaa

SEQ ID NO: 4122929 - RNA, 72 nt, Human
uuaacauuuggcuuuggcaggaagaaaauguuucaguauagaaauaugugucucuaccaaugcaauuguuaa

SEQ ID NO: 4122930 - RNA, 85 nt, Human
uuaaccaucauaugguuucucuccaaguuguccucagaggccucuggcuggagauaguaggauccauaaauguuuaaaugguuaa

SEQ ID NO: 4122931 - RNA, 69 nt, Human
uuaacucagcaguauacucugaagauuagguaagaaauccaagauuuucucuuuguauaugcuaguuaa

SEQ ID NO: 4122932 - RNA, 69 nt, Human
uuaacuucugugugaguuuaguguuuuccguguuucacugaugaggaaaccaaggcucagggagguuaa

SEQ ID NO: 4122933 - RNA, 97 nt, Human
uuaacuuuaugccugccaagcagcaaacuuccacaaguagauaauuugaaagccugacuuuuauuugcucuugcugcuuggggcaaaaugaaguuga

SEQ ID NO: 4122934 - RNA, 85 nt, Human
uuaagaauaguaauaaguugugcuuugauaugcuacagcugaagcauguaugagccaucaaaguggaaguuuacuagguacuugg

SEQ ID NO: 4122935 - RNA, 61 nt, Human
uuaagaauuguuugcagugggcuuugcacuuuacaaagcaccaucagaugcaauaucuuaa

SEQ ID NO: 4122936 - RNA, 62 nt, Human
uuaagagcacugaagucuucuuaggaaagggaugugggucuugggaaacuugagucuuuugg

SEQ ID NO: 4122937 - RNA, 55 nt, Human
uuaagaggugaggccuuuaagaggcaauuaggccauuauggcuccuaccuuguga

SEQ ID NO: 4122938 - RNA, 57 nt, Human
uuaagauuuuguuacaguguguaacaaaaugguuacacacugugucauaaugcuuaa

SEQ ID NO: 4122939 - RNA, 57 nt, Human
uuaagcaaugcuaagaaaagugucaugccuacggugaucuuagcaucacuugcuuaa

SEQ ID NO: 4122940 - RNA, 68 nt, Human
uuaagcuuuuucccuucaccaguuguccuaaugggccuggcauugcuucugaaguggagagaguuuaa

SEQ ID NO: 4122941 - RNA, 60 nt, Human
uuaaggaaggagucuuaaaugggugccuacuuugugcacuuagacucucuuugucuuuaa

SEQ ID NO: 4122942 - RNA, 56 nt, Human
uuaaggaauuacgaaaauauuuaggguucuguucugaguugcuuugggauccuuaa

SEQ ID NO: 4122943 - RNA, 71 nt, Human
uuaaggagcuaggcaaagcucacggacuguuggcaaauagacauuuuguauuuagccugccuguuacuuaa

SEQ ID NO: 4122944 - RNA, 67 nt, Human
uuaaggccauuuuaacuuuuuuguugagauguuaaugucaacaaaacgguucaaaugaaggucuuga

SEQ ID NO: 4122945 - RNA, 106 nt, Human
uuaagguagguuaauaugauguguuagaaaaucuggugacauauguuaagauaauuggcaauguucuguuuuguaauucauaaauuaguauuaacuguacucuuga

SEQ ID NO: 4122946 - RNA, 77 nt, Human
uuaaguaaaauagaugggugugaaauagaugcuuuguaaaauacaaaguuuuauucaagcauuagucauguauuuaa

SEQ ID NO: 4122947 - RNA, 78 nt, Human
uuaaguaacagaaacuuauuuuaucacaguucaguucuggaagugaaaagucuaagauuaagguucuggaaaacuugg

SEQ ID NO: 4122948 - RNA, 55 nt, Human
uuaaguaagaccuuaugucuugaagguaguuuaggacauaaaaaugcugacuuag

SEQ ID NO: 4122949 - RNA, 59 nt, Human
uuaaguauucuacuaggguccuaugcauuuuaaaaggauuccugguggauacugcuuaa

SEQ ID NO: 4122950 - RNA, 90 nt, Human
uuaaguuaaacuuuauaaaaaugaggcgauggaccuaaaacucaguauguucugcuaggauuuguauagcuuucuuuugguuugauuuaa

SEQ ID NO: 4122951 - RNA, 127 nt, Human
uuaauaaggaugcuuugaauguucuuauacaagucuuugcauggacauguguuuucauuucucuuggcuaccuaucugagaauacaauuguucaguaauagaguagauauauguuuaacuuuauuag

SEQ ID NO: 4122952 - RNA, 82 nt, Human
uuaauauagaucuugcuauuuaaggaagucuuagaccauuucauaaguaaauagucuuuuaguaaagcgagaucuucauuga

SEQ ID NO: 4122953 - RNA, 124 nt, Human
uuaauaucguuaacauguucagacuaccugugaugguuaauacugagugucaaauugauuggauuuaaggaugcaaaguauuaauccuugguaugucugugaggguguugccaaaggagauuaa

SEQ ID NO: 4122954 - RNA, 78 nt, Human
uuaauaugguuuauaaagcuguauuuuaaguauuuguucauuuugaaaaaucuuagcacagcuauauaaguuaguuga

SEQ ID NO: 4122955 - RNA, 129 nt, Human
uuaauauuacaagaagacugaggaauuagugucuuuaaagcugguucauucauucauggucuucuuaaagaggaccuauugaguggaugaacuguuaauugcaauuucaagucgaguguuaauaggugg

SEQ ID NO: 4122956 - RNA, 77 nt, Human
uuaauauuuauggaauacuuaugcugcaguaggcacuguggaaaaugcuuuacauauaguguuucauuaaugcuuaa

SEQ ID NO: 4122957 - RNA, 68 nt, Human
uuaaucacaggcauagauugcuccuucaaaaguaauucucaucagugagcucuuuguguagugguuga

SEQ ID NO: 4122958 - RNA, 77 nt, Human
uuaauccuuuagguuaaaagaggaucaacauggcaacaaaguguuuuggaaauagccucuugugauuugaagauuaa

SEQ ID NO: 4122959 - RNA, 74 nt, Human
uuaaucucuuuggcucaaggauccucucucaguuuggguucccccggaaauggaccuugagacaaggauuuuag

SEQ ID NO: 4122960 - RNA, 80 nt, Human
uuaaucuuuuaguaaguguaguugaagccuucaacaauuuaauauaauugugcuguuaucacauuuuguaaaaugauuag

SEQ ID NO: 4122961 - RNA, 82 nt, Human
uuaaugagauguggcaguuuugacaucacaaaguuuugacauauuuuauuuugguaaugguguugcuguuuaaccucauuga

SEQ ID NO: 4122962 - RNA, 92 nt, Human
uuaaugagccuauccuguguucuagguauggucuuagauguuuagcuccaccuucccuaagauuccccaguuuugcaaguuaggcuuuuuaa

SEQ ID NO: 4122963 - RNA, 67 nt, Human
uuaaugcuuggaaagcacuuagaagagugccugcuacagggcgaacacuacgcugaguguguauuaa

SEQ ID NO: 4122964 - RNA, 89 nt, Human
uuaauggcauuuacuggcuuacaugccuuucuaucuccacuagaguacuauuugcuugaggguagggccguagggccauguguuauuaa

SEQ ID NO: 4122965 - RNA, 63 nt, Human
uuaaugguuagccuccuagauccuucuguaccuuaugccuuugcuccaggaggcugccauuga

SEQ ID NO: 4122966 - RNA, 129 nt, Human
uuaauuauuuuucuuagguguauauuacauauauguauguguauaugugugguacauauauugucucagguguauauuacauaaacaugagugaauauucuuagaaaaaauauucuuacaauauauuaa

SEQ ID NO: 4122967 - RNA, 63 nt, Human
uuaauuguacaaaggauuuggaagagauucugguuucuguuaucuuccuuuguauacuguuga

SEQ ID NO: 4122968 - RNA, 96 nt, Human
uuaauuuaaugcuuaggucauguuacauaccucauagacucaggaagauccuuuuugggagaaugcaggaugugcugauuuaguaguagaaauuaa

SEQ ID NO: 4122969 - RNA, 73 nt, Human
uuaauuuuccacucuguuuaucugacaguguggaugugcaauccaaacagauaaugagagagugggauauuga

SEQ ID NO: 4122970 - RNA, 71 nt, Human
uuacaaggcaacacaucauuguuaagcacaaaucuucugcuuuugaccauggcacauguuugccuauguaa

SEQ ID NO: 4122971 - RNA, 78 nt, Human
uuccaauuuguggugaguuaauauugugcaugaccauacagagcuugccccauuugugacucaccaucggaguuugaa

SEQ ID NO: 4122972 - RNA, 56 nt, Human
uuccacaggacuaaaugucaucauagaguuugugauugcacuuuccccugugagaa

SEQ ID NO: 4122973 - RNA, 61 nt, Human
uuccacagguuucagacuguucuccuagaaauaacuggcaaugcaaccugaaccuugguaa

SEQ ID NO: 4122974 - RNA, 73 nt, Human
uuccaccaggauaaaaccucuagauaguaccauucaaaacaaccuguuaucuagagugaacaucaugggagaa

SEQ ID NO: 4122975 - RNA, 60 nt, Human
uuccaccauguaacaagcucuguacugaacuauaaaaauacgggaaugaacaugguggag

SEQ ID NO: 4122976 - RNA, 67 nt, Human
uuccacucuacucuggccagucaccucucuucaucaauccuggggaugacuaaagagaaguagggaa

SEQ ID NO: 4122977 - RNA, 65 nt, Human
uuccacuuugggucugugcaggccucgauaacgugaggggaugcaucgggcccggagcaguggaa

SEQ ID NO: 4122978 - RNA, 56 nt, Human
uuccagaaaguucuggaacuggacuuaccaugcaggcuccggaaccuccucuggga

SEQ ID NO: 4122979 - RNA, 64 nt, Human
uuccagaccaugugagaggcgcaaggucucagagagacugugcauucugggugcauggcuggga

SEQ ID NO: 4122980 - RNA, 77 nt, Human
uuccagagacacauuuucagcucugccaaaccauaaugcuuaggcuuucguuuggauauagcugaggugucuuggaa

SEQ ID NO: 4122981 - RNA, 68 nt, Human
uuccagcauggccacggggguagguaaaagcagaaaaucauagcuuugcaagagcccagggccaggaa

SEQ ID NO: 4122982 - RNA, 80 nt, Human
uuccagccuucuagaaguccaaaguuaaauagaacguccagcagccuuuuaucuagcagggauuuuugugggggcgggaa

SEQ ID NO: 4122983 - RNA, 73 nt, Human
uuccagcuaguucagguuuucucauuuucuucauauguugaguaauuuuggaguauaaccuggauauugugaa

SEQ ID NO: 4122984 - RNA, 80 nt, Human
uuccagcugucgauucagcucuucagagauaucggggugcacacuugccucuuucucuggugguuggacugggguuggag

SEQ ID NO: 4122985 - RNA, 59 nt, Human
uuccagcuuguccuuucucugccgugacugacguuggccuggaucuaaggaagcuggga

SEQ ID NO: 4122986 - RNA, 75 nt, Human
uuccaggaaacagcaucucagcaucuccaggcugagacgggccccaggucgugacugagagcugaauuccuggaa

SEQ ID NO: 4122987 - RNA, 72 nt, Human
uuccaggauaugcuaaugacacucuagaaauaaugcuucuguuuuugagaauuguuagcauauauccaggga

SEQ ID NO: 4122988 - RNA, 80 nt, Human
uuccaggcacaaagucuaugcccgaugugcuuggcauccuuuauuaucagccaaaaaguacauuuaggugugccauggaa

SEQ ID NO: 4122989 - RNA, 64 nt, Human
uuccaggcauugugagugggcagguaugauaauuucuucaucuguaaagcccugguaccuggaa

SEQ ID NO: 4122990 - RNA, 57 nt, Human
uuccagguggcuuuccugggggagugccugguaauuuucccagaggaaugccuggaa

SEQ ID NO: 4122991 - RNA, 55 nt, Human
uuccaguuggagccugccuuuaucccugacguacuggauuggcuuccugcuggaa

SEQ ID NO: 4122992 - RNA, 80 nt, Human
uuccaguuuguacuugauaguccugaaacauucuaggaaggaaguccccagggugugagaaggaaguagcagaucuggga

SEQ ID NO: 4122993 - RNA, 74 nt, Human
uuccauaucguuaaaguucugacauucuaaucggaaaagaaaugaaccagcagacuuugacagguuuugugggg

SEQ ID NO: 4122994 - RNA, 76 nt, Human
uuccauauugccucuuaugguuugucagggaaggagcaacuaaaucaaaaccugaucaaagaggucagcauuggga

SEQ ID NO: 4122995 - RNA, 72 nt, Human
uuccauauuuaaagucuacuugaauacgauggugaugaaaaccaagacugucccauuuauguagacauggaa

SEQ ID NO: 4122996 - RNA, 67 nt, Human
uuccaucauggcuggcuucagucugauuuauugccauccacuccugaagccaagccagcugauggag

SEQ ID NO: 4122997 - RNA, 60 nt, Human
uuccauccacuccucagcucuauucccugcauaucucuaggaggcugugaggggaaggaa

SEQ ID NO: 4122998 - RNA, 101 nt, Human
uuccaucccaguaaguucccaugggauaaguuauuuuaguaaaucagaaaauuucucugaaagcaaaguaauucuuaauuuuuggaggcuugaaaauggag

SEQ ID NO: 4122999 - RNA, 78 nt, Human
uuccaucuuaacaccugcuuucuuggacuacucaugguaccaacuguugaguucuccaggaagcagacugagauggag

SEQ ID NO: 4123000 - RNA, 69 nt, Human
uuccaugaaacacacacgcgcauacuguguucaaggcagcuauguauuuguguguuaaaacagaaggag

SEQ ID NO: 4123001 - RNA, 73 nt, Human
uuccaugacuaguagauuaucacuuuuggguuugcucuuggaagugacaagaugcuaggaucccucuuuggaa

SEQ ID NO: 4123002 - RNA, 74 nt, Human
uuccaugcuaaugauggaagacauguucgaucucucucaaacucgaggauacauguuuuuuaucaauucaggaa

SEQ ID NO: 4123003 - RNA, 60 nt, Human
uuccauggcccagcaccuggcuuuuuguaaaaaagcaugccagccuucuguggccugcaa

SEQ ID NO: 4123004 - RNA, 68 nt, Human
uuccauggugacaaacaguagcugugaugucuguucaccuuuuugcagccauuguuuucuaccuggag

SEQ ID NO: 4123005 - RNA, 90 nt, Human
uuccauuaucccauauuucaugugcaccauaauucaccagaaguuuggauguugaauaccugcgguguccaugaacugguugucauggag

SEQ ID NO: 4123006 - RNA, 88 nt, Human
uuccauucaaaacaauguacacaugaauguuuaaauucaucagccuuucacuguguaauaaugugacauguuuacaguguugaaggaa

SEQ ID NO: 4123007 - RNA, 76 nt, Human
uuccauucuuguuggaaagaagcaacuucaguguuuuucacuaaacaaauugcaguugucuuuccuaauuuuggga

SEQ ID NO: 4123008 - RNA, 95 nt, Human
uuccauucuuuuauuauuucuguuccuucuaauuuuacaccugacugcucugaguggguguguuuguaggaggggguggaagauuaaagaaggaa

SEQ ID NO: 4123009 - RNA, 68 nt, Human
uuccauugcagcaccaauggcuuccugcuggaacccucccuuuagccacagguguuggccagugugag

SEQ ID NO: 4123010 - RNA, 102 nt, Human
uuccauugccaaggagccuuuguguugcugacaagagaggagcaggcugagagaaaacgcccuguuugucacaaaguuacaucugcgagcuccuucaaggaa

SEQ ID NO: 4123011 - RNA, 56 nt, Human
uuccauuguuucugucuucacuuccuuuuaccugggagaagcugauacugauggaa

SEQ ID NO: 4123012 - RNA, 95 nt, Human
uuccauuugcucucuuuccugcuccacuugggcaccccccaggcccaguuuccuugggugggaucagcugguggaaaggagggaggugcugagaa

SEQ ID NO: 4123013 - RNA, 65 nt, Human
uucccaagccuacaauguauuaguugguuuccacacuucauuuacauuauaggcugcugcuggaa

SEQ ID NO: 4123014 - RNA, 69 nt, Human
uucccacacucaguacauauggaagauuucucucuacuuugaaucuucucauguguaaugagguuggaa

SEQ ID NO: 4123015 - RNA, 65 nt, Human
uucccacugcuggcuccaggcuggagcgcaacugagaggggguguuacuggagucacagugggga

SEQ ID NO: 4123016 - RNA, 69 nt, Human
uucccacuuuccuucucacacuuggggcuacaccaguagagagguuguaugugcuugagaaggugggag

SEQ ID NO: 4123017 - RNA, 85 nt, Human
uucccagaaugcuggcuucuagcaguguugauuuuucuguccaaacaaugcaaaucacacaagcuggcagcaaggauucaaggaa

SEQ ID NO: 4123018 - RNA, 69 nt, Human
uucccagcucucucuucacaauaccuggaccaauauccucaaguucaguccugaggaagagcugcugaa

SEQ ID NO: 4123019 - RNA, 78 nt, Human
uucccaggaggguaauuggaaauauuaauagaagggacauuuuuacuugaaaaccaccaguauuugcauaucugggag

SEQ ID NO: 4123020 - RNA, 126 nt, Human
uucccauaacaagauguucaucucuggaggcuaucccggagagccaacugcacauaaauccauucuaauuaaauaugccacucuccagggguagaugccuucguuacaggacuuauuucaggggaa

SEQ ID NO: 4123021 - RNA, 60 nt, Human
uucccauaaggagauagucaaagcuucuugggauuaggauguggacauaucuuuugggag

SEQ ID NO: 4123022 - RNA, 74 nt, Human
uucccauuuagcaaaugucugaaggaauagcucacagaauuggcaguggaguucagaacauugguguaugggaa

SEQ ID NO: 4123023 - RNA, 73 nt, Human
uuccccagaugacaucaaaaggccauguuggugucaccaccaccuccagugcuaaauugaagucucaggggaa

SEQ ID NO: 4123024 - RNA, 65 nt, Human
uuccccaguuuaccaggcaggaaaaugaagcuuagcaaauaacuuggccaaggucacugggugag

SEQ ID NO: 4123025 - RNA, 73 nt, Human
uucccccuguagaaugaguaagccacaaggucauaacucuuucuuugguuuauuucuuccuaugagaauggaa

SEQ ID NO: 4123026 - RNA, 88 nt, Human
uuccccgaguggaguucccagcggcccgcggcugacggccagaucuguccugaggggucgugggagcccagcgccugccuugagggaa

SEQ ID NO: 4123027 - RNA, 74 nt, Human
uuccccugugcuauagaagguaccauauucacaugcuucaagaauuagaauauauuguaucuuucaugggggag

SEQ ID NO: 4123028 - RNA, 70 nt, Human
uucccgugucugcucuccgcagcccuccugggaggguuugaagagacagcugagagcggccagcugggaa

SEQ ID NO: 4123029 - RNA, 126 nt, Human
uucccuaaacacucaggaguuuaauugaguauuauuggaugauucacuuggcaguuaggaucuugcuguggaagagggucaccaguaugaauauucacuauugugaugaugaaauguauaggugag

SEQ ID NO: 4123030 - RNA, 60 nt, Human
uucccuacuagccuuaauguuuuccccaaaacugugagguggaauggguucuguagggag

SEQ ID NO: 4123031 - RNA, 88 nt, Human
uucccucuuucucugcuagacccuucauguaguuccccagcugugaccaguuugcaugggggagaggguagguaaaagagggagggga

SEQ ID NO: 4123032 - RNA, 62 nt, Human
uucuauuaagucaaaggcaguuggaccugcuguggaauucagcuacccuuggcuuaauagga

SEQ ID NO: 4123033 - RNA, 90 nt, Human
uucuauugaauuguucauucucuuagcauaguccuugugauugucuuuuuaacaguuaguauugucuaauagaguaaaugagaaaaagaa

SEQ ID NO: 4123034 - RNA, 72 nt, Human
uucuauuugccugaguuuuaauuuuuuucacugaaauaaguagaaggacagguuggggcuucaggaguagga

SEQ ID NO: 4123035 - RNA, 104 nt, Human
uucccuuucuuuucugguugccucauacucccagccagcugucucuucuccuuuaaggcugagccuggcaugggggucuggugggguacugaguagcgggggaa

SEQ ID NO: 4123036 - RNA, 55 nt, Human
uucccuuuguugauuuccuaguccuugguuacuagaggaguauuuucuaagggaa

SEQ ID NO: 4123037 - RNA, 80 nt, Human
uucccuuuuuguguuguacuucugugcauuugugccaaagcaugaaaugcaaucaagaguaccagcugcaagcuggggag

SEQ ID NO: 4123038 - RNA, 101 nt, Human
uuccgagauaccucugcaacuucguuaggcaugcaagauuaagcucgaauucaucucggcuuagucauacgcgcucugaaacugaauugugaaggauggaa

SEQ ID NO: 4123039 - RNA, 61 nt, Human
uuccggguguaacguacuacccagccaggcccuuucccuugcugugcuuuggaaccuggaa

SEQ ID NO: 4123040 - RNA, 61 nt, Human
uuccggucugagagcaggagaagggagaugaggugucccagcucaagcaguuaggcaggaa

SEQ ID NO: 4123041 - RNA, 86 nt, Human
uuccgugcugguuguggucugaggcaugaaugugggcuuuggagccaggguucgaaucucagcuuugccacauucuagcuguggaa

SEQ ID NO: 4123042 - RNA, 71 nt, Human
uuccguguuauguuugugaacagagccauuuucauugauaccgcuuugaaaacacacgaauagacacugaa

SEQ ID NO: 4123043 - RNA, 82 nt, Human
uuccuaacaaacaucuaccagaauugcuauaaaucugccuaguuccauguuuuggcagugcuggaagauuaaaaguuggaag

SEQ ID NO: 4123044 - RNA, 85 nt, Human
uuccuaagggcagggaccgugucugcccauucacugcuauaguucagcauggggcuggcacagucucuauuaacuacuuugugaa

SEQ ID NO: 4123045 - RNA, 74 nt, Human
uuccuaaugacaggugcuaugcaaucagcacuauuaccauaugcuggaaauaggcauuguagcuuaauaaggaa

SEQ ID NO: 4123046 - RNA, 60 nt, Human
uuccuaggauggugaagcaggauacaggaaagaccugaguuuggcuuccugugcugggga

SEQ ID NO: 4123047 - RNA, 63 nt, Human
uuccuaggccugccguggcucugccccuucuccagguuagagcucugcagcuggccucaggaa

SEQ ID NO: 4123048 - RNA, 117 nt, Human
uuccuaguggcacccacuccccagagcugggggagggcgucagaagcuggggggguuugugccuuuaacuccagcuuuagcucuccagggugggaggaguggguuggacauaagggg

SEQ ID NO: 4123049 - RNA, 63 nt, Human
uuccuauagaaagcuguguagacugcuuucuauaggagcagucuacacagcuuucuauaggaa

SEQ ID NO: 4123050 - RNA, 61 nt, Human
uuccuauccuuuuauguuuaugucuccucagaagacacaccugauauaaagagauggugaa

SEQ ID NO: 4123051 - RNA, 76 nt, Human
uuccuauguuugccuuugcaaagacucuugccuucaucaaauaagagcaaugguaaguuuuguauaggcaugggaa

SEQ ID NO: 4123052 - RNA, 93 nt, Human
uuccuauuccccggugaugugguuucuccacuaucuuguaacuuaauagaauuuacaagauaacggagaaagcacaucauuggagaauaggaa

SEQ ID NO: 4123053 - RNA, 63 nt, Human
uuccucaacucaaggaagacccacgcagauaugcucuauguuugcccucuuccaugagaggaa

SEQ ID NO: 4123054 - RNA, 60 nt, Human
uuccucaccagaacauguuguccccuuucaucaagggugcagcuucugaagguguaggaa

SEQ ID NO: 4123055 - RNA, 86 nt, Human
uuccucaccuuuguucccugggaagcacuugucacaugcccugugugucccagaugcuucgugggugagcacguauugaauuggaa

SEQ ID NO: 4123056 - RNA, 88 nt, Human
uuccucacuacucaggaugucggugacuauugauuuuuauuucauaaagaauuuacgguaguaauaccaauauaaaugacuucgggaa

SEQ ID NO: 4123057 - RNA, 62 nt, Human
uuccucagaaaucuugucaaggcaucuuggcuacaccuggauugccugugaauuuugaugaa

SEQ ID NO: 4123058 - RNA, 67 nt, Human
uuccucauuacuguauuguauagaauaguuucacugccauaaauaugcccugugcagaaauguggaa

SEQ ID NO: 4123059 - RNA, 56 nt, Human
uuccucauucuggggcauguugaagcacauguuucuccugcccaccagaagaggga

SEQ ID NO: 4123060 - RNA, 65 nt, Human
uuccuccaguaugccuaauauucuuagaagaagaugaaauuaggacacauacauguacagaggga

SEQ ID NO: 4123061 - RNA, 77 nt, Human
uuccucccacgcucaccccuaccucuuccugcacugagugucccugugcauuuugaggcugggggagcaggauggaa

SEQ ID NO: 4123062 - RNA, 57 nt, Human
uuccuccuacccugcagauacacucacucacauguuugcuguuucaaguaggaggag

SEQ ID NO: 4123063 - RNA, 85 nt, Human
uuccuccucucaguagcaucaccauucaaguggcuguuacacuuuuuauucuccaccugcuuuuggugauuuuacugaaggugaa

SEQ ID NO: 4123064 - RNA, 59 nt, Human
uuccuccucucaucuguccuaagccagguuuguggcuccagguacguaugggaggugaa

SEQ ID NO: 4123065 - RNA, 70 nt, Human
uuccuccuggggguuuauuuuuggacugcugagcaaugccuugacuuuagaagagcccuuuaagggggaa

SEQ ID NO: 4123066 - RNA, 75 nt, Human
uuccucuagcuuuugucuuccgccuuccccagguagguuuucuauuccuggaggcaaagcagaggcauggaggaa

SEQ ID NO: 4123067 - RNA, 65 nt, Human
uuccucuggcucugacacuacuguuauccuauccuugauaagugaugcucaggccuagaaaagaa

SEQ ID NO: 4123068 - RNA, 94 nt, Human
uuccucuuugcccaaagcugagcugucugaauggugaggauucucuccuccacuuugucuagcaacagcuuggcccuugauacugcaggaggag

SEQ ID NO: 4123069 - RNA, 128 nt, Human
uuccugcacacuuguuuuugacauauuacccagaucuucaucaccuggauaagcauuguucaauaaagcuuucuguggugauguaaaggaucuguauauuugcauauggguuaagugugauuauggaa

SEQ ID NO: 4123070 - RNA, 56 nt, Human
uuccuggccucucucugagcaguuccagauaggguugcucuccagggguccgggga

SEQ ID NO: 4123071 - RNA, 64 nt, Human
uuccuggcucucuguugcacagcugacuugugccauucugcuguugcuguauagaguuaaggaa

SEQ ID NO: 4123072 - RNA, 62 nt, Human
uuccuggcuugucacaucuacgugggacauuuagacuauccacgggcuggauaccuuaggaa

SEQ ID NO: 4123073 - RNA, 58 nt, Human
uuccuggggugaagauauuuuucuuccaucuuagagaaagcccccuucugcccaggaa

SEQ ID NO: 4123074 - RNA, 99 nt, Human
uuccugguaauucggaugcacauuaaaauuaaaguuuuauuuagagcauugguccccuaaguuagguagaaguuuacuuugaaguuugcaagccaggga

SEQ ID NO: 4123075 - RNA, 58 nt, Human
uuccuggucccguucuucacuguuuaaaccgcaggauuccuagaacacgaccguggaa

SEQ ID NO: 4123076 - RNA, 57 nt, Human
uuccuggugaccucacugguaggcugggcugggagugguuggugacguugccaggga

SEQ ID NO: 4123077 - RNA, 77 nt, Human
uuccuggugucccucagaugcacucugcguaccucucccugccguagaggcugaaaucugagggcuucaucaaggga

SEQ ID NO: 4123078 - RNA, 71 nt, Human
uuccugguuguccugauguagugacccuccccugccucuccccgggaagaaggugcuacacagggcaggaa

SEQ ID NO: 4123079 - RNA, 64 nt, Human
uuccugguuuauggaaagcaugucaaaauuuggugugugaaugugcaaguccacaaaaagggaa

SEQ ID NO: 4123080 - RNA, 60 nt, Human
uuccuguccugccccuguagaggcaaagagggugucugcacagcuggugcagggcgggga

SEQ ID NO: 4123081 - RNA, 55 nt, Human
uuccugugguaugggagugaugugggguucccagcuccagaacauagcacaggaa

SEQ ID NO: 4123082 - RNA, 82 nt, Human
uuccuguugaguuguuuaauuuggagauaucacaccuucacagaagcacacuguuugugauguuucuugaugcuuuuaggaa

SEQ ID NO: 4123083 - RNA, 86 nt, Human
uuccuguuguucaacuaagcucccaacugaagaggcugaaaucacagcccccucaaagaggaagcucuggcuuaaacaacaaggaa

SEQ ID NO: 4123084 - RNA, 71 nt, Human
uuccuucauuuauucaugaucuguagcugguuuuguacuacaguggcagaguugaauaauugaaacaggga

SEQ ID NO: 4123085 - RNA, 61 nt, Human
uuccuuccaaauugcccuucaguugaaugcuuuucucugagcuggucuauggacuugggaa

SEQ ID NO: 4123086 - RNA, 55 nt, Human
uuccuucccccucaagagaacuuaauuuacucaaaguccucccuggguagaggag

SEQ ID NO: 4123087 - RNA, 73 nt, Human
uuccuuccugacuuuuuucagccacagugagucucugagaccuaguuuuggcagaaggaaguaccagagggag

SEQ ID NO: 4123088 - RNA, 106 nt, Human
uuccuuccuuuccugaggguguccaggcuucacgucugcccucauugccagguaggugcagggacaccuuugugaagcuccugggccuuuagggaagacagaggag

SEQ ID NO: 4123089 - RNA, 92 nt, Human
uuccuucuaucuccuuaaaggcuccuuuucuuccauaauuucuugguagaaagcuggaagagcugggauuuuugccaaggaagguuuaggaa

SEQ ID NO: 4123090 - RNA, 57 nt, Human
uuccuuggccacacuggugcuuguucaauaagccaacauacagaguggccacaggga

SEQ ID NO: 4123091 - RNA, 66 nt, Human
uuccuugggaggaaaugagaugcuauauaagaagcugugguauauuaacuaguuucuuccucggaa

SEQ ID NO: 4123092 - RNA, 56 nt, Human
uuccuuucacguuuuaaugcacacuguuuaaggauguauuaggaaggaggaaggaa

SEQ ID NO: 4123093 - RNA, 75 nt, Human
uuccuuuuguauuuuucccagcuagcuucugcacccagaaccaacuauaauuuuggggauccagugcaaaaugaa

SEQ ID NO: 4123094 - RNA, 57 nt, Human
uucgacugcugcucaaaccaucugcugaguauaaggagguggucugcagcagcugaa

SEQ ID NO: 4123095 - RNA, 60 nt, Human
uucgaucugaucacccuggcuguucuguggagaacagacuuggaggagugaucagaggag

SEQ ID NO: 4123096 - RNA, 104 nt, Human
uucgcagcgucuuccaagucucuguucucuaaggaaauaugucacuugcugagcgaggguaggggaagugugguuucuuuacagaaccgggaagauucuccgag

SEQ ID NO: 4123097 - RNA, 71 nt, Human
uucgcauuaaaaaaugagcaagguuuucaaccaaacaguugagcaacugggcucauuuuuuaaacaccgaa

SEQ ID NO: 4123098 - RNA, 93 nt, Human
uucgcuugcccuggccuccaggcaguccugcagcagcaaacacaucaucagccuuaggagcuggccugugagguugaccacucuguaggugga

SEQ ID NO: 4123099 - RNA, 77 nt, Human
uucgguuaaucaguguuucaaauguaaucugggguuuagugccagguggcaugccugagacauaaagauuuuaugga

SEQ ID NO: 4123100 - RNA, 99 nt, Human
uucgucugaagacauuguuaccuaacuggugaguaggauuuauaugugccuuguugccuguaucuuucucacuuaguaaacuucauugucuuagcugag

SEQ ID NO: 4123101 - RNA, 91 nt, Human
uucguucucuauuuauuauuaguuagucaaauccaguuuuugaucuccaaaaauagaaggauugacugaguuggagucuguggggaaugag

SEQ ID NO: 4123102 - RNA, 68 nt, Human
uucguuucugcccccuugauggacuuuucccacuguaaacauaagccucugggugggcagcagaugga

SEQ ID NO: 4123103 - RNA, 70 nt, Human
uucuaaaaggcagaugacugagguacucgggggaaucaaagagaaauguucuucauuugccauuugagaa

SEQ ID NO: 4123104 - RNA, 74 nt, Human
uucuaaagaaguacuagaaauagcagugccucaaagugagggcuucuagaauuucugauauauauuccuuggaa

SEQ ID NO: 4123105 - RNA, 71 nt, Human
uuacaauaauugcaagugguuaauagaaacauccuuuuacagcuucuauuuaccaaauguaguuccugugg

SEQ ID NO: 4123106 - RNA, 55 nt, Human
uuacacaacaucuguauuauuagcauccuuuuuaaugagauagauggaggugugg

SEQ ID NO: 4123107 - RNA, 130 nt, Human
uggugcccuaggcagggcucauagcggcagaggcaggaauggauucgcugugagcugggucaggcuugcuccugcccuucacgaugguaucuuagguccugccaccuguguuccaggcguggggucacca

SEQ ID NO: 4123108 - RNA, 59 nt, Human
uggugccugugcaugaagagacagcaggcucucugauaucucuucccaucaggacacua

SEQ ID NO: 4123109 - RNA, 60 nt, Human
uggugcugccucuuugcccgggucugugccagcuccgacuccaggugcaggaggagccca

SEQ ID NO: 4123110 - RNA, 66 nt, Human
uggugcugucuacuuugugcaguuccugcuacuaaauagcagcuaaccuguauugagugauuacua

SEQ ID NO: 4123111 - RNA, 64 nt, Human
ugguggagccaggagaugaagcagguuugucuggcuccaaagcuguggucuuuuaguuccauca

SEQ ID NO: 4123112 - RNA, 73 nt, Human
ugguggccuucaugaagcugugaaaucucuagugcagggggucccccuguucugagcucuuagcuucacccca

SEQ ID NO: 4123113 - RNA, 90 nt, Human
ugguggcgugcgcuaggccgaagcugacccaggagcgugugcggcagugcaccagcgccuccgugggcagcaugugccaguccgucacca

SEQ ID NO: 4123114 - RNA, 78 nt, Human
uggugggccgacuggggaaggcggugacugcgcugaaucguagccagcaucuugcaagcuuccuguccaguuccagca

SEQ ID NO: 4123115 - RNA, 65 nt, Human
ugguggggaugagagcaggaaccauggccagaauugucugugcaucuguucauucguucccagca

SEQ ID NO: 4123116 - RNA, 116 nt, Human
uggugggugguggggauggaguucuccucugucuaccacgaggguaagucucuuuuuggcgcuuuuguggugauggagaggcacuccgggaaggggaaugucuccgccgccugcca

SEQ ID NO: 4123117 - RNA, 64 nt, Human
uggugguaaaggcagcauuugaauccagguccauuuggcuuuggaaugugcuguuauagcagca

SEQ ID NO: 4123118 - RNA, 78 nt, Human
uggugguaauauaugccagauaaaauucgccacuuuaaucaauuuaaguguauauuucaguggcaucgauuacccuca

SEQ ID NO: 4123119 - RNA, 75 nt, Human
uggugguaauauugaaugucaaguucuacccagaugauuggguuuuauagauguggacauucauaguuauuacca

SEQ ID NO: 4123120 - RNA, 119 nt, Human
uggugguaguaugaugucauagaaagagccuuaggcauagacugacgggcagcguuugagucccaucuccacuauuuucuagcucuuuggucuuuggcaguucacuaagcaagccacca

SEQ ID NO: 4123121 - RNA, 93 nt, Human
ugguguaccuucaauaaauguuaugcccaucauccaagcaucuccaaacaugauuguguuuagaaauggguuacauuuagagaugguauguua

SEQ ID NO: 4123122 - RNA, 55 nt, Human
ugguguacucucaagcagaugucucuacuuuaggcaaacauguugugagauacca

SEQ ID NO: 4123123 - RNA, 82 nt, Human
ugguguccucagcauguccuguuuuggcuugcucucaguuuccuagagacuagcauaguggcuugcacaugguagacacuca

SEQ ID NO: 4123124 - RNA, 68 nt, Human
uggugucugggacucagauugugcuguucauggacagagagaauuggguuuacagaauauuuucacca

SEQ ID NO: 4123125 - RNA, 71 nt, Human
uggugugaggacuaaaugaguaccaucuguaaauccuuagagcagcaggugcaaagugcuagcccacacca

SEQ ID NO: 4123126 - RNA, 68 nt, Human
ugguguggugugugagaugaggauucucagagauuuccucacaauuuuaauacacagucaauauacca

SEQ ID NO: 4123127 - RNA, 67 nt, Human
ugguguugcugcuggcuggcugcaugacccagccaggguucaaaguccugucagguagccuacacca

SEQ ID NO: 4123128 - RNA, 87 nt, Human
ugguguugucaguguucuggauuuggggcauuuuguuguacaaguuaucaauacuugccuuaugguuccaggucuuguauuucacua

SEQ ID NO: 4123129 - RNA, 74 nt, Human
ugguuaaaugagggcugacaugauugggagaguugccugcagugugucuuguucuguucaguucuuauuuauca

SEQ ID NO: 4123130 - RNA, 66 nt, Human
uucuguuuuuaucauccuguucacuuuuuccagauaaauaaagagacaggaaacaagaaggcagga

SEQ ID NO: 4123131 - RNA, 58 nt, Human
uucuuaaagaggcaaaacacagggaugacugaccuccucuaccguguuucuuugggag

SEQ ID NO: 4123132 - RNA, 72 nt, Human
uucuuaauucucucuagaagcugagauggggcaagggauugcacuauguacauggagagcaauugaauagaa

SEQ ID NO: 4123133 - RNA, 78 nt, Human
uucuuacagguauuuccuuuaaagaaacucucaaggauuagaagucuucuugauucaagggaguaaaguugugaugaa

SEQ ID NO: 4123134 - RNA, 76 nt, Human
uucuuacuguauauaguuuagguucgaaugggaucaccauaggugugcuuaugaccuuaacuguaacagcgaugaa

SEQ ID NO: 4123135 - RNA, 59 nt, Human
uucuuaucuaauccaugacaguguugugaggcaggcauuguccuguuuagggauaagga

SEQ ID NO: 4123136 - RNA, 63 nt, Human
uucuuauugucacugagugaaaagguaauucucguugaauuuacgaaaagugacuaauaggaa

SEQ ID NO: 4123137 - RNA, 55 nt, Human
uucuucaaccaucuacauaaacacauauuaauuguguuggggauuuuuugaagaa

SEQ ID NO: 4123138 - RNA, 75 nt, Human
uucuucacauuuuagugguuugucaguguuugacaauuaaaccucaaauuuagauauaugauuauaauggaagag

SEQ ID NO: 4123139 - RNA, 66 nt, Human
uucuucagaaaacgauuuugacuagugcugggcacagcaguagacacauuuguuuuuccucaagaa

SEQ ID NO: 4123140 - RNA, 74 nt, Human
uucuucaguccuuucaauggugaccuuuuauggaggcaacaacaaagaaugucaccagaagaaggagggaagaa

SEQ ID NO: 4123141 - RNA, 64 nt, Human
uucuucauccuaagaauguuuaaaugucacaaaggauuuuaaagcaaaaacuaggauggaugga

SEQ ID NO: 4123142 - RNA, 73 nt, Human
uucuucccugccagaagguuccugcugcagcucuccugcuaguuuagcuuagccuucugguuugagggaugag

SEQ ID NO: 4123143 - RNA, 85 nt, Human
uucuuccuaggugacagcaacacucaauucugcagaaguaaccagucaguuuugcucuggguucuugcuguuacugaccuaagag

SEQ ID NO: 4123144 - RNA, 80 nt, Human
uucuuccucugauauuacucugauuuaguaaauguaccaacagaaugcaguauuuacuagggagagauuuagaguaagaa

SEQ ID NO: 4123145 - RNA, 83 nt, Human
uucuuccuuacaaguucauggcugguccacucccuggaggcugugccacacagaccccagagaucagcugcccuugagaagag

SEQ ID NO: 4123146 - RNA, 71 nt, Human
uucuuccuucuuugcuccuucuuucuacccccagucucccuggggugggaucuguggagccucaggaagaa

SEQ ID NO: 4123147 - RNA, 65 nt, Human
uucuuccuuguucuucugggagagacauccaaaagacucucaagcuaaguuugaacaaggaagaa

SEQ ID NO: 4123148 - RNA, 68 nt, Human
uucuucuuaauguccugggaacuaucugugcagacuaagaauaauuuguuccuuaggcauuggaagaa

SEQ ID NO: 4123149 - RNA, 76 nt, Human
uucuucuuggcacaaauuucugaaauaagauaagcagaugucuugguuuuagcaaaucuguugcuucaaguaggaa

SEQ ID NO: 4123150 - RNA, 85 nt, Human
uucuucuuggucacccauugcccucacagucaguucuuagucugaucuuuuaugacuucagauaugugagcaaaccaaugaggaa

SEQ ID NO: 4123151 - RNA, 70 nt, Human
uucuucuuucccccugugguaccccuuguucagaaaaguuugcuaaaugucuacaggaaggaaagaagaa

SEQ ID NO: 4123152 - RNA, 67 nt, Human
uucuugaagacuaagcgguucuuuucaauuuuuggguauucagaaaggguugccugguuacagagaa

SEQ ID NO: 4123153 - RNA, 89 nt, Human
uucuugaaucgaauauaugugugucuuagcauuggaaggccaaauaucuagcuuuccaguuucuaaguacaguugagucccauuaagaa

SEQ ID NO: 4123154 - RNA, 130 nt, Human
uucuugacccgguggucauaugguaugcacauuaugauauguuaaaaaauauauauguauguguguacauaucuguuguggacaugcauacauauguuucauguacuuuguccauauuccacaauaagaa

SEQ ID NO: 4123155 - RNA, 71 nt, Human
uucuugaggaaccaaaucagcuugcacauaguucaaaaucagaaaugguugcugauaugaguucuuuugaa

SEQ ID NO: 4123156 - RNA, 69 nt, Human
uucuugaugauuugcagagggaguguuauuagggagcuaacacuuaaaccaaaauguaauuaucaggga

SEQ ID NO: 4123157 - RNA, 84 nt, Human
uucuugauguaccuauuguaagagguuuggcuguguaauaacaaauaauauuagccacucuuuuuagcacggggacaccaugag

SEQ ID NO: 4123158 - RNA, 56 nt, Human
uucuugcaucaagacagccuguccagcuagcaaggcagguuguuaaacuguaagag

SEQ ID NO: 4123159 - RNA, 63 nt, Human
uucuugcauuuuggagaaugcugaauuaaaauuguaggucagucuucuaaagggaugcaagga

SEQ ID NO: 4123160 - RNA, 80 nt, Human
uucuugccauuucauuuugggguuugucaucuuuuaaguuuuuccuuagaagcuucuaaaaugaccucagaauguaagaa

SEQ ID NO: 4123161 - RNA, 92 nt, Human
uucuugcccccaugguuaucauagacuaaauaguuacagguaggcccauucauugcuuccauuuggauacuuuugguuacuauaagcaagaa

SEQ ID NO: 4123162 - RNA, 65 nt, Human
uucuugcccugcgugucucugucucauggccaccuuccugagccguguucaacugcuggcaagag

SEQ ID NO: 4123163 - RNA, 94 nt, Human
uucuugccugaauuaauuacagugaagauugcaaagggauuauguucuaauucuguaaucccuuuuucauuuaauagauagcauuuugcaagaa

SEQ ID NO: 4123164 - RNA, 79 nt, Human
uucuugggaguauuuauacuggcuaguguuuguucuuauagcgguccaucucugcccaguuugggagccuuuccaggaa

SEQ ID NO: 4123165 - RNA, 97 nt, Human
uucuuggggaaaauguuagacaagggaugaaugaagcacuuauguucugcuaagguaaauguaugugcaucauuuacauuuggaacauaaucaagaa

SEQ ID NO: 4123166 - RNA, 65 nt, Human
uucuugguuuggaaacuuggauggaaaaccucgaauuuuuuugaguugauugguuucccuaagaa

SEQ ID NO: 4123167 - RNA, 89 nt, Human
uucuuguuccucaguaagaaacccaggaauuucuuaccugugugauagaguaauaaagaugugggcuuugaaacugggaaacacuagaa

SEQ ID NO: 4123168 - RNA, 72 nt, Human
uucuuuaacugguuucacgucagcuuuuuccucugauuugagagguggaguuaagugugaacugcuuaagaa

SEQ ID NO: 4123169 - RNA, 57 nt, Human
uucuuuagcugcgaagggaguggaaaagacgacuaagccaagagcaugcaugaggaa

SEQ ID NO: 4123170 - RNA, 78 nt, Human
uucuuuaguuggcugucucauggaucuacagucaggaguggcucuggcuguacagauaaagacuguaaauuuaagggg

SEQ ID NO: 4123171 - RNA, 130 nt, Human
uucuuuaucuugccuuuaaaagcaguuguuacccuuuucccuuucuuguauuucuagcuguguuaguggcucuauuaggaacaacugcagguacaagaaagccugcugcugacuuaaaccaagagaagaa

SEQ ID NO: 4123172 - RNA, 76 nt, Human
uucuuucaauuuuacauaggggauaugggcuaugaagugggcuugucccauaucugacccugaaggcuugagagag

SEQ ID NO: 4123173 - RNA, 64 nt, Human
uucuuuccaaccagauauugguuuguaguuaaucaguuauuauuauuauuuugguuggagaggg

SEQ ID NO: 4123174 - RNA, 129 nt, Human
uucuuucuaaugggagccaccacauugcguuccuuuaauuacacagugucaugucguguuccccugugaaaugacacggaggaacaugaggugaccugggauaacugugaugaauugcaucccgaagag

SEQ ID NO: 4123175 - RNA, 81 nt, Human
uucuuucuguagagaaugaguugguacauaaggaaccucauuauagugacuuauguacccacucauauuccccagagagag

SEQ ID NO: 4123176 - RNA, 65 nt, Human
uucuuucuguccauaaugagacauaccucauuuguacuguccugagauuuauggagggauaagga

SEQ ID NO: 4123177 - RNA, 82 nt, Human
uucuuucuuucccaugccaguuuugagaugcaccucuuacuuggcagguguuccucuguacuggguacugggacagagagaa

SEQ ID NO: 4123178 - RNA, 62 nt, Human
uucuuucuuucuuuuggcuucugcugcuacucagaaaaggagacuccaaaugaaagaggggg

SEQ ID NO: 4123179 - RNA, 67 nt, Human
uucuuuggcuguccucuuggcuggugguaaugaggaacccuggauagaauaaagggcaggcgaaggg

SEQ ID NO: 4123180 - RNA, 121 nt, Human
uugaauccaauauuuuuucuucucggaaucccaggcauaucuacauuauccaagguguggauggagauguauuuuggaaggauuuagagaugucuguucuuauugaaaaaauaaaauucaa

SEQ ID NO: 4123181 - RNA, 63 nt, Human
uugaaugagauuuccagaaagcgcaaugcaaguguuaaauuuguaucucuggaaauucuucaa

SEQ ID NO: 4123182 - RNA, 80 nt, Human
uugaaugaguuacuagggauauucuguacaggcauaggcuauauauguguuuugaacucaucuacugcugacucauucag

SEQ ID NO: 4123183 - RNA, 56 nt, Human
uugaaugcaugguucacucugucauuuccuuucagggucugcucagugucguucaa

SEQ ID NO: 4123184 - RNA, 63 nt, Human
uugaaaucucaaagauggccagaagagacgagucugcugucuauagcaucuaugagaaaucaa

SEQ ID NO: 4123185 - RNA, 61 nt, Human
uugaaaugccguguuucuuacguucaacuucuguugcacguacaugucaggguaacuucag

SEQ ID NO: 4123186 - RNA, 67 nt, Human
uugaaaugguuuugugaaaaugcuuugauaacuucccacucaaagaagagauuuacagagcuuucga

SEQ ID NO: 4123187 - RNA, 59 nt, Human
uugaacacuuacuauguuccaaguauuaauccagaugcuuaauguacgugaguguacag

SEQ ID NO: 4123188 - RNA, 62 nt, Human
uugaaccaaaggauccuuccguugucaucuaucaaaguggacaauuucaccuuuugguucaa

SEQ ID NO: 4123189 - RNA, 130 nt, Human
uugaaccaagagaaauggcuuucccuaggaguuuguuagaaaugcagagucucaggcucccggaccugcugccugggaagcugcauuuuaacaagauacucgggugauuugugcacaccuuagaguucaa

SEQ ID NO: 4123190 - RNA, 67 nt, Human
uugaacccaugagguggagguugcagugagccgagaucgugccacugcacuccagccugggugacag

SEQ ID NO: 4123191 - RNA, 58 nt, Human
uugaacuguguacucuucuccugccaugcaugaaugaaaggagaugauccagagucag

SEQ ID NO: 4123192 - RNA, 75 nt, Human
uugaacuguugcaauucuguuguguuuugcuaaaaucuuaacgagaggauauuuacaaauuugccaauaguuuaa

SEQ ID NO: 4123193 - RNA, 56 nt, Human
uugaagcauuguggcuuguauuuugcaaagcaacugcgggcacauccauguuucaa

SEQ ID NO: 4123194 - RNA, 93 nt, Human
uugaagcauuuauagccuuauaggguagaauuauguacuuuuguuauugguacauaaaauacugccauguauuucuuuuauauuugauuuuaa

SEQ ID NO: 4123195 - RNA, 59 nt, Human
uugaagcccugucuccuguacuucuagaaugugacugcauuuggagacagggucuuuaa

SEQ ID NO: 4123196 - RNA, 56 nt, Human
uugaaggcaacugacaggguuugcaucaaaccuuugugugucugugccuguaucaa

SEQ ID NO: 4123197 - RNA, 80 nt, Human
uugaaggcucuuuaguccuguacucauuuagauugacucucacuucuggucccuuuuuguggugcagacuaaagccucaa

SEQ ID NO: 4123198 - RNA, 68 nt, Human
uugaaggugggaauucaccagguauccaccccuuucuguccaggaaccugucugccucccaccaucaa

SEQ ID NO: 4123199 - RNA, 95 nt, Human
uugaaggugucugagucccuccuggccucacaguccuggguucugggguauagcuguaacugagguggggccgggaggaauggggacuaauuugg

SEQ ID NO: 4123200 - RNA, 72 nt, Human
uugaagucagccugaggucauaggaugcaacuuuccuuagaaaauuuugcccuauccuucauaaaccuucaa

SEQ ID NO: 4123201 - RNA, 59 nt, Human
uugaaguccuaaucuccaggacgucagaaugggacugaauucagagauagggucuuuaa

SEQ ID NO: 4123202 - RNA, 59 nt, Human
uugaaguccuagccccugguaaaugagaauguaacuuuauuuggaacuagggucuuuaa

SEQ ID NO: 4123203 - RNA, 59 nt, Human
uugaaguccuugccucuugcaccucagaauauaacuuuauguggagguaagguuuuuaa

SEQ ID NO: 4123204 - RNA, 61 nt, Human
uugaaguggaagccuacucuugugguuauguugcuuaaccacucauugguuucucuuucag

SEQ ID NO: 4123205 - RNA, 73 nt, Human
uugaagugggggaacgagaguucuggaaggcuuacucaaaguucucauuuggacacucuuuccuucaauucaa

SEQ ID NO: 4123206 - RNA, 69 nt, Human
uugaagugucaaauuaaauaaucugggccucaagagaagacuacucugauuaggaguuugagacuuuga

SEQ ID NO: 4123207 - RNA, 63 nt, Human
uugaauaaaguagcuuucagugccaagguuaauguaucaacuucagguaguugcuuuguugaa

SEQ ID NO: 4123208 - RNA, 55 nt, Human
uugaauaagauaagauuucugcucucauagggcugagagcuguguaucuguuuag

SEQ ID NO: 4123209 - RNA, 70 nt, Human
uugaauacuguaggauuugaggaaaugugggugugaaacagaacauuucuuuucaucucuauauuuuuaa

SEQ ID NO: 4123210 - RNA, 80 nt, Human
uugaauaggucugacagcauuuggaaaaagacagcuuaugaugugggcaucauggucuuauuucacugucauccuuuuaa

SEQ ID NO: 4123211 - RNA, 60 nt, Human
uugaaucacgguauucugcacggggugccaagcccugugguagguguccugugauggcaa

SEQ ID NO: 4123212 - RNA, 81 nt, Human
uugaaucaucugcaaauauuagcuuagacauauauccucuuguaugucacugccuuuauucuguccaguaugacgugucaa

SEQ ID NO: 4123213 - RNA, 96 nt, Human
uugaauccugccuuuuucaguuacuguuuaugugaccuugagaagauucuuagccucucuaaaccuuuacauaacgguaugaaaaaugggaaucaa

SEQ ID NO: 4123214 - RNA, 86 nt, Human
uugaaucucuuccugcaacgcaguucaccugcagccugggaaaguguucuagugccaucuugagcugcuuuguggaagggacccga

SEQ ID NO: 4123215 - RNA, 82 nt, Human
uugaaucugccacuuuggagugcucagagaacaaaguuuuuaaaauaaguaguguagcauucuuagaguuugguucuuucaa

SEQ ID NO: 4123216 - RNA, 85 nt, Human
uugaaugaaccauggggcucuucugguugucacauuuuaagaaucuagaaauggaagcauauggaaagcuauuagguuggugcaa

SEQ ID NO: 4123217 - RNA, 66 nt, Human
uugaauggagacccuaaggaagagguagaaauuacuuguucaauaacucuuagaggucuuuuucaa

SEQ ID NO: 4123218 - RNA, 84 nt, Human
uugaaugguguaggucuggagaaaguugaguuugugaucauuugggaaugcaaugccaguuucuccacagcuucugacuuucaa

SEQ ID NO: 4123219 - RNA, 82 nt, Human
uugaaugucacaagacuuauuuguguagaaaacagaacacucaccaagguguauucuuuacaguggguuuugaaucauuuaa

SEQ ID NO: 4123220 - RNA, 71 nt, Human
uugaaugugaggugccucuaagucuauuaagaggugauguuaaguagacauuuagauaucucgcuguucag

SEQ ID NO: 4123221 - RNA, 55 nt, Human
uugacaaaggaauugaaucucugggagcgguucggaauuuuucuuccuguguuaa

SEQ ID NO: 4123222 - RNA, 56 nt, Human
uugacaaagugcuaaaccacagaggucugagaaagacacucuuaagccuuugucaa

SEQ ID NO: 4123223 - RNA, 80 nt, Human
uugacaaauuuacuugauguaugaugaguaggcauuuuauagauaugccauauucuacuucauauaucaagaagugucag

SEQ ID NO: 4123224 - RNA, 81 nt, Human
uugacaaggccugagcagaggaggcugccaacuguagaaauugcaaguuauaaagaaauucucuguuuucuaccuugacag

SEQ ID NO: 4123225 - RNA, 68 nt, Human
uugacaccagcaucccauugugggucuugauccucuucacaaccauggcccugauggagcuggugcaa

SEQ ID NO: 4123226 - RNA, 55 nt, Human
uugacagccaccacccucaugaaaucauagaugacaucaacaguggugcugugga

SEQ ID NO: 4123227 - RNA, 55 nt, Human
uugacagcuacggagcagcugucuacuccggcaaaugcgucuaaugugcugugaa

SEQ ID NO: 4123228 - RNA, 65 nt, Human
uugacagcuaggaaauugaggcugagacaagugaagugucuugcccugguuucccagcuagugag

SEQ ID NO: 4123229 - RNA, 61 nt, Human
uugacagggcaaguuugagauuauuuuccaaugagaaguucuagaacugugcccuucucag

SEQ ID NO: 4123230 - RNA, 55 nt, Human
uugacauuuuguuggcagccuucagagcacuucaggcuucucugcaagauguuaa

SEQ ID NO: 4123231 - RNA, 58 nt, Human
uugaccagggagcaccgcugcggccgaucagaggagcaggaacuggaacccuggccga

SEQ ID NO: 4123232 - RNA, 63 nt, Human
uugaccauaccuccaggcaguucaaaaggccaaaugcuuccuacugccuggggugcuggccaa

SEQ ID NO: 4123233 - RNA, 64 nt, Human
uugacgucugguguccaaacaugaugucaauauugauauuaucucaagggauagcagauuucag

SEQ ID NO: 4123234 - RNA, 67 nt, Human
uugacugccaaggcuuuuaaacugucaaggaauugcugccagaaauccuugaagagugggcggucga

SEQ ID NO: 4123235 - RNA, 55 nt, Human
uugacugggccagacagagauccuugcuggggaucucucugguggucacagucag

SEQ ID NO: 4123236 - RNA, 75 nt, Human
uugagaagagggaaaggugugcaaguugggagcuauuauucguuccacaggacagccacguuucagucuucucag

SEQ ID NO: 4123237 - RNA, 76 nt, Human
uugagaagcugucgugugcaagugacagaaauaccucugagcagagagucuaguccuugacugacaugucuuccag

SEQ ID NO: 4123238 - RNA, 56 nt, Human
uugagaaggggagaagcuaccaggaucuuauuucuuuacucuuuucuccuuuuugg

SEQ ID NO: 4123239 - RNA, 116 nt, Human
uugagaauaugcugguguggcugguuaugaggcugacaggguagacagagggcagagggugccuucuuuucaacuuuguuucucuggcuccgugccuggugcacaguaguccuuaa

SEQ ID NO: 4123240 - RNA, 124 nt, Human
uugagaaugaaauccuuucauguuaucuucuuuuguuuagucuguuggacauuuuccuuuggauucaaguguuuauugauuggucuagggggugugacaacuagagugacuuccuacuucucaa

SEQ ID NO: 4123241 - RNA, 127 nt, Human
uugagaauuuaagguauggccucucuuuucaggaauccaaggaaaggcacaaauucagcauuuugcauuuaucugcagggagucagagacugccuaacccuugccuugaaagccugccucaguccaa

SEQ ID NO: 4123242 - RNA, 106 nt, Human
uugagacaaagagucucgcucuggcacccaggcuggagugcagugucgccaucucggcucacugcaaccuccaccucccgggguuuaagcaauucucuugccucag

SEQ ID NO: 4123243 - RNA, 104 nt, Human
uugagacaagagucuugcucugucacccaggcuggagugcaguggcucgaucucggcucacugcaagcuccaccucccggguucaugccauucuccugccucag

SEQ ID NO: 4123244 - RNA, 104 nt, Human
uugagacagaguccugcucuuguugcccaggcuggagugcaauggugcaaucucggcucacugcaaucucagccuccuggguucaagcgaugcucuugccucag

SEQ ID NO: 4123245 - RNA, 102 nt, Human
uugagacagagucucgcugugucaccaggcuggagugcaguggugugaucucagcucacugcaaccuccgccucccggguucaagcgauucuccugcuucag

SEQ ID NO: 4123246 - RNA, 103 nt, Human
uugagacagagucuugcucugucacccaggcuggagugcaguggcgugaucucggcucacugcaaccuccgccucccggguucaagagauucuccugccucag

SEQ ID NO: 4123247 - RNA, 102 nt, Human
uugagacagggucuugcucuguugcucaggcuggagugcaguggugugaucauagcucacugcagccucgcucuccugagccaagggaucauccuuucucag

SEQ ID NO: 4123248 - RNA, 67 nt, Human
uugagacaggugucugcaaguuacugggaauuaggcagagaaccaggcauugacaccugaucaucaa

SEQ ID NO: 4123249 - RNA, 104 nt, Human
uugagacggagucucgcucuuguugcccaggcuggagugcaguggcaugaucucagcucacugcaaccucugccaccuggguucaagcuguucuccugccucag

SEQ ID NO: 4123250 - RNA, 103 nt, Human
uugagacggagucuggcucugucacccaggcuggaaugcaguggcgcgaucucggcucacugcaagcuccgccucccggguccacgccauucuccugccucag

SEQ ID NO: 4123251 - RNA, 103 nt, Human
uugagacggaguuuugcucagucguucaggcuggagugcaguggcgcgaucucggcucacugcaaccuccgccucccggguucaagcgacucucccgccucag

SEQ ID NO: 4123252 - RNA, 76 nt, Human
uugagagagaucaucaucaauauuccaagguacccguggagcugggaggcuggauucaugcugggauuuuucucag

SEQ ID NO: 4123253 - RNA, 77 nt, Human
ugguuagaaccucuccacagaguaggggaugagggggcacaccccaggcacauccacucugugagaucucugggcca

SEQ ID NO: 4123254 - RNA, 68 nt, Human
ugugaaaccuguaggcgagggauggacaguucacagagugagcugcuucugccacugccaauaucaua

SEQ ID NO: 4123255 - RNA, 55 nt, Human
ugugaaagauuaucugcaaugagggcugcuagaaagucagccugcugaucucaca

SEQ ID NO: 4123256 - RNA, 78 nt, Human
ugugaaagucgcccaagcauuguguuuaacagcucuaaugccaaagugguuguucauuagcgcuugggcacugacaca

SEQ ID NO: 4123257 - RNA, 102 nt, Human
ugugaacuaucagguuggugcaaaaguaauugugguuuuugcauuuuuuuaauggcaaaaacugcaauuacuuuugcaccagucuaauacuuuuagcucaca

SEQ ID NO: 4123258 - RNA, 65 nt, Human
ugugaagaugcucuccauccaggagugucugaguccuggcuggagcaggcaucuuguuuaacaca

SEQ ID NO: 4123259 - RNA, 130 nt, Human
ugugaagcaccaguugacccgcaggugggggugccaacugguaggcuguaggguuagcucuggccucuggcagccagccaguugucuccuaagaaaauacuguggcgugaaugcaaaaugugauucauca

SEQ ID NO: 4123260 - RNA, 103 nt, Human
ugugaaggcaauauuuuguuaacuaugaguggcguagagguaggggguuauagauuacccucauacuuuaaccuauuuuccuacaauguauuuucuuuccuca

SEQ ID NO: 4123261 - RNA, 96 nt, Human
ugugaauauuaaagcacauuuaaguaugaaauauagcaccuuguuuauagugagugcuuaauuauauuauuauaugugaauguguauauauacaca

SEQ ID NO: 4123262 - RNA, 66 nt, Human
ugugaaucuguacucuagaguuuuucaaggggcagcccaagcaucuuaaaaaguaucagauucuca

SEQ ID NO: 4123263 - RNA, 76 nt, Human
ugugaaugugggagagcuggcaaugcagccaagugauggcaugccuagaaguugaagcuuucuuauguaaauuaca

SEQ ID NO: 4123264 - RNA, 62 nt, Human
ugugaauuucuggacccuuugagaagagugagcuauaauuuuucucuauccaaagauuuaua

SEQ ID NO: 4123265 - RNA, 62 nt, Human
ugugacaaaguauuuuuagguuuguagcagaauuuuacuuuugcuucugauacuuugauaca

SEQ ID NO: 4123266 - RNA, 67 nt, Human
ugugacaaauguuucuacagcguccacugagccaggcucaguaggucccugggacauauaugaaaca

SEQ ID NO: 4123267 - RNA, 75 nt, Human
ugugacacuaaaugagucuacaguacuguugaacaaccuaucaguagaguagaugauuuggugaagaaaaucaca

SEQ ID NO: 4123268 - RNA, 59 nt, Human
ugugacagguggggaaacuaagguaugguggcaugccuugccucaggccccaccccaca

SEQ ID NO: 4123269 - RNA, 55 nt, Human
ugugacauauugagguacugagguauugagguacugagguacugagguugugaca

SEQ ID NO: 4123270 - RNA, 92 nt, Human
ugugacccaagagaaaugaagcuguauuaauuugguuuguuguuagggaaaagcacuagccaaguuuuacgacuaauuuuuccacuuucaca

SEQ ID NO: 4123271 - RNA, 87 nt, Human
ugugaccuaauuauuuaacuccuuuggagagaccccuuugaauaugugucucgucaaacaucagauguuguugguagugaggucaca

SEQ ID NO: 4123272 - RNA, 59 nt, Human
uugcugcccuuuucaccuuuguugcucugcacaggacaauggagggaccagggaagcag

SEQ ID NO: 4123273 - RNA, 62 nt, Human
uugcugccugcuucaccagacguguuuugagcauguuugcauaaaguggaugcaggcugcaa

SEQ ID NO: 4123274 - RNA, 71 nt, Human
uugcuggccagugugcaagaggccaccagcugcccuguucagcuucuggaugagcucacgcuggcccguaa

SEQ ID NO: 4123275 - RNA, 83 nt, Human
uugcugguuucaugaggugggcuuggugccaacaugcagaaaggauacuacagguuggauuccauagucuacagcaugagcaa

SEQ ID NO: 4123276 - RNA, 68 nt, Human
uugcuguuguucugucuuucugcugccuggccuuggucaagggugcagucacaggaaaugugcagcag

SEQ ID NO: 4123277 - RNA, 63 nt, Human
uugcuucccagcuggcugagcacugguuuauagacuucuguguacaaauuuagccagcagcaa

SEQ ID NO: 4123278 - RNA, 75 nt, Human
uugcuucuagcugacauuugagagagauauacaguagguauauauguauaaaauggaaugucagaauugaaguaa

SEQ ID NO: 4123279 - RNA, 77 nt, Human
uugcuugaacccaggagccggagguuguggugagcugagaucgcaccauugcacuccagccugggcaacaagagcga

SEQ ID NO: 4123280 - RNA, 70 nt, Human
uugcuugaacccaggagguugcagugagccgagaucguguuauugcacuccagccuggguaacagagcaa

SEQ ID NO: 4123281 - RNA, 77 nt, Human
uugcuugaacccgggagguggagguugcagugagccaagauugcgccacuguacuccagcucugggugacagagcaa

SEQ ID NO: 4123282 - RNA, 77 nt, Human
uugcuugaaccuggaaggcagagguugcagugagcugagaucgugccacugcacuucagccugggcgacaagagcaa

SEQ ID NO: 4123283 - RNA, 75 nt, Human
uugcuugagcccagaaguugaggcugcagugagccaugaucaugccauuguacuccagccugggcagcaaagcaa

SEQ ID NO: 4123284 - RNA, 75 nt, Human
uugcuugcaucuauuuuugcauaguuaugcuaguaucuuuuaagcauaauaacaccugaauaggaaaguaggcag

SEQ ID NO: 4123285 - RNA, 77 nt, Human
uugcuuggaguucccugagucucccugagucuccaggcagguggggagcagccgcgucucagggcagcuccaggugg

SEQ ID NO: 4123286 - RNA, 82 nt, Human
uugcuuggauguaguaaauuuuuguucaauauaaauuaacaauuauguacugaguucuuauugaauagaaaucauugggcaa

SEQ ID NO: 4123287 - RNA, 67 nt, Human
uugcuuggcacagcuccaggcaugcggacuaugguguguaauugcugccccuggagcuccacagcaa

SEQ ID NO: 4123288 - RNA, 76 nt, Human
uugcuugggcccaggagcuggagggugcagugagaugugaucacaucacugcacuccagccugggcaaccgagcaa

SEQ ID NO: 4123289 - RNA, 92 nt, Human
uugcuuguagccaagacagucuagcaguaggguuccaggugacuucugaggccucguuggcuggaacacuugcucuugaagcuuucauguaa

SEQ ID NO: 4123290 - RNA, 125 nt, Human
uugcuuucuuuacagaauaaacaacugaaguccucauagacugacugcuugccuugacauuccacagaaaaggcaagccauuaaucaugagguagucaccugaacuacuccucaaagaugagcaa

SEQ ID NO: 4123291 - RNA, 104 nt, Human
uugcuuugaagugagguaaacuguaguucagaaucuguucccagcauuuucuggccaugugcugucucugagccuuaguuucugcacucauaaaauuaaaguaa

SEQ ID NO: 4123292 - RNA, 57 nt, Human
uugcuuugaucucaugucagucucuacccuugacuuugacauuuggauucauaguaa

SEQ ID NO: 4123293 - RNA, 59 nt, Human
uugcuuugucugcuuuuuggucucuuggucacagcagggcaugaaaugggcagaagcaa

SEQ ID NO: 4123294 - RNA, 76 nt, Human
uugcuuuguugccuaggcuggagugcagugaugcgauuucugcucacugcagccuccaccuuccagguucaagcaa

SEQ ID NO: 4123295 - RNA, 86 nt, Human
uugcuuuucuaccucugccucugguuuuggucccuggcagcugcugauuuagggcaaaaucccagagcucagagucagaagacuaa

SEQ ID NO: 4123296 - RNA, 61 nt, Human
uugcuuuuucuuuguguaacauuugugcuauuaugaauauggcacauacagaaaagaguaa

SEQ ID NO: 4123297 - RNA, 66 nt, Human
uuggaaagcaagcuggacauacagaguucucaauuuuaugccauugugcccugacuugcuucccag

SEQ ID NO: 4123298 - RNA, 67 nt, Human
uuggaaagguuuaugaguuuggaaggggugugacccauaccuguuccauucauauccuauuggcuag

SEQ ID NO: 4123299 - RNA, 69 nt, Human
uuggaaauaugcuccauucuuuucccuuugacuccagauuuaagaaaauuaaauggggcagcuuucuga

SEQ ID NO: 4123300 - RNA, 83 nt, Human
uuggaacuuaaggagcuuaaacuuuuauaacuugaagcagaaauaugugcuuuuuacagaaguuucagcguuuuagguuucag

SEQ ID NO: 4123301 - RNA, 69 nt, Human
uuggaagaccagaggccuuguccagaagaguaaagauuccagccagcugggccuauggucugaauccaa

SEQ ID NO: 4123302 - RNA, 122 nt, Human
uuggaagaggcuaaauaauaucaacauuaugcuuuucaguuuuaaauuuugaaugucuggaaaacuuaccagaaaaguuuucugagacugacauuuguugccuauguguuaauuucuucuga

SEQ ID NO: 4123303 - RNA, 72 nt, Human
uuggaagcuguggucagggaugagagugcuggggauguguguggaccagcuguacccuggcuaugcuucuga

SEQ ID NO: 4123304 - RNA, 57 nt, Human
uuggaaggcagcauuuguccauggaauuggagagagacgggggcugcugcuuuccag

SEQ ID NO: 4123305 - RNA, 70 nt, Human
uuggaagggauggagggaaagaagugaaaggcgggucuuagccuuuuacuucugcauuuccccuagccaa

SEQ ID NO: 4123306 - RNA, 70 nt, Human
uuggaagugauagauccauauuuugguaaaaaacuauggugccaucuaugucuaguuaaaaaacuuccaa

SEQ ID NO: 4123307 - RNA, 72 nt, Human
uuggaaucuuguaucuuggaacuguaacauuggaugugucccaagcacagucauuagauacaaugucuccaa

SEQ ID NO: 4123308 - RNA, 75 nt, Human
uuggaaugagaugcccucugaaguuagauuccuacugucccagagaaacugaaacauagggccacuacauuucaa

SEQ ID NO: 4123309 - RNA, 88 nt, Human
uuggaaugcugaggugggagaauugcuugagcccaggaguuugagacaagugccugggcaacauagcaagaccuugucuguauuuugg

SEQ ID NO: 4123310 - RNA, 69 nt, Human
uuggacaggaagguacaccaaaguucaaguuuugaagagcaaagccauugaauuuagugccuuuucuaa

SEQ ID NO: 4123311 - RNA, 79 nt, Human
uuggaccaucucuaagguuccugagaucaggaagagcaccugauucaauucugguccucaggaacuggcaaaggucuag

SEQ ID NO: 4123312 - RNA, 113 nt, Human
uuggacccugaaggcaagaauccacccaguuuugcucaccauggaaugcuggccagcaccccacaguuuccagcacagggcaagcuacugugugggcauagguauggguccaa

SEQ ID NO: 4123313 - RNA, 79 nt, Human
uuggaccucaauuuuaauuuuguuauagaacucugugagaaaaagcuuauagacacguuguaacaaacacuguggccaa

SEQ ID NO: 4123314 - RNA, 56 nt, Human
uuggacuccucuuuccucuuggucucgggaaaagagacaaagggagagguguuuaa

SEQ ID NO: 4123315 - RNA, 79 nt, Human
uuggacugaaucuuucucacacugcugcuuuugguuaauggcucucaagagaaucuaaauguagaaagauuuacuccag

SEQ ID NO: 4123316 - RNA, 59 nt, Human
uuggacuguucuaucuuggaaugaaucaucuugaccucuuuguuccaaggagcauuuga

SEQ ID NO: 4123317 - RNA, 86 nt, Human
uuggacuuucugaucuguauauuuuucaaugcaauguaaguuuacauauccauauauuuauagaaggauuauagaaaaaggucuga

SEQ ID NO: 4123318 - RNA, 70 nt, Human
uuggagaauaccucuuuacacagugcaucaaacacaauaguguguacuuaaagguuagcuauucuaccaa

SEQ ID NO: 4123319 - RNA, 59 nt, Human
uuggagauguaaaauucagagagaaucagggcugagucucugagccauagcagucccaa

SEQ ID NO: 4123320 - RNA, 85 nt, Human
uuggagauuugucuuaagaaauugcauuugugguaauacuuuuaaauagacuacuuuuugcaaauauuuuuuaaaugaacucuga

SEQ ID NO: 4123321 - RNA, 55 nt, Human
uuggaggauugcucucagcccaguacaacuguucuucuacugagacuuucuccaa

SEQ ID NO: 4123322 - RNA, 60 nt, Human
uuggagggaagcagaucauaccagaccacgaauggccuuauguguccuguuuuauacuaa

SEQ ID NO: 4123323 - RNA, 71 nt, Human
uuggauaccauggcaguuuauucacgguacagccgcagguuaaucugugagacuaagaugcaaguauuuaa

SEQ ID NO: 4123324 - RNA, 60 nt, Human
uuggaucaguguguggauccucccaggacuuccucggaagugcugggcacacauuuccaa

SEQ ID NO: 4123325 - RNA, 67 nt, Human
uuggauccaggagcagggagaagaggaagguaaugcuuuuuacuucauuccugacuucaacguccag

SEQ ID NO: 4123326 - RNA, 79 nt, Human
uuggaugagacuaacauuuacauuggcagacuuugcguaaagcaggcugccuuccauaauguacguaggccucauccga

SEQ ID NO: 4123327 - RNA, 62 nt, Human
uuggauucacuguugguagaguggccaucaagccagaaccuagccaaccaacacggagccag

SEQ ID NO: 4123328 - RNA, 70 nt, Human
uguggcaaaggugauggaaugucacuucugugguuagguuacaaaagauugugacuuccaucuugcugca

SEQ ID NO: 4123329 - RNA, 59 nt, Human
uguggcagaguaaggacccagugggaacacagaucuaccugaagccaaagucugcuaua

SEQ ID NO: 4123330 - RNA, 61 nt, Human
uguggcagcugcugcaggagcucugugggauaauugaguagaacuguucagcugaacuaca

SEQ ID NO: 4123331 - RNA, 67 nt, Human
uguggccagccuugucaucgcuuuuccugguuaaagauggcaaaagugacugccagugcugggcaua

SEQ ID NO: 4123332 - RNA, 69 nt, Human
uguggcucaggaucuaagcagaauguggagcucugacuccugccauucagaaugccaucuugagcuacg

SEQ ID NO: 4123333 - RNA, 82 nt, Human
uugcaguaccaacacuggggugaccacuacacuugccacauugugcagcaaauguauguuuuccuauguaucuccacuguaa

SEQ ID NO: 4123334 - RNA, 56 nt, Human
uugcagugcuucgcaaaggggcagcagcauggcugucaccaaagcaggcacugugg

SEQ ID NO: 4123335 - RNA, 130 nt, Human
uugcaucauacuccauggauugauauaccacaguuuggccauagguuauuuauuauauuuuguaauuacaaagaauguggcauugaauaaccuuggacuuuguauuguuggccaucugucuuccagguaa

SEQ ID NO: 4123336 - RNA, 94 nt, Human
uugcaucucugaguccuuuauagaauccaguuguuguauuuuaagcagaauacugguuggaaauuacuguagaggcauacuagccagaauguag

SEQ ID NO: 4123337 - RNA, 67 nt, Human
uugcauguccaggguauuguggauauugugguucugucauugcuaauccucaacuuuuggauugcag

SEQ ID NO: 4123338 - RNA, 65 nt, Human
uugcauguguaauuuuucuaaagguucccauauuccucuacccucuagaaugguuacagcagcaa

SEQ ID NO: 4123339 - RNA, 61 nt, Human
uugcauguguauaaaaguuggaaaucaguacaguguaaucagcuuuuauuuuacagagcaa

SEQ ID NO: 4123340 - RNA, 67 nt, Human
uugcauucauaggaagaaaaugggcaaugcagaaggaacauuggccuagagaagcuuacugaagcaa

SEQ ID NO: 4123341 - RNA, 61 nt, Human
uugcauucccagccaaguuagugccuguugcuggccagcacuaacuuggcugggaaugcaa

SEQ ID NO: 4123342 - RNA, 70 nt, Human
uugcauuuuagauguuuucuuugggugguucuuguagccaucacagaaauaaacauaccuuaguuugcaa

SEQ ID NO: 4123343 - RNA, 101 nt, Human
uugcauuuuauaaaguccucuuaaaagcugugggggcaggaaucuguggugaucauucaucacccugcccacacagcaauuuuaaguuacuuuaaaggcag

SEQ ID NO: 4123344 - RNA, 62 nt, Human
uugcauuuugccaauuuguuuucagcugaucuuuauguacuaacaaauuggcagaaugacaa

SEQ ID NO: 4123345 - RNA, 125 nt, Human
uugccaaaccaaguguuguguguauugauuugccucccucucugccacuggacauugcugcuguguuucugacaugacggccauccgugacacagaggcaggaaauccaugaggcaugguggcaa

SEQ ID NO: 4123346 - RNA, 58 nt, Human
uugccaaaucaaagguggcuaugcuaauauucuguagcagaaauaccacauuuggcaa

SEQ ID NO: 4123347 - RNA, 69 nt, Human
uugccaugcauaggaaauguuuuuugacagcacagcuggcuccaggauauaucucuaguguuggggcaa

SEQ ID NO: 4123348 - RNA, 66 nt, Human
uugccauuucccauggaccugccucaccaacccacagcggacaggcaguccccagggguguugcaa

SEQ ID NO: 4123349 - RNA, 60 nt, Human
uugccauuuuucuuugacugaguccauugauaucaguuggcugcaaaggaaaagugguga

SEQ ID NO: 4123350 - RNA, 55 nt, Human
uugcccaaguuccagcugcugcucccacaaucacuagcugugcaacuuugggcaa

SEQ ID NO: 4123351 - RNA, 88 nt, Human
uugcccaugaggaaaugccuccagggcuucgugucucagugcucucaaagagacccagagagcggggccuuucuuucuccgugggcaa

SEQ ID NO: 4123352 - RNA, 78 nt, Human
uugccccaguuauccagcaugcugucuacacgcuuuccugccucaagacagccaaugcuggaagaugcuaugaggcaa

SEQ ID NO: 4123353 - RNA, 66 nt, Human
uugccccuccaaggcacugagauuuccuuguggaauucuagcagauauuggaaauuuugguggcaa

SEQ ID NO: 4123354 - RNA, 88 nt, Human
uugccccucuuucaagaaaggcuuaacagaagaccuuugagcugguucuuaaaggaagauugagcuuuuccaagcaaagcagggucag

SEQ ID NO: 4123355 - RNA, 61 nt, Human
uugcccuucugaguauaaucugcugcuuguucauuauuacaugcaggcugcucagaagcaa

SEQ ID NO: 4123356 - RNA, 69 nt, Human
uugcccuuuuguacacuuacuauauaucuugcugccagcaguuaugggggaaaggguacaaaggggcag

SEQ ID NO: 4123357 - RNA, 80 nt, Human
uugccggugcuuagagcuggaaaacugcagguagggcugagauggauccuguuugucagcgucuguucuguacuuugcaa

SEQ ID NO: 4123358 - RNA, 88 nt, Human
uugccuaaaucuuuauuacauuuaguuuuguuuucauaucuuuuaaagagaugaaaaggguacugaggagauugagggauguggguga

SEQ ID NO: 4123359 - RNA, 121 nt, Human
uugccuacuaccagaggaagauaaagcuuaguggugaugucucuauuauugucuguacaauuacaaagcgauuacauuacacacuaggugcucaaccuguguuaugaugaguagagggcag

SEQ ID NO: 4123360 - RNA, 71 nt, Human
uugccuacucugcguggcugcugugagcgugaaaugggaucaugugcggaacagccacgcaugguccguga

SEQ ID NO: 4123361 - RNA, 69 nt, Human
uugccucauuuucuggugaaaugggcuuaaucaacuacaucagucaauuuccuacuauaaaagagguaa

SEQ ID NO: 4123362 - RNA, 58 nt, Human
uugccucugcggugcuuggcauguggaugauuuccaggugaauaugcagcagaggcag

SEQ ID NO: 4123363 - RNA, 65 nt, Human
uugccucuggguucuauaacugagucagauaccagcaaaccucagggacgugagcucagagucaa

SEQ ID NO: 4123364 - RNA, 71 nt, Human
uugccucuuauguccaugcucuuaauuagacacauuaguagguuauuaacaugaguuggagauagggguag

SEQ ID NO: 4123365 - RNA, 68 nt, Human
uugccugagccugggaggcggagguugcagugagcugagauugcaccacugcauuccagccugggcga

SEQ ID NO: 4123366 - RNA, 66 nt, Human
uugccugcuugaauacuuguguuuggagcaugugaggggugguuccaagucacuuaagaugggcag

SEQ ID NO: 4123367 - RNA, 56 nt, Human
uugccugggcugggcugggugccaaacacuuaaugcacacagcucugcucagggaa

SEQ ID NO: 4123368 - RNA, 61 nt, Human
uugccuuccaggacuuggcaggagaugacaacaacagucacuucugaagugucuugggcaa

SEQ ID NO: 4123369 - RNA, 85 nt, Human
uugccuucgauaaaagguaguuuauuguauaugguaguuuaugguacagccaagacuaaauaaugauuuacuggauaaaaggcaa

SEQ ID NO: 4123370 - RNA, 82 nt, Human
uugccuucuuaaugcauaaacuguguuugucucugcugccgacagaggcaaaacccauacaccuuuauaacauugagagcaa

SEQ ID NO: 4123371 - RNA, 56 nt, Human
uugccuuggguucacaucuaggccuugucacuaacuagcugugugaccuugggcaa

SEQ ID NO: 4123372 - RNA, 98 nt, Human
uugccuuuuagguuucagaguucuguccuccccacucuuuaucuccauauuacagggcuggcguugggacagaagucaagaaaaugacaaaguggcaa

SEQ ID NO: 4123373 - RNA, 70 nt, Human
uugcuaaaagagcuugguugauuuugcaacaccugcaaaggucuaguaaaaaggccaagcccuugugcaa

SEQ ID NO: 4123374 - RNA, 130 nt, Human
uugcuacuucuguuuuuuuaaaaaagcaagauccccaacagaaaaggauguguagaacuguaaugcccacauaauguugcgaugggacuacuguuggcacauuugggguuuggaggcccaggagagugaa

SEQ ID NO: 4123375 - RNA, 75 nt, Human
uugcuagaaccaaccacaagaguuucugauucaguaggucuaggguggagccuaugaauuagcacuuucuagcaa

SEQ ID NO: 4123376 - RNA, 66 nt, Human
uugcuagauccagaauggcuuuucacucuuagcgcuuaucugugaauucaguuugacaucuagcag

SEQ ID NO: 4123377 - RNA, 59 nt, Human
uugcuagggcacucagucuggaggcagucuggccuacacagaggcugaugucuuagugg

SEQ ID NO: 4123378 - RNA, 66 nt, Human
uugcuauucuguuuuuccagguuguaauuacagcaaacgauugauuggaaaacauuuaaauagcaa

SEQ ID NO: 4123379 - RNA, 58 nt, Human
uugcuauuuccugaaauaagcacuacucagcuuuggggagcugcuucaggcaauguaa

SEQ ID NO: 4123380 - RNA, 84 nt, Human
uugcucaagguugcacaguugauuuaugcuggugccagcuuuggaaggcuuguaucuucagcacagauccugugcucuuugcaa

SEQ ID NO: 4123381 - RNA, 57 nt, Human
uugcucacuuugacuauuugcagauuacaaauuauuugaggucaaagaagugagugg

SEQ ID NO: 4123382 - RNA, 57 nt, Human
uugcucagcaaaggggaugcguccuaagaacuauuaggcaguuucauuguugugcaa

SEQ ID NO: 4123383 - RNA, 56 nt, Human
uugcucagcacuggagccagcuagccccacauuuggaacuggacucugcugugcaa

SEQ ID NO: 4123384 - RNA, 66 nt, Human
uugcuccugccagcacugccuccugagguccacgucucauuguuccaggagcaugcuggcuggcga

SEQ ID NO: 4123385 - RNA, 68 nt, Human
uugcucuaaaaaugcagcaauuaauggauaagaacccuggcccaauauggcuccauuccuuuaggcaa

SEQ ID NO: 4123386 - RNA, 57 nt, Human
uugcucugacaguggugucauugagaacgauggugacaaggacagguugcagggcaa

SEQ ID NO: 4123387 - RNA, 76 nt, Human
uugcucugucacccaggcuggagugcaauggcacgaucucagcucagugcaaccuccgccuacugggcucaagcaa

SEQ ID NO: 4123388 - RNA, 67 nt, Human
uugcugagucaugcaguguguaucuacuuaauugaacucaauuaagugaaccagcuguacucuacag

SEQ ID NO: 4123389 - RNA, 69 nt, Human
uugcugauuguagccacugugaugaauuaaucuauuagagcuuuucaauuuauguggcuauucauucaa

SEQ ID NO: 4123390 - RNA, 77 nt, Human
uugcugauuugggggugcugccauugccucuaagugugucaaccuuuugcaaacauucagggcuccaaagucaguag

SEQ ID NO: 4123391 - RNA, 66 nt, Human
uugcugcauuuuuucugugugccagguacugugaggacuuagaggacacagagauaagugagacaa

SEQ ID NO: 4123392 - RNA, 116 nt, Human
uugcuggugaaagaggauacaaagauaccuccagagacagggcagggagugugguguacuuaccacauuucuggaauugacuugggaagugguguucacuucuuuuaucaaagcaa

SEQ ID NO: 4123393 - RNA, 66 nt, Human
uugcuguaaugugggaagccagagggugccguguuuuaucagccuggcucauccugguugcagugg

SEQ ID NO: 4123394 - RNA, 78 nt, Human
uugcuguagauugugggauauugacugaaguaccagauucugaaguagaaaaaugaggucaauauccuuuucuggcaa

SEQ ID NO: 4123395 - RNA, 99 nt, Human
uugcuguguucaguggguuacuuuuggagaacaugauaugcucuagggcccacauguuaccuuguucuccaaaaauagcauuuccuacucauuaagcaa

SEQ ID NO: 4123396 - RNA, 63 nt, Human
uugcuguugcuaucauugcugcuauuuuuauuccacucaagggcaguaucugaagccacacaa

SEQ ID NO: 4123397 - RNA, 64 nt, Human
uugcuguugcuuaaguucacccuaggagcaggaaaaaugagggugcauuuaacagaaacaggaa

SEQ ID NO: 4123398 - RNA, 61 nt, Human
uugcuuaaagggaguagagagagaggucaaagagcagaccuauuucuaaaccuauaaguga

SEQ ID NO: 4123399 - RNA, 57 nt, Human
uugcuuauacagauggugugcuauucaugaauggcuuuacuuugaucugauaagcaa

SEQ ID NO: 4123400 - RNA, 65 nt, Human
uugcuucauauuuguggcuugccuucuauuucuauuggacagcacuggucuaaagucugaagcag

SEQ ID NO: 4123401 - RNA, 57 nt, Human
uugcuuccucuaguuucuugaaggcaugcauuacugucuucacauuggaagaaguag

SEQ ID NO: 4123402 - RNA, 66 nt, Human
uugcuucucuccucagaacaggcccucuagcuccagcagguggcacugccccugggauucaagcag

SEQ ID NO: 4123403 - RNA, 55 nt, Human
uugcuucuggaucuuaauguuugcaugaacaaaacauuaagaaacgagagagcaa

SEQ ID NO: 4123404 - RNA, 104 nt, Human
uugcuuuuaaaaaugccuguacagaguucugaguguacuggucacuauuuuucuuaagcugagaggauuuuuguaguacuuagcaauuuuguauaacauagcaa

SEQ ID NO: 4123405 - RNA, 91 nt, Human
uugcuuuuauuuaggaaagacaaaaugucauuccaaaacuagaagaaauuguuuggggggaaauauuuugucuaauuuguagggaaagcag

SEQ ID NO: 4123406 - RNA, 103 nt, Human
uugcuuuuggcugcuggaagcuguagcuuuucaaaacguucacacauuucaauguaucgucgauguuuuuaaauagacuuacagggaggguggcacacagcaa

SEQ ID NO: 4123407 - RNA, 64 nt, Human
uugcuuuuugcuauuuugagucuauucugcagcauagagguauaccaaaaaggcaucugagcag

SEQ ID NO: 4123408 - RNA, 93 nt, Human
uuggaaaccuuugggaaaacauuucaaguaguuugcuuuccaagccguuuucuugguaaaguaaagauugggaaugugucaccuaaagcccaa

SEQ ID NO: 4123409 - RNA, 129 nt, Human
uuggaaacucagucccgugaguaggacguccaccucauuggugguguuuaaauauuaagugucaaaugcuagagacaguacaaaacccaccagagggggccuuccuaacacguuggcauaaggauccaa

SEQ ID NO: 4123410 - RNA, 74 nt, Human
uuggaaauaacaugcuaugugucugaaucacauacagucaucugugauuagucaauagcuaugugucaacccaa

SEQ ID NO: 4123411 - RNA, 71 nt, Human
uuggaaauggaugugucuggcuccccugcaaggguacacugcccuuggaaacagacauguccaucauuugg

SEQ ID NO: 4123412 - RNA, 80 nt, Human
uuggaaauguguaaagcuuuucuuuguucagugagucuuuucauuauuuaaaauagagagcagcuuugcgguuuucucaa

SEQ ID NO: 4123413 - RNA, 64 nt, Human
uuggaagaaccaugcacugcagggagggggccgccccaugacagcugcaagcagguuauuccag

SEQ ID NO: 4123414 - RNA, 56 nt, Human
uuggaagaagguacuguauauauacauauauauguauguuucauaucuucauuugg

SEQ ID NO: 4123415 - RNA, 76 nt, Human
uuggaagagaauggcaaagaaagugagaaaucuaaaucacauuaaaauucuacuuucucugucauuaaaagcccag

SEQ ID NO: 4123416 - RNA, 57 nt, Human
uuggaagauugcuguucuacaguuucucagucagaagggcugucagcagcuucacga

SEQ ID NO: 4123417 - RNA, 69 nt, Human
uuggaagcagcuagcccacuagucaguauucuuucugccucugugcugcaccgugggagcuguguccaa

SEQ ID NO: 4123418 - RNA, 87 nt, Human
uuggaagcuuugagagcagaagccccuccagaccaagaacuccugauugugucuuucccuugggcuuucgcaguuuucagcuucuaa

SEQ ID NO: 4123419 - RNA, 95 nt, Human
uuggaaggauauagcaauuacuuggucuagugagugagcauaguuguguuagcuauagcucaaagaagauuaugugauuaauguuuauuugccaa

SEQ ID NO: 4123420 - RNA, 99 nt, Human
uuggaauaaggggaagggugugguuugaagggagauggaggaaagaaaaaguaauuucacuaucucuccacaaugccaguguucauacuugaauuuuga

SEQ ID NO: 4123421 - RNA, 72 nt, Human
uuggaauauucaaucagcuaugguugcuuaugaggaacaccuuggaaguaacaaugcuguugaauuguuuga

SEQ ID NO: 4123422 - RNA, 106 nt, Human
uuggaauauuuauugaguuacuguuaugcaucaggcacuaggaauagaaagaaaaauauucugucucuguacuggguguucagaauuuagugaggaaaauagccaa

SEQ ID NO: 4123423 - RNA, 72 nt, Human
uuggaauggcugauguaggugcuguauguauaguugaggcuguuugugcccugccuacaucaccuuuaccag

SEQ ID NO: 4123424 - RNA, 116 nt, Human
uuggaaugugguccuuagcuuugcaagucuagauccuguguuuuauuggugcagucagagaaaacugguuuucuggaauuaaacucaggagacucaugcuuaauccacaauuccaa

SEQ ID NO: 4123425 - RNA, 63 nt, Human
uuggacaacggcaaaggaauguagagauuuuggaucaaagccucacaguuuucuguaguccaa

SEQ ID NO: 4123426 - RNA, 63 nt, Human
uuggacaccagaauugcuaggaaaauugaucucagaauuucuugcaucacucugcuguuccaa

SEQ ID NO: 4123427 - RNA, 70 nt, Human
uuggacagggaaguccaugggggcgguggggcacagguuccauggccgacugguuuaccacuguauucaa

SEQ ID NO: 4123428 - RNA, 84 nt, Human
uuggacauaugcucauuuacuugcuuauaaucaaaacauuaaaaaacuguuuugaacucaggcuagguguaaguauuggacuaa

SEQ ID NO: 4123429 - RNA, 58 nt, Human
uuggacuguuacuguauuuaaucaucuaacacaucuagaggaagacaguaaccuccag

SEQ ID NO: 4123430 - RNA, 73 nt, Human
uuggacuguucugccaagaucaacguugccucacuucucacuauaaacuugaaaccuuggcaaacaaugccaa

SEQ ID NO: 4123431 - RNA, 70 nt, Human
uuggagaaguccuuuaauaucacauaguguaaauauacuugcacuuaauuggagauaaaggcuguuccaa

SEQ ID NO: 4123432 - RNA, 86 nt, Human
uuggagacagcuauuaauugcuucccaagggaggucuuuggcacuaagucagagucucuuuugcgaagaguguuuaggugugcuaa

SEQ ID NO: 4123433 - RNA, 67 nt, Human
uuggagagaacagaugugaaaugcuaagccaaaugagugugugagcuuuucacaucugucccuuuaa

SEQ ID NO: 4123434 - RNA, 56 nt, Human
uuggagagcaguaaaccacacuuguuuaaaacaaacaugcuggugaugccuuccga

SEQ ID NO: 4123435 - RNA, 60 nt, Human
uuggagagcugacaucaugauguugggaaaugaaaccaauguuugugugucauuuucugg

SEQ ID NO: 4123436 - RNA, 59 nt, Human
uuggagaggagguagggacagccucucuguucauggaaaucucccaucauccucuccag

SEQ ID NO: 4123437 - RNA, 80 nt, Human
uuggagaguuuguacuucauugguucuacuuugucugagagcagauggagcccuaaagugaagcuauuauuauuuuucaa

SEQ ID NO: 4123438 - RNA, 66 nt, Human
uuggagauggucuccagagcauaauucacagccacuuguggcagcagccauggaaggcccuuccaa

SEQ ID NO: 4123439 - RNA, 59 nt, Human
uuggagaugguucagaauuauaaagauuaucugaaucuuuaucugugagcagucuccaa

SEQ ID NO: 4123440 - RNA, 65 nt, Human
uuggagauugggcugcuaucuuccuugauuuuuacaugucaaagagauggcucucagaucuuuga

SEQ ID NO: 4123441 - RNA, 73 nt, Human
uuggagccucugugggaaccugcacuuugugcuuuuccagaagcagaggagcaaguugcuacaguggucccag

SEQ ID NO: 4123442 - RNA, 77 nt, Human
uuggaggauagguuguuguauuauuaagagagcaggcagguccuuugaauuccaguacaauaacucuucuccucuaa

SEQ ID NO: 4123443 - RNA, 60 nt, Human
uuggaggggccacugcagagcucgcgguccuugaggacacggcuggcggugccuuuccgg

SEQ ID NO: 4123444 - RNA, 70 nt, Human
uuggaggucaaauggagggcuggguggggccagcucaaaccuucuauccccagcucuuuugaaauuccag

SEQ ID NO: 4123445 - RNA, 69 nt, Human
uuggaggugagcuucucaugaacagggcuuccugggaccucuuauccugucuuacaugagucaccccaa

SEQ ID NO: 4123446 - RNA, 69 nt, Human
uuggagguuugaaaauauguguacuugguuuuauuccuuuccacauuacuguguugugcagacuuucaa

SEQ ID NO: 4123447 - RNA, 113 nt, Human
uuggaguuuugauuuacuguccuauuuauuuuuacugcacaaaggaaacacuuauuccuuccuguuuugcauuucagaagaaaauucgggaugguccaaaugacagacuccaa

SEQ ID NO: 4123448 - RNA, 63 nt, Human
uuggauaucugcugaugcaccuuccucucuuuccacaggcuggugacaucuagagacauccaa

SEQ ID NO: 4123449 - RNA, 130 nt, Human
uuggauccugagagaaaggaguagcaggaacugacccuccuggggcacuuagaagcaaacugacaguauugcuccagccugcuucagcaguuggucauguccuugagaccuaauccugaucuaagcccaa

SEQ ID NO: 4123450 - RNA, 60 nt, Human
uuggauguuugaaaucacguacauggaaaugaucucuaugugcaugagggaggauagcaa

SEQ ID NO: 4123451 - RNA, 71 nt, Human
uuggauucagucuugcagauucauuuguaacagcucacaaaaacaagucagauuuguauuauugguuccaa

SEQ ID NO: 4123452 - RNA, 85 nt, Human
uuggauuuguggcacuaugaguuauaaguggaccacggaaaugaaacuaauguccacccuauaauuuuuuaauguacaaaauuga

SEQ ID NO: 4123453 - RNA, 63 nt, Human
uuggcaaauccuagcuaucacggcuuuauucucucaaagagucaguagugagguauuugccaa

SEQ ID NO: 4123454 - RNA, 73 nt, Human
uuggcaacacauggaaaaauuuccaguacccaauuaaaguuaugcaggcugauuuucauucauauguugccaa

SEQ ID NO: 4123455 - RNA, 80 nt, Human
uuggcaagcacacacgcuggagaggaagaaacgggaucaguuucaauuucacuuuccaggcuuuuuguguuucuugcuag

SEQ ID NO: 4123456 - RNA, 86 nt, Human
uuggcacagagcaguguugagugucuguuugcagguuuucgcccuguuauucaacagauauuuauugagcaccuacucuguggcag

SEQ ID NO: 4123457 - RNA, 55 nt, Human
ugugugugcauuugucaucugugcuagaggagcaaagaugaguccggcagacaua

SEQ ID NO: 4123458 - RNA, 76 nt, Human
ugugugugugugugugugugugugugugcaugcgcacgugcgugugugaaggaauauauacucacauauguacaca

SEQ ID NO: 4123459 - RNA, 72 nt, Human
uguguguguguguguguguguuuugaacuuagagcacaacucaauucagacuagacacauuucaagcacuca

SEQ ID NO: 4123460 - RNA, 57 nt, Human
uguguguguguguguguguuugggcuggagagcuguaaaggccauaaucacggagca

SEQ ID NO: 4123461 - RNA, 57 nt, Human
uguguuacauuaggaaaacuaaguaucuuuaacuuagaguuuccuuguaugaacaua

SEQ ID NO: 4123462 - RNA, 89 nt, Human
uguguuacuaugaggguggcacugguggcucuauuuauuuauucauuuauuuagacagagucucgcuaugucacccaggcuggagcgca

SEQ ID NO: 4123463 - RNA, 75 nt, Human
uguguucaagcuccuaagagcaacugugcuuuucuggugauuuggcaugagguucuuggccagcauugauauaua

SEQ ID NO: 4123464 - RNA, 84 nt, Human
uguguuccuggugaauuccuggcaccaccacuucuagguggguauggaaucaggaagaaggguguuagggagccauugaauaua

SEQ ID NO: 4123465 - RNA, 129 nt, Human
uguguucggaucucacaugaagaaaugaaccuggaauuuaguuaauuccauuuucuuuacuaucagagcuuuaagugacucagcugaauucagaguugaauuuuuucuccaaaugagaucugagauuua

SEQ ID NO: 4123466 - RNA, 76 nt, Human
uguguucucuagagguucagaccaagaauugcguuuugaagacugagagcugggccugacacuuacuagggacaca

SEQ ID NO: 4123467 - RNA, 79 nt, Human
uguguucuuaucauuagaccaaacuagagcugauagguugaaaaugucagcuuucaguuacuaaugaagggaaauguca

SEQ ID NO: 4123468 - RNA, 67 nt, Human
uguguugaaugccugcugugugccagacagcucagugccugggugcguggacacagagauuaacaca

SEQ ID NO: 4123469 - RNA, 68 nt, Human
uguguugagaacuaaugauguacuaggcacuauuuugugugcuuuagauagauuuagucuuuacaaca

SEQ ID NO: 4123470 - RNA, 63 nt, Human
uguguugcaguagcaguaguugcaguggaugcugcuucugauucaugguuauugccaaacaca

SEQ ID NO: 4123471 - RNA, 59 nt, Human
uguguuggauguacauaugucuguuagcuuuuaguggcagacagagugcagucuacaua

SEQ ID NO: 4123472 - RNA, 55 nt, Human
uguguuggcuguacauguaucuguuaccuuuuaguggcagagugcagucuauaca

SEQ ID NO: 4123473 - RNA, 97 nt, Human
uguguugggaaaaugugcauaucucauuaacuugccuagcaucaaccucugaacacugggauaggugauagacuguaagguuaccuuucucaaugca

SEQ ID NO: 4123474 - RNA, 60 nt, Human
uguguugggauuacaggcaugagccaccacaccuggcuccucccugacuucuacagcaca

SEQ ID NO: 4123475 - RNA, 57 nt, Human
uguguugguaaacuuucucagggcuguuauucaaagggcucugaccauaucaagaca

SEQ ID NO: 4123476 - RNA, 71 nt, Human
uguguugguauugaggaaaguauuucaauuaggacagauaguuagaagucucuuaguaauauccaaccaca

SEQ ID NO: 4123477 - RNA, 81 nt, Human
uguguuuauucuugugguuugauucaguaugaccuuuggagccucacuuuggacuagacaucgagcuacagaguggaaaua

SEQ ID NO: 4123478 - RNA, 84 nt, Human
uuacacgccgucuguucugcuaauugagugucagggucagaugcuccuucuccuggcaggucagcaggagcagcgugccuguga

SEQ ID NO: 4123479 - RNA, 62 nt, Human
uuacacuugaaaacaggauuuauuuucagccucccuuaucugguuuccuuuuuucaagguga

SEQ ID NO: 4123480 - RNA, 55 nt, Human
uuacacuuuugacaaaccugagcauuaagcuaagggaagauuaugucaagugugg

SEQ ID NO: 4123481 - RNA, 57 nt, Human
uuacagaaaagggguuguccuucauaaacuaaaagaaguuaacccacuucucgguga

SEQ ID NO: 4123482 - RNA, 64 nt, Human
uuacagacaaagugcuauaggguggggacagaaaggugagccagccauagcucuaugccuguag

SEQ ID NO: 4123483 - RNA, 57 nt, Human
uuacagaguagugcagaacucacaguagcuucugguaauucugcaugugcucaguaa

SEQ ID NO: 4123484 - RNA, 69 nt, Human
uuacagauuaaaaugcugaggucuacaaaacuaaauucauuuauauaaggagaccucacagaucuguga

SEQ ID NO: 4123485 - RNA, 67 nt, Human
uuacagcuauguguauacguguguguguuugcuuuuagacaucaucgugcacauacauaagcuuuaa

SEQ ID NO: 4123486 - RNA, 73 nt, Human
uuacaggacccccugccuugggcaauaugaaguuuuauaaaguuauacacaauuccagaggcagcuucuguaa

SEQ ID NO: 4123487 - RNA, 124 nt, Human
uuacaggaugaggaugcaaccagaugaguguaaauaaccugaggucuauaauuuauuaagugcucaacaaauaguaguaauuguuaucuuauuuauguaugcuuauuuucucucagauauguaa

SEQ ID NO: 4123488 - RNA, 59 nt, Human
uuacaggcaaggguuguuaccauggcauucgauaugcgugacaggcacccuggcuguga

SEQ ID NO: 4123489 - RNA, 59 nt, Human
uuacagggggaugagauugugaccauguuaaauacaucaacauuuguaucucccagugg

SEQ ID NO: 4123490 - RNA, 74 nt, Human
uuacagguagagagggaccauuccugugccaaauagguuaauuuuuggcagagagacucuccuugaucuaguaa

SEQ ID NO: 4123491 - RNA, 96 nt, Human
uuacagugaucguuguugaguagugauucugauguaagacaagcucacagcuugugaccacaaggaucauuauaugaacugcaaggaucauuauaa

SEQ ID NO: 4123492 - RNA, 56 nt, Human
uuacauauugccucuggcugcuuucacaguaugacagcacaguagaguaguuguaa

SEQ ID NO: 4123493 - RNA, 56 nt, Human
uuacauucuggaaaggcacagaccaaagggccaggcugggccagccagacauguga

SEQ ID NO: 4123494 - RNA, 68 nt, Human
uuacauuuaccucguaauauauguauauauauauauuaggaguuaaauguauuaggagguaaauguaa

SEQ ID NO: 4123495 - RNA, 77 nt, Human
uuacauuuuuaauuucacagcucagugaggugggcaaaagcaguauuaccaaccucauuuaacagauuaaaaaguga

SEQ ID NO: 4123496 - RNA, 84 nt, Human
uuaccaaguauuguguuuaaaaaaacaguugaggagaugugauuccucugcugugccuuaaaaugcaaguugauacuuacguaa

SEQ ID NO: 4123497 - RNA, 55 nt, Human
uuaccacacuuauuuacauugggucucaaaaccuaauugcuauuuaaugugguga

SEQ ID NO: 4123498 - RNA, 106 nt, Human
uuaccacuguuaauguguuuaaauaauuaggggccugugucaaagacucacauaccuguccacagaagccuucccugguuguuugaaagucuuaaaaucuugguaa

SEQ ID NO: 4123499 - RNA, 65 nt, Human
uuaccagaugggggacuaugagaaugucuacaaacuuuucugagauuuggguuccucaucuguaa

SEQ ID NO: 4123500 - RNA, 58 nt, Human
uuaccagcugcugccugugggucgggccuuuaauuagcucacaucuggcagcugauga

SEQ ID NO: 4123501 - RNA, 89 nt, Human
uuaccauuuaggucuucuuaagagucaauccagcaaauaaugcucuagggcaauuugauacuuaaaaugaugagaccuuucccugguga

SEQ ID NO: 4123502 - RNA, 62 nt, Human
uuacccugggcuuggccugcucagccggucugggcuuccugggcaaacacaacucaggguga

SEQ ID NO: 4123503 - RNA, 74 nt, Human
uuaccuaacuucucugagucuugguuucuuaccugaaggaugaggacaaucccuaacucagagaguuaauguaa

SEQ ID NO: 4123504 - RNA, 99 nt, Human
uuaccuccauugaggcucaguuuuaucaucugugaaauggggacagucagcccugucucacagguaauaggacacaugggcccaguauccuggacauaa

SEQ ID NO: 4123505 - RNA, 56 nt, Human
uuaccugagcggauuuguugcaggguccagacugcaagaaccuagcgaucagguaa

SEQ ID NO: 4123506 - RNA, 68 nt, Human
uuaccuucccacacaauuaagucauuuuucuagucugucuaaaguguaaauaauuugagggaagguag

SEQ ID NO: 4123507 - RNA, 59 nt, Human
uuaccuuuaugcaguaugcaaccauaaaauugguuucuauacacugauauaaggaguaa

SEQ ID NO: 4123508 - RNA, 57 nt, Human
uuacgaccuuugucaugcuugggauuuguggaaauuucacagugguaaggguuguga

SEQ ID NO: 4123509 - RNA, 92 nt, Human
uuacgaguagacauuacccaguuaggagacugugauaggaucugugauucauaaaguacagucucuuugagugauugucuugucacuuguga

SEQ ID NO: 4123510 - RNA, 73 nt, Human
uuacggcucagggccuccccggcagucuuucgugacugagcucaagaaggcugcauggaggcuguggcuguga

SEQ ID NO: 4123511 - RNA, 74 nt, Human
uuacgggaagcuuggauaacuguaugggggacuuuaaaauuuaucucucugugauaguuuuucagcuauuauga

SEQ ID NO: 4123512 - RNA, 55 nt, Human
uuacuaagucccuggguccaaggcagcucugcagagccuagggucacuucaguga

SEQ ID NO: 4123513 - RNA, 78 nt, Human
uuacuacaacuuaauauuucuccaaauguuuucaaaauggcauaauuggaaaaacuggugaaaugcagucugcaguga

SEQ ID NO: 4123514 - RNA, 57 nt, Human
uuacuacaagauucuguuuuauugcuauccguggcuuuauuuacagacuugaaguga

SEQ ID NO: 4123515 - RNA, 97 nt, Human
uuacuagcaaccugacauuuauuugaacaacuauuuuuuuaagagaaguaauucagacaaauuguugcuucaugaaugagugugagucuguuguuga

SEQ ID NO: 4123516 - RNA, 81 nt, Human
uuacuauauacuauauugcugaugagacagcaaauugaauaucacugacaaguugucucaacagugaaauguguuugauga

SEQ ID NO: 4123517 - RNA, 93 nt, Human
uuacuauggcaaauagcugacagauacaaucagauuuggaauuuagauagauuuguuuguacacuguguagagaauggauuggaacaugguaa

SEQ ID NO: 4123518 - RNA, 69 nt, Human
uuacucaacauuuaacagugaaaaaguggaaaaauccagcuuucauagcugaaaauguugaauauguaa

SEQ ID NO: 4123519 - RNA, 74 nt, Human
uuacuccauccucaaacuaaauuuccugaaaaagauuaguuaguucagaauuuugguuugguugguugguuuaa

SEQ ID NO: 4123520 - RNA, 88 nt, Human
uuacucuuccaaggucaaauuugcagguucaagaaacugauugagaaagccuggucauugucagagccuguacugauaaggacaguaa

SEQ ID NO: 4123521 - RNA, 68 nt, Human
uuacucuugcuuugcuucacaguuccguagagauaucucaggggugccugugagcagaugcugaguga

SEQ ID NO: 4123522 - RNA, 55 nt, Human
uuacugaauaucucugagccagaaaugauuguagaugcucaggauguagcaguag

SEQ ID NO: 4123523 - RNA, 83 nt, Human
uuacugaaugugaugcuaaacauaugucuaauuuguguauagauuugcagagaaaauguauauguuggguuauguuacaguaa

SEQ ID NO: 4123524 - RNA, 60 nt, Human
uuacugaucccccaggugacccacagcgggaaauuauacuucaacuggcaggauuaguag

SEQ ID NO: 4123525 - RNA, 58 nt, Human
uuacuucagauuguggaaggcauucaccagcuaaaaguuccuuuccaauucgagguag

SEQ ID NO: 4123526 - RNA, 79 nt, Human
uuacuugauaucaauaagucagugggagaagugugaagucuuaucuugaucagaacauucucauugacugcuuaaguaa

SEQ ID NO: 4123527 - RNA, 62 nt, Human
uuacuugccuggacucugcugguauuucagcuugagaucccagaccagagccaugcagguag

SEQ ID NO: 4123528 - RNA, 72 nt, Human
uuacuugucagcaguuuuuaguggaggaaaaacugcaguuaaagcaccuuuacugagaacuuugagcaguaa

SEQ ID NO: 4123529 - RNA, 62 nt, Human
uuacuuuacuacauccacagauggauuucuaaagaaugucgccugugaguauaguaaauuaa

SEQ ID NO: 4123530 - RNA, 77 nt, Human
uuacuuuccacaauauagucucccauuggccugcuguuuacuuucauucugccacagcagggacuacgugaaaguga

SEQ ID NO: 4123531 - RNA, 76 nt, Human
uuacuuugaacauuuuucugcaaguguagauacccagcguuuaagcuggaauuugcuuugagaggcuuuuagguga

SEQ ID NO: 4123532 - RNA, 70 nt, Human
uuagaaaaguauauuuacuuacugugaauuugcagugauggaaaucacagugaggaguuacaguuucuaa

SEQ ID NO: 4123533 - RNA, 58 nt, Human
uuagaaaauggaggugggagggugguucuugacauccuuagacauguucauucucuga

SEQ ID NO: 4123534 - RNA, 61 nt, Human
uuagaaacaaagaccugggugcuagcugugcuuauugcuacaagcaugucauuguuucuag

SEQ ID NO: 4123535 - RNA, 74 nt, Human
uuagaaacagugcauauaugaagaguaugauggcauguuuauaagcugcauauacauguaccccgauuuucuaa

SEQ ID NO: 4123536 - RNA, 83 nt, Human
uuagaaagagacagccuggcuuaaucugucuucugaaacgcaaggucagcagacuggaggauaucagcugccacucuuuuuga

SEQ ID NO: 4123537 - RNA, 65 nt, Human
uuagaaagggugucugaaucugcaagggugggaugcagaauuaaaucaaaggacacuuucucuga

SEQ ID NO: 4123538 - RNA, 56 nt, Human
uuagaaauuucuccugaguagugcucauuugacacacucuucccagaagguucuga

SEQ ID NO: 4123539 - RNA, 82 nt, Human
uuagaaguaguugcaggcugaugaguuugguuuuuguuaacaaagaacaagagcuagacuuugucaggaggcagccaccuaa

SEQ ID NO: 4123540 - RNA, 104 nt, Human
uuagaauaucuuccaucucaugucaaaugaaugcugaacggggguuuugauuauuuuuaguuaaucgaaccugaauacaguaauuuugaugaguuguauucuag

SEQ ID NO: 4123541 - RNA, 55 nt, Human
uuagaauccagcucucucugagcucccuuugagcucugacauucugugacucuga

SEQ ID NO: 4123542 - RNA, 125 nt, Human
uuagaaucuccuguuuuuguuuuguuuuaauuacugaugccuguguuccaccacagagauacugauuuaauuggcauggggcauaacggagaucagaauuuuuaaaagcuucccagggaguccaa

SEQ ID NO: 4123543 - RNA, 76 nt, Human
uuagaaugagauaucugaugaaaauacucugauucucgacaagaauguagaguauguuucagaucgucuuuucugg

SEQ ID NO: 4123544 - RNA, 95 nt, Human
uuagacugcgauuaacucucuuuguaaucauucccuugguucgaugauguuguggagcugaggaauaauaacaagguugguugguuuguuuuuaa

SEQ ID NO: 4123545 - RNA, 100 nt, Human
uuagacugugagcuccuugagggacuuugucauaaucacuguuacaucccagugccucacacuaugccuggcccuuaagaagugcucaauaaaugucuga

SEQ ID NO: 4123546 - RNA, 77 nt, Human
uuagacuucuucaauuauuggaaagaaagauucauuuuauuaccuugucuuuaaacauaucuguugagggaguguga

SEQ ID NO: 4123547 - RNA, 66 nt, Human
uuagagaaaagcuugcuugcuugaguauaauuauuguuuugccugaguuuguaaacuauucacuaa

SEQ ID NO: 4123548 - RNA, 57 nt, Human
uuguuuccagugggaggugcagugugaauuccuagccugccauauaccuggaaacag

SEQ ID NO: 4123549 - RNA, 77 nt, Human
uuguuuccuuaagccugccuuuuuacuuuguaaaaguucaccuaugaggcaaguuaucagggcaguuagagaaacag

SEQ ID NO: 4123550 - RNA, 82 nt, Human
uuguuucgaaauacaugaggaacaacuaucuguguuaacauuuuuggcaauuucaugguauuccuuuauguagaagaacuaa

SEQ ID NO: 4123551 - RNA, 77 nt, Human
uuguuucuugccugcuuggaguccuccagcaccaggagaaguugguggguuuggcaggauaccaagucccaaaacaa

SEQ ID NO: 4123552 - RNA, 67 nt, Human
uuguuuggaauguugauaaacauaggcauauagauauaaaaugccuuguuuacagauauccuuauga

SEQ ID NO: 4123553 - RNA, 71 nt, Human
uuguuuuagaaaggggugaaucaauggaguaggcaaucauugcccauuacuaacuccuuuucuucugacaa

SEQ ID NO: 4123554 - RNA, 111 nt, Human
uuagauuaagguuaggguugaggaaggugaauguuauuagagguugaucucauuauuaggagcuucucaccuuuggauaaucuuuguguuucugcccuggcucuuuccuag

SEQ ID NO: 4123555 - RNA, 67 nt, Human
uuagauuacaguauuggucacguuuguaucucacaagaaacuaaaggaccaaaaugcugaugucuag

SEQ ID NO: 4123556 - RNA, 83 nt, Human
uuagauucucauaggagcgugaaccugauugugaacugcacauggugagggaucuagguugcaugcuccuugugagaaucuaa

SEQ ID NO: 4123557 - RNA, 88 nt, Human
uuagauuuuguacagauuacauuaggauauaucuauggagaaagucugaaguuuuagucaaaauguagaaacauuuguacauauuuaa

SEQ ID NO: 4123558 - RNA, 85 nt, Human
uuagcacauggauauaguuggaauuauaaagggauuuauuuucuaaauuuaaaaaugcuuuuuauagcuauguccuauguccuaa

SEQ ID NO: 4123559 - RNA, 127 nt, Human
uuagcauaugugcuuucuaaaauacaauauauuauguuagucccauuauaugacuucuagauaucauguacagacaaguacauaggaggggcucaccugaauaguauuuuucuauuuuauauguuaa

SEQ ID NO: 4123560 - RNA, 59 nt, Human
uuagcaugugcaagggccuggaggcaagaaugagcuuggcacucucccugcacugguga

SEQ ID NO: 4123561 - RNA, 81 nt, Human
uuagccacauuggccaaauuugguguaacuugacauuuuaacaucugcaacccucuucacuaguuuggucaguaggguuga

SEQ ID NO: 4123562 - RNA, 67 nt, Human
uuagccauuugaggucuucauuuauuuuccugucuuucugauacagugagugaccuccagugccuga

SEQ ID NO: 4123563 - RNA, 116 nt, Human
uuagccgguugaacuauuuauuacgugucuccguuccugguuauuaugccaguaaauugcucaggcagaugcagggauggaugaugggcauauaauucacucuuuuucacggcuag

SEQ ID NO: 4123564 - RNA, 93 nt, Human
uuagcuaguggaugugucugcaagauagccaagucccuggcaacccugaggcucugugauuuguguggcuuggugaggaccucuacuggcuaa

SEQ ID NO: 4123565 - RNA, 98 nt, Human
uuagcucgaguaggagagcacuguucaagcaugucguccauuaaucauugauaaccaguguuuagugugcagacaugcaagacugcuaaucuggcuaa

SEQ ID NO: 4123566 - RNA, 63 nt, Human
uuagcuguuuauuucuguaugugcauuuccuagcagucuacacauacagaugguuccagcugg

SEQ ID NO: 4123567 - RNA, 129 nt, Human
uuagcuuuucauuaugacugcuuuucucuguguuacuuaauuagaaucugcagcuuuuggcaggaaaauagucaaccaagcagauuucuaauaagcaaugucuuuaggggagaaagucgaagugagcaa

SEQ ID NO: 4123568 - RNA, 88 nt, Human
uuaggaaaaugaucuuugcaaacuuugucacuuaccguucaaguuauagaaucaauaguaggcuugagauugcaguagcauuuccuaa

SEQ ID NO: 4123569 - RNA, 60 nt, Human
uuaggaaacacgagggggauuucaugugaacgagaaauaaacuuccacuguguuuuuuaa

SEQ ID NO: 4123570 - RNA, 62 nt, Human
uuaggaccacauugagagucauuaacaaaaagggacaaguuaaaacuauaaauguggcuuaa

SEQ ID NO: 4123571 - RNA, 89 nt, Human
uuaggagacaugauuagacguugcugugagauagauuuuagacuugaacauguagaagagcuguucaacguagcaaugagcauuccuga

SEQ ID NO: 4123572 - RNA, 68 nt, Human
uuaggcaaacugauuauuggugacaaggcugauauggcagcaauagcacugaaaauuagcuuuccuga

SEQ ID NO: 4123573 - RNA, 59 nt, Human
uuaggcauuagagaaaugcaauuuuaaaccacagugagauacaucucucagaugucuaa

SEQ ID NO: 4123574 - RNA, 74 nt, Human
uuaggccuggaacuuuaggauccuggcucauucucuaugggggugagugagugugugaaguacuggaugccuaa

SEQ ID NO: 4123575 - RNA, 76 nt, Human
uuaggcggagaaagugaguaacagcuggauggagagaaacaacgggcuuuucucccgcuggcugcucuuccccugg

SEQ ID NO: 4123576 - RNA, 59 nt, Human
uuaggcucuaucaguuauuuguguugugcaaagcacugcauuaaaugcuagggaccuaa

SEQ ID NO: 4123577 - RNA, 56 nt, Human
uuaggcugcauuccaggcccuuuguauucucucccagaccugccaugacagccuga

SEQ ID NO: 4123578 - RNA, 63 nt, Human
uuagggaagcaggaaugagugauacuaauaucaguuuuauuuuacaucaugcuacuucucuga

SEQ ID NO: 4123579 - RNA, 70 nt, Human
uuagggaaggagcagggggaggaggacucggcgagcuccugugugcccaccugcucucacuucuccuuaa

SEQ ID NO: 4123580 - RNA, 60 nt, Human
uuagggagagggcauagaccuccuuauaaaucuuaugaaaucuuuguacccuuuuccuag

SEQ ID NO: 4123581 - RNA, 84 nt, Human
uuagggccucaugcaucugcaggggaagccaguuuguucuuuugauccagaaggguuaauuuucgcugcaggugucaacucuga

SEQ ID NO: 4123582 - RNA, 71 nt, Human
uuagggcuggacuguuuauguuaacaugauaccacauauauguacaaucagcaguucauaaaaugccuuag

SEQ ID NO: 4123583 - RNA, 130 nt, Human
uuaggggagccauggcagggagagugccuuccacccugaggccacccagaccuggaggagaugcaggccccagcucugcuaaagggccuuugaggugggugggacugucucccaguugggcagcucuuga

SEQ ID NO: 4123584 - RNA, 91 nt, Human
uuaggguugggauuaggggaguuauuagacagggagucagggccuccugccaugggaacuucuugucagugauuucuucccuuggcccuga

SEQ ID NO: 4123585 - RNA, 57 nt, Human
uuagguaaggauggugacaguaaucaaaugccacuacuguguaccaucuauaccugg

SEQ ID NO: 4123586 - RNA, 56 nt, Human
uuagguagccccacaguacauguuuauauugagcacaauuucuguggcuaaccuaa

SEQ ID NO: 4123587 - RNA, 74 nt, Human
uuaggugauaaugucuguguuucagugcagcgaguagguggagcuccugcugcaucuguuagauuaucaccugg

SEQ ID NO: 4123588 - RNA, 102 nt, Human
uuaggugucuaagcaaaacagccugucuuuuuuuggagcaauuguauuauuguuucaacuguuaagauaugcaguauuaugacuuuuaaaaaagacauuuaa

SEQ ID NO: 4123589 - RNA, 103 nt, Human
uuagguguuugccauuguacccccacucagaaugacugaugcugugccaugcacauaauaaauguuccugaugcugggguuugcauuggcugggacuaccuga

SEQ ID NO: 4123590 - RNA, 58 nt, Human
uuagguuuugcaaaguccauugaaguaaucuggcuacaguguggugugcacagcuuag

SEQ ID NO: 4123591 - RNA, 58 nt, Human
uuaguaaaugcuugcaacaucccaggugcuauauuaagcacuuugcaugugugucuaa

SEQ ID NO: 4123592 - RNA, 70 nt, Human
uuaguaacugaucaugugggaggauauguuccuuagaacauuaaaaaucauucaugguuaguauuacuga

SEQ ID NO: 4123593 - RNA, 65 nt, Human
uuaguaaucguggugguuaauuccaugugucaacuucacuggguuaagaauguuacgauagcugg

SEQ ID NO: 4123594 - RNA, 90 nt, Human
uuaguaauguugguaucuaguauaugacagaaaugaaaaauaacguauuuuguauuuaugcaagaaauuaucuguaccgaucaaaacuga

SEQ ID NO: 4123595 - RNA, 60 nt, Human
uuaguagauugugaucaguacuuagcccauagaaggugcugaauaaauaaagucuauuga

SEQ ID NO: 4123596 - RNA, 69 nt, Human
uuaguauaucgguaguuagcuccaaacacauguaacuaacauuuaguuacagcuaacugcuguuauuag

SEQ ID NO: 4123597 - RNA, 73 nt, Human
uuaguauuauuuuccuuccgguagguggaccuauguuguguugguaaggcuuauugcaagguaaaauugcuga

SEQ ID NO: 4123598 - RNA, 63 nt, Human
uuagucaggaaaagcuuuccuggaagguuccuagcagacuuccuuuuaugucuuccuggcuag

SEQ ID NO: 4123599 - RNA, 63 nt, Human
uuaguccccaugugcucuggccccucugccccgaagagagccaggaaguggcguggggucuga

SEQ ID NO: 4123600 - RNA, 80 nt, Human
uuagucuaguagggacaugccauuaucucauuuccaauuauuggaucuggauuaaugagugaguaugcccauggggcuga

SEQ ID NO: 4123601 - RNA, 77 nt, Human
uuagugaccacugaauaugacugccuacauggaaacaguuaggaagauguguuuagcagguuuagaucaagcacuaa

SEQ ID NO: 4123602 - RNA, 79 nt, Human
uuagugcagucuucuagaguaaggaacaaaugaaguccaaucacucccauuggcauuccuucucaggaauauuuccuaa

SEQ ID NO: 4123603 - RNA, 92 nt, Human
uuaguggcuuauagguugcuuguuuuugccuucucuacaguuauagcuagugaaagucaaagacagcuaccuuccccucucagagucauuga

SEQ ID NO: 4123604 - RNA, 84 nt, Human
uuaguggggaggggagguccagcugaucugcccgcuuugaugcaaggaacaguagacgaucuccuuuaauuauacccucacuaa

SEQ ID NO: 4123605 - RNA, 77 nt, Human
uuagugguauuauuggguaguaugguaaauauauguuuagcuuuacaaagugcugcaccauuuuaaucucccacugg

SEQ ID NO: 4123606 - RNA, 62 nt, Human
uuuagaaugccacuuggcauguaauucauacuccugaaguauuugcuacugguaauucugga

SEQ ID NO: 4123607 - RNA, 78 nt, Human
uuuagacaggagcuccagcccagggaagucauuugagcccuggaucaagcuguaccugaaacuggagcucccucugga

SEQ ID NO: 4123608 - RNA, 68 nt, Human
uuuagacauggauucagggaugugaauauuagcaaaauauugaacaaucaaaagaauucaugugugaa

SEQ ID NO: 4123609 - RNA, 91 nt, Human
uuuagagaauccuucaggcagagguaccaagauugauuuacguaggauuaagguucuuuuagugccucaaugacuuaaagcagucucugaa

SEQ ID NO: 4123610 - RNA, 55 nt, Human
uuuagagaguagaggacagacaagggugugcccugguggccucucacauucugag

SEQ ID NO: 4123611 - RNA, 65 nt, Human
uuuagaggcugccuaucacaacuauugagaauuucccuucuuuucaggugacgguaaccuuugaa

SEQ ID NO: 4123612 - RNA, 85 nt, Human
uuuagaggggaaaacaaauucucuaaagaaaacaugaaggaucuacucaauuucaugacuauacagaauaugaucuccaucugaa

SEQ ID NO: 4123613 - RNA, 70 nt, Human
uuuagagucuuuaggagaaaugagaaugaggaauugaccuuuuguaagcuuacuucugaggcacucugaa

SEQ ID NO: 4123614 - RNA, 67 nt, Human
uuuagauguuuaauccggcuguuuuaaauacuauucccauuuuguuacaguauauuagauauuugaa

SEQ ID NO: 4123615 - RNA, 74 nt, Human
uuuagcaaguauggauccaagggaaauuauuuuuaaauuuuuguaaaacugaaccuugagaucuuuguguuaga

SEQ ID NO: 4123616 - RNA, 55 nt, Human
uuuagcauuaagcuuuucaaauuuuagcuuuuagugaggaaagcuuaaugcuaga

SEQ ID NO: 4123617 - RNA, 61 nt, Human
uuuagccuuugguccagauugcuggucuguaaggaccucacugauuggaccagauucuaaa

SEQ ID NO: 4123618 - RNA, 59 nt, Human
uuuaggacagaguaaacucauaauucuguguguagaaggcaaggcugcacugucuuaaa

SEQ ID NO: 4123619 - RNA, 106 nt, Human
uuuaggacaggcagaaaugaaccucaaccucagcugugaggauuuauguaguuugaaagaagagugcauguguuugccacagugagcugcaggaaugccuccugaa

SEQ ID NO: 4123620 - RNA, 72 nt, Human
uuuaggcagacaucagauugcuuuuccuuaacacaugcuuguuuagagcuguggaggagaagcaagccuaag

SEQ ID NO: 4123621 - RNA, 80 nt, Human
uuuaggcaucuaaaucacuuuaauguauuuaagcgcauaauuagaaugcauuagacuauggcugaucuuagguguucaaa

SEQ ID NO: 4123622 - RNA, 62 nt, Human
uuuagggaugucagaacagggaucaucacugcaguccccaucccugucuaauaugccaugaa

SEQ ID NO: 4123623 - RNA, 130 nt, Human
uuuagggcccagacaaagcucugcucuucaguacaagaggccaccugcccucccaauggacaguccucuauugggagggcagguggccucuuguacuaaagaggguagggcugugucuaagucacuucug

SEQ ID NO: 4123624 - RNA, 59 nt, Human
uuuaggggaaaaucuuugguuugucuguuauuaauuggcugugagauuuucguccugaa

SEQ ID NO: 4123625 - RNA, 57 nt, Human
uuuaggggguuaccacugugggcaacugaguuuugguccugcugggaacccucugaa

SEQ ID NO: 4123626 - RNA, 61 nt, Human
uuuaggguuucucuccagugugaauuaucuaaugauuaguaacaucugagaaacacuuaaa

SEQ ID NO: 4123627 - RNA, 63 nt, Human
uugcuggaugguuugguaaaaguauguuuaguuuuguagagaaacaaccaaaccaucuuccaa

SEQ ID NO: 4123628 - RNA, 71 nt, Human
uugcuggcucuggacgucgaucuaugucuaccuacaaacacaaguggaccaggcuaguucagagcuucaga

SEQ ID NO: 4123629 - RNA, 68 nt, Human
uugcuggucauuuagauguggacuuauguuauuccaggcaacuggaaaucauacauauugaucuguaa

SEQ ID NO: 4123630 - RNA, 73 nt, Human
uugcuguaaggcuacugucagcuucagggcagaacuguuucugagacugcagugagccgcuuagccacagcag

SEQ ID NO: 4123631 - RNA, 60 nt, Human
uugcuguguuaaccagcuuuaguuuauuaucucagaacucuggcugcaccauuauaguag

SEQ ID NO: 4123632 - RNA, 78 nt, Human
uugcuguuguuacccagugcuguggagggagaugauuuggcauggacucccauuugcaagcuggguaaccugaggcaa

SEQ ID NO: 4123633 - RNA, 71 nt, Human
uugcuuaccagagcuuacaugcuagaaagugauuuuucucuuuguaaacuaaauugaguuacugguaguaa

SEQ ID NO: 4123634 - RNA, 76 nt, Human
uugcuucaacccaggagguggagguugcggugagcugagaucaugccacugcacuccagccugggcaacagagcaa

SEQ ID NO: 4123635 - RNA, 59 nt, Human
uugcuucauuuucuuugaagaacguuuucacuuacuuccaugaaagugaaauggagcaa

SEQ ID NO: 4123636 - RNA, 63 nt, Human
uugcuuccagggacucauacagcuguuguaucagcagggaaaugugucagucuuuggaagcaa

SEQ ID NO: 4123637 - RNA, 59 nt, Human
uugcuucucggucuuucagguucauuauggcagcuccaucacugaaggcaccagggcag

SEQ ID NO: 4123638 - RNA, 77 nt, Human
uugcuugaacccaggagguggagguugcagugagcugagaucgcgccauugcacaccagccugggcaacaagagcga

SEQ ID NO: 4123639 - RNA, 76 nt, Human
uugcuugaacccgagagguggagguugcagugagccaagaucuugccacugcacuccagccagggugacagagcaa

SEQ ID NO: 4123640 - RNA, 68 nt, Human
uugcuugaauccgggaggcaaaaguugcagugagccgagaucgugccauugcacuccagccugagcaa

SEQ ID NO: 4123641 - RNA, 75 nt, Human
uugcuugagcccaggaaguugagacugcagugagcugugaucaugcacugcacuccagcuuaggcaacagagcga

SEQ ID NO: 4123642 - RNA, 75 nt, Human
uugcuugagcccaggaauuaagcucgcagugagcuacgaucauaucacugcacuccauccugggcaacagagcaa

SEQ ID NO: 4123643 - RNA, 118 nt, Human
uugcuugugacaccgugaagauaggcuacaacucuccacauuugcuaggucuacuaagagucuauacaaacaagcuuauggaagugcaaauugugugaugaguguggcucacaggcaa

SEQ ID NO: 4123644 - RNA, 71 nt, Human
uugcuuuauaauuuuguuucucucuuccugccuggcuaagaggagaaagaagacgaacauuguagaaguaa

SEQ ID NO: 4123645 - RNA, 62 nt, Human
uugcuuuaucuaagcauggccaguugaaaucaagcuguggauaagccaugaagauagaguaa

SEQ ID NO: 4123646 - RNA, 82 nt, Human
uugcuuuauuuugugagggauuacuaccaaaagaacaauaaacuuucccuucgguucuguacucccucucaaggcugagcaa

SEQ ID NO: 4123647 - RNA, 70 nt, Human
uugcuuucuauuagugugguuaggauggauauuuuuggauuccacuucuauuggucaugauaaaaagcaa

SEQ ID NO: 4123648 - RNA, 56 nt, Human
uugcuuucucucuaccccacuuuguagauauucuuuaaaaggagagagaaaaguaa

SEQ ID NO: 4123649 - RNA, 82 nt, Human
uugcuuugguuuuauaguuaggaagaccuggguucauacagcuauuccgugggccucaguuucuucaacuguagaaaagcag

SEQ ID NO: 4123650 - RNA, 73 nt, Human
uugcuuugucacccaggcuggagugcaguggugcuguauuggcucauugcaaccuccuccuggguucaagcga

SEQ ID NO: 4123651 - RNA, 71 nt, Human
uugcuuuuaucaguuguguguauacacgcacacauacgcauggccaugcauacacacaaugguucuggcaa

SEQ ID NO: 4123652 - RNA, 75 nt, Human
uugcuuuuccuauuugauucuguaaaauaacaggaagguuucuauugugcuaccagaauuacaaaaguaaggcag

SEQ ID NO: 4123653 - RNA, 86 nt, Human
uugcuuuugcugcuucuuuuguggguuugcacuugugaccuaaaguaaauaaaauagcauaaaauaggaagcuggggugggggcaa

SEQ ID NO: 4123654 - RNA, 60 nt, Human
uugcuuuuguagaugaaugggguuuuuuauuauuguaaaaguuuucauuaauaaaagcaa

SEQ ID NO: 4123655 - RNA, 83 nt, Human
uugcuuuuuggccccagccuaguuuucuuucauucccaugucucaucuuuuaugcagcugcagagagcaggcugggaaagcag

SEQ ID NO: 4123656 - RNA, 97 nt, Human
uuggaaaacuaaaguagaauauaugguuaguauugccuauaaaugccaaaacacucauaugggguaguagaucauacuuuucucucaaguauuuuga

SEQ ID NO: 4123657 - RNA, 58 nt, Human
uuggaaaacuuacacagagcugugcuguguccaaaaugcuguucaguagguuuuccaa

SEQ ID NO: 4123658 - RNA, 103 nt, Human
uuggaaaaugugagauguugcugcauaaugacaauaaucauuaacuuuagguuuauucugggguuaaugaauuauuauagugcagugaaaaauuauucuccaa

SEQ ID NO: 4123659 - RNA, 61 nt, Human
uuggaaaaugugcucugaggugcagagggcuuauuuggaagugcucugaaagacacaccag

SEQ ID NO: 4123660 - RNA, 64 nt, Human
uuggaaaauuugcugauggcauuugagcugggggcacuaguuaaauguucaguaaguaaucuag

SEQ ID NO: 4123661 - RNA, 106 nt, Human
uuggaaaggauuaaaaguuugacaaaacuuaaaaauagcagggaugugggaaaauugacauucucuugcacuguuguuagaaauguaaauugguauuccuuucugg

SEQ ID NO: 4123662 - RNA, 57 nt, Human
uuggaaagggaggaauguagaccgaaaagaaucucugcagacuuguaccuuuaccaa

SEQ ID NO: 4123663 - RNA, 79 nt, Human
uuggaaccuggcagcuccguggccuuccggagcucugagggcugugggcuaugggaggguuggaugggguugucuccaa

SEQ ID NO: 4123664 - RNA, 82 nt, Human
uuggaaggcuuucucaguaauguccuggaauuacgguuacagccugcauuucauguuaacugaacagaaaaccagccuccaa

SEQ ID NO: 4123665 - RNA, 104 nt, Human
uuggaaguuugaagauuuggguugguguuuuaguucuuggccucaaaucauuuguagaacgaagauggucuaguugaaccauaugaaccccuuccagcucucaa

SEQ ID NO: 4123666 - RNA, 55 nt, Human
uuggaaugcauaaacuuaagguuuugucaauguaaaaccugaggcaguguuccag

SEQ ID NO: 4123667 - RNA, 66 nt, Human
uuggaauggccagcuagcacuugcauuguauaguuaacauugugcuauaagcgugguucuuucuaa

SEQ ID NO: 4123668 - RNA, 76 nt, Human
uuggagaaauugcuuuaucucuuaugccucagguuccucaucuguaaaauggguagaauaauggcucuuacuucaa

SEQ ID NO: 4123669 - RNA, 84 nt, Human
uuggagaaguguuggcuuucaaaugguuucugaaguuaggcagauguuuacucucugucaugguuugaaugcucgccccucuaa

SEQ ID NO: 4123670 - RNA, 66 nt, Human
uuggagaaugauucuuugcucacuuuuagaccacgugguuccuguaggaaagagaacauuccccag

SEQ ID NO: 4123671 - RNA, 61 nt, Human
uuggagagguacacccuuuaaacuugagaacauaaaguuugaaaacaacugccuuggccaa

SEQ ID NO: 4123672 - RNA, 71 nt, Human
uuggagcucagagagguugaacaacuugcucaaggccacccagcuugcaagugggaccugucugauuccaa

SEQ ID NO: 4123673 - RNA, 56 nt, Human
uuggaggaagcucaugggggaucuguguauuucuuagguuucucccuguucuccaa

SEQ ID NO: 4123674 - RNA, 110 nt, Human
uuggaggauaaaaagaaaggccuuuuugugagggaggagaauacaggacuuucacuagcuguuccuccuagaugucuucagagaaacauuuugucucuuugucucuuuga

SEQ ID NO: 4123675 - RNA, 62 nt, Human
uuggagggacugagcuucagucaagcacccuacugugggggucacugacugagucccuugaa

SEQ ID NO: 4123676 - RNA, 64 nt, Human
uuggaguagaugguuauggauuagcaaauuguauagcuuguuaaguucuaugaaucuacuccaa

SEQ ID NO: 4123677 - RNA, 79 nt, Human
uuggaguaugugagggugaggugcgcugcaggugauuaaacuacugucucucagcucaaaauucaccuuugcuacccag

SEQ ID NO: 4123678 - RNA, 61 nt, Human
uuggagucauauggaauucacaucaaaaaaggugcucauuugguuuaccguauuauuccaa

SEQ ID NO: 4123679 - RNA, 60 nt, Human
uuggagucucuaggggaaaaucuauuucuuugccuuuuccaccuucuagagauuguccag

SEQ ID NO: 4123680 - RNA, 92 nt, Human
uuggaucaaaguugcaacauauuacuuccugguauaaaauguauuuuauaugcugaauucugugccacaagaaagcugcaacuuugaucuga

SEQ ID NO: 4123681 - RNA, 123 nt, Human
uuggauggauguuucaaugaggacaacaguaguuugaaugcaguaugcauuuuucacauaacauggaaaguagugccauuuugcucuuugucuugcaguuggaauaugagauaacccaugcag

SEQ ID NO: 4123682 - RNA, 55 nt, Human
uuggaugugucagugugggcaugcucccuuaugcaagccugagccagccaugcaa

SEQ ID NO: 4123683 - RNA, 61 nt, Human
uuggauuaacuguuauaugccagcacugcucaaggucuuaguauaucagcagugaauucaa

SEQ ID NO: 4123684 - RNA, 65 nt, Human
uuggauuagagaucacucugaugaccucaucuuaacuugaucaucugcacagauccuauuuccga

SEQ ID NO: 4123685 - RNA, 65 nt, Human
uuggauuauacacauacauguacgucacaugugugcacacaugcauacauguuuguguauuuugg

SEQ ID NO: 4123686 - RNA, 97 nt, Human
uuggauuggaauucugagugugucauugagagacgaggugagacauuuuuaaaauguugauguuuucagugagcacaggcagauuuucacaaucuaa

SEQ ID NO: 4123687 - RNA, 84 nt, Human
uuugcuucagagaguggcagguuuuuaauuaauuuuaauaauguaaaauuccauuaggaaacuuccaucaguucauugugcaaa

SEQ ID NO: 4123688 - RNA, 102 nt, Human
uuugcuucucaaacucacuguuaauggaggacuacaggacauucacauagacugagaaauuuuccacugucauucauaauguggguucuauugagaagcaga

SEQ ID NO: 4123689 - RNA, 78 nt, Human
uuugcuugaacccaggaaguggagguuacagugagcugaaauuacaccacuuuacuccagccugggcaacagagcaag

SEQ ID NO: 4123690 - RNA, 59 nt, Human
uuugcuugacccuugugcugaaccaaaaucuuuuccaagguucugaaggguucaguaaa

SEQ ID NO: 4123691 - RNA, 65 nt, Human
uuugcuuguuuguuuugacaagugcgguuuaguuuuaugauaauauuucagagcacacaaguaaa

SEQ ID NO: 4123692 - RNA, 56 nt, Human
uuugcuuuaaguuccauucuucccguuccucuagaggaaccaggaacuaaagcaga

SEQ ID NO: 4123693 - RNA, 73 nt, Human
uuuggaaaauauugaacugguugaaauuaguuauaauguucuaagaaaugauauuaguucaauguauuucaga

SEQ ID NO: 4123694 - RNA, 112 nt, Human
uuuggaaagcaugguuuagaaacuacaggcauugucaaguggccgggucuuuuauaauuugaauaggcauaacacugauguccucuguguuuccaaaaacaugguuuagaaa

SEQ ID NO: 4123695 - RNA, 59 nt, Human
uuuggaaauguguuucgaaaacugguguccccauuuaggacccagcacauuauuucaga

SEQ ID NO: 4123696 - RNA, 57 nt, Human
uuuggaagcuucacauugaacuugggugcuagagagauacccuuggagacuuccaga

SEQ ID NO: 4123697 - RNA, 59 nt, Human
uuuggaauaggaccuuauuuuuguucaguauauuggacaaaguaauuccugcuuccaaa

SEQ ID NO: 4123698 - RNA, 78 nt, Human
uuuggacugaagaguuugcaauuguuccauuguagugaauucacuagugaagcuaaccugcugauuuuucgucucaga

SEQ ID NO: 4123699 - RNA, 57 nt, Human
uuuggagaacaaaucuacaccuuagaggaaggccucugcugucugacaguucccaga

SEQ ID NO: 4123700 - RNA, 68 nt, Human
uuuggagaggcagucuugcucuguuacccaggcuggaucccagcucacugcaaccucugccucccagg

SEQ ID NO: 4123701 - RNA, 64 nt, Human
uuuggagauguacaaguaaaauauguguguucuucauugcacacaucuauauugcaucugcaga

SEQ ID NO: 4123702 - RNA, 63 nt, Human
uuuggagccucaccuuuagucccacccuggccagccaaaccagggucagccuggggcuccagg

SEQ ID NO: 4123703 - RNA, 73 nt, Human
uuggcugcuauagguagaucugucuaauugcaggauggaaugaauccauuuacaguuuauguaaagcugccaa

SEQ ID NO: 4123704 - RNA, 57 nt, Human
uuggcugcuggucuuuggauaugguuauggucuaugucuugauuucaguaugugcaa

SEQ ID NO: 4123705 - RNA, 63 nt, Human
uuggcuggaggucauguaauauggaagcucuuuagccuucuuuguacaugcacuucuuuucaa

SEQ ID NO: 4123706 - RNA, 75 nt, Human
uuggcuggggcccggccugucucccuagaccuuuuucucugugagaggagaccaggucuuuauggcuccaacuaa

SEQ ID NO: 4123707 - RNA, 67 nt, Human
uuggcuucccaguuugaccauuagacuuuggaaaaaauuuucuaaacuaggguuaaaggaaagccag

SEQ ID NO: 4123708 - RNA, 68 nt, Human
uuggcuucugcauauuuuuagagacaaaugcuuuaucaagaaggguccugaacaaauggcauagccaa

SEQ ID NO: 4123709 - RNA, 78 nt, Human
uuggcuugaagaucuaucaacauauaauauuugaguucuuguuugagauuuagauaagguaugucauguucaggucaa

SEQ ID NO: 4123710 - RNA, 68 nt, Human
uuggcuuucuggaggccagcugccaccuggggcaaaguauccagguccaagaucauucugaaggccaa

SEQ ID NO: 4123711 - RNA, 78 nt, Human
uuggcuuugcauucugggugacuacgugaucaccaugauuagugaucaaguuuaucucuuaagacauguaagagccaa

SEQ ID NO: 4123712 - RNA, 91 nt, Human
uuggcuuuuguggauauuaaauuaguaaaacauuguauaugucauugacauauauauuauuuagcaugaugaaauauucaugauguacuaa

SEQ ID NO: 4123713 - RNA, 87 nt, Human
uugggaagagagaagccucucuccagcuuggcagauucauugaggauguugcagagcuggggaggguguuaauuguguacuucucaa

SEQ ID NO: 4123714 - RNA, 78 nt, Human
uugggaauuugaaacugccacuccuccccacuuagugagccccaucugagcuggaggacaggaggguaagaggcccag

SEQ ID NO: 4123715 - RNA, 72 nt, Human
uugggacauggacugcugaacuaaggcaaaguugagcgacuccuuugacuucuugcaguccagcuaucccaa

SEQ ID NO: 4123716 - RNA, 61 nt, Human
uugggaccuccaggaccucucuuagugucauacugagcagaagagaucugugaggcuccaa

SEQ ID NO: 4123717 - RNA, 66 nt, Human
uugggacuugggucuguccugcugugcauccauagugggugcuuuagaaacgggaggcccacccga

SEQ ID NO: 4123718 - RNA, 95 nt, Human
uugggagcaucauugacuuuagagcuuuaggugccuugacaauggcucaauccauggggcacagagaagguuuuaguguaaaaaaugagccuuaa

SEQ ID NO: 4123719 - RNA, 64 nt, Human
uugggaggagggaaugcaaccccagauuggccccugaucugguuuuggcugugucccugcccaa

SEQ ID NO: 4123720 - RNA, 83 nt, Human
uugggagggaaacugaggcagggcuugcauaguccuuuggaaugugucuagacuugcuggcuccuugcuucuagcccuccuag

SEQ ID NO: 4123721 - RNA, 71 nt, Human
uugggaggugaaguuaaugcauuagcacaucccucguaugcauuauacauuaauuucuccagauauuccag

SEQ ID NO: 4123722 - RNA, 56 nt, Human
uugggagugaagaauuaggcuauuuggggagccaaaugauaugcuuguauuuccaa

SEQ ID NO: 4123723 - RNA, 65 nt, Human
uugggaucaaauuuuaaagcuaaaaauacuaaacuacauuuuuuagucuggggaagggaucccag

SEQ ID NO: 4123724 - RNA, 63 nt, Human
uugggaugaaaacagugucagguaaggaguuaaguagccuuaucuuggccuaaguucacugaa

SEQ ID NO: 4123725 - RNA, 63 nt, Human
uugggauggggugggaccaacagaggaacagauauuuguuugcuauauccuacuucauaccaa

SEQ ID NO: 4123726 - RNA, 119 nt, Human
uugggccagauaauucuuuguggaggguucucuugguguguugucgggcauuuaguaacauucccucuacccacagaaugccaaugagaccucccgaccaugaccaguugugaccacaa

SEQ ID NO: 4123727 - RNA, 61 nt, Human
uuggggaagaguugacuuuggauuaccaaaucuaguccuccauauucaguaacuuccucaa

SEQ ID NO: 4123728 - RNA, 82 nt, Human
uuggggaggaggcuggcgccgccugccggaagccuaaggaaacucagggcucgagggaagccggcuuccagccgccccccag

SEQ ID NO: 4123729 - RNA, 70 nt, Human
uuggggaugacuacuuaugggaaguaucuacuuaugggaaguaugacuacuugugagagauuaucucuaa

SEQ ID NO: 4123730 - RNA, 74 nt, Human
uuggggaugaggccacugucccugccuuccugggagccaggauguugauugaauggccauuucacucucuccaa

SEQ ID NO: 4123731 - RNA, 108 nt, Human
uuggggauuguuuuuaaggaauuggauucuuucuaggcugugagccuuuagacuuuuuuauuagcuaaucacaucuuauuagaguaucucuuccaaagcaguguucaa

SEQ ID NO: 4123732 - RNA, 80 nt, Human
uuggggcacugucccccuccgagaccaggugaggaaugcugagaaauaugugggccugggaaggugacacacagccccga

SEQ ID NO: 4123733 - RNA, 58 nt, Human
uuggggcagagaggauacggcaacucucgauuuuguugugaaccuaaaacugcuguaa

SEQ ID NO: 4123734 - RNA, 87 nt, Human
uuggggcaugguguuggguuucuuauacuauauugucaucuggacccaauccaguaauucaagaaauaagaucuagcucaucccuaa

SEQ ID NO: 4123735 - RNA, 65 nt, Human
uuggggcuaaagauguguucuuuggagucaaugaugaugacauucgaugguauuuauagccuuaa

SEQ ID NO: 4123736 - RNA, 60 nt, Human
uuggggcuaggagugcaagccacccaggggcuccugacgggcugcucaccuaggucccaa

SEQ ID NO: 4123737 - RNA, 72 nt, Human
uugggggaaggcagcuuucugaggcugaagaauuuccugaaggggccacagcuggaggcugucuacucccaa

SEQ ID NO: 4123738 - RNA, 55 nt, Human
uuggggggaugauuggagaggcuuucucuuauaccccuaaacugcagccccccag

SEQ ID NO: 4123739 - RNA, 68 nt, Human
uuggggguaacaggugguaguuugugcucaaauucuagcuguagcaucuacuaguuguauggccugaa

SEQ ID NO: 4123740 - RNA, 59 nt, Human
uuggggucugggucaaggggugugaggccacuaacccacacuuuaugucuagaucuggg

SEQ ID NO: 4123741 - RNA, 59 nt, Human
uugggguggaagugaggaucaucaggagaguuacuguaagggaccugcacucaucccag

SEQ ID NO: 4123742 - RNA, 66 nt, Human
uugggguggggcaggaacaaaucaaaugauggaaugucaucuuuuguuguucuuccauugcuccag

SEQ ID NO: 4123743 - RNA, 67 nt, Human
uugggguguucuauaaauaucagccacauuucccaaagcuguccaugguuuauacagaagaccccaa

SEQ ID NO: 4123744 - RNA, 62 nt, Human
uugggguuacggugcaugcccuccaucaucuuguuaggaggagggagcauguuagcuuucga

SEQ ID NO: 4123745 - RNA, 62 nt, Human
uugggguuuuauggcaaaaagacugggcauguccaacuggcuugucugcuauaaaaauccag

SEQ ID NO: 4123746 - RNA, 66 nt, Human
uuggguaaaucacuccuaauaaucagucaaucagcuuguauuguuaugccagugauacauaccuag

SEQ ID NO: 4123747 - RNA, 80 nt, Human
uuggguauuuuacaacuuugugcugauuugauauggacagaucaucccaguguuuuaucagacaaaguauaacacuccag

SEQ ID NO: 4123748 - RNA, 67 nt, Human
uuucugcuaguauauauaugucugaagacaaaauuugacagucuccagcauguuugugcugcugaaa

SEQ ID NO: 4123749 - RNA, 73 nt, Human
uuucugcugccugacaauuuagguuugccacauccagagacucagccggcaagccuuacagcuacagcaggaa

SEQ ID NO: 4123750 - RNA, 61 nt, Human
uuucugcugucacucauuugcuucagggcugacuuguuuugaagccagugggcagcagaga

SEQ ID NO: 4123751 - RNA, 62 nt, Human
uuucugcugugcuuucuugcguauuuucuuaauggauagauaggacaaugguacagcagaaa

SEQ ID NO: 4123752 - RNA, 57 nt, Human
uuucuggcuuaguuguuguauauaacuaggaguuaauguaucaauuaagccaaggaa

SEQ ID NO: 4123753 - RNA, 67 nt, Human
uuucugggucaaaggauagucacauuuuuauguuuuugauguauuuugccagacugucucccagaaa

SEQ ID NO: 4123754 - RNA, 83 nt, Human
uuucugggugaaauauuuugcuucccccuguucuaguucaguuagcugaauugaguucugggaaguucuguuccacguagaaa

SEQ ID NO: 4123755 - RNA, 60 nt, Human
uuucugguccugcaauugccaguuuggagaagcagaguggcauagugaggggcacagaga

SEQ ID NO: 4123756 - RNA, 58 nt, Human
uuucuguaccuccucuugccccauccguagaguaaggagggcuagaccagggcagagg

SEQ ID NO: 4123757 - RNA, 91 nt, Human
uuucuguauaucucugugauacaaauaaacauaugcucauucuauuagccaaguauuuguggauuuguauuggugaaauaaaauauagaaa

SEQ ID NO: 4123758 - RNA, 124 nt, Human
uuucugugcccacuaaucaacuucuguucauccccaaccccaggccugcgcauuucugacugugcuuguuagaaaagccccagcuggagggggugagcagucccuguugcugugaccacggaag

SEQ ID NO: 4123759 - RNA, 87 nt, Human
uuucuguggucaccuucaugaccuaucaccagccaggggucugcaaauggaugggcuggagauaugucuggaacauuaucguggagg

SEQ ID NO: 4123760 - RNA, 55 nt, Human
uuucuguuguacuuaaacuagguauguaacaaugcuuagugaccuauaagagaaa

SEQ ID NO: 4123761 - RNA, 79 nt, Human
uuucuuagguuuaggcaaacucauugucagaaauauuaugaacguauuugagcaguuugugcugaacgcuauacagaaa

SEQ ID NO: 4123762 - RNA, 76 nt, Human
uuucuuaguacuuuguacugugcuuuucuuauuuuaggaguuuaaugaauaugauuaaguauagaguauugaggag

SEQ ID NO: 4123763 - RNA, 56 nt, Human
uuucuuauguucacauaauuccaccuugguaagguggucccaugcaauauagggaa

SEQ ID NO: 4123764 - RNA, 78 nt, Human
uuucuucacccaaaacuguauguugagaugacagccucacaaagugaugcagcuuaagcaugcaguuugaugcagaaa

SEQ ID NO: 4123765 - RNA, 75 nt, Human
uuucuucagacauuguaaacuuuauucacuaccuggcaguagguguaaaauaagaauuuacuugucaagagggaa

SEQ ID NO: 4123766 - RNA, 130 nt, Human
uuucuucauuucccugaccuguggguacuugaggguggccggggagugguguguggggagggagauggcuguccuucuucaugaaugaaucuuugaccuccuuaguuuacucucacuuccaaagaaguua

SEQ ID NO: 4123767 - RNA, 56 nt, Human
uuucuuccccacugcaggcucucaaggcugagauaguccugaguugggugaagaga

SEQ ID NO: 4123768 - RNA, 122 nt, Human
uuucuucugaguaauuuuggccuccagccugaguaaggauaguucuagaccuauaguucuuaaaccuagaugaguaauuauaagaauuaccuaggggaggagccaagauggccgaauaggaa

SEQ ID NO: 4123769 - RNA, 57 nt, Human
uuucuugaaguccuaacccucagugugaugguauuugggggcaaggccuuugggaag

SEQ ID NO: 4123770 - RNA, 128 nt, Human
uuucuugaauguuaguaagugaaauaaaaggugagaaaauggcuuuuuagacuuugguacccugacaagaaauuaguggauuaagagaaguuucuuaucgcaggcaucaucuugcuauucuuugauga

SEQ ID NO: 4123771 - RNA, 111 nt, Human
uuucuugcuuuagaagugcuacugucauuuacauucucuaguaauccaauugugaauuuuauggauauauaugagcaugugaggacagggugccaguggaaagcuaagaaa

SEQ ID NO: 4123772 - RNA, 97 nt, Human
uuucuugguuucuugaaagaggaaggagauguauuaauuagcuuuucuguuaaucuguaguaaugauauuucccauuucucucacacagccaaggaa

SEQ ID NO: 4123773 - RNA, 70 nt, Human
uuucuuuauuauuucacccccaaggagagggcaaaaaaaauuaaguuauggggugugagaaguagaggga

SEQ ID NO: 4123774 - RNA, 57 nt, Human
uuucuuuccagagugauuggcacagguugaggggcugggaguuacuuaggaaggaga

SEQ ID NO: 4123775 - RNA, 78 nt, Human
uuucuuugcaucuccgugccccaauccuggaccuguucuggugcacaggaagcugguuacgaagggaugcaguggaga

SEQ ID NO: 4123776 - RNA, 81 nt, Human
uuucuuuucuuuaggcauuguguagcucugagagcuuucuauauaucuggcuucuauggugacacagugacaggaaagaga

SEQ ID NO: 4123777 - RNA, 68 nt, Human
uuucuuuugacuucuaucuaguaagaagcaggcugaugggcuucuuucugggaagaguucagaagaaa

SEQ ID NO: 4123778 - RNA, 69 nt, Human
uucuugggaaucagacaguucuggauucaaaccucauucucacauuugaaucaacugucugaccaugga

SEQ ID NO: 4123779 - RNA, 86 nt, Human
uucuuggucuggacccuggaacuuucagcagaguuuuaaacaaaaacuacacgcugcuuguuuccauggcuccccucaccaaugaa

SEQ ID NO: 4123780 - RNA, 71 nt, Human
uucuuguaucauaauugcuccagugauauauugccaauauaucacuuuugaagagaauugacaugcaagga

SEQ ID NO: 4123781 - RNA, 62 nt, Human
uucuugucccauugauaggcaaaaguacuaaauagucuacauuuuuguuaaugguaugggaa

SEQ ID NO: 4123782 - RNA, 129 nt, Human
uucuuuaaaaauuuugacuuucuuauguagugcuucuguuguugacaguaacuccaacugccucuuguuuguaacugaaguucauacaacagacuaugagccaaaguuagugauuaacuguuuggaaag

SEQ ID NO: 4123783 - RNA, 75 nt, Human
uucuuuaagguuucuaggauacucuaaauguauuccuucaaugcaguuaaguaauguccuagaagccugaaagga

SEQ ID NO: 4123784 - RNA, 91 nt, Human
uucuuuaccuuuuaucaaugcaguauguuuuccccaugaguguaguuuucuaaucuggcugacauccuguaugagaucaaaagugugagaa

SEQ ID NO: 4123785 - RNA, 60 nt, Human
uucuuuauagcaucuaggaugauugcaguauuuugcuaugauaaauaaugcuacaaagaa

SEQ ID NO: 4123786 - RNA, 72 nt, Human
uucuuucacucaagaaauguuuacugagcaucauuuaugugccugugcuuggugucauuuccauugaaaggg

SEQ ID NO: 4123787 - RNA, 89 nt, Human
uucuuucauuagaaucuucagcaauucucuucacuacugucuagauuuaucaguuuuacaggugggaaaacuaagcuucagagagagaa

SEQ ID NO: 4123788 - RNA, 72 nt, Human
uucuuugagcuaaaaggagcacuagagauuaucuauugagguaguuuccaaauauuguuuuagcacagugga

SEQ ID NO: 4123789 - RNA, 56 nt, Human
uucuuugauggacagaugauggauuuauguccuauccagaaugcuguaaucaagaa

SEQ ID NO: 4123790 - RNA, 89 nt, Human
uucuuugcugaaggggaggaggaggaagggcugccugccgggcucagggugagccucccugcuguccuuccuacccuugcccuagagaa

SEQ ID NO: 4123791 - RNA, 86 nt, Human
uucuuuguucaugguuagaaauauuugcuuuuaaaguauuucuggugcuaaaggacuagucuuucuaccaugaagcauauaaaggg

SEQ ID NO: 4123792 - RNA, 62 nt, Human
uucuuuguugggaacugcugaguaggaauauaaacaaaauuacuuugcaggagaacagagaa

SEQ ID NO: 4123793 - RNA, 125 nt, Human
uucuuuguuuacccugagcuuaagucaaaggaugcauaugcaucuguguacauuggugugcauucuagugugugcauauguguuugcaugaggaaugacuuuuuaagguuaagcgugaaaaagaa

SEQ ID NO: 4123794 - RNA, 114 nt, Human
uucuuuuaaaaguuauucuugucauucauugugaucugcagcucugaaagauacaccuacgaacauguucauagaaagagcauaguauuauaaauggcuagacuuuuagaagga

SEQ ID NO: 4123795 - RNA, 129 nt, Human
uucuuuuggaaaauaucagcugugagugaaggcagguuggggaaaagcacuaaggccuggucucaucuaccaggaagguuucccccucugccuuuuccuuacugagugaauuuaccaagucauggagag

SEQ ID NO: 4123796 - RNA, 93 nt, Human
uucuuuuggcacugucucaauaugcaaagcguguuaucugcaaaauaccugugcagaaaacauuguguguauaagaucuaaagccuaaaagga

SEQ ID NO: 4123797 - RNA, 58 nt, Human
uucuuuugugaauugcuucuucaagucuuagaucuuuggcugggggaaggcaagaggg

SEQ ID NO: 4123798 - RNA, 56 nt, Human
uucuuuuuaccaacucucugauaugcaaauguaugucuggaguaccauaaaaagga

SEQ ID NO: 4123799 - RNA, 65 nt, Human
uucuuuuuaucuucccauaagaccaccucucuuguuuguugcugaggauggggggauaagaggag

SEQ ID NO: 4123800 - RNA, 130 nt, Human
uucuuuuuccaacugugcuaauaguuauugggggaaauucagccagauauugggcggaauucacccccaauauuucacguagguuguuuucauuuucccuaaauguuggcuggucugagaaauaaaggga

SEQ ID NO: 4123801 - RNA, 99 nt, Human
uuuauuuuaugggugacuagauuaagaugccaguuuugagaauuaauuguaaauaucuuuaaagcccagucuuaauucuuggugcaacuguaaaauaga

SEQ ID NO: 4123802 - RNA, 60 nt, Human
uuuauuuuccuaguucuaagaaauguagugaagauagucauucaguccuagggaaauaaa

SEQ ID NO: 4123803 - RNA, 124 nt, Human
uuucaaaacauuuauccauuuucauaaaagauuucuuaaaauucaagcuagguuuucuuccuuuauuugaaaagggaauaugguaauuuuaggaauaugauuauauaugcauauguggaagaga

SEQ ID NO: 4123804 - RNA, 56 nt, Human
uuucaaaauguauggggaaaauaugugaauaaaauauugugaccaucauuuuggaa

SEQ ID NO: 4123805 - RNA, 62 nt, Human
uuucaaagugcuguucaaaguagcaucucaugauguuugcugucugaaaguaaucuuuggaa

SEQ ID NO: 4123806 - RNA, 55 nt, Human
uuucaaauagcaacuaccugcugugacagcgguagggacaauauguuauuagaaa

SEQ ID NO: 4123807 - RNA, 65 nt, Human
uuucaacagaucugucuucagguuugcucauucuuucuucugccagcuugaaacuacuguugaga

SEQ ID NO: 4123808 - RNA, 65 nt, Human
uuucaagagcaggaaaaaggucacugcuuuaauccuguuaauugccuuuauucuggcucuagaaa

SEQ ID NO: 4123809 - RNA, 61 nt, Human
uuucaagcacagagcaacucaaaucagcuuccccggaacugggauccagaugcucuugaaa

SEQ ID NO: 4123810 - RNA, 78 nt, Human
uuucaagguaguaagaugggggaaagaaauaguuuauucccauuuaaaauguuuuuuuacuuuuuugguacuuugaaa

SEQ ID NO: 4123811 - RNA, 56 nt, Human
uuucaaggugcugacauagcaugugcaaacacauggcagaaucaugcaucuagaaa

SEQ ID NO: 4123812 - RNA, 78 nt, Human
uuucaaguauuaucuguuugcgcuucuggguuuaguaaacaucguaacuguccauagcaagaggagcagaaauugaaa

SEQ ID NO: 4123813 - RNA, 87 nt, Human
uuucaagugcccuuucccugcagcccuccuuucacucccagguucccuugggguaagugggggcuggggggagugguaaagauggaa

SEQ ID NO: 4123814 - RNA, 79 nt, Human
uuucaauauguuaauguuauuguggguuugucgauucuuuauauuuuagaccuacauacggaaauauuuacgggugaaa

SEQ ID NO: 4123815 - RNA, 69 nt, Human
uuucaaugaugcugaagguagcgugucaaaauauggaguacacuacacgaaguuuuaagcucauugaaa

SEQ ID NO: 4123816 - RNA, 63 nt, Human
uuucaauucaugucuucaaaugaucaaucagcuuuugaucauuugccucaagugaaagugaga

SEQ ID NO: 4123817 - RNA, 64 nt, Human
uuucacagagaaauauaacaggccugaugucuuccugacaauucuguuauuuucuuguguggaa

SEQ ID NO: 4123818 - RNA, 65 nt, Human
uuucacagcugauaccucuucccacaaaaaggaaaaaaagggggaagaugauauuaauugugaaa

SEQ ID NO: 4123819 - RNA, 65 nt, Human
uuucacagcugggauggauaggggauauauguguauguguguacauaucuauccuagauuugaag

SEQ ID NO: 4123820 - RNA, 56 nt, Human
uuucacaggggcaaccuccauguggagacacauggugauucagugcugccugggaa

SEQ ID NO: 4123821 - RNA, 94 nt, Human
uuucacaguaauuuuuaucauaugucacucaugggcauauaugugugucuguguguguguguguguguguguguguaagaaauacuaagugaaa

SEQ ID NO: 4123822 - RNA, 56 nt, Human
uuucacagugagcuaugucuuguguuuauaaaagcaaggguggugauauuguggaa

SEQ ID NO: 4123823 - RNA, 98 nt, Human
uuucacaguuuuaguuucauaauucaaucaaaugacagcuguucuaaagauaaaaugauguaaggacuucaauugauuuguguaauuacaacuggaag

SEQ ID NO: 4123824 - RNA, 67 nt, Human
uuucacauucagcucauuaauggucuaguacauuguauuuuugauuuaaagauggcugaauaugaga

SEQ ID NO: 4123825 - RNA, 105 nt, Human
uuucacugaagacagauucagccuaauucaugaauauauugaauuagcaugacuacaugcuuuauucaggucacugaggagacugaauuuaucugcuuaguggga

SEQ ID NO: 4123826 - RNA, 61 nt, Human
uuucacugggcuaacaucaaggcaucagccgggcugcauucuuucuguaagcuccauggaa

SEQ ID NO: 4123827 - RNA, 73 nt, Human
uuucacuuagauuuccuuacuggguggucacaggugugggugaacuaccacaaguaugaagaacuaaaggaaa

SEQ ID NO: 4123828 - RNA, 82 nt, Human
uuucacuucuccaaccucagccagacaugacccagucuggcagaggucugggucaugucuggcugagguuggagaagugggg

SEQ ID NO: 4123829 - RNA, 57 nt, Human
uuucagacaggcucagagccgucaucugcuugaagagucuggggggcuugucugaag

SEQ ID NO: 4123830 - RNA, 87 nt, Human
uuucagacucuauguaagagcacugugguaugcugagcagaaacaccugacucuaacacuguaaugcuuucuaugcgaguuaagaaa

SEQ ID NO: 4123831 - RNA, 61 nt, Human
uuucagagcccugcuccuccccaaggccaggugcagcaauuggagaggaagggcacucaga

SEQ ID NO: 4123832 - RNA, 57 nt, Human
uuucagaggugcuuggaaugcugauggaguugaaucagcaagagggccugacugaga

SEQ ID NO: 4123833 - RNA, 76 nt, Human
uuucagauaaaauacagugaaagugagcaaggcagaaaaagucaacagaugcccaggcuccuacuguauucuggag

SEQ ID NO: 4123834 - RNA, 80 nt, Human
uuucagcuugaauuucauuuguuuccuaccauuucucuucauauuauuaguggugguaaaaguuaauaaaauagcugaaa

SEQ ID NO: 4123835 - RNA, 124 nt, Human
uuucaggaaauguuuauggugauaguagcauuaagauaauaagauaugcuguccauacauauuacucaaaggaugacauucuguuaagucucauaaaguuauagucaugaagagauuauugaaa

SEQ ID NO: 4123836 - RNA, 58 nt, Human
uuucaggaaugugacuauuuuuucagcaagcuuucugugcugugucacauuuaugaaa

SEQ ID NO: 4123837 - RNA, 85 nt, Human
uuucaggaggaaaugaacgugcaaccauagagugcucagaaaggugucuggcucuguaaguguugcagguaugguuccccaggaa

SEQ ID NO: 4123838 - RNA, 87 nt, Human
uuucagguauauuuuguauauacucuuaugcuguacccaaauuaaagguuuaaaacagaagaguguauaauuuuaauauaugagaaa

SEQ ID NO: 4123839 - RNA, 59 nt, Human
uuucaguguaagguuuccaggaguaacucgagcugcuucugaaacuuuuacuauugaaa

SEQ ID NO: 4123840 - RNA, 60 nt, Human
uuucagugugagugucuuauuuuaagccuagcaucggugaacuaaagugcucacaggaag

SEQ ID NO: 4123841 - RNA, 64 nt, Human
uuucaguguuaugacuuucauuccugaagggaaaauguaggagcuggguaguaauacacuggaa

SEQ ID NO: 4123842 - RNA, 56 nt, Human
uuucauaaccagcucuagccaguuguagucacagcauggagugcuguguugagaag

SEQ ID NO: 4123843 - RNA, 130 nt, Human
uuucauacuguuuaaguucuguuucaugguuuguuuucuuucagcauacacuaucaugucuggcuuaugacagaguucugcuuuccaauaaaaucaccaauagcuaugugugguucuugagcacuugaaa

SEQ ID NO: 4123844 - RNA, 66 nt, Human
uuucauaugagcaugacaccuaccauauuaagucacaaacacacgugacugucaugccagaugaga

SEQ ID NO: 4123845 - RNA, 89 nt, Human
uuucaucagaugcaccugaggcucuaaacucagucccauccucaacuaggaacauucuggcaguggggccucaguguugucaugagaag

SEQ ID NO: 4123846 - RNA, 109 nt, Human
uuucauccucauucuuuccacauuugauaaaccuaugcuaagcuguggcucauuaauaaugguccaggcuggaaaugucaaacucugcagaaggcaagagagggaggaa

SEQ ID NO: 4123847 - RNA, 79 nt, Human
uuucaucucaaaaggcuauuuccugugaaucaacucaaauucaaaugggucuguuuaggcaaaauagcuacagaugaag

SEQ ID NO: 4123848 - RNA, 61 nt, Human
uuucauguuuauggaaaaugaggacgucuuccuaguuacauauucuaugauuaacaugaga

SEQ ID NO: 4123849 - RNA, 61 nt, Human
uuucauugucagagcuuugaauaaaugggauaaucaaucacccacaaagugugacuugaag

SEQ ID NO: 4123850 - RNA, 68 nt, Human
uuucauuuccuagccucucuugcaguuagaugugggcauaugacuaagcucuagcuaguggaaugaga

SEQ ID NO: 4123851 - RNA, 75 nt, Human
uuuuaucaguuaaaucauuacugacagagauuuacuuuuauuugauguuagcagugauuugggcagcagaugaaa

SEQ ID NO: 4123852 - RNA, 56 nt, Human
uuuuaucuaccuaugcucauuuccuaugauuuuggggugaggugggugagauagga

SEQ ID NO: 4123853 - RNA, 58 nt, Human
uuuuaucuuccucugccuggugaucgaucaucagcacaacguacagagaaagauggaa

SEQ ID NO: 4123854 - RNA, 70 nt, Human
uuuuauggaaagguacagaauaaaaaguggcagauguuccccuguguacuuucuuguuccuuucauaaaa

SEQ ID NO: 4123855 - RNA, 63 nt, Human
uuuuaugugugucgcaauaguguaguuaguuaauuauagcuuucucauuagcaccacguagag

SEQ ID NO: 4123856 - RNA, 95 nt, Human
uuuuauuacuuacagcaguuaaaagguaugcuaccaaucauaugcaaaacaagaaaagauugcagaguacauuuuuuuacuggguggugguagaa

SEQ ID NO: 4123857 - RNA, 89 nt, Human
uuuuauuaggcuggugcaaaaauaauugugguuuuuaccauaaaaguaauggcaaaaacugcaauugcuuuugcaccagcccaauaaaa

SEQ ID NO: 4123858 - RNA, 73 nt, Human
uuuuauuauaggaaugcuggcccagagauaggaauauagcaacuaauugaggccaaaaaguccuaugaagaaa

SEQ ID NO: 4123859 - RNA, 130 nt, Human
uuuuauuauuacuguauugaacuuaaggacuguccugagccagacugucagagaggacugagguaucuggggagguaucuggggagguaucuguagucugacuacauggggcagcuucagauuaauaaga

SEQ ID NO: 4123860 - RNA, 62 nt, Human
uuuuauucccagguaaaaguagagcucagcauuauguaggugcugcuguccugggacuaaag

SEQ ID NO: 4123861 - RNA, 100 nt, Human
uuuuauuuacaggugucauccaacaggacaggguugaugaccuguucaacagcuugaaacguugauucccugucacaauggaugacauuuguaaguaaag

SEQ ID NO: 4123862 - RNA, 60 nt, Human
uuuuauuuauaagccacuugcugcaugacccuccaaguagaccuguggcuuaaaauaaag

SEQ ID NO: 4123863 - RNA, 98 nt, Human
uuuuauuuugauucuaugcauagguaggcccucgacgggacugguuaguguauaauccagcuuugucuggucuucgaaugcuauaguuuuacaugaaa

SEQ ID NO: 4123864 - RNA, 130 nt, Human
uuuucaaguagcuuuuguucaauguagaauucugguaacaguauaaacuccuaaaagccaggcaguccuagguuuuaauuucaguuuuuauuaguuuccagggaugcuauaacaaauugccaccuuuuaa

SEQ ID NO: 4123865 - RNA, 128 nt, Human
uuuucaaguguuuaaguucugcuuccucuuugauuaacacuucugucuuuaugucauuucucucucuugcauuuuacaauaggcagucaagagaagcaaagccucaccuucaacacuuugcuugaaaa

SEQ ID NO: 4123866 - RNA, 67 nt, Human
uuuucacaggaugcuguuuuauaauaagguauuuuaacuuauuuuauaaaucagcucugagugaaga

SEQ ID NO: 4123867 - RNA, 86 nt, Human
uuuucagaaagauuuuaagaaagacuuaaauugcaguuaccucuguguaucugguaaagcuggagaggucuuuuaucuuuggaaaa

SEQ ID NO: 4123868 - RNA, 70 nt, Human
uuuucagacaguaguaguuaaacuguguauuuguaucuaaauaaaagguuaacacuacuggcaugcagaa

SEQ ID NO: 4123869 - RNA, 80 nt, Human
uuuucagcucccgguuucuuugcagugcugucaucucuggagacaggcgcuggcagagagaaaagugcccauguagaaaa

SEQ ID NO: 4123870 - RNA, 78 nt, Human
uuuucauaggccaguguccuuucuuaaaauaacuaguaaccaaaaaacuuucaggauuauuucaguggcuuuugagaa

SEQ ID NO: 4123871 - RNA, 61 nt, Human
uuuucauauucaaauacucugcuugguuccgcauugccaagcuuguaaggagucaugagga

SEQ ID NO: 4123872 - RNA, 111 nt, Human
uuuucauggcuacucuuaagaauuuuccuuaauaguuggucuucauuaaaugcuuucuucaauuucacuggaauaguggagacugggauuuguaagaggaagcuguggaaa

SEQ ID NO: 4123873 - RNA, 82 nt, Human
uuuucauguggcagugaccaagaagccucccagaacaugaaaagcaagguugucugagggccuuggcuccugcccgugaaga

SEQ ID NO: 4123874 - RNA, 69 nt, Human
uuuucaugugggucugcacuuuucaaaccuuggugucaacuaggaacagaugggcucagauccugaaag

SEQ ID NO: 4123875 - RNA, 78 nt, Human
uuuucauuucucacugugucaugccaauuauauggcugguccuaagcaguguacaugacagagagagccaauuggagg

SEQ ID NO: 4123876 - RNA, 74 nt, Human
uuuucauuuguuuuguguguguuuguuuguuucaagcuaggagugacucaaagaugcauaaaugccaauggaag

SEQ ID NO: 4123877 - RNA, 63 nt, Human
uuuuccaaaaguuuguucugugcaauuuaagugccuuguuguaagggagaagaaauuggggaa

SEQ ID NO: 4123878 - RNA, 55 nt, Human
uuuuccacucuaugauagaaggguuaauaauaccuacaucaagggagugguagga

SEQ ID NO: 4123879 - RNA, 75 nt, Human
uuuuccagcaaacaggaaugaggagaaaaggucaaggacaucuagccuuuaucuuccugauucagauuuggaaaa

SEQ ID NO: 4123880 - RNA, 106 nt, Human
uuuuccauugucagugugauccugguuaugcuccuccagauugugagccgccaauaucaucaccaggaggaaguguuaaugauggauuuuagcuuacgguagaaaa

SEQ ID NO: 4123881 - RNA, 81 nt, Human
uuuuccauuuuguugaugaagaauugaggcccaaaauuauaaaagaaccugucuaaugucacauaucaagaaagugguaga

SEQ ID NO: 4123882 - RNA, 71 nt, Human
uuuucccauuuaaacacaagcuuucaggaugcaaugcuuuaaccuaaagagugucuuuaugguggagaaga

SEQ ID NO: 4123883 - RNA, 103 nt, Human
uuuucccccuacaugugcuuaauuugcaggaaguuuaacaucugugaagcugcucaucugacggccccagagauuaaagucuguuuauuggcauaggggagag

SEQ ID NO: 4123884 - RNA, 84 nt, Human
uuuuccccuccaagugcuauauucucucuuucuaauggaaaauuccauugucugaggguuugagagaauagcaggguaggaaaa

SEQ ID NO: 4123885 - RNA, 65 nt, Human
uuuuccucuguuauuagugugaaggcuuuuacuccccagcaauuuaucaucacuucagaggaaaa

SEQ ID NO: 4123886 - RNA, 72 nt, Human
uuuuccugccugaacccugacuacuuagauaauaucccauuuuacaaaugucaggaaguugaggcguagaga

SEQ ID NO: 4123887 - RNA, 81 nt, Human
uuuuccugucuuguucugugcuucuuacauuguauagcauaauguuuaaauguaaaguugggcacaaaugguaccugaaag

SEQ ID NO: 4123888 - RNA, 68 nt, Human
uuuuccuuagcuucucugcgaggucacuuuucaaaaauuuuagucuaucucagaaaagcuaaggagaa

SEQ ID NO: 4123889 - RNA, 64 nt, Human
uuuuccuuguugaaaaugucugcaguaaacaaauauugccugacaguuuacaacuccaggaaaa

SEQ ID NO: 4123890 - RNA, 74 nt, Human
uuuucuaaauuagcuuuccuacuaauaaauaaaauauuuuucuuaugcucggucaggaaagcuaaaugggagag

SEQ ID NO: 4123891 - RNA, 81 nt, Human
uuuucuaauaagucaaaaugaauuugugauuuaauguuccucuuauuucaaaggaauuugauuuugauguaguuuggaaaa

SEQ ID NO: 4123892 - RNA, 71 nt, Human
uuuucuaauuuaguuacccucccuguuaaauuuaguuuucuaguguaaaaaugggguacuacuuuggaaag

SEQ ID NO: 4123893 - RNA, 63 nt, Human
uuuucuaccacagccuguuucuuuuuguucgcuuuucagagaaaauaaauugaugguggaaga

SEQ ID NO: 4123894 - RNA, 78 nt, Human
uuuucucacaguucugaagacuagagccugagaucaaagcguuggcaggguugguuucuucugggggcugugagggaa

SEQ ID NO: 4123895 - RNA, 127 nt, Human
uuuucugcuuguuagguugucggaauuuugcuuuuguggaccuuuccuaucaccuuuuccugccucaugguuguaguguuccagaagcaaacaagauucccuuguugaaucuugauuuaguagaaag

SEQ ID NO: 4123896 - RNA, 76 nt, Human
uuuucuguucugcugcugcagcuacacuaucuacuuguuagcauaaccagggccaccagcaacagaugcuagagga

SEQ ID NO: 4123897 - RNA, 67 nt, Human
uuuucuuauuggcauauuuauguugaggucauuaggaauucauuucauuucuauggcaaugggaaaa

SEQ ID NO: 4123898 - RNA, 55 nt, Human
uuuucuugaauguauguauguugcuucaagucauucaugcacacauugaagagga

SEQ ID NO: 4123899 - RNA, 56 nt, Human
uuuucuugguuuauuuuucucuauuuucuucugugguagggagaauuccaagagga

SEQ ID NO: 4123900 - RNA, 128 nt, Human
uuuucuuucuauauccucuucuuuguuagagaggguugaaccuauaaacuacauuucucagucucuaguuacuugacuuuagcccugcucugccaauaagaagcacuaacauaagguuagaaggcaag

SEQ ID NO: 4123901 - RNA, 57 nt, Human
uuuucuuugucuuuauaugcugggcauuuggugccuagcaggaccaugacaagaaaa

SEQ ID NO: 4123902 - RNA, 127 nt, Human
uuuuuuccccugagucaucugugauuacauuuucauguuacaguauauuguucagggaucauuguggagacugaagagaaauguacacauggcuuuauguaggucauggugaaagacagagagaaag

SEQ ID NO: 4123903 - RNA, 63 nt, Human
uuuuuuccggaugcccagaaguuaggauuauugaagcccuauccugcuccugguuggaaagaa

SEQ ID NO: 4123904 - RNA, 73 nt, Human
uuuuuucucauuucugguuuggaaaauugaggcaaauucugggcaguagagucagaaccaagaugaggcugaa

SEQ ID NO: 4123905 - RNA, 79 nt, Human
uuuuuucucugacccccuuaaauauuuccuauauguuaaaucagauuaaaaugaagguggguacaacauugagaagaaa

SEQ ID NO: 4123906 - RNA, 105 nt, Human
uuuuuuggccuuguuuguuuaaaugauguucgggcuguuccccugauuaauaaagucguaaacacagucaggagcagcuucugaaccaugugcaaaagcaaagaa

SEQ ID NO: 4123907 - RNA, 60 nt, Human
uuuuuuguguguuccugaaggcacgauauaacgacagaaguuuuuaggaauuccaagaga

SEQ ID NO: 4123908 - RNA, 61 nt, Human
uuuuuuucaggggccuccagaguacucucucaaauuuacuucaugagagcccugaggaaaa

SEQ ID NO: 4123909 - RNA, 92 nt, Human
uuuuuuucccucuuugauccuaguuucauagauguccucugucuacuaggcagcauuuuugaucccacuaggauugagcucaaggaaagaag

SEQ ID NO: 4123910 - RNA, 64 nt, Human
uuuuuuucucucuguucuacacaacucuacuuuccgugauuuucaguggacaggguggagaaaa

SEQ ID NO: 4123911 - RNA, 57 nt, Human
uuuuuuucugauugcaugacguguaguccucuuuucuugucagcaauuaggagaaaa

SEQ ID NO: 4123912 - RNA, 60 nt, Human
uuuuuuugauuuuacuucaaguucugggauacuuuuaaggacuugcuuuugucaggaaaa

SEQ ID NO: 4123913 - RNA, 65 nt, Human
uuuuuuuuaaguucucugaaaugaaaaagucuuauagacuuguuuuuaggagaaguuauaggaga

SEQ ID NO: 4123914 - RNA, 55 nt, Human
uuuuuuuuccucugaaguccuuguccuuuauugggcaaggggugagggaagcaga

SEQ ID NO: 4123915 - RNA, 130 nt, Human
uuuuuuuuuuuuugcuaucuggauaguugacauuggacuucauguuucuauuagcucacggaaggaggccugugggaucagucuggaauauugauuccuguggggguguaugggugcaagaaaaggagag

SEQ ID NO: 4123916 - RNA, 82 nt, Human
uuugccuguuccagggauauuagagguaacuguaccaccuaggaguuaaguaugguuauuacugcuguuccagggagguaaa

SEQ ID NO: 4123917 - RNA, 84 nt, Human
uuugccuguuucuaugguuuauauuacugucaugccuauauucuugugggaguuucaaauaagaaucaagauauaacuggcaaa

SEQ ID NO: 4123918 - RNA, 62 nt, Human
uuugccuucaguuuggcuuaauaucauucaccauuuuagauagugggauacuggaagguaga

SEQ ID NO: 4123919 - RNA, 109 nt, Human
uuugcuacaaagcuuucuuaaggugcuacuaggcauagaugacauccacaaccuaaaagaagagugucagugccuuggguauuuugaguauguguuuacauugugcaga

SEQ ID NO: 4123920 - RNA, 76 nt, Human
uuugcuagcugcuguggauucagagaugaaaagacauaguuccuuuuauucacagaauuuacaggagugauacaaa

SEQ ID NO: 4123921 - RNA, 61 nt, Human
uuugcuaggagcucaucugagggaagagacacagaccuucccuggagcuagucugagcaga

SEQ ID NO: 4123922 - RNA, 57 nt, Human
uuugcucugacaugccccagcauguuuuaggauagugguuggauaugucagagagaa

SEQ ID NO: 4123923 - RNA, 107 nt, Human
uuugcugcuuguuuuucaagugugagucuacugaugcuauacuucucagauuuuggaaaaugucuguagcuaguaucagcaugguaauaaugagaaagaccagcaag

SEQ ID NO: 4123924 - RNA, 97 nt, Human
uuugcuggaauuuucuacucagcccauagaagugaaagaauacaaaaagccaguuuucucuuuggaggggcugaauggagagaagaguuucagcaaa

SEQ ID NO: 4123925 - RNA, 70 nt, Human
uuugcugucuaggagaggacaaauagaaagggguugacaugcauccaacugccucuucucuggcagcaga

SEQ ID NO: 4123926 - RNA, 72 nt, Human
uuugcuguggguccuccugugugcccggcccuguccuaagugcugggaagauaugagugaccaacagacaaa

SEQ ID NO: 4123927 - RNA, 99 nt, Human
uuugcuguuguugcuuuuuaauuaggaggcagaggaauaaacuucuguuaccuggaauugcccccuaaguggaaaacauccuuugccuacaauagcaga

SEQ ID NO: 4123928 - RNA, 67 nt, Human
uuugcuucaaaaggcagcuuaaugucaucauugacucccugaaucauuuucugccuuuggaaccgag

SEQ ID NO: 4123929 - RNA, 58 nt, Human
uuugcuucaucucaugcugccuccccaccuccccugugcucaggccagaugaggcaag

SEQ ID NO: 4123930 - RNA, 77 nt, Human
uuugcuuuccucaggacuuucaaauagaaauguuauuaaauauuuccuuuuugucaguguuugcacuugaagguaaa

SEQ ID NO: 4123931 - RNA, 59 nt, Human
uuugcuuucugacggguacauaugacuaaguauauacaccuguuuucagaaaaugcaga

SEQ ID NO: 4123932 - RNA, 110 nt, Human
uuuggaaggauaaaaugagauuggacagguauuaugaagccuauuuuacagauggaaaagcuacuacucauaaaucuuccugaaauuuguucaaguuagucuuuuccaaa

SEQ ID NO: 4123933 - RNA, 55 nt, Human
uuuggaauagcauagaagcucaucuguauaacaagaguuaauaugguguuucaaa

SEQ ID NO: 4123934 - RNA, 64 nt, Human
uuuggaaugaaaucaacuaggagacaccauggggaaucguuguccugagucugauuucucugag

SEQ ID NO: 4123935 - RNA, 88 nt, Human
uuuggaauggacuccuguucauguugaggcauagggacuugguuugacgucuguuacucuacccucaaaugaauaguaugucuccaga

SEQ ID NO: 4123936 - RNA, 77 nt, Human
uuuggagaugaagcuguuuauuuuagcagccccuaaacaggcuuaugcugcugcgaauugcagucuguucuaccgaa

SEQ ID NO: 4123937 - RNA, 129 nt, Human
uuuggagcucugccuaauuuuuugcguuuuucuuugacuccugccuucuccuguuuugcaguggguggaaacaacagguguagcaggagcaucaaauggagaaucaggagaucccaggucugguagaaa

SEQ ID NO: 4123938 - RNA, 96 nt, Human
uuuggaggagacagaagacuuguaacauugaguccacuaaacagggugucaccuguugaugagcacaaaguugaaggucuguccagucaccccaga

SEQ ID NO: 4123939 - RNA, 76 nt, Human
uuuggaggcuagaagucagaggucaagaugucuuuauagcuggcuucuugugacaccuuucuucuuggcuuguaaa

SEQ ID NO: 4123940 - RNA, 71 nt, Human
uuuggaugcugucauaugcugcuuugagugaaccagagaaacagccauuugcagcaugagaaagccccaaa

SEQ ID NO: 4123941 - RNA, 117 nt, Human
uuuggauggauugaguuauguauuauuguuaccauuuuauaaguuaaaguauggaaauucaaguaguuugcucaaguuaggugggaaaaccaugauuauaacuuaguucuuucugaa

SEQ ID NO: 4123942 - RNA, 82 nt, Human
uuuggauuuuauucugguggcaaugaggcgucacugaaagaauuucagcugaggcaugaugcuaucagaugagagauuuaga

SEQ ID NO: 4123943 - RNA, 65 nt, Human
uuuggcacauucugucacauucuaccugaaaagaggguuuucugacugauagauugugaaccaaa

SEQ ID NO: 4123944 - RNA, 107 nt, Human
uuuggcagggugcguggcucauaguaagugcauaauaaauguuaauuauuuuuauucauuuauuaaauacuuacugagagucugcuauguccaggcaccaugcuaag

SEQ ID NO: 4123945 - RNA, 62 nt, Human
uuuggcagguggauggcauggggagagcccuuucagacaguggguccauccaucauguuaaa

SEQ ID NO: 4123946 - RNA, 55 nt, Human
uuuggcugcagccccagcauuuccuucagauuauugauggaguucugcagucagg

SEQ ID NO: 4123947 - RNA, 72 nt, Human
uuuggcuggcuagugggcaggauuaugucugagaaaaccuccuuuuaaucaaucugaugcuugccagccaag

SEQ ID NO: 4123948 - RNA, 120 nt, Human
uuuggcuguaguauaucauaacugugaguucugugagucugccuagcacaucaccaaaucuggggauggacuuggggacuccaggcacagaaccauaacuggaauagacuuacaggugaa

SEQ ID NO: 4123949 - RNA, 65 nt, Human
uuuggcuuguaaaaugaaaagcuaucaagcugaauugccuugaaaguuuuauauuauaagcuaaa

SEQ ID NO: 4123950 - RNA, 130 nt, Human
uuugggaauauaguuaaaaggguuaugugauuguuuuuagguacauuuuaaguguugacuaauaaaaggcaaauaucagaacaaaagaacaguuuaacguagcauuuucaaaaccuuucggcauucuaag

SEQ ID NO: 4123951 - RNA, 130 nt, Human
uuugggaaugguggagucucaguuuuccugggaaacaaguuuguagacuagccauaaaaacagcaaacccuucugcaggugucuguucauacaaacauuauuguuuuccagaaggaaguggaacccucug

SEQ ID NO: 4123952 - RNA, 65 nt, Human
uuugggagaggaauagcucaaauuaguuccauaagcaaauugggaaauuucucuagcucuccaaa

SEQ ID NO: 4123953 - RNA, 76 nt, Human
uuugggaggcugaggcaggaggauugcuugagcacagaaggugacucgcucccuuuugucuuauuuccauccugaa

SEQ ID NO: 4123954 - RNA, 59 nt, Human
uuugggauugauaaggaauaccagaaggaacccugaguuuuucucuaaguagucccaaa

SEQ ID NO: 4123955 - RNA, 62 nt, Human
uuugggcaguccuggaauuuguggacuuugaugaagucaaacagaaucucaggcuacccaga

SEQ ID NO: 4123956 - RNA, 68 nt, Human
uuugggccuugcuggacaaggagcugaggaagaacucuggaguccuggaaucagcuacugggccuaga

SEQ ID NO: 4123957 - RNA, 58 nt, Human
uuuggggaagagacauuuguaccugauucaauauaggcuuguuugugauuucuccaga

SEQ ID NO: 4123958 - RNA, 81 nt, Human
uuuggggacacugauauucuugaaaucaugguuuaauuuugcucuuuuaccuugaacacaagaauuauugcuugccuuaaa

SEQ ID NO: 4123959 - RNA, 59 nt, Human
uuuggggacauuuaucaacuacuuccaagugaagagugauuguaucagugucucccaaa

SEQ ID NO: 4123960 - RNA, 75 nt, Human
uuuggggaggagcaggaaguggugaaguugauagaaggcccaacccacucuaccuggcuccauggaaucccugaa

SEQ ID NO: 4123961 - RNA, 59 nt, Human
uuuggggauugugagaagacuguaucauauguguguaacagucucuuggaauuuucaga

SEQ ID NO: 4123962 - RNA, 55 nt, Human
uuuggggcauggggaguuuucaacagugcccagaaaauucuaacaugcagccaag

SEQ ID NO: 4123963 - RNA, 81 nt, Human
uuuggggguauuucuuuggggagaucagaaaguggguuuagauuaccaugauuacuuucugccuuacaggagucccuugaa

SEQ ID NO: 4123964 - RNA, 97 nt, Human
uuuggguuuaguaguccuggaggagccaggagggaaguccagguagucugauuccacugucuguccugcucuccgugaccuuaaacugucucccaaa

SEQ ID NO: 4123965 - RNA, 84 nt, Human
uuugguaaccccaggaaaaggagacuuuagcacugagcaccuccuccuucagcugccacgagguuuccuuauccguccuccaga

SEQ ID NO: 4123966 - RNA, 123 nt, Human
uuugguaaguaauucagggagaauaaauuaucaccagacuuggguuuugguaacuuaaguguuaaaguuagcaaauaccacaaucugcauuugauuucugugcuuuuccuguuauuuaccaag

SEQ ID NO: 4123967 - RNA, 62 nt, Human
uuugguacccuuggaacaguugaugauuguccaaacacaaaaauucucaggggcauacuaag

SEQ ID NO: 4123968 - RNA, 76 nt, Human
uuugguaccuugcuccagcuucccucagcuguggaaaggauucauuuggcuguauggcuggucucaugguaucaaa

SEQ ID NO: 4123969 - RNA, 86 nt, Human
uuugguauuuaaaagguagauucuccuucuaugaguacauuauuuaugauuaaucauagaggaaaauccacguuuucaguaucaaa

SEQ ID NO: 4123970 - RNA, 78 nt, Human
uuuggucaaacauuuugagugguuucugugagaauguuuuuguaugagauuagcauuuaaauccauggacugacuaaa

SEQ ID NO: 4123971 - RNA, 78 nt, Human
uuuggucaauagauucucccaucaugagauguucccaaacaguaacaaugguaauauuucgaugggaucugaaccaaa

SEQ ID NO: 4123972 - RNA, 56 nt, Human
uuugguccugggcacugauuaacuugacauaaaagcagugaaacaauaggaucaaa

SEQ ID NO: 4123973 - RNA, 59 nt, Human
uuuggucucugugcauccuccuagcacaccuuaauggcacaugauguauggaggcuaaa

SEQ ID NO: 4123974 - RNA, 63 nt, Human
uuuggugccacaagaauacaaagcagagaauuucuaggcugauuugauuacuaguggccugaa

SEQ ID NO: 4123975 - RNA, 61 nt, Human
uuugguggaccucaucagaaccggacauugcugucacggauuugacugagguccugccagg

SEQ ID NO: 4123976 - RNA, 60 nt, Human
uuuggugggaaggcaagaugaccagcuuuugaguugaguccagcucugccucuuacuaga

SEQ ID NO: 4123977 - RNA, 59 nt, Human
uuugguucuuagacaaguaaccuuaguuccacugaaggaaaauuaucaugagagccaaa

SEQ ID NO: 4123978 - RNA, 59 nt, Human
uuuguaacauuauggacugcuuuucauggcuuauaauaaagcagugccaucuguacaaa

SEQ ID NO: 4123979 - RNA, 69 nt, Human
uuuguaauauauucagccuucaguuagaguguggauuaaauuugacuucugauuaaggaugaaugcaaa

SEQ ID NO: 4123980 - RNA, 91 nt, Human
uuuguacagugaaaggagcuuuuccuuugaaaggugagggcuuccaacaugaaguuaccuuagcaggggugaagauucuacauuggacaag

SEQ ID NO: 4123981 - RNA, 60 nt, Human
uuuguagacagaauaucauguuccuuguucccaaggucuagcugaaaaguuguuuacaag

SEQ ID NO: 4123982 - RNA, 77 nt, Human
uuuguaggauguguuuugguaauuucugcuuugcaugaguaaauuucagaucccuguuuucaagacaaucuugcaga

SEQ ID NO: 4123983 - RNA, 120 nt, Human
uuuguauauagauagauagaaucuuuagcucaguguucauuuugaaguacuucaagguuuagccugggagagaauuuuaggggaagaugcugcuguugauguaucugcucuauauaugga

SEQ ID NO: 4123984 - RNA, 69 nt, Human
uucucucuguuauggauuuuacuguuuauauuaauuuacuaacauuuuagugagguucaagagggagaa

SEQ ID NO: 4123985 - RNA, 62 nt, Human
uucucucuuacuugcucacucugaugaaacaaguaccauauuggcaagcaacugagggagga

SEQ ID NO: 4123986 - RNA, 70 nt, Human
uucucucuucaguuucccuaaagccaauuaggcacucauaauugccauuugggaaauggauuugggagag

SEQ ID NO: 4123987 - RNA, 76 nt, Human
uucucucuuuccagguaucaagcuucaggccagcaugggcugggaucucagcaacaggugccugugaaggggagaa

SEQ ID NO: 4123988 - RNA, 55 nt, Human
uucucugacagccacauagaggcuuugccaaccugaagcagggcugucagcagaa

SEQ ID NO: 4123989 - RNA, 69 nt, Human
uucucugaggacauugagacuggagacuaagaucaacaggauguuuccacgucucaguuccaaagagag

SEQ ID NO: 4123990 - RNA, 72 nt, Human
uucucugccccuaaacaugcaagagcuucuggguccucugaaggccacauacaagccauggggggaugagaa

SEQ ID NO: 4123991 - RNA, 58 nt, Human
uucucugcuuaugcccauccugucugugguuaucaccaggccaggguugagaagagaa

SEQ ID NO: 4123992 - RNA, 57 nt, Human
uucucuggagaguaucuucuuaucuguugugagagaauugagauuuucuccaaagaa

SEQ ID NO: 4123993 - RNA, 56 nt, Human
uucucugggaucuggcaaaaggaauucagaaacuguaucagucagaucugcaggag

SEQ ID NO: 4123994 - RNA, 109 nt, Human
uucucuucuuucggcaaugacuuaaguaacuuugcuuuuguggguaaaggccuuggggcauuuuugucacaggaggagggaucugggcuugucaguuuggagaagagaa

SEQ ID NO: 4123995 - RNA, 60 nt, Human
uucucuugcaguuuugcaugaccacguaacugaguucuggacaaugcacauguaagagga

SEQ ID NO: 4123996 - RNA, 80 nt, Human
uucucuugucauacagauggcucucuucuugguggugccccagcccacccucaagggugucuauaaguaggagaagagaa

SEQ ID NO: 4123997 - RNA, 104 nt, Human
uucucuuguugggugguucuguuaggagaggaggcucugggaucgucccguugggcacaggauguucugggguucucuuguuggaugguucugcugggagagga

SEQ ID NO: 4123998 - RNA, 81 nt, Human
uucucuuugcuccucucugcuugguguaugugagucuaugugugacggggugugugagagcagaauugaggggugaaggag

SEQ ID NO: 4123999 - RNA, 58 nt, Human
uucucuuuuaccacaauaaucaucacaaauaauccuguuuggaagguggagaagagga

SEQ ID NO: 4124000 - RNA, 56 nt, Human
uucugaaagaauaagauguuuacagugccauuuggagcuguuggcuucucuuagaa

SEQ ID NO: 4124001 - RNA, 71 nt, Human
uucugaaagcucugcuggucaaggcugggucccugccugucugauuggggaggccuggccagucuucagga

SEQ ID NO: 4124002 - RNA, 55 nt, Human
uucugaaauguugagaguccauuugugagacuggaaacuuggaacgucuucagaa

SEQ ID NO: 4124003 - RNA, 57 nt, Human
uucugaagcucccuuuuguaguuaagaguuaaaagucccgaggcgagcucuucagaa

SEQ ID NO: 4124004 - RNA, 58 nt, Human
uucugacagucucuucuuuagcuugaauucccaaacaggcuccuagggauuuuuagaa

SEQ ID NO: 4124005 - RNA, 66 nt, Human
uucugagaaauggguucacauacacccugcccucuaagaauggcgaguuguggagcucacucagga

SEQ ID NO: 4124006 - RNA, 56 nt, Human
uucugagcaagcuggacagucugagaggcaguuccuccagcucuuauguucaugaa

SEQ ID NO: 4124007 - RNA, 63 nt, Human
uucugagccagagucaguuaugaggaugguggcacccguuacaagauugaguuauggcuggag

SEQ ID NO: 4124008 - RNA, 91 nt, Human
uucugagggggcaaaacaucuacaggagaaugucacuggaucauuucaaaaaucuauguguauuugauucuaggacuaugucucuucagaa

SEQ ID NO: 4124009 - RNA, 55 nt, Human
uucugagguagccacucacugggugccagaaaacccugagccuguuuauccagaa

SEQ ID NO: 4124010 - RNA, 79 nt, Human
uucugaucuuaacacucaugcucagcuggugcucuaauacucaagagcaggagaaagaguaugggcucugugguuagaa

SEQ ID NO: 4124011 - RNA, 73 nt, Human
uucugaugagagaggugcuagccugaccugaacaggagaugcugacaggcagugcugggcauguugcacagag

SEQ ID NO: 4124012 - RNA, 62 nt, Human
uucugaugccuguuccugccagauugcugggcacugcccuggagugugacgaggcauuagag

SEQ ID NO: 4124013 - RNA, 68 nt, Human
uucugaugcugaccuuuacacucacauggaaaauuuccaggcugugcaauuaggguaagacauuugaa

SEQ ID NO: 4124014 - RNA, 88 nt, Human
uucugauguuggugaguguugaauaucguguucuuguuuuuuaaaaguaugaauccaggaguuauuuagcaaaagcaugacaugagga

SEQ ID NO: 4124015 - RNA, 55 nt, Human
uucugcagugugcagggccuguuucccuccucaagcccagcccauucaugcagag

SEQ ID NO: 4124016 - RNA, 64 nt, Human
uucugcaucuggcugugccuuguuucgaaauauaauggaagcaacacugccuucaggugaagaa

SEQ ID NO: 4124017 - RNA, 82 nt, Human
uucugcaugugccuguguguuuuguauguaaauucgaucagcaagaucagucauuucacaaagaacagaugcagguguagga

SEQ ID NO: 4124018 - RNA, 67 nt, Human
uucugccagggcggggcaggcaggccugggggcagaggcgggccuggccucuccccaccuggcagaa

SEQ ID NO: 4124019 - RNA, 72 nt, Human
uucugcccaguuugugcucagguuguggagacaaggcuuccuacgagaugcacacacagaaauuuggcagaa

SEQ ID NO: 4124020 - RNA, 57 nt, Human
uucugccuuggcagggugguccugagaguggugggugccacccuguccggggcggag

SEQ ID NO: 4124021 - RNA, 64 nt, Human
uucugcuaccuuucuguaccuuaaggaacaaucauucaaggcauuuuacagaacuggaguagaa

SEQ ID NO: 4124022 - RNA, 111 nt, Human
uucugcuguguaguuuuacauggucccauucugcguuaauguuuuaugcaugagguagccuggcuggauuuaaggcagagagggccaguucuugaaccugagauagcagaa

SEQ ID NO: 4124023 - RNA, 77 nt, Human
uucugcuuguauuagguuggugcaaaaguaauugugauuuuugccauuacuuuugcaccaaccuaauagaauaugaa

SEQ ID NO: 4124024 - RNA, 68 nt, Human
uucuggaaaaacuuccaacccagaagccuaaauacaguuuggaugcuuagguuggugagacuucagag

SEQ ID NO: 4124025 - RNA, 76 nt, Human
uucuggaaguguucacauuacaaggccauauuugaauaaccccauuacaacggccuaauaaaugugaaggucagaa

SEQ ID NO: 4124026 - RNA, 67 nt, Human
uucuggagcagauucaagcagcaaauauuuacugaacacuugcuaugugcuggaaauuguucuagga

SEQ ID NO: 4124027 - RNA, 64 nt, Human
uucuggaguucaggucccuaaaccgcuuuccucaauuuugagagaaggggcacugucucuagag

SEQ ID NO: 4124028 - RNA, 59 nt, Human
uucuggaucaugggaaagggaucaguaugcaguaacgugguaagguuccagaucuagaa

SEQ ID NO: 4124029 - RNA, 74 nt, Human
uucugggaauuucuaaggugagguagaaaaucuucagcaaggaggaaaccuauauagucuuagaagccaaugaa

SEQ ID NO: 4124030 - RNA, 81 nt, Human
uucugggaccugcuguggcugaagaugcagggaugggucaaugcaguccguaccugggagggcuucagucuagugggagaa

SEQ ID NO: 4124031 - RNA, 104 nt, Human
uucugggaguacauuuuuuaggggagaguaagaaagggcacaguugcuucucagguagcgugagguugagagcccaggauucuuucuuccuuaagaauccagaa

SEQ ID NO: 4124032 - RNA, 57 nt, Human
uucugguauagaaaaugacagggccuuguucaggcuucucagaagucugugccagga

SEQ ID NO: 4124033 - RNA, 76 nt, Human
uucuggugcaccgugaagcuugagaacuacuguccuagaauaauuccaggaugucuucaagcucagugcaguagag

SEQ ID NO: 4124034 - RNA, 100 nt, Human
uucugguuugagguuacuaaaaguaaagcugcugugaacauuguuguaccaaucuuuguauacacguaccuuuucuuuucccuuaaguaacuaaguagaa

SEQ ID NO: 4124035 - RNA, 68 nt, Human
uucuguauauuguaaagacucaacaccuuacuaacuggcuuugugaguaacucuacauauguacagga

SEQ ID NO: 4124036 - RNA, 90 nt, Human
uucuguaugcucccaugacccuggcagguagccucacaguccacgcagauugugacgguaucugccagggucaugggagcauuaagugaa

SEQ ID NO: 4124037 - RNA, 60 nt, Human
uuuuccucuguauuugaaaugcuuugaaagcuacaagauuuccuagauacagaagggaag

SEQ ID NO: 4124038 - RNA, 62 nt, Human
uuuuccuguuguaugucuuaauuuuaaaaauaaagaacuaaggcaugcuagcaguaugaaaa

SEQ ID NO: 4124039 - RNA, 129 nt, Human
uuuuccuuacauuauaauuuuauguguucaugaugcuaaccauuuggauauuuggaagcauauggaagguugaauauuucacuuuauauccagauguuugguguuauucaauacugauauauaggaaaa

SEQ ID NO: 4124040 - RNA, 78 nt, Human
uuuuccuuaucccuauugcuggaacagaaugccaagacaugacauguauggcuucccaggaaaggagaagugggaaaa

SEQ ID NO: 4124041 - RNA, 83 nt, Human
uuuuccuuuacuucuugucucaugccuauucccaugcuuguuagcauuuccaccuauaggugagcaacagaaggaagggaaaa

SEQ ID NO: 4124042 - RNA, 65 nt, Human
uuuucguccacagucuauuuuuagucuauuauuuagauagaauaauaucuauccuguggugagaa

SEQ ID NO: 4124043 - RNA, 100 nt, Human
uuuucguguuagucucuccugcugaacugcaugugucuuagggauuguaaguaugccaucuguguauagcaguuuccagucuagugcaugacacugaaaa

SEQ ID NO: 4124044 - RNA, 68 nt, Human
uuuucuaacuguuccuauggggaggcgaaucuguaacaagcuccucugccuuuagugaaaguugaaaa

SEQ ID NO: 4124045 - RNA, 69 nt, Human
uuuucuauuaugaggggcagagggcaucucuaggaaaggagaugccaacugaauuuccaugauagagaa

SEQ ID NO: 4124046 - RNA, 68 nt, Human
uuuucuauucaacuugacuguuucaccagcuaaaacuggugaaugauuugaaaguugaguuuugaaag

SEQ ID NO: 4124047 - RNA, 76 nt, Human
uuuucugaaagagcauuuuguaaaauccuugcuuccuuucaauuuaagugguuucuuagaauguuuugcuagaaaa

SEQ ID NO: 4124048 - RNA, 64 nt, Human
uuuucugaaagugacauaccuuacauauguuuguugagguugcaagcauaggauguccagaaaa

SEQ ID NO: 4124049 - RNA, 77 nt, Human
uuuucugauuuagaaucuuuaaaauucauaguuguuuuuacagucugagauuagggaagauuuuaaaguagugaaga

SEQ ID NO: 4124050 - RNA, 71 nt, Human
uuuucuggggaaggauaugauuagacuaaugaaauaauggaauuaggcuuauuugucuuuccuacagugaa

SEQ ID NO: 4124051 - RNA, 64 nt, Human
uuuucuguacaauuauuuaaauggugaaaccaauguuucuaucaucuagaugaugguuagaaaa

SEQ ID NO: 4124052 - RNA, 78 nt, Human
uuuucuguuuccucauuuaucuguugggaagcuaacugugaccuuagcgucccagcagauaaaugaggaaacagaaaa

SEQ ID NO: 4124053 - RNA, 86 nt, Human
uuuucuuagcauaaguauuuuaaggcugcccguguaucuccagauagauuugacagcagauaaaauaaaauuaucuaauuagaaaa

SEQ ID NO: 4124054 - RNA, 73 nt, Human
uuuucuuaugugcagcuauauguugucccacugauguguagggcuagagugauagcaguggauguggagaaag

SEQ ID NO: 4124055 - RNA, 59 nt, Human
uuuucuuccagcuguaggaccuagggccagcucuuuguuagccaucagcuggaggcaag

SEQ ID NO: 4124056 - RNA, 85 nt, Human
uuuucuuccuguccaccugaagcagcacuaaugggccccagaaaccuucuggaguguauugggucugcuggcgacaggcagagag

SEQ ID NO: 4124057 - RNA, 98 nt, Human
uuuucuuggcaaguccaaacccuggggcugcucugccuggugguccgaggcgagggggacagagcgagcgccccaggacggcgacuucccacggagga

SEQ ID NO: 4124058 - RNA, 91 nt, Human
uuuucuuggcuguuguucaugcuugcugccucauuguuccaagauggcugacaaagaagcaagcaucacaucuucauucgggccagggaga

SEQ ID NO: 4124059 - RNA, 84 nt, Human
uuuucuuguguagcucggaauggaacaacagcggucccuuucauugacaaggcauccuccaucuccaucggacugccaagagag

SEQ ID NO: 4124060 - RNA, 55 nt, Human
uuuagggcuggaggucuucaaugguauacaccaugagguaaagaucagcuuuaaa

SEQ ID NO: 4124061 - RNA, 130 nt, Human
uuuagucaaagcacagcagaacaauguggaacacaagguugacacuuuuucaggugucuauaagaagcucacagauaaggauguuaauuuugauuucccauaguuuccguuguaaacaaaaaugacuaaa

SEQ ID NO: 4124062 - RNA, 64 nt, Human
uuuagucgguucagggucacccaguaguguugcucugggcugcggaugucuuuggaccacugaa

SEQ ID NO: 4124063 - RNA, 56 nt, Human
uuuagucuuuggguugugggugggcugcaagcccugcuggcuuccugagggcugag

SEQ ID NO: 4124064 - RNA, 130 nt, Human
uuuaguggaggccaaaaccagguuaagacucagucaccucauuaguaucuuguuuaggcaccuccaauuuaguagcuaggcaaaguauuaaugagugacugauuuuuaaucuacuuuuggcucuagugaa

SEQ ID NO: 4124065 - RNA, 62 nt, Human
uuuagugugaaagcagccauagauuaauauauaaaugaugaacauggcuguguuccaguaaa

SEQ ID NO: 4124066 - RNA, 68 nt, Human
uuuaguuccaauucaugugagcggacucuucucuaaguggaagauuuuggaacaugaaauggacugga

SEQ ID NO: 4124067 - RNA, 79 nt, Human
uuuauaaugaaaagagguuuaacugacucacagcuccacauggcugaggaggccucacaaaaccuacaaucauggugaa

SEQ ID NO: 4124068 - RNA, 55 nt, Human
uuuauaccccaccuggggcaagccauagacagugauuggcagugugggguaugaa

SEQ ID NO: 4124069 - RNA, 129 nt, Human
uuuauauauaauacacacaugcauguauaauacauauguagacaucuagauuuauguguguauguaucuacagauauaaauacagaugucugucuguauguacacaugcauguauaauacauauauaga

SEQ ID NO: 4124070 - RNA, 86 nt, Human
uuuauauuugaguaucuuauugcccugaggcacuccauccauugaaauaaugguuucugugcuuuagggggaagaacagauaugaa

SEQ ID NO: 4124071 - RNA, 74 nt, Human
uuuaucagaagcagaacacuagauuuaaaggcuuuccaaagccuaaugaguaaguccaguguucucucugugaa

SEQ ID NO: 4124072 - RNA, 66 nt, Human
uuuaucagagauauguguggacguaugcauuuagauagaaauauucuacuacauaggucugguaaa

SEQ ID NO: 4124073 - RNA, 57 nt, Human
uuuaucagaguccccaaaagaaauagaaggcuauuucaaguggggacauuugagaag

SEQ ID NO: 4124074 - RNA, 73 nt, Human
uuuauccagucuaccauugaugggcauuagauugauuccaugucuuugcuauugugaguagugcugcaaugaa

SEQ ID NO: 4124075 - RNA, 59 nt, Human
uuuauccaguguuggaauuuuuccugcuuuuuagauuaguucaagcaaugcuggaagaa

SEQ ID NO: 4124076 - RNA, 61 nt, Human
uuuaucgggugcccucauauagugagcaaucuauacaacugugcaugguauccuugaugag

SEQ ID NO: 4124077 - RNA, 60 nt, Human
uuuaucuuguagaaagaucauucuggcugcuaagcagagaauggcuuauacagaaguaag

SEQ ID NO: 4124078 - RNA, 57 nt, Human
uuuaugacaagcauuacugauuuuccauuucuagaagucagagaauguuuucaugga

SEQ ID NO: 4124079 - RNA, 59 nt, Human
uuuaugaucuucugucuaaucauguuaucagagaugacugugcaagcagagagcauaaa

SEQ ID NO: 4124080 - RNA, 60 nt, Human
uuuaugauuuagaaagauucacugagagaaaaauacuuaguguuuuuuuaaaucugugga

SEQ ID NO: 4124081 - RNA, 118 nt, Human
uuuaugcaguagaaaccugaaugccuuucaacuacauacaggcgauggauaaaaucagugauguacaaauacauccccuguauguaguugaaaggcauucagauuucuacuguguaaa

SEQ ID NO: 4124082 - RNA, 75 nt, Human
uuuaugguaacuugcaaggaguuaauguacugugaauucauucuuguacauugauuucugcauuagcuccgugaa

SEQ ID NO: 4124083 - RNA, 90 nt, Human
uuuauguguuuauuugcucagaaaguauuuaaguccauauuuuuuugucgaaacuggaaauugugcuuuguuaaguguaaacaacauaaa

SEQ ID NO: 4124084 - RNA, 85 nt, Human
uuuauuaaagggucgggaaagggaggaacacaugggggcuuuagggggcacugauaauguccucucucuuauccuaugugauaga

SEQ ID NO: 4124085 - RNA, 108 nt, Human
uuuauuaauagcuugauuguuacuaggauuuugaaaacgugggcucuguggcagggagacaugcacacacaguucuaauuaacaccaaucacaaacgcuaaugguaga

SEQ ID NO: 4124086 - RNA, 67 nt, Human
uuuauuauagugguggggacugcuauugccucccacaauaucuuucacucccuucuauaguaauaaa

SEQ ID NO: 4124087 - RNA, 63 nt, Human
uuuauucuuuucuguauuuaggacagguggaggaguuucacacugaugugcagaaauagugag

SEQ ID NO: 4124088 - RNA, 85 nt, Human
uuuauugaacuauuggucaucuuuaacaauuuacaauguauucauuauaaaguggaaguguuaaagggguuuuuggaggaauaag

SEQ ID NO: 4124089 - RNA, 59 nt, Human
uuuauugacccaaagcgagagucaauauuuaccuuggcucucacucuauggucaguaaa

SEQ ID NO: 4124090 - RNA, 69 nt, Human
uuuauugcugagaaggauuccauuguauggauauuccacauuuuguuuauccauucuccgguuaaugag

SEQ ID NO: 4124091 - RNA, 87 nt, Human
uuuauugggcuggugcaaaagcaauugcaguuuuugccauuacuuuuaugguaaaaaccacaauuauuuuugcaccagccuaauaaa

SEQ ID NO: 4124092 - RNA, 96 nt, Human
uuuauuguagugaauauguuagaguguagcaggaagaggcaauauauucaauacuggucuuuuccuuuauuauuucacuuauauuuaagcaaugga

SEQ ID NO: 4124093 - RNA, 71 nt, Human
uuuauuguugcaaguuuuauaggcagauuaaugggaagcagccccagucuuauccugaaaacaacaauaaa

SEQ ID NO: 4124094 - RNA, 61 nt, Human
uuuauuguugggucuuaagcugaguuuacacacuuggugucagaaugauuccggcaaugaa

SEQ ID NO: 4124095 - RNA, 77 nt, Human
uuuauuuauaaacucucugcugcugagcuuggggccuggagccccaggaaugagcaggcaggggagacugagaugga

SEQ ID NO: 4124096 - RNA, 59 nt, Human
uuuauuucucugugcuugacuuucccauuuauaaaauggggauggugauaggaaauaga

SEQ ID NO: 4124097 - RNA, 86 nt, Human
uuuauuugauaguuaaugauagggagaggggugauagaacaaauggguauuaucuuuucuucuuuccuauaauuaauuaaaaugaa

SEQ ID NO: 4124098 - RNA, 76 nt, Human
uuuauuugcuuacuguccauugguauauuaggguucuccagagaaacccaaccaacuggauagauagauagauaga

SEQ ID NO: 4124099 - RNA, 92 nt, Human
uuuauuuuagggacauaauuaggcaguugaucauucgaagcuaaugcuuuacuaauaaugagcuugucuaauuguguauuccacagaaugaa

SEQ ID NO: 4124100 - RNA, 93 nt, Human
uuuuguucuuucgguccuguacuugaugagauagaaacagaugacaagaaaacguguugauauuggaauuuaguuagagaauuaagaacaaaa

SEQ ID NO: 4124101 - RNA, 66 nt, Human
uuuuguugcaaucuuaggguucucacuauuuuaacauuagcuuagaacauguggauugcaaaggaa

SEQ ID NO: 4124102 - RNA, 60 nt, Human
uuuuguuugcuucagugcauugcagagcacacccaugcaguguguuuggagcgagggagg

SEQ ID NO: 4124103 - RNA, 81 nt, Human
uuuuguuugggacuuguggaugcaguguauuaggauggaggcgggauuuucuuaaugcuuaauuuucacaagccuccaaaa

SEQ ID NO: 4124104 - RNA, 89 nt, Human
uuuuguuuuccuguguucaccugcugucugcuuguucuuaguggcagauggagggagaguagauaucagguguauuauggagcacagaa

SEQ ID NO: 4124105 - RNA, 85 nt, Human
uuuuuaaaguacguaugcccaggccccaccccagacuaagucagaaucucugggaaugaggcuugggcaaugacauuuuuaaaaa

SEQ ID NO: 4124106 - RNA, 62 nt, Human
uuuuuaaauaugcuuuuggcuucgaguggcaauaacuagauucaagacagcauauuuaagaa

SEQ ID NO: 4124107 - RNA, 58 nt, Human
uuuuuaagccucuugguuauuaaauuacuuugcagauaacugagccgaggcuuaagaa

SEQ ID NO: 4124108 - RNA, 84 nt, Human
uuuuuaauuaacauauuaauuaacacauauuuggagagcuacuaauguaggccugguacuguguuaauaagaguuaauugaaaa

SEQ ID NO: 4124109 - RNA, 89 nt, Human
uuuuuacagagcacugauuggugcauuuuacaaaacucuagcuagcuacagagugcugauuggugcauuuuacaauccucuuguaagaa

SEQ ID NO: 4124110 - RNA, 81 nt, Human
uuuuuaccguauucuaaucaguuuaacugucaagagccaccuguggcuaguggcuaccaaauuggacagagugguuuuaga

SEQ ID NO: 4124111 - RNA, 92 nt, Human
uuuuuagcaagaaaugugguuacuguuggccaccacagucagaaccagaggacaccaugcuggcuaauggaaaccagaugcucugguaaaga

SEQ ID NO: 4124112 - RNA, 66 nt, Human
uuuuuauacuuugcucaagauucacauucccccaaagagggaguccaauuggucagaguaaagaaa

SEQ ID NO: 4124113 - RNA, 81 nt, Human
uuuuuaucagucaagguccuugaggaaacagaugugaccaauagguuacagauggcacacucaaggggugauugaugagaa

SEQ ID NO: 4124114 - RNA, 73 nt, Human
uuuuuaucugaccucacuucuuaauuuagcuccauuucagaucccuugcuaaguuagaagggccagaugaagg

SEQ ID NO: 4124115 - RNA, 61 nt, Human
uuuuuauuggaugcauaccauacaucagggacucuuucaagugcugggcaugcaguggaaa

SEQ ID NO: 4124116 - RNA, 81 nt, Human
uuuuucaaaugagcaaacagagguugaauaacuuguaugagguaacauaaccaguaaguauucgagucuccauuugaaaaa

SEQ ID NO: 4124117 - RNA, 105 nt, Human
uuuuucaacaaaugcuuccaaugcuucuaucacauuguaaguggucuguaugacauuaagucagaucccguguauaguaagcuggauguucaaguuguagaagaa

SEQ ID NO: 4124118 - RNA, 63 nt, Human
uuuuucaagcuccauugccacugguacauucccagcgaugaccuggaauggguccuugaaaaa

SEQ ID NO: 4124119 - RNA, 88 nt, Human
uuuuucacuacgcuugagcuccuacuuauuccagcaaugcugccacaugcugugugggagcaaaugacugggagauccgagugaagaa

SEQ ID NO: 4124120 - RNA, 83 nt, Human
uuuuucacuuugaggaaaaugggacaggcuguagaugacaucaaucuucuuggucuuucgucucuuuuuugaugagugaagag

SEQ ID NO: 4124121 - RNA, 84 nt, Human
uuuuucaguacuguguucugagcaggcagcgugaauugguuauuuucaauggucaaaagaaagcucagaacacauauagaaaaa

SEQ ID NO: 4124122 - RNA, 73 nt, Human
uuuuucccucaauucuagagccuuacauugugguugaguuuauagguuauuuauuggcuuuaggaaggaagaa

SEQ ID NO: 4124123 - RNA, 71 nt, Human
uuuuuccuaugugcuauggguguuuaguuuaauuugagaaucaauaugacucaugcaugacacuggaaagg

SEQ ID NO: 4124124 - RNA, 93 nt, Human
uuuuuccugguuaacuuaaaaaucuuugaaagcauguaucaaaauuguaugacaugugcuuguaauguuaaauguuuuuguugaauggaaaaa

SEQ ID NO: 4124125 - RNA, 92 nt, Human
uuuuucgaagaguggccuuaggauuggauuucucuuccuguuccugggaagaauuagagauauaaccuaaaggucacuauucuucugagaaa

SEQ ID NO: 4124126 - RNA, 55 nt, Human
uuuuucuaguuucugagguuguauauuccuucuguacagucagggaauagaaaaa

SEQ ID NO: 4124127 - RNA, 72 nt, Human
uuuuucucuaauaugaggcuaaccaugauguccuuucccaggaaggacaaucucuccuuuaucagggaaaaa

SEQ ID NO: 4124128 - RNA, 107 nt, Human
uuuuucucuuaauuucaccagggaggcugagacucugaauuuuucccccuugcaggagggaauaauuuagauuuucuuccaucccugucagaaguugaacagacgaa

SEQ ID NO: 4124129 - RNA, 77 nt, Human
uuuuucucuuuugauaguugcugagcaggcucucagaccugcacauaggcuuuucagaaccaaagcgcagagaaaaa

SEQ ID NO: 4124130 - RNA, 63 nt, Human
uuuuucucuuuuugggguggggugggauaggagccuuguucaccccacccugaggaggaggga

SEQ ID NO: 4124131 - RNA, 76 nt, Human
uuuuucuucucaaaggaggugacuguagggaggguuggauaccaagggcucacccaacucacuucugagagaaaga

SEQ ID NO: 4124132 - RNA, 97 nt, Human
uuuuugaaacagaauuggucaguagagaggaagaggauuugcaagggguauuuacaagucacuuccuuucuaaauguuggaucucagaauucagaga

SEQ ID NO: 4124133 - RNA, 79 nt, Human
uuuuugaacauuccuaucuaacuccuuaagcucugcguagaccccuugagagcugaagauauguuaacuggaucaaaga

SEQ ID NO: 4124134 - RNA, 76 nt, Human
uuuuugcaagauguauuaguuguccagggcugcaguaacaaaauaccacaaacuugguggauuaguacagcaaaaa

SEQ ID NO: 4124135 - RNA, 60 nt, Human
uuuuugccugagagugaaaauaauggauaauauccauuguaaccacccauuagacagaaa

SEQ ID NO: 4124136 - RNA, 69 nt, Human
uuuuugcuaccuuugaucuggaauuuuaaucuuauuugguuaaauuauuucuagugagguguucaaaga

SEQ ID NO: 4124137 - RNA, 81 nt, Human
uuuuugcuuauugcuuucaagacuguuucaaacaugauuucuuucgguauacuaucuuugacaguagugagaaaacaagag

SEQ ID NO: 4124138 - RNA, 56 nt, Human
uuuuugcuuuuuugucaucuaaagauuaaugaacuucagauggcaaaaugcaaaga

SEQ ID NO: 4124139 - RNA, 75 nt, Human
uuuuuggcaaaguaaucugauuuuauagcuaucucuuuaaaugagaaggcuucuuuuucagauuucuuccaagaa

SEQ ID NO: 4124140 - RNA, 61 nt, Human
uuuuuggcaaauaaccauuuucuuacagguuuuuaaucuaaagaugguuaugugcuaaaga

SEQ ID NO: 4124141 - RNA, 57 nt, Human
uuuuugguacaugcaauagcaauuauuauuuguguaaugcuugucuugugccaagaa

SEQ ID NO: 4124142 - RNA, 60 nt, Human
uuuuugguaucucguaauuagauguuuuauugugagacauugauacugagauacaaagaa

SEQ ID NO: 4124143 - RNA, 74 nt, Human
uuuuuguaguguugauagauguugcuuguguuuaucuauuugaaaugccacuaaaucugugaauacaauggaaa

SEQ ID NO: 4124144 - RNA, 76 nt, Human
uuuuugugaaaggcuaugaguuugguauaauacucuaaugagauaaguguauaaaaacauagcuaucauacaaaaa

SEQ ID NO: 4124145 - RNA, 91 nt, Human
uuuuuguguuuggaaagucuacauaucuacauguguuucuguauguguauacagauacagaucuagauacaugcuuucauagacaagaaaa

SEQ ID NO: 4124146 - RNA, 64 nt, Human
uuuuuguucuguuugaauauagcuauacaauuucugauaaguggcuauauuuguugaauaaaaa

SEQ ID NO: 4124147 - RNA, 66 nt, Human
uuuuuguugauuacuguguugcugacauuaguuauggaagcacuuuaagcaacagaucaacagaaa

SEQ ID NO: 4124148 - RNA, 71 nt, Human
uuuuuguuuguuugguugguugguuguuuuuuaaggaauaauaauaacuggcacauaucacauaucaagaa

SEQ ID NO: 4124149 - RNA, 90 nt, Human
uuuuuuaaucugugaaagagcuuugcauuauucagaagcaaaauauuaauguuguuauuaauggggcacaggcaaucauaguagagaaaa

SEQ ID NO: 4124150 - RNA, 72 nt, Human
uuuuuuaccuaguuuuuaucuuuuguuucucacagcacuuuuuaaaggaaucuuuggcagcuagguaaagaa

SEQ ID NO: 4124151 - RNA, 83 nt, Human
uuuuuucaaauaugauuguccuuagcaaauuauauuuuauuuuaacaguggcaauuugagggcacaauuuugcuuugaaagaa

SEQ ID NO: 4124152 - RNA, 129 nt, Human
uuuuuuccugccaauuuuaguuuuuaucuuugugcuguauuuaauuguaucaucacaggccacauuaaaucauuucuggaagaucaguuuuaaauaaauagaugaauaaaaaaauagcaguuaaaaaaa

SEQ ID NO: 4124153 - RNA, 113 nt, Human
uuuuuucucuuuccauuucaguggcuucauuucugccagaauuuaacauugacagggugauguugccucuuuucuggggggaaaaagaagcucucuguugucaagaaaaaaaa

SEQ ID NO: 4124154 - RNA, 57 nt, Human
uuuuuucuguuacaguuagaaugaggaaacuuauguugcugccuguuauggagagaa

SEQ ID NO: 4124155 - RNA, 73 nt, Human
uuuuuucuguucacuggauuguauguaugaugacuggagcuucugcagccagaauacaaucaugaggaaaaag

SEQ ID NO: 4124156 - RNA, 97 nt, Human
uuuuuugaaacaggacaggguacaaauaaauagaaaaacacagcucuaaaagguuagauguuuugauauuugcugaaccuugugcugauguaagaaa

SEQ ID NO: 4124157 - RNA, 90 nt, Human
uuuuuugcgagauagaaauucuugauagagagcuuccagacugcugguggcagggaagaaaucugguuaagagauucagaaagcagaaaa

SEQ ID NO: 4124158 - RNA, 63 nt, Human
uuuuuugcucacaucaagguuuuucaggagcuccucagaaauaaugaaugauggggcagagaa

SEQ ID NO: 4124159 - RNA, 87 nt, Human
uuuuuuguuuucucugauaguuucauuggacugaggugguagcuaauaucauccuguauccucagaccaugaaaagaacauaaggaa

SEQ ID NO: 4124160 - RNA, 64 nt, Human
uuuuuuuaaacagacuucugcgucugguauagaaugcuaauaucuagaaguuuguuuaaaagaa

SEQ ID NO: 4124161 - RNA, 89 nt, Human
uuuuuuuguucuuucuaaacaucauaggcaugcaugauuuguauagcaaaaaucaaaaugcuccagugauggugaugagaauuuggaag

SEQ ID NO: 4124162 - RNA, 104 nt, Human
uuuuuuuuaaagccacauguaggcugaauucauuuaauuugacagaauaacacuccuuacugcuaauccugaucaauuuuagcuuugugugucuuuggguugga

SEQ ID NO: 4124163 - RNA, 108 nt, Human
uuuuuuuugcgggggggggcaggggucaauacacauauuauuauuguauuauauguauuuauaugcauaauguauguauugacuauugacucccccuuccaaaaaaaa

SEQ ID NO: 4124164 - RNA, 68 nt, Human
uuuuuuuugguuuguuuaccaacuagauuuugcucugguuaagaccgcaugguacaaaccaagagaga

SEQ ID NO: 4124165 - RNA, 63 nt, Human
cgucuccuguguucgagccauuccccugccucagccuccagaguagcugggacuacaggugcg

SEQ ID NO: 4124166 - RNA, 81 nt, Human
cgucugcaagcugcccugugccagacuuccuggaacucuuaggauggaggcccaggguggggaugggggaggaugcagccg

SEQ ID NO: 4124167 - RNA, 107 nt, Human
cgucugcaguccugagcuuggcaggcagggagaguucaggcauggccacauucacacucucacucccugaccugacaaagccucagugucuccagugcugcaccacg

SEQ ID NO: 4124168 - RNA, 57 nt, Human
cgucuucuaaguaucaaagcagagauucacuuuucauuucuggguauuuggaagaug

SEQ ID NO: 4124169 - RNA, 79 nt, Human
cgucuuucauuguucuauucauaaacaguugggauguuucuacauuuuggcuauuguaaauagugcugcuaugaagaug

SEQ ID NO: 4124170 - RNA, 73 nt, Human
cgucuuugugaagugguuugaaauuuccugcuauguuuagguacaggggaagagcccuuuacauggaaggacg

SEQ ID NO: 4124171 - RNA, 72 nt, Human
cgugaacauaaaguacugagagacucuugccagaaaccaauggggcaaagaucuuauuuagcuuuaaucaug

SEQ ID NO: 4124172 - RNA, 70 nt, Human
cgugaaucccacagguggagcuugcagugagcuggauuggcuacugcacuccaaccugggugacagagcg

SEQ ID NO: 4124173 - RNA, 83 nt, Human
cgugacuuccaaaguugcugcaucagggcaaguuuaugugacacaggcauacacuggcccuugauugcaucagccaagacacg

SEQ ID NO: 4124174 - RNA, 69 nt, Human
cgugacuuccagagcuaggucggagaggcauugcggcuucuuccuugguuuccuggauagguaguugcg

SEQ ID NO: 4124175 - RNA, 74 nt, Human
cgugauagggcagguguggugaccagagaugggugaccaggcucgcaugcccugcaccacugccgugauucacg

SEQ ID NO: 4124176 - RNA, 66 nt, Human
cgugauucuuugugcagccauuuucugccaaugcucuucuugggugcagcagugucugcagucaug

SEQ ID NO: 4124177 - RNA, 94 nt, Human
cgugccaaacacuguuuuuguugguggaauugaugcuaggguauuguauuuguaccucauuuuuaccuuaacauacaucaugaacaaugggaug

SEQ ID NO: 4124178 - RNA, 60 nt, Human
cgugccgggcgucucccaggcucagggucuugcucagggccaggcugauggccuggcaug

SEQ ID NO: 4124179 - RNA, 63 nt, Human
cgugccuaggcuuggcacggaggcaaaugggaagaagaguggcuguggacaggcuggggcaug

SEQ ID NO: 4124180 - RNA, 124 nt, Human
cgugccucagcccgggacaaggggggaggcggcggccgagcccggagaggagcucuucaggcaggagcccagccugggcucggaggagcagcuggagcuuccgcuuucccgggaaacgggcucg

SEQ ID NO: 4124181 - RNA, 66 nt, Human
cgugccuuguuaggugauaaagauacccuugcuggaaagcagcuuuguuuacucccugcaagcacg

SEQ ID NO: 4124182 - RNA, 61 nt, Human
cgugcucacgucacuccagccgcacuggccuccuugccauugguggagugugcugagcaug

SEQ ID NO: 4124183 - RNA, 102 nt, Human
cgugcuuuuuuuggucuucuaguuuucccacaacagaucuguauuaaacaucaaauuuaguuuagagaauuggggaugauuaauuagcccagcagacuuaug

SEQ ID NO: 4124184 - RNA, 60 nt, Human
cguggagaugcaauguagaaucuggccgcuggccggaucuucucuacuuccauccucccg

SEQ ID NO: 4124185 - RNA, 59 nt, Human
cguggccacaguggagcugagcaugaccagcaguugcugcagcaucuccuugugccaug

SEQ ID NO: 4124186 - RNA, 80 nt, Human
cguggccaucacgccacaguuucccggaggggccauccacagucuucuggguggcagugauggcguggacuauggucaug

SEQ ID NO: 4124187 - RNA, 129 nt, Human
cguggcgggugggcaggcggcccgggcgaggggcucgcagccugggcgucagcguggucauggccgucguggcuuccgccgcgggccucggcgcagagauccuagggccgcggcgcccuuccggucccg

SEQ ID NO: 4124188 - RNA, 55 nt, Human
cguggcucacgccuguaaucgcagcacuuugggaggccgaggcaggcggaucacg

SEQ ID NO: 4124189 - RNA, 76 nt, Human
cgugggcaguagaagccagaugguccauuuuuaugacauuuuacaaguugugucagugccauuugucuugccuaug

SEQ ID NO: 4124190 - RNA, 56 nt, Human
cgugggugcagcugggaacggggaaaacccagccugaaguccagcccugcccgacg

SEQ ID NO: 4124191 - RNA, 59 nt, Human
cgugguaugagaguguguguuugcauucauaugugcccacacaagcacucguacauacg

SEQ ID NO: 4124192 - RNA, 62 nt, Human
cgugguccuuggugcugcucccacagguucacaagacugugguugcagugccaaguaucacg

SEQ ID NO: 4124193 - RNA, 66 nt, Human
cguggugguggagcgggcccaggccgagccguucugcuugcccuggugcagguuccacaggcugcg

SEQ ID NO: 4124194 - RNA, 64 nt, Human
cgugucuucggccuuucccucgcuguaauuugaauauuuaggcuguagguuggugcuggacacg

SEQ ID NO: 4124195 - RNA, 61 nt, Human
cguguggucccggcaaggcaaggcgggcaagacgcacaaguucucugccggcaccuacccg

SEQ ID NO: 4124196 - RNA, 82 nt, Human
cguguguauucaaagguccaguuugaauuacugugaggccaguggcuagaaagcaguguaguugggacuggagauucacaug

SEQ ID NO: 4124197 - RNA, 68 nt, Human
cgugugugccaaaucccauaauaaauccuguuauaugagaggauuuauuaugggauuuggcucauaug

SEQ ID NO: 4124198 - RNA, 73 nt, Human
cgugugugccugcuuguguggaugcagcgugggucucugcacggacccugcguguauccacacugcauauaug

SEQ ID NO: 4124199 - RNA, 72 nt, Human
cguguugcugugugcacguccagccuauugcuucugaccacagcauggacucuaugaugcgccagcaacacg

SEQ ID NO: 4124200 - RNA, 69 nt, Human
cguuauuuuuaaguagccuuauugaggcaugauucauaugccauaaaagccaccuauuuaaaguauacg

SEQ ID NO: 4124201 - RNA, 70 nt, Human
cguucuggccgcgccacccuugccccagccgccgagcggcugccugggcaggaggcgcugagccggccug

SEQ ID NO: 4124202 - RNA, 58 nt, Human
cguugcagaagccuguuguuccugcucuucagauaggauuucacagucuaucugcccg

SEQ ID NO: 4124203 - RNA, 56 nt, Human
cguugucuauuuauucuacugugcuuaacaugguaacaggcaaauuuuagacaaug

SEQ ID NO: 4124204 - RNA, 57 nt, Human
cguuuaaaaccaaagaaagccucugcccuggcaagguguaugcucugguucuaaaug

SEQ ID NO: 4124205 - RNA, 74 nt, Human
cguuugaaauauucagggcaaugacccugcaaggccaguaagaacuggccuguguccuccuugcccugcagacg

SEQ ID NO: 4124206 - RNA, 80 nt, Human
cguuuguugugugagugaagcuuuagcugaggaaaacuacuaauguuauguccagccccuuuuacucauucauauaaaug

SEQ ID NO: 4124207 - RNA, 76 nt, Human
cguuuucaaguagucacacaugauauccagagauuuagauucugccuuuggcauaugcaguagacauuugaaaagg

SEQ ID NO: 4124208 - RNA, 88 nt, Human
cguuuucuucugggucccuuugcuguugaugaugugauacagacaguugcuguggacgucauuaaagcaguggacaagaagccugcag

SEQ ID NO: 4124209 - RNA, 61 nt, Human
cguuuuuguagcuguagacaguguuugcuguuggagcaagcacuuguaucuuacuaaaaug

SEQ ID NO: 4124210 - RNA, 129 nt, Human
cuaaaauucuuuauuccauauuaugugucugagggcugaaacauaauccuucuggaggcaaaauucaggacuuguuauuuuuacgcugcuagguauuuuuaaacauauaaaauggaaaggaauauuuag

SEQ ID NO: 4124211 - RNA, 59 nt, Human
cccuuccgccaauccuaugaagucggacagcuaccugauuuuacagaugaggggaaggg

SEQ ID NO: 4124212 - RNA, 77 nt, Human
cccuuccugaggugcugagcacagugagugcaccauccaaccagaagcaacagcuguggaaagagccuuuggagggg

SEQ ID NO: 4124213 - RNA, 75 nt, Human
cccuuccugcugggucuaacucugguuuuuaggguaaguaccaggggaacaaggccuaaugagcaggugucaggg

SEQ ID NO: 4124214 - RNA, 67 nt, Human
cccuucuaguccauucuucacacccucugcucuuuauacagaggauggaagacaggcauggaagugg

SEQ ID NO: 4124215 - RNA, 59 nt, Human
cccuucucuccuccacugcguuuggggccauuuguuuuaaaaguggagagagaagcugg

SEQ ID NO: 4124216 - RNA, 68 nt, Human
cccuucugacugcccuuguccuggcacaccuccguagguuugccauguuuaaguggcaauuagaaggg

SEQ ID NO: 4124217 - RNA, 57 nt, Human
cccuucuguaaaugcugacuggcugucacugauggcaagauggagaagcagcaaggg

SEQ ID NO: 4124218 - RNA, 99 nt, Human
cccuugacagggacaauuucugggagggacucagccuuuagcaaccaguauccaaccuuccuggcagcuggaagaaugagugccucguuccuggaaggg

SEQ ID NO: 4124219 - RNA, 86 nt, Human
cccuugcagguuuuuuccuaaggcucauuuuaaaauguuacaucuugaguucauccuggguaagaggagaaccuuuuaggcagggg

SEQ ID NO: 4124220 - RNA, 69 nt, Human
cccuugccgauugccaccucuuuaaacgcuguuccuucacuuagcaggugggaucaagcuggcaagagg

SEQ ID NO: 4124221 - RNA, 55 nt, Human
cccuugcuccaccgcaucccgggcaggaggagcccuggagcaucaggaggaaggg

SEQ ID NO: 4124222 - RNA, 61 nt, Human
cccuugcuuagacgucaaguacagcccucagcacuggauagaggcuggcgcugggcggggg

SEQ ID NO: 4124223 - RNA, 122 nt, Human
cccuuggccacuugcuuccuucaaaagccccaaggccccgcuguguccugggggacuucagguucgcagaagcagccuggauccuaggcucagcugggcucccucugcagcaagaaccuggg

SEQ ID NO: 4124224 - RNA, 64 nt, Human
cccuuguuugcagaauggcacccccacccacaacucuggcuguccagcuuucuguagaaaaggg

SEQ ID NO: 4124225 - RNA, 61 nt, Human
cccuuuaaggaaaggaaggaugagaaguauguggcacuuucuguuuuugcuccauaaaggg

SEQ ID NO: 4124226 - RNA, 63 nt, Human
cccuuuaaggucugauuuucagcagggcagagagacuucuuuugaaaguuaggauuuagcugg

SEQ ID NO: 4124227 - RNA, 72 nt, Human
cccuuuaugguaagggguuggucucuucauaaaacuuggaguauccacaauaaagcccuuugcuaugacugg

SEQ ID NO: 4124228 - RNA, 77 nt, Human
cccuuucauccaccaccagcagcagcagguguucuaggcaaagggauauuuacugcuguggugaagggauggagugg

SEQ ID NO: 4124229 - RNA, 94 nt, Human
cccuuugccgcugccgggagggcggugagguguccugugagcccuccagcugcggcccgcaugagaccugccggccauccgguggcagcuuggg

SEQ ID NO: 4124230 - RNA, 68 nt, Human
cccuuuggaagaggcucacugagguaaauauuaaggucacuaggucucaggagcagcuguaggaaggg

SEQ ID NO: 4124231 - RNA, 74 nt, Human
cccuuuggucaacguauguaguugugaagucaugaaauugugaagucaugaaaucugaguauguuuccacuggg

SEQ ID NO: 4124232 - RNA, 66 nt, Human
cccuuuucagucccuauucacaauaaauacagaggcaaauuuaugugacagggucauugaaaaggg

SEQ ID NO: 4124233 - RNA, 60 nt, Human
cccuuuuguucuuuccgaacugcagccagcgauggcugcaguucacaggagcaagcaggg

SEQ ID NO: 4124234 - RNA, 61 nt, Human
ccgaaacaucuggaggccccguuuguccgugggauaagaaugggcuugagcauggcugugg

SEQ ID NO: 4124235 - RNA, 103 nt, Human
ccgaaucugaucugcucacaaggugcgcagaagucaggugugggauaucauggggaggguguccuggccuagaguuuguguuccuuuucagcaucuuacuagg

SEQ ID NO: 4124236 - RNA, 82 nt, Human
ccgacaauucagugugcugucccccgugucugggcuggcuuggugggcugggaauggcgggggaaugggacacuuauuuugg

SEQ ID NO: 4124237 - RNA, 67 nt, Human
ccgagaugaguugcauccaucggcucccgauuaccaagaaucaagaggcgauggauggaaaccuugg

SEQ ID NO: 4124238 - RNA, 59 nt, Human
ccgagcuggccacgcugagcccugugcccucuccagggcuggugcccuuggccagucgg

SEQ ID NO: 4124239 - RNA, 55 nt, Human
ccgaggaguagggugucuacggggcgggcccguguagaccagcugugcuccucgg

SEQ ID NO: 4124240 - RNA, 64 nt, Human
ccgaggcaagcuugaaauuggcucuuccgagaugaaaaaggagaggcaggaguggcuugcccgg

SEQ ID NO: 4124241 - RNA, 58 nt, Human
cuaauguacaguuucuagacucaaauuaagaaauaugggucuggaaaauggcuuguag

SEQ ID NO: 4124242 - RNA, 60 nt, Human
cuaaugucgcugaauagggggaugucaugaugaaauucuggccuaucacagugauucuag

SEQ ID NO: 4124243 - RNA, 90 nt, Human
cuaauuagacucacuucuuuuacuauaaaaccuuaagagaauauuuugaucaagagaguuuuuuagugaaaucuagagggacaagauuag

SEQ ID NO: 4124244 - RNA, 71 nt, Human
cuaauuaguuggcuaugcaaggaacguacccgagccgcccggguagacaacuuuguaauagcccugaagag

SEQ ID NO: 4124245 - RNA, 93 nt, Human
cuacaaaauccuuuuauuauaguguguuagugacauaggcuuuuccaugacagccuggaguugaaacuauuauucaauagaaacaauuugugg

SEQ ID NO: 4124246 - RNA, 67 nt, Human
cuacaagccaaugagagaggccucagaagaaaucaauucugcugacaccuugaucuuggaauuguag

SEQ ID NO: 4124247 - RNA, 78 nt, Human
cuacaaggaacacuacaaggcugggagauaauuggagaaguuuuguuuuguuuuccggaucuugaugguuuccugugg

SEQ ID NO: 4124248 - RNA, 68 nt, Human
cuacacuuugguugacuuugugauaucuacuuauaauauaucaucacaacaguuauaacuagguguag

SEQ ID NO: 4124249 - RNA, 81 nt, Human
cuacagaaccucucugagcaccaguguauucgccuguaaaguaagggugaguaacacaguaugcuuacagggcaguugugg

SEQ ID NO: 4124250 - RNA, 57 nt, Human
cuacagaguaucuaaagagguaaaggcuagaagugagacuuugaaagauaccugugg

SEQ ID NO: 4124251 - RNA, 71 nt, Human
cuacagauuuggggaguaaaguuaacuggcucuaaaauuuuaaauggguuaauuuagucaacagacugugg

SEQ ID NO: 4124252 - RNA, 87 nt, Human
cuacagccacaucuggggacaagaugauuuuugauccuacuaugagcaggaagaaaaagaagucauuuauguuagaugagggugggg

SEQ ID NO: 4124253 - RNA, 72 nt, Human
cuacagcucccagaaggcccugcgccaagaguacacggcgggccgcggcgcguggccugcugggaguuguag

SEQ ID NO: 4124254 - RNA, 74 nt, Human
cuacaggcuucagauuucucaguuguuuccucaggcaaacaauaaaucuucugagcauugaucuaagccuuugg

SEQ ID NO: 4124255 - RNA, 65 nt, Human
cuacaguaugaaaccuuuacucucuauacuaugcaugauauaauggaugagggguucguauguag

SEQ ID NO: 4124256 - RNA, 77 nt, Human
cuacagucuugcucccagagaccaagcugagaaugucuaaauuugaucaggugggguuggggugaggcucuaaguag

SEQ ID NO: 4124257 - RNA, 68 nt, Human
cuacagugauuucucugguuaauagaugcaugcauuuccaugcauuauacuuuuagaaauuucuguag

SEQ ID NO: 4124258 - RNA, 69 nt, Human
cuacaucaaguaaucuucaaaaagugcugaaauuggacagugcuggcuugaucauuucuuggacugugg

SEQ ID NO: 4124259 - RNA, 55 nt, Human
cuaccaagccccaaauaaugaggggugagaggcucacuguucaagggccuggugg

SEQ ID NO: 4124260 - RNA, 120 nt, Human
cuaccagugcugcuuagauuggcaaaugcccaugcaguuugaagagggcaggcggaugacuggaugccugccaggaagugugugggccugaugccacugcuggacuccauagccugguag

SEQ ID NO: 4124261 - RNA, 69 nt, Human
cuaccaguucuggcuuuacuucccauccagcagcacacuggauauugaagaaagucagugaaauguuag

SEQ ID NO: 4124262 - RNA, 59 nt, Human
cuaccauagcaguaaugauuuaggauauauuaaugucauuuugucucacugcuauguag

SEQ ID NO: 4124263 - RNA, 77 nt, Human
cuaccccaacgcugaggaggcugagagagcuaaggcugagacuccccaguucucuuccacagccuccucacauguag

SEQ ID NO: 4124264 - RNA, 101 nt, Human
cuacccccuuccucaaaacacuuuccugccaucuauugggaacuuguaguaacuacacauaucuaagauagaugacaaugaaauugaggaguagggggugg

SEQ ID NO: 4124265 - RNA, 57 nt, Human
cuaccccuuccuagcuauagucaguaaauggagccccuaagcaaggagcagggguag

SEQ ID NO: 4124266 - RNA, 122 nt, Human
ccuggcuaacuuuuuaaauuguuuguagagauggggucuugcuaugauucccaggcuggucuugaauuccugggcucaaguaauacucccaucuuggccucccaaagugcugaguuuacagg

SEQ ID NO: 4124267 - RNA, 79 nt, Human
ccuggcuaauuccaaguagcaucccaucacagcaggcaugaacaccugaaugguaccugcuacuggcagauuuccuagg

SEQ ID NO: 4124268 - RNA, 73 nt, Human
ccuggcuccacaggcauguuacauuguuccaggagcauccguagggaacaguaacugucugcuguguuccagg

SEQ ID NO: 4124269 - RNA, 58 nt, Human
ccuggcuccugcacagaucuuuagugccacacagagauggcugauggcaggagccagg

SEQ ID NO: 4124270 - RNA, 57 nt, Human
ccuggcucuucugugucagcccugcauccuggguugaaugcuguucuuggagcuagg

SEQ ID NO: 4124271 - RNA, 58 nt, Human
ccuggcuggggccuagcaccagaaggcaggcgcucuucucaggagcccccaggucagg

SEQ ID NO: 4124272 - RNA, 59 nt, Human
ccuggcuuccaccauggccccugcuucagacaacgggaagcagaggccagaagcacagg

SEQ ID NO: 4124273 - RNA, 75 nt, Human
ccugggaagucuugaagagcacuguaaauuugaaggucuuuggaaaauuuuagucuuggaacaagacaguccagg

SEQ ID NO: 4124274 - RNA, 73 nt, Human
ccugggacaggguggcugauagggcucugugcugugauggggaugggccccguccaccugcucugcucccagg

SEQ ID NO: 4124275 - RNA, 97 nt, Human
ccugggacauggugugugcgcuucuuccugagccagguugagguugggaccacugauccauuggaagccuggugagggguacagccaguucuccggg

SEQ ID NO: 4124276 - RNA, 89 nt, Human
ccugggacgcugacuccaagguggcccugaugucaugugcuccauggagccuaggggguccugggccaccccgagaguguugccccagg

SEQ ID NO: 4124277 - RNA, 116 nt, Human
ccugggacucagagcaucugcuaugcugucccugcccuucaccccaauacaaacaccuacguaugguaggggagguggcaggagaaggggcuuggcugggaggcuggguugccagg

SEQ ID NO: 4124278 - RNA, 61 nt, Human
ccugggacucucacauugcucacuuagcuggagcaacaggugagaaaacgaggguugcagg

SEQ ID NO: 4124279 - RNA, 125 nt, Human
ccugggagccuguggcuacugauccuauugccucggucaucagcccuccuguuuuccuaggugacauagagggcuuguaggguggcuguagggugguggaaaaagaagcagaacugaauuccagg

SEQ ID NO: 4124280 - RNA, 107 nt, Human
ccugggagcugauuuaaaaugcagauuuuuggcuuuauccccaaguuacugguucaguagcuguugggagagggcuagaaauugcguuuuuaauaagagccccuagg

SEQ ID NO: 4124281 - RNA, 85 nt, Human
ccugggagcuuguuaacagugcagaaucucaggcccuacccggaccuacagaaucagagucugcauuguaacaagauucuucagg

SEQ ID NO: 4124282 - RNA, 74 nt, Human
ccugggauaguggcugguaggaauguguggauuacaaaugaagcuacacaagucccuccauacucucuugcagg

SEQ ID NO: 4124283 - RNA, 68 nt, Human
ccugggaucuggauccuauggaggggacaccugguccacacucagugcuuuggauccuggauuccugg

SEQ ID NO: 4124284 - RNA, 57 nt, Human
ccugggaugagaacccagaauuggggcucugaucuccauucaccaaaucaucccagg

SEQ ID NO: 4124285 - RNA, 65 nt, Human
ccugggcaaaggagucaggguagccuguaaauccucaggcacccaggcacuuuccuuucuucagg

SEQ ID NO: 4124286 - RNA, 59 nt, Human
ccugggcauaaaucacuccaagcguaaauuucccauguuuuggagaucacguguccagg

SEQ ID NO: 4124287 - RNA, 55 nt, Human
ccugggcccccuuaggccaaugcauggccacccuccaggccucugggggcccugg

SEQ ID NO: 4124288 - RNA, 66 nt, Human
ccugggccucucagcucccgcggguccuucuucgacccgcagaaagacccugagaacggcgccggg

SEQ ID NO: 4124289 - RNA, 80 nt, Human
ccugggccuggaaauagguacugcauugcuucugcuguauuguauuggccaaagcaguuacgggccuaucuagguucugg

SEQ ID NO: 4124290 - RNA, 67 nt, Human
ccugggcugcuuuaaaacugauacaugaagcagaaaguucacaguuuuccuuaaagcagaaaucagg

SEQ ID NO: 4124291 - RNA, 92 nt, Human
ccuggggaagcggauggagcaaauggggcugcaggagucccaggagucccaggagcuucugugccucaucugguucaggauuuucuuccagg

SEQ ID NO: 4124292 - RNA, 78 nt, Human
ccuggggagaaagagguuucccaaccaggccugucacaguaagcagccaaggacacggagccuccugucucucucagg

SEQ ID NO: 4124293 - RNA, 85 nt, Human
ccuggggaucugaaucaagugcuucaacuaguguggucccauagaccaggacuucaaaagcugacauucauuccaaucaccuagg

SEQ ID NO: 4124294 - RNA, 80 nt, Human
ccuggggaucuuguuaaaaugcagauucugauuucauaugucugggauggggcauucugcauuuuuaacaaguucccagg

SEQ ID NO: 4124295 - RNA, 79 nt, Human
ccuggggccaguuccucucagaguuacaggauguauccuuaaucauggcuugugggaggcagaaguuacugcccccggg

SEQ ID NO: 4124296 - RNA, 84 nt, Human
ccugggggcugggugaaaugcaggcuuggauucagcaggacugggguagggccugagagucugcauuucuaaucagcucccagg

SEQ ID NO: 4124297 - RNA, 127 nt, Human
ccuggguauccauggcuuacccaaaacaccuuaaauacugagucugaagcuaaugauuuauuuucugucuuggacagaauuggcacaggcagugcaguaggguauggggagguuagggaagcguggg

SEQ ID NO: 4124298 - RNA, 55 nt, Human
ccugggucuauagacuucaagacugagccagaaugaagcaagucuauugcccugg

SEQ ID NO: 4124299 - RNA, 61 nt, Human
ccugggucucuguccuugcucuaccaaugacaggaagaaauagacaugguagugauucagg

SEQ ID NO: 4124300 - RNA, 77 nt, Human
ccugggucuucuacuguguugagcuguugcugggguguccccagugucuguugcuuuugcaguggacaguacccagg

SEQ ID NO: 4124301 - RNA, 65 nt, Human
ccuggguuaggaguaauuuguuacagcaagaugauacuugagugacaggcugcuucuggcugagg

SEQ ID NO: 4124302 - RNA, 56 nt, Human
ccuggguuggagagcaauggugugaucucagcucacuguagccuccaccucccagg

SEQ ID NO: 4124303 - RNA, 83 nt, Human
ccugguccaggccccauucacauaaucugcagcaagcgugugaggaaugugcaugagagugugaagguuucuggaguaccagg

SEQ ID NO: 4124304 - RNA, 90 nt, Human
ccuggucuauaaaggcaugaaaugcugagaggugcuucuuagcuauuuuuuguggggcacuuuuaaguauuuaaagagcuuuuccccagg

SEQ ID NO: 4124305 - RNA, 86 nt, Human
ccuggucuccccugacccuuccacggggcuccccgcucuucugcccccagaagccagcagacagcccugcggacgaggaggccagg

SEQ ID NO: 4124306 - RNA, 60 nt, Human
ccuggugagcugggugcacggcagaugccauagucacagcagugccccagcuacaaaagg

SEQ ID NO: 4124307 - RNA, 82 nt, Human
ccuggugcgccuggcccguggcgggucccuggaggacgaggacaccccggagcccaggguaccccaagggcaggugugcagg

SEQ ID NO: 4124308 - RNA, 68 nt, Human
ccugguguugggagguguuccaguguugguaugggaaucauucgauggcgccagcaccgcccaguagg

SEQ ID NO: 4124309 - RNA, 73 nt, Human
ccuguaacacaugagucacuugauuaaagaaauacucaaauaucaaguuugugauucucucugugugggcagg

SEQ ID NO: 4124310 - RNA, 78 nt, Human
ccuguaagauugagcugcagacauagauaagcgagcuggaagcuugcaugaauaaaugccugcagcucugcuaauagg

SEQ ID NO: 4124311 - RNA, 85 nt, Human
ccuguagcuucaggaaauaucuccuggcagaggugacgcaucuuuugucaacucaccaguaaauauacccaugaaagccuacagg

SEQ ID NO: 4124312 - RNA, 57 nt, Human
ccuguaguaccucagaaguaccuuuuguaaaagguauugcacaaagagaugcacagg

SEQ ID NO: 4124313 - RNA, 106 nt, Human
ccuguagucacugaaauagagacauuguauacuuguguguuuuuacaagugcaauaggauuucacauacaagugauauaauuguuucaaacuauaguaguuagagg

SEQ ID NO: 4124314 - RNA, 88 nt, Human
cuagugugugcugcucuucuucccucauaaaagguaacuucuuuugcugcuuuuuauucauagggauggagagaaaccuauucacuag

SEQ ID NO: 4124315 - RNA, 93 nt, Human
cuaguuauucgguuggugccaaaguaauugugguuuuuguuauuaaaaguaauggcaaaaugagcaauuacuuuugcaccaccuaauagaugg

SEQ ID NO: 4124316 - RNA, 56 nt, Human
cuaguucacaagugcauuucaggaggggcuucaugaaaguguaucuugugggaaag

SEQ ID NO: 4124317 - RNA, 60 nt, Human
cuaguucacucagucucccagggguuaaaggguccguugagacuucuagaagugagauag

SEQ ID NO: 4124318 - RNA, 55 nt, Human
cuaguucuagaucccugaggaaucgccacaccgacuuccacagugguugaacuag

SEQ ID NO: 4124319 - RNA, 55 nt, Human
cuaguucuagaucccugaggaauugccacacagacuuccacagugguugaacuag

SEQ ID NO: 4124320 - RNA, 55 nt, Human
cuaguucuagaucccugaggaauugccacacugacuuccacagugguugaacuag

SEQ ID NO: 4124321 - RNA, 67 nt, Human
cuaguugaaauuaagagagaguuugaugcuaauauguagacaaauauuccuugauuggauuaauuag

SEQ ID NO: 4124322 - RNA, 64 nt, Human
cuaguuugguuagauaagucucccaauugcagugucagcaugcagacuagucuaguccagagag

SEQ ID NO: 4124323 - RNA, 95 nt, Human
cuaguuuuauguuuacucaaacauguauuucuauguagugaagaagagaauacaaguucugggucuauccugcuuagaaguauguaacaugcuag

SEQ ID NO: 4124324 - RNA, 82 nt, Human
cuauaaacacauaacauacauuagcucauaugauuaauauaauccuugacguaaaugcuaacgauguaaagaugugggauag

SEQ ID NO: 4124325 - RNA, 77 nt, Human
cuauaacaugcauuuucuauucacucaguaguuuuuaaaucuguuggguuaauaaaugguagaguguagcugugugg

SEQ ID NO: 4124326 - RNA, 66 nt, Human
cuauaauacugaaaguauuuucaaaucuaggaugaccaggauagaggaauuguucaguguucauag

SEQ ID NO: 4124327 - RNA, 130 nt, Human
cuauaauagcauuauuaucacuuagggcagcugggucaucucugauauuuuaaaugucaagccauuuuggcaauuauaucaccagagaucuggcucaaguaugaccaaagaauugacuguucaucuauag

SEQ ID NO: 4124328 - RNA, 57 nt, Human
cuauacaguaaccacagugauuuggauugacaucaugccugcuggguaacuguaugg

SEQ ID NO: 4124329 - RNA, 55 nt, Human
cuauacucuuucuucagccaagugcucagagguagaggagcugaagugaguauag

SEQ ID NO: 4124330 - RNA, 60 nt, Human
cuauacuuucagggaucauuucuauaguguguuacuagagaaguuucuuugaacguguag

SEQ ID NO: 4124331 - RNA, 60 nt, Human
cuauaguuacaacuguuugaaugucagagcauuugaugagucaagacauuguagcugugg

SEQ ID NO: 4124332 - RNA, 114 nt, Human
cuauauacccagucuuguugcaguuugcugagcggguggagcguuaccuugggaggcccugaucccucccugggcggacauucucccacagccaaacucucaagaaauguaugg

SEQ ID NO: 4124333 - RNA, 72 nt, Human
cuauauugugucuaaaugaaaagagaugccugcuuauuuuuagagguauuucuuauuuuauuuugacauuag

SEQ ID NO: 4124334 - RNA, 86 nt, Human
cuaucacaaucuucuuccuacgcacuuccagaaucuuucuuuuaggaggguuuggcaauauuuguggaacacuaagcaugugguag

SEQ ID NO: 4124335 - RNA, 59 nt, Human
cuaucacaauuccuauaguuugugaggcacauuaaauucaucagcugucauugugauag

SEQ ID NO: 4124336 - RNA, 70 nt, Human
cuaucagccugaugaccuuggcaagucacagaaaccucucugugacucaauguucucaucuguaaaaugg

SEQ ID NO: 4124337 - RNA, 93 nt, Human
cuaucagcuccaaguggcacagagcuuugucccaguuggcacggugcccugggagcuggguacagccugugccuauggccagggagagggugg

SEQ ID NO: 4124338 - RNA, 65 nt, Human
cuaucugaugacaaacuuuccugaugcccguuucuugucugggcauugagaauugacauucauag

SEQ ID NO: 4124339 - RNA, 87 nt, Human
cuaucuuagguauuuuucaguucuacaagagcuuuguaccugauucuaaugcacagcuccugguaagcugggggacccuggguauag

SEQ ID NO: 4124340 - RNA, 129 nt, Human
cuaucuucuacaccugcuccuucauuuuccuuucucuggagggcugagagagauuuacuggucaaaaggaagagcuccucacuucggguucaggaaucuuacugaaggaaaugaaauggucacagaaag

SEQ ID NO: 4124341 - RNA, 66 nt, Human
cuaugacaacacauggugcugaauuugucagauaaguacaauauucggaucauguguauguguuag

SEQ ID NO: 4124342 - RNA, 66 nt, Human
cuaugaccccagcaugaauaaggcucugugugugaaaagugaauggguagcaauguggggucaugg

SEQ ID NO: 4124343 - RNA, 85 nt, Human
cuaugcaugcccuggaaagagaaugaaugagcccuuuuuaauuuaucaacugguuuucuuccaucucuuuacuagugagccaugg

SEQ ID NO: 4124344 - RNA, 76 nt, Human
cuaugccuacagguaaacauacugcugucuucuuggaagaccgagaaguauaaagaauguuuaugugcaggucuag

SEQ ID NO: 4124345 - RNA, 85 nt, Human
cuaugggagugggagcgagggucugaguggaaugguagcaugauuuaauuuuacaggauuacccuggcugcuggcuugagaauag

SEQ ID NO: 4124346 - RNA, 105 nt, Human
cuaugggauuauuguuguguacuaggaagagcauaccauggaauuggaauaggaauuccuacucuguacuuucuuguugugugaucuugguuauuuugcccaugg

SEQ ID NO: 4124347 - RNA, 74 nt, Human
cuaugguaagagaaaugcaugcaugucaucaccaaagugagaacugccuguauuuaucuauguuacgcaaaugg

SEQ ID NO: 4124348 - RNA, 73 nt, Human
cuaugugaaauaugaacucacaggaagcugacaguaaagaaagcuaauagugucuagugaguuugaugcauag

SEQ ID NO: 4124349 - RNA, 105 nt, Human
cuaugugacuaaggaagacucaaugcaugagucacucagugcagaauguaccauugauauauuguuucugaguuuucauguauaauucacuuccacagugcaugg

SEQ ID NO: 4124350 - RNA, 57 nt, Human
cuaugugcugggcauuguguuguagggaggcacuuugcauuaagugucugcauaugg

SEQ ID NO: 4124351 - RNA, 71 nt, Human
cuaugugggguggggaagguuacugggccugaaacuccagcauucagagauggccucccacacuuccaugg

SEQ ID NO: 4124352 - RNA, 63 nt, Human
cuauguguccauguguucucaucauuuaguucccacuuauaagugaaagcaugugguauuugg

SEQ ID NO: 4124353 - RNA, 78 nt, Human
cuauguuccaugacuaugcaugaaacaagcugucacuguauuauaaaggcucagcaauucauucauggcauaauauag

SEQ ID NO: 4124354 - RNA, 76 nt, Human
cuauguugcgagaagguucuguauuauuuaaaacugaauuauucuguuccuaaaucuggaggaccucacaacaugg

SEQ ID NO: 4124355 - RNA, 72 nt, Human
cuauuacuguggggggcuuugcucagugggcuaugcaggcuuggggcuggagcugaguucccugggcaaugg

SEQ ID NO: 4124356 - RNA, 83 nt, Human
cuauucagguucucagugcagcaaggaauuuagaccagugcuucucaaauuucaauaugcguauagauuaccugaggaacuag

SEQ ID NO: 4124357 - RNA, 65 nt, Human
cuauucugguuuccggaucucuaaaaguauuucagauuuuaggaagcugauggaacuagagguag

SEQ ID NO: 4124358 - RNA, 70 nt, Human
cuauucugugggucacucuauccugcuuagucaucuggcuugguaguccagguuauccuucuaggaaugg

SEQ ID NO: 4124359 - RNA, 65 nt, Human
cuauugaagugugggaaguagguggcgaggacugaaagaccugucauuuuccaccauuuuuguag

SEQ ID NO: 4124360 - RNA, 91 nt, Human
cuauugcugcacaacucccaacuccuuaggaaagggcugugcaugguaaagucauucacacccaaauucuaacaguagaugucagcacuag

SEQ ID NO: 4124361 - RNA, 71 nt, Human
cuauuguaaaggauaacuuucaagaauuguuuuuaacaauuugaauuguuguuauuuucuguuuacaguag

SEQ ID NO: 4124362 - RNA, 78 nt, Human
cuauugugcccauggucacagagcuuaauuaauugucaaggagacaagaguaagauaccugggacaguuggacaauag

SEQ ID NO: 4124363 - RNA, 81 nt, Human
cuauuuacauaguauucacauuguuuuagguauuauaaauaaccuaaugaugauuuaaaauauaugggaggauguggauag

SEQ ID NO: 4124364 - RNA, 98 nt, Human
cuauuuaguauuuacagagcagcuuuauuaaugauugucuugcagaaagucaaggcaggaaggucuuuuaauaaagcacacaugaaaauaacgggaag

SEQ ID NO: 4124365 - RNA, 74 nt, Human
cuauuucaagucucagaguccuacuuauucccugugacuuuugcauggaagacuugcugaggcugugaauuuag

SEQ ID NO: 4124366 - RNA, 130 nt, Human
cuauuuggugcuacuucuacuccucaugaccaaagcuggcuuucaugguuuacucauguacuuacugaugaaacccugagacuuggggccagugacuguucagagguccaugugaagaugcgcugaaugg

SEQ ID NO: 4124367 - RNA, 57 nt, Human
cuauuuguacagcauuaguaauuuuugcucaaucaaaagacuaugcugaauaaaugg

SEQ ID NO: 4124368 - RNA, 67 nt, Human
cuauuuuuccuucuagagcagauuucaggcagcaaauucagcugggaauucuagugcaggauaauag

SEQ ID NO: 4124369 - RNA, 64 nt, Human
cucaaaacuacuggauuaguaacuuaaccucucugagcuucaguugcagaauccagagaaagag

SEQ ID NO: 4124370 - RNA, 62 nt, Human
cucaaaauuuggggucccauggucauuuuacacagguaaaaauuauggaguaucccaaagag

SEQ ID NO: 4124371 - RNA, 110 nt, Human
cucaaagcucuccccaggccagcgucuaccaaccuuucuaacagguguuuucugagacagcugugcaggagaaggggcuggggaugggggcguguaaaagagagcuugag

SEQ ID NO: 4124372 - RNA, 87 nt, Human
cucaaaguuuguagccucuacaaagucccauugccauggaagggaacauucacaggcuccgggguugugggcaggggcaucuuugag

SEQ ID NO: 4124373 - RNA, 107 nt, Human
cucaaauuaauggaaugauaaacuagugcaaagggcuguugagaaguaggguucccuccccaucuuuuucagaauguccuuuucaugcuauuauuucagaacuugag

SEQ ID NO: 4124374 - RNA, 94 nt, Human
cucaaauuucuggcuggacauggugguucacaucuguuuucccagugcuuugggaggcugaggcaggaggaucacuugaggccagaaguuugag

SEQ ID NO: 4124375 - RNA, 80 nt, Human
cucaacacacaugguagcagguacaagucaaaaucaauuacaaauuugaguuugcugcacuguaguaaagauaaguugag

SEQ ID NO: 4124376 - RNA, 62 nt, Human
cucaacacguccucgagaagcgccuacuaccugucaggccagagccuuugggcguuguuggg

SEQ ID NO: 4124377 - RNA, 63 nt, Human
cucaacagcucugccauacucccauucaguggguccugaaggagaugcuuaagagugguugag

SEQ ID NO: 4124378 - RNA, 69 nt, Human
cucaacaggaggcagggaugcugcuuaggcaguuggcuaaccagaagcaauggcaucuugcuuuucgag

SEQ ID NO: 4124379 - RNA, 64 nt, Human
cucaacagugauucugcaugaggaaagggauccucccaguccuccaugacaucacucaauugag

SEQ ID NO: 4124380 - RNA, 61 nt, Human
cucaaccuugacuuuccuuggggcuucagaucuggaagaggcucagugggaacaagcugag

SEQ ID NO: 4124381 - RNA, 55 nt, Human
cucaacugggaacuguuugccuuugaaggaaugucaggcacaguuccuaguuggg

SEQ ID NO: 4124382 - RNA, 99 nt, Human
cucaagaguuuagaaugggaggaaguggcagauaggcaacagauaugacaagaucauucuauguccuuucucccauuccugacccaucucauucuugag

SEQ ID NO: 4124383 - RNA, 65 nt, Human
cucaagaucagcucccgagucugagaucucuucucucaauggcauuggagcuggcugugccugag

SEQ ID NO: 4124384 - RNA, 73 nt, Human
cucaagccucuggggccucaucuguaggaugaaaaucauagcaggucugccagcgcccauggagagguuugag

SEQ ID NO: 4124385 - RNA, 57 nt, Human
cucaagcucuuuaaacuuaugucauuuauuugguauauagguagugaggaguguggg

SEQ ID NO: 4124386 - RNA, 74 nt, Human
cucaagcuggugcagugauugcaguucacuucucuuccaaacaacugguguucugcucugugcacuuguucagg

SEQ ID NO: 4124387 - RNA, 65 nt, Human
cucagugaguugugcugaggaccaccagcuggacauugcaaguguuuucaccagaauucacugag

SEQ ID NO: 4124388 - RNA, 79 nt, Human
cucagugucugguuggcucuacguccaaggccacugccggcugcagagacguggugagggcugaggccagacagcugag

SEQ ID NO: 4124389 - RNA, 69 nt, Human
cucaguguggcuagaagugucuuguugagggcaaagaccaaacacgaggucucuggcuacuaggcugag

SEQ ID NO: 4124390 - RNA, 89 nt, Human
cucaguuaauugugaauugcuuaugccaggugagagagaauuggugucuaccccucucaccugacauaagcaacucugaauuaacuggg

SEQ ID NO: 4124391 - RNA, 105 nt, Human
cucauaaaaauuuaagugaugugauuaagcauuucagaauuugcaaaugaagauuaugaguucauggagauuugggaaagcuugacacauguagaaaccccugag

SEQ ID NO: 4124392 - RNA, 60 nt, Human
cucauagaugucaccuugcuguacccuaacaugguaaaaaaggcaaggcagcucucuggg

SEQ ID NO: 4124393 - RNA, 60 nt, Human
cucaucacuggaucauuagauauuuacauuauaaaaucaucugauguguuuaaugguggg

SEQ ID NO: 4124394 - RNA, 75 nt, Human
cucaucauuuaacaguagucuuaauuucauguacaaaugggcauuuguacauuuggaugugcuuaagugugugag

SEQ ID NO: 4124395 - RNA, 66 nt, Human
cucaucgacuuggcucacaaggacgguugcuacgaagcaguauucuccugugguggaggaaauggg

SEQ ID NO: 4124396 - RNA, 129 nt, Human
cucaucuuugaaugcgguggaucuaagcauguugaccgagaacuauccauggaagagggcagacacccugccuggcacauaguacucuuucaauacaugguagcuauucuuauuagcauagguggugag

SEQ ID NO: 4124397 - RNA, 63 nt, Human
cucaugagccacuggcaaaugaaaugaugaguuauuucaccauguaaaccauguggcugugag

SEQ ID NO: 4124398 - RNA, 79 nt, Human
cucaugagcuugauuuuuauauggcauucagaauauucugaaugauauauugggaauaaucacaccaaguucucaagag

SEQ ID NO: 4124399 - RNA, 82 nt, Human
cucaugaucuuauguauucuucacacuaacccugugagauaugauuagcuucaguguacagugaagggauuaaggaucagag

SEQ ID NO: 4124400 - RNA, 58 nt, Human
cucaugcauucaugguuucuguuucuccaauuugauucaaggagccuugagcagugag

SEQ ID NO: 4124401 - RNA, 58 nt, Human
cucaugccagugccuuagaaaucuaugcucucgugcuuuucuaagugcuugguuuggg

SEQ ID NO: 4124402 - RNA, 60 nt, Human
cucaugccuguaaucccagcucuuggggaugccaaggcugguggauuaugaggucaggag

SEQ ID NO: 4124403 - RNA, 103 nt, Human
cucaugcucuuuguggugugacuucaggaaggcacuugguguguucacucccaccaugggaaacuuggcaaaauacacgagggccuucuacacacaagcugag

SEQ ID NO: 4124404 - RNA, 97 nt, Human
cucaugguucaacucacuuuccuuauggauggggaaacugaagccuagagaggugauguaccuuguccaagaugaacuaguugguuagagccauggg

SEQ ID NO: 4124405 - RNA, 57 nt, Human
cucauguagcucucaggccacacauuuauaugaugguucaguuuugaguagcaugag

SEQ ID NO: 4124406 - RNA, 65 nt, Human
cucauguccagacauuuuauagcagucucacuuuuggugggggugauauagugugcugggaagag

SEQ ID NO: 4124407 - RNA, 85 nt, Human
cucauguguuuauuuaguacauauaaucugcccugguuccaagacauuccuacagaagauauguaguacuuagugcauacaugag

SEQ ID NO: 4124408 - RNA, 129 nt, Human
cucauuacccugcccucucauggacugggcuaacugaaggccaagcucccagagaagcuggacucacugugcgggauuacugaggguguggcugccaggcuacagucacaggaaggccagacuguugag

SEQ ID NO: 4124409 - RNA, 56 nt, Human
cucauucacucuacccuuccuuccucacaaaaccaaggcucuuggagugaaugcag

SEQ ID NO: 4124410 - RNA, 68 nt, Human
cucauucauucccgcagccaccacucagcgcgucccaugugccaggggcugaugguggggaugaagag

SEQ ID NO: 4124411 - RNA, 63 nt, Human
cuaaggaggugugaggacacagugguucacacugaggaaccuggcuuguuucuaccuccuugg

SEQ ID NO: 4124412 - RNA, 83 nt, Human
cuaaggccuugaagaaaaauugcaugucugcuucuccuccucuccgcaagaagaaagcauuagacaggcauucaaguccuuag

SEQ ID NO: 4124413 - RNA, 127 nt, Human
cuaagggagugacaucuaucuuuaauuauauaugggagcuauuuauagaggcugaugccucauuagucuaaccaggaaauaguuauuuguauuuauuagaaaaguguuaaaaaauuaaaauucuugg

SEQ ID NO: 4124414 - RNA, 84 nt, Human
cuaagguacugggcagaaggccaaagauagcacagcugcucugugcucuguuggcuucuuuugucaauugcuaugugaccuuag

SEQ ID NO: 4124415 - RNA, 114 nt, Human
cuaaggugacaucaugccaaggccuccugauggagaggaacauuuucuggaggaaaguuuugaccuuuagaaaggaaucuucauuucaagcaggcuuuuggcuuccagccuuag

SEQ ID NO: 4124416 - RNA, 76 nt, Human
cuaaguacugugaaaggagaaauggaaacuagguuaacuacuuaguguuuugcuaauccuauuaaucgguaugaag

SEQ ID NO: 4124417 - RNA, 91 nt, Human
cuaaguguucucagguaaagcugucaaggcaggaggcugagugaggacacaccagcuuuaccugccuuggggcacuccugggauugauugg

SEQ ID NO: 4124418 - RNA, 70 nt, Human
cuaaguuacuaacauuuggaaggcuuaugaaagugaagcauaguuaugagccagcaauguuuuuauuuag

SEQ ID NO: 4124419 - RNA, 63 nt, Human
cuaauaacaugaacuacuuucugaaaauaaagaagguaaugucuucccaguucuaguuguuag

SEQ ID NO: 4124420 - RNA, 66 nt, Human
cuaauagagcuucggaacucuguugugagcaauuuggaaauucacaucgaguuucggguucauuag

SEQ ID NO: 4124421 - RNA, 63 nt, Human
cuaaucauaccugcaaaguuccuuuugccauguaaggugacaugugaagguuucagggguuag

SEQ ID NO: 4124422 - RNA, 57 nt, Human
cuaaucaucuuucucuuaaagcauuugaaauuggguagaaggagagggagggauugg

SEQ ID NO: 4124423 - RNA, 55 nt, Human
cuaaucauuuuaacuugcaugcagugugagcacuaacuagcaguaaaaugguuag

SEQ ID NO: 4124424 - RNA, 62 nt, Human
cuaaugcuuugggguugguacugucaacucuauuugacauauuggcaaacuggaggcaugag

SEQ ID NO: 4124425 - RNA, 61 nt, Human
cuaaugggccuguuucccuucagggccuugaggggccuggaugguaaaugaggccccuugg

SEQ ID NO: 4124426 - RNA, 59 nt, Human
cuaauguuagacuggccaaguuuucugaaucaaagcuuggaauauauuguuugacauag

SEQ ID NO: 4124427 - RNA, 83 nt, Human
cuaauuguguuugcaauagccuuauuuccaaaugaguuuacauuuugaggaaguaugggcuaggaugucaacacugaauuugg

SEQ ID NO: 4124428 - RNA, 62 nt, Human
cuacaacauaacgggcauucaguaaauauucauuuguaucuagugagcuugcaugugugugg

SEQ ID NO: 4124429 - RNA, 116 nt, Human
cuacaacucagacagcagagccacccucaggaggcugcaacccugaggccccaggggccuguaggucagccuccuuuucuguagcacggggugucugaaugccuggaacauggugg

SEQ ID NO: 4124430 - RNA, 129 nt, Human
cuacaagaucaggcaguuccuggacuguucgaccacugagaaugaccugucccugugugagggcuucaaugaggccccaaagcagugcaaguacaaccauggucugagcucccugccuugaagacguug

SEQ ID NO: 4124431 - RNA, 77 nt, Human
cuacaagccucacagguuaguuguguggauccaugagacacugugugagggacacacaccaccugucagucuuguag

SEQ ID NO: 4124432 - RNA, 101 nt, Human
cuacacaugaggagcugccuuuucuaccagugacaggcccagugggaugcaggaagcagccugcccucgcuguggucaguuaggggguacauuaucuguag

SEQ ID NO: 4124433 - RNA, 91 nt, Human
cuacaccccuuguuuaacuuaaucugcuugaugauuucugcuuuggaguuuggauuucguugaaagcaugauagguuguagcauagugaag

SEQ ID NO: 4124434 - RNA, 74 nt, Human
cuacacuguagcauguaauuaagauguagucauaaaucaggaaaacauuauaucuuguuuaggugcacaggugg

SEQ ID NO: 4124435 - RNA, 63 nt, Human
cuacagaaucuaccucaagccauugcuuaccaaaucuuuguuaauggauuggagacucuguag

SEQ ID NO: 4124436 - RNA, 63 nt, Human
cuacagaguuaguuaaguuagagugacaauguugagauuguagaucuucaucuaauucuguag

SEQ ID NO: 4124437 - RNA, 55 nt, Human
cuacaggaucuaauguaacugaaaaugguuuguuucaaguugcuagaugcuguag

SEQ ID NO: 4124438 - RNA, 78 nt, Human
cuacaggguccacuuggacauugaucuuggaaguuucucuguguccugaaugguaauaaugcaaguggccccugauag

SEQ ID NO: 4124439 - RNA, 98 nt, Human
cuacagguaagcucaaaggagaccaggucagagauggugaaccugccuguacaagccacugccaccauuggccagucuccacagagcuugugcugugg

SEQ ID NO: 4124440 - RNA, 59 nt, Human
cuacauaaauuuaucacagacuacuggcauugagauguacuagucugagugaaauguag

SEQ ID NO: 4124441 - RNA, 73 nt, Human
cuacauaguguuagcugcugauuaaauauguuguuggggcagcagguaggaggggucauaguugaugggugag

SEQ ID NO: 4124442 - RNA, 108 nt, Human
cuacauguugauauuuucugugucucugcacuugcacauaagcuuugugaaacuuuaucaccacagccuaaagcaaugcauggcauaugguaggugcucaauagauag

SEQ ID NO: 4124443 - RNA, 60 nt, Human
cuaccauggcauguaaacuauuucuuggacuugucuugauuagugaaacaugccuaguag

SEQ ID NO: 4124444 - RNA, 57 nt, Human
cuacccaggucuaucaaguugggcucaucucccagggcccagcacaggaccuggcag

SEQ ID NO: 4124445 - RNA, 89 nt, Human
cuacccagucucaguuauucuuuuauagcaauacaaaacagacuaagacagcuggguuucuauagaaguagucaacuguagauuuguag

SEQ ID NO: 4124446 - RNA, 117 nt, Human
cuaccccugcagugccaacucugcagugcccacaucucucaucaggacagcuguagagucauugccugccugucagggggagugggaaaugagcagauugcagacacugggagguag

SEQ ID NO: 4124447 - RNA, 70 nt, Human
cuacccuuuggaggcagcugggcuggugguuugggcuagccaggcuucccaagcagcugcaaaggggugg

SEQ ID NO: 4124448 - RNA, 55 nt, Human
cuaccucacuuuuuccaucccauucucugggaaucagaagaagcuugagaaguag

SEQ ID NO: 4124449 - RNA, 63 nt, Human
cuaccuccagguaacuugagaacaugagaagcccuuuuguuguucucuuuugccuaacuguag

SEQ ID NO: 4124450 - RNA, 65 nt, Human
cuaccugaaaagguuguggugaaaauuaaaugauauaauguauaccaaguacuuauuuagcgugg

SEQ ID NO: 4124451 - RNA, 75 nt, Human
cuaccuuccaagcaccuuguaagaauuaaauuaguuaauauaaguaaaguucuuagaacaaggccuggaacauag

SEQ ID NO: 4124452 - RNA, 61 nt, Human
cuaccuuucugacucuugggauuacggguuaucacuguuucuuugauggaaggaaagggag

SEQ ID NO: 4124453 - RNA, 57 nt, Human
cuacgcuguuugguccaggcauaggagaugagcccuggccgggaagggacagugugg

SEQ ID NO: 4124454 - RNA, 87 nt, Human
cuacuacaugauaacagaagguaauuguugagaauguguacauacauacacauagcauaaagaaugacucuagucuguaguguggag

SEQ ID NO: 4124455 - RNA, 70 nt, Human
cuacuagaaagccauuacaaaauuucauaugggaaaugauguuugucugaaguaagguuaguggcaguag

SEQ ID NO: 4124456 - RNA, 62 nt, Human
cuacuccugccacacagaugcugucuuguccccaagauggucccuacauguggcaugauuag

SEQ ID NO: 4124457 - RNA, 69 nt, Human
cuacugcuuugacagggaugacaugagccaucacaucggauccucacugccacuauugcaaagcugugg

SEQ ID NO: 4124458 - RNA, 70 nt, Human
cuacuuaugaccacgugacuugcuuuuuucaauagaaugugaaucagaagugauguguguuauuuaauag

SEQ ID NO: 4124459 - RNA, 68 nt, Human
cuacuugagccauuuugguaaugauaacaauuugauaaaauuaaagucauaagaguggauccgaguag

SEQ ID NO: 4124460 - RNA, 63 nt, Human
cuacagggacuuacaauagaugaacccaacuaugaguauuuauauguaaguaccuuuaugugg

SEQ ID NO: 4124461 - RNA, 60 nt, Human
cuacagucucuucuauggaaagcuguuuaucaugagcuuucuaggcagagaugacuguag

SEQ ID NO: 4124462 - RNA, 67 nt, Human
cuacauccuguuugucacuagaaaauagaaaagagcuauuuauuuucagaugggaagcaggagguag

SEQ ID NO: 4124463 - RNA, 69 nt, Human
cuacaucucuucugagcaauuccuguuuuuggaauuugaaaauggauugauucuuagaaaaggugucag

SEQ ID NO: 4124464 - RNA, 72 nt, Human
cuacaugucuaagacuuguuagcaagauacagucuuccauugccaguuuuggagucaggcuuagaugugugg

SEQ ID NO: 4124465 - RNA, 129 nt, Human
cuacauuuuauaucaguuuuuuggagcagcccauuuguaauuuggggaauucaguuagaauagaaaccuuuccugaauugaacucaguuaauuguguggcuuugccuguuuccugauauguaaaguaug

SEQ ID NO: 4124466 - RNA, 74 nt, Human
cuaccaaaucagugauggugaaacaguauauuaguuuguuagggcugccauaacugauaccauagacugggugg

SEQ ID NO: 4124467 - RNA, 79 nt, Human
cuaccacaauacagauguuaaagcaauuuccaaggauuuggcacauugcuugcccauuguaaguacauauuugugguag

SEQ ID NO: 4124468 - RNA, 92 nt, Human
cuaccacucagagcuguccuaccaggaguccuuccacagcuccauaaaccaaggugagagggcccuggaugagggcagucgggggugagugg

SEQ ID NO: 4124469 - RNA, 57 nt, Human
cuaccaucucugcagauuguacagaauuaucuguggcaggaugcggaagaugcagag

SEQ ID NO: 4124470 - RNA, 71 nt, Human
cuacccggguccgccguccccuaggaaagagcuccgacgauuggagcuuugggggccggggaugggggugg

SEQ ID NO: 4124471 - RNA, 60 nt, Human
cuacccugggucucaaucauccuaacagauguuugcuuaggaaggacgggacuugggugg

SEQ ID NO: 4124472 - RNA, 88 nt, Human
cuaccucugaaguuuuucccagagaagugaagauguaauuuuauucacucgaaugaugugaguuuuuauucucagcucucagaggcag

SEQ ID NO: 4124473 - RNA, 112 nt, Human
cuaccugaauuccaaguggugucaugaacaaguacauacauaauauagcaguuaagugcaaauuuggaaucuguauguauguauaaaguugcuguugacaugguucuaguag

SEQ ID NO: 4124474 - RNA, 68 nt, Human
cuaccugauucucauuuucuuguucacucauaauucucuuugaaguaaacaauguaugaggacaggag

SEQ ID NO: 4124475 - RNA, 89 nt, Human
cuaccuuaaucuccuaguuggcucugauccacugggacauuuauuccggcuuuauuauguggccaugugacugugggagcuuaagguag

SEQ ID NO: 4124476 - RNA, 58 nt, Human
cuaccuugggguuuuguugcucuguaggagcucgcuggagucacuuucccgggagugg

SEQ ID NO: 4124477 - RNA, 60 nt, Human
cuaccuuuugguacccaaagaugccaacaucuaaagggucugaggguaagguuaagguag

SEQ ID NO: 4124478 - RNA, 100 nt, Human
cuacuagaacccaaaagcugauggaagcuucagaaaacauccucggucucuauauuacccuaggaacuauucuaaguuucucaguuucaguccuauguag

SEQ ID NO: 4124479 - RNA, 89 nt, Human
cuacucauucaucuacuuugcacagaaggauaugucaucuaauauauggauaaacaugaaguucuguguacuggauaauggcugagaag

SEQ ID NO: 4124480 - RNA, 64 nt, Human
cuacuccaagggcagccauagaacuuccagaugguugggggaaaguaguagccuuuggagucag

SEQ ID NO: 4124481 - RNA, 82 nt, Human
cuacucgcggcugcggugaacuuggauggugcuacucucaccacaaaccacaguccgucacaaauugccguguggugaguag

SEQ ID NO: 4124482 - RNA, 76 nt, Human
cuacucuuuauuauugugaguauaacugcauuuaaaugaacaggauaaauauaagagcagucuccauaagggguag

SEQ ID NO: 4124483 - RNA, 94 nt, Human
cuacugaauuaauccuguacuucuaaaugagaaaaaggugacaaccucaaauuacccagaaagcuacauuuggagaguauaggaauuuuaguag

SEQ ID NO: 4124484 - RNA, 55 nt, Human
cuacugaguccuucagcugccauucuuagacuggcaccaugaaauauuccgguag

SEQ ID NO: 4124485 - RNA, 58 nt, Human
cuacugcaugaugagagggguucucuguguucaacagugcuguucacauuauuaguag

SEQ ID NO: 4124486 - RNA, 57 nt, Human
cuacugggagaaacugacaccuuagauacugcauuugggagagagaauucccagugg

SEQ ID NO: 4124487 - RNA, 74 nt, Human
cuacugguggcccccuaaacgagcuggcagucuuuaacuuuaguucauaaaaccaggguggcauuugccagagg

SEQ ID NO: 4124488 - RNA, 61 nt, Human
cuacuguaguuaaaguuuuguagaaacagcacaguuuuuuaagacuggcugaacuuaguag

SEQ ID NO: 4124489 - RNA, 73 nt, Human
cuacugucugccagcuggagaccaaggaaagcugaugguguaguuugaagccugaaagcuggacaggcagugg

SEQ ID NO: 4124490 - RNA, 56 nt, Human
cuacugucuuccuugguaacaacaucuucuagguaaaauauuugggaauacaguag

SEQ ID NO: 4124491 - RNA, 110 nt, Human
cuacugucuucuuccuuuauuggucuuguuuuucuuguuuguuuuguuuauuguuugguugguuuuuuagcacagaacagagaaauagccaauaacauggagggcagagg

SEQ ID NO: 4124492 - RNA, 91 nt, Human
cuacugucuuugcuaaaccuuugugcuugcaauuuguaagucaaguacaaaugaguuguaaggcccaaagaaacaaaguuugcaacauuag

SEQ ID NO: 4124493 - RNA, 55 nt, Human
cuacuguuguguuuuaaagguagaaaccuuccuucgugauguugcauugcaguag

SEQ ID NO: 4124494 - RNA, 99 nt, Human
cuacuuacauuggauaucauuuuuaaugaccuggaagaagugauaaaaauaauuugauuauucuugcaggcaguaauaggaaauuauccauaaaagugg

SEQ ID NO: 4124495 - RNA, 91 nt, Human
cuacuuagaguaaggacagauaaauuuaagagaauaaauuugguugaaauaucuaauuuaugacagaagauaugcugucuacacugauuag

SEQ ID NO: 4124496 - RNA, 64 nt, Human
cuacuuaugggaaauuuuauuuuggaagacgaaauuguuaaacaaagaaaucucccauugguag

SEQ ID NO: 4124497 - RNA, 86 nt, Human
cuacuucauucuguucccacagucacugggagaaguuggaguaaggacuucugaaacccccaguguggguccugaagaauguguag

SEQ ID NO: 4124498 - RNA, 56 nt, Human
cuacuuccugucuucagucucuuugauuucuuuaaagacucuccagagggaaguag

SEQ ID NO: 4124499 - RNA, 58 nt, Human
cuacuucuaaguacauggugauaaaguaugauggauugcuuaggugcuuaagaaguag

SEQ ID NO: 4124500 - RNA, 108 nt, Human
cuacuugcaugcugaccuuucucucuguaaucuaagccaccaguaguuuccugccauuucucggggcauugggcugggauggagcaucaaggacaaggcguguuuuag

SEQ ID NO: 4124501 - RNA, 67 nt, Human
cucccugugucggacgugggcagcagaacgccccuuugaugccccguccuguacacuaagaagggag

SEQ ID NO: 4124502 - RNA, 60 nt, Human
cucccuguguuucaccaaaagagucuaggauuugaggcucccugggaggagacagaggag

SEQ ID NO: 4124503 - RNA, 128 nt, Human
cuccgacgcuaacccgcugcucccagccuccgcuuccuguuuucgagggauuagcuaggacugugcaacaccagucuccgcucucggagucggcacgggggcugguggguggcgggaugaacucgggg

SEQ ID NO: 4124504 - RNA, 56 nt, Human
cuccgacuuucucaccguguucugagccuuguaccagagcagggagugguuguggg

SEQ ID NO: 4124505 - RNA, 57 nt, Human
cuccggccugccuuaacccccuuuuugaauuagagggugggcaacauuuggccugag

SEQ ID NO: 4124506 - RNA, 60 nt, Human
cuccgggcugugagcuaaugcggcaccacugcuguuugcauagcugcacagcccuaggag

SEQ ID NO: 4124507 - RNA, 59 nt, Human
cuccggguuagagcaggugaucugguccggugugaccuccccugacucgaaacccagag

SEQ ID NO: 4124508 - RNA, 58 nt, Human
cuccguugaucuggauaugggaguuucauggcccaggggcucucuuuccucaguggag

SEQ ID NO: 4124509 - RNA, 129 nt, Human
cuccuaaaguugcuagguucuuguuuacauuccuguuagcaucuaagcauaaaagauauaggauguuucuugaugcuguauccuuagauacuaacagggaugaaaacaagaaccuagcaacuuuaggag

SEQ ID NO: 4124510 - RNA, 58 nt, Human
cuccuaaccagccucaccuccccacugaacagaugggaaacugaggcucggugaggag

SEQ ID NO: 4124511 - RNA, 91 nt, Human
cuccuaccaguuuacaagagcugauaguccacaugucuucccaacucuguucugugacaucaauauuaguagcuugaaauuggugacggag

SEQ ID NO: 4124512 - RNA, 111 nt, Human
cuccuacuguauuggagagggguucucaucuuuaguagguucuggagauucagcugaagucuccuguugaacugguaaagguccagucucuuccgaugacucuguaggcag

SEQ ID NO: 4124513 - RNA, 60 nt, Human
cuccuagagauuggauuuaauggccaaauggcuggauuuggccguguccaugucucagag

SEQ ID NO: 4124514 - RNA, 61 nt, Human
cuccuagagcacaaaaggccauugugaaucaucccagugcugcacuuauggcucugaggag

SEQ ID NO: 4124515 - RNA, 90 nt, Human
cuccuaggauucuuugguaaaugucaugggaagucacuaggccaacaggaugaucagaacugguauuuaucaaggagaaggcuccagggg

SEQ ID NO: 4124516 - RNA, 57 nt, Human
cuccuagggcugugcagugugcagcuggaauggcuacacacagcugcccuuagguag

SEQ ID NO: 4124517 - RNA, 107 nt, Human
cuccuauaauauaacuaugacauguuagggacagaguauguguaagaacuacauacuuuguccuuaacguacauuuauucugaaguuacuaaugcaaaaauuaggag

SEQ ID NO: 4124518 - RNA, 59 nt, Human
cuccuauggguacuuugauuuagaaacuaauguuggugucuaugugguauuccugggag

SEQ ID NO: 4124519 - RNA, 87 nt, Human
cuccuccccuagacacacagggcugcgccugaccccaggccaucagcaggcggaggcagggggcaguggguggcagugagggaggag

SEQ ID NO: 4124520 - RNA, 86 nt, Human
cuccucccugccagugauguggggaccguccuggcuggccacuaccagcuguuugacucucuccccacuugcugagaggggcugag

SEQ ID NO: 4124521 - RNA, 67 nt, Human
cuccucugacagugugaauauugacuugcacuuauaaaggucagacaguuccacuaguuaauaggag

SEQ ID NO: 4124522 - RNA, 69 nt, Human
cuccucugcugucccuuccacagugucugguggaagugcuaaugacagggaaagggacagcagcaggag

SEQ ID NO: 4124523 - RNA, 62 nt, Human
cuccucuggcuuccuggaggcauuggggauugacaggcuuaucugggacagggccugaggag

SEQ ID NO: 4124524 - RNA, 78 nt, Human
cuccucugucucucacagguaccagcacccucccugguucaggcagggaaugaggaauagguuugugugagaugggag

SEQ ID NO: 4124525 - RNA, 77 nt, Human
cuccugaacauggugcuuucaaauuuccuguuucacaacgacugagagguaauuugaagugcaaaaaugugagugag

SEQ ID NO: 4124526 - RNA, 60 nt, Human
cuccugaccucgugauccacccgcuucggccucccaaagugcuuggauugcagguaugag

SEQ ID NO: 4124527 - RNA, 60 nt, Human
cuccugaccuugugauccuccugcccuggccucccaaaguacugggauuacaggucugag

SEQ ID NO: 4124528 - RNA, 70 nt, Human
cuccugagcacccuaccugccacugagagugcccgacucucuaguguagugcaggaaggaguguggggag

SEQ ID NO: 4124529 - RNA, 63 nt, Human
cuccugagcucugaggaagcuugccuucuuuugagcuaccugauccuucuucugagcaagggg

SEQ ID NO: 4124530 - RNA, 65 nt, Human
cuccugauuugccaaggaguucugaguccagauuuaccugacccugggcucuuagguagcagggg

SEQ ID NO: 4124531 - RNA, 55 nt, Human
cuccugcaguccaaaccucagagcuccuuuggggaggaggcgaggcgugcaggag

SEQ ID NO: 4124532 - RNA, 78 nt, Human
cuccugcauauuguccuugauauuauuuacuguaacuaggauuuaucucaauaauaaugcgaggagaaaaugaaggag

SEQ ID NO: 4124533 - RNA, 86 nt, Human
cuccugccuggcucccucucccugagucagacacagaucugccuauuuggccagacugagucaggagaggaugggggccaugugag

SEQ ID NO: 4124534 - RNA, 66 nt, Human
cuccugcucucauggcacaacgugcucaccauuuguucagucgggcaccaggccauggagcgggag

SEQ ID NO: 4124535 - RNA, 55 nt, Human
cuccuggaugcaggcugucugccaccuuccugcagcauccgccugcuuccugggg

SEQ ID NO: 4124536 - RNA, 73 nt, Human
cuccuggcuuucccagaccagguccaacaugguucccacccucccaacguuuccugggggagaagccgaggag

SEQ ID NO: 4124537 - RNA, 73 nt, Human
cuccugggauggccuccuuccugucuggggcccacaggcagcuuguccuggaggaugggccaagccaccggag

SEQ ID NO: 4124538 - RNA, 56 nt, Human
cuccugggcaggagagagucugccagugacagcugaggcagcucaggcccagagag

SEQ ID NO: 4124539 - RNA, 61 nt, Human
cuccugggcuucgaaggcucccgggcccaguaagaaggaggugggugccaagguugaggag

SEQ ID NO: 4124540 - RNA, 67 nt, Human
cuccuggggugggguuacucauucugccuagggugagguggaaggaugaaauggccccacagaggag

SEQ ID NO: 4124541 - RNA, 64 nt, Human
cuccuggguaucccuuccucgggguugguuugucacagccagcucugggccaggaacccuaaag

SEQ ID NO: 4124542 - RNA, 130 nt, Human
cuccugguggcucaauggcacuaucugugacuguguuggaugcacacagguggucaucucccaguacagugugagucauucagcaccucaagucacugaagagugccugacagacccuaggcccuccuag

SEQ ID NO: 4124543 - RNA, 61 nt, Human
cuccugguuccugucuuaaauaaucuuuuaaagguaaaguuuccaagacagaagccaugag

SEQ ID NO: 4124544 - RNA, 59 nt, Human
cuccuguggucaagggugggacucacccucagcaaguuucacuuuaaccccacaggcag

SEQ ID NO: 4124545 - RNA, 67 nt, Human
cuccuuacuguacaccuacagaaaaggagaguugguggaggcucuccuguagguguacaguaaggag

SEQ ID NO: 4124546 - RNA, 67 nt, Human
cuccuuacuguacaccuacaggagagccuccaccaacucuccuuuucuguagguguacaguaaggag

SEQ ID NO: 4124547 - RNA, 71 nt, Human
cuccuuaucacacugcauuuugauagugccuuuaauggugguggcaaguuaaagaauagauggguagggag

SEQ ID NO: 4124548 - RNA, 65 nt, Human
cuccuucacuguagggaucccuucucauuucucacagggaucccuucuggcagcagugugagggg

SEQ ID NO: 4124549 - RNA, 70 nt, Human
cuccuucuagauagagagcuacugcgagaacuuugcuuucaagcaacugcuuuuugaucucaggagagag

SEQ ID NO: 4124550 - RNA, 71 nt, Human
cuccuucucuuccccuuaguuuccuuuaagagugauaaaaauggaaaagggggcugagguggaggaaggag

SEQ ID NO: 4124551 - RNA, 67 nt, Human
cuccuugcacccaugagaugccaagugccugcugugaacacaguaguauuuucugugauguaggggg

SEQ ID NO: 4124552 - RNA, 84 nt, Human
cuccuuguccugcaaccucacauggcauaagagaagacaggcaaaagaaacuaaugcugugugcucacguaguggaagauagag

SEQ ID NO: 4124553 - RNA, 76 nt, Human
cucgacaaguauagcacacuggggagauacaaagauggaguagcugcaccccuuccccaggugcucacugucuggg

SEQ ID NO: 4124554 - RNA, 61 nt, Human
cucgauagcagcgcuggcccucugccuugaacgccacggcggcacgcaggcugcugucgag

SEQ ID NO: 4124555 - RNA, 73 nt, Human
cucgauagguggugugcgaagagcguguuuuccaaaaauggcugcgacuguauuucccacauucucuauuuag

SEQ ID NO: 4124556 - RNA, 79 nt, Human
cucgcagucuuuaucucgcuccuggauuggcagggagcugaaagaucagaagcaggaggaaugaagucaacacagugag

SEQ ID NO: 4124557 - RNA, 68 nt, Human
cucgccaucaugccccgcuacagugcaggagcgcagcugcugccaggcuuagagcaggggcuggugag

SEQ ID NO: 4124558 - RNA, 125 nt, Human
cucgccucuguauuucuauguauguguguguacuuaugucauuuaaauguuuguauauguguacguguauacauuuggugcauauuuacuaaccuaaccuauuuccaugcauagcacauagugag

SEQ ID NO: 4124559 - RNA, 105 nt, Human
cucgcggccccucagaccccacgcggaggaggucaggaggugacacagguucgcggaagaaagcgggacucaucuuccucauuucuccagggauuuagguguggg

SEQ ID NO: 4124560 - RNA, 99 nt, Human
cucgcggccgcagacccccucuccacugcagccccgcaggcagccucuccggcgugggcuucaccgcgggguugcaggggggccaagaugaggcgcggg

SEQ ID NO: 4124561 - RNA, 74 nt, Human
cucgcucuaacaccacagugugguuuggacguggccacagugccguacaaaccacagugugcugcuggggcggg

SEQ ID NO: 4124562 - RNA, 64 nt, Human
cucggaagcaggcaacaguggcggauacugugaguggcaugaguccugugaccugcauccugag

SEQ ID NO: 4124563 - RNA, 92 nt, Human
cucggcgcucauccccagcacagcccuccccaggcugcggcaaagacuguugcuguccugcugagggaugugcccccggggauucaaucgag

SEQ ID NO: 4124564 - RNA, 82 nt, Human
cucggcuucuccagcggacgcugcuggcuccauucucuuaaguuugaugaagcaagccagccaguucacuaggaaaguaaag

SEQ ID NO: 4124565 - RNA, 118 nt, Human
cucgggcgacagcaucauuuauaucuuccacgcacacaaucuuuucugcaugugcgugagucucgauuacaggcaguugagguuugugugguaggcauuaugcauuuaugagccagag

SEQ ID NO: 4124566 - RNA, 68 nt, Human
cucgggcgagcaguucccagggaggugagcugugcagacccagggccuccaccgaacgcucucuugag

SEQ ID NO: 4124567 - RNA, 128 nt, Human
cucggggaggccauuaccauggcugcucucugucugcccugugaggguccuugggguggcugcacucuggggauggugcuggggcugacugacucacgcggucguguaacacaucagaccuuccaaag

SEQ ID NO: 4124568 - RNA, 59 nt, Human
cucgugcuggggaggcagcagagaacacagucaccuugacauguuuucuuccccgggag

SEQ ID NO: 4124569 - RNA, 56 nt, Human
cucguuccuagcaaggcugcuccaucugcaugggcucggcgcugcugggaucuggg

SEQ ID NO: 4124570 - RNA, 107 nt, Human
ccuucaaucagcgcaguuccacccguguuuacugagccugugcccucaucaggccucuguggggugcugggcucaggugggggaggcagggaacugugggaugaggg

SEQ ID NO: 4124571 - RNA, 67 nt, Human
ccuucaaucauaaguauaacugguacagguuaagcaugccuuaccugaaaugcuuaggaccagaagg

SEQ ID NO: 4124572 - RNA, 96 nt, Human
ccuucaccuacauucauauacagauauguuccaugcaucgcuaauugaugguuaaugcuaagugggagaugucuacuguggagcuuuuggagaugg

SEQ ID NO: 4124573 - RNA, 58 nt, Human
ccuucagccaguuuucuuuguugcagaaguauuugucugguuaggauucugcugaagg

SEQ ID NO: 4124574 - RNA, 78 nt, Human
ccuucagcucaauggcccagggucuacagccucaagaccuccuugaugcuacuaccugggcugaaagcugauucaagg

SEQ ID NO: 4124575 - RNA, 102 nt, Human
ccuucaggaacagaguggcucuggaccucagcuacagacugcagcuaauucauaaaugucaacagucaagaggaggggaaccagaacauuuugucuugaggg

SEQ ID NO: 4124576 - RNA, 72 nt, Human
ccuucagggcaggcgagcagcugcuugaugggaaaauauacuaaacaccaagcagagcgccugcucagaggg

SEQ ID NO: 4124577 - RNA, 122 nt, Human
ccuucaucacuugguuaagguagugugcuaggcuucuccacauaaaguuacaauuuuccccuuucuguacucuacucugcagaagcaagucacuaagacuaucgagccuucagggaugaagg

SEQ ID NO: 4124578 - RNA, 71 nt, Human
ccuucauuuucuucuaacuuguauguauaguuuucucaucgaaaauucauuuuuguagguuaguaugaagg

SEQ ID NO: 4124579 - RNA, 90 nt, Human
ccuuccaauauuuuggcuacuucaugguccauguauuuuuuagaugacagagcauugcacgacaugagaggcuguggaguacaaggaagg

SEQ ID NO: 4124580 - RNA, 78 nt, Human
ccuuccacccgaugggaggcuguaacuugggcacuggggugacuuuuuccaugcccuugucaucuccagggugggagg

SEQ ID NO: 4124581 - RNA, 76 nt, Human
ccuuccaggaaagcaggaaauucccgaggucacacuucagauugaucucagaaaaccucuuucuugauagugaagg

SEQ ID NO: 4124582 - RNA, 76 nt, Human
ccuuccccaaaaccugccagcugagaaggguguccccucaggguggacucugucauggcuggacaggcagggaggg

SEQ ID NO: 4124583 - RNA, 55 nt, Human
ccuucccuagaucucagcgccuucauuuuagaaaugaaaaguucgaucuagaagg

SEQ ID NO: 4124584 - RNA, 78 nt, Human
ccuuccgggcugcuggggaggcgccucgacguuccaucuggagagccucgacguuccgcccgagcccggcgcgggcgg

SEQ ID NO: 4124585 - RNA, 68 nt, Human
ccuuccucuguggcuugccuuucuguccaccaagaacaaagggggagaaaagagagucagagaguagg

SEQ ID NO: 4124586 - RNA, 70 nt, Human
ccuuccuggagcccaugcagauagccuccaaaacacaaagcagccaucugcuuccugggcuccaugacgg

SEQ ID NO: 4124587 - RNA, 111 nt, Human
ccuuccuguuauaucuuuuauguucuuccuucaauuuggaaggagagaaaauaucuucuugcauuuucuaggagggcaaauagguaaauaggugauuauaagacaacaagg

SEQ ID NO: 4124588 - RNA, 57 nt, Human
ccuuccuuucucccuacaccaaggcacaaucaagggugaauggggcaggaaggaugg

SEQ ID NO: 4124589 - RNA, 71 nt, Human
ccuucuaccaccagcuuacagucucaccccuggccuggguuaguggggggagcugcaagcuggaaaggggg

SEQ ID NO: 4124590 - RNA, 59 nt, Human
ccuucuauggagaucuccuuuggggucuaggcaaaucccuggaguaaauucuuggaagg

SEQ ID NO: 4124591 - RNA, 76 nt, Human
ccuucucaggaccuccagggaucucugagucucugggccagcccagugacuccugggccucugagaggccugaagg

SEQ ID NO: 4124592 - RNA, 69 nt, Human
ccuucuccaggcugauaggguccaaaguugucuucaguggcuaacauuugcgaguggguuuggggaggg

SEQ ID NO: 4124593 - RNA, 62 nt, Human
ccuucucugcagguaguuggcuacaggggucuaccaaaaccaaucuauuucugcaguaaagg

SEQ ID NO: 4124594 - RNA, 55 nt, Human
ccuucuguaaacugauuuuucaccaagauugaggagaaucuuuccccacagaagg

SEQ ID NO: 4124595 - RNA, 100 nt, Human
ccuucugucuggguaaccgagucuccacugguccuuccuaaaaaagggaaagacuuuauuauaguggcaauagaagaggcauggucuccaguuuggaagg

SEQ ID NO: 4124596 - RNA, 129 nt, Human
ccuucuguggagcuugccaggccuugguguuugcucugccccuccccagguggcugggggaaggaaaaggcagucacaugaggaaggggaaggaaaggcagucacaugaggccuccagcuccaggaaag

SEQ ID NO: 4124597 - RNA, 61 nt, Human
ccuucuucuguguggcccaagaugacucaccaauaugucuguauucuacccagugagaagg

SEQ ID NO: 4124598 - RNA, 72 nt, Human
ccuucuuucacccaguuaaauccucucugggcuuagaaaggcucaggaacccccgcugggugaaacuccagg

SEQ ID NO: 4124599 - RNA, 62 nt, Human
ccuucuuuccuuucuuuaccaagggccuuuuuuggcuuuggcccugguuuuagaggagcagg

SEQ ID NO: 4124600 - RNA, 128 nt, Human
ccuucuuuuagauaugcuggcaaauaauuacuguagauauggcuggaauacugaaaggcuguacucuggucauuucagauugccugaggaguaaccacccagucugcugcagcaugaauucaggacgg

SEQ ID NO: 4124601 - RNA, 60 nt, Human
ccuucuuuucuuuacgguguaggaguuguaaaaucaauuucaugugaagaagagauaagg

SEQ ID NO: 4124602 - RNA, 65 nt, Human
ccuucuuuuuacagcuuucuucuuguuuuggccagaacuggaggguccaucuugugaaaaggagg

SEQ ID NO: 4124603 - RNA, 107 nt, Human
ccuucuuuuuccuuggugacuacaggccggcaucagagaguccgauuuauaacaugggcucuaccuuugcaaugcaguuacuuucuuuuccuuggggagagggaagg

SEQ ID NO: 4124604 - RNA, 55 nt, Human
ccuugaaagccaggcagaggaaccugaguuuaccuugugguccugguauucaggg

SEQ ID NO: 4124605 - RNA, 85 nt, Human
ccuugaaguauaauauggcauauaguccagcauaaacauacacacccauccuugugagguuauuaugccuauuauacagacaagg

SEQ ID NO: 4124606 - RNA, 127 nt, Human
ccuugaagugguuguuccagugacucugagauuaagcucaacagcugggcgucucugggaaagcuggcagggcuggcaggauccacagggauguugaguucuuagucuuccaagcuggacuucaagg

SEQ ID NO: 4124607 - RNA, 129 nt, Human
ccuugacauguggcguuacaugaaagucaguguggcacguguucuguggcaugggugcuggcaucccaaguagcaggauacaugauuguuggucuauauaugacacaugacaaauguccaugucacagg

SEQ ID NO: 4124608 - RNA, 60 nt, Human
ccuugacuagugcuuaggacuucuuaggaaccacaguuccuauuucaaagcuuaucaagg

SEQ ID NO: 4124609 - RNA, 71 nt, Human
ccuugagaaauuaaugaugggaucucugaaacuucauugaagacagcagauacuuucauugaagaauaggg

SEQ ID NO: 4124610 - RNA, 79 nt, Human
ccuugagaggguucaagagcugaggaggaugagggccagcccuaggccauuccuucucuugaucauuucccucguaagg

SEQ ID NO: 4124611 - RNA, 75 nt, Human
ccuugagugguuggauccauguggauugauacuuucaguugcguaguuaguucauagaauguaacaggaucaggg

SEQ ID NO: 4124612 - RNA, 130 nt, Human
ccuugaugauuugauuuuuuuaaauaguuaugguugugaaaggaaggcaugaaaaguggaagauauuuuaaaggcagauuauggcuuauccuuaauuauagcugcagcugagcugaggaguuggguuggg

SEQ ID NO: 4124613 - RNA, 72 nt, Human
ccuugcacaagacggagguuguggcagcugcuugagugacagcaaaggacgaacacucuguacugugugggg

SEQ ID NO: 4124614 - RNA, 85 nt, Human
ccuugcccagggccagcucugauuuugaccuccagaugcuuccuacuuuuucuggcuccucaucacaguugguggugauguaagg

SEQ ID NO: 4124615 - RNA, 56 nt, Human
ccuugcccugcguuaccaucucuuucucaacaggaaaggggugcaacaagggaagg

SEQ ID NO: 4124616 - RNA, 80 nt, Human
ccuugcccugugccuggcccaguggugucaccugaggaauggggaaugagcaccucuggguccuggucuaggguacuugg

SEQ ID NO: 4124617 - RNA, 76 nt, Human
ccuugccuaaggagagagcuuugcuggaacaauuggaggacaacugccagccccuuagggcucucccgggcaaagg

SEQ ID NO: 4124618 - RNA, 67 nt, Human
ccuugccucuaauuagcucugugacccugggcaaaacuguccacuugcauuaauguggaggcacagg

SEQ ID NO: 4124619 - RNA, 59 nt, Human
ccuugccuugguccuucgcaggaaugagccaccaggcuguggaggagaaggggucaagg

SEQ ID NO: 4124620 - RNA, 62 nt, Human
ccuugcucucuuugaaagaucuuauuaaauacaaugaucucauucuuucaaagggagugggg

SEQ ID NO: 4124621 - RNA, 56 nt, Human
ccuugcucuuuagguggcagcauaacuuuguuguuaacacaauucuggagagaagg

SEQ ID NO: 4124622 - RNA, 81 nt, Human
ccuugcugauuuuagagcuucuguucaugccugcuggcagcaugccaguacagaaggagcuuuggauucacuaaugcuugg

SEQ ID NO: 4124623 - RNA, 81 nt, Human
ccuugcugccccugcugcagagagcuuuccauccuccgcaccgcguggucaggcugcucugcggcgugcgggacagcgagg

SEQ ID NO: 4124624 - RNA, 60 nt, Human
ccuuggagguccuggcuggguuuuaaugacugguauccuuccccaggaccuugagucagg

SEQ ID NO: 4124625 - RNA, 56 nt, Human
ccuuggccucagauuauugcacaguuggacaaugacugugguucuguggcucaagg

SEQ ID NO: 4124626 - RNA, 68 nt, Human
ccuuggcggggcugccacaucuccagucccugcgcggcagggcacagucugcagccccccagccuagg

SEQ ID NO: 4124627 - RNA, 65 nt, Human
ccuuggcuuccugcacuugaguuucagcccucuggagcuucauauguugcagagaaugccuaagg

SEQ ID NO: 4124628 - RNA, 66 nt, Human
ccuuggcuuccuucccucuagacaagugaagcuuuacucuuugaggaggaaaaggggguaccaggg

SEQ ID NO: 4124629 - RNA, 55 nt, Human
ccuuggggaacuucaguauuauaagaaaacuuauaacacugauuuguucucaggg

SEQ ID NO: 4124630 - RNA, 87 nt, Human
ccuuggggagguggagaaagcccugggagauuuucuggguuuguuugaggaccugaauccccagggccuuccgguugcuucccaagg

SEQ ID NO: 4124631 - RNA, 92 nt, Human
ccuugguuuucaguucuucgugaggcucugcaucgcacaggcacugugucucaggggaucagagccuuuuaagaguuggggaugccugaagg

SEQ ID NO: 4124632 - RNA, 81 nt, Human
ccuuguaauuuguucccaagcagaauagauauguucuuauauuuggaugcucuaggucugauggggcagaaaauuacaugg

SEQ ID NO: 4124633 - RNA, 73 nt, Human
ccuuguauagccacacuuauucucaugcacauguaauuuuuaacugugauggauagaguuuggcguuccaggg

SEQ ID NO: 4124634 - RNA, 82 nt, Human
ccuuguaucuuuaucccucguuggagccuaacauaaacuguugcaugugguaaguuuucacugaggguuuauugauugaagg

SEQ ID NO: 4124635 - RNA, 115 nt, Human
ccuugucaccugccuuuacacucagccugccccacccucgcuccauuucggugaucaauucauccacugaauggacauuuggggguggagcgaguggugauaaaugcacauuagg

SEQ ID NO: 4124636 - RNA, 63 nt, Human
ccuuguccucugguuuccuguuucuggccaguggggagccuugacaggagaucugaggaaagg

SEQ ID NO: 4124637 - RNA, 124 nt, Human
cuacuuuacacaauauugggcaucuucaugacagcuauugacgucuuuaauuauuuuuaacuccacuuauauuauugagcucaguguagucauggcuuucagaagcacaaaaacaaaauaguag

SEQ ID NO: 4124638 - RNA, 78 nt, Human
cuacuuuuaaauaccaaacuuccugagcagucuaauugcugcucuuuggaacaagaagaaauggcuauuuaaaagaag

SEQ ID NO: 4124639 - RNA, 74 nt, Human
cuacuuuuauggagcauacauucuaguuggaggagagagaccacaaauagguaaauguaugcugugcggcagag

SEQ ID NO: 4124640 - RNA, 62 nt, Human
cuagaaagcagcuucccuggcuccuggugcaucacaugaggaguggcagggcugcucccuag

SEQ ID NO: 4124641 - RNA, 66 nt, Human
cuagaaauugcaggucguguggaagugacguuucguguucuuuuaauagagauccuguguuucugg

SEQ ID NO: 4124642 - RNA, 81 nt, Human
cuagaagggcuguucaagacuaggaaauuuuauauuccuugaauuuuguggaguuucaaaaugcuuugacacuuuucuuag

SEQ ID NO: 4124643 - RNA, 61 nt, Human
cuagaaugagggacagcuaaagagaaauuucagaauauccuuagagcuaucccuagaauag

SEQ ID NO: 4124644 - RNA, 69 nt, Human
cuagagaaaaagcuuagguacgcgucuccaaaugaugguuucuuuuucuacaccuuagcuuuuucauag

SEQ ID NO: 4124645 - RNA, 80 nt, Human
cuagagacagucuauacuggacuguugugauuucaaagggaaauauuuacaacucugucaguauagcuguuccaguuuag

SEQ ID NO: 4124646 - RNA, 65 nt, Human
cuagagaggugguguuggguggcagaaagagccaggguuugaaaccuagcucugccucuuacugg

SEQ ID NO: 4124647 - RNA, 114 nt, Human
cuagagauaaauaaauaugugcaaggaaaauaacuuugaggucacugaauuccaggaaacugagaucacugaaauucugugucccagagugcaauauuuauuucacaacuguag

SEQ ID NO: 4124648 - RNA, 61 nt, Human
cuagagcuguucugugcacucagcuuuccaacauuaagcaagaugugaggacaugcucugg

SEQ ID NO: 4124649 - RNA, 67 nt, Human
cuagaggagauggugcagcagagaauacuguuauaaagcauuauucuuaugucaucauggcuuccag

SEQ ID NO: 4124650 - RNA, 65 nt, Human
cuagauagcgagugucuuaggggcacgggucuaauuucagugcucacugaacucuugcugucugg

SEQ ID NO: 4124651 - RNA, 78 nt, Human
cuagauaucuuuuuaguauaacuauguguuugguauauaauauguguacauacacaaauauacuguuuugagaucuag

SEQ ID NO: 4124652 - RNA, 69 nt, Human
cuagauggucugaaaggcagcggaaucccaggggugagcccagagucuucuguuuuucagcagcucuag

SEQ ID NO: 4124653 - RNA, 66 nt, Human
cuagauggugguugcucaaaaaauuaaacauggaauuaccauaugauucagcaaguccacuucugg

SEQ ID NO: 4124654 - RNA, 71 nt, Human
cuagcaacucacugcugcugugcuauuacaacuuagcaaggauugagagcacugguagcuggaggggcuag

SEQ ID NO: 4124655 - RNA, 70 nt, Human
cuagcaggcuaauguaagcuuguacucccccaaauuaaaagggaucaguggcauauauuaguuaugcuag

SEQ ID NO: 4124656 - RNA, 59 nt, Human
cuagcaucuccuuaggguaaggaaggcaaaaugcccauuccugaucccagauugcuuag

SEQ ID NO: 4124657 - RNA, 97 nt, Human
cuagcccucaauaaaguuaaucaguuuuagcuagagcaaaccagcuaacauuaagaaguuggucucuggcuauagcugagauguagaugacaccuag

SEQ ID NO: 4124658 - RNA, 65 nt, Human
cuagccucggaggaccuuggugcugagggagugucccuugccuucagugucccuuugcaggcugg

SEQ ID NO: 4124659 - RNA, 75 nt, Human
cuagcucaaaguccuugcuuuuucugugacaucauauaggggaauuuacagauuagcuggggccauugauucugg

SEQ ID NO: 4124660 - RNA, 118 nt, Human
cuagcucauaaacuccgacuuaaaagccagucucaguuacucucccugguacuuggaggucccagugccagagagagugacugaggcuagcuuauaagucggaguuucuccaggcugg

SEQ ID NO: 4124661 - RNA, 91 nt, Human
cuaggaauaaacuuagaugugcaggacuuuuaucaaggacaggacaaaauuuugcugaguggaaugaaagauuugcauucuauguuccugg

SEQ ID NO: 4124662 - RNA, 55 nt, Human
cuaggaaucaccaagauucuagaucguacuuucuaggaaucuuggugauucugag

SEQ ID NO: 4124663 - RNA, 55 nt, Human
cuaggaggugacaggugggaaaggcugcgaccucacucaucucugagccuccugg

SEQ ID NO: 4124664 - RNA, 86 nt, Human
cuaggauaagaacacuuggaacuuaguaauaugacaugcuuuucauuugguuguuuuguuuuaauuuccacagaucugcuuuuuag

SEQ ID NO: 4124665 - RNA, 75 nt, Human
cuaggaugugagaaaaauuccuaaggguuugaguucagagauccuggagaccagaaggaagcuucgaacagcugg

SEQ ID NO: 4124666 - RNA, 59 nt, Human
cuaggcaguaaaggauaccaagucucauagaugaucuggaaugucugauucugcucuag

SEQ ID NO: 4124667 - RNA, 77 nt, Human
cuaggccuugguuuccuuaacagccuaaagggacagggagguggacccuuuguggcaggagcggagaccgggccugg

SEQ ID NO: 4124668 - RNA, 67 nt, Human
cuaggcugugcauugcaugacaucucuuguggauaccugagcaagaaacagcaguacacaugccuag

SEQ ID NO: 4124669 - RNA, 62 nt, Human
cuagggagcagcccugccacuccucaugugaugcgccaggagccagggaagcugcuuucuag

SEQ ID NO: 4124670 - RNA, 114 nt, Human
cuagggauccccugagcugaguuccuacagagggaagaugguccaaucuuacuacacugugagcucauccccaugguccgucgccuuccaguugccugcucagcccgucccugg

SEQ ID NO: 4124671 - RNA, 63 nt, Human
cuagggcaguucaacuucauaguggugcagacggcgcucuguugguuagcugagcuggccuag

SEQ ID NO: 4124672 - RNA, 84 nt, Human
cuagggccacauagcuagucaguagugaagccuggauccaaacccagaucugucugucugcacagcucaugggaaaaacccuag

SEQ ID NO: 4124673 - RNA, 67 nt, Human
cuaggggaagaggacuguggcauccuagcaccaccaaguaucagcugggguaccaaaccucuccuag

SEQ ID NO: 4124674 - RNA, 71 nt, Human
cuaggggcaugaaauagagaauucaguagcccaauaaauauaguacacauucuugucauuucauguucuag

SEQ ID NO: 4124675 - RNA, 61 nt, Human
cuaggguggccugcugggaucagacaccauguggaggacaccaucucagaggccauccuag

SEQ ID NO: 4124676 - RNA, 87 nt, Human
cuaggugaggggaugccaggagccagcuucuuagcauucucagugaugccgaccuagcucccuggcucucccucauuuucucccugg

SEQ ID NO: 4124677 - RNA, 118 nt, Human
cuaggugauauaggggcaaauauuaauaacuaugacuauuuaucaaguguuuccuggggcugguuucagccacaaaggcaggugcugaauauucugagcugcccuuuuaagcacuaag

SEQ ID NO: 4124678 - RNA, 86 nt, Human
cuagguuaacuagauuauaugucaucacagacacccucuacaucuuagggggugucugugauggcauauaaccuaguuucuucugg

SEQ ID NO: 4124679 - RNA, 84 nt, Human
cuagguuuuggcuagguugcagguuccaagcugcucuccugcugugucggugaguucugguuaaccugcaaccuccugaugugg

SEQ ID NO: 4124680 - RNA, 76 nt, Human
cuaguacauguacuuaugcuuauuguuuaugggagggcuagacuuuuauuaaugaguacaaguuauuucugacuag

SEQ ID NO: 4124681 - RNA, 116 nt, Human
cuaguaugcuuucauccacaguguauguacaugauuucauuugcuuuucaccaaccuaucagagacaaaugguaauuaugucuaguaagugcaaacacuaaacacgagcagcacag

SEQ ID NO: 4124682 - RNA, 92 nt, Human
cuagucuuguauuguacaguggguguagucuuccuccugaguuuccuugagaugagggcugcacucaaaaacaaagaggaaaacaaggcugg

SEQ ID NO: 4124683 - RNA, 58 nt, Human
cuagugaacgugguacuauggaaggcuagaaagcccgccauucaaccauguucucugg

SEQ ID NO: 4124684 - RNA, 65 nt, Human
cuagugccucaguuggaaaugcagaacucacccaucuucugcguugcucacgcugggagcuguag

SEQ ID NO: 4124685 - RNA, 112 nt, Human
cuagugcugccacccccuugggucggugagcauggcugcucuggauggaguccuguguuccagaggcccaggucaagcagccaccgucccuaggcacgguccccaagcaugg

SEQ ID NO: 4124686 - RNA, 101 nt, Human
cuagugggugcagagccagacaggaggcacuucccgucucagccucagccucuaucuccaccggcauggcuaagugcugcugucagcuucucacccgcugg

SEQ ID NO: 4124687 - RNA, 67 nt, Human
cuagugucucuucuauuugagacuauuucuacaagcagaaaaacucaaaucagggaggaggaauuag

SEQ ID NO: 4124688 - RNA, 75 nt, Human
cuaguuaucaucacaauuuuaugacccucucacuugagaguggaaugacaaugugguuauguaaccuaagacuag

SEQ ID NO: 4124689 - RNA, 55 nt, Human
cuaguucuagaucccugaggaaucaccacacugacuuccacagugguugaacuag

SEQ ID NO: 4124690 - RNA, 110 nt, Human
cuaguuguguuugagugccauuagaauguaaauuccaagggcaggacauuucugccuguuuuguuucugcuuuuguuuguuauauucccagcaccuaaaaccacaccuag

SEQ ID NO: 4124691 - RNA, 56 nt, Human
cuaguuuaaagcagcugaaagggcucuuugugccucucuccuugacuuugagcugg

SEQ ID NO: 4124692 - RNA, 61 nt, Human
cuaguuuaugcgaugggaacauuuuaguuggggcuuuuguucauucaucacaugcagcugg

SEQ ID NO: 4124693 - RNA, 65 nt, Human
cuaguuuccuaaaacuacucuacugcuuacucgguagcugagggaccauguuucaggagagcuag

SEQ ID NO: 4124694 - RNA, 55 nt, Human
cuaguuugcaugcaguugcugguauggcacugcucagcagccugcugcagauaag

SEQ ID NO: 4124695 - RNA, 71 nt, Human
cuauaaaaugagaauaguuguaguaucuaucucgugaauuuauuaugagaauuaaauuauuuucucugugg

SEQ ID NO: 4124696 - RNA, 60 nt, Human
cuauacuuucagggaucauuucuauaguguguuacuagagaaguuucucugaacguguag

SEQ ID NO: 4124697 - RNA, 59 nt, Human
cuauacuuuucucugacuuuguauaguaucuguaacuuuaugauacagggaaggguugg

SEQ ID NO: 4124698 - RNA, 57 nt, Human
cuauaggacugagauugucaguuugcuagcaaaagggacuacucucagcuccuagag

SEQ ID NO: 4124699 - RNA, 73 nt, Human
cuaucaagccugcgcugagaaguucuuuagagugguacuuccuaaauacauuuacagucguggcuuggcauag

SEQ ID NO: 4124700 - RNA, 59 nt, Human
cuaucacagaggguuguuuugagccauguaacgcucucagaacaguucuuggugcauag

SEQ ID NO: 4124701 - RNA, 64 nt, Human
cuauccauuaaagccuuggaaauugcugguaaauauguaaaaaaucaagugcuuaaauggauag

SEQ ID NO: 4124702 - RNA, 75 nt, Human
cuauccgagucucaguuucuuacucuguauaacaagaguuguugugaagguugaagaaacuuaguaaaucagugg

SEQ ID NO: 4124703 - RNA, 78 nt, Human
cuauccguggacaguuacugagcuugaguaaguuuuugaugucaaaauaauucaggucacagucugaacauuugacag

SEQ ID NO: 4124704 - RNA, 81 nt, Human
cuaucucauguguuauuguuuguuucuuacucaucucuuagauuuuuaggugcuggaguagaagaaaaaaugccugagugg

SEQ ID NO: 4124705 - RNA, 88 nt, Human
cuaucugcauuauauuuguacaauuagcagaggcuaaaagaaacuugauaauuucuuaguuuggugaauugaaauauaagcauauuag

SEQ ID NO: 4124706 - RNA, 69 nt, Human
cuccaacuaaaguccuguuguagcauagacagugaaaugcuaugacaucagaagacuuuaaaauugcag

SEQ ID NO: 4124707 - RNA, 94 nt, Human
cuccaagcccaguucucuuuccacuggaggcuggauaucagaggcgucuggcuauaauuuaugggaagagguccaagcugggcagcuguuggag

SEQ ID NO: 4124708 - RNA, 73 nt, Human
cuccaaggaaaaguccaggggcuggaggcggcgacccgucuguggcaguccagacccuggacucgauucggag

SEQ ID NO: 4124709 - RNA, 74 nt, Human
cuccaaggucuauguguugucaggccuuuaugacucugaggccugcaucuuacugacagcacaugcaaucggag

SEQ ID NO: 4124710 - RNA, 73 nt, Human
cuccacaggcacaggcugcucugcacaggggcugguggggggacuucccaccaggcagagcuguccaugggag

SEQ ID NO: 4124711 - RNA, 70 nt, Human
cuccacaguguccgcgguuugcguugugggccggaggcuccgcagcgggccaauccggaggcguguggag

SEQ ID NO: 4124712 - RNA, 57 nt, Human
cuccacccagcucccuggaaacugucaaggauaacucuggcaggagcuggguaggag

SEQ ID NO: 4124713 - RNA, 128 nt, Human
cuccacccccuucaaaauagcuuuucgucaaaauuauaacugcuuuguuuuauugaauugcugaaauuuaaugguuuaaugggugaaggcaugaaggaaaggcuguaaaaaugugaauaaugguguag

SEQ ID NO: 4124714 - RNA, 66 nt, Human
cuccacucaacaagcccaguguauggccuagaacucccaucauaccugugcaccaauugaggagag

SEQ ID NO: 4124715 - RNA, 80 nt, Human
cuccacuuaaacaugcccagugacagggaucuuacugcuccuaagguucucuguucccuugggcaguuucagagcugggg

SEQ ID NO: 4124716 - RNA, 82 nt, Human
cuccacuucccuguccuugccccacagccaacuucacccucagcaagggccuuggcaugggccagggagagcugaggucaag

SEQ ID NO: 4124717 - RNA, 55 nt, Human
cuccagaaagcagccagaugaacaugaaguuauguucauugaacuauuuguggag

SEQ ID NO: 4124718 - RNA, 59 nt, Human
cuccagaaggugggggagccacuagagguaaggagccuggaccccucgaucaucugggg

SEQ ID NO: 4124719 - RNA, 86 nt, Human
cuccagagcauugcuggacauccuuuggaaauaaaugaugugcaagauguaauuucuaccguccagggaugccagccauguuggag

SEQ ID NO: 4124720 - RNA, 55 nt, Human
cuccagaggaaagcacauagugggacagaaaccagagugcucuagacuucugggg

SEQ ID NO: 4124721 - RNA, 73 nt, Human
cuccagaguccuugucugauugcuguggcgcugagcuaugccagggcccuagggaaugagacauuacguggag

SEQ ID NO: 4124722 - RNA, 66 nt, Human
cuccagcuucugcccagagacucucggggcuuuccccacccugcucugggcuggaggcaguugggg

SEQ ID NO: 4124723 - RNA, 66 nt, Human
cuccagcuugggugggaggaggugguuccucacacagagaaagccuccucuucuacucgccuggag

SEQ ID NO: 4124724 - RNA, 57 nt, Human
cuccagucuucucauguaucccuuggaacaauacagcucuuacugaggggucuggag

SEQ ID NO: 4124725 - RNA, 83 nt, Human
cuccagugaaggcacguggguggauacuggccacagcuuugccuugggccuuaagguaaccaccccaugggccugacugagag

SEQ ID NO: 4124726 - RNA, 58 nt, Human
cuccagugagcgcggggcauggucuugccacuugcacugagcccuggcucgccuggag

SEQ ID NO: 4124727 - RNA, 64 nt, Human
cuccagugcgucuuaguaaaccaucucugugaaaugguuaaguuuacuuagaagguaacuggag

SEQ ID NO: 4124728 - RNA, 85 nt, Human
cuccauaaaaacugacccauccuuugcaucaacaauaguggcuugaugacgcucuucaguagaggauuuugcauuucauaugggg

SEQ ID NO: 4124729 - RNA, 67 nt, Human
cuccaucuccaaaagagauuaauaagauaaauaaaaguuuauuugccagaauuucucuuggggagag

SEQ ID NO: 4124730 - RNA, 61 nt, Human
cuccaucucuguaccucagggggcuaaaaguaguaagugcagagcccugggcacaugguag

SEQ ID NO: 4124731 - RNA, 80 nt, Human
cuccaugagauaaaaagucgagguaaaacgguuccuuugggggaaagacuuauuuugacuucaccugguguuucgcggag

SEQ ID NO: 4124732 - RNA, 75 nt, Human
cuccauggaaugucacaguugcaacaugaaucaacaaugauuccugucaccagacuugaugccuuccaucucgag

SEQ ID NO: 4124733 - RNA, 86 nt, Human
cuccauuggcuaccacagugggccacaagaaguucaggguugauaacaagaagcagggaccuuggcccauguaguagcagauguag

SEQ ID NO: 4124734 - RNA, 70 nt, Human
cuccauuguuccucacguggacagaugaugcguccugguaaagcauguauuuuccaaaaggaaguuggag

SEQ ID NO: 4124735 - RNA, 56 nt, Human
cuccauuguucgcgcagcugcaagccugcaaucccauggcugugagaaacauggag

SEQ ID NO: 4124736 - RNA, 79 nt, Human
cuccauuuccgggagcacagcugucuugcaagcuguccgaacggcagccccgugcccagcagcuggccaccgagugggg

SEQ ID NO: 4124737 - RNA, 62 nt, Human
cuccauuuguauuccaggaaugugauauauguauaaugugauauccuggaauccaaauggag

SEQ ID NO: 4124738 - RNA, 68 nt, Human
cucccaaguuucuacaugccucuuucacccuaugagaaggugguguggaauagugggaaaauugggag

SEQ ID NO: 4124739 - RNA, 58 nt, Human
cucccaccuuggcuucaguagcucacccagcucacaggggagcugcccugggcuggag

SEQ ID NO: 4124740 - RNA, 77 nt, Human
cucccacuggcuggccucacugagggaccugcauccuaaucucaggguggcaggaggaugaggcggcuacuugggag

SEQ ID NO: 4124741 - RNA, 55 nt, Human
cucccagccaggcuugguggugggcagaucccaagcugaacuuguuugcugggag

SEQ ID NO: 4124742 - RNA, 58 nt, Human
cucccagggccaucgagucacuucaaugagugugucugccuguaaggcccgaugggag

SEQ ID NO: 4124743 - RNA, 67 nt, Human
cucccagguugauucuuucccugacacaaaacaggcacuaugggcaaagacaccugcagccuuggag

SEQ ID NO: 4124744 - RNA, 127 nt, Human
cucccaguuguuucugcauuggugggagguuggugggagauuggcuggagugggagaaguuuauagcucauauuucaucucucacucugcuaccaugccucagugucaggacaagaaauaacuggag

SEQ ID NO: 4124745 - RNA, 65 nt, Human
cucccaugaggccauggcugucacuaaauacuuucugucuuugggaacagcaguuggcucuggag

SEQ ID NO: 4124746 - RNA, 72 nt, Human
cucccauggaggcagcaauaagcccugggcagaggaagagggaauguugucugaggcuguuguaccagggag

SEQ ID NO: 4124747 - RNA, 89 nt, Human
cuccccacugcagagcagcuggcugcaucuagaaguuucugcaccuccgucugggcaucagauguuuaccucuggucugcggguaggag

SEQ ID NO: 4124748 - RNA, 80 nt, Human
cucccccaaaggauggugguuugcaucccauucccgccaacuggcugauggcaggugauagccgagucacauggaggggg

SEQ ID NO: 4124749 - RNA, 59 nt, Human
cuccccccacaguguucuugccaaugagagaaaugagcaggagcauuguugugguggag

SEQ ID NO: 4124750 - RNA, 88 nt, Human
cucccccggaacucgcgaauccccugucggaacaguggcucagacggcagccccuccccacuguuggcccgaaggggucuggguggag

SEQ ID NO: 4124751 - RNA, 68 nt, Human
cuccccucuuuuaguucuaacuggagagcaaggcagagacccuucacagaugcugagagggcugggag

SEQ ID NO: 4124752 - RNA, 55 nt, Human
cuccccuuucccagaagcccgagcaaagcuggcucuguacgcaggaugaggggag

SEQ ID NO: 4124753 - RNA, 58 nt, Human
cucccgcaugagaugcugcagcugagaauucacucagcugcagaugcucagcgggcag

SEQ ID NO: 4124754 - RNA, 84 nt, Human
cucccgccccguucccaggaagccucuccaagcgaccccugcccagagcgcugaggcuccucgggaggacaaacggcgcggggg

SEQ ID NO: 4124755 - RNA, 61 nt, Human
cucccgcccugacacagcugcuccugggaaccuagugcagacccacguccagggccaggag

SEQ ID NO: 4124756 - RNA, 88 nt, Human
cucccguccaaauuagauugguuacucaauuugacugagugcuuagaaauuagucaauaaggcaacuaauuaauaauuugacuggggg

SEQ ID NO: 4124757 - RNA, 62 nt, Human
cucccgugauccuggaggagagggucugaauauauguggccaccccuaaagacucacgggag

SEQ ID NO: 4124758 - RNA, 64 nt, Human
cucccuaauaauagagguggcauuugaguuguuaccaaguggucaaaucucuuauuucauggag

SEQ ID NO: 4124759 - RNA, 76 nt, Human
cucccucaaugccacccugaccccacggcuggagaacccugugcuuauguggugggcagggccacuguugauggag

SEQ ID NO: 4124760 - RNA, 57 nt, Human
cucccucgucucucucugacagguauucagcuaccaccuacuagagagggcagggag

SEQ ID NO: 4124761 - RNA, 56 nt, Human
cucccucucuaaggcaaagagauauuucaauguuaccugggaccugagaaaggggg

SEQ ID NO: 4124762 - RNA, 71 nt, Human
cucccugaggacaggcccuguccccacucugccauauugcaggugucaaacacugggccugacuuugggag

SEQ ID NO: 4124763 - RNA, 77 nt, Human
cucccugcuguguguggggaggacgggcgccuuccugucacccacaggcucugugcauccuccccaagcacagugag

SEQ ID NO: 4124764 - RNA, 72 nt, Human
cucccugggcagauguggcucuccuugggcagguguggcucuccuugggcagguguggcucuccuugggcag

SEQ ID NO: 4124765 - RNA, 64 nt, Human
cucccugugucaucagcuguggcuacaaggacaggcuugugcagcagaauauggcugcagggag

SEQ ID NO: 4124766 - RNA, 59 nt, Human
cucccugugucuucacuuggccugauugccaaacccagcgccuucugagauacuggggg

SEQ ID NO: 4124767 - RNA, 70 nt, Human
cucccuuccucaaucaucuucuggggcucccuauuggucaaaaccaaugggaagccagaagacaagggag

SEQ ID NO: 4124768 - RNA, 56 nt, Human
cucccuucugagccuuuuguuaaguucucauggggauccacgaaccucagagggag

SEQ ID NO: 4124769 - RNA, 80 nt, Human
cucccuucugaguuguaaagcugagaaagagguuugguuuguaaggccaaaccauuagguuuuaucuacucagaugggag

SEQ ID NO: 4124770 - RNA, 98 nt, Human
cucccuugauucuaaccauggagugucaccuuccugguuauuggagaaaucuauagcagcuucauuaaaccagagugacacucuacagauuuuaggag

SEQ ID NO: 4124771 - RNA, 69 nt, Human
cucccuuuggcagggcaucagacacguggaccacuuuggguuuaucugucgggagucuuccggaggugg

SEQ ID NO: 4124772 - RNA, 62 nt, Human
cucccuuuguguaagucaaggagaaauugauuaagucauuuugcuugagugcacaaaaugag

SEQ ID NO: 4124773 - RNA, 90 nt, Human
cuccgcagaggcaggcucuucccagcuccacgagaggcggagaauugcaacuucuuccucucugggaacggccuaucuagcuccugggag

SEQ ID NO: 4124774 - RNA, 84 nt, Human
cuccgccugugcucugcagggccuuuuagcaucuucucaucuggugggaggaaugcaggcccuuggaaguacgaaugcagggag

SEQ ID NO: 4124775 - RNA, 75 nt, Human
cuccgcgcuggaagcccacguuuggugauguauguguuaugauggccacguguccuucccccaucagcgacgggg

SEQ ID NO: 4124776 - RNA, 60 nt, Human
cuccgcuguguguuuuugugcccucaggaauguguggaugcagcaaaugacaacagugag

SEQ ID NO: 4124777 - RNA, 58 nt, Human
cuccggguagcugaggcccuggaaguaguagugcugguacauggucucauacugggag

SEQ ID NO: 4124778 - RNA, 90 nt, Human
ccuugucuaucuuauauacuguagcaucucuagugacuaggccacagugccuggcacauaguaggugcucaauaaaugaucagugacugg

SEQ ID NO: 4124779 - RNA, 83 nt, Human
ccuugucuguggaaaaauguggugacugaguaaaguuguuuuuuaacuuccaaaccucaguuucuucaucucccuaacaaugg

SEQ ID NO: 4124780 - RNA, 77 nt, Human
ccuugugaaucaacaugacaggagaagagagugaugagaaauaaaaucagucucccuuuuccucugugaauacaagg

SEQ ID NO: 4124781 - RNA, 84 nt, Human
ccuugugcacuuguccucuucaacugccaggcagucuagcucuggcaauaggcucuggacagugaggaguuuuguagcaggagg

SEQ ID NO: 4124782 - RNA, 72 nt, Human
ccuugugcuuacuugcuauauuucuuuagggaaaaaguucuuagacaggaaacaguugguaaugcauauugg

SEQ ID NO: 4124783 - RNA, 130 nt, Human
ccuuguggaggaaaggcuggugggaggaaagaaggcuuguugaguaucuacugcacacccggcccuggggcuacggcuggaagcuggacaggccggguccuugcccuccugagaccugccuucuaguggg

SEQ ID NO: 4124784 - RNA, 75 nt, Human
ccuuguguaugugaguaccugucaugugcccacguauccugguggcacaaaagguacuucauguagauugucagg

SEQ ID NO: 4124785 - RNA, 99 nt, Human
ccuuguuauauaccuuccuauacauuuccuucauaacauuuaucacaguguuaaauuauugagggauugucaggcuauaggugguacuugaugacaagg

SEQ ID NO: 4124786 - RNA, 61 nt, Human
ccuuguucuguguggggagggaggcagcgcggugguuaucaaccucacccugcagaggagg

SEQ ID NO: 4124787 - RNA, 125 nt, Human
ccuuguugauuauaauauuuggagaucuuauuguggagaagggaagaauacuggaaaauauagaauauucugucuuuuuauacaucuaagugaaagaguuuuuaaaagauauuauaauucagagg

SEQ ID NO: 4124788 - RNA, 75 nt, Human
ccuuguuugcccuaggaucucacagauccacucuccccuuuggagcuccucuguccagagguccuggagacaggg

SEQ ID NO: 4124789 - RNA, 94 nt, Human
ccuuuaaccugagagcauuccacacugaagucugcuuuucuugaagcaaaaauucuaguguccuuggacuugcuauuuuaucagggaucaaagg

SEQ ID NO: 4124790 - RNA, 78 nt, Human
ccuuuaagacauggagggaaugucuagcauucuucacggaaaugugccugugaggagcauuaacuccuguuauacagg

SEQ ID NO: 4124791 - RNA, 76 nt, Human
ccuuuacagcugcuggcaagcuugaaacuggcaucacaccaaacucuagaacuaagcagaagccaguagcaaaagg

SEQ ID NO: 4124792 - RNA, 87 nt, Human
ccuuuagcuuaaugacccagcuucuugugccuaaguuacagucugggacugcugcaggaacuuaagaagcuucauuagucuuuuagg

SEQ ID NO: 4124793 - RNA, 99 nt, Human
ccuuuagggcugcugaacuugguuaugcaauuucuuugcugcauggagguaucagccaaagagaccccauauccacaagguauugcacuugcccagagg

SEQ ID NO: 4124794 - RNA, 62 nt, Human
ccuuuaucuguggaaguguuuacucaugagauaaacgucuauuaacaucuuuccaguagagg

SEQ ID NO: 4124795 - RNA, 64 nt, Human
ccuuuaugagauccuggggugagcacuuugacaaggcagucacccccaaaggagcucgcaaugg

SEQ ID NO: 4124796 - RNA, 96 nt, Human
ccuuuauuguugcuucuauuguggcuuuauguaguuaaacccagaaaaguuagaguuuccaaauaugaagccauaggacagaggauaagaaagagg

SEQ ID NO: 4124797 - RNA, 69 nt, Human
ccuuuauuuuacuaugacgggaagucuuccuauucuuaaaagauuagccugcucuuuagugaaagaugg

SEQ ID NO: 4124798 - RNA, 75 nt, Human
ccuuucaauauacagagacuuuauggcacaaaauauaguuuguuuugguaauaucucugugcgcacuugaaaagg

SEQ ID NO: 4124799 - RNA, 65 nt, Human
ccuuucaucaacauuugcauccuuccacucaagauucagaguucggcaggaaagcguugaauggg

SEQ ID NO: 4124800 - RNA, 96 nt, Human
ccuuucccaaaggcaggcccccugugcagcuucaacuauucacucuauuuauaauguuguuccuggauauugggcuugcuuccacuuguggccagg

SEQ ID NO: 4124801 - RNA, 84 nt, Human
ccuuucccagcucuaugacauuauaaaggauuauugugaaaaugacaguaggguuugggaguuacuaguaaagcuggcuaaagg

SEQ ID NO: 4124802 - RNA, 80 nt, Human
ccuuucccuccagagagaaaggaggccgcucccaaguccguccuugccccguggccuuccuguuccuuugaagggggggg

SEQ ID NO: 4124803 - RNA, 66 nt, Human
ccuuuccucgagguauagggaggguaucucucaaaugaggagucuacgaccugcuucaggggaagg

SEQ ID NO: 4124804 - RNA, 56 nt, Human
ccuuuccugccuggaccucugcuugagaacaggaagaggugugggcgggguugagg

SEQ ID NO: 4124805 - RNA, 55 nt, Human
ccuuuccugugcuuucuguuuuaugauuugaauaugacagaguccagaggaaagg

SEQ ID NO: 4124806 - RNA, 57 nt, Human
ccuuuccuguguccuuuuaagguugacacagugcuuuaagagccuaacacagaaagg

SEQ ID NO: 4124807 - RNA, 73 nt, Human
ccuuuccuucuguguuaucauuucaguacguaggugguugccuuguacagggaaguaauacaagcgggaaagg

SEQ ID NO: 4124808 - RNA, 58 nt, Human
ccuuucuaacagauuguggaucgcuuugaagagcagcguccuacauucauaggaaagg

SEQ ID NO: 4124809 - RNA, 56 nt, Human
ccuuucugacagugauggggggccaggccugguacccccauccaugucaggagagg

SEQ ID NO: 4124810 - RNA, 92 nt, Human
ccuuucugccugcuguuucugagccagagcuacaagugucugugugaguuauggguucuuaucucuuggcaauuagagcagcucagcaaagg

SEQ ID NO: 4124811 - RNA, 63 nt, Human
ccuuucuugaugaaugcuaagaacuagagugggguucagguuuuaaccauucacaagugaagg

SEQ ID NO: 4124812 - RNA, 61 nt, Human
ccuuucuuuagcaauucuuucaugccauccauauguugugauuacaagggccaaagaaagg

SEQ ID NO: 4124813 - RNA, 67 nt, Human
ccuuugaagauacagcucuggccagaugugggcacuccuauguuccuggggcuguggucaaagaagg

SEQ ID NO: 4124814 - RNA, 73 nt, Human
ccuuugacuucccagacuuguguuucuuuccaacagaggcgaauaaacacucuugguaugugaagauuaaagg

SEQ ID NO: 4124815 - RNA, 56 nt, Human
ccuuugauuucccccgucucagcuaguuaguuucuugagaggggagagaacagagg

SEQ ID NO: 4124816 - RNA, 56 nt, Human
ccuuugcaauccuguaggccuuucucaaggaagagccauauauauuuugcacuagg

SEQ ID NO: 4124817 - RNA, 66 nt, Human
ccuuugcaugugguagaagguuccuuuucagauacauuuguguagaaccuaugccacauguuuagg

SEQ ID NO: 4124818 - RNA, 80 nt, Human
ccuuugcccugccagcugacccgugggaggcgggacuggccuaacaguucucuaauccaaggucagcucgggugcggagg

SEQ ID NO: 4124819 - RNA, 73 nt, Human
ccuuuggaaauauccagguagaugucuucucuuugggaaacaguuggaugaaaaggccugguguuuaggaggg

SEQ ID NO: 4124820 - RNA, 57 nt, Human
ccuuuggcugacuuuuaugcacacuaaaguuuuaguacugauagggucaaucaaggg

SEQ ID NO: 4124821 - RNA, 60 nt, Human
ccuuuguccaucgugccucaugucucauggcuuguggagugagagacugguggauacagg

SEQ ID NO: 4124822 - RNA, 76 nt, Human
ccuuugucuagugccucuugucuacgguuuucugcuagauacagaaaguaucaagggaagcauuuuggaucaaagg

SEQ ID NO: 4124823 - RNA, 58 nt, Human
ccuuugucuuggccucaguuuucuguucuaugaaaagaaaauagugguaggacaaagg

SEQ ID NO: 4124824 - RNA, 63 nt, Human
ccuuuguggaugcagacgcugucacacucauuaauuaguuaaucugcacagccccgcaggagg

SEQ ID NO: 4124825 - RNA, 86 nt, Human
ccuuuuagaauacuagaugucccaagugugccaugccaaacccuuuugcuuugaaugcccuggacuucuaguauucaaugaagagg

SEQ ID NO: 4124826 - RNA, 67 nt, Human
ccuuuuauacucagugauaucacggcuucuccguagcuguuuuauucacgucugggagauaaagugg

SEQ ID NO: 4124827 - RNA, 78 nt, Human
ccuuuuauaguaugagauaggaauguuuaugugggguuucaucaguggauauauuuauauaggcuuccauaugaaggg

SEQ ID NO: 4124828 - RNA, 112 nt, Human
ccuuuuauguacucuaaagauguuuuaucauagaagugcaauuucaggaagagucauaugcuuugauucugagggagcauucugccagcugucuucauggaguaagcaaagg

SEQ ID NO: 4124829 - RNA, 81 nt, Human
ccuuuuauuuuuacucagcaaguauuuucugaaugccucuaacauacaaaguuuuagguagggaaauagaaaauuaaaagg

SEQ ID NO: 4124830 - RNA, 91 nt, Human
ccuuuuccucuccauaaaucuguuaucugcugcuguggcucagaugccucauccugaggaaggugcagagauuuuugggguggucucaagg

SEQ ID NO: 4124831 - RNA, 62 nt, Human
ccuuuucuaaucuuaagaaugucuuuagaagguuacugaaaguuucuuguacuuggagaagg

SEQ ID NO: 4124832 - RNA, 55 nt, Human
ccuuuucuauguaccagcagugaggacuuuauuuauugcauuaugguaggaaagg

SEQ ID NO: 4124833 - RNA, 61 nt, Human
ccuuuucucccugaguuuguggcuaaguuccaggaggcuuaugucacagcuuugggaaagg

SEQ ID NO: 4124834 - RNA, 78 nt, Human
ccuuuucugacagaagcagugugaacccauguaacuaucaggaauugucacguaggguauauucuugugucaggaugg

SEQ ID NO: 4124835 - RNA, 129 nt, Human
ccuuuugaaccacagagauaauuuauuagaugccagaauguguuauuagagaaggaguaaugaagaagaacacucuuuuauguuaauacuuuuuuacauuuuguauaugucgcuauguuaggcaaaggg

SEQ ID NO: 4124836 - RNA, 56 nt, Human
ccuuuugaagguguuguuaagugauaucuccuagguguaguaacauuuuuaaaagg

SEQ ID NO: 4124837 - RNA, 110 nt, Human
ccuuuugcucggcuuuguugccaauuucaugccauguauugcuccauguuuugugcuucaugaagcugucacaggcauaaaaguggucugaccagggucguaguaaaagg

SEQ ID NO: 4124838 - RNA, 72 nt, Human
ccuuuugugucuguugagauuuuuuuaguuucagcuguuagaaacuaaaccuggcuuaguaagcagaaaagg

SEQ ID NO: 4124839 - RNA, 93 nt, Human
ccuuuuguuccaauccccaagcucuuuccacuaaaccacugcagaauagcaaucaugauuuagaagaaauuaauccuagguauggauaaaagg

SEQ ID NO: 4124840 - RNA, 80 nt, Human
ccuuuuuauaaucuuccuauuuuugagguguuggaacauuagucuucaaggccuucuugggagagauugaacuggauggg

SEQ ID NO: 4124841 - RNA, 56 nt, Human
ccuuuuuccuccuuggugucuucaacugaacaagggcuugaagggaggaaagcagg

SEQ ID NO: 4124842 - RNA, 97 nt, Human
ccuuuuucuuccucuuacuaacuauacuuauccuugguuuucuguuaagucauuuaaggaauuuaaggaauuuauaguuguacuuggagggaagggg

SEQ ID NO: 4124843 - RNA, 59 nt, Human
cgaaagcugugcacuggguccaggaugacuugcacacccuguucacugcacaguuuccg

SEQ ID NO: 4124844 - RNA, 77 nt, Human
cgaaaucgugcaguguuuggauccauagcgaggguguuguaaaucauuugucgcuacugguaaaauacugacuuuug

SEQ ID NO: 4124845 - RNA, 61 nt, Human
cgaaggcacugacugugcaggggacggaguucguuucucaucccccacucucagugccucg

SEQ ID NO: 4124846 - RNA, 126 nt, Human
cgaaggcauuuaacugucgcaagcaggaggcaggccucggagccacaguggauugauuccauccucgaaauggagccuacccaagcuguagguggcgcucuuccugcuuucuccagugugcuuuug

SEQ ID NO: 4124847 - RNA, 91 nt, Human
cucuaaaguccuuccacagcuggggcagggaugggaaacuauggugaccucaagugcucccauauccugcccuuccuagggcagaauggag

SEQ ID NO: 4124848 - RNA, 71 nt, Human
cucuaaaugcuuguauugggggaaaaaagcuggagguuaauuuuuuagacauccaauuuaagaauuuagag

SEQ ID NO: 4124849 - RNA, 69 nt, Human
cucuaacuccugaccuuaccuggaaagcauguaaaucugccugcagggccagacuggguuggacuugag

SEQ ID NO: 4124850 - RNA, 70 nt, Human
cucuaacucuccuacuuaagacagcuuuggaguuuggacucaagcagcuguugcugggaggagagaagag

SEQ ID NO: 4124851 - RNA, 84 nt, Human
cucuaagaagguacaccugcaguuuguugugaccccguuucagaacggacagaaccaagugcaggcuuacucuauuugguagag

SEQ ID NO: 4124852 - RNA, 129 nt, Human
cucuaagcaugauauugggugugugguuuaagcugcccuuugacuccagagcccuuuguccaagugugacaaaauaucagcaaagggugacaugagcuacagccgccacccucgggucaggcguugggg

SEQ ID NO: 4124853 - RNA, 77 nt, Human
cucuaauccccauuuuucuugucucuaaauugaugcuacaaauagugucuucuucauaaggagagugcugaguaggg

SEQ ID NO: 4124854 - RNA, 81 nt, Human
cucuaccauguacugccuacgucugcuauaauucagugguucuucacuguuagagcaaacguauguuuugugaugguugag

SEQ ID NO: 4124855 - RNA, 71 nt, Human
cucuaccccuggaugacucaggaaaaacaacgcaaggaguggagguggcuuccugggugguccugguagag

SEQ ID NO: 4124856 - RNA, 87 nt, Human
cucuacucaugcaguuccuuuugccuggaaaguuacuuccuucacaaaugccaggacagcauuuucagcaucucugcaucuguagag

SEQ ID NO: 4124857 - RNA, 68 nt, Human
cucuagacaacuugcuguggguaacuuacugcacccauucuacaacuaguaagcugaauuuucuagag

SEQ ID NO: 4124858 - RNA, 56 nt, Human
cucuagagccaaagucuugggggguugugcuucccucugacccacuggacucugag

SEQ ID NO: 4124859 - RNA, 70 nt, Human
cucuagagccucagucuauuuccagcagguguguggcccacaccuggaguggggauacugaggccaggag

SEQ ID NO: 4124860 - RNA, 95 nt, Human
cucuagaugacaaguagaaggcagguuuuaaaaugucugaaaauugcaacuucagcgcuuuugcaacaccugcuuuuacgaucugucacguggag

SEQ ID NO: 4124861 - RNA, 71 nt, Human
cucuagcacuuaguacagcugacauuggcagcuauuuguugaguggcugagugagcggucuuaggcuggag

SEQ ID NO: 4124862 - RNA, 91 nt, Human
cucuagcuucuucugcaguaucuguaaacacccguaagcuuuccugggggaaauuugcauggugauacacuucugcuaggagaguucagag

SEQ ID NO: 4124863 - RNA, 68 nt, Human
cucuaggauuuaaauccuuaaccacuauucuauacuauuugagccaguuagaguuuuuagguccugag

SEQ ID NO: 4124864 - RNA, 55 nt, Human
cucuagggaagaaugagagcccagaaaauugucacugcgccuuccuuccugggag

SEQ ID NO: 4124865 - RNA, 62 nt, Human
cucuagggaauauaauguaugccauucugaaaggugguauuucagcuuuuguaucuuugggg

SEQ ID NO: 4124866 - RNA, 82 nt, Human
cucuaggucucugcuacaguuguaaaguucuagguguguguuugacaugcuuuuuaaacuuaauuggaaagcagagcaggag

SEQ ID NO: 4124867 - RNA, 96 nt, Human
cucuaguggcuuuucuggaaggcucugcugccugucuggugccagucuucugucuuggacugggcaacagggccucccagaacuuuucuacuaggg

SEQ ID NO: 4124868 - RNA, 71 nt, Human
cucuaucuuugucugucagcucuuccucccagaaguagcucagagacuugcugagcacaccuaggguagag

SEQ ID NO: 4124869 - RNA, 69 nt, Human
cucuauggagacuuuaaaaagggcaaauaggccauaaucccagcccuugcuuauuuauagucaauagag

SEQ ID NO: 4124870 - RNA, 63 nt, Human
cucuauuagcugaauaaugcauuguugggagagaaauaguccaguaaaacagcuaacguagag

SEQ ID NO: 4124871 - RNA, 69 nt, Human
cucuauucuuuuaauuucugucugcagaagggcuaauauucaggacagaaauaaggaauauaauaagag

SEQ ID NO: 4124872 - RNA, 94 nt, Human
cucucaagucccaucuuccaggugacccucucaccugcuucuaagccuuugaauggguuguaagagguugggggcuggggguuagggaugagag

SEQ ID NO: 4124873 - RNA, 69 nt, Human
cucucaccuuguggcugugggucaaaaaucagcaaaaaaucaaugacaauaccuacaucauugugagag

SEQ ID NO: 4124874 - RNA, 62 nt, Human
cucucagauccucuccgaaugcguaguaacugcgaugaauucccgcagagggcuucugagag

SEQ ID NO: 4124875 - RNA, 78 nt, Human
cucucaguuacuugacacaaccaauugaaucuugcucaaggcaguggaaguuggguuugugucaguugcaaccaagag

SEQ ID NO: 4124876 - RNA, 60 nt, Human
cucuccagggcuggggguaggaggaugcaaggacuuccuggccuagcucacccuggagag

SEQ ID NO: 4124877 - RNA, 60 nt, Human
cucuccagggugagcuaggccaggaaguccuugcauccuccuacccccagcccuggagag

SEQ ID NO: 4124878 - RNA, 65 nt, Human
cucuccagucauauucucagucaaggcuucccugacagucccacuacuagaaagucacugggggg

SEQ ID NO: 4124879 - RNA, 56 nt, Human
cucuccaguuauagcugauuugaaacuucccaaugaaucaggagucgcggggagag

SEQ ID NO: 4124880 - RNA, 126 nt, Human
cucucccaguuuucucaacauaagacucacggagacgacauagaagagggaagagacauuacaauucuuauucauucaucugguguuaguccucacguuaguuaguauucagcaagaacuggagag

SEQ ID NO: 4124881 - RNA, 65 nt, Human
cucucccaugugcagagaugggagcaccaaugucuauggaaguuccagguuucgcuacaggagag

SEQ ID NO: 4124882 - RNA, 61 nt, Human
cucuccccagagaacacuugagugauuuuccuaucagucagcaguggguccugaggguggg

SEQ ID NO: 4124883 - RNA, 88 nt, Human
cucuccccaugaaggagcaccacagguugaggggaccacaucaguugguccuggaguauuucuguggugucugcuuuaccuaggagag

SEQ ID NO: 4124884 - RNA, 72 nt, Human
cucucccgugacaguaacugagagauguaauauccuccagccgguggaagaaguugguccucagcgggaggg

SEQ ID NO: 4124885 - RNA, 70 nt, Human
cucucccuaagacacauucauacguucaacugaacauuuauugagcaccuacuaugugcuagggauagag

SEQ ID NO: 4124886 - RNA, 129 nt, Human
cucucccuccuccagccccagcagccaggggccuggagguuggcggagggcugagcagcccagcuuccugcuuccuggccucacaagcaggccucugugaaguugccagggcuccaggggcaggggcug

SEQ ID NO: 4124887 - RNA, 126 nt, Human
cucuccucuauauacuguuggugucuccuacaggcugaacucaaugaugagucagagaaccaagaagacugguugaugaggucaggcuccagggggcgcugaaacaggugaagaaugggggagaug

SEQ ID NO: 4124888 - RNA, 62 nt, Human
cucucuagaggcccaccuugagucacuucauuaccauaaacuaucagguguggucaagggag

SEQ ID NO: 4124889 - RNA, 91 nt, Human
cucucucacuuucucacuuuucaauccccagcagauuuccauacccacaaagacaucuguacagauaucaggagugaggaccgagccugag

SEQ ID NO: 4124890 - RNA, 57 nt, Human
cucucucaguguaauacaggauuguugugaagaucaaaguaauuaacacugagaaag

SEQ ID NO: 4124891 - RNA, 60 nt, Human
cucucucaucuggaaagcagaagaaaaauuaagcaagucuguucugcacuccugagagag

SEQ ID NO: 4124892 - RNA, 70 nt, Human
cucucucucucucugccagccccagggaugaccuagagucuaacccugacagauggcaggggagcaagag

SEQ ID NO: 4124893 - RNA, 91 nt, Human
cucucugaaaaccuauccaccugaaauuguccucuguaugggauaggagcucaauaauggcaggauaaauuuauaaaugauagacagggag

SEQ ID NO: 4124894 - RNA, 57 nt, Human
cucucugagucucagcuuccuuaucuguaagauagggacaguauccaucucacagag

SEQ ID NO: 4124895 - RNA, 63 nt, Human
cucucugauguggcagcugcaucuaaaugcuuuuuaguuguuucacaugccagcauucaggag

SEQ ID NO: 4124896 - RNA, 64 nt, Human
cucucugcccccacuaaguugagggcccucucagaggaagggggucaaaaggugggggagggag

SEQ ID NO: 4124897 - RNA, 56 nt, Human
cucucuggcccauccuguugccuggagcaaccaggggcagccugacccccagagag

SEQ ID NO: 4124898 - RNA, 55 nt, Human
cucucugggggccaugccaagaacuccccuccaauggcgccugcccccagaggag

SEQ ID NO: 4124899 - RNA, 61 nt, Human
cucucugugcacuucucuuuauuugugaagcaguuggcuccagagauugagugacagggag

SEQ ID NO: 4124900 - RNA, 61 nt, Human
cucugaacuggaacuuaguuuuuuaaauccugucuagguaaauuaccuuuccagugcaggg

SEQ ID NO: 4124901 - RNA, 102 nt, Human
cucugaaucaaggucaugugucagcauccuuugggacagugcuuacuuuucauauagugucuuucccguuugaagguguuuucacugauccgccuuacagag

SEQ ID NO: 4124902 - RNA, 69 nt, Human
cucugaaugaucuaguuuuguagacaauagagagaaaacaauugauuguaaaacagaucauuaucugag

SEQ ID NO: 4124903 - RNA, 78 nt, Human
cucugacaaucaaagucccagcugcuuagagacaagaguccugaccugaacuggggucuuuagaauuuggauucagag

SEQ ID NO: 4124904 - RNA, 77 nt, Human
cucugacauucugccaccaacacacaggaagcaaacagguuuuuuucuacugguguugguguacuuugugcucagag

SEQ ID NO: 4124905 - RNA, 67 nt, Human
cucugacuccucuguugcuaggcccagcagcaccucguggcucccagggcagcgcagaagaguagag

SEQ ID NO: 4124906 - RNA, 57 nt, Human
cucugacuccugccccccucuuggggcuucccacaggauccugguacaggagcagag

SEQ ID NO: 4124907 - RNA, 59 nt, Human
cucugaggucagugcugcaguuauccccauuuuaaagauaagaaaacugagacucagag

SEQ ID NO: 4124908 - RNA, 58 nt, Human
cucugaguagauagggaaccugcagccgggcugcucaagggccucuguguacuggggg

SEQ ID NO: 4124909 - RNA, 65 nt, Human
cucugaguuucauuucccuccucuguauaaaugagaggcuugcacauggcuagugaagcucaggg

SEQ ID NO: 4124910 - RNA, 76 nt, Human
cucugauuuuugacaucaauacccuagaauaggcaauaacauaugcaacuauuuuagauaaugauaaaaagaagag

SEQ ID NO: 4124911 - RNA, 56 nt, Human
cucugcaaucugagcacuuguaagaaaacuggaaagggcacagucagguugcaggg

SEQ ID NO: 4124912 - RNA, 106 nt, Human
cucugcaaugugucaggagauucaucaguguccuuaucacuuauguuuucucauauugguuauaagucagggucauugugauuuuuucagacagcguaugaaaggg

SEQ ID NO: 4124913 - RNA, 69 nt, Human
cucugcacguauaaucagucuguuucuccaaauuaggagguucgagcagaguguuuguuacuuguagag

SEQ ID NO: 4124914 - RNA, 55 nt, Human
cucugcagaggcccaaggcugagacaugcaaguuuccuugcuggcccugcuggag

SEQ ID NO: 4124915 - RNA, 80 nt, Human
cucugcaugaugaacaaaugagcaaaugaagaacacacauacagauucucucccacacgcucacauguucauuugcacag

SEQ ID NO: 4124916 - RNA, 94 nt, Human
cucugcauuuuccuagaaggccucccucuggcugucagacagaucaggcuggugaccacgagccagggggacgcuuucuggcccaaccacagag

SEQ ID NO: 4124917 - RNA, 91 nt, Human
cuaucugucgcuuuccugaggggucucaugcccauccuucuccaacuuuucuaaugaugucugagauucuguucagaaaaaugacagacgg

SEQ ID NO: 4124918 - RNA, 75 nt, Human
cuaucuuucgauucuagcuuaaggugguuuaaacuacaugaaugagcuguauuucuggcuggaguuacaggguag

SEQ ID NO: 4124919 - RNA, 74 nt, Human
cuaugaaaauggguauacaaauaaucucuuugagacccagccuucaguucuuuuggauguauacccagucgugg

SEQ ID NO: 4124920 - RNA, 129 nt, Human
cuaugacuacaacuucugcgguagguaacagagaggccaccucagcagcaugcaguaaagcaguucucacaauguuuguugagucaaugauuccuuuuucuaccauauucacagaaucuccaaucauag

SEQ ID NO: 4124921 - RNA, 73 nt, Human
cuaugagauuuuaaaacuucacuuuauggggagacuuuaacaccaucgauguagagggacgaaaucgccauag

SEQ ID NO: 4124922 - RNA, 55 nt, Human
cuaugcaguggggcaggugaggcuuggccugcccagccuguccugagugucaugg

SEQ ID NO: 4124923 - RNA, 110 nt, Human
cuauggaacauauuucagauugauacauuauuguuaaagaacauuagcaaaagccacauuuucuucauagcaguagcaccuugugagagaacugagguauagguucuuag

SEQ ID NO: 4124924 - RNA, 67 nt, Human
cuauggacuugugaguguucuccagagguacaggauuuaacauccuggugaggacuccaagauauag

SEQ ID NO: 4124925 - RNA, 76 nt, Human
cuauggaugccuuucuaggaauacacuuuccgggguuccuuuuuucccugagaugugaauuucagagcuuccaaag

SEQ ID NO: 4124926 - RNA, 130 nt, Human
cuauggcagaagugauuggucuguuaggaggaagauacucagaaguugauaaaguaguugaaguaaguucucucuuuuaaaaaaauguuuuaguuauuuaguccuacuaccauaccaaauauuuuuauag

SEQ ID NO: 4124927 - RNA, 79 nt, Human
cuauggccucuuucagggcugagacucugugaugaugauuucuuauuuuguccacacagaacaguaaaagaugccaugg

SEQ ID NO: 4124928 - RNA, 67 nt, Human
cuauggugucuggccagaaagacuugaugucuaaaauuagacauuuggagacugguuagaggcauag

SEQ ID NO: 4124929 - RNA, 130 nt, Human
cuaugguguuguuugguuaggucacuuuggcuuugaaucuggguacuuguaauacuguagucuaaacaguauuagugguaucugugauuuccuuaguggcuuggaguaugguugcuaguaaaggcuguag

SEQ ID NO: 4124930 - RNA, 58 nt, Human
cuaugucaguaugaggcuccuaaaauaauuuuauuuuaggcagcuacauacuaacugg

SEQ ID NO: 4124931 - RNA, 78 nt, Human
cuaugucauagaacacagaugggcguggcgcuugcugucugggcaaagccacgucuacauuugguuuuuauaauauag

SEQ ID NO: 4124932 - RNA, 78 nt, Human
cuaugugugagguuuuaauguucaucucaaaggaucauacugaugauuacaugagagaauguaaauacuggcguguag

SEQ ID NO: 4124933 - RNA, 67 nt, Human
cuauguuaauacacuauaugaucacauauguuagcaagagguauggaaucgggaguguugacgucag

SEQ ID NO: 4124934 - RNA, 56 nt, Human
cuauuaaacacuacugugcacuuacuuauguucuacaugggcaguguguuuaauag

SEQ ID NO: 4124935 - RNA, 84 nt, Human
cuauuaggcuggugcaaaaguaauugugguucuugccauugaaagugauggcaagaacugcaauugcuuuucacaaccuaauag

SEQ ID NO: 4124936 - RNA, 67 nt, Human
cuauuaucagcuagauaagucaagcaagcccucuugguugaagugauauuugagcugagaauuauag

SEQ ID NO: 4124937 - RNA, 111 nt, Human
cuauuaugucaucuaagugcugaaacauuagccauauagaaaaagagcucuuauagguagucucuuaauuuuuucuaaguguguuuauauuucuauuuagugaccacauag

SEQ ID NO: 4124938 - RNA, 86 nt, Human
cuauucacauuugcuuccuuuacuauagcuuuguuucagugucacauagcacuggaguucaugguaaagucagcaauucaccaugg

SEQ ID NO: 4124939 - RNA, 68 nt, Human
cuauucacuuugucaaauggaaaguaaaaguuuucugguacuuugcagcuugauaaaaugucucuuag

SEQ ID NO: 4124940 - RNA, 111 nt, Human
cuauuccccuuucuccuccucccuccccaccuucgcggucccugccucucuccuucccaucccacggggcagggacucagugagggaggcucaguuggccccggugagugg

SEQ ID NO: 4124941 - RNA, 95 nt, Human
cuauucuaagugaggaagaacaaggcuguuuccaaugccacaucaauuagguggugagggagcuuucuuuguugaguguuuccgcuucagacuag

SEQ ID NO: 4124942 - RNA, 72 nt, Human
cuauugaaugaagucccuuuuuacuaaauuuggauaucuagugaguuuucaagggacauuuauuuuaaguag

SEQ ID NO: 4124943 - RNA, 63 nt, Human
cuauugauggcggccucuccauaucacccucugagagcaugugggaaaaguggccaucuuuag

SEQ ID NO: 4124944 - RNA, 69 nt, Human
cuauugcacaaacacagucagacuucauuagaacaagcauggaaaucugagauguaacaugugcaucag

SEQ ID NO: 4124945 - RNA, 55 nt, Human
cuauugcauuugcaucuucauccuuuuaaagauggagcaacuuaaaugcacauag

SEQ ID NO: 4124946 - RNA, 74 nt, Human
cuauugcucagagauguuugggcuguacaauuucuguagauauggcaucuggagcagccuuuucuaagcaaugg

SEQ ID NO: 4124947 - RNA, 73 nt, Human
cuauuuaucuucauaccucuaguucuucuuuuagucucugacuuacaggaggugcuagguguuuauugaguag

SEQ ID NO: 4124948 - RNA, 60 nt, Human
cuauuucuguauccugcugucagauuuucuccacaguuuagcagaguuauauggaaguag

SEQ ID NO: 4124949 - RNA, 82 nt, Human
cuauuuuaauguugauuugcauaauguuuggccuagcaagaacaauacugaaugcuaauagcuacagaaugcaauaaaaugg

SEQ ID NO: 4124950 - RNA, 59 nt, Human
cuauuuuauggugucucauaauagcaauuucuauuuguuuuauguacuucauagaguag

SEQ ID NO: 4124951 - RNA, 75 nt, Human
cuauuuuauugucucacaaacaggaugcccagcguggauggguaucagcaaaauccuguuguaggcaguaauuag

SEQ ID NO: 4124952 - RNA, 59 nt, Human
cuauuuuuuuggugggauauuucuggaaaaaacuuucuagaauuuugcuaaaagacuag

SEQ ID NO: 4124953 - RNA, 75 nt, Human
cucaaacauaaauaugcaaggcaucgaagcaauuaccguugccccauccuauucauguuucugugcauguuugag

SEQ ID NO: 4124954 - RNA, 89 nt, Human
cucaaagguaggaaccuuguguuaucuuuuuuguucauacugucugagcacagugcaggagacauaauagggacuccaaaaauguugag

SEQ ID NO: 4124955 - RNA, 59 nt, Human
cucaacuaggccuguguucuaaacuggcagugaaugauuauccacaggugugguuugag

SEQ ID NO: 4124956 - RNA, 77 nt, Human
cucaacucucucuggcucccagcaaguacaacuauuuauaaaagaugagguuugccagggaacagggagaggcugag

SEQ ID NO: 4124957 - RNA, 95 nt, Human
cucaagaacagaugugcuucuaaaucaagccugucucaccagugcuaauauuuaguaguggucaaguuuguuggagagcucaucuguaacuugag

SEQ ID NO: 4124958 - RNA, 63 nt, Human
cucaagagaaauucauguggcagcuuaagcaucuucaguauguggcacagaauuucuuaggag

SEQ ID NO: 4124959 - RNA, 68 nt, Human
cucaagccuggguggucuugcuucccaggauaggaucucuguuucuggggaacccccggguucuugag

SEQ ID NO: 4124960 - RNA, 69 nt, Human
cucaagggcaggugugaguggacggugaagguggcugucaccaggccaaaaucauauuuacuucuugag

SEQ ID NO: 4124961 - RNA, 60 nt, Human
cucaagucagaaauaaaagcauuuauagaauuucaugguuuuaaguuuucugaacuugag

SEQ ID NO: 4124962 - RNA, 71 nt, Human
cucaagugugcauguguguguguauguguguguauacaugcauagggaaccucaugcauuaaacauuugag

SEQ ID NO: 4124963 - RNA, 67 nt, Human
cucaaguucuuagacaagcuuguggcagguccuaccuacuacaugucugguuuaaggaagaagugag

SEQ ID NO: 4124964 - RNA, 67 nt, Human
cucaauccuuguucugucuccuccacucaaauuccugaaggugguuugcagacagaauaaaagugag

SEQ ID NO: 4124965 - RNA, 83 nt, Human
cucaaugaucggcacggugggggcugagggccaggagcaaugagcaccuggcuggcuggaccacaccugcagagaucaaugag

SEQ ID NO: 4124966 - RNA, 83 nt, Human
cucaauggcuauuaguaaugugcucaagucccuguguguuauuacgccaacacacaaauuguaggauaauugcuggcacugag

SEQ ID NO: 4124967 - RNA, 95 nt, Human
cucaauuagcaccugggcaugguuuggucuuuguaguggauaaugucuggccacacaaagauggggcacgggccaggucaguucugcugacuggg

SEQ ID NO: 4124968 - RNA, 70 nt, Human
cucacaaaaauuuuaucuucauuccuaucuacaccaaaagggugcagagauuggaagaugaauuugagag

SEQ ID NO: 4124969 - RNA, 61 nt, Human
cucacaaagauugaaagauauacuguucucacacuuuuguguguguguguguuucugugag

SEQ ID NO: 4124970 - RNA, 111 nt, Human
cucacaauacuuguguccuucauauguauuagguguuuuacagacauuuuuucuaucauaauucuauauaauaaguguuagguaaacaucuuaacagaugaggaaacugag

SEQ ID NO: 4124971 - RNA, 65 nt, Human
cucacaccuggucuuugcaugagcauguuucaguaacacaugugggcacacacacagguagugag

SEQ ID NO: 4124972 - RNA, 74 nt, Human
cucacacuguuuaugccaaagccaaacgcaggcuucgaagcagagucuguggauggacuggcagaggugauggg

SEQ ID NO: 4124973 - RNA, 58 nt, Human
cucacaggagucauaauuacaguggaggcggcauaccauuguagugagaguucuggag

SEQ ID NO: 4124974 - RNA, 68 nt, Human
cucacauauuccauuucaaguuuugaauguggcccgucaucucauuauuuuggacuggaguguuugag

SEQ ID NO: 4124975 - RNA, 60 nt, Human
cucacaugguggaaggggcuaucuuucucccuguggccucuuuaaucccauccauguggg

SEQ ID NO: 4124976 - RNA, 77 nt, Human
cucacauucagguggcauguuagauucacugcugacuauugcuuuguuucacaguagccauuucaugaguuugugag

SEQ ID NO: 4124977 - RNA, 91 nt, Human
cucacauuuccaccccagauacaugaagaugaauguauggcaugauugaacuagaacauguuaucucagcuuaugucugauuggaucugag

SEQ ID NO: 4124978 - RNA, 80 nt, Human
cucaccacuugguuccaaagacagaaagcuugugucaaagcgaccugucacagcuuucacgauuuggaacaggugaagag

SEQ ID NO: 4124979 - RNA, 60 nt, Human
cuccagagauaccugauuugcugguaucugcccaguauuuccuggcuuaucugcuguggg

SEQ ID NO: 4124980 - RNA, 56 nt, Human
cuccagauagaguccuguuaguauugugauuuuugcucucaaaacuuucacuggag

SEQ ID NO: 4124981 - RNA, 70 nt, Human
cuccagccaaccaugccuuaauaugaaccacugugaaacugacacuagagguugaugagaggugcuguag

SEQ ID NO: 4124982 - RNA, 73 nt, Human
cuccagccucagcggcuggaauucgggugccccccuuccucgggagcuggagaaacugcagcugaggcgggag

SEQ ID NO: 4124983 - RNA, 79 nt, Human
cuccagcucccccauaucucaaaagcagcuuugugggagugccaauucuccagcagagucucugagggggguuuuggag

SEQ ID NO: 4124984 - RNA, 59 nt, Human
cuccaggagcagaggguggucagcagggucccguguugcaaggcccuagcuucaaggag

SEQ ID NO: 4124985 - RNA, 65 nt, Human
cuccaggagcuggccagaugucccaaagagcccugagggcucaugcauauggggucagcccagag

SEQ ID NO: 4124986 - RNA, 59 nt, Human
cuccaggccagggaaguggacaagguaaugagcuccuaggaauguccauuugccuggag

SEQ ID NO: 4124987 - RNA, 62 nt, Human
cuccagggagggagggucgggguccugggggcuucuggagccugggccuccugcccuuugag

SEQ ID NO: 4124988 - RNA, 55 nt, Human
cuccaggguuccagaagauauuccagaugaugacacugggcacuggggacuggag

SEQ ID NO: 4124989 - RNA, 60 nt, Human
cuccagugcacccagaggauuuugaaggcuuaugccaacaauucuuuggggcaguuggag

SEQ ID NO: 4124990 - RNA, 77 nt, Human
cuccagugcguggcagggguauuccagcugagcuuaacuagcucucaggggccaggagaccccugcugccauuggag

SEQ ID NO: 4124991 - RNA, 120 nt, Human
cuccaguguccugaagcccgguuccugaugauuccuggguccucacaaucccaggcccugucagcucuggggucucagggaugggaggccccagguucuggaagcuguugugcacuugag

SEQ ID NO: 4124992 - RNA, 86 nt, Human
cuccaguuccaagaguaaauucaaauugcauaugccagaaauuauuggcuucagcauagguuauggauguuauucuggccaaggag

SEQ ID NO: 4124993 - RNA, 66 nt, Human
cuccaguuuacaggguugcuuuuggaugggugaagccaagucacaagcauaccugugauuugagag

SEQ ID NO: 4124994 - RNA, 65 nt, Human
cuccauacacccuaugcccaaaucuggaaauccaaguuuccaaauauuaugauuauaggauggag

SEQ ID NO: 4124995 - RNA, 67 nt, Human
cuccaucagccccauggugugcuccagcaggcucaggaggcaggcacuggagaugggguugucggag

SEQ ID NO: 4124996 - RNA, 122 nt, Human
cuccauccaaauagagcuuguggacuucaucagccuagaccaaagaguucacggaggccaaagggagccacucuggugggcucagugggcucuacugaaaaguuuagacuucauuuggggag

SEQ ID NO: 4124997 - RNA, 57 nt, Human
cuccauggaaugugaguuguuuaguucuuuuuugaacugucagaaaaauccauggag

SEQ ID NO: 4124998 - RNA, 67 nt, Human
cuccaugucuuacaccugaaacccucccaccagccugggagcccguuuuacaggugagaaaauggag

SEQ ID NO: 4124999 - RNA, 60 nt, Human
cuccauucaauucuaaagcccuuagucaauuaucuguaggggccugggaacugaguggag

SEQ ID NO: 4125000 - RNA, 113 nt, Human
cuccauuucuuuuuaaauggcaacagugcaaaagcuuccuugcaugcuagaaagauugauuucccagagucaaaauuuuucagaaucauugcuuuugacacuugucuauggag

SEQ ID NO: 4125001 - RNA, 106 nt, Human
cuccauuugugucagaacuuucuugauacagcagccugugauccugacuuauugggagcggggauggcugccugcaucaggaggcuggggucuggcauggcugggg

SEQ ID NO: 4125002 - RNA, 129 nt, Human
cucccaaagaacguuaucaucagugacuccaggagguccuucucccaccuuguugagauguagcuucccucaacaagaugggagaaggaccuccuguuauucaaaggcaacaugacuauucuaagggag

SEQ ID NO: 4125003 - RNA, 63 nt, Human
cucccaaagugcuaggauuacaggcgugagccaccgugccuggcugauuuuagaacuucugag

SEQ ID NO: 4125004 - RNA, 67 nt, Human
cucccaaagugcugagauuacaggugugagccagcacgccuggguaauuuuuguauuuuuaguagag

SEQ ID NO: 4125005 - RNA, 102 nt, Human
cucccaaaucucugcagacagagcucugcaggcacagcugaggacggccucucuuugggucccccagacucaucccugggagcucacaacuggcagagggag

SEQ ID NO: 4125006 - RNA, 82 nt, Human
cucccaaguggugagcagggcugaagucgcaggccuacuggacccugcauuugaagucagacaggcugcuggcggcuuggag

SEQ ID NO: 4125007 - RNA, 59 nt, Human
cucccacguucaucugccuuaauagugacuagcucuaaguccagaaggagaacugggag

SEQ ID NO: 4125008 - RNA, 79 nt, Human
cucccacucacucuucaugcuaugcucaacuggcuuccagaaccauugaguuucuguuguguuggcugagaaauggggg

SEQ ID NO: 4125009 - RNA, 105 nt, Human
cucccagacucuaauuccagcacagaggcggauccuugcauuucuguggacccgcaggaaagucuguaaaggaaccgcgcgcuuggcugggugccaggucuggag

SEQ ID NO: 4125010 - RNA, 63 nt, Human
cucccagauguccgugguauuuugcuaagggggaacacuuggagcaggcuccgggcuugggag

SEQ ID NO: 4125011 - RNA, 85 nt, Human
cucuugguaccugugguugugucaaguguauagcaggugaguucuaagcugcugugcacuaaccacacccacggguaugcaaggg

SEQ ID NO: 4125012 - RNA, 72 nt, Human
cucuuguaacagucaguaucccaggcaaauauuuacccaacauguacuuauuuaauggcuacuggauaggag

SEQ ID NO: 4125013 - RNA, 120 nt, Human
cucuuguauauucacaagugcucaugguagaacuacagaaguuucccuugcuuacaucaagagcuuuuaacaauuguagcauacuuucuuuaguuugcccacacgugugacauuuaggag

SEQ ID NO: 4125014 - RNA, 64 nt, Human
cucuuuccauugcccagcaguaaccucuguuaaaguuuauugggugcucuggaaauggucugag

SEQ ID NO: 4125015 - RNA, 61 nt, Human
cucuuuccugugaaaugccagaccaugaaagacuguuuggcugugauuugcacgagaugag

SEQ ID NO: 4125016 - RNA, 62 nt, Human
cucuuucucacgauuacggccaucugugugcuggcaauggcaguaguugcaugagagcagag

SEQ ID NO: 4125017 - RNA, 58 nt, Human
cucuuucuucuucuggcugcaccugggguucugcccacuggccuagaggaagaaaugg

SEQ ID NO: 4125018 - RNA, 58 nt, Human
cucuuucuuucucucaugugcauacacucaugauaugcauguaagggagacaccugag

SEQ ID NO: 4125019 - RNA, 77 nt, Human
cucuuugcucaagauccagaaauaggaguacuuuaugggaaaaaucucucuccuguugucauggaauaaguuaagag

SEQ ID NO: 4125020 - RNA, 109 nt, Human
cucuuuggggaugagcacucugcucaugacucauuaacuuuuuuucuaagugugaaagcuuuuuaaggaagaaaugaauagguggagaugccuuauuaacuucaaggag

SEQ ID NO: 4125021 - RNA, 65 nt, Human
cucuuugucuaccacagacaucgucuccauggaaccuacaauauguuucugagguggacgaggag

SEQ ID NO: 4125022 - RNA, 92 nt, Human
cucuuuucauagaagaauaucacugucaggcugacuuuuagggucauguuccuaaaggccaauaaagacaagcuguguucucaugacaacag

SEQ ID NO: 4125023 - RNA, 82 nt, Human
cucuuuuccuagccugcauacagcugccuucuaacuauguccucacauggccuuuucucaguguguguuggggggaagagag

SEQ ID NO: 4125024 - RNA, 115 nt, Human
cucuuuuucaggauucuggaacauaccaccuguuuuagucuuuaaucaucucuccacucauuacaggugcagaagguugaagcagcuggaaacaucuguucccagagaaaaggag

SEQ ID NO: 4125025 - RNA, 68 nt, Human
cucuuuuugugggggaggaguugugugcauucuguuuaaugugauuuucucacucccuuacccaagag

SEQ ID NO: 4125026 - RNA, 66 nt, Human
cugaaaaucagaggaagcaucaaguucucagaaaaccuucggggcaacuuaacuguuucuuagcag

SEQ ID NO: 4125027 - RNA, 59 nt, Human
cugaaacagaugugugcauuaauccacauucauuugguaaauguauuguuuuguuucag

SEQ ID NO: 4125028 - RNA, 57 nt, Human
cugaaacccguccagauggaggacccgguuuccauuaaaccuggauggaguucucag

SEQ ID NO: 4125029 - RNA, 61 nt, Human
cugaaacuccaugagaaauugcaagauaaaauugcccagcaagcaugcucuggaauuucag

SEQ ID NO: 4125030 - RNA, 106 nt, Human
cugaaagaaccaccgcuguagccucucauggcagucuggaaaaugccagggggaagccgacugcacagauggccagaggcagcugcaugcucccgauuucuuucag

SEQ ID NO: 4125031 - RNA, 70 nt, Human
cugaaagcccauuaagucuguuaacuggagaaccuacacguaacaucuccagguggcuugggcuucucag

SEQ ID NO: 4125032 - RNA, 72 nt, Human
cugaaagcuuuuuccaaggaugugucucucuauagaacuucuuuagaauaauaucacuguggaaccuaucag

SEQ ID NO: 4125033 - RNA, 59 nt, Human
cugaaaggguuacauaguaaguuccugaccugcuaaggaagacuagguagcuauuucag

SEQ ID NO: 4125034 - RNA, 74 nt, Human
cugaaauagugcugggaagggagucaagauacugggguucaagucuuggcucuccucucuccuaacuaugucag

SEQ ID NO: 4125035 - RNA, 96 nt, Human
cugaaauauccaggaagucuucccagaggaggugccagcuggauauuggaggaugaguaggugguaccugaaugaagggaggaaagggcauuuuag

SEQ ID NO: 4125036 - RNA, 69 nt, Human
cugaaaugacuggcuaacuuugcugauaaacuuccugacagcaauaacucaaagccauuuaugcuucag

SEQ ID NO: 4125037 - RNA, 130 nt, Human
cugaaaugcuauuuugugaaaguugggaauuuauauaaaaucaguuagugguaggauugaugagauguuuaccaggccugguagguagcugauuucuuguuugacuucucaacugaggcaggaaaguagg

SEQ ID NO: 4125038 - RNA, 123 nt, Human
cugaaauuguauuacugugaaaucguaccagaagcuuugcucauaaccaucuaugcauuucgcuuacaugaauguugcaaagacuuuuugauauaaucagauaaacacagaaaauauuuaaag

SEQ ID NO: 4125039 - RNA, 72 nt, Human
cugaacacauuucucugacuguagugugcuaguuauuugccagcccucugccuauuauggaauuguguuuag

SEQ ID NO: 4125040 - RNA, 74 nt, Human
cugaacacccagcucacucucgccuucuuccucuggagagaggaccagaggccagagucagcucugggguauag

SEQ ID NO: 4125041 - RNA, 70 nt, Human
cugaacacucaggcaccaacugccacguccaaaccaagggcuugggguguuggauggagcaaguguccag

SEQ ID NO: 4125042 - RNA, 110 nt, Human
cugaacacuugggaggcaugugggcugggcuagggcacagccacucuggacccuccugcugagagccccagcugagacacagacccuuggccaaccccaggaauguccag

SEQ ID NO: 4125043 - RNA, 64 nt, Human
cugaacagauugauugcuugaugguucagagggaaccagcucauaauuuucaaaacuguuuuag

SEQ ID NO: 4125044 - RNA, 58 nt, Human
cugaacaggcucugauggauucugccaacacagggccccaaaucucagggcuuuucag

SEQ ID NO: 4125045 - RNA, 61 nt, Human
cugaacccaggaaguugcagugagcugagauugcaucacugcacuccagccugggugacag

SEQ ID NO: 4125046 - RNA, 57 nt, Human
cugaacucagguugaugaacauuauauauuauuguuguuuguuuauucuccugacag

SEQ ID NO: 4125047 - RNA, 63 nt, Human
cugaacugacagacugccugcucugaaacugcaccaacagucccuggcuauuuugucauucag

SEQ ID NO: 4125048 - RNA, 63 nt, Human
cugaagaacaccugcugcccaguggcagguguucccagaccacugggcagcagguguucccag

SEQ ID NO: 4125049 - RNA, 59 nt, Human
cugaagagcaaaccaacuggacuaauucuuacuccuuaguucaggugguaguuuuccag

SEQ ID NO: 4125050 - RNA, 55 nt, Human
cugaagagcucuccuguccccucugccaugugaggauacagagagaagucugcag

SEQ ID NO: 4125051 - RNA, 89 nt, Human
cugaagauaugggcaacauguugagcaagggcugcuguuauauugagaagugagcuuuagaauuguucagcaaguuucuucuuguucag

SEQ ID NO: 4125052 - RNA, 60 nt, Human
cugaagcaggaggggaggcgcugggagcacgcaggguugggccuccaccccaggcuucag

SEQ ID NO: 4125053 - RNA, 55 nt, Human
cugaagcuuuacuucaaauacaagaaacagcugguguuugugauuuaaggcucag

SEQ ID NO: 4125054 - RNA, 72 nt, Human
cugaagcuuuggaagggcaggguugagcagagugcauccuauuuuccagcccuucuuccaaccagcuuucag

SEQ ID NO: 4125055 - RNA, 80 nt, Human
cugaaggaaagguuucaucuacuuuucauccuaaaaauucuuaaaggcuugggaaauggauuggagcuuuagaacuucag

SEQ ID NO: 4125056 - RNA, 80 nt, Human
cugaaggcggcaguugguccccagcuccagcccauuguugccagguggagacacaggaccagacugcccaguuccuuggg

SEQ ID NO: 4125057 - RNA, 61 nt, Human
cugaagggauuauuuuugcauguccccaucagaagagcaacaugaaaacugguuccuucag

SEQ ID NO: 4125058 - RNA, 74 nt, Human
cugaaguuaaacuugccuuuauuccuguuuguggauuagcuaggauaaaaugaggaaguuugcaaugcucuuag

SEQ ID NO: 4125059 - RNA, 58 nt, Human
cugaaguuaaucagagguacaaauggcuggcuaugccucucugacacguaacuucugg

SEQ ID NO: 4125060 - RNA, 59 nt, Human
cugaauagaguuuucucugggaaggaguaagauuccucucccagggagagccugagcag

SEQ ID NO: 4125061 - RNA, 64 nt, Human
cugaaucauuuauuuuugacagcagagccauaggccaugcuucacauguguagauaaaauucag

SEQ ID NO: 4125062 - RNA, 61 nt, Human
cugaauccagagcuauuucguccaaccaagcuucagcauggagaauuacacucuggaucag

SEQ ID NO: 4125063 - RNA, 74 nt, Human
cugaaucuccgugggguuuagggagacgaaaggaccccagaucgacguccccucguucccacuuuggggaucgg

SEQ ID NO: 4125064 - RNA, 61 nt, Human
cugaaugccagcuaccugcauuauggccucgguucuaggaagggaagcauggcacuauuag

SEQ ID NO: 4125065 - RNA, 76 nt, Human
cugaaugccuuauuguggauacgcagccugggaggcagugggucccccaggcacagauuaucccaauagagguuag

SEQ ID NO: 4125066 - RNA, 73 nt, Human
cugaauggaaaggauuccaaggccagagaaaagggugggccuuuccucuggccuuggaauccuuuccauucag

SEQ ID NO: 4125067 - RNA, 55 nt, Human
cugaaugucgaucagcuugggucagagucuuugccguggcuggacuggcauucag

SEQ ID NO: 4125068 - RNA, 85 nt, Human
cugaauucagagaaguguggguuuuauggagcccuguaauuuucaagcaguuccacugauggccuacaaauguacugaguguaag

SEQ ID NO: 4125069 - RNA, 98 nt, Human
cugaauugaaaaagaugauuucucuuggcaauauguugcuuuaucuaagcaacauacagaguacagagauauacaacaaacccucuuuuuuaugucag

SEQ ID NO: 4125070 - RNA, 56 nt, Human
cugaauugaagcacuugagaaucuugaaucacggauucuccaggcaaccauuucag

SEQ ID NO: 4125071 - RNA, 59 nt, Human
cugaauugcuuuacaagccguuuaagaacaauuuaauauuccugugugcagcaguucag

SEQ ID NO: 4125072 - RNA, 65 nt, Human
cugaauuuacauguauuuuggaaaaaguccuggaaaacuuguucauugaguacauaugguuucag

SEQ ID NO: 4125073 - RNA, 71 nt, Human
cugacaacugccuggggcaucagucaagguuccuguucuggagcacaggggaagccccaggcaugguccag

SEQ ID NO: 4125074 - RNA, 77 nt, Human
cugacaguagaaugcugagucuuaucucuuaucucuuuguugggguaguagauuuuauuucauguucugcuccacag

SEQ ID NO: 4125075 - RNA, 84 nt, Human
cugacaguaugauauuaaguuuuugugaucuggagccauuuuuagcaaaaucucuggaguaagagcuaugaaauuaaaugucag

SEQ ID NO: 4125076 - RNA, 78 nt, Human
cugacaguucuauauagcagagucuucaagggcaggccagauauggcuuugcuuuaguggcucuauuugacuguacag

SEQ ID NO: 4125077 - RNA, 66 nt, Human
cugacaugcagagcgucugggcagcggcccucaccccuguccccuuuaccuccgcagcccugucag

SEQ ID NO: 4125078 - RNA, 70 nt, Human
cugacauugauccagcagccgaauaagccugcagggaauggcgacucuuggcagcgggucaggcuguggg

SEQ ID NO: 4125079 - RNA, 110 nt, Human
cugaccacaucugcugaccauccucuguggcgugggaaguggugguguguaagaacacaccugcccuuaacacugugugcauggggaccagggaagggcggugauggcag

SEQ ID NO: 4125080 - RNA, 84 nt, Human
cugaccauagcuggccaaccacuggucugagguacaaggcauaggccaugaccuugggugugaguggaguggaagcugagguag

SEQ ID NO: 4125081 - RNA, 83 nt, Human
cugagcuuagcaauggagaagcagcuucuugaugaagccccauccuguggguuccaucaaagaaauuuccaaaguugaggcag

SEQ ID NO: 4125082 - RNA, 80 nt, Human
cugagcuucuagcugauguccaacaauaggugccagcaugugaguucagcuggcaccuauuuggaccuggaugaguucag

SEQ ID NO: 4125083 - RNA, 74 nt, Human
cugaggagaccaucaacuaauuuggaccugugaguuuuuuagaaaaggagugggguggucguggucuccuucag

SEQ ID NO: 4125084 - RNA, 62 nt, Human
cugaggaggggcucuugggcaugaagggcuuugagcaucuuggucccugagcucuuucacag

SEQ ID NO: 4125085 - RNA, 59 nt, Human
cugaggcaccggcaauguucuguuucuucaaccacgugcagguuacacggugcgcucag

SEQ ID NO: 4125086 - RNA, 57 nt, Human
cugaggccaugaauggauguuccuucaacccaaggagcaagcuuuccuggucaucag

SEQ ID NO: 4125087 - RNA, 55 nt, Human
cugaggcucagaaugagugagcaaccuucagugguugcacagacaaugagcccag

SEQ ID NO: 4125088 - RNA, 59 nt, Human
cugaggcucagagagguccacauacuuguuuaaguguuaaagggggcuucugagcccag

SEQ ID NO: 4125089 - RNA, 57 nt, Human
cugaggcucugagaaagccaaauguccucucuuucaggauggcuucucaaagcccag

SEQ ID NO: 4125090 - RNA, 55 nt, Human
cugaggcugagacaggugaaaugaugugauccacgucgccugacaccagacccag

SEQ ID NO: 4125091 - RNA, 73 nt, Human
cugaggcugggucggcagggggccagcagcccgggugaccccugccuggcuccuaaugcugcccagacugcag

SEQ ID NO: 4125092 - RNA, 65 nt, Human
cugaggcugguucccuugaucuuuccugaccccaguuuugggaggagacaguggagccgcuacag

SEQ ID NO: 4125093 - RNA, 85 nt, Human
cugagggaaguuaguaccugguauacuuagaaaucccagaauuauggagagaaggaagcuaucagcuacuaucagcuugccucag

SEQ ID NO: 4125094 - RNA, 58 nt, Human
cugagggagaaggaaggcugaagcaauaguguuugcaguuguugccuucccugauuag

SEQ ID NO: 4125095 - RNA, 55 nt, Human
cugagggagcuaugaauagaagaacccuguguucuccccuguccagcuccccugg

SEQ ID NO: 4125096 - RNA, 76 nt, Human
cugagggaggaccugaacuuggauguggccuggcuugggcccggaggccagcaugcaguucuaaggcucugcucag

SEQ ID NO: 4125097 - RNA, 72 nt, Human
cugagggaggccuccagccacaugccagugaggaacugaauccucagaaagcaacugaaggccuuaguucag

SEQ ID NO: 4125098 - RNA, 59 nt, Human
cugagggccugaggaccuagaugaucaucuuaauuuagauugcuccuuggcccacacag

SEQ ID NO: 4125099 - RNA, 69 nt, Human
cugaggggaauggugaggagugcauugagagggucaccuucaguuuugcuuuuaaucaugaacuaacag

SEQ ID NO: 4125100 - RNA, 57 nt, Human
cugaggggauggccaguccuguuccauggaagugagaaacaguaccauuuaucucag

SEQ ID NO: 4125101 - RNA, 72 nt, Human
cugaggggcaaagcuuguauagggaaagauaaauccgugguggguucugguuucugacaagucugaacucag

SEQ ID NO: 4125102 - RNA, 90 nt, Human
cugaggucaucucauccuuaagagaacuuuuaggaccagacaggaaugcucaucucucugugcccaguaguucucuggggguggccugag

SEQ ID NO: 4125103 - RNA, 55 nt, Human
cugaggugagcuucccugggcuccggaggcacuggaguagcgaggcccaccuuag

SEQ ID NO: 4125104 - RNA, 56 nt, Human
cugaggugggagaggagaaagagagagagaguccuuuaaguccucuuuuauauuag

SEQ ID NO: 4125105 - RNA, 78 nt, Human
cugagguuuuagguuucuggauuuauuauggcacccaguagcaaagcuggagucaaguguuuucaaggcuuccauuag

SEQ ID NO: 4125106 - RNA, 69 nt, Human
cugaguaaacugcauuaaagcaucagucuuucuugucuagaguagaacugguggugaucaguuauucag

SEQ ID NO: 4125107 - RNA, 81 nt, Human
cugagucacuauuuaacagggucccagcuggcuaaaguaugaccuccaucuggccagcaugagaccuggugugguggccag

SEQ ID NO: 4125108 - RNA, 76 nt, Human
cugagucuccucccaggcucuuccaggacccagcuucaauaaccugggcuuuauugaaaccuggggggaauuugag

SEQ ID NO: 4125109 - RNA, 74 nt, Human
cugagugggcaugaaauggccaaccuucggccacccacagcuccuaggugccuggcgccguuuuaugcaugcag

SEQ ID NO: 4125110 - RNA, 63 nt, Human
cugaguguuaaacauguucacagcaucccuacuggcaaaggugcuggcuugucuaauauacag

SEQ ID NO: 4125111 - RNA, 65 nt, Human
cugaguuacagcuggcguggggaaaucuaggagacaggugguucccuuaacagcuguauauuugg

SEQ ID NO: 4125112 - RNA, 61 nt, Human
cugauaaggaaucccauuauauggaaaauauaauccaccaaaaugagauuccuuaugauag

SEQ ID NO: 4125113 - RNA, 84 nt, Human
cugauaauauuauucgguuuugacaauuagguagaaaaagcauucaaagaagugcuuuuuuauugcagcugguaauacuauugg

SEQ ID NO: 4125114 - RNA, 127 nt, Human
cugauaccuacuguguuccaaguucuuucuggaguuugcggggacagagacaugaacuaaacaaggucauugccuuugcagagcuuaguauuuaguggggucaggauugggguagagauggggagag

SEQ ID NO: 4125115 - RNA, 58 nt, Human
cugauagagcauuagugugagagucuggauuucauaaagucucuccuggcucuaucag

SEQ ID NO: 4125116 - RNA, 82 nt, Human
cugauagcauaacuaaaggccaugauggaggaucaguauccacguugcuuguuccuucuggcuuuuacaucuaugauagcag

SEQ ID NO: 4125117 - RNA, 62 nt, Human
cugauaguauaagggacucugucucaguugaagaagcaagcaugauagaaaccuuuaaucag

SEQ ID NO: 4125118 - RNA, 74 nt, Human
cugaucaaaucaccaaacucacuggcacacacugaguggcaacaccgggggccuggaguguugguauuucucag

SEQ ID NO: 4125119 - RNA, 75 nt, Human
cugaucaucuagucuggccacuucuuuucauacaaggggaaacuaaaccccagggaagugaaugacagauaucag

SEQ ID NO: 4125120 - RNA, 84 nt, Human
cugaucauggggauguagaagauggcaacugcacugaugugagagacacagguaccaaaagccuuuuucugcuccucuggggag

SEQ ID NO: 4125121 - RNA, 82 nt, Human
cugauccaggagcacugcaguuugagucuaccagccuccucuccuuaggaguagggcugccucaggcaccuccuggccucag

SEQ ID NO: 4125122 - RNA, 56 nt, Human
cugauccaguagccugggguggggcacaggauguccugcugcuggggucugggcag

SEQ ID NO: 4125123 - RNA, 94 nt, Human
cugaucuacaaauuuggaagaacugaagagcuguggaccugagaucacuccuuaaaucacauuuucuuuguguuauauucuguuuguagauaag

SEQ ID NO: 4125124 - RNA, 77 nt, Human
cugaucuggacagggucugaugguccucacuugaccuaagcugagcucucccaggcugugagcauccccaaggucag

SEQ ID NO: 4125125 - RNA, 76 nt, Human
cugaugacgggguguaccacucuacuaaggguucccaacaugaaggugagggggccccugggaauucugugauugg

SEQ ID NO: 4125126 - RNA, 64 nt, Human
cugaugaguguuagcaguaaugauaucaguuucuacauguuaacauacuguuuaauauucacag

SEQ ID NO: 4125127 - RNA, 86 nt, Human
cugaugaguuccaaauuuggaucuuuaggcuuggcuuuaccugcacuccaggccugaauuucugaguuuacuggaauuuccaucag

SEQ ID NO: 4125128 - RNA, 66 nt, Human
cugaugcccagguuccucuccagaugaaauaaauuacaguaucugggaguaaggccuaggcaucag

SEQ ID NO: 4125129 - RNA, 75 nt, Human
cguucuuaguugguggagcgauuugucugguuaauuccgauaacgaacgagacucuggcaugcuaacuaguuacg

SEQ ID NO: 4125130 - RNA, 59 nt, Human
cguucuuuucauauuuacauggaggaauuucuguggccacauggaugugagacagaaug

SEQ ID NO: 4125131 - RNA, 82 nt, Human
cguugacauaaauacuaaaggcuugagcauuuguugaaugaguuuaagauuauacaacauguaaagugguuuaaugucaaug

SEQ ID NO: 4125132 - RNA, 58 nt, Human
cguuuagaaagugcuacugaccugaaaauugcauuuugaggagcagcgcuuuuuaccg

SEQ ID NO: 4125133 - RNA, 88 nt, Human
cguuucaaacacugacauucuaacauuguacagauauguuuagaugaggugccugaacuaagaguugggaaaucagguuucugagaug

SEQ ID NO: 4125134 - RNA, 55 nt, Human
cguuuccuuuuggaauuagagcucgaaaacgagaacuggugaagggagggccgcg

SEQ ID NO: 4125135 - RNA, 67 nt, Human
cguuuuggucagguuggucucgaacuccugaccucaggugauucaaccaucuuggccucccaaaaug

SEQ ID NO: 4125136 - RNA, 73 nt, Human
cguuuuucucuuguucaucugucuuuuguuacaaggccuucagccaauaaccuaagauggguagaaggaaaug

SEQ ID NO: 4125137 - RNA, 84 nt, Human
cguuuuugacuaggcaucuucuuuggaugaaagaauauggucgccaucuguaacacacagaggagaaucuguaauucaaaaaug

SEQ ID NO: 4125138 - RNA, 91 nt, Human
cuaaaaaguauguacauguaguccuaaugcuggugaagauacaguuagagguaucaucaaacauggacauuagggguauacuuuuuuuuag

SEQ ID NO: 4125139 - RNA, 75 nt, Human
cuaaaacuucacuaaucacugaacuccaaaagccccuagucucacugguggaccacagugacagugauauuuugg

SEQ ID NO: 4125140 - RNA, 69 nt, Human
cuaaaaucuucacaaucuggcuuagcauugugcaauagaaacauaaagcaggccacauaugugauuugg

SEQ ID NO: 4125141 - RNA, 59 nt, Human
cuaaacaugaacuacauuuaggguauuguauuauggagucccuaagguauucauuuugg

SEQ ID NO: 4125142 - RNA, 101 nt, Human
cuaaaccagugcagauuugcuggcccacugagccucccagaugagaaccugcauuucaacaagguccucagugcagcaaaguuugagauauacugggcuag

SEQ ID NO: 4125143 - RNA, 91 nt, Human
cuaaagagaagcagaacaccguauggacacccucuccugccucuugcccaaggcauggccucugugcuuguugcugcugcuuuucuauuag

SEQ ID NO: 4125144 - RNA, 85 nt, Human
cuaaaggggauuuuugguggaauuuuuaguuuucuauguauauguugccugagaacagagauaauuuuacuuccuuccucuuugg

SEQ ID NO: 4125145 - RNA, 65 nt, Human
cuaaaguguguggguucuaaauucagaaaaaucauauuuccgaguuuuggaccuacauauugaag

SEQ ID NO: 4125146 - RNA, 129 nt, Human
cuaaauagcagugauguguguaaucuuucuuuguuucaggcugugucuuuaaacaauaaaauuacuuucaggccaaguuggggggaauuguuuaaguagccuguuaaguaugcauuaagccuauuauag

SEQ ID NO: 4125147 - RNA, 60 nt, Human
cugcaagugucuguacaggauacuagcuuuaaucuugagcuccucagaagacauuugggg

SEQ ID NO: 4125148 - RNA, 84 nt, Human
cugcaauauucaugugauuugagguacauaaauccaguuucagcuaucuauguauccuuaagguccuagucaugaacaacguag

SEQ ID NO: 4125149 - RNA, 71 nt, Human
cugcaaucuuaccucuuccucugcauuuuuuggggggagugacauuuuaaugggaggcaggagguuugugg

SEQ ID NO: 4125150 - RNA, 73 nt, Human
cugcaauguuaagaucacaccuggaggaugguauuuccucccaggcuguaagagugauguugacaaguuggag

SEQ ID NO: 4125151 - RNA, 126 nt, Human
cugcaauguuugcauuuguugggugccucuggggccucaagaaugucucuggugaggcgcuggaucauuuuaaucaaugcgcuaagugacgauuccuguggcaccggcccacauugcaacaaccag

SEQ ID NO: 4125152 - RNA, 97 nt, Human
cugcaauuaacuuccucagaacacugggguaucauugagccuacugcagcagcaauuugcuaaaugguacuccagugaucagaaagagugagugcag

SEQ ID NO: 4125153 - RNA, 66 nt, Human
cugcacagaggucggucugccauccucuugcaagauuaaugccuguagucccacucucugcugcag

SEQ ID NO: 4125154 - RNA, 56 nt, Human
cugcacagcugggcaagauauaucuagaaaaggaaauuaguuucucagaugugcgg

SEQ ID NO: 4125155 - RNA, 56 nt, Human
cugcacaguaagcuucagagaugagaauccauuuuucuauuugccugacugugcgg

SEQ ID NO: 4125156 - RNA, 55 nt, Human
cugcacaguguuggaagcugcccucuuggcuugguugagccagcacagugaccag

SEQ ID NO: 4125157 - RNA, 78 nt, Human
cugcacaugcucugugugguuggccugaucuauaagagacuaaauaaugaccaggcuugcugcuagagcacuuuguag

SEQ ID NO: 4125158 - RNA, 61 nt, Human
cugcacauguucaucaugacaauguacucaggaguucuaagucaugaugagcauccugcag

SEQ ID NO: 4125159 - RNA, 60 nt, Human
cugcaccauuaauuuaugugagaauguguuaacagcauuuucaauggcugauggaugcgg

SEQ ID NO: 4125160 - RNA, 57 nt, Human
cugcacccaggccuggucccagguugccuagcaaccgggggcugcucugggaugcag

SEQ ID NO: 4125161 - RNA, 79 nt, Human
cugcaccuauggcacuuggucacuuccugcggguaacugugaagaagaagaggaagugacuagguaacccaaagcacag

SEQ ID NO: 4125162 - RNA, 95 nt, Human
cugcacgugcuccuaaucuaguuccagggacaaacaagguuggggauaguuccuaucucccacaaagaguuuuaacuggauguaggugucugcag

SEQ ID NO: 4125163 - RNA, 56 nt, Human
cugcacugcccuaaaaccuuugaccagagauucugggaaggcuuggacagugacag

SEQ ID NO: 4125164 - RNA, 65 nt, Human
cugcacuguguauuccuuggcuuaugucuccuucuuccaucuugaaagccagcagcacaguguag

SEQ ID NO: 4125165 - RNA, 83 nt, Human
cugcacuucuaacaagcuuccaggugaugcugaugcugcuggccucaggaccacacuuugaggagcaaaaagcaggagugggg

SEQ ID NO: 4125166 - RNA, 84 nt, Human
cugcagaaagcaagcuagggauggaugaugccuggcaaugaaagucguuuucaaagaccauuaacuaucagcugcuuuacucag

SEQ ID NO: 4125167 - RNA, 83 nt, Human
cugcagaacuauccauucugacaccuaauucugugaggaaacugagucccagagaagguggucagagugcugguuagaggcag

SEQ ID NO: 4125168 - RNA, 61 nt, Human
cugcagagaauggugaaguauuucugucugauuucaugaagcuugucaccauuucuuucag

SEQ ID NO: 4125169 - RNA, 72 nt, Human
cugcagcaaccauggcuacacacccugaauuuccugggacucucucaaguucacauguggucaugcugucag

SEQ ID NO: 4125170 - RNA, 59 nt, Human
cugcagcaguaguccccaagugcauucauauauucaaugggaagucacuacuguuacag

SEQ ID NO: 4125171 - RNA, 109 nt, Human
cugcagccucagggcaaaccuggccuuaaccugcucagccccagcucacccugggcaggccagggguguuggcauugaggggcagucagagucugccaggauggugcag

SEQ ID NO: 4125172 - RNA, 56 nt, Human
cugcagccuccugggguacaugacacuugcgaaagugacgugaguggaggcugcgg

SEQ ID NO: 4125173 - RNA, 95 nt, Human
cugcagcuacucaacaccucucaggaggaggcccagcccagggagcagcucccugcugugucccaccuggaaaggcauugagucugcuggugcag

SEQ ID NO: 4125174 - RNA, 104 nt, Human
cugcagcugggcucaccugcggcugggcucaccuguggcuggcauuacuccuguugcugaccuccccugcagcugggcucaccugcggcugggcucaccugcgg

SEQ ID NO: 4125175 - RNA, 57 nt, Human
cugcagcugucucuacugggcaaggauaggaggcccaggagggggaaauggcugcag

SEQ ID NO: 4125176 - RNA, 102 nt, Human
cugcagcugucuugguucuuccaauuucaaaaugucuuugaagaagugacuuagccacuucuucaaagacauuuugaaauuggaagcauuaagaaacuguag

SEQ ID NO: 4125177 - RNA, 75 nt, Human
cugcagcuugucugcugccuggagccuuuuguuucucagggaacauggagcugccuggcagugggggagcccuag

SEQ ID NO: 4125178 - RNA, 66 nt, Human
cugcaggcagaagggauggugagggggcgcaacccucugcccugucagccccacuucugccugcag

SEQ ID NO: 4125179 - RNA, 65 nt, Human
cugcagggcccucuggcaggccaggcccggcuccuuugucugccucagccgggggccgcccgcag

SEQ ID NO: 4125180 - RNA, 77 nt, Human
cugcagggcugcugccucaacauuuuagguucugauagcuguauucucaguccuggagugacagguguagccugcag

SEQ ID NO: 4125181 - RNA, 60 nt, Human
cugcagggguguccuguauuggcaucgaccugucguuaauccagcaaacacacccugaag

SEQ ID NO: 4125182 - RNA, 66 nt, Human
cugcaguccgaggcgcaccggcgcuccuucggcggcacggaggaccgccugucgugcuucgcgcag

SEQ ID NO: 4125183 - RNA, 65 nt, Human
cugcagugaggaccugccucuauuuaccauccagguggaacaagaagcaggucgcuuuagagcag

SEQ ID NO: 4125184 - RNA, 71 nt, Human
cugcagugggugggugucugacaguuuagaggggacucuggaccuugaaaauucacccaccucgucugaag

SEQ ID NO: 4125185 - RNA, 67 nt, Human
cugcaguguuccugaaccaugugaguaguguucauuuuaaacucaaacacaugcaaggcaccugcag

SEQ ID NO: 4125186 - RNA, 56 nt, Human
cugcaguuggcugagaccccccaggguuauuucuccuggucucagugcagcugcag

SEQ ID NO: 4125187 - RNA, 69 nt, Human
cugcauaauuugugguagugggggacugcguucgcgcuuuccccugccuuacuggaaguugaaagguag

SEQ ID NO: 4125188 - RNA, 62 nt, Human
cugcauccaggccaggucacagaaggggcccagucaccccgagaccugugucugggaugcgg

SEQ ID NO: 4125189 - RNA, 70 nt, Human
cugcauccauguugcugcaaaggaucuaauuuccuucuuuuuaauagcuguguaguauuccaugguguag

SEQ ID NO: 4125190 - RNA, 55 nt, Human
cugcauccuaaccuccaugcagucaucacuggcugcacugcccuucaggugacag

SEQ ID NO: 4125191 - RNA, 87 nt, Human
cugcaucucucuucucccucugccauaagaccaacacaucccagaagggguggcuucuucugccagaaggaagaaaacagggagcag

SEQ ID NO: 4125192 - RNA, 107 nt, Human
cugcaugcuuguuuguaucacccauuccacagaugaaaauuaaguuuguucaaaaccugcaguuuuuauucugagacaggggaaggugaaacaaagaaaguaugugg

SEQ ID NO: 4125193 - RNA, 62 nt, Human
cugcaugucaaggcacucaggauauugcacauucuuggcaaucuuguugccugugacaucgg

SEQ ID NO: 4125194 - RNA, 95 nt, Human
cugcauguucagccacugcugcuuccgcuaaaaauuaaucccauuuuuccccugaauggagguauuucucagcaggaagcaguauguccaugcag

SEQ ID NO: 4125195 - RNA, 69 nt, Human
cugcauucauaagacuuugcucuugugagaauucgcucaugccccaaaagcaaagaucuuugauugaag

SEQ ID NO: 4125196 - RNA, 64 nt, Human
cugcauucccaaugcuguucugagucugcaggcguugccuggacaggguaggcaggaagugcag

SEQ ID NO: 4125197 - RNA, 70 nt, Human
cugcauuguugagggcagaaugaaggugggcaagggcaaggucagguucagacuagucccagugguguag

SEQ ID NO: 4125198 - RNA, 97 nt, Human
cugcauuugguauugggacuguugucuaaaccauaaccuaaacuacuuuaugcaguuagguaauagucucaucucagauaacaaaaggaagaagcag

SEQ ID NO: 4125199 - RNA, 90 nt, Human
cugccaacucccuccccucucugcgcucccaggucaaggugcaauaauaucauuuggggacagaguggggguaaaggggcaguagggcag

SEQ ID NO: 4125200 - RNA, 107 nt, Human
cugccaccucuccauagucagccccacucagggcuugaguguccaggaggaguccugccugcuggccuggcccugaggcccuguguggugguccugaggggcgguag

SEQ ID NO: 4125201 - RNA, 94 nt, Human
cugccaccuucccuagugucuuguaccaucuucagugggcagaacuuggccagaaaaaggagcccaaaggaaggacaaggcagaggagggucag

SEQ ID NO: 4125202 - RNA, 71 nt, Human
cugccacuguaaguuugaaaauaacaauguuauuuucuauuuuguuauuuuugucuuugcaguaccugcag

SEQ ID NO: 4125203 - RNA, 88 nt, Human
cuccugaggaauguuccacagugcucaaacacaagugcaggacacuacucucuuaaugccacuguagaguauggacaagcuugaggag

SEQ ID NO: 4125204 - RNA, 60 nt, Human
cuccugcaagccuccccaagcagucaauaaauuugcuugauucaaaacaggagguaggag

SEQ ID NO: 4125205 - RNA, 77 nt, Human
cuccugccuccacagccccuccaguggcagggacaggucuugggucuuugucaucuuggugcugugagagguaggag

SEQ ID NO: 4125206 - RNA, 65 nt, Human
cuccugccugugggacugaggagcagcccaagaacuggggucccacgggucuccgcagcagagag

SEQ ID NO: 4125207 - RNA, 65 nt, Human
cuccugcgguacuacugugcuugcuguguguucaucucugcaggaagcagacagagcggcagggg

SEQ ID NO: 4125208 - RNA, 55 nt, Human
cuccuggaagcccgcccugcugccaucacuggcccgaggaccccggcuccaggag

SEQ ID NO: 4125209 - RNA, 78 nt, Human
cuccuggcauuuucagcagacugcaguuuucugagaaugucuguguuuuccagagcaugucugcucagaauguaugag

SEQ ID NO: 4125210 - RNA, 130 nt, Human
cuccuggcccggccuucugacagccagccccgcuccuucaagugcaguaccugagcaccggccgauaauccacgccaaagagcugcugcugccgcuggaggugguugggagugucgauggguaccaggcg

SEQ ID NO: 4125211 - RNA, 78 nt, Human
cuaaaucucccaaacucauuucuucaucuacagucaccucccuguaucccugaacaccuggguauugggagauguugg

SEQ ID NO: 4125212 - RNA, 64 nt, Human
cuaaaugggcauguuuguguuccaauaaaauuucauuuauagaacagaggguugcccagauugg

SEQ ID NO: 4125213 - RNA, 93 nt, Human
cuaacaaauuaagucucuaccugcuuuugacuaacaggagcaucuacacacugugcuuuccuuaauaagcagguauaaggggcagucugggag

SEQ ID NO: 4125214 - RNA, 58 nt, Human
cuaacaaugaaaaaggagcugguggacaaauaugccugcuuccuugcuucauugcugg

SEQ ID NO: 4125215 - RNA, 114 nt, Human
cuaacauacaaaacuggugguuucaaggguauuauuguuuaaagccauguaaaguuuuagaaaaggaaguuuauuuaaagaaaaauacuaagugaauaguaguguagguguuag

SEQ ID NO: 4125216 - RNA, 89 nt, Human
cuaaccuccaucucagucugcuuccuggagaacucaacaguugguaccaugaguaguccaagaaagcagguguuaagauggaauuuugg

SEQ ID NO: 4125217 - RNA, 96 nt, Human
cuaacuccaccguguguuuccaagacgagaggcucucuguuugucccuuuccuaagaauaaacaucuguuucucuucuggguuugguggacauuag

SEQ ID NO: 4125218 - RNA, 70 nt, Human
cuaacuucccugugggcagguaguggguggcagagcuggauuccaacuacuggugcucaggaaaucuuag

SEQ ID NO: 4125219 - RNA, 90 nt, Human
cuaacuuugcugacucagggaacauuuuaauuacaauaaacauccuuccacuuaauguauuuugggaguuucuuucagcaaauguauuag

SEQ ID NO: 4125220 - RNA, 130 nt, Human
cuaagacucaguuucuucaucuguauaguggaggugauguuagugccagccuuagguauuacuugugaacuuggggcagugcuuggcacaugacugaacacccacugauuucugagacuaagaguuucag

SEQ ID NO: 4125221 - RNA, 86 nt, Human
cuaagacucuugacuauagaccauuuuacaauagugugggaugucuuaaccauacaaauuguaaaagguuuucagaauuucuuuag

SEQ ID NO: 4125222 - RNA, 64 nt, Human
cuaagagaaauaguugcauguuucuuuugagauguugaacaaauacugcugcuauuccuuuuag

SEQ ID NO: 4125223 - RNA, 91 nt, Human
cuaagagagucuaguucucuucuuuggggugggcucacguuaaaguuagaagucagaaggaagagaggaaagauuagaaaaccucucagag

SEQ ID NO: 4125224 - RNA, 56 nt, Human
cuaagagcucugcaaacagucuucaacagauaaacugcuuuagcuagugcucuuag

SEQ ID NO: 4125225 - RNA, 67 nt, Human
cuaagaggaaaaugaguuccagaauccaugaacuacucauugaacuaaaacugguuuguucucuugg

SEQ ID NO: 4125226 - RNA, 59 nt, Human
cuaagauuucagacucugugguuauggauuauaaacaugagucacaguaucagucuuag

SEQ ID NO: 4125227 - RNA, 79 nt, Human
cuaagcaaguuguccuguaaagacuaaccaguugucaaaaucucacugagauuuuuaagguuuguuuauauauguuuag

SEQ ID NO: 4125228 - RNA, 60 nt, Human
cuaagcauuuggauaaaguuccuaaugguauuccacuuucuagcuuugccaaaaacuuag

SEQ ID NO: 4125229 - RNA, 72 nt, Human
cuaagcgggauaucuuaagcuguauugucaacuaccauuugaaaugcaguuuucaaagacuauucugacuag

SEQ ID NO: 4125230 - RNA, 127 nt, Human
cuaaggaaauuucccaggucauguagcaaauauguuggagcagggauucagcugaaggaggcuaauacuggccuccuuccugugagucacugcacauaucagacugccucucuccauguuuccuuag

SEQ ID NO: 4125231 - RNA, 59 nt, Human
cuaaggcaguuugggccaccaucuuaugcauuucucaagagcccuaaacccugccuugg

SEQ ID NO: 4125232 - RNA, 57 nt, Human
cuaagguacuugaucucccagauccuggcaaccagggccuacagcuuaaguccauag

SEQ ID NO: 4125233 - RNA, 78 nt, Human
cuaagguaugcaacuuuuucugggauggaggguggaagauucaaagaaagacaccuuguuacccaaagagugccuugg

SEQ ID NO: 4125234 - RNA, 83 nt, Human
cuaaggugggguaugguugugugugugugcacacgugugcacgcacugugcaaaugacaggcacacaaauguacccaaagugg

SEQ ID NO: 4125235 - RNA, 76 nt, Human
cuaagucaccauuauaugugcagacagcauguucuucgggcacaaacuuauguuucauauguaucaagucacuuag

SEQ ID NO: 4125236 - RNA, 62 nt, Human
cuaauaauuggcuaucauucugaaauucucuggagagcuuuucaggcugaugucgauguuag

SEQ ID NO: 4125237 - RNA, 92 nt, Human
cuaauagcagccauucuguacuuauugaaagccccugugccuacugcugucuuaaguauucaggaggggcuuacaagaggguuuucuauugg

SEQ ID NO: 4125238 - RNA, 130 nt, Human
cuaauauuuagauauaguagguaguuuauucaugaaaaggucuauuucuuagaguaugcuuaaguuaagacaaaaaauaggaucuuuucaugcuuauuuuuuauccuuuauuuuuucuucucauuguugg

SEQ ID NO: 4125239 - RNA, 129 nt, Human
cuaauguacacacaauucgaggaguaaacugaugucuguuuuacucauugcuggaucuagaacuagaaugguuuugggcacaugggaaauuuucaguaaauauuuguugaaugaaugaauacaugaaug

SEQ ID NO: 4125240 - RNA, 92 nt, Human
cuaauuacccugcagcagugagggcauucagugcugggaccuuucccaggcucugagccucacucuuucaaugugcgcugccggucuauuag

SEQ ID NO: 4125241 - RNA, 85 nt, Human
cuaauuccacucaugcaaaggucccaacucccaacaccaucacacuggagguuaggauuucaauguacagacuuuguggagagag

SEQ ID NO: 4125242 - RNA, 68 nt, Human
cuacacaggauguguucaaucaccaaagguauuuauugaaugccagcuaugaaucauguacugcguag

SEQ ID NO: 4125243 - RNA, 99 nt, Human
cuacacaugcacagagcuggaaggucuguccccacugccacuccagagugcgagaaagggagaggcagugggauggggacucucugcuucgcauguugg

SEQ ID NO: 4125244 - RNA, 60 nt, Human
cuacacuuguucgacugcaggaaaacccuacagguugcugggcugcagugggggagguag

SEQ ID NO: 4125245 - RNA, 55 nt, Human
cuacagaaacacuggacauguguucaggggauguguacaagaguguuuacuguag

SEQ ID NO: 4125246 - RNA, 79 nt, Human
cuacagaagaccauuagcugcuauucaguagcucccuaaugaggcuaccgaugcugagagacugcugguauaucuguag

SEQ ID NO: 4125247 - RNA, 73 nt, Human
cuacagcauccuucaaugggaaguuuuagggcugcucuguccagcuucuaaagugugaagccaagaugugugg

SEQ ID NO: 4125248 - RNA, 57 nt, Human
cuacagccuccacaggccaagugaccuugccaaggccacacagcuggagggugcuag

SEQ ID NO: 4125249 - RNA, 68 nt, Human
cuacaguggccagccagggugcugaugugaggggcccuuuguaaagcagugugguugugucccuguag

SEQ ID NO: 4125250 - RNA, 60 nt, Human
cuacauggcauucacucccacagggcaucugccacugccugugagcugugugccagcaag

SEQ ID NO: 4125251 - RNA, 81 nt, Human
cuacaugguguucuucacugaugggacagcucaagaauauuuucaauucugguuucugugucaguugacaaauacauggag

SEQ ID NO: 4125252 - RNA, 82 nt, Human
cuacauguuaucaugcaugucuugcccugauuaguagucauuuccaguguuuacuuguuggguuaagaugugauacaugcag

SEQ ID NO: 4125253 - RNA, 63 nt, Human
cuacauucacuuguugaagguggcaaagccccuguggccugaacccggagugauuauguguag

SEQ ID NO: 4125254 - RNA, 85 nt, Human
cuacauucgugcguaguacgaauuugugccugcuggguccuuguaccuuuacgccaggcagaaaucuccguaaucgucaguguag

SEQ ID NO: 4125255 - RNA, 56 nt, Human
cuaccacccaggacaaaauauggaaugucacuggcacuccaagagccugggggugg

SEQ ID NO: 4125256 - RNA, 96 nt, Human
cuaccaguauccuguguauccuguuguggccagaaagcuacugacaccauuagugcuuuacagggcacaaagggagcuaaggaagcuuaaggcuag

SEQ ID NO: 4125257 - RNA, 77 nt, Human
cuaccagucuugucugagggagucaugauuaaggaagccuccuuaggcuuuguucagcuuccugggugagaaggaag

SEQ ID NO: 4125258 - RNA, 100 nt, Human
cuaccauacccagccugucuuuuaaauuggaaacuuccuaacuucuuucguuauauuaucaaagaauaguuaaguuuagggcauguuguggguagugugg

SEQ ID NO: 4125259 - RNA, 77 nt, Human
cuaccauggccagcacagcuccacacagaacacgagcugccuuguguaccuaccguuugugugcgucuggccugggg

SEQ ID NO: 4125260 - RNA, 63 nt, Human
cuacccaauucugccuuuguacugugaaagcagccaucacuguacauaaaggaauagguguag

SEQ ID NO: 4125261 - RNA, 82 nt, Human
cuacccuggcaccugcuuuucuauuggcauauccacgacaaugcugagcucaguguggggccaggaucagggcucgguguag

SEQ ID NO: 4125262 - RNA, 94 nt, Human
cuaccucaucacccagcuguggcccacuuacgucaugugugauauguguucugcugugugauaauggugguguucugcugugugaugaugguag

SEQ ID NO: 4125263 - RNA, 88 nt, Human
cuaccucugagacaucucauccugcccuaaaacagcacuguaaaucaaaaucuugguuuguuuuaucaagauggcaugucguuuguag

SEQ ID NO: 4125264 - RNA, 65 nt, Human
cuaccuuccagggagcccaaccuacaacaccaagauaaauugcuuguauuuuuuccuggcggugg

SEQ ID NO: 4125265 - RNA, 67 nt, Human
cuacgcgauauucccuccugugcggauccaccucugcgcagcucagugagggaacuugugucuguag

SEQ ID NO: 4125266 - RNA, 76 nt, Human
cuacgucuggccuuuuuagcuuguggaacuuaucauccccgccauccaguaaaggcuacaaaggccccgagacuag

SEQ ID NO: 4125267 - RNA, 80 nt, Human
cuacuaaaugauauauugucugcaaagguuuauaaagauaaucuuggugucucuuaguacauagauuuaucauauagaag

SEQ ID NO: 4125268 - RNA, 108 nt, Human
cuacucucccacuugcugcuuugaggagggcuuccauggggagcccccuaccaccugaguuguaugggguaccuuauagaagcccaacaaagggugggcucccagugg

SEQ ID NO: 4125269 - RNA, 70 nt, Human
cuacucugggcuuguguuagcugacaaggcacauugguuuucccguuuacucacauuaagcccuggguag

SEQ ID NO: 4125270 - RNA, 60 nt, Human
cuacucuuggagacauauuaugaacaggaguacauuucugcaggcucaucucaagaguag

SEQ ID NO: 4125271 - RNA, 84 nt, Human
cuacucuugugugcguccuugcuauauguucuuaacagaaaauuacuuuagaacuuaguagcacaagaaguacacauagagcag

SEQ ID NO: 4125272 - RNA, 56 nt, Human
cuacugagagcacaccccugugugaaugguccaacugcaguaucugcuuuggguag

SEQ ID NO: 4125273 - RNA, 69 nt, Human
cuacugcaucugugccuaacauagugccugacacuuaccagguguucauguaaguauagaaagcagugg

SEQ ID NO: 4125274 - RNA, 63 nt, Human
cuacugcaugcauugaauucuagggugcaaugauaacuucuaggaccaacauagcagcagugg

SEQ ID NO: 4125275 - RNA, 83 nt, Human
cugaccuccaaaagggaggggcugcccuggugucagggccuagggcguacagauggcuccacaaggcagcuccuccaggucag

SEQ ID NO: 4125276 - RNA, 66 nt, Human
cugaccucucuguaguggagucuccuguccuggucugaccagagugagacccaggugcugggucag

SEQ ID NO: 4125277 - RNA, 55 nt, Human
cugaccugugcagugacugguggcccagcaaacagggccuuguaugcagaggcag

SEQ ID NO: 4125278 - RNA, 57 nt, Human
cugaccuugugauccacccaccuuggccucccaaagugcugggauuacaagcgugag

SEQ ID NO: 4125279 - RNA, 57 nt, Human
cugaccuugugauccacccgcuuuggccucccaaagugcugggauuacaggcgugag

SEQ ID NO: 4125280 - RNA, 57 nt, Human
cugaccuugugauccaccugccuuggccucccaaagugcugagauuacaagcgugag

SEQ ID NO: 4125281 - RNA, 57 nt, Human
cugaccuugugauccacuugccuuggccucccaaagugcugggauuacaagcgugag

SEQ ID NO: 4125282 - RNA, 57 nt, Human
cugaccuugugauccgcccacuuuggucucccaaagugcuaggauuacaggugugag

SEQ ID NO: 4125283 - RNA, 57 nt, Human
cugaccuugugauccgcccgccuuggccucccaaagugcugggauuacaagugugag

SEQ ID NO: 4125284 - RNA, 57 nt, Human
cugaccuugugauccgccugccuuggccucccaaagugcugggauuacaagcgugag

SEQ ID NO: 4125285 - RNA, 57 nt, Human
cugaccuugugaucugcccaccuuggacucccaaagugcugggauuacaagcgugag

SEQ ID NO: 4125286 - RNA, 64 nt, Human
cugacgcuuuccuaguuggucccagcacugagcagaacugugcuagagaagcagggaagcacag

SEQ ID NO: 4125287 - RNA, 70 nt, Human
cugacggaacucuggaucucauacaccucauaauuccuccaagauggcugaggucuggggcuucugcaag

SEQ ID NO: 4125288 - RNA, 97 nt, Human
cugacuacugauuuucacuuaaaucuguugagaaaaaggcaauuuugcuuuuguuucuuagcaacagauagcuugauccugaaagucuaaugguaag

SEQ ID NO: 4125289 - RNA, 95 nt, Human
cugacucacaaacgaaagguucuucuucaguagucauuagaaaaauuguguuuuugauuucuuaagaggaacauuuuugugucuucacacaucag

SEQ ID NO: 4125290 - RNA, 88 nt, Human
cugacucacagguguguaguacagcugcugccucauccacuuuauuccaccacaaggucauuuaaggccagcuggcucugugcgucag

SEQ ID NO: 4125291 - RNA, 63 nt, Human
cugacucccuccccaaagcuggcgcuucugugagauuccagacucugguggaggguguagcag

SEQ ID NO: 4125292 - RNA, 83 nt, Human
cugacuccuugaguuacagcucuccaagagaaaucauauuuuauucccuuuucaugagagcacauaauuauuuuaggagucag

SEQ ID NO: 4125293 - RNA, 86 nt, Human
cugacugcacucugcucggcucaugcuucuguugcggcacugugcuccuugcuguucuaggagcugugagcaugccucugccucag

SEQ ID NO: 4125294 - RNA, 78 nt, Human
cugacugcagcucugcuuccuuguacaggucuguugugggcaucccgaccugcgaguccguggugcagcugcagccgg

SEQ ID NO: 4125295 - RNA, 56 nt, Human
cugacuguaauucuguucuuaauugcuauucaaaugaggaaaggagggcaagucag

SEQ ID NO: 4125296 - RNA, 104 nt, Human
cugacuguuguuuaaagacauucgguuuuucuacuauacaguuucucuugaauauccgaauuacugagaugaauagauggcaagaugucuuaaacauugauuag

SEQ ID NO: 4125297 - RNA, 63 nt, Human
cugacuucacaugaauggccuggaggggaucauauuuuuaaacaggaaaucagugugaauuag

SEQ ID NO: 4125298 - RNA, 86 nt, Human
cugacuucccagcacccaccucugaguuggccugucuugucugucacuaccagagagaggcccccucaggcugcagggcugagcag

SEQ ID NO: 4125299 - RNA, 128 nt, Human
cugacuuugcugcaugggaaagggcagggauaaggagcagggcugccccaguccagccggauccaggcucugauggacauggcagcccucacuccuucuccuccagcccuguggggugcagcuguugg

SEQ ID NO: 4125300 - RNA, 57 nt, Human
cugacuuugugauccaccugccuuggccucccaaagugcugggauuacaggugucag

SEQ ID NO: 4125301 - RNA, 99 nt, Human
cugagaaacagacgggugcugacaacucuuugguggaaaaauaaguugcagacuuauacaaguugcccaaaugauuaucaagccgaguuuguuuuucag

SEQ ID NO: 4125302 - RNA, 55 nt, Human
cugagaaaggaccucaaacagggaaagccaacacccugaaccaaggcuuucucag

SEQ ID NO: 4125303 - RNA, 59 nt, Human
cugagaaaugcauuuuuccagcacuucuuuuuacugcugggaugggauguccuucuggg

SEQ ID NO: 4125304 - RNA, 58 nt, Human
cugagaacaucauauuuugccugguauacagaaccagcugcccacuauguguucuugg

SEQ ID NO: 4125305 - RNA, 69 nt, Human
cugagaaggugacuuuaaaacagucugaguguauaaauugcaaucagacuauuaaagucucuuuuaaag

SEQ ID NO: 4125306 - RNA, 60 nt, Human
cugagaauaguaauaauuucuggcauuuguagguguuagagaagcuguaauuauucaaag

SEQ ID NO: 4125307 - RNA, 93 nt, Human
cugagacagaauacguagaaaugugugaauugagagaagagcccuaagguucuuacauuacuuuacauguguuuuuuaaaaaaauuguuuuag

SEQ ID NO: 4125308 - RNA, 58 nt, Human
cugagacagacagugcagacacccucuccucauagucccugcacugaacaugucugag

SEQ ID NO: 4125309 - RNA, 55 nt, Human
cugagacccagacaccugaggaggaagugcugccuggcuagugcuggugucucag

SEQ ID NO: 4125310 - RNA, 82 nt, Human
cugagacccugccaaggauggccccgauuccaggcagcugauaaaagcgagcucuucagggucacuuuaggcauuuccucag

SEQ ID NO: 4125311 - RNA, 78 nt, Human
cugagaccuccuggauggagcugcccucgccaccgggcccuuggcccugcacggagcucuguccaauaaaguucucgg

SEQ ID NO: 4125312 - RNA, 64 nt, Human
cugagaccuuggacuccauccuucugccaaauuguggcugagggugguggcuuaaggugcugag

SEQ ID NO: 4125313 - RNA, 95 nt, Human
cugagacucaggggccaagggacuugcucaaggucauugggacgucugucauggagcagauuugaaaaccugagccucccggcuccccaguccag

SEQ ID NO: 4125314 - RNA, 61 nt, Human
cugagacuuuggcauuuacagucacagcacaugcagggagagucaaaugccaaugucacag

SEQ ID NO: 4125315 - RNA, 55 nt, Human
cugagagaaaaauguuccagcuggugugggugguaccagcacaugcuucucugag

SEQ ID NO: 4125316 - RNA, 81 nt, Human
cugagagcaguugugccuguccagggacugagggagagaaacacacaucugucccccaacuggaagaacagcugaacucag

SEQ ID NO: 4125317 - RNA, 63 nt, Human
cugagaggcacaaggcauuucgguuaaguuauauuggccccaaaguacccuuuugcuacucag

SEQ ID NO: 4125318 - RNA, 64 nt, Human
cugagaggcaugcacagaugugcugugggaacccuaacauaggacacuuagcugagccucaaag

SEQ ID NO: 4125319 - RNA, 57 nt, Human
cugagaugguagauggauguuaaggugaauguuucuuaaugucuugagacauuucag

SEQ ID NO: 4125320 - RNA, 71 nt, Human
cugagauucagcccacaguggguaguauugagagagggcugggagcugccccagcugggggcuggacuggg

SEQ ID NO: 4125321 - RNA, 108 nt, Human
cugagauuuagaaagguuauaguaagaggcaaagucacagcuaaauagcuaagucuucugaacuucaagcucugugaccuuaaccucuauguaauaaaaugauuuugg

SEQ ID NO: 4125322 - RNA, 80 nt, Human
cugagauuuauaggaacaggccuuuuaacuuuacaagauuggauucuagcaugaguuauccgaaggcacugagaucuuag

SEQ ID NO: 4125323 - RNA, 102 nt, Human
cugagauuuccccgggcaacacaugaaaagagcucgauugucaguguuagggagacagacguuuucagcacuggacagcgagucucaggccugaggguucag

SEQ ID NO: 4125324 - RNA, 69 nt, Human
cugagcaauuucagcucucacucagggauaaaucaaaaauuaccuaaagugaguugauggaaaacucag

SEQ ID NO: 4125325 - RNA, 80 nt, Human
cugagcacccugugucagaccucugcagcugccaaugucuuccuccugcagcuguggcaggugucuggggcaggugccag

SEQ ID NO: 4125326 - RNA, 56 nt, Human
cugagccaagagcucaccucguguggcuggcccuccgccauguccucuuggcucag

SEQ ID NO: 4125327 - RNA, 67 nt, Human
cugagcccagaaguuagaggcugcaaugagccaugauagugccauugcacucuagucugggugacag

SEQ ID NO: 4125328 - RNA, 64 nt, Human
cugagcccgggacccgccgucaauggcgugggugcucccacccuguucccgguggccgggccag

SEQ ID NO: 4125329 - RNA, 67 nt, Human
cugagcccucggggcuguauuccccagggacuaugucccgaaaaggaggucagugccugagggugag

SEQ ID NO: 4125330 - RNA, 66 nt, Human
cugagcccucuugucuauaugguagaucaaaacaaguuuuaucuaaagacagugagaggaaagcag

SEQ ID NO: 4125331 - RNA, 57 nt, Human
cugagccuccauuucaucaggugaauaaccauccuggcugguugugauggggcuuag

SEQ ID NO: 4125332 - RNA, 73 nt, Human
cugagccugcagugagggaggugaguccuuuucccugcaggggucaagagagaacucccuucgccaggcgcgg

SEQ ID NO: 4125333 - RNA, 62 nt, Human
cugagcgaggaguuggagcuuugccauaaaccaaguaaagugaaaacacuaguucuugccag

SEQ ID NO: 4125334 - RNA, 74 nt, Human
cugagcggggcccuggggcugaagguccuccacuggagcugcacccuggcgacccggcuccaggcccagcagag

SEQ ID NO: 4125335 - RNA, 130 nt, Human
cugagcugaaaagccggcagacauugcccuggggccuuggcagagggcugggcucaggacaccuccuccugggcucagacucugguuaggaugugcugacgugaugucuggcgguuugacacuggcuugg

SEQ ID NO: 4125336 - RNA, 62 nt, Human
cugagcugaaacuugagaggcuacacacuacaggaaaaauaggccucacagaauuaguucag

SEQ ID NO: 4125337 - RNA, 56 nt, Human
cugagcugggaguggauagugggcacagccagccccagcucucccucucaguugag

SEQ ID NO: 4125338 - RNA, 77 nt, Human
cugagcuguguguuagucucaaagccguuggugcacuugcgcccacagccuggccugaguuaaggcagagcacuuag

SEQ ID NO: 4125339 - RNA, 79 nt, Human
cugagcuguugguuuaaauuuccauuagugucaaguuucagcacuugcauguuauagaauuuuaacucaguggaaucag

SEQ ID NO: 4125340 - RNA, 70 nt, Human
cugagcuucugugcccacugugggaucuuaacaaugucugcuggcugguccugggcagcgggacgcucag

SEQ ID NO: 4125341 - RNA, 56 nt, Human
cugaggaccggggucucugggguguuccccggaaacuacgugacacccguuuccag

SEQ ID NO: 4125342 - RNA, 56 nt, Human
cugaggagcugaaggcccuccaggcccaguuugaggaugccaucacagcccaucag

SEQ ID NO: 4125343 - RNA, 64 nt, Human
cugaggagggagaauuaggcuuaauauaaugucaaaauauuauuucuauuacucuucuucuugg

SEQ ID NO: 4125344 - RNA, 89 nt, Human
cugaggauucacgcgugauggauauggaagugccucgcacccagggggcccuggcuagauggcagcuuucauuguccacagagccucag

SEQ ID NO: 4125345 - RNA, 77 nt, Human
cuacuucauaggucacuguacagguuaaaugagauauuuuguguaggguucuuagcacuguaaguggccuauaguag

SEQ ID NO: 4125346 - RNA, 74 nt, Human
cuacuucaucagugcauggacagauuuagagaggugugguaaccucucaggcugcacagcaggguuagaggugg

SEQ ID NO: 4125347 - RNA, 64 nt, Human
cuacuucuuuugaguuagagaaugacugagccuuuaagucaguuuuuacggucacagggagaag

SEQ ID NO: 4125348 - RNA, 65 nt, Human
cuacuuuccaggcaccugaugccucacugcugcucugcuuggcauucuuagggccugggguguag

SEQ ID NO: 4125349 - RNA, 94 nt, Human
cuagaaaaucagaaccuaaaucaucuauggauuuugauguuuuuuagauuuaaaagauggaaaacauugagauaccaagggguucaauauuuag

SEQ ID NO: 4125350 - RNA, 75 nt, Human
cuagaaaaugcuuuauacaaaacacuuaauagguuccuauagugugaaaguuguaaaguaagaugacuuuucuag

SEQ ID NO: 4125351 - RNA, 57 nt, Human
cuagaaauguagauucuuaguguccuccuaccagaccuacagaaucgagcauucugg

SEQ ID NO: 4125352 - RNA, 106 nt, Human
cucauuuggggccaaacuuaugauaugcauuuaccuggcauauaccaaccaaacagaauggcugcaauauaggcacaggugagagguacaaaauggcugcaguggg

SEQ ID NO: 4125353 - RNA, 72 nt, Human
cucauuuuucuacugcccacauuguaccuuuucuaucugugcaaaggucacuguuugcagugaagagaagag

SEQ ID NO: 4125354 - RNA, 61 nt, Human
cuccaaaaucacaugagccaauuccuuaaaauaacucucuauuggcucuguuucucuggag

SEQ ID NO: 4125355 - RNA, 101 nt, Human
cuccaaauuaugaucaagugaugggagaagcagcagccaagugccagagagagucugugaguggacauguggcugcuguuccucaugaauguuggugggag

SEQ ID NO: 4125356 - RNA, 77 nt, Human
cuccaacugcagugcguucuuguucucauuguucuggacagagagaagcaaucagcagccacccacugcagcuggag

SEQ ID NO: 4125357 - RNA, 77 nt, Human
cuccaacugcagugugcucuuguucucauuguucuggacagagagaaacaaucagcagccacccacugcagcuggag

SEQ ID NO: 4125358 - RNA, 59 nt, Human
cuccaagcacucaggcuucuuuugagaacaggagcaaaggcaagcccaggcacuuggag

SEQ ID NO: 4125359 - RNA, 96 nt, Human
cuccaaggauggugcuuagcauauggucagcacucaguaaauaucuguugaaugagugccugaacauagaguagcuaagaaaaacuauuuuugaag

SEQ ID NO: 4125360 - RNA, 68 nt, Human
cuccaaggauucuggacccuuggccauauuugccucuagcuuuaggucaacagauuucuaacauggag

SEQ ID NO: 4125361 - RNA, 73 nt, Human
cuccacaggccccucugcugggagcgcauacacaaaagugaggcuccuugaaagggggacucugucugugcag

SEQ ID NO: 4125362 - RNA, 66 nt, Human
cuggcggaguugggcgggcggccgcggcggggagcggcgcugucggcugcucggccgaguccucgg

SEQ ID NO: 4125363 - RNA, 62 nt, Human
cuggcguucugugaacaucccugaaaugaaaacaguggaugcaggaacacagcgaccuccag

SEQ ID NO: 4125364 - RNA, 79 nt, Human
cuggcuagucaagaucaaucaauacuccuuagacagcaccaauuugagguucugacaaguguuauuuuuugaaggccag

SEQ ID NO: 4125365 - RNA, 78 nt, Human
cuggcuauuagccuaaaguggaaucaagaaacuauucugucuugucuuucccucuaagcuuuagauuuagugagccag

SEQ ID NO: 4125366 - RNA, 68 nt, Human
cuggcucagccuggcccuuucaugaacaaauggaaaugaguaucucaggaggggcaaggcuuagccag

SEQ ID NO: 4125367 - RNA, 65 nt, Human
cuggcucaggaaaguugcugcugacugcacaaagaucugagcagugaccuucuugcuuaaguugg

SEQ ID NO: 4125368 - RNA, 64 nt, Human
cuggcucaucucugcauccucuauggugugccuggcacacuggaggguccagggauguuucuag

SEQ ID NO: 4125369 - RNA, 55 nt, Human
cuggcuccacucccugccugaccccuccuggggucucugggauaaacugggccag

SEQ ID NO: 4125370 - RNA, 59 nt, Human
cuggcucugaccgcgcuggccugggccggagagcccaggaggcgugucucagagaaaag

SEQ ID NO: 4125371 - RNA, 86 nt, Human
cuggcugaaaauacuuuuuuaagaccuaguaccagacuucuuuagagaaguaauuacuaguuuuuaggaaaagugacuuugaauag

SEQ ID NO: 4125372 - RNA, 65 nt, Human
cuggcugaucuccugaaugucuuugcugcaaccucagcuccgugcuucucggggagguuagccag

SEQ ID NO: 4125373 - RNA, 77 nt, Human
cuggcugcacaaacauggaagcagcaucugcuuggcuucuggugaggccucagaaagcuuuuauucauggcagaagg

SEQ ID NO: 4125374 - RNA, 126 nt, Human
cuggcugcuccugggaauaagugccaaaucuggggucagacagcccuggggccagucuuccuuggguacuggcuuccuccuucaggagcugcacugggcccacugguauccuaucccuacagcugg

SEQ ID NO: 4125375 - RNA, 58 nt, Human
cuggcugguaauggaacgacagaguugagaaggauuuuaaauccaggaccagacucag

SEQ ID NO: 4125376 - RNA, 55 nt, Human
cuggcuguauuaguuugauccugggagggauuaaagaccaaauaacuacagucag

SEQ ID NO: 4125377 - RNA, 68 nt, Human
cuggcuguggucauuaggagguugugggggacucuguuccugcuuuucagagcugagaucaccgcugg

SEQ ID NO: 4125378 - RNA, 61 nt, Human
cuggcuucagagcccacacuguuaaucacuauucuauaugauuaacaaagucugaagucag

SEQ ID NO: 4125379 - RNA, 68 nt, Human
cuggcuucccucucuccagggcugccuuacaaguaaugagggagggaguaaaugagagagggaaacag

SEQ ID NO: 4125380 - RNA, 72 nt, Human
cuggcuucccuggcuguguucaggugcguggacuggguguguggcauggaccccagacaagccaggguccag

SEQ ID NO: 4125381 - RNA, 71 nt, Human
cuggcuuccuuccucucuuuccuaauucagcccaagagucacugagcaggcacaagaaagggaggugacag

SEQ ID NO: 4125382 - RNA, 59 nt, Human
cuggcuugguggucacagcccugaggaauggaguuucuggagaaucaccaccaggccag

SEQ ID NO: 4125383 - RNA, 56 nt, Human
cuggcuuuucaaacuguucagucauauuuuuuugaagaacagucugggaagcacag

SEQ ID NO: 4125384 - RNA, 116 nt, Human
cugggaaaucucacugucuucauuguugacauaccaagagcaaagcugggagguuugagcacagagcucuauggugagugucugugaagaagacaugauggagaaguuucuaccag

SEQ ID NO: 4125385 - RNA, 76 nt, Human
cugggaacaaucaaguuuaaucauugagcauuggagacacucuccaagggcaacaauggaacacacuguaucucag

SEQ ID NO: 4125386 - RNA, 58 nt, Human
cugggaacaggcacugcugucaggagcuacugccugggccuaccagccuguaucccag

SEQ ID NO: 4125387 - RNA, 55 nt, Human
cugggaagcuucgagcaggaaaugaagaaaucuaaagucugguucagugucccag

SEQ ID NO: 4125388 - RNA, 63 nt, Human
cugggaaggcagucacuguccuauucauacuucugcuggggcuagaaugaaugccuauuccag

SEQ ID NO: 4125389 - RNA, 91 nt, Human
cugggaagugccauuaucugauuuguaauuuuagaaagaucguuuuaucuuucaugagcagagcagguucuagagagugagugcagcccag

SEQ ID NO: 4125390 - RNA, 60 nt, Human
cugggaaguggcaggacccgaccuaugcaaaugccaugucuuccugaaacccuguuccag

SEQ ID NO: 4125391 - RNA, 69 nt, Human
cugggacauuuaaucuauguuuuguuuuguuuuguuuuacaauuauaagaauaauuaaguuaguccuag

SEQ ID NO: 4125392 - RNA, 89 nt, Human
cugggacgucaugucucugcaggugcaggucgggcggcccgaggugcugcuggauggccuggaaccuggcagggacuaugaggucucgg

SEQ ID NO: 4125393 - RNA, 73 nt, Human
cugggacuucgggacucagaaagguggcagcagaauuguuguggcucuugaggcucucgugugauggucucag

SEQ ID NO: 4125394 - RNA, 70 nt, Human
cugggagaaaggauaggaaugugcuuugggcuaugucagauggcagacagaucccaguucuuauucucag

SEQ ID NO: 4125395 - RNA, 119 nt, Human
cugggagaagcucagaggcuguuuaggaauccagaucuagacuguccuggggcccuacccagugaaauuugucucagugugauugauggguuuuauacacugucuugagccuuuccugg

SEQ ID NO: 4125396 - RNA, 129 nt, Human
cugggagggggacaggugaccacgcaggaaggcuuccuggaggagguguccucacucaugaaagaaggugauagugacagugcuccucuuggggaagagcccuccauccugaccugcugcccccacccg

SEQ ID NO: 4125397 - RNA, 66 nt, Human
cugggcaccugaagauuuagagauugaagauacagccuuauucaacuucaaauccucagggccuag

SEQ ID NO: 4125398 - RNA, 55 nt, Human
cugggcaccuuugcagcaggcucggccacgaggccugcugucacagcgggcccag

SEQ ID NO: 4125399 - RNA, 60 nt, Human
cugggcacuuuggggagccuaccacugagccuagacagugcccccagccugggugcccag

SEQ ID NO: 4125400 - RNA, 59 nt, Human
cugggcagcuccauaccacccacugucacuuggacuuugaggggcagagagguguccag

SEQ ID NO: 4125401 - RNA, 65 nt, Human
cugggcagugcagcuauagaacauuuucaucauugcagacuuucuauugggcagcauugcuucag

SEQ ID NO: 4125402 - RNA, 63 nt, Human
cugggcaugcuaugaacacaggcuugucagggacucugaaaaccugugccaaaguguguuagg

SEQ ID NO: 4125403 - RNA, 64 nt, Human
cugggcccccggcgcuggagcucuguaucucagggacugagaauaacagccuguguucccccag

SEQ ID NO: 4125404 - RNA, 64 nt, Human
cugggccuaugacuguggagguggcaucugggcuggcccugaugcuauaagccacaguggacag

SEQ ID NO: 4125405 - RNA, 58 nt, Human
cugggccugucagggcuuuuuggagacaagcaacagaaaccaacccuggcuggccuag

SEQ ID NO: 4125406 - RNA, 61 nt, Human
cugggccuuagggcacucccuuugcagagcacucauuaggaacaugugcuuuggggcccag

SEQ ID NO: 4125407 - RNA, 70 nt, Human
cugggccuuuuucuuuaaaggaacucuguuuaccauucauuagauaguccauuuggagaaauaugugcag

SEQ ID NO: 4125408 - RNA, 63 nt, Human
cugggcuaugagaagauuagagcugaauuuacuuaccauagcuuuaaauaauacaagguccag

SEQ ID NO: 4125409 - RNA, 128 nt, Human
cugggcuauuuccuuauagcuggagcagcagugggcauagcagggucucaggagucaggaggauccccacugucacccuggcuggacuggaccguggcucacuccuccuagagggauaucaagcccag

SEQ ID NO: 4125410 - RNA, 72 nt, Human
cugggcucagugucucacuccuguaaucccagcaccuugagaggccgaggugggaggauuacugaagcccag

SEQ ID NO: 4125411 - RNA, 57 nt, Human
cugggcugagcuguggaaacuccccugaaggggaaugcuucccacagcccagcccag

SEQ ID NO: 4125412 - RNA, 60 nt, Human
cugggcugcgguucucugaagccaccccguguuucagauguacgagugcaguugcuccag

SEQ ID NO: 4125413 - RNA, 65 nt, Human
cugggcuggagagcuccuauuugcugucugagauuuauacucagauguaguugcuccagccacag

SEQ ID NO: 4125414 - RNA, 66 nt, Human
cuggggaaaagcacuucaggagcaguuugcuacagcaagcaaugcugcugacuguucccuccuugg

SEQ ID NO: 4125415 - RNA, 62 nt, Human
cuggggaacaauuugccacacuuuccuaguuuacuuuagccucugggcaguugcuuucccag

SEQ ID NO: 4125416 - RNA, 71 nt, Human
cuggggacaggagacuuacagcuaccuauguguggaugccauccuuaggagccugagucaaggguucccag

SEQ ID NO: 4125417 - RNA, 97 nt, Human
cuggggaccuagcagaugccugaaggagcuggguuuggcaccuuugccagcuccaggaccccagcucuuuuagcggcaucuccauggcauuccuugg

SEQ ID NO: 4125418 - RNA, 75 nt, Human
cuggggaccucucaaccuucuuuagaagauggaggggcuuccuucuucauggucugguucuccaggggcucccag

SEQ ID NO: 4125419 - RNA, 82 nt, Human
cuggggagcuugucacugugcuggcaaugacucagggaacauuuccuggaggagguggguugcaggagcaagaagccaccag

SEQ ID NO: 4125420 - RNA, 60 nt, Human
cuggggaggaggcugcagccuuggaguuuguugagcauggugggcacagccuccccccag

SEQ ID NO: 4125421 - RNA, 72 nt, Human
cuggggaggugaugguuuccuaccuuccaacccacugacccagggaggcagcugaccuagcaccauccacag

SEQ ID NO: 4125422 - RNA, 58 nt, Human
cuggggauauugcaaagaauuaaaccuauuaaauuagaaucaaaugucauauccccag

SEQ ID NO: 4125423 - RNA, 81 nt, Human
cuggggaucuuguuaaaaugcagauugucauucaggagggcuggccuguccugggauucugcauuucuaacaaguucccag

SEQ ID NO: 4125424 - RNA, 81 nt, Human
cuggggaucuuguuaaaugcagauuuugauuuaguagccuguggcauggcccaaaauucugcauuucuaauaaacucccag

SEQ ID NO: 4125425 - RNA, 73 nt, Human
cuggggcaagguagggcaaaguagggcaccugggacaagcuuuccaccccucugggccccugcuucuccuugg

SEQ ID NO: 4125426 - RNA, 59 nt, Human
cuggggcaucauccauucuuucguauauucacagauauguaugguauguccugccccag

SEQ ID NO: 4125427 - RNA, 57 nt, Human
cuggggcauugggagaggccugggacucuggaccuggucugucuuucuuguccccag

SEQ ID NO: 4125428 - RNA, 86 nt, Human
cugcccagccccuggucccagucccuuuccaccguuggcuucaucaagcuccuugcgggguuggggcugcauggccaggguggcag

SEQ ID NO: 4125429 - RNA, 76 nt, Human
cugcccaucuugaauuguaguuccucagcuguaaaaugaaggagcugauugaacugagcuucaagaucacuugcag

SEQ ID NO: 4125430 - RNA, 64 nt, Human
cugcccauggcuccuggcugugguucuucuuggucugggucccacaucucagggcuacaggcag

SEQ ID NO: 4125431 - RNA, 55 nt, Human
cugcccauucaaccagcuacagaaucccaggccugcuguuggaucagugggucag

SEQ ID NO: 4125432 - RNA, 90 nt, Human
cugccccaguggcagauuuuccaguuggcagugccccuugaccagugcuggagcgucaguggggccacuccagucugugccugguggugg

SEQ ID NO: 4125433 - RNA, 82 nt, Human
cugcccccucucuguuuugugagcuccuuggagguagggaucgaagcuuuucccucccucugggcuccagcacggagcucag

SEQ ID NO: 4125434 - RNA, 93 nt, Human
cugcccggaccccaguugcguaagacacggggaccuucacccauuuguucauucaacaaauggcaggcucuuugcuaguugcuaggguggcag

SEQ ID NO: 4125435 - RNA, 67 nt, Human
cugcccucaggcugguccccacaguggaaagccugcuuugcuuucuugcugugccccagcagggcgg

SEQ ID NO: 4125436 - RNA, 55 nt, Human
cugcccucuagaggaggacugaaaaagggauuagccagauuucuuugcagggcag

SEQ ID NO: 4125437 - RNA, 61 nt, Human
cugcccucuagggaugcacugggcuggacaacagcccaccaacauuacccuguaagggcag

SEQ ID NO: 4125438 - RNA, 68 nt, Human
cugcccugagauuuguaauuuuuguaggaaaacuaagauuccugauaaagauucagaucuuucuucag

SEQ ID NO: 4125439 - RNA, 115 nt, Human
cugcccugcaguugugcuguguuuuucccaggcugggucuggccuuuggcaaacagucagcugggcuagggccugcuaugguuuggaaaggcagcuucagagguaccaugggcag

SEQ ID NO: 4125440 - RNA, 78 nt, Human
cugcccugcuucagcucacccucugugggcugcacccacuguccaaccagucccagugagaugaaccagguaccucag

SEQ ID NO: 4125441 - RNA, 60 nt, Human
cugcccugggcccuauccgcugucagcugccugagcugaagagagaugcguccagcucag

SEQ ID NO: 4125442 - RNA, 58 nt, Human
cugcccuguggcucugagucaugagaaaaccagacauaagcgagcaucacagggacag

SEQ ID NO: 4125443 - RNA, 57 nt, Human
cugcccugugguuguggguucucugugcaaggcaggucucacccauccccagggcag

SEQ ID NO: 4125444 - RNA, 129 nt, Human
cugcccuguguggagacgggcugagugacauguucuucaggaggugagcaagaagggggcaucaucucccacccuuccuccaccugcacacaccuggcacgugugcuccuccaccuuucugcaagggag

SEQ ID NO: 4125445 - RNA, 81 nt, Human
cugcccuuuuagaaaagguuugccgaccucugcuuuagaggguuaugaacagggaauggcacaaucugacgggaaguuuag

SEQ ID NO: 4125446 - RNA, 76 nt, Human
cugccgagaucagaguaggauuuggaacccaagcaccagggaaccaauguuaggcucugguuuuagauccuggcgg

SEQ ID NO: 4125447 - RNA, 70 nt, Human
cugccuagccuucuucaugccaugaugcauacauacaaaauuauacggacuacauggagaggcuaugcag

SEQ ID NO: 4125448 - RNA, 71 nt, Human
cugccuaguucuggguggccaguauuuagaaaugguuaauuugcuucugauucugcccccugaagcugcag

SEQ ID NO: 4125449 - RNA, 109 nt, Human
cugccucauuacuccuaagacugcacaguacacaaaaggaguuaguuugccacgugccaaaacauggcugugggugcuggcuccacccugcagagggaaacugaggcag

SEQ ID NO: 4125450 - RNA, 61 nt, Human
cugccucauucuggccuugguuccucugucuaaugggggaccugaacauaaaacgaggcag

SEQ ID NO: 4125451 - RNA, 56 nt, Human
cugccuccaggcucaccuugacaagcuacugauggagcggggucggcuggaggggg

SEQ ID NO: 4125452 - RNA, 65 nt, Human
cugccuccauggggucuggcccaggcugcacacuguaggugcucuggggccagcuccugaggcag

SEQ ID NO: 4125453 - RNA, 59 nt, Human
cugccucuccccagaguggccccaccaaccccuucuguagcccucuguucaagaagcag

SEQ ID NO: 4125454 - RNA, 82 nt, Human
cugccucuuccaucaacuucaacuauuuauaaauucucccaaguuccccaagggaguuagauuugaaugauguaaagagcag

SEQ ID NO: 4125455 - RNA, 55 nt, Human
cugccugcaugcugccauagcugguaggcuucuccaagcagcagcugccaggcag

SEQ ID NO: 4125456 - RNA, 75 nt, Human
cugccugccucugaguccugcacucacccguccaccaggacagggauggcugucaggauguaguguugcugggag

SEQ ID NO: 4125457 - RNA, 63 nt, Human
cugccugccugccugcuggccgggacuccugagucaggcucucuggcccuggggugugggcag

SEQ ID NO: 4125458 - RNA, 57 nt, Human
cugccuggcuccauccuugagcucugggcaccaccuagggugagggagagccugcag

SEQ ID NO: 4125459 - RNA, 122 nt, Human
cugccugguagagguuagucacuugguaguguagaguggugggggugucuguggauguaucugcuucucaaacagacauucagcuaagucuauuauugcccaacauuaaccuccacuagcag

SEQ ID NO: 4125460 - RNA, 70 nt, Human
cugccuguuaaacugucaccuaauguauuuuuagaaauauauaaucuaaaaaagacagaggaugaggcag

SEQ ID NO: 4125461 - RNA, 85 nt, Human
cugccuguucucacuuucuuucgaagacgugauuaaguuuccacauuuguuuggucccucaaaaggcaaagaugaaguacaggag

SEQ ID NO: 4125462 - RNA, 77 nt, Human
cugccuguuuuccacaugaaaauuaauguaauauuuuguuuagaaaucacauuguaggucauuugcaaaugaggcag

SEQ ID NO: 4125463 - RNA, 55 nt, Human
cugccuuggaaaaugugguaauuaaaaagugcuuuaauauaacauccaggagcag

SEQ ID NO: 4125464 - RNA, 67 nt, Human
cugccuugugauggagaagcaacaucuggaccuaagaccuagcagacagcugccuccaccacagcag

SEQ ID NO: 4125465 - RNA, 56 nt, Human
cugccuuuugcccuucuuuggaaugugauuuucauccagggaagaaaugagggcag

SEQ ID NO: 4125466 - RNA, 84 nt, Human
cugcgagggagcuguagagcagggagcaggaagcuguguguguccagcccugaccuguccuguucugcccccagccccucacag

SEQ ID NO: 4125467 - RNA, 59 nt, Human
cugcgcagggguggcgccagaaugaucaaagucaucauggggcacucaucuuugugugg

SEQ ID NO: 4125468 - RNA, 63 nt, Human
cugcgcaguggauuaaggagggcagcuccuuugggggcuggccagagccuguccauugaguag

SEQ ID NO: 4125469 - RNA, 60 nt, Human
cugcgcggcuccgcgggccccaccggaaaucccggcccgggguggccucggagcgcgcgg

SEQ ID NO: 4125470 - RNA, 100 nt, Human
cugcggacuucaccacucacauucacuuuacuuuguuaaucuggcugcaaggaaauuucuuagcccuugacacaguaugugaagagaguucuguuggcag

SEQ ID NO: 4125471 - RNA, 55 nt, Human
cugcggccccgacuucagcgguugggcuaggcugugcugacuguuuggguggcgg

SEQ ID NO: 4125472 - RNA, 61 nt, Human
cugcgggccagggcugcauaaucaaaguuagacaguuguuaugcaagcuuccuggucucag

SEQ ID NO: 4125473 - RNA, 63 nt, Human
cugcguccagcccuaagcugaaccuucugugggcugcagaagacgccugggugcuguacucag

SEQ ID NO: 4125474 - RNA, 68 nt, Human
cugcgugggaaggggaagagaccgcagagucagggacccccugccuccucuccuuccccaucccucag

SEQ ID NO: 4125475 - RNA, 117 nt, Human
cugcguggucaguuuugcaucucgcccuuuucuccagcuuucuuccuucugucugugcuacaaguaauggacggggaagaaaagcaaagaaagaauugcagagcuuggaaaauucag

SEQ ID NO: 4125476 - RNA, 58 nt, Human
cugcguucgccuccuuucugaggauggggucuuuacagggcagaagcaggcagugcag

SEQ ID NO: 4125477 - RNA, 58 nt, Human
cugcguugcccagugccacggccacuaugacauguggcuucugagcauugaaacgugg

SEQ ID NO: 4125478 - RNA, 67 nt, Human
cugcuaaaaugguauuuuuaaagauucugugguauucauaauaauuuugaaagcaccauuugaguag

SEQ ID NO: 4125479 - RNA, 59 nt, Human
cugcuacacaguucugccuaauggcaugaaaacaugccugcuaggcuggugugugccag

SEQ ID NO: 4125480 - RNA, 72 nt, Human
cugcuacauugugagcaacuccagggcugggacugugcucccagaaucuccagugcuacagcaguguggcag

SEQ ID NO: 4125481 - RNA, 64 nt, Human
cugcuagaguggcuaagccugcagaugccucuagagaaagguccucaggauggcggccuggugg

SEQ ID NO: 4125482 - RNA, 69 nt, Human
cugcuaucacaaacacaucauucaugucgucagucagcauguugcaggcauaaccgauguugauggcag

SEQ ID NO: 4125483 - RNA, 83 nt, Human
cugcuauguuuuagaaugagcaugaagccaguuugguuauuuuauuaaagaagaauuaggugcauguuuacaaaaacaagcag

SEQ ID NO: 4125484 - RNA, 75 nt, Human
cugcuauuucagucacuucuucucugacccaaaagguauagaguccacgcagagacauaugauugagacagacag

SEQ ID NO: 4125485 - RNA, 79 nt, Human
cugcucagauucugccaggggcacuugcggcucaaaguacauucaagucucaagggaugucucuauaggguagaggcag

SEQ ID NO: 4125486 - RNA, 96 nt, Human
cugcucagugugcagacugagggccagcagccucagcaugacugggagcucacuagcaguucaggccggcugacucagaacccacauucuagcaag

SEQ ID NO: 4125487 - RNA, 58 nt, Human
cugcucauccauggaggcgauuguucuuggccgguccuuccugcagggauggaugcag

SEQ ID NO: 4125488 - RNA, 84 nt, Human
cugcuccuccauugguccacugugaaauugggacaaaagauaucuuauuuuuuaggauucacauggauucaugauggagagcag

SEQ ID NO: 4125489 - RNA, 59 nt, Human
cugcuccuccccaucaggcagccucucuugcggcuggugacgauuaggaggaaagccag

SEQ ID NO: 4125490 - RNA, 69 nt, Human
cugcuccuggcccugagcucccaggugccaugcaauggcucgccuggggcagcuguggggcuugaacag

SEQ ID NO: 4125491 - RNA, 57 nt, Human
cugcuccuggucauccuccacucucugacucccccagguccuggagaugcuggacag

SEQ ID NO: 4125492 - RNA, 68 nt, Human
cugcuccuggugacucccagauaaacuaccugcacuuuggucuuuaucuugggcucagcauucagcag

SEQ ID NO: 4125493 - RNA, 85 nt, Human
cugcuccuugaaggauccagcugcagcccaguuucuucccaccagugccugguguagcugggcagugcuuggauucagggagcag

SEQ ID NO: 4125494 - RNA, 65 nt, Human
cugcucuaacugcauuaguuuuucuagacuuuuuucuauuguggauuaagaaguuggaaaugcag

SEQ ID NO: 4125495 - RNA, 72 nt, Human
cugcucuauccaguguguaugagguuugcagugggagcguccuuacauuaacuuacguccacaugguggcag

SEQ ID NO: 4125496 - RNA, 79 nt, Human
cugcucucaaggagcucacagaugaaucaguaguaauaauuauaccaacggcugacauuuacugagcacuuacuagcag

SEQ ID NO: 4125497 - RNA, 69 nt, Human
cugcugaauuacagaaaaaagcacaacaccaucagaaguuacagguguagcauuuuauguaauaaguag

SEQ ID NO: 4125498 - RNA, 56 nt, Human
cugcugaccuucagggcugcuuccaucccuggugggggccguccuggggauuauag

SEQ ID NO: 4125499 - RNA, 64 nt, Human
cugggggcuagagagaugaaauaucuuaucuagaaaaugagagguuuugaaucuagcagccuag

SEQ ID NO: 4125500 - RNA, 95 nt, Human
cuggggucaaagauucagcugccaugguccaggcuccaggcuggggaggauguuagggauugguguggucaggaccagcgcugcuaugacugcgg

SEQ ID NO: 4125501 - RNA, 87 nt, Human
cuggggucaggugaccugaauuccuauccugguuguacccaagcaggcugggcaauaugggcaagacauggcuucucugagccccag

SEQ ID NO: 4125502 - RNA, 75 nt, Human
cuggggucuaucaacugcaugagcugucaguggaggccacggcggccucuccguugcugaccucuuguuccccag

SEQ ID NO: 4125503 - RNA, 68 nt, Human
cuggggugggucuggaaggagagcuuccugcagugaagaacuccgaugcuuccagggccaccugccag

SEQ ID NO: 4125504 - RNA, 68 nt, Human
cugcuggaggaaaucucaccgcgccggggcagccuucgccaccggcaggaccucauuuccuucugcag

SEQ ID NO: 4125505 - RNA, 55 nt, Human
cugcuggcaccuccagggauggaguccucccagaccucuccugugggugcagcag

SEQ ID NO: 4125506 - RNA, 73 nt, Human
cugcuggccggguucaucgaggcugcugggucaguuugacaccugcucagcccuggugagguuggcuaugugg

SEQ ID NO: 4125507 - RNA, 79 nt, Human
cugcuggccucugccagcucuaaacggcucuguggucuggcaaggccaaggcaaugugcagcuggugggaggucggugg

SEQ ID NO: 4125508 - RNA, 59 nt, Human
cugcuggccuuacuuuuuuagcauacagggauuggaagugaaagaaaagagaccagcag

SEQ ID NO: 4125509 - RNA, 63 nt, Human
cugcugggauagaaguaucucaguguaccagcauucacuaagcuauaaaaucugugacagcag

SEQ ID NO: 4125510 - RNA, 66 nt, Human
cugcugggauauuucauguaaaugguggacauuuuagacaccaugugcauccuuaaucucccuagg

SEQ ID NO: 4125511 - RNA, 83 nt, Human
cugcugggcucugcaaaaguagauacuugauaauauauuuauuuuucauuuuaaaaagaauuuguauuugcaggaaaugguag

SEQ ID NO: 4125512 - RNA, 55 nt, Human
cugcuguaauaggagcguuuugcugaaaaagaacagaaagcccuauguacagugg

SEQ ID NO: 4125513 - RNA, 87 nt, Human
cugcugugaaauuccuagaucauaagugaaagucuaacucagagccaucagggccaugaguagcgauuucauuuuuaguucauacag

SEQ ID NO: 4125514 - RNA, 65 nt, Human
cugcuuagcuccugucaucuccacacggaccuguuuuaaggagaagcuggaggaagacuaagcag

SEQ ID NO: 4125515 - RNA, 88 nt, Human
cugcuuaucaggcggcuuugugccuuuaaggggagcugagugguguguacaugggucucugaaaggcggaaaucugcaagaugugcag

SEQ ID NO: 4125516 - RNA, 60 nt, Human
cugcuuccaguuccucaccacauauauguuguguuagcuauguaggaguuauuggaacag

SEQ ID NO: 4125517 - RNA, 57 nt, Human
cugcuucucucccucauaaucguacaauucccucaguacaugcuugagaggaugcag

SEQ ID NO: 4125518 - RNA, 74 nt, Human
cugcuucuuagcagcuaaggacucuugggaaaguuacuaaacuucccaaagcuuugucugugaacuggaggcag

SEQ ID NO: 4125519 - RNA, 55 nt, Human
cugcuugacuuugauaaaauugcggaaaauugcauggaucuaagaggucaaggag

SEQ ID NO: 4125520 - RNA, 99 nt, Human
cugcuuggcauucaggacagucacuauuggugcagaucucuuguuaauugacaucuauauaacagauccacuauggugcugaugagcugugaccaacgg

SEQ ID NO: 4125521 - RNA, 56 nt, Human
cugcuugucuucgaggggugcacucuuaucuuugggggccccaguguggcacgcag

SEQ ID NO: 4125522 - RNA, 58 nt, Human
cugcuuuagacggcuuucgcugaccucggacaggaagacggcgaagcgcuuggaguag

SEQ ID NO: 4125523 - RNA, 63 nt, Human
cugcuuuggacaacuauucuuggaaacuaauuucaauuaagcaggaacaggguguccuggcag

SEQ ID NO: 4125524 - RNA, 100 nt, Human
cugcuuuucauccucaauacauugguuucaaggacacugagcuuuguaaagucccuucacuuuacugggccucaguguucucaucugugagaggaagcag

SEQ ID NO: 4125525 - RNA, 79 nt, Human
cugcuuuuuaaaauuguaguuuaaacuucagugacacguuuugccguuugcuaauuuaaagcuauuuuuaaaagagcag

SEQ ID NO: 4125526 - RNA, 73 nt, Human
cuggaaaauugaucaaggauuuauuuaagcuccauagagugggcucuggaaaguguccuugauggaaauucag

SEQ ID NO: 4125527 - RNA, 56 nt, Human
cuggaaagucaggucagaaacuggggcagagccucugcugaaaaugugcucuccag

SEQ ID NO: 4125528 - RNA, 77 nt, Human
cuggaaaugagcuacagacccaccuuggaagaaccugcaguugaggggcuucuuucauuugguuuuguacuuuucag

SEQ ID NO: 4125529 - RNA, 70 nt, Human
cuggaacugaaaacucaaggauuuagacgaagcuacccaguuuguuuaaucauuugaaguuuuguuucag

SEQ ID NO: 4125530 - RNA, 64 nt, Human
cuggaagaggccacagcugacagcacaggagaccaacuggcuggaggcucuggccauuguccag

SEQ ID NO: 4125531 - RNA, 66 nt, Human
cuggaagagugcagguuuguuucauaaacaucgcuuauggaaacuauaaaagcaccuucuucacag

SEQ ID NO: 4125532 - RNA, 75 nt, Human
cuggaaggauugagguaggcauuguucaaaaggcuggguagcgguccaggcuggggcaguggcuuuucacccuag

SEQ ID NO: 4125533 - RNA, 55 nt, Human
cuggaagggccugggaagagucgugcuucuaauucugaacaagggcaccuuccag

SEQ ID NO: 4125534 - RNA, 91 nt, Human
cuggaagugcacagcaccgagaaggaagcaugccuuugcuggcagagucagauggguguuugugacuuugcucggggaagugcaugcccag

SEQ ID NO: 4125535 - RNA, 66 nt, Human
cuggaauggaccccaagggaugcgugugcucaugagagaggagcgcugugcgcccuggguccucag

SEQ ID NO: 4125536 - RNA, 65 nt, Human
cuggaaugugcuagggcuguggccaccugggccccugcuggagcugcagcuguggauguucucag

SEQ ID NO: 4125537 - RNA, 57 nt, Human
cuggaauucuagaauucauggaguccuagaguggacuccaggacuugagaauuccag

SEQ ID NO: 4125538 - RNA, 58 nt, Human
cuggaauucuuauucugacuucagaggguccaucuucuuagucuucuuagaauuugag

SEQ ID NO: 4125539 - RNA, 65 nt, Human
cuggacaaccacaaggccaauaaacaagucuucagggagaccauggccagcuguagguugugcag

SEQ ID NO: 4125540 - RNA, 97 nt, Human
cuggacacauuuauucuacuauauucucugcugcuuuuguguauagauuuggaaaaugaacucaaaagaccagagagcugaggauaguugguaucag

SEQ ID NO: 4125541 - RNA, 109 nt, Human
cuggacacuugaacuuuuaaggagcagaggcuguggagcacuguuccuggcauggauuuggccagccuggggcacuucuccaaacccucucucgcuguccaaggugcag

SEQ ID NO: 4125542 - RNA, 76 nt, Human
cuggaccugggaugcagagcccugagggugcaggggaugggccaagggcucccugagggcucagcccccagcccag

SEQ ID NO: 4125543 - RNA, 119 nt, Human
cuggacucauugauuuucuccucccccccacuuacauugucauucuaugcuauucaguuguauuuuauaauugggugguggcaguaaugagaaagaagaguaugagaaaugauguuuag

SEQ ID NO: 4125544 - RNA, 67 nt, Human
cuggacucuugccagaacuacggugcaagccccauuguguggcugcagauuguagucuguuaaccgg

SEQ ID NO: 4125545 - RNA, 65 nt, Human
cuggacugugaggucugggugaggaggaaugguguuuaauucucauguauaucuucaguguucag

SEQ ID NO: 4125546 - RNA, 73 nt, Human
cuggagaagguggccugcaggaccccacagaagcaacaacagcuuaccuuccccuguggugccagaucgccag

SEQ ID NO: 4125547 - RNA, 65 nt, Human
cuggagaaguacugagacauuuagagguuaaacuaaacucagagugccauaaaguccuucuugag

SEQ ID NO: 4125548 - RNA, 97 nt, Human
cuggagaccaggaggcgcuaaaaggcagcccugcgcugcccccugguggccgauguggacacugcagccaggaagccuuucccucccggccuuccgg

SEQ ID NO: 4125549 - RNA, 63 nt, Human
cuggagaugcuauguaguuugguugcaagguggcugucaaucacaaaugcaaguugucaccag

SEQ ID NO: 4125550 - RNA, 65 nt, Human
cuggagauuuugcauuucuaacaagcugccaggugaugcugaggcagcugaagcugcaguuccag

SEQ ID NO: 4125551 - RNA, 95 nt, Human
cuggagcauggaauuucuauucaccuuugugaauaugcagaaaauaugagagcauauucuguguaugucauaauguuuaguuuuguguaauuuag

SEQ ID NO: 4125552 - RNA, 88 nt, Human
cuggagccgagcagugagccacagcuuuccuugugcacuugccugagcucagcaguggugugaggagggcucugacugugaagcccag

SEQ ID NO: 4125553 - RNA, 70 nt, Human
cuggagcugccagacgggcacaggcgagggcaccucacccuugaggcggccuuccuggcaguggcuccag

SEQ ID NO: 4125554 - RNA, 62 nt, Human
cuggaggccagaaaaagacagcuccaguguccuucuaggcugggggugguucuugccuccag

SEQ ID NO: 4125555 - RNA, 69 nt, Human
cuggaggcucuucaauaggucaaugguuuaacaauauuuaguacauucaucccauggaagaguucucag

SEQ ID NO: 4125556 - RNA, 61 nt, Human
cuggaggcugcaccguuuccugcugcccacgaugaacaaagcaggaaacugucuuuuccag

SEQ ID NO: 4125557 - RNA, 66 nt, Human
cuggaggggaccuugggacaagggcuucuuugguagcccuggccagguucacaggcuuccuuucag

SEQ ID NO: 4125558 - RNA, 68 nt, Human
cuggagguaugggauugauacccguccgucaacucucuggcaaagaaggaacuauaaucccauuucag

SEQ ID NO: 4125559 - RNA, 59 nt, Human
cuggagucuucagcuugcugccaaguuuugugaccuagaggcaggcaggagguuuccag

SEQ ID NO: 4125560 - RNA, 61 nt, Human
cuggagugccauaccugcguaggcggcugaguugaucugcacaggcguagguugacuuuag

SEQ ID NO: 4125561 - RNA, 83 nt, Human
cuggaguggagggagggaggugcugguucacggucauucucuguaaccaauuggcauccccugagaucuccaguccgcucugg

SEQ ID NO: 4125562 - RNA, 66 nt, Human
cuggaguguuauagugacuuccacaucaucuuuaccaucucucuugacuggagucagugacaccag

SEQ ID NO: 4125563 - RNA, 56 nt, Human
cuggaguucaguggcgugaacaugacucaccacagccuugaccuccuggacuccag

SEQ ID NO: 4125564 - RNA, 65 nt, Human
cuggaguuguuauuguaagaggugacugcauauugccuugcauuacacuaaugugacaacaauag

SEQ ID NO: 4125565 - RNA, 74 nt, Human
cuggauauuucccauuucccccaaaugcagccugguaaccacuguauuuguuguuaaauggagaggauuucuag

SEQ ID NO: 4125566 - RNA, 79 nt, Human
cuccaccuggucucucccuugaccuguggggauuauggggacuauggggauuacaauucaagaugagauucaggugggg

SEQ ID NO: 4125567 - RNA, 59 nt, Human
cuccacguauguguacagucauggcuguacagucauggcuucuaagugauaacguggag

SEQ ID NO: 4125568 - RNA, 74 nt, Human
cuccacguugccuuuccuguucuaguuguugccaucacuguguggagagaaaguugaauggagggacgguggag

SEQ ID NO: 4125569 - RNA, 57 nt, Human
cuccagagacacuucucaugauuguucaacuuuugguucugugaggugucucuguag

SEQ ID NO: 4125570 - RNA, 58 nt, Human
cuccagagguccccgcggcacucucggccggcaacggcucccgcgcggggccuuggag

SEQ ID NO: 4125571 - RNA, 61 nt, Human
cuccagauaggaggggguccccagugucugggagcuguggacucccaauucuugucuugag

SEQ ID NO: 4125572 - RNA, 67 nt, Human
cuccagcucgcgagcucugcucccuuauucugggaaaugucccacugcaggggugugugagcugggg

SEQ ID NO: 4125573 - RNA, 57 nt, Human
cuccagcuucuugacuuggugguugacaacaaagugcgcaaaaauagaagcugugag

SEQ ID NO: 4125574 - RNA, 59 nt, Human
cuccaggacagauucagggccaaguacggccgcagugacuugguccauguguccugggg

SEQ ID NO: 4125575 - RNA, 71 nt, Human
cuccaggacugaggacagagcugcucuucuucuucuacguuacuguggcccucuugucuggcagccuggag

SEQ ID NO: 4125576 - RNA, 57 nt, Human
cuccagggagcugcgggagccacaugcaggccccucaccuucaguucccaauggcag

SEQ ID NO: 4125577 - RNA, 62 nt, Human
cuccagggagcuuucccaggacccugguuccauuagucaccccaggcucugagcuccuggag

SEQ ID NO: 4125578 - RNA, 55 nt, Human
cuccaguaucuguaggaaaaggaaacuuuucuuuuaaaagagagcagaaauggag

SEQ ID NO: 4125579 - RNA, 63 nt, Human
cuccagucuagguccuacuuauuuaggaugguccugcucaagucucaaggccuagauucggag

SEQ ID NO: 4125580 - RNA, 55 nt, Human
cuccagucuaguagagccugcuugauugaaauugauuagcucuagaugauuggag

SEQ ID NO: 4125581 - RNA, 62 nt, Human
cuccagugagcaaguaaugaaggccuaugcuauggcucccucaaaccaccuuguuacugggg

SEQ ID NO: 4125582 - RNA, 55 nt, Human
cuccagugcacuggucuuuucagaccugccuccuggaauauccagaugccugggg

SEQ ID NO: 4125583 - RNA, 75 nt, Human
cucugcaauuucauggccuacuuugcuucaauauacucaagacaggaaguugcagcaaggucaugaaauguagag

SEQ ID NO: 4125584 - RNA, 92 nt, Human
cucugcacaagccaggucuucacuuuacugaagccccagcugaccccucugggcucaaacuuuacugaagugaagaccuggucugugcagag

SEQ ID NO: 4125585 - RNA, 60 nt, Human
cucugcaccuacacaacaggaagucccacaugcuggguucuaguugucccagguucauag

SEQ ID NO: 4125586 - RNA, 71 nt, Human
cucugcagacacuggcugauugaggagagcuuucuggggagaggauucuggaaguguuagaaucuggaggg

SEQ ID NO: 4125587 - RNA, 77 nt, Human
cucugcaggcucuggcggcucuuucaauaucucaggaucuggagacauguuucuggggaugccugggcucaacggag

SEQ ID NO: 4125588 - RNA, 56 nt, Human
cucugcaguugugcgccaauauaggucgauuacccagggcauccacgaaugcagag

SEQ ID NO: 4125589 - RNA, 65 nt, Human
cucugcaucaggcauuauggaugaaaggggacagucucaaccuucaaaauguuugcagugcagag

SEQ ID NO: 4125590 - RNA, 71 nt, Human
cucugcauuaagcuccaaguugcucugagaccugauuuaggggggucagaggaacuggacuaaagccaggg

SEQ ID NO: 4125591 - RNA, 55 nt, Human
cucugcauuuuaacagaugauuaguuauacauguuuguuugcuugaagagcagag

SEQ ID NO: 4125592 - RNA, 83 nt, Human
cucugccacgugguaaaagcuuccggggggaggcauuaguuauuucugucugaggaguuuuugaccaaacguaaacaucagag

SEQ ID NO: 4125593 - RNA, 120 nt, Human
cucugcccuguccagaccugccgggucccgcccaaguccgaccugagguuccaggggcguggggacacuccccaccccuugucuuuggggucguguggaccgcccggcgacggggaggag

SEQ ID NO: 4125594 - RNA, 98 nt, Human
cugcacccuccucucucccucucuuuccuacaccuuggacagacagccugagauuccagggcgugugugaaggaaagccgaggagggcagggccgcag

SEQ ID NO: 4125595 - RNA, 78 nt, Human
cugcacggagaaggaggcgaagcgugugcggguagacacgugagcacgcuguuuccuucugauguaaacacugggcag

SEQ ID NO: 4125596 - RNA, 65 nt, Human
cugcacuuuuccuuagggucagccagaucugguaaguagguaugcucuucuagggauaaaggcag

SEQ ID NO: 4125597 - RNA, 80 nt, Human
cugcagaagccaaauuggccuuugucaucaagaucagagguaucaauggugugagcccaaagguccaaaagguguugcag

SEQ ID NO: 4125598 - RNA, 65 nt, Human
cugcagaaggggaguggcuagugugugagggaggcaaugccccaccauuaagcauuucucuguag

SEQ ID NO: 4125599 - RNA, 80 nt, Human
cugcagacaugggaguguucagaacaaagguaaaugaggugguccucacagacccuugcugagcucuuaucccgugccag

SEQ ID NO: 4125600 - RNA, 75 nt, Human
cugcagacccucgggugaguuggccuuuuucgagcaaggagaccaugaaaacauaccuucucaggggaucugcag

SEQ ID NO: 4125601 - RNA, 119 nt, Human
cugcagaucaagacuuuuaaaguucacuuccugacuugcagcagcucuuugaauguuuuccaagcuugcaagcaugcuguuguaaaguaaaagugaagcuuuuaaaguuugcacagcag

SEQ ID NO: 4125602 - RNA, 57 nt, Human
cugcagaugcauagguacacuccguugagaucagcagagcauggcuuacaucagcag

SEQ ID NO: 4125603 - RNA, 58 nt, Human
cugcagcaagagaagugcugacuguuaauguguacacuaggcacuucucuuagcucag

SEQ ID NO: 4125604 - RNA, 130 nt, Human
cugcagcagauguggccuguacagggccggcacggggcggugccuggcaguggggcccugggacguggcagguccgagggcuggacgcaggggcccugcagcugcagcccuggaggucagcugugggaag

SEQ ID NO: 4125605 - RNA, 66 nt, Human
cugcagccaguauccucugagauuuugucguuagaaaucagggucuggaguaggaugauggcuagg

SEQ ID NO: 4125606 - RNA, 57 nt, Human
cugcagccauuucccccuccugggccuccuauccuugcccaguagagacagcugcag

SEQ ID NO: 4125607 - RNA, 62 nt, Human
cugcagcuaaggaaugugguugacguuagucagaaaauacgcuccaaauuaccuggcuguag

SEQ ID NO: 4125608 - RNA, 64 nt, Human
cugcagcucaggaaggaaggccggccuugcaggagggggccuggggccagcuugggcugagcag

SEQ ID NO: 4125609 - RNA, 57 nt, Human
cugcagcuccuucuggcaugugaaauugccugauaagccagcuaacugagucugcag

SEQ ID NO: 4125610 - RNA, 80 nt, Human
cugcaggaaaccuaaauuauugucaugucuacuuguucuuaauagguccaagagaacugaaauaggacaggauuuuucag

SEQ ID NO: 4125611 - RNA, 67 nt, Human
cugcaggaaucagaggggaagcgggcgccucgaaaccuaccacuugcuccccagggaccguccucag

SEQ ID NO: 4125612 - RNA, 73 nt, Human
cugcaggaugagugaguacauuuaugaaugaaucuuccauuuaaauauugaguuccuuaucucauaccugcag

SEQ ID NO: 4125613 - RNA, 64 nt, Human
cugcaggcgagugaacagacucucaacagcacgauuaagcccugagauuuaaucauuugcucag

SEQ ID NO: 4125614 - RNA, 67 nt, Human
cugcaggcucgaagacacggaugcaucucaucacacauccaacugacaccccguuucuucccuguag

SEQ ID NO: 4125615 - RNA, 62 nt, Human
cugcagggauugcuucuguauaugcaggccuucuugcaucuauaggauuagguuuacugcag

SEQ ID NO: 4125616 - RNA, 58 nt, Human
cugcaggguuuuucaaggacaaccaagguauugauuuggcaaccaaaaacuccuguag

SEQ ID NO: 4125617 - RNA, 86 nt, Human
cugcaggucaggggggcagcuguccuggccaugggcaucuggacccugguggagaggagcagcuaccucagcauccuggccuccag

SEQ ID NO: 4125618 - RNA, 61 nt, Human
cugcaggucaucggccagugucuucuucuuggagaagccaaugauacgggugaucuugcgg

SEQ ID NO: 4125619 - RNA, 59 nt, Human
cugcagguggcagcggggcaccaggggcucauuccugguggccucaguggcuucugugg

SEQ ID NO: 4125620 - RNA, 74 nt, Human
cugcagguggcugggcugacgcugcuggcugucggggucuacucagccaagaaugcgacagccgucacuggccg

SEQ ID NO: 4125621 - RNA, 56 nt, Human
cugcagguuuguaguacugagaauaauagagcguuuucagacccuacauuccucag

SEQ ID NO: 4125622 - RNA, 68 nt, Human
cugcaguacaagaagcaucucucgggcgaugaugcgcauagacagagggauuuuuuagucaauugcag

SEQ ID NO: 4125623 - RNA, 81 nt, Human
cugcaguucccacagccacgcccccugcccauuuugauucagaaaauggugggcaguggggaaugcuggggagaugagcag

SEQ ID NO: 4125624 - RNA, 87 nt, Human
cugcauaauaugccucaucuuguacucaucccugccucagcuccaggcuucauggagguaggauagauaggaagaccugcaaugcag

SEQ ID NO: 4125625 - RNA, 71 nt, Human
cugcauaauuagcucuuugacuaaucuugcuuuugccuuaggguaagaggcaguuuaggaugcaaaagcag

SEQ ID NO: 4125626 - RNA, 61 nt, Human
cugcauccaacaugaucauaaauggccagucccagcagcuucccacauggcuggaugacag

SEQ ID NO: 4125627 - RNA, 59 nt, Human
cugcauccaggcugcaggcccagcccaugcagggcucuacaccugccagucuggagcag

SEQ ID NO: 4125628 - RNA, 80 nt, Human
cugcaugaucucagcaugaacuccagcagacagacaaagagucugcaguaaguuaauagugcugguaaacaucauugcag

SEQ ID NO: 4125629 - RNA, 94 nt, Human
cugcaugcaaaccucagguggggugugggagugaagaguaacagguguaauuaaccugcccacacuuccuucccaagucuagcuguugcagcag

SEQ ID NO: 4125630 - RNA, 82 nt, Human
cugcaugguuuuggcuuaacuuguagcaauagauaaaugaaguuauuuauccaaaguagauuaagucacaugaaaccugaag

SEQ ID NO: 4125631 - RNA, 72 nt, Human
cugcaugucucugugguuagacuauggcugugucuccugcacaggaagucaguuaaccauagacauacucag

SEQ ID NO: 4125632 - RNA, 71 nt, Human
cugcauuauucuaguccaagccaguaguaucaucacaacuucuagauuggcucagguuauucuuaaugcag

SEQ ID NO: 4125633 - RNA, 123 nt, Human
cugcauugacaguugaaauccugagcuucuuugugggcuccagaaucagagauuuaaaauuucucacauaccuuccgggaguucuagcuaagcaugagcugagaaagguuuccacuagugcag

SEQ ID NO: 4125634 - RNA, 80 nt, Human
cugcauuuaauuucagugcaagcucacggcuuugcauucacaucccagcaccgauacuuaaacauugaaauggugugcag

SEQ ID NO: 4125635 - RNA, 63 nt, Human
cugcauuugagauuauuaauuugacgggggagggcucccauuaauauuguucuucuuuagcag

SEQ ID NO: 4125636 - RNA, 102 nt, Human
cugcauuuuuugaugugggggcacuuuacugccucaucucuagugguugauguuccuccucucuaaagaaggcacagugcugcuaagauugagaaaucacag

SEQ ID NO: 4125637 - RNA, 74 nt, Human
cugccaacuuuccugagucuucagcuuuucucuuacauucaacaagauaaagaagcauuggaccaggggcccag

SEQ ID NO: 4125638 - RNA, 101 nt, Human
cugccaagcuggucaaucaaggucaugcagggauuguuggcauccaugguagagagccaugaauuucuaaucucugucaagaucaggaugccaacuggcag

SEQ ID NO: 4125639 - RNA, 84 nt, Human
cugccaaguuuucucagcaagacccccaccguguacagaauaacugucagauaaaugggugguuucugcuggaguccuuggcgg

SEQ ID NO: 4125640 - RNA, 64 nt, Human
cugccacaagcuggcccuguguggucaagggaaguucuggagaaaaagggccagcugugaguag

SEQ ID NO: 4125641 - RNA, 68 nt, Human
cugccaccccaaggggggcccucaggacaaauauuuuuucauuagagggguccugccuuggcuggaag

SEQ ID NO: 4125642 - RNA, 92 nt, Human
cugccacccucccugugugccagaagggccucuggucccaugggcaccuucccugcagaucuaggguccuucagggggcgcagcgugugcag

SEQ ID NO: 4125643 - RNA, 86 nt, Human
cugccagacacuccccugggcaggcaaugugcccaggcccuggcaugaauuccacagaauccuguccacucugggagugcugggag

SEQ ID NO: 4125644 - RNA, 71 nt, Human
cugccagagucacuugccaccuuuaccuugguauccuuauucauggaugggggcugguugacucucugcag

SEQ ID NO: 4125645 - RNA, 66 nt, Human
cugccagagucuucugacccugugacagaagauuucugugugugcuccauggggaagacucugcag

SEQ ID NO: 4125646 - RNA, 65 nt, Human
cugccaggcagcagcgaggauggugaccgagaagguggggaccacguccugguggcuguuggcag

SEQ ID NO: 4125647 - RNA, 98 nt, Human
cugccagggcacuugggaauggcaaggaaaccguuaccauuacugaguuuaguaaugguaaugguucucuugcuauacccagaaaacgugccaggaag

SEQ ID NO: 4125648 - RNA, 81 nt, Human
cugccagggccagccaggcccuacaaacguguguucuggaaagcaaggaggagucuguccuggaccuggcuggcuuugcag

SEQ ID NO: 4125649 - RNA, 55 nt, Human
cugccagggcccuacucaguuuaauuuccaaaacugauuaggcauuaccuggaag

SEQ ID NO: 4125650 - RNA, 60 nt, Human
cugccaggugcaaacucccagcagguuucacaacuguuucugcuaggaguuugcauucag

SEQ ID NO: 4125651 - RNA, 74 nt, Human
cugccaggugugagcagaaaccaugaguacuugggaaagagaggcagguaccagguagcugcugauacugggag

SEQ ID NO: 4125652 - RNA, 102 nt, Human
cugccaguugggggacuggcugaauuuugcaaggcaucuguagaaccaacccugggugaaaacagcaaagucuugaaaaguggccaguuugucacugugcag

SEQ ID NO: 4125653 - RNA, 94 nt, Human
cugcccaccacagagccagucagcaucugcacugugcugggucagaugucucuccagcgguauggcaaaugcuggcuggcccagggauggggag

SEQ ID NO: 4125654 - RNA, 66 nt, Human
cugcccagaaucacucacucgaugccuuuugggaucgaugacauuugauuuguaaugagugggcag

SEQ ID NO: 4125655 - RNA, 56 nt, Human
cugccccaccccaaccugaggucagagcugaggcguaggggccgggguaggggcag

SEQ ID NO: 4125656 - RNA, 58 nt, Human
cugcccccaggcugcauggcugggacagccgcacuccacgcaucagccauaggggcag

SEQ ID NO: 4125657 - RNA, 59 nt, Human
cuguauauaauguaugcauggguacacauauaugcacaugcauucuauuugucaugcag

SEQ ID NO: 4125658 - RNA, 93 nt, Human
cuguauaugauucccuugccaaauuaaagagcuuugauucaauguagaaacaugaaaugcaaagcucuuuaauccuugacaaggauugugcag

SEQ ID NO: 4125659 - RNA, 60 nt, Human
cuuaaaucguuauaauguuaagccuuuaucaguggagguauagaauugaaaggguuuaag

SEQ ID NO: 4125660 - RNA, 55 nt, Human
cuuaacacuccuaacuacagucucagaaacccaugagaaguuuggggguguggag

SEQ ID NO: 4125661 - RNA, 69 nt, Human
cuuaagguagucagccucuguguacacaguuuaaauuaucuguaaacaugcauggcugcuuaaauuaag

SEQ ID NO: 4125662 - RNA, 74 nt, Human
cuuaagucuaguauccuucuugacuuugaaaguaucuuccacuucugaaagucaggaaggauacuagacugaag

SEQ ID NO: 4125663 - RNA, 84 nt, Human
cuuaaucguaucugcaaagucccuuuugucauguaagguaacauauucacagguucuggggaucaaaaugcagauaccuuuggg

SEQ ID NO: 4125664 - RNA, 71 nt, Human
cuuaauucaucacuuucaauaaaguaaaugauagacauagaguuuguuaaaauauaggaagugugguuaag

SEQ ID NO: 4125665 - RNA, 79 nt, Human
cuuaauuuuaucucaccuuccaauacagccugagauaagaacuugugucugggcuuuguaaugggagguagauuauagg

SEQ ID NO: 4125666 - RNA, 80 nt, Human
cuuacaagcuuugccacauucuucacauuugcaggguuucucucccguaugaauucucuuguguauaguaagguuugaag

SEQ ID NO: 4125667 - RNA, 68 nt, Human
cuuacaagggagccugagugacaacuccggaggccagccauugagagauuaccacgcuuccugagagg

SEQ ID NO: 4125668 - RNA, 63 nt, Human
cuuacaauggaagaggcuuaagauuuauguauuugaaacauugaguucuacuuccauuucaag

SEQ ID NO: 4125669 - RNA, 77 nt, Human
cuuacaggacacuacaacgugggacuuuguuucuuccauauuuggaagauaaauuuauguguagacauuuuuguaag

SEQ ID NO: 4125670 - RNA, 119 nt, Human
cuuacaguauacuuuccaacacccauauggugagggacaucacucagccaacagauguggcuuuaugguuucagugacugucucugcacauagaggggccagggauagauaaaggugag

SEQ ID NO: 4125671 - RNA, 60 nt, Human
cuuacauacaccaccuuggaucuuucagauugcuaagaguuuuggggggugugucggaag

SEQ ID NO: 4125672 - RNA, 71 nt, Human
cuuacauuuaaucaugugucaugucaugaauuugcaaggaauguaauggaauacagugguaugaauguagg

SEQ ID NO: 4125673 - RNA, 73 nt, Human
cuuaccuaguaaauacugacuuaagaaauugcuaugcugaauucagucaauuaucucuaggucaucuagugag

SEQ ID NO: 4125674 - RNA, 129 nt, Human
cuuacuauauuuugcauuuccccagggugucaauuuuaugaaacaaagugacgggaugauuucuaucacuugagaagcuguguuaaaaaaaucugaugcacuggcaacagcaaaaauuguuaugguagg

SEQ ID NO: 4125675 - RNA, 70 nt, Human
cuuacuggagaaggaaccccaggaggagcaccugagaagccaguucaucaugauguuccccucuaguuag

SEQ ID NO: 4125676 - RNA, 125 nt, Human
cuuacuguuuuaaaaauguagugucacuuggcacaagacuuguuuuauagcuguguuuuaaaaaauacucucaauaaagaaaguguugugaggaagcugaugaauugcucuuuaggauaauugag

SEQ ID NO: 4125677 - RNA, 84 nt, Human
cuuacuuauucuaacaccugucagaugugauuauuaaguacaauauuauugcugacaugguguugacaccucugcauaagugag

SEQ ID NO: 4125678 - RNA, 66 nt, Human
cuuacuucagaccccagaaugaagccagugggcuaucuccgcuguucagcgugggugugaacagag

SEQ ID NO: 4125679 - RNA, 84 nt, Human
cuuacuuguuuguaaaauaccauuccuugucacuacucucacuacuugugacauaccauaagguaauuuugagacuucagugag

SEQ ID NO: 4125680 - RNA, 80 nt, Human
cuuacuuuuauucccguacuguuuaucuuugaggaaguuucuauuucaaguauuauuacagauguaggaauaaaggugag

SEQ ID NO: 4125681 - RNA, 72 nt, Human
cuuagaaaaacuagcuuuaguuuuggaaggaguuaguguagguuuuuccagauuggacuuaguccuuuuaag

SEQ ID NO: 4125682 - RNA, 85 nt, Human
cuuagaacaugcaggacuuuguggaugauggaaggaggcuagauuuucuuauccauguuagguaaaggcacuggaugguuuuaag

SEQ ID NO: 4125683 - RNA, 78 nt, Human
cuuagaacuggcacaaugucacuuuugcuacaugcuauuauuagccaaagcaaguuucagggacacccagauucaagg

SEQ ID NO: 4125684 - RNA, 63 nt, Human
cuuagaauuuugccuacuacaaacagcaaugaguaacccugaaaaaguggggagagugcuaag

SEQ ID NO: 4125685 - RNA, 56 nt, Human
cuuagaggcccuuaacgagauccaugcuccaugcuucucguuguauggucuugggg

SEQ ID NO: 4125686 - RNA, 76 nt, Human
cuuagaguuauggaaauguugagcuucaugguaccuuagaaauuaaugagaaucaacauuucauccauggaucagg

SEQ ID NO: 4125687 - RNA, 72 nt, Human
cuuagaucuuuaauuuucucaucugugaaaugggaaguccuaacagaaaauggagaaaauuguggauuuagg

SEQ ID NO: 4125688 - RNA, 129 nt, Human
cuuagauuaaggacagucugugcaguucucaagcggcugucugucuucacaucucgcugcucaagugagggacgugggcuguggggagaggcugaaacugucaagauggcugcaacuggaaaugggaag

SEQ ID NO: 4125689 - RNA, 127 nt, Human
cuuagcacagcauuuggccuucaguauguggucaaugaagauacacuauucuuauuuuucuuauuaggcucagagcaguaccuguuuuuucaaccaucgugcuagagacugcuaacugcucccuagg

SEQ ID NO: 4125690 - RNA, 71 nt, Human
cuuagcagcuuauucaguaagcacauacuuggcuuuuaaugaguauugcuuaaauugaugaguugaauuag

SEQ ID NO: 4125691 - RNA, 82 nt, Human
cuuagcagcuuugggggagguagucuguggcaaagcuaaaccacauucuccauagagcccugaccccaagguaacaguugag

SEQ ID NO: 4125692 - RNA, 81 nt, Human
cuuagcuugugucaggagagaucaggacagcacugggguagugaagccaucugcauguucugaaucuuuucugcagcugag

SEQ ID NO: 4125693 - RNA, 56 nt, Human
cuuaggaaaagaagacauuucuacaguauuuguaguaaugugaugcuuuuccucag

SEQ ID NO: 4125694 - RNA, 86 nt, Human
cuuaggaacucauuuaacuuuuccaagcugugauuugcuuuguuguaaaaugaaauacaguugggaggagguaauaagcaucugag

SEQ ID NO: 4125695 - RNA, 81 nt, Human
cuuaggcugcaauaugaugucugagaaauguaccagagagacucaccuggaaauaucccagagaauuaauugcagacacag

SEQ ID NO: 4125696 - RNA, 76 nt, Human
cuuaggcuuccuuuaaagacugcauaacuuccaaaagucaagggaauuguuuggcuuuuuaaaaugugagccugag

SEQ ID NO: 4125697 - RNA, 55 nt, Human
cuuaguaguaagagucauauguaggauaccuacuaugugcuucgugcuauucuag

SEQ ID NO: 4125698 - RNA, 55 nt, Human
cuuaguaguaguccugguaccagagcccagucuggcucuauaacuccuagcugag

SEQ ID NO: 4125699 - RNA, 69 nt, Human
cuuagucaagucauucuauuucucuauguuuugauuggaagcagagagaaacagaaugauuugacuaag

SEQ ID NO: 4125700 - RNA, 77 nt, Human
cuuagucuuuagaacacucuccugaaaauuaagugagaacuauuaguugacccucuaggaagugucuggaaauuaag

SEQ ID NO: 4125701 - RNA, 78 nt, Human
cuuagugucaucauuugcuugacuauggcuugcaauugauauuguuagaaguaauccagcaaauuucaagauauuaag

SEQ ID NO: 4125702 - RNA, 85 nt, Human
cuuagugucuccugccuggggacaaaggagggcauaucuaaugauccuucuacuuguuuguccugucccaugccagagcacugag

SEQ ID NO: 4125703 - RNA, 58 nt, Human
cuuaguucuugggugaacuuuuggcuuccuacuaaguuagaauuuucacagagcuagg

SEQ ID NO: 4125704 - RNA, 104 nt, Human
cuuaguuucuuccacaaacuuucauguaucucuuucaccaaauaggacaccaacuggcaaguagacgagagguaaaugaaagguugacuaaaagaaaacaugag

SEQ ID NO: 4125705 - RNA, 107 nt, Human
cuuaguuuuaaugcagaagucagauggcauagguuggaauucaguuugacccuguacugcgguuauuaauuuccuuaugccucgaguuccugaucuauaaaagugag

SEQ ID NO: 4125706 - RNA, 56 nt, Human
cuuaguuuuugcccuggaguuuagagagagaauucaaauucccuggcaaaagcaag

SEQ ID NO: 4125707 - RNA, 55 nt, Human
cuuauacauaaaauggguguaguggauugaauuuauaccaaaagauauguguaag

SEQ ID NO: 4125708 - RNA, 79 nt, Human
cuuauaguguuuuccucauucccuuccuuuuuaaacagauguuugaaaaaauugguagaggauggaagagaaaugugag

SEQ ID NO: 4125709 - RNA, 76 nt, Human
cuuauaguucugacaaaccacugcuccagcugaauauuuuaugaagcuacaguuuggcuuguuagcagucucaaag

SEQ ID NO: 4125710 - RNA, 61 nt, Human
cuuaucagcacagggacaauagcagauguaauuacagcuuucugucaccugugcuugaaag

SEQ ID NO: 4125711 - RNA, 57 nt, Human
cuuaucaucuccugcugugguuauaauuguacauuugucucuccuggagaugguaag

SEQ ID NO: 4125712 - RNA, 123 nt, Human
cuuaucauuaacuguaacuuaguuagcgugauauuuuugauccuuaaguuuuuaacaucguauaaagaauuuuccauccaaaguaacaugaggcagagcuaccugaauuucaguggugauaag

SEQ ID NO: 4125713 - RNA, 88 nt, Human
cuuauccauuucuccuuugggcauuugcuuaaugccaggcauuugugucaggcacugugcaagggucucgaaauagaaggacaauaag

SEQ ID NO: 4125714 - RNA, 85 nt, Human
cuuauuaaacuuuuccuaggcccucaaagagcauaagugaauaaagacuuauuccuagagcuugggagugugaagguuuggugag

SEQ ID NO: 4125715 - RNA, 73 nt, Human
cuuauuaccaguuacagcuuauguuugaagucacaauaaacucuucuucaaacaugaaagcuugauuuuugag

SEQ ID NO: 4125716 - RNA, 66 nt, Human
cuuauuauaaaauccuguuugacuaugggucaaauugcuuguggaaaaaauagaauuuuuaauaag

SEQ ID NO: 4125717 - RNA, 77 nt, Human
cuuauucauucaugacagggcucccugagcuaaaucaauuaguucauaauacaaagaguucugcaugcauaaauugg

SEQ ID NO: 4125718 - RNA, 83 nt, Human
cuuauuccagccuguauguuuguucugcaucacagaaaaaaguagagaugcuuacuggauggcaggauagagguuagaguaag

SEQ ID NO: 4125719 - RNA, 75 nt, Human
cuuauugaggguaaugauguuuuuaaagaacauagaacauucuuuauguuuuaaaagaaucaugccuucauuaag

SEQ ID NO: 4125720 - RNA, 86 nt, Human
cuuauuucaagucccaguauuucauucagaauuguuauugcagggaagacccuggaaacuuaugaggagauuacugaagaaauaag

SEQ ID NO: 4125721 - RNA, 99 nt, Human
cuuauuucuaugcuuaucuauauaccuauauauaucaucuuccaguuuuuccauagaaacgaauguguguauguguuuguguguaugcauuuguauaag

SEQ ID NO: 4125722 - RNA, 90 nt, Human
cuucaaaaccucacucugcugaaaucgccuuguguuugagaagcucugugggaugaggcaggaggugguguccagggugaggaggugaag

SEQ ID NO: 4125723 - RNA, 70 nt, Human
cuucaaagggccacugggcugcugaagcuaagcgccucucaucugcaucagaauuccaguuucuuugaag

SEQ ID NO: 4125724 - RNA, 65 nt, Human
cuucaaaguauaaugugaaacuggcuugcacuggauaugagagaaauucacauuuugcucugagg

SEQ ID NO: 4125725 - RNA, 58 nt, Human
cuucaagucgccaaaugcugaauuauucugcaucgaaagcgcaguaguggcacuggag

SEQ ID NO: 4125726 - RNA, 97 nt, Human
cucugccuaguuaaugaccucuuauuuaccuggauucuuacuuccuuuuuucuaagaguacaaauuuaggugaacuguuaggugaaagauuccagag

SEQ ID NO: 4125727 - RNA, 72 nt, Human
cucugccugugucacucacugcguuaugucccaugcugggauuugggcauuuagugcaggacacacacagag

SEQ ID NO: 4125728 - RNA, 115 nt, Human
cucugcuauuauaccucucuuugacuuucuggcauuucaggcaucuauaguagaaucuuauacuaucuggaaaaauccaaguguuagaaagugguuugguauaagaagccuagag

SEQ ID NO: 4125729 - RNA, 61 nt, Human
cucuuucucgccgcccgcaguccgacgcagacaggucgauagcugguuaaugcagaaggag

SEQ ID NO: 4125730 - RNA, 64 nt, Human
cucuuucugauucgcugggaccugccugggagaguugggcaauacccagugaagcauggaagag

SEQ ID NO: 4125731 - RNA, 81 nt, Human
cucuuucuuugcaucuaccuuuuugugguuuagggagggcuauuugccuuugacauggaaagggaagcaaggaacauaggg

SEQ ID NO: 4125732 - RNA, 62 nt, Human
cucuuugcuaauguugcauuuucaguaacacaauugagaauacugcauuguuaggaacagag

SEQ ID NO: 4125733 - RNA, 57 nt, Human
cucuuugcucacuucaccuuaugggcaguguccugcagguuucugugagcagagcag

SEQ ID NO: 4125734 - RNA, 62 nt, Human
cucuuuggggugccccacuggucucaagggaauccaacacagucaggaugcauccccaagag

SEQ ID NO: 4125735 - RNA, 73 nt, Human
cucuuugugacaggaauucuuaaaaugguguguaugcacaacugccuguaucacuaacaagaagucacaagag

SEQ ID NO: 4125736 - RNA, 95 nt, Human
cucuuuugaagaaacugggauaaaaggaaagccuguugugacaaagcuggcccauuuguagcauaggcauuuuccccuuuuucccggcguaugag

SEQ ID NO: 4125737 - RNA, 59 nt, Human
cucuuuuucagccuuaccaaagaccuugacucaggaagaagugagugugggaagaagag

SEQ ID NO: 4125738 - RNA, 129 nt, Human
cucuuuuucaguuauaaauaaaauugcacuguaaaacauugcagcuuaauugcaggaaacccaaugcauuuuuuguuguuguucugcaagugguuaauagcuuguuuuuuucuuuauauggaguuggag

SEQ ID NO: 4125739 - RNA, 124 nt, Human
cucuuuuucugucuucuuguuucaccagcauaguagguggcucuugccauuauuguaauuagauauggcuguugcacaucuaagccugugcacauggguccuaggcaggaagaagaaagaagag

SEQ ID NO: 4125740 - RNA, 81 nt, Human
cucuuuuuuccuuccuugcuagccugagcuacuagugccucuuucacagaacuuaggaauguaaagggaggacgcaaagag

SEQ ID NO: 4125741 - RNA, 66 nt, Human
cugaaaacagaaagaugauuugaaauggcuucaagcaagugcauucaaauuucuuccugguuuuag

SEQ ID NO: 4125742 - RNA, 95 nt, Human
cugaaaagaaaguguagucaaugaacauuuauucugagauuaagcuuugcugcugauugcuuguauaauguguucaucuuacaauucauuuccag

SEQ ID NO: 4125743 - RNA, 82 nt, Human
cugaaaauacaauagcuuuucauugcucuuaggauacaggaucaugcugugucugaugucugaaaugcucuugucucuuuag

SEQ ID NO: 4125744 - RNA, 119 nt, Human
cugaaaauguaucucaguuugccuuuauagcaucuguuucucuuugugaguuaagaaagucacacugggagagaaacgggugcuggaaggcugcucuuacaagagacuauuaaccucag

SEQ ID NO: 4125745 - RNA, 72 nt, Human
cugaaaccaaacaucuuucuauugcaaguuaacagcaccugagcuuggcaucuaagguaguuuggacacuag

SEQ ID NO: 4125746 - RNA, 56 nt, Human
cugaaacuacaguaaggagaacgugggagaaauguuccuccuaucuugaguuucag

SEQ ID NO: 4125747 - RNA, 67 nt, Human
cugaaacuauggggaggggagcagaguucaaguaccaaauugugguucacccuucucuggcuuucag

SEQ ID NO: 4125748 - RNA, 76 nt, Human
cugaaaggaaauagguucacugucuugaggagcaaaacauccuuaguuacccaagagugaacuuugagacuuucag

SEQ ID NO: 4125749 - RNA, 56 nt, Human
cugaaaggccaagcaugagguggacagagaagugaccauuacaucuggccuuuugg

SEQ ID NO: 4125750 - RNA, 67 nt, Human
cugaaaguauaaagggcccuaaggaaggcacacagaaaauauucuggggguucauuugugcauucag

SEQ ID NO: 4125751 - RNA, 65 nt, Human
cugaaauaguuucauagaacuuauguuuauaaauauuucauaagaacuagcugagaccauuuuag

SEQ ID NO: 4125752 - RNA, 85 nt, Human
cugaaaucaugcuucucagaaaugcuggcuguuaugagacaauggaguaaaugccuucaaguaucugaggaaaagugauuuucag

SEQ ID NO: 4125753 - RNA, 70 nt, Human
cugaaaucuaguuucugauaagcacauuuuaaggcacagcaaguguauuaucagaaacugugggcuuuag

SEQ ID NO: 4125754 - RNA, 61 nt, Human
cugaaaucucagcucaugcaauuccagagagaaucucuaguucaacgaguugggguugcag

SEQ ID NO: 4125755 - RNA, 89 nt, Human
cugaaaucuguguaggcuuuuggaaaagugaaacuagaugcaaagcacaaugauguaauucuggcaauuuccacugacacagaacucag

SEQ ID NO: 4125756 - RNA, 56 nt, Human
cugaaaugguugccuggagaauccgugauucaagauucucaagugcuucaauucag

SEQ ID NO: 4125757 - RNA, 97 nt, Human
cugaaauucagggaaagaaggggaggauuguccuggggucuaccagcugacucugccacaggacaaucucgucggguccuucugcuuugagucuugg

SEQ ID NO: 4125758 - RNA, 106 nt, Human
cugaacgagggaagccgugaaguguugugcagaguugaagacaggagagcugacuuuuagcugucacccugccaccaaauagcuccaugagcuucuccucuuugag

SEQ ID NO: 4125759 - RNA, 95 nt, Human
cugaacuauaguuaaauugaugugacugaagugucuagaccuguacauuuuauauagagguuucaaauucuagccacacgaugauuauaauucag

SEQ ID NO: 4125760 - RNA, 116 nt, Human
cugaacucucuuccuuuuuucaccacugcccuugaaauacgcuuggggcgggcugcgugucucccagaauccucccggggcacaagggcgaacguggaggcaggaggagccaacag

SEQ ID NO: 4125761 - RNA, 77 nt, Human
cugaacugacaaagucuuuccuuuaguuucugcuaggucagacuuggugcuaaauggaggagaguuugucaguauag

SEQ ID NO: 4125762 - RNA, 100 nt, Human
cugaagauuccugcucuccugcugagguggagauugcagugagcugagaucgcaccauugcacuccagccugggcaacaagagcaaaacucagucuccag

SEQ ID NO: 4125763 - RNA, 60 nt, Human
cugaagcacagauaguuuuguuaauaacaugacuguuauuugaaacuuucuuguuuccag

SEQ ID NO: 4125764 - RNA, 68 nt, Human
cugaagcagggagcagucuuugcaccgauccacacaacucggugucagcucuuagcauuuugugucag

SEQ ID NO: 4125765 - RNA, 64 nt, Human
cugaaggaagacuugagaagguucccuaaaacucaacuaggaaaugucaaaagccuucccuuag

SEQ ID NO: 4125766 - RNA, 57 nt, Human
cugaaggagcauagucaguuuuucuuuaagaaaacgugcacuugugcaccuacucag

SEQ ID NO: 4125767 - RNA, 87 nt, Human
cugaagggcucagaaggaucaagucauccugaucccagccaaccugagcuggcaaggaccugacauuguguuuucucagccuuaaag

SEQ ID NO: 4125768 - RNA, 60 nt, Human
cugaagggcuggaucucucugagcaucuccaguugcuccagggcugccagacccucacag

SEQ ID NO: 4125769 - RNA, 67 nt, Human
cugaagguaucuuuccuacuuugcugaucauguagcuaaagucaggcuguguaccuaacuaaaucgg

SEQ ID NO: 4125770 - RNA, 57 nt, Human
cugaaguauuuagggauggaauuacacuacggugugauguacuuuaaaauacuucag

SEQ ID NO: 4125771 - RNA, 65 nt, Human
cugaauacacucaggugggcauaagccauagaaaugcaaaguaguccagccuuggguguagccag

SEQ ID NO: 4125772 - RNA, 72 nt, Human
cugaaucaggguuuucuaccucugugauagguaacuagauugcuagaaacacagggagggaaacucuuucag

SEQ ID NO: 4125773 - RNA, 88 nt, Human
cugaaucuucaucgcaaaccuuugaguguauugucuuuccuauuuuacagcuaugaaccacaagauucaaagggguggaaagcuucgg

SEQ ID NO: 4125774 - RNA, 72 nt, Human
cugaaugaugaaggauuuuuuguguugaacuuuuagaaaauuucaaccagaguuuuucuuaauaugauuuag

SEQ ID NO: 4125775 - RNA, 78 nt, Human
cugaauggaucuugagcaagcagcucauccuguguugaggaccugggauagggcuauugcucacaaaggaaaauucag

SEQ ID NO: 4125776 - RNA, 101 nt, Human
cugaaugucacuguaaagaaacgaaaaacaggaggcgacgugugcugggcagaugggacauggcuuucuguguuuccguagguaauugcaacagcauuaag

SEQ ID NO: 4125777 - RNA, 66 nt, Human
cugaauuagaugaaaaaggcucugcuugauguaauauugcgagucuuuaaugaucauguauuucag

SEQ ID NO: 4125778 - RNA, 81 nt, Human
cugaauuuggaaugccuugguugcaagcugaaguuagauuuuaacuaguacauagucaguagcaagguauuuugagcaagg

SEQ ID NO: 4125779 - RNA, 71 nt, Human
cugaauuuuguaauugaacgucugugucugcagcaaaagcacagaacauuuuuagaugcagauaguaucag

SEQ ID NO: 4125780 - RNA, 73 nt, Human
cugacaaagguuuccgagcuuuaauuuacuagaacauauaacgggcaaaggagaggcugggaaacacagucag

SEQ ID NO: 4125781 - RNA, 75 nt, Human
cugacaacugaaguguucuggggacagcgucccaugaaacagaugaacaccucucccuagggccaggacagucag

SEQ ID NO: 4125782 - RNA, 74 nt, Human
cugacaagcucagccucugcgcucugugcugucaagugcugcccacccaucagugugcagaggcagccuguggg

SEQ ID NO: 4125783 - RNA, 85 nt, Human
cugacagauuguuaagcuacgugaggcuaccagagugggcagaggacaguccccugucccaggccucauguugccacaucagcag

SEQ ID NO: 4125784 - RNA, 56 nt, Human
cugcccuuguccugcagguggcugggagcccgagccccacaccugccgggcagcag

SEQ ID NO: 4125785 - RNA, 90 nt, Human
cugcccuugugcugcucacauguguguuagcacauguaacagacauauacaugaauaaggcaugaugugcaguggcaaaugaggggguag

SEQ ID NO: 4125786 - RNA, 76 nt, Human
cugccggaaguuuaccagcucacuuucggcgucgcgcccgccuccguggagcaggccggaaguggcuuuccggcag

SEQ ID NO: 4125787 - RNA, 71 nt, Human
cugccgucaccucuucccccuguccacagagccgggagccaggcucuccauagaggcaggagggacugcag

SEQ ID NO: 4125788 - RNA, 77 nt, Human
cugccuagcauucagaacugagagcaacacauuucuguuguuuacaaguuacucagucugaggcauuguuacagcag

SEQ ID NO: 4125789 - RNA, 56 nt, Human
cugccucaccacagcuguuucucuucgagaaaucuuggagucugugguagaggcag

SEQ ID NO: 4125790 - RNA, 71 nt, Human
cugccuccugucuucuggaguugugaccucaggguggcccagguggaucggcuucagaggccaggaggcag

SEQ ID NO: 4125791 - RNA, 77 nt, Human
cugccucggagagcugucacucagaccaugcagacuucaguggagaaccugcaggacuucaggacucugagaggcag

SEQ ID NO: 4125792 - RNA, 67 nt, Human
cugccugccaggccuggggugcugucagggugggccccccaggagagccccccaggugagguagcag

SEQ ID NO: 4125793 - RNA, 77 nt, Human
cugccugccucuggagcccauccucuuaacuguugugcuaaucaguuucugggugcuccuggggcaguucuuugcgg

SEQ ID NO: 4125794 - RNA, 60 nt, Human
cugccugcgcucgcucucgcagggcugggaagccuuggcaggguggaggaugcagggaag

SEQ ID NO: 4125795 - RNA, 57 nt, Human
cugccugcguugccucgugccuggaauccuagcacauugggaggccaaggcaggcgg

SEQ ID NO: 4125796 - RNA, 56 nt, Human
cugccugcuuuucugggagccgggcacacaguaggcgcucaccacgcagcaggcgg

SEQ ID NO: 4125797 - RNA, 65 nt, Human
cugccuggaagguucucuuccagaaccugcagagagcuacugcuagaggauaggaccuuaggcag

SEQ ID NO: 4125798 - RNA, 60 nt, Human
cugccuggaaugccagcuucucccagugugcaaauuacuagcucaaucauuccuggguag

SEQ ID NO: 4125799 - RNA, 59 nt, Human
cugccugugucuggguggccagaguauaaaauauuccagucacaaaacauauuaagcag

SEQ ID NO: 4125800 - RNA, 74 nt, Human
cugccuuacuccauuuguuuuagcuacauagacauaacucugauaccgcuagaagcagaugucugaguaggcag

SEQ ID NO: 4125801 - RNA, 63 nt, Human
cugccuuccuggucacugcuguucccugaguccucagcaguagccugaccguggaacugguag

SEQ ID NO: 4125802 - RNA, 62 nt, Human
cugccuucucauacaggaucucuuauuauugucauaauagucuugugagugaggaagggcag

SEQ ID NO: 4125803 - RNA, 65 nt, Human
cugccuugcccuggccccucacuccgaggccagcgccaugcugcgccuggggcugugcgcggcgg

SEQ ID NO: 4125804 - RNA, 56 nt, Human
cuguggcucugcagucccaacaguugcagcuguucuaggacaccgcaggggcauag

SEQ ID NO: 4125805 - RNA, 68 nt, Human
cuguggcugaggcuggagugcaguggcacaaucuuggucaacugcaaccuccaccucccagguuccag

SEQ ID NO: 4125806 - RNA, 84 nt, Human
cuguggcugcagggcagggguaggggagcacaguccaugcugccagcagcagcucccacugcagcccugagcccucgcccccag

SEQ ID NO: 4125807 - RNA, 67 nt, Human
cuguggcugcuggagagaacuagcccaguuauuggaaaagcguucucuguagcacacaaaggcccag

SEQ ID NO: 4125808 - RNA, 57 nt, Human
cuguggcuggccuuauugcugcuuccagccacgaggcaugauaaggugugcccacgg

SEQ ID NO: 4125809 - RNA, 56 nt, Human
cugugggagaggcacuugcuacuuccgggguuggacuccagcaacuucucccacag

SEQ ID NO: 4125810 - RNA, 63 nt, Human
cugugggagaggugccuggauuuagaggagcgaccacucuucauuuguagguacucucccuag

SEQ ID NO: 4125811 - RNA, 116 nt, Human
cugugggaucuaacuggccaguggugguggcugcaguguccggugcauuucaccaggagcauccugcgagcccugggagcugccuggcugacggcauucccacagcgagccuacag

SEQ ID NO: 4125812 - RNA, 81 nt, Human
cugugggguaguuacuauaaugagucccuguuuuauaaaugaagaaacgaggcucagagagggugacuugccccaugucag

SEQ ID NO: 4125813 - RNA, 72 nt, Human
cuguggggucugcauucacucugcaaauacugagugccugcucucugcagagugcugucguacgccccagag

SEQ ID NO: 4125814 - RNA, 90 nt, Human
cuguggguagauacccaguggugagauugcuggaucaaaugguaguucuacuuuuaguucauuaaggaaucuccccacuuuuuuccauag

SEQ ID NO: 4125815 - RNA, 73 nt, Human
cuguggguuaaaaugauaccuugcaagguuaauuaaauuuacugguuuaaaaugcggguaucugacuccacag

SEQ ID NO: 4125816 - RNA, 92 nt, Human
cugugguaaacaagacuaaugcuaacaucauaucacuguguguuacauaguauaugauguauaguguaugccagugguguuuauaaacauag

SEQ ID NO: 4125817 - RNA, 57 nt, Human
cuguggucaucucagaguggcccaaauaguuccuaagaaggcaggggugaaccacag

SEQ ID NO: 4125818 - RNA, 101 nt, Human
cugugguccccuuggcugaauagcacaggcgaccccuaggagcaacaggccaaggugugugagccugcuggucggcgauagugcuucagcgggggccaggg

SEQ ID NO: 4125819 - RNA, 85 nt, Human
cugugguugauaagcaucccaugacucuggaggaagcugcauuaagcuucuucccaggcuuagaauuguguuggauguaccauag

SEQ ID NO: 4125820 - RNA, 65 nt, Human
cuguguaaaugccccauucauugauaagucauaguugugcuucuuggauguaggcauguacacag

SEQ ID NO: 4125821 - RNA, 86 nt, Human
cuguguaauccuauuccuuugacuuagugggacucugaauaugaugauuagaucauuuuguauagcaaagguggagggauucacag

SEQ ID NO: 4125822 - RNA, 74 nt, Human
cuguguaaucgugguuauguggcccugugucugcuuuuguaugacaugaaccuaccauaaugauuugcccauag

SEQ ID NO: 4125823 - RNA, 115 nt, Human
cugugucaggcuccuagguaauugacguguauuaauucauguucucuucauaauaaacugaggagguaugugcuauuguuauauuauuuuuacccaugaggaagcugaggcauag

SEQ ID NO: 4125824 - RNA, 71 nt, Human
cugugucaucuguguuacauaauucuuaaagaaugcacacugcuuuaauugugcagcacagaucaugacag

SEQ ID NO: 4125825 - RNA, 78 nt, Human
cuguguccagcagccugggagcaguuaugagcugggccacagccucagcagcucuggaacucccggcugcugucauag

SEQ ID NO: 4125826 - RNA, 56 nt, Human
cuguguccuccccaucacuucuucccuaauuguaggagagagucagggaggcaggg

SEQ ID NO: 4125827 - RNA, 61 nt, Human
cuguguccugucuccuaagguggauuuuuuuucagcuccagagaaggcgagaggaacauag

SEQ ID NO: 4125828 - RNA, 98 nt, Human
cugugucucccgcccaggcuaauaacugcagcugacaucuggcugggccccgcgggggcgcagcgggcagcguugggggguugggcagggcagggcag

SEQ ID NO: 4125829 - RNA, 61 nt, Human
cugugucuccucaacucaugcucgaggucagaaauggucucgguacuugagagagacacag

SEQ ID NO: 4125830 - RNA, 78 nt, Human
cugugucucgaggagcuguuuugaagugcucggucaauuccaugugagcagcucccaguggcagcuccuuguccucag

SEQ ID NO: 4125831 - RNA, 57 nt, Human
cugugucuuccuccccaguucuguacugacucaggcagaacugggcagggagcagag

SEQ ID NO: 4125832 - RNA, 120 nt, Human
cugugucuucucucuacucuucauuuccugccuuuaaggggaccuggaaacaaacaugaauggcacagaaccuuggugguagggacacaguggagagugaguguuggggauaagacagag

SEQ ID NO: 4125833 - RNA, 72 nt, Human
cugugucuucucuugauaguucccaaacaguagaggcucagccuuugggauggggcuaacgagagagcagag

SEQ ID NO: 4125834 - RNA, 117 nt, Human
cugugucuuuuaauuggagcauuuagcccauuuacauuuaagguuaauauuguuaugugugaauuugauccugucauuaugauguuagcugguuauuuugcuuguuaguuuacgcag

SEQ ID NO: 4125835 - RNA, 61 nt, Human
cugugugccagguggguguaugaaugcaaagaaagucucugccuuguaacccgccuuacag

SEQ ID NO: 4125836 - RNA, 75 nt, Human
cugugugcugggagucaggagcaggcugggcuggcagaggacuggaagcagagcuugguuugauagagcagacag

SEQ ID NO: 4125837 - RNA, 77 nt, Human
cugugugcugugcuaggggcacuaaaagcugaaccucccagucuuagcaaaggccccuacacccaagcuugacacag

SEQ ID NO: 4125838 - RNA, 84 nt, Human
cuguguguccacacuagauuuauuuccaugcuaagguacaaauacaaccuucaaggagauuggagucuacugugggaaaaacag

SEQ ID NO: 4125839 - RNA, 114 nt, Human
cuguguguuacucucugcugugguucugccuuuagcgcugugacugguacguaauuaacaaccagcugcugauugcuaaaugcaugaauggucaccuguaccuguggcagacag

SEQ ID NO: 4125840 - RNA, 67 nt, Human
cuguguuauuggcaggaauuagauaagcuugugaauuuagggaucugcuucgcgccaauuucaucag

SEQ ID NO: 4125841 - RNA, 79 nt, Human
cuguguucaugccccagugcaggagcucagaaacauguucugucccuucuuccuguucuugggcugugaacagacacag

SEQ ID NO: 4125842 - RNA, 67 nt, Human
cuguguugggcucugcguccuggaacaucaguucccuguccucaggaacacaggggcccaugcacgg

SEQ ID NO: 4125843 - RNA, 58 nt, Human
cuguguugugaaaaauaaacagagcugucgaauaagcucugcucuguuucauagacag

SEQ ID NO: 4125844 - RNA, 76 nt, Human
cuguguuuaauaucaaaguauucuugacuguuuuucaccccuucuugagggacaaucugaacuuguauggacauag

SEQ ID NO: 4125845 - RNA, 59 nt, Human
cuguguuugcucuugcuggaaaaguugcccugagaccaggacaauucaagagccuacag

SEQ ID NO: 4125846 - RNA, 56 nt, Human
cuguguuuugccugcgaugaaggcggggcagguguucaggcagugcaaauacaugg

SEQ ID NO: 4125847 - RNA, 59 nt, Human
cuguuaaagauaguuaagcuucucaccuauaaaauggugagagcuaucuacacugacag

SEQ ID NO: 4125848 - RNA, 62 nt, Human
cuguuaagcaacaugaguaaguacaaauuccaaagaacuaacuugcugaugcuguuucgcag

SEQ ID NO: 4125849 - RNA, 55 nt, Human
cuguuaagugaaugucaugucaggcaagcuucugcagccuucauucaucuggcag

SEQ ID NO: 4125850 - RNA, 61 nt, Human
cuguuacugcuggagccauugagugagugcauuuuuucucagucuucccugucaguaauag

SEQ ID NO: 4125851 - RNA, 64 nt, Human
cugcugucaaaggaaauauuugggugacucagccaagaaagcaguuuauugguuuuggcagcag

SEQ ID NO: 4125852 - RNA, 69 nt, Human
cugcuguccagagucuccuguuguuguucuucagaucaccagacuggacccuuuggauacugacagcag

SEQ ID NO: 4125853 - RNA, 61 nt, Human
cugcugugcuauacagauuguacugcacaauucagcuaacagccauucauauagacagcag

SEQ ID NO: 4125854 - RNA, 70 nt, Human
cugcuguucugaagcaacaagcagggguagcugaaggugaccucgaaccguguguugcuugagaucacag

SEQ ID NO: 4125855 - RNA, 130 nt, Human
cugcuuaguacucccccacucccaggcuugauuuauuacccacuauauuguuccaagcacagaccuuuuuaucacugucacauaugugggccuggugaugagauaugcuugguaguggcuggaggggcag

SEQ ID NO: 4125856 - RNA, 61 nt, Human
cugcuuauggagaugaguaagagcaggugaaauguuucuauuucuauucauacaugagcag

SEQ ID NO: 4125857 - RNA, 56 nt, Human
cugcuuccauggucuggagacuggaauauguggguucugcagacaccugggggggg

SEQ ID NO: 4125858 - RNA, 78 nt, Human
cugcuugacauucuggaaaggguccucauucugucuuguucagggauaacgaacaccuuuucccagcaggugaagcag

SEQ ID NO: 4125859 - RNA, 76 nt, Human
cugcuugauacaacugaauagaacuuuacaagaauguuugcugcacacacauucuuugaguuuuguuaaagagcag

SEQ ID NO: 4125860 - RNA, 57 nt, Human
cugcuugccucucccucccuccaucccaucugccugggggaggcgagggcugagcag

SEQ ID NO: 4125861 - RNA, 61 nt, Human
cugcuugcuugccaugggcuugggcacuacaacuugggcccaaggucccauggcagcacag

SEQ ID NO: 4125862 - RNA, 104 nt, Human
cugcuuggacugaaacauccaacauagcuuuacucaaaugaccuggaccuuuucuaggguagcgggaaugguugugguugguugugccuuucuguaccaaguag

SEQ ID NO: 4125863 - RNA, 71 nt, Human
cugcuugggaaagcugcagaaauucucaggacuuggaggcuugaaaugcucagggguuuuccagaaagcag

SEQ ID NO: 4125864 - RNA, 88 nt, Human
cugcuugggcagcugcagggcgggcgcgccgcgucucuggaaggccccguccacgaagacgccguucuugccgaggcagcgcagguag

SEQ ID NO: 4125865 - RNA, 74 nt, Human
cugcuugguaaauaaugagacagcuuauuuaauuguucuuauuuagaccagcucaucuuauuaauuacaagugg

SEQ ID NO: 4125866 - RNA, 69 nt, Human
cugcuuuagauuuuacuaaguggauaucugucuaguaagagagaagcaacacuugguaagacuaaaugg

SEQ ID NO: 4125867 - RNA, 82 nt, Human
cugcuuucugccaugucugaggagcagcuggcccgcuacgaagugugucgccggucagcuuucccaaaagcacgcauugcag

SEQ ID NO: 4125868 - RNA, 78 nt, Human
cugcuuugcgugugacuuuucuaguuucagcacugaaaguccugcauccuugaagccccuaagucccaggcaaaccag

SEQ ID NO: 4125869 - RNA, 70 nt, Human
cuggaaaacaaagcuuuucaguauguucaugaacauuauuuagaagaugcugauuggcuuuugaaagcag

SEQ ID NO: 4125870 - RNA, 109 nt, Human
cuggaaaaucccugagauaucagcuucaggcgaggcuuaauccaaggcugagagucugcauuucucuauuucuuggguuugccuugcugcugcaggccuuuuuuuccag

SEQ ID NO: 4125871 - RNA, 74 nt, Human
cuggaaacugaguguaggacuuugaguuuggucuugcuaaaccacaagucuuuagauucaguucaguguuccag

SEQ ID NO: 4125872 - RNA, 61 nt, Human
cuggaaacuggugcuucugugugcagcugcuggaaacagcaccugggcuggaagaccccag

SEQ ID NO: 4125873 - RNA, 57 nt, Human
cuggaaagcagaggcuguagugagcugagauggcaccacugcacuccagccuuccag

SEQ ID NO: 4125874 - RNA, 71 nt, Human
cuggaacccagagggguuaagugcuaguccgggcagagcccauggccagauucuuucuucucaggauccag

SEQ ID NO: 4125875 - RNA, 68 nt, Human
cuggaaccugucuggucagggaagacccauuucaggccaugaggucaacacugugaccaacaggccag

SEQ ID NO: 4125876 - RNA, 88 nt, Human
cuggaagcacugccacuggaaccuggaggccaccaaccagacuggauucuauugccgccuccuggauuuuagugccauuuguuucugg

SEQ ID NO: 4125877 - RNA, 89 nt, Human
cuggaagcugguuagaaaugcagagucucaggccacaccccagcccucagggugggucccaggaaucuguguucuaacaagugguccag

SEQ ID NO: 4125878 - RNA, 121 nt, Human
caggccuugcuggauagacggugcaggaagagaacauggaggcugagggcccaugagacaaaccucaccugauuuacaacuuugucuuugacaccgucuauagaauccagcacuuggucug

SEQ ID NO: 4125879 - RNA, 85 nt, Human
caggccuuuuuaccuuuuucuucaccuuuauuccuuaucaagaagaaugcaaaauaaaucgguugguucaagguaauaagguuug

SEQ ID NO: 4125880 - RNA, 88 nt, Human
caggcgcacgcucacccuggggaucagccccgccuccugcuucagcagcuggcucagccggguggucuucuuggagagggugugugug

SEQ ID NO: 4125881 - RNA, 80 nt, Human
caggcggucgcaggggcugagcaccagcggguacaagcgggacucagauccagccccuugggcuucagcccuaccgccug

SEQ ID NO: 4125882 - RNA, 63 nt, Human
caggcuacaaauaagcauguaauacugaaaauacauucuaauuacauggcuguuuguccccug

SEQ ID NO: 4125883 - RNA, 65 nt, Human
caggcuauccccacgauauagccaaagcacccuggcuugcuuugaaagugucuggggaguuuuug

SEQ ID NO: 4125884 - RNA, 75 nt, Human
caggcuccaagcccucugauguacgccagcuuccuugguguaaaggaccucaucagggguaucugcuuggcccug

SEQ ID NO: 4125885 - RNA, 78 nt, Human
caggcucccccaauguacuccucaaucugaucgguggccaaaacaacagacacuugugaggaguguggauggagcuug

SEQ ID NO: 4125886 - RNA, 89 nt, Human
caggcucccuggucugaauguuuauauuggccaaaagggauguucagaguucuuauuguccaauaggauguuccugcagauggugccug

SEQ ID NO: 4125887 - RNA, 70 nt, Human
caggcugaaaucuaugcuugagacagauggggaagagccuggcccugcuguguagcggaggaacagccug

SEQ ID NO: 4125888 - RNA, 61 nt, Human
caggcugacugggguucauugguguccacugggggcagcucccgugccuucagcaguccug

SEQ ID NO: 4125889 - RNA, 65 nt, Human
caggcugcccagggccugcaugcgggugugggguacauccucggggaaaggcacuggacagccug

SEQ ID NO: 4125890 - RNA, 59 nt, Human
caggcuggauuucuaauaccccuacaagcaucuugaacggguguggaaauuacauccug

SEQ ID NO: 4125891 - RNA, 90 nt, Human
caggcuggggacuuggaggcuagaagugaguccuguuuccuccaugaaagccacagcacuuuacuucucagugacucaguuucccacuug

SEQ ID NO: 4125892 - RNA, 81 nt, Human
caggcugugacccucuugagggaagcacuuucuguugucugaaagaagagaaagugcuuccuuuuagaggcuuacugucug

SEQ ID NO: 4125893 - RNA, 59 nt, Human
caggcuuagagggacgaauaagcccuggccagaggccuggccaguccucuuugggccug

SEQ ID NO: 4125894 - RNA, 56 nt, Human
caggcuugaccaguuucuagacuuccuuagaugucaguguagcaggugcaagccug

SEQ ID NO: 4125895 - RNA, 65 nt, Human
cagggaaauaaguccagccccugacucccaggccaugggccaggcugcaggagcuggaugccuug

SEQ ID NO: 4125896 - RNA, 55 nt, Human
cagggaagaauaguuagcaaagccuccaauuagaguuuuguuuauacuuccacug

SEQ ID NO: 4125897 - RNA, 80 nt, Human
cagggaaggcaaguuagggcugccuauggcuagauagaacuauuccuuucucguuuaguucagcuccuugaagaaaccug

SEQ ID NO: 4125898 - RNA, 58 nt, Human
cagggaaggcugcaaauguuaaauugauuauuccuuugacaguaggugguuuucauug

SEQ ID NO: 4125899 - RNA, 76 nt, Human
cagggaauauugauggagguguuagacagauaauucuacaaacuaacaugucucauccuaaacaauaaaaucccug

SEQ ID NO: 4125900 - RNA, 61 nt, Human
cagggaauccauggucauaagguacuuuuuaucauguggaacacuuaacuuggguuuccug

SEQ ID NO: 4125901 - RNA, 99 nt, Human
cagggaaugggcaucggggcuggaagaggacacacgaaucaccuuucugauuucugccuuugcuuuuuccugagccuugguugcugcugcccagcccug

SEQ ID NO: 4125902 - RNA, 69 nt, Human
cagggacucacagcccguucucuggcacacacagccccagcacauguggcccgacguggcuggccccug

SEQ ID NO: 4125903 - RNA, 55 nt, Human
cagggacuuagguauauuaugggauagaauauuaugauuuaugcccaagucccug

SEQ ID NO: 4125904 - RNA, 82 nt, Human
cagggagcacauucagggaagagagggaggaggcaggaugucccucugccuucgcugcucccugaaacacagugcuguccug

SEQ ID NO: 4125905 - RNA, 70 nt, Human
cagggagcgguagccacugccugcauuccuuacucaggaggcaggcauggggucugccauugcuuaccug

SEQ ID NO: 4125906 - RNA, 79 nt, Human
cagggaggaaggggucuugggaguccuggcugaggaugugcucccaucagccaggacucacaacaccacuaucuaacug

SEQ ID NO: 4125907 - RNA, 65 nt, Human
cagggaggcggcugagagggcgcgccccgaguccacaggggaccagugcccugcccgcagccuug

SEQ ID NO: 4125908 - RNA, 60 nt, Human
cagggaggggaagagcugagggcagaggaaagggagcccccugaggaugucuccuuccug

SEQ ID NO: 4125909 - RNA, 68 nt, Human
cagggagugcacccucacucugcaggugagucagaaucaggcaccacagagccaggguugcaccccug

SEQ ID NO: 4125910 - RNA, 60 nt, Human
cagggagugggaggagagagcacugaaaagagugucucuuuggccucccauaugucccug

SEQ ID NO: 4125911 - RNA, 90 nt, Human
cagggaguugcuguuaauuugaagugcaaugaggauucugaauguuuagagauucaccacaucuuuaugaaguaaccuggcaacuucgug

SEQ ID NO: 4125912 - RNA, 64 nt, Human
cagggauacauagauagauaaucuggcaaaauuguggauuuaaucuuuccauguugauacccug

SEQ ID NO: 4125913 - RNA, 130 nt, Human
cagggaucuuuuaauuuugagauuaugauucaguagauguagguauaccugagagucugcauuuuuaacaagcucacagaugaugucuauguggcugaucuguagagaucaagauguagguaucucccag

SEQ ID NO: 4125914 - RNA, 76 nt, Human
cagggaugcgaggcacaaucagcaccccacacaugaauccaagacugaaugagggcugcugcugugagcgucccug

SEQ ID NO: 4125915 - RNA, 85 nt, Human
cagggauuggggcuugcccugugaugugcuguugaccaaguuagagggguauaggcaagcagcaaaguauugggcaagaucacug

SEQ ID NO: 4125916 - RNA, 80 nt, Human
cagggauuuuggaaucugggaaaacaguguguuaaauuuaugaugugcauuuuuucuccacuuuucagcauuauucuuug

SEQ ID NO: 4125917 - RNA, 58 nt, Human
cagggauuuugugcuguaaugcccauccacugcauguacaggcagcacccaguccuug

SEQ ID NO: 4125918 - RNA, 70 nt, Human
cagggcaacaugauguaauggaaagaacagauaauuaauauuuggguucuugauugcauuuguuccuuug

SEQ ID NO: 4125919 - RNA, 59 nt, Human
cagggcacugaaugccaagcuaggaggcuugggugggauucucuuggcauuagugacug

SEQ ID NO: 4125920 - RNA, 125 nt, Human
cagggcagaaguacagguucuguuuguacacucgccauuguccaagagcucauuauccggagugugugugcuugaggaguggcgcuggacuuagaguggacagaugcaugugacuugaagcccug

SEQ ID NO: 4125921 - RNA, 72 nt, Human
cagggcaggacagauacauuaccucccaguagagcugauaacugggaguagagugccuucugcccuguccug

SEQ ID NO: 4125922 - RNA, 64 nt, Human
cagggcagugaagaacacacgugaccauggccaucagcuggauaacgacugucaucgugcccug

SEQ ID NO: 4125923 - RNA, 68 nt, Human
cagggcauaagaugaggcuguagauguagguugaccauauagaguauuuuagcacauauuaugcuuug

SEQ ID NO: 4125924 - RNA, 72 nt, Human
cagggccaaguuggugccuuuuucuuccccuguucagggaggaauggcccugagugcccagccuggccccug

SEQ ID NO: 4125925 - RNA, 68 nt, Human
cagggcccagcccucugcucacugucccaccagcuacauccccggagaccgugcugggcugggcucug

SEQ ID NO: 4125926 - RNA, 61 nt, Human
cagggccugcauuguugaccaccaauuccuuggagagggaggcagcuccugcagugcccug

SEQ ID NO: 4125927 - RNA, 62 nt, Human
cagggcgacagccuguggaggcaucaaggagaugcuccuggcauugugcagggugugcccug

SEQ ID NO: 4125928 - RNA, 59 nt, Human
cagggcucugccuugagggauggccauuccaguagggccauauucuuggaggagcuuug

SEQ ID NO: 4125929 - RNA, 72 nt, Human
cagggcugguggggcagagaauaaaaaccuaacuccuuuuugucaguuuuucuauacuuuguaguugcccug

SEQ ID NO: 4125930 - RNA, 90 nt, Human
cagugagcgguccaaauggauuggggggcaugaauggcaccugacuuacagcaggagcucagcacuuuuacucucuuugccgcuucacug

SEQ ID NO: 4125931 - RNA, 55 nt, Human
cagugagugggauagcugggauucgaaccugggucucugaacuuccacugcgcug

SEQ ID NO: 4125932 - RNA, 61 nt, Human
cagugauaggacagcuagaacugaguuccgaguguuuugaagaguaucuguccuauaacug

SEQ ID NO: 4125933 - RNA, 79 nt, Human
cagugauaguuagucugguaucagugaauuugcaaguugauauucaaaucaaagugaaaagugcugaugacugucacug

SEQ ID NO: 4125934 - RNA, 64 nt, Human
cagugauauuuauccuacucacacguccauccauaggcugucugugagaagaaaaauauggcug

SEQ ID NO: 4125935 - RNA, 58 nt, Human
cagugauucagacucaucauuucugacuugaucuggaauccucaaguuuggaucacug

SEQ ID NO: 4125936 - RNA, 62 nt, Human
cagugauucaggugccuguuggaaaaacauucuguguauaauuugguauaucugaaccacug

SEQ ID NO: 4125937 - RNA, 87 nt, Human
cagugcaaaaugagacuggagaugcaaacaaggaccaaauaaugaaagaccuugcaugacaugcuaagauuauguuauuuugugcug

SEQ ID NO: 4125938 - RNA, 64 nt, Human
cagugcaauuacaagcuaauucagugcucuuuguguuggacuaauagcuucugauuugcugcug

SEQ ID NO: 4125939 - RNA, 60 nt, Human
cagugcaauuuugcuuucccaaugacagcacccuggaagcauuggggguagauugcuuug

SEQ ID NO: 4125940 - RNA, 74 nt, Human
cagugcagacccacagggcagugcugcccacucccaggacucgggagcauggcugccucccugugccaacacug

SEQ ID NO: 4125941 - RNA, 81 nt, Human
cagugcagugaagacaauggagcacagcaguuugccuuucuagugcacagcugcccuacuccaugugacuucgacgcacug

SEQ ID NO: 4125942 - RNA, 106 nt, Human
cagugcauauuuccuauuugaaaagcccaaaucuguagcaucuuaaauguagucugcaucagacuuccuuuaaguggcacuuggauuucagagaggguuugcauug

SEQ ID NO: 4125943 - RNA, 125 nt, Human
cagugcauuuuauucugucaugaaguagguaaguucucugacuuggcgcucuugucuucaagcauugguuuguuccuugcaagcaggaagcucagguccuugaaucuugucuucagcagucacug

SEQ ID NO: 4125944 - RNA, 96 nt, Human
cagugcucaacacuggucuugacaguuuaagcaccuaauauuugcuaaauaaauaaccaaaaguaguaaacuugaacugaugaguguuagagcuug

SEQ ID NO: 4125945 - RNA, 92 nt, Human
cagugcuuggagaauagcugggaggcacauucaucacauuaugauguuacugacuuaaaaugcugcccauucccagcaguuuuccauaucug

SEQ ID NO: 4125946 - RNA, 89 nt, Human
caguggaauagcaucaacauuuauauggguucaugaagcuaugcugugcuuuuuacuuucguuguauaaauaguugcccuaguucacug

SEQ ID NO: 4125947 - RNA, 64 nt, Human
caguggccagaagacugcaaugcucugauuggccagcccugagucuuguggucuucugucccug

SEQ ID NO: 4125948 - RNA, 67 nt, Human
caguggccagucccgaugcuuguucaguauguguuagcugagcugcauuuguggaguggcugagcug

SEQ ID NO: 4125949 - RNA, 79 nt, Human
caguggcccuccccacccuggcucucuggccaccgcaggugccuccugggagcagagcagggguggagaaggcagccug

SEQ ID NO: 4125950 - RNA, 87 nt, Human
caguggcuggaccacugugcuccccagcaggcuccggggcucccuuuauuucaaguccugcuuugggcagcuuuguggcccucacug

SEQ ID NO: 4125951 - RNA, 68 nt, Human
caguggcuucucagaauacucuggacagugcuaauuuccugauuuccacagugacugauaggccacug

SEQ ID NO: 4125952 - RNA, 66 nt, Human
caguggcuuuaguguucaacccagauaacuuaccaacaagucauuuucccacugaagcugucacug

SEQ ID NO: 4125953 - RNA, 57 nt, Human
caguggggucuguuuuuguuuccaagcaggugauggcuggaagaggagaugccucug

SEQ ID NO: 4125954 - RNA, 59 nt, Human
caguggucagcuguccacuguggacagagccccugguacacaguggaaauugaugucug

SEQ ID NO: 4125955 - RNA, 61 nt, Human
caguggugccauuuccuaauugaggcaccuggcccaauuaggaauaaaugaguacuugcug

SEQ ID NO: 4125956 - RNA, 60 nt, Human
cagugguggaagagauagugaugugagcucauauguaauuacucagucucccauacauug

SEQ ID NO: 4125957 - RNA, 88 nt, Human
cagugguguucuugucaguguuaaucagugguaccugaagagagguuuucuggguuucuguuucuuuaaugaggacgaaacacaccug

SEQ ID NO: 4125958 - RNA, 58 nt, Human
caguguacuuggaauguaacagcugcucaaaauguguguguugaaucugagucuacug

SEQ ID NO: 4125959 - RNA, 62 nt, Human
caguguagaauacaaucuaggugaagcugucauccauggcuucacugacugguucuaggcug

SEQ ID NO: 4125960 - RNA, 88 nt, Human
cagugucagaggaugucuuuugagcccuguaccacuuuucaccuuggagaauacaucucauguaagagauaacauuaucugauaacug

SEQ ID NO: 4125961 - RNA, 59 nt, Human
cagugucucccccagguucugugaguuaagacaacaaagcagccggcuggguggugcug

SEQ ID NO: 4125962 - RNA, 65 nt, Human
cagugugaauaguucuauggcugcagggcuccagcguggcucuuccaaauggcuguucuucacug

SEQ ID NO: 4125963 - RNA, 56 nt, Human
cagugugagcuaauagcagagccagguguagaagcugggccucuuugcucauucug

SEQ ID NO: 4125964 - RNA, 94 nt, Human
cagugugauuuguuuuuauuguucauguaugaauaaauauuaaaauguaaucaucuguuuaugccgagcaugagcugaaaugccugugacauug

SEQ ID NO: 4125965 - RNA, 98 nt, Human
caguguguugucauugauuaauuuauuuaagaaucuccaucugauucacucucagaggagcaccauggagaauucauuauuugaugaugaacguguug

SEQ ID NO: 4125966 - RNA, 70 nt, Human
caguguuagcagggguagauagaguguguuagaauagcaauggcuucucugugagcuccugcaaauguug

SEQ ID NO: 4125967 - RNA, 64 nt, Human
caguguugucugauauuuuagcaguagggacauuuucauagcaguuggagguacagagacacug

SEQ ID NO: 4125968 - RNA, 55 nt, Human
caguguuuagcacagugcuuggcacauaguaagcccuaguaaauguuaaauauug

SEQ ID NO: 4125969 - RNA, 78 nt, Human
caguguuuucaacaacuugguucaaauggguuuccccuaagauccacccacccauuuggccauucaguuguuccacug

SEQ ID NO: 4125970 - RNA, 89 nt, Human
caguguuuuuucaacaucuuagaauuucaguguuuccagguuugugaaaugccccugggugaaugauauucuaaaugccaaggacacug

SEQ ID NO: 4125971 - RNA, 58 nt, Human
caguuaaacagauugaguguuacagggcccagaaccuauaaaugcaucuguucaacug

SEQ ID NO: 4125972 - RNA, 60 nt, Human
caguuaacugagcucugugagagucccagggcugaauugucgccagugguuuaguuucug

SEQ ID NO: 4125973 - RNA, 69 nt, Human
caguuacauggggguuaggauguugaacuauaaucauaaguaaaacaguuuccugacuccuaugaguug

SEQ ID NO: 4125974 - RNA, 62 nt, Human
caguuaccagaucgcaggagguggggccagcacgucccccuccagccaagccuugguagcug

SEQ ID NO: 4125975 - RNA, 111 nt, Human
caguuaccugggggagcuuaucaaaaaacagauucugguuucucacuugcaaaagauggggcggggcgcgagacacaggauucugcauuucugauaagucccaagcugcug

SEQ ID NO: 4125976 - RNA, 63 nt, Human
caguuacuuggggguguuuuccuugguauugucuaaaugggccaaguaaacauucucagauug

SEQ ID NO: 4125977 - RNA, 55 nt, Human
caguuagaggagguggguuaagagagauuuucuaucuuaccucccuucuuuccug

SEQ ID NO: 4125978 - RNA, 69 nt, Human
caguuauaguugugguaucugcuguuucugccuugaaauuuccagcuuacagcuaagcaacaacuacug

SEQ ID NO: 4125979 - RNA, 99 nt, Human
caguuauguauuauaaucaugaaauuguauuggccucaaacccaaauuuucuuuguagucuaggauagauuuuucaugaaagcuauauaguuauaacug

SEQ ID NO: 4125980 - RNA, 55 nt, Human
caguucaugagugaccaugaaaaauguuuucaucaggcaucaugcucaagagcug

SEQ ID NO: 4125981 - RNA, 72 nt, Human
caguucauuagaagguuuuaaaggaauacaauuuuuaccaccauuguauuauuuuugcuucucaugagucug

SEQ ID NO: 4125982 - RNA, 62 nt, Human
caguuccagugcuccauagcauaguguguuggucacucuguccuggagggcauaggacgcug

SEQ ID NO: 4125983 - RNA, 71 nt, Human
caguuccuuaaugcuuugaaaaggugcauuaacacuuuggcagcacuaacuauuagguauuuaaggagcug

SEQ ID NO: 4125984 - RNA, 73 nt, Human
caguucucaauaauuuggacauuuuuggcauguaacuuuguacauguaaguauucaaaauauuucauggacug

SEQ ID NO: 4125985 - RNA, 79 nt, Human
caguucugauggcaggcagccugagggaucugggcacagcgggcggcucagguguccccggcugcccucccaguagcug

SEQ ID NO: 4125986 - RNA, 58 nt, Human
caguucuuaugcugguggcuuccaaaccucacuuugagaaauacugccuuaggagcug

SEQ ID NO: 4125987 - RNA, 64 nt, Human
caguucuuuguggggaguucucaguccaugucaaggagacguggcuccccucuacagagggcug

SEQ ID NO: 4125988 - RNA, 57 nt, Human
caguugaaggcccagccacagaaugggaaacaagccauucccacugugccuucccug

SEQ ID NO: 4125989 - RNA, 80 nt, Human
caguugaucuccagaugccuggaaaugagaaugugucaagguaacucucaccuucguugccaggcugagggauccagcug

SEQ ID NO: 4125990 - RNA, 108 nt, Human
caguugaucugaaauaggauuuuaccuaaugaagcagaauuucccacucuuuuguuuaugagagguguggguuuuguuuuguuucuuaaucuuauuuuguuuuuacug

SEQ ID NO: 4125991 - RNA, 64 nt, Human
caguugcacccaugucuccacguacagcucaugcaggcugguggguggugcaggagugugcuug

SEQ ID NO: 4125992 - RNA, 65 nt, Human
caguugcuuguuaguggugagguucuaugauccuaaguaggggacuuaguggcuacaagcagcug

SEQ ID NO: 4125993 - RNA, 61 nt, Human
caguuggaggaaugaggcuguaacaaaggaaaaauauauuucucccucuuccucucagcug

SEQ ID NO: 4125994 - RNA, 98 nt, Human
caguugggccuccagaugccaggucuuuguucugcauccucagcccgccucaggucucagcugaggagcgagaacucugcuggaaggccacacagcug

SEQ ID NO: 4125995 - RNA, 86 nt, Human
caguuggggacacauucacaaaugcugccccauuccauggaaggauagauuuggaccagagagggcaguaccgugaaugccaacug

SEQ ID NO: 4125996 - RNA, 73 nt, Human
caguuguauggcuuuaaauugaaggaguuuggcuuuuuaucuaaauugcuucauaauaaaaccacugcuuuug

SEQ ID NO: 4125997 - RNA, 65 nt, Human
caguuguauguaccacagguggugguagaacauucuauuagcuuuuaagugugcuacaugcuaug

SEQ ID NO: 4125998 - RNA, 55 nt, Human
caguuguccuuuguaccaaguucugucaacuagcuugguagcugaggacauacug

SEQ ID NO: 4125999 - RNA, 74 nt, Human
caguugucugauaaaugccaucuuuuugaaugcuuuccuugaaauucaagaaaggagucuauguaucacagcug

SEQ ID NO: 4126000 - RNA, 91 nt, Human
caguuguguuauuuccuugggguacaguucuuccagugucauuggcaucaaugaauaugugacuuugauuucaaguguaaacaaaccacug

SEQ ID NO: 4126001 - RNA, 56 nt, Human
caggaagcucuuagcagucaccuuccgauugggguugauuggguuaaggccuucug

SEQ ID NO: 4126002 - RNA, 85 nt, Human
caggaaggaggacuagaggaacaucgagcgauggacugcaagaucuauaauagauguccuuugcuucucugguccauccuuuuug

SEQ ID NO: 4126003 - RNA, 88 nt, Human
caggaagguugggggaggccugcugcccaugugccaggcccccaggggcuguuucagggcagagcguuuccugcccccacccuuccug

SEQ ID NO: 4126004 - RNA, 81 nt, Human
caggaaguggcaggcgcaggguuuggacccaggccugggugaccccagaaccucaugggauccugugaccuguugacccug

SEQ ID NO: 4126005 - RNA, 73 nt, Human
caggaaucacuaacuuagggaauuugaugaacuacuucacauaguucacauuuacugguuuguccgauuccug

SEQ ID NO: 4126006 - RNA, 78 nt, Human
caggaaucagcaggcccagaguuucauggccuugagcaauugcugggcagugggguuucugugggugcuaauugccug

SEQ ID NO: 4126007 - RNA, 79 nt, Human
caggaaucaguacaaaggugcucucaaggaacauucgaugguguaguuugggauuggcccuauggauuguaucuuccug

SEQ ID NO: 4126008 - RNA, 74 nt, Human
caggaauccagauuuagagagauaaccauguuuuucuuuaggcaaaaguauuaucucuuuaaaugugccucuug

SEQ ID NO: 4126009 - RNA, 59 nt, Human
caggaauguuugugcuccuuuagagauuuguaauuaagaagaggcagaacucguucuug

SEQ ID NO: 4126010 - RNA, 93 nt, Human
caggaauuagguuuuccuuuucagauucaaauuuuaugugaguauuugccuuuuguaacuuuagcuauuuaaucugauggagaauuuuuccug

SEQ ID NO: 4126011 - RNA, 78 nt, Human
caggaauuuagagucccuggguuuuaccgagucuccacugacuagcagugcagcugugggagaaucucuggguuucug

SEQ ID NO: 4126012 - RNA, 73 nt, Human
caggacaaaccucuuccuagucacuuggaaagaagaacuuuccgaguugaaguaggauagcgguuagugccug

SEQ ID NO: 4126013 - RNA, 59 nt, Human
caggacaaagcccuuugagaaacagucaccaaccuguguucccacugggcucuguccug

SEQ ID NO: 4126014 - RNA, 65 nt, Human
caggacaagagggaaucgauaacuaaaauaggucacgagaagcuggagaagccgucuugucgcug

SEQ ID NO: 4126015 - RNA, 77 nt, Human
caggacagaggccagcuacccaagggucagggaccuccaucucuggcccugaggggcugugccccuucugcuuccug

SEQ ID NO: 4126016 - RNA, 89 nt, Human
caggacagagugggccccuggcacaugcucccugagugguaacaaugguucuccaccaucucucgugucucaaggggccccgcugccug

SEQ ID NO: 4126017 - RNA, 72 nt, Human
caggacagggcagaaggcacucuacucccaguuaucagcucuacugggagguaauguaucuguccugcccug

SEQ ID NO: 4126018 - RNA, 60 nt, Human
caggacaguuggacagacauugugggaacccccgcacugcccuggcaccacacaugccug

SEQ ID NO: 4126019 - RNA, 68 nt, Human
caggacaucacucgccgccugucucgaaguggugagcgccaccacaucgggcggacacugggguccug

SEQ ID NO: 4126020 - RNA, 61 nt, Human
caggacauggacacuuuugggcaguuaucauuuuacccaacacagauguguuaguguuuug

SEQ ID NO: 4126021 - RNA, 63 nt, Human
caggaccaggagauuugagcuaggcuugggaccuucucuuugcugggucucucccugguccug

SEQ ID NO: 4126022 - RNA, 79 nt, Human
caggaccaggcugugccucugcucucagggaacucacauccuaggguggagagaaagaaacgugaacagauggucacug

SEQ ID NO: 4126023 - RNA, 71 nt, Human
caggaccccgaggagagguccaggcccuugggcuucugccaggcccugcugaggccucccucucuguccug

SEQ ID NO: 4126024 - RNA, 55 nt, Human
caggaccuaacucaccugucucagagccgucuguaaguaccugugagaggaccug

SEQ ID NO: 4126025 - RNA, 83 nt, Human
caggaccugggaugguucucauguguucguccccuuccacacuaagccaaagaaggagcugaaacaagggaccguccuuucug

SEQ ID NO: 4126026 - RNA, 63 nt, Human
caggaccuuccauuucuaaaccagaugugauuaccuuauuggaugaagaaaggaaggaaccug

SEQ ID NO: 4126027 - RNA, 56 nt, Human
caggacuauguucaacagauagccgcugagacaugcaugcacucuggcauauccug

SEQ ID NO: 4126028 - RNA, 69 nt, Human
caggacugcauaugauagaugccuugcaauaauuucccagcaaggaaaauaucauguuagugauuccug

SEQ ID NO: 4126029 - RNA, 62 nt, Human
caggacugggucuagggcagcagggcuugggggucgagcccucugccugggaccaaguccug

SEQ ID NO: 4126030 - RNA, 67 nt, Human
caggucccacagggaguucacgcaaugcaggccagcuuuucuggcccagagugaguccugggcccug

SEQ ID NO: 4126031 - RNA, 84 nt, Human
cagguccuucucaaggaaaagugauggcauacugauuagauguaugaugccgaugccaucacuuuuccuuuuguaggcauacug

SEQ ID NO: 4126032 - RNA, 82 nt, Human
caggucucacugcuguuggacacucccuuuucgaagcugccacugcucugagucugggcauguucacuuugccugggaccug

SEQ ID NO: 4126033 - RNA, 60 nt, Human
caggucugagucacauguucaucucagaaucagaugguacguucaauuagacucagacug

SEQ ID NO: 4126034 - RNA, 63 nt, Human
caggucugcaccauucccaaggguugcugugcacagccuuuucuaagguaugguuuauaccug

SEQ ID NO: 4126035 - RNA, 70 nt, Human
caggucugccucacucacuucugacuccauaaaagcucccauaagauggaaggagaaaggggcagagaug

SEQ ID NO: 4126036 - RNA, 75 nt, Human
caggucuuccuccagcugcuucacaaugauccucuccuccaccagcacgucauuaauccagucgaggaggaccug

SEQ ID NO: 4126037 - RNA, 76 nt, Human
caggucuuguauggaagguguguguuuaaacaaauuugaauaguauuuaaacacuggcaauuucaugcacaauuug

SEQ ID NO: 4126038 - RNA, 62 nt, Human
caggucuuuguugcagcauggacaggagccaacgucguucaaccacagccaagagggaccug

SEQ ID NO: 4126039 - RNA, 97 nt, Human
caggugaacaguuugucaaaccucaaaauuaguaacaaaggccaccacccuugaccugggacuuugagcaauucugagaugcaacaagcuucacuug

SEQ ID NO: 4126040 - RNA, 64 nt, Human
caggugaccuauggucacuacauaugaguucagaaaguucagaaaggugaccguaguucacgug

SEQ ID NO: 4126041 - RNA, 70 nt, Human
caggugaccugacucuccucaagcauaaauaggucauuaguuacugcuuucaggaaguuucccucaccug

SEQ ID NO: 4126042 - RNA, 71 nt, Human
caggugaggugggacugggcugcaagaucuggugccgcuuuucuccacugugcagccugucccuucuccug

SEQ ID NO: 4126043 - RNA, 65 nt, Human
caggugaguuuuccuccuugguugucuaauuuaacauuccaaaaugggaagaaaaccagcaucug

SEQ ID NO: 4126044 - RNA, 80 nt, Human
caggugaugagaggguguggaagucaugggcugagagagcuggucagguuccccccagccuuucacaugagcaucacuug

SEQ ID NO: 4126045 - RNA, 62 nt, Human
caggugauuagagcuagaugaggucaugagagggaggcccucaugaaaggcucaguggccug

SEQ ID NO: 4126046 - RNA, 85 nt, Human
caggugauuugaaugugcagccagguuugaggaccacuguucuacaugcaucuuuggccacuugugcugcaucuugucuacucug

SEQ ID NO: 4126047 - RNA, 58 nt, Human
caggugcaaguaauuccagcuacugaggaggcucaggcaguagaauugcuugaaccug

SEQ ID NO: 4126048 - RNA, 80 nt, Human
caggugcccgccaccaugccuggcuaauuuuuugcauuuuuaguagagaccuuguuagccaggauggucucgaucuccug

SEQ ID NO: 4126049 - RNA, 59 nt, Human
caggugcucugcugcagguaagccaguugucacauccuggcucuccuuggaggcaucug

SEQ ID NO: 4126050 - RNA, 67 nt, Human
caggugcugaagaagucuguucgcccugaaauuccuccuuggucacagcuuuuucagcagcaaccug

SEQ ID NO: 4126051 - RNA, 56 nt, Human
caggugcugacuucccacuaacuucaaagggaauugaggaggaagaaagcacacug

SEQ ID NO: 4126052 - RNA, 57 nt, Human
cagguggaugguugcuuaugguuaguaucgauucugagcagguaggcauucauacug

SEQ ID NO: 4126053 - RNA, 72 nt, Human
cagguggcaaugcaaucagaugauuauuucuguaagaaucaagaaauucagcaucaugcauuguaaccccug

SEQ ID NO: 4126054 - RNA, 64 nt, Human
cagguggcagugccugcauucugaauguccugcgcugacacagguagguuauugcugcuaccug

SEQ ID NO: 4126055 - RNA, 83 nt, Human
caggugggauucacauuguuuuaaugugaauaaggacauuuacuuauucuagauaagaaaagggcugugaaauccauaaacug

SEQ ID NO: 4126056 - RNA, 66 nt, Human
caggugggccguaaucucuggguagcuaaagcccagcagcagcccgaggaucaugugucaacccug

SEQ ID NO: 4126057 - RNA, 67 nt, Human
cagguggugccucagggacuuacaaaccagaagguuccaugccuuccccuuuaguggguauuauuug

SEQ ID NO: 4126058 - RNA, 55 nt, Human
caggugguugagagcuguaggccugacaccagaaagucugaucucaaccauucug

SEQ ID NO: 4126059 - RNA, 85 nt, Human
caggugguuuuggggucgagagcugacucccuccuccuccgucuuaacccaggcucagagggucagcucccuccccagggcucug

SEQ ID NO: 4126060 - RNA, 77 nt, Human
cagguguagagugaggcugggcagagggguguugcugaugucugcaccgccaugcucccagccacaguuuccaccug

SEQ ID NO: 4126061 - RNA, 57 nt, Human
cagguguauaaacucagugacuccaagcggcuacacugagcaauguuuacauacuug

SEQ ID NO: 4126062 - RNA, 89 nt, Human
caggugugcuggugauugucuccugagagcuggacagaggccucugcacucuaccugcacucaggaaacauuuacagaaucacacucug

SEQ ID NO: 4126063 - RNA, 65 nt, Human
cagguguuaaaugauggauuuagacaagcuggacaccaaguuuguguucuaucauucuacagcug

SEQ ID NO: 4126064 - RNA, 61 nt, Human
cagguguugcaguugaagacugguaaguuugccaaucagaucuuccaacacugacaccaug

SEQ ID NO: 4126065 - RNA, 56 nt, Human
cagguuccaguugcagggacuuuauagauugggaaagucuacaacuagggaagcug

SEQ ID NO: 4126066 - RNA, 82 nt, Human
cagguuccccaagggcauuuggcucaaccuaaguaagagaauaugaauuugagggagaaagccgaggugucuggggagugug

SEQ ID NO: 4126067 - RNA, 61 nt, Human
cagguucuauacugaauaauuuuuguugguauuuuggcuucaguaauucagauaaugccug

SEQ ID NO: 4126068 - RNA, 62 nt, Human
cauguucuuugugauucugagcuggcaggucaucauugccaccagcauuucaaagacacaug

SEQ ID NO: 4126069 - RNA, 64 nt, Human
cauguugagggagaagauucugcacacucauuugaggcccgccugacccugucucccucacaug

SEQ ID NO: 4126070 - RNA, 56 nt, Human
cauguuuauggagcagguauuaggugucuugcacuguaccaggcccuguggacaug

SEQ ID NO: 4126071 - RNA, 89 nt, Human
cauuaaaggacuugcuauugguuuacucuguaaaccaggaaccugacauaguugcugguuucugaguaaccacagcaguacaacaaaug

SEQ ID NO: 4126072 - RNA, 64 nt, Human
cauuaaaugccauuguauauucauugaucagugaaaucacaucugggucacaguggcaucuaug

SEQ ID NO: 4126073 - RNA, 85 nt, Human
cauuaaguagcuggugugaccuucaugcuaaguuggauacagcagaguuuaaacaaaugaaauagucaaucuaccagacuuacug

SEQ ID NO: 4126074 - RNA, 77 nt, Human
cauuaaguucugguauaaauggcucuuggucccuuuggaaauuucagacuaagugggacauuuacuaggacucuuug

SEQ ID NO: 4126075 - RNA, 110 nt, Human
cauuaaugaggaaaccaggugggguaaagcugguucacuaagcauaauaucuguaauauuuuuaggucugcugugauucuacuaguguuucaccuggauuuuuuuuaaug

SEQ ID NO: 4126076 - RNA, 73 nt, Human
cauuaauuagcugcagaguagggcauguaccuguucaacuuuacaauauacugccaaauugcagcaauguaug

SEQ ID NO: 4126077 - RNA, 90 nt, Human
cauuacaaucccuuguauuuggguaguauagagaauuagaaaaaaaugaacacaaaaaguucucauuuuacccaagaacuggguguuuug

SEQ ID NO: 4126078 - RNA, 56 nt, Human
cauuacuaucaaccaggucacagaugacgauugcuuggaccaggaaggugguggug

SEQ ID NO: 4126079 - RNA, 75 nt, Human
cauuacuccaccucccagagccacagcuucuuuaaaauaucuauuucaauggcuugcucugggagggaugugaug

SEQ ID NO: 4126080 - RNA, 59 nt, Human
cauuacuuacaguuacggcaaguggucuccaaagauggcugccaacauuguuagcgaug

SEQ ID NO: 4126081 - RNA, 83 nt, Human
cauuacuuaccaccucuuugauuugaggcaaguuacgaaccacuccauuuuucucuucuguaaagugguggcacugauugaug

SEQ ID NO: 4126082 - RNA, 80 nt, Human
cauuacuuaugggaaaaaucagucuucuauuuggguuggcaaaaaucagcugaagagaggugcugaguggccaggaaaug

SEQ ID NO: 4126083 - RNA, 73 nt, Human
cauuagaaucaggaaauggugauuugguugaaucuacagauaauagcuuuaccacuuccugugucagcugaug

SEQ ID NO: 4126084 - RNA, 67 nt, Human
cauuagcaaucauaaaccuuuauugaucuaaaccaauggguauugaagugguuuguaauugguaaug

SEQ ID NO: 4126085 - RNA, 60 nt, Human
cauuagcauucagugacuuguaagaguaaacuuccuucuagauaguccugugugcuuaug

SEQ ID NO: 4126086 - RNA, 129 nt, Human
cauuagcugacgauaaugaaucuucuguucugaaaagcaugguuuaguugauuuuuuuaauuuuacuucaauggagcaguaccuugucuuuuauagaacaaguuagacaaaccauuaaugacaagagug

SEQ ID NO: 4126087 - RNA, 69 nt, Human
cauuagggaugcuguggaagggauuugggaggaugcauuagguggcuuuaggguuccuucuacccuaug

SEQ ID NO: 4126088 - RNA, 76 nt, Human
cauuagguuagugcaaaaguaauuggaguuuuaauggcaaaaacugcaauuauuuuugcaauauaagaacuugaug

SEQ ID NO: 4126089 - RNA, 107 nt, Human
cauuauacagugaccagcacuaucuuuguuuccagccaaaauagauuucagaggaacuauacauaaaacauuuggguggaaacaguuagugggccauuucaaaaaug

SEQ ID NO: 4126090 - RNA, 75 nt, Human
cauuauauuacagcacuguuaaagauacugaaauauauugaaguuuuaccuugacauugcuguaguguccagaug

SEQ ID NO: 4126091 - RNA, 83 nt, Human
cauuauauuauucugaauuauuguuuaggaauguuuagacuauauuuuuuccagaggagugauucagaggguauguuuuagug

SEQ ID NO: 4126092 - RNA, 73 nt, Human
cauuauuaaccuuaaaggccgaaguaaagauuuauaggacuaaguguuugcuuuagucuuuugguacauagug

SEQ ID NO: 4126093 - RNA, 64 nt, Human
cauuauuucagcugggaaagucacuauaugaauuaauagcagauuucccagcugaaaauaaaug

SEQ ID NO: 4126094 - RNA, 61 nt, Human
cauucaagguuggcucaggaauugggcucuggcuccaggaacugauuuauaacuuuaggug

SEQ ID NO: 4126095 - RNA, 85 nt, Human
cauucaccuuuucauggcuuuguucuguuagaugaaaguguuucuagauuuggcauuuaucuaacauagcaucauagggugaaug

SEQ ID NO: 4126096 - RNA, 61 nt, Human
cauucacugaagcuuuauugaaugccuuuuauggaucagcagugugaagcuuuauugaaug

SEQ ID NO: 4126097 - RNA, 69 nt, Human
cauucagagcaucucuaaagccagaaaauaagagcaagguuagcuguugggguugggggugugcugaug

SEQ ID NO: 4126098 - RNA, 73 nt, Human
cauucagagugcuugcauauuuauugucucauugacuucucacaagggacuggaaggcaaguauuucugugug

SEQ ID NO: 4126099 - RNA, 55 nt, Human
cauucagcuggcagguucugggaaggcgggccucuucccucauccccaguuguug

SEQ ID NO: 4126100 - RNA, 55 nt, Human
cauucagguacacucagugcuaggggaccucccuccccagucugggaccugcgug

SEQ ID NO: 4126101 - RNA, 96 nt, Human
cauucagucgugugugugucccugccacauggauucagucuugugugugugugucccugccacauugauucaguccuguguguguguaugugugug

SEQ ID NO: 4126102 - RNA, 68 nt, Human
cauucauguuguaguauguaucaguacuucauuccuuuuuauggcugaauaauauuccauuaugagug

SEQ ID NO: 4126103 - RNA, 76 nt, Human
cauuccacuggacacuuguggccuuucuaguaaguuuauggaagauuuacuggaagaccacauuguuuaugguuug

SEQ ID NO: 4126104 - RNA, 101 nt, Human
cauuccaguuuuauucucagacacacaacuucugcuuagauaguucagaguucccauaauccugucuuagaaaaaggcuguggucuuagggaaguggaaug

SEQ ID NO: 4126105 - RNA, 83 nt, Human
cauucccaaggcuguucucuguaacaugcauuuuucccccuuuuucuuuaaaugcuguggcguuacggcgaacaccuuuugug

SEQ ID NO: 4126106 - RNA, 58 nt, Human
caguccuaccagguucugagcuagccagaugaguccuggcauagaauauggugggcug

SEQ ID NO: 4126107 - RNA, 59 nt, Human
caguccuguugguuccagagguggccugucaccaggcaucuggggacaucauuaggcug

SEQ ID NO: 4126108 - RNA, 75 nt, Human
caguccuugcucaaagucuacaguuagcacacuaaauaaugaauuucuuuuugugaaaaguugaguaagaaacug

SEQ ID NO: 4126109 - RNA, 68 nt, Human
caguccuuuuugacucagauuuuguggauuugaaauaaucaacgugccauucaugugagcaagaacug

SEQ ID NO: 4126110 - RNA, 80 nt, Human
cagucgacuaccuuucaucuuauugucuuugauccucucuuuagaagcuucuuggcaggagauaaaauauuaguugauug

SEQ ID NO: 4126111 - RNA, 57 nt, Human
cagucuaagacucacgccaagauuuuuauuuccuucuggggcccugucuugggucug

SEQ ID NO: 4126112 - RNA, 55 nt, Human
cagucucacccuggaggccccaguugcaauauugggugucacaaaugugagagug

SEQ ID NO: 4126113 - RNA, 58 nt, Human
cagucucugcccgcgucugccccagcacuuggcacagcgggacagacgcagagaucug

SEQ ID NO: 4126114 - RNA, 56 nt, Human
cagucugaacacugggcuacuccugcgggauuccagguaagacccaggauaggcug

SEQ ID NO: 4126115 - RNA, 58 nt, Human
cagucugggagggaugccaguguacaagcguaaaugagcaaauaaagcucucagauug

SEQ ID NO: 4126116 - RNA, 63 nt, Human
cagugaaagauaaguuauuauguaccugaugcucagguuaguggaaaauaucuuuuuaagcug

SEQ ID NO: 4126117 - RNA, 85 nt, Human
cagugaaaucagaggucagcuguaccacaggaaacacugagaagucaagacaagaucaguauggucaucugaccuuuguucucug

SEQ ID NO: 4126118 - RNA, 97 nt, Human
cagugaaauguauaggguugguacaacaguaaucaagguuuuugcccaaguaauggcaaaaaccucaauugcuuuugcaccaaccaauauuaagaug

SEQ ID NO: 4126119 - RNA, 56 nt, Human
cagugaacauuugugcuagcccugccuaugcagaaggccagcugcauaugucacug

SEQ ID NO: 4126120 - RNA, 57 nt, Human
cagugacacugguuuagguauguaucucugguacuuuccaaagcugcaguguuucug

SEQ ID NO: 4126121 - RNA, 107 nt, Human
cagugacauugcugcuucaacuaagaaauucuauauuuaaauucuaauguaugcaacauacugaaggcauucagauaacagagcacucagagggcugcaaaccacug

SEQ ID NO: 4126122 - RNA, 122 nt, Human
cagugacccucuggauagguaagcugcauggaccaggcucauugagaauguacugacacuuccaggaggcagggcugugcccgcuucucaacuguucauauauugaugcuuuugggucacug

SEQ ID NO: 4126123 - RNA, 60 nt, Human
cagugaccgaguagaauaagcucuccaucaggguagagacuuugucuauuuuguucacug

SEQ ID NO: 4126124 - RNA, 75 nt, Human
cagugagcccccagcagagcccgguccaagugcgggauggacuguggcguagaugcugggaagagguguccacug

SEQ ID NO: 4126125 - RNA, 57 nt, Human
cagugaggauuacuaguuaacagggagaaacaaucuuguacuaugucuaagucacug

SEQ ID NO: 4126126 - RNA, 57 nt, Human
cagugcagacguggagggggcacagcugggaauugccucagaugucuuaaggcacug

SEQ ID NO: 4126127 - RNA, 64 nt, Human
cagugcagaggccagggaggauugauuuuguggcacuguuccauccuggccuggauugcaacug

SEQ ID NO: 4126128 - RNA, 77 nt, Human
caggcacccaccaccaugccuggcuaauuuuuuggacgggguuucaccgaguuagccaggauggucuugaucuccug

SEQ ID NO: 4126129 - RNA, 55 nt, Human
caggcaccugccucucguguccaugcagcauuacaggaggggacagguggccgug

SEQ ID NO: 4126130 - RNA, 61 nt, Human
caggcagaggcuuuucauggcucuugugggaaaaagaguccuugcugacaaguccugccug

SEQ ID NO: 4126131 - RNA, 82 nt, Human
caggcagcacaagguaugugaagagauuaaaaaauaggggauggucugccucuuucucucuacaguacuuucauccugcuug

SEQ ID NO: 4126132 - RNA, 76 nt, Human
caggcagccagaggggccuggcacugagcuggcacggaggagaacggcccugcuggcccaggccccucgcugucug

SEQ ID NO: 4126133 - RNA, 74 nt, Human
caggcagcugcugucucacuggugugguuugccaaguagccaguuagaccuguagauagcaggagguuugcuug

SEQ ID NO: 4126134 - RNA, 71 nt, Human
caggcaggagucagccugcggcugcacgaggcuucggagaccaagcugccugcugcacucggugcugccug

SEQ ID NO: 4126135 - RNA, 62 nt, Human
caggcagggcugccuucugcuuuuucaaauucuugcuggucuuagcaguggagccaugccug

SEQ ID NO: 4126136 - RNA, 57 nt, Human
caggcaggggcccugcugaguacauacagcucacccacuuggccaggcccccaccug

SEQ ID NO: 4126137 - RNA, 81 nt, Human
caggcaggguggaaagugggcaggaggaugcacccaggcccagaaugaaccucugugcuuuguccagccuccccuagccug

SEQ ID NO: 4126138 - RNA, 58 nt, Human
caggcagugauauuuaauuuguauagugauguauuccaagugucuauaucagugcuug

SEQ ID NO: 4126139 - RNA, 86 nt, Human
caggcaguuguuuuaaaucgcggauaaugugagauugaaaagcagccuucaaauucuguuacuaaugugaugugaauaacauucug

SEQ ID NO: 4126140 - RNA, 56 nt, Human
caggcauaaguaauguuuuauguauagaaaugcuuucuuucauuacuuggugccug

SEQ ID NO: 4126141 - RNA, 59 nt, Human
caggcaugagccaccgcaccgggccuaaaauuuguugcuuuggucagugguucaguuug

SEQ ID NO: 4126142 - RNA, 59 nt, Human
caggcauggagaggcagagacucucccuuggacguaauucuuugccuauucucugccug

SEQ ID NO: 4126143 - RNA, 85 nt, Human
caggcauggauccuucauugguugagggcuacucucuggagcauauauggugcuuccagccuucccaaugcuugguuugagccug

SEQ ID NO: 4126144 - RNA, 57 nt, Human
caggcauuguucuagguucucaggauagagugucaagcaagaccuaaacgaucccug

SEQ ID NO: 4126145 - RNA, 64 nt, Human
caggccaauaaaugugauggccuuuuuuuacaaugcucuuuaugaaguccuuaccccuggccug

SEQ ID NO: 4126146 - RNA, 64 nt, Human
caggccaccagauacaugccccuuggggagucauuuacuaguagggucugaauaucuggugcug

SEQ ID NO: 4126147 - RNA, 129 nt, Human
caggccacugugggagcuguggugcugugccagugaggugaguagugagaagcccaucuugcagaccccacagacgaagggcuucugcucagccugcacgcacuggugcuccagcaggucaguggccug

SEQ ID NO: 4126148 - RNA, 66 nt, Human
caggccagaggaguugaggcuuuggguagcaccccgcaggcccagcaguagagcucauauggccug

SEQ ID NO: 4126149 - RNA, 125 nt, Human
caggccauaagaugaccuaauaagcacacaauaucuggagagcuaagcggaguuaucccucauaccuaaggcgacuucucucucuggauauuuguaugcuggauuugucucugaagcuaagcuug

SEQ ID NO: 4126150 - RNA, 104 nt, Human
caggcccagccuucucacccacccagccccacacggucuagcucugccugaaguaggugcuuggcucgugcacacagauggacggguggaugcggcugggccug

SEQ ID NO: 4126151 - RNA, 65 nt, Human
caggcccaggguuauugggaaaauaaccaaauaaauggucaacuaucuaaauagacucugaccug

SEQ ID NO: 4126152 - RNA, 108 nt, Human
caggcccauuuccauucacuaagaaaugcucuuuaagacuaaauuagaguuugguaaauuacuagacaaugaauagauuugagaagcucuucuggaaaugcagggcug

SEQ ID NO: 4126153 - RNA, 75 nt, Human
caggccccacgauguuuugggagaguguuuagcacaggaaaaugcgcagaauacacgcacgacacgggggcacug

SEQ ID NO: 4126154 - RNA, 83 nt, Human
caggcccccauauagccagugagugggaagcuacaauuccugcucuguccucuuaccacuacauuugcuaauggcaaggucug

SEQ ID NO: 4126155 - RNA, 57 nt, Human
caggcccucgcccgcagcgaccuaaccccuuccagaggcucugcuggcuggggcuug

SEQ ID NO: 4126156 - RNA, 61 nt, Human
caggccggugauucuggauguauuuugaagauagagccaauaacuccggaguuuuggccug

SEQ ID NO: 4126157 - RNA, 55 nt, Human
caggccucaccagcggagcugcgagaggucuuuccagagcuugcugagaggccug

SEQ ID NO: 4126158 - RNA, 73 nt, Human
caggccucacugcagccccaggaaguaggggcggguuggggcccauuuuccagagggugcucagggcggccug

SEQ ID NO: 4126159 - RNA, 77 nt, Human
caggccugagaggcagccagagaaaaucacauagccgcacagauuuguucauugucucugaugugccucuaugccug

SEQ ID NO: 4126160 - RNA, 70 nt, Human
caggccuguccuggguccccgcaggucagugugaaggcgugcgcugccggcggacccugggacaggggug

SEQ ID NO: 4126161 - RNA, 58 nt, Human
caggccugucugcacaugaggcugugagggcacaggccugugugcacacgaggccaug

SEQ ID NO: 4126162 - RNA, 59 nt, Human
caggccuuucuggggaagugagaggaaauacaagauucuuaugggucccaagaggccug

SEQ ID NO: 4126163 - RNA, 55 nt, Human
caggcgaugcugcuggugcuggugcacaggccccacuuugaguagcacuugaaug

SEQ ID NO: 4126164 - RNA, 76 nt, Human
caggcggggagggagcuuccgaacuacagcuucuccagcacuuggagcagcucgaggccucucaccuuaaggccug

SEQ ID NO: 4126165 - RNA, 73 nt, Human
caggcgucccacugacccaggcuggguggcggcagagaguggcauucccacugagguagcuggugacugccug

SEQ ID NO: 4126166 - RNA, 66 nt, Human
caggcuccauuaaucauccugcaccuaaguuguuccuacgauggcaggauguuugguggaaaucug

SEQ ID NO: 4126167 - RNA, 82 nt, Human
caggcuccauuugcugaugggcugugcgacucaauguucacaaauguuuagucauucagcuccuuuucaaggaauaagccug

SEQ ID NO: 4126168 - RNA, 78 nt, Human
caggcucccagaaaauucucagacaaugcuaucagaaauucuacacaacauaguuuugucugguuucuugggugugug

SEQ ID NO: 4126169 - RNA, 84 nt, Human
caggcucgggcugauguaugguccagguaaaugcagcuucugguuaauacgaugcuguaauggaaaaacauuagcaugagauug

SEQ ID NO: 4126170 - RNA, 64 nt, Human
caggcucugucaggcggagcagcaugaggucguggcuguaguccucgucugcuuggcgggugug

SEQ ID NO: 4126171 - RNA, 80 nt, Human
caggcucuguucaaugcaauggcaauggaaggaauaguaaccuuccauuuagugcacaguguaaugaaucagaauucuug

SEQ ID NO: 4126172 - RNA, 55 nt, Human
caggcugaggguuaggccuuagaacuccaccuauuugcugcaacuccucugucug

SEQ ID NO: 4126173 - RNA, 55 nt, Human
caggcugcagugcaguggcuauucagaggcauggucauagcucacugcagcccug

SEQ ID NO: 4126174 - RNA, 55 nt, Human
caggcugcauggagggguacaggacucuuucugcuucuuuuauuggcagauccug

SEQ ID NO: 4126175 - RNA, 55 nt, Human
caggcugcugacaggcuuggagaggagugaggacugggagucgucggagagucug

SEQ ID NO: 4126176 - RNA, 76 nt, Human
caggcugcugugaggaggcggccagaagaguggggacgggccuguguuguguguuuccuccucuccagagagccug

SEQ ID NO: 4126177 - RNA, 65 nt, Human
caggcuggcucaggugugagcugaagaggcaaaacugucuguuuagguugcauuggguuccccug

SEQ ID NO: 4126178 - RNA, 58 nt, Human
caggcugggaacgccacccgcuuccguaguaggaaaucaaucguggauucccagccug

SEQ ID NO: 4126179 - RNA, 55 nt, Human
caggcugggacugaccccugcugagaaguaccaggcggucuugucccucugccug

SEQ ID NO: 4126180 - RNA, 65 nt, Human
caggcugggggaggugagcugagucuggcaggccaccugccccaccagcacccucucuaucccug

SEQ ID NO: 4126181 - RNA, 103 nt, Human
caggcugucagaggggaggagguggagauggcgauguuuagugguguguucacguggcugacuuugccugucuuuagcagaacacuuccccuaaaaguaccug

SEQ ID NO: 4126182 - RNA, 69 nt, Human
caggcugugaaacugagaugcgccauggguggguggugggucugaucacaguuucuccuucccagccug

SEQ ID NO: 4126183 - RNA, 59 nt, Human
caggcugugaguuuugucucagacuuaauuuuaucucugacagauuuaacucauaaaug

SEQ ID NO: 4126184 - RNA, 69 nt, Human
cagguuuuauaaagcauguacugugugcuagacacuguucuaagcacuuuacuuguuuuaccuuacuug

SEQ ID NO: 4126185 - RNA, 59 nt, Human
caguaaauacauaucagagaagcaggaacauaugugcuucucugauacgugcuuuauug

SEQ ID NO: 4126186 - RNA, 60 nt, Human
caguaacaagugccaacguuagauuagaugagaaaauuuucaauggaggcacuauugcug

SEQ ID NO: 4126187 - RNA, 74 nt, Human
caguaagaacugggagggagagcaauagucuuuacuuugagauuugacauuauucucucagucuuugggaucug

SEQ ID NO: 4126188 - RNA, 89 nt, Human
caguaagacccagaguuaguauacaaaguaacagcuagugucaaauugagauguucacuuauguauugcaugccucgugucucuuacug

SEQ ID NO: 4126189 - RNA, 105 nt, Human
caguaauaauaccauucagaugugcacaguauuugauagauuucaaaggacuuuuuacaaaaucuuauuugauccugucagcaguguuuugagguauuaucccug

SEQ ID NO: 4126190 - RNA, 58 nt, Human
caguaauuguaauuaaaaauuagcauagaaaugugcuuuuaggagauuaaaauuauug

SEQ ID NO: 4126191 - RNA, 114 nt, Human
caguacaagcuggcaccucuucucaaagcaacauugacaaauggcaauggcuuucuauuugagcccacauuuguuaaugcugcuuuuaacaagaagugccagcaugcuauacug

SEQ ID NO: 4126192 - RNA, 83 nt, Human
caguacacucauccauaaaguaggaaacacuacacccuccagugcuguuaguagugcuuucuacuuuaugggugacugcacug

SEQ ID NO: 4126193 - RNA, 59 nt, Human
caguacugcauuaaauuuagguuauggcuguagcuaugccaaaauaauguauguaucug

SEQ ID NO: 4126194 - RNA, 60 nt, Human
caguacuuaguucucaugguuucuugaacauugugaaugagagaacuuuggaaagugcug

SEQ ID NO: 4126195 - RNA, 60 nt, Human
caguacuuugcaucauuccacugccuucuguccuaauuguuuaugaugcaaagucagcug

SEQ ID NO: 4126196 - RNA, 63 nt, Human
caguacuuuucuggcuuucuacucugguaggaaaaacagcccuacuagucagaggaguaucug

SEQ ID NO: 4126197 - RNA, 94 nt, Human
caguagaagugaauuaauauuauaugugcuacaugguaguguaguuaugauacucauaauuuuguauugccauuguagauauuuucuucuagug

SEQ ID NO: 4126198 - RNA, 77 nt, Human
caguagagccaaggccgggguugcagccaccaguuugcuuucuguacugcugaggcucccucgggucugcucugcug

SEQ ID NO: 4126199 - RNA, 69 nt, Human
caguagaggagagagcuuggguuuugaauuugauauaguaaagagccugucugccuuucuaccucacug

SEQ ID NO: 4126200 - RNA, 68 nt, Human
caguagauuuuucaucugauugauaacucugcaauuagggcuuuuugaugcaguauggaacaucucug

SEQ ID NO: 4126201 - RNA, 68 nt, Human
caguaggucugaguauggccugagaaugugcauuucuaacaaguucucaggugauacugagguugcug

SEQ ID NO: 4126202 - RNA, 63 nt, Human
caguaggugcucaacaaguacagccuaaucccucugcuugcuugacuuuguguaccuguccug

SEQ ID NO: 4126203 - RNA, 111 nt, Human
caguaguauacguugaaaugcuuaaaaacaguaugguagucaauaaaugugugguggcaacacucuaauauaguauuaccacugcaguuuugcauucuaauauugccucug

SEQ ID NO: 4126204 - RNA, 76 nt, Human
caguaugcuugggacucccuguagcagugccuggaagaugguauguuuugcugcugcaggaauucucaagggacug

SEQ ID NO: 4126205 - RNA, 76 nt, Human
caguauuccgagagcaucuccuaccuacuccuucucaucuugagagaaaggggaguuucaggagagccgagaccug

SEQ ID NO: 4126206 - RNA, 88 nt, Human
caguauuuauaaucuugcccaucuuccagagcauuuauucaacaaauauuaaugagcaucuaugugcuggguacugugguaagugcug

SEQ ID NO: 4126207 - RNA, 63 nt, Human
caguauuugagagguccaggugugacuggcuucaggcacccacauuuaacccucagguuucug

SEQ ID NO: 4126208 - RNA, 72 nt, Human
caguauuuuacugcucaaagcucuagguagcuuccuucuuuagggaaagauauuugagcuguaaaauaucug

SEQ ID NO: 4126209 - RNA, 77 nt, Human
cagucaaggucacagucuaggccuaggucaaaaucuagaucaagaucuuggacuaguccuaaauccaguggcuacug

SEQ ID NO: 4126210 - RNA, 80 nt, Human
cagucacccaaagcagcaguuccaucaccugacuugcggguacagacagggauggagagacuacuggcccaugggggcug

SEQ ID NO: 4126211 - RNA, 89 nt, Human
cagucacugccccuugguuagagcuggaacuugagaugaaacauaguuuccauugcugaccaaagucccauaaggugucuaaguggcug

SEQ ID NO: 4126212 - RNA, 69 nt, Human
cagucacuucaugguuucuuggacaggcagauccuggccauguucauguaauuccauaagguaaggcug

SEQ ID NO: 4126213 - RNA, 63 nt, Human
cagucagggaaugaugcacacaguuggguugucccuaaccuuguugguuucauucaccucuug

SEQ ID NO: 4126214 - RNA, 68 nt, Human
cagucaguugaagauggccaugcauuagucauacuucugucuguguaaauggcaucucucagcugcug

SEQ ID NO: 4126215 - RNA, 55 nt, Human
cagucaugccugcuggggacccuguugcaccaggguccagagacaggcaugggug

SEQ ID NO: 4126216 - RNA, 79 nt, Human
caguccaaaaugucaguguuacugcuauugaaaagccuugaucuauaccaguuagcacaugacauccuucuggcaacug

SEQ ID NO: 4126217 - RNA, 64 nt, Human
caguccagugauuaaaacaugacagccacaaauaaauuauuuauguggcuuuuaggucacacug

SEQ ID NO: 4126218 - RNA, 57 nt, Human
cagucccuucccauuagguccccucaauccagaagaggccaugaggggaggugacug

SEQ ID NO: 4126219 - RNA, 75 nt, Human
caguccuucauuccuccuuugaaugucauauuacaacacacacagcauucccaggacaguggaauuuagggauug

SEQ ID NO: 4126220 - RNA, 92 nt, Human
cagucuaucccauuuuaaugcauguuagagguuuuccacauguuaggcaaauuuucuagaauguuuugaaagggaaaaaauucugcagacug

SEQ ID NO: 4126221 - RNA, 105 nt, Human
cagucuaugacacagcugaaacugaauucggaaguucuaaggugcauuauucucaucaauguagguauaaugcguagaacucuuggccacagaagccauagaaug

SEQ ID NO: 4126222 - RNA, 55 nt, Human
cagucucuggcagcugcuggccugaccuuuguuuccccagccuuuccagugauug

SEQ ID NO: 4126223 - RNA, 61 nt, Human
cagucucuggugaguugacaguagcuaauagaaucuagucucuguuugcuaucaugagcug

SEQ ID NO: 4126224 - RNA, 76 nt, Human
cagucugaaauguucuggaguuucuguggcucuaaagcgggguuuucaacagcagcacuauugacauuuugggcug

SEQ ID NO: 4126225 - RNA, 57 nt, Human
cauuaugugagugauuaauucaggauaacauaaacuucuggaagucauuuacaggug

SEQ ID NO: 4126226 - RNA, 85 nt, Human
cauuauuacaaaagaagggagaagguaccauuuagccccuaagccauggaaguuaacagacucuuuccaucuuuugguaaugaug

SEQ ID NO: 4126227 - RNA, 66 nt, Human
cauuauucuacaccucucucauuuagaugagguagacauuuaaaucaguggagguuguguaaagug

SEQ ID NO: 4126228 - RNA, 63 nt, Human
cauucacaaagcugauugauggcaaagcugagauuugaaaccaaucaguuuuguuucagaaug

SEQ ID NO: 4126229 - RNA, 77 nt, Human
cauucacaacucauagaccagaacuugucaccuggcuacacccaaucucugggagccagaaaguucagcugugaaug

SEQ ID NO: 4126230 - RNA, 66 nt, Human
cauucacaucuuguuccaucacccuuuccagucacaggagagccugggaaagccaauguguggaug

SEQ ID NO: 4126231 - RNA, 63 nt, Human
cauucaggucuguuuccaucagugcuuuguucucaaauauuagcccuuguuauagaccgaaug

SEQ ID NO: 4126232 - RNA, 78 nt, Human
cauucaguaaaugucacuuuucucccugcuggcccuugucugacauuacucagcauuucagaaguggcauauacuaug

SEQ ID NO: 4126233 - RNA, 85 nt, Human
cauucaguuuguucccagagcucugacaccagcugacuuagauuaaauagcagugagcuggaaaagcauucuggguauugguaug

SEQ ID NO: 4126234 - RNA, 71 nt, Human
cauucauaucuguuguuuucucauauguuggucuccuugaugaacauauaaagaaaggaacagggacaaug

SEQ ID NO: 4126235 - RNA, 93 nt, Human
cauucaugugacagacuguguucuagaaggggauguauagcaguaaaccaaguuuauaaaacucucugucuaaaugcaguuugcauucuaaug

SEQ ID NO: 4126236 - RNA, 83 nt, Human
cauucauuuaguggguccuugguucugugagcaaaagcaaacgaaugagguuccacagguaugaggccccaccugauaaaaug

SEQ ID NO: 4126237 - RNA, 55 nt, Human
cauuccuggcccgggcgccgucguaaggggcaggccgagcccgcggcccggggug

SEQ ID NO: 4126238 - RNA, 101 nt, Human
cauuccuucaagcgucccagagcucuaaggcgaagcugcuauagaaugauuugccuagaacuuugccuuagggcaaaccucaaguacugcuuuuaggaaug

SEQ ID NO: 4126239 - RNA, 56 nt, Human
cauuccuucuuccaucuccccaacugaaacuuggggagaucuugcuugaaggcaug

SEQ ID NO: 4126240 - RNA, 81 nt, Human
cauucggcaauaagaaugcggcucaugguagaaacaguguuucuaaaugguggcugcauugugcuauuagcccacagagug

SEQ ID NO: 4126241 - RNA, 57 nt, Human
cauucguucuuccucagaacccuguggacuaagcuggguucugggaggggcugacug

SEQ ID NO: 4126242 - RNA, 72 nt, Human
cauucuagcuaucuguguccagauccaagugucugagucucagaugagcugguccuacacaugugcuaucug

SEQ ID NO: 4126243 - RNA, 71 nt, Human
cauucuauuucacuugugaaguccuuugcaauuugaauucuaaaaagagaaaucacaagagagauaaagug

SEQ ID NO: 4126244 - RNA, 80 nt, Human
cauucuauuuugagccccugacaucuauuuucuugccaaaacugcugcacaauugguuguagaggggucagagaagggag

SEQ ID NO: 4126245 - RNA, 123 nt, Human
cauucuccauacucaaucacuacagccugcuuuggguugcuucauguuauaugcuucuggaaaagucgucaucauuuuccauccauaccacuuggagacagccagguuuugcacuggagagug

SEQ ID NO: 4126246 - RNA, 68 nt, Human
cauucuccugccagaaaagagggaguucaagucuucuuuccaggacuccuguguuuuggcugagacug

SEQ ID NO: 4126247 - RNA, 101 nt, Human
cauucuccugccucagucucccgaguagcugggacuacaggugcccgccaccaugcccggcuaauuuuugguauuuuuaguagagacgggguuucaccgug

SEQ ID NO: 4126248 - RNA, 58 nt, Human
cauucucuugacaggacagcccccuugcccuaucuggcuccccaugugaggagcgaug

SEQ ID NO: 4126249 - RNA, 101 nt, Human
cauucugacuguucaaccaguagcagagauacggaaccugacuagggucaauuucaaaccucauucaggucuguacuauugucuugcuguaacuaagaaug

SEQ ID NO: 4126250 - RNA, 93 nt, Human
cauucugagagccuucugaguuguaucauacauggauaauuugcauuaugaguuuuauccacguaugauaaaacucugaaggcuuucaaaaug

SEQ ID NO: 4126251 - RNA, 76 nt, Human
cauucugcauuuggaaggggcaggguagaaagaauggaauaugacgcuugcagacacauccuuuaucagcagaaug

SEQ ID NO: 4126252 - RNA, 64 nt, Human
cauucugugcuuuggggcuucagaugggacugacuagggcugggacacccagagcugcagagug

SEQ ID NO: 4126253 - RNA, 111 nt, Human
cauucuguguuuuuaugcuucuauuaugcauaugucugaauccauacgugauugauaacauuguuuuauauguuuuaaauauguguguaaaugguauauuaaugugguuug

SEQ ID NO: 4126254 - RNA, 94 nt, Human
cauucuuauuaaaugcucuaugcuaauauuagcuucuuugacuauuuuauuucagguuuuuaaguuuuauuggcuauagcacuucuugagggug

SEQ ID NO: 4126255 - RNA, 57 nt, Human
cauucuucaguccauaaguauucagagcacccacugugugcugagggcugggcaaug

SEQ ID NO: 4126256 - RNA, 84 nt, Human
cauucuucucuggucugccaccuucauccuccacuugcagccuccuuugcagugaccauacaggugcagagcaugagcaggaug

SEQ ID NO: 4126257 - RNA, 60 nt, Human
cauucuugcaccgugauggcuuuugacaaauuaaacaaagggugcauguuugcaagagug

SEQ ID NO: 4126258 - RNA, 94 nt, Human
ccagaaaccugaacacuggcuaugagggagauggggguuggaggagaucuugugcccuccaccaugguuaagugaauugaauuuagguauuugg

SEQ ID NO: 4126259 - RNA, 74 nt, Human
ccagaaagagcuguugucugcuuacuguucccaucuuagcaggaggcaguaugacuacaaacagcuuuuccugg

SEQ ID NO: 4126260 - RNA, 80 nt, Human
ccagaaauacucagauucacugccucccuugcaagaaugaggguggggugagggagagcaggguccugagauacuucugg

SEQ ID NO: 4126261 - RNA, 70 nt, Human
ccagaaccuuucuuuccuuggucugagcucccgacccacccccugucuggacuggagagaggaagucugg

SEQ ID NO: 4126262 - RNA, 84 nt, Human
ccagaacgaggaaggagcggaguugggauuccagcccaguuggacgcugaagucccuguuuuguuuacugccuccuguucaugg

SEQ ID NO: 4126263 - RNA, 90 nt, Human
ccagaagcgaggaagaggcaaggcaggauucuucucuagagccuccagagacagcaugagccugcugaugccuuguuuucugauuucugg

SEQ ID NO: 4126264 - RNA, 61 nt, Human
ccagaagcugcagugaucugggagcacacgcagugaucugggagcacacgcagugaucugg

SEQ ID NO: 4126265 - RNA, 92 nt, Human
ccagaagcugggacaaaggcauggaacagauucuccccuagagccuucagagggagcgugacccugccaaugccuugguuuuggacuuccgg

SEQ ID NO: 4126266 - RNA, 71 nt, Human
ccagaagggcuauugcagugacuggaaaacaguaaaagcuccucucacuagcuucacuagcuucccucugg

SEQ ID NO: 4126267 - RNA, 55 nt, Human
ccagaagucaaguaagaugaagauugaaaaauguccauuggacuuggcuucaugg

SEQ ID NO: 4126268 - RNA, 66 nt, Human
ccagaagucaggaaugagucuuacagggcugaaaauaaaaguguugacaggacuaguuccuucugg

SEQ ID NO: 4126269 - RNA, 59 nt, Human
ccagaauaguuucauugugccuucuucugagcagagacaguguaauguaauuguuaugg

SEQ ID NO: 4126270 - RNA, 66 nt, Human
ccagaauccccagccagcuugcuucccaguagccucugccaaugggagacacuggugggagcuugg

SEQ ID NO: 4126271 - RNA, 88 nt, Human
ccagaaucugcuaccagacgggacuuaucacagauguagagaucugaaaaauaacagauauauauuauaagcccuuucagaauucugg

SEQ ID NO: 4126272 - RNA, 69 nt, Human
ccagaaugcagugagaagcaguuaugauuugcaguugucaaaucauauaguugucacugcuaaucaugg

SEQ ID NO: 4126273 - RNA, 61 nt, Human
ccagaaugugugaaauuugauguaguccuucuuggcuucguuuuuuccucagauguucugg

SEQ ID NO: 4126274 - RNA, 70 nt, Human
ccagacacaccccugggcugggcacacaguuccuuauuuggguuuugugguuuucccaggugguagcugg

SEQ ID NO: 4126275 - RNA, 73 nt, Human
ccagacagccggccugagccaagagucagaaucuggcuaugaaagccaggugacuggcuggggcuggagaugg

SEQ ID NO: 4126276 - RNA, 62 nt, Human
ccagacaucuugguugcagcuuguucagacccugagcagagaauccagcuaagugugccugg

SEQ ID NO: 4126277 - RNA, 75 nt, Human
ccagaccacuagucucaugacagcccaacagcgugaggcccauggcagcuggcugcuguugagacuuguguuugg

SEQ ID NO: 4126278 - RNA, 56 nt, Human
ccagacccugcaggugauguguagcgcccagucucaggcaccaauagggaucgugg

SEQ ID NO: 4126279 - RNA, 80 nt, Human
ccagaccuuguuaucuccguguccuugugauaauucagaaauggaaaugaaugaacacaggccugggguacaaguucugg

SEQ ID NO: 4126280 - RNA, 60 nt, Human
ccagagaaaaaugugucccuguguaggcaacugcccugaggaauguauuauuccuucugg

SEQ ID NO: 4126281 - RNA, 57 nt, Human
ccagagaaagugaagcaaaugugugagguugcguuuguuagcauuuauuuaaucugg

SEQ ID NO: 4126282 - RNA, 66 nt, Human
ccagagaaauaaggggaaaauggcaaauaaugauaaaggcaucuuuccccuaguuaguuuuucugg

SEQ ID NO: 4126283 - RNA, 80 nt, Human
ccagagaaggcagagauaaguagacaggaugagucagcugccuuucuuaccuacaaguuauuccauuucugccaacuugg

SEQ ID NO: 4126284 - RNA, 58 nt, Human
ccagagagaguagaaguuuccaagggcuugugugccaagcauucugcuucuuuccugg

SEQ ID NO: 4126285 - RNA, 73 nt, Human
ccagagaugugauccuuugcuguguaaguuauguuuucuaauaaaaaugauacagaugggucagauuucaugg

SEQ ID NO: 4126286 - RNA, 81 nt, Human
ccagagcauguggagucuuugaggaauuucauagucuugguaccuuugaauauguuccucacaaguucucagaaugugugg

SEQ ID NO: 4126287 - RNA, 56 nt, Human
ccagagcucuuugauccacugccaggccucgggcaauggagccaaggugugucugg

SEQ ID NO: 4126288 - RNA, 55 nt, Human
ccagagcuugaauccaacaaagacugauaugggcagucuuuagccagagcucugg

SEQ ID NO: 4126289 - RNA, 83 nt, Human
ccagaggccuaaucacuggaggucaguagacauauaaguuuccaucuuaauuaauuauuugccuguaagacaaggccuugugg

SEQ ID NO: 4126290 - RNA, 58 nt, Human
cauauauuuugaauagccucugugauuuuuugggggugacaggggcagcacaauaaug

SEQ ID NO: 4126291 - RNA, 117 nt, Human
cauaucaaaauugcuaugucaaaauggccacuuugauaaaauuuuauagcaaacuccuagagaaagcaauaguauuuauuaaaguagcuuccauggcacccuaguucuuuugguaug

SEQ ID NO: 4126292 - RNA, 59 nt, Human
cauaucagcccaagcaaugggcucugguggaacuuccaggcuggugggggcuugacaug

SEQ ID NO: 4126293 - RNA, 64 nt, Human
cauauccuggcugcaccagugacccuucuuauccagaggggaaaucuuaguggagcugguuaug

SEQ ID NO: 4126294 - RNA, 77 nt, Human
cauaucuccugugaauugcaacaauugcaacaauauuguugaauauugaagcaauuuuccaguccugcagggauaug

SEQ ID NO: 4126295 - RNA, 93 nt, Human
cauaucugauaagaaauucccugcagcagcacuuaggacuuagcuugaaagcugcccaguggaauuauaaucuguccaaacucugagaaugug

SEQ ID NO: 4126296 - RNA, 67 nt, Human
cauaugauguaugacuguguucaaacuacagugguagaguuugaauaguugcaacauaaaucauaug

SEQ ID NO: 4126297 - RNA, 55 nt, Human
cauaugccugcaaauaccaguaauuggccuuacagugugaauaagcaggcauuug

SEQ ID NO: 4126298 - RNA, 71 nt, Human
cauaugggugaaccuugaaaauauuauguugagugaaagaaaccagucauaaaaggaccaccuauuguaug

SEQ ID NO: 4126299 - RNA, 77 nt, Human
cauauguguauauauagagugugcauauuuauguguguguuuacacagauguacacucauauauaauugcacacaug

SEQ ID NO: 4126300 - RNA, 63 nt, Human
cauauguuuagauguuguuuugugguuuguuuuucacaaauuacccucaacaucuagaugaug

SEQ ID NO: 4126301 - RNA, 92 nt, Human
cauauuaaaguguagcucuagaucauaggucauuauuauagucuguaaaaauuucaaaguaguuccagaucauagagcauuauuguagucug

SEQ ID NO: 4126302 - RNA, 111 nt, Human
cauauuagaauuacauccauuuucucccccuuagcucuugucuuuuuuucagagcauaaaauggaggagaugagaggaaggggaagggaagaaacuugcuuuucuaaaaug

SEQ ID NO: 4126303 - RNA, 55 nt, Human
cauauuccgguguguggguccccagugcugacuggggacuacaauuugcagugug

SEQ ID NO: 4126304 - RNA, 55 nt, Human
cauauucuguuggucacauagagcaacccuaguaugaugugggaaagagagugug

SEQ ID NO: 4126305 - RNA, 119 nt, Human
cauauugaacaucuguucuauaccaggcauaguguuugacacugagauaaauaaaacgaaaaaucuguuuuaagaagugcagaggcuuguaaggaauaaaauauaaaaaguuuaaugug

SEQ ID NO: 4126306 - RNA, 64 nt, Human
cauauugacaauucuaugcagagcaaagcuuccaaaaaggcaugcuaugaauucugucaaugug

SEQ ID NO: 4126307 - RNA, 97 nt, Human
cauauuuggagugucugauaaaagauauuuggaaaucaaagagcugauguaauucaaucuuugauuugacaauaucuugucagaaaugcuaaguaug

SEQ ID NO: 4126308 - RNA, 130 nt, Human
caucaaagcugcuucgcaagcccccucauuagcagggcuuaucugggggagcugcucauggaguccucgcugcucaugcccacagcccucccagagugcuaugcgaguggcugccgugcaguugggggug

SEQ ID NO: 4126309 - RNA, 59 nt, Human
caucaaagcuuuuuucuguguugggcauauacccaacacacacagacucagcuuggaug

SEQ ID NO: 4126310 - RNA, 63 nt, Human
caucaaauaggaauauuuggcaaaugagucugguguuuauggaucaaauguuucuauuuguug

SEQ ID NO: 4126311 - RNA, 83 nt, Human
caucaaauauaucaguggucacaagauacauauaggcccaaaagaggcuucaugaugauguugccaucaugguguggguggug

SEQ ID NO: 4126312 - RNA, 89 nt, Human
caucaaugggccugcuuaacaaugaaauguaucuaguuucuguguuuauuaucugaaaucaugaacaagguaggugaguagcccuggug

SEQ ID NO: 4126313 - RNA, 78 nt, Human
caucaauguacugaagguggggccagaaaaauaguacuuaauuacaguacuauguuucuuccuuuucauacaucuaug

SEQ ID NO: 4126314 - RNA, 70 nt, Human
caucaccaucagcagaugcucaaugaacaccuccuauuugggugugacauccuguugugugcuugugaug

SEQ ID NO: 4126315 - RNA, 78 nt, Human
caucaccugccucccaguuuuucuccacuaaggcaaucaugguugccuuagggacuaauagacugucaccagguuuug

SEQ ID NO: 4126316 - RNA, 57 nt, Human
caucacuacaaauuuaagaaauagcuacaguuaauucaguagauauuguagugaaug

SEQ ID NO: 4126317 - RNA, 64 nt, Human
caucagaaagaguccuggacuugacaucagaaaauccacauucaaaucuaggcucuuuucagug

SEQ ID NO: 4126318 - RNA, 64 nt, Human
caucagaaucugagucucugcccuaaaauugcucagucucgugggagagauagcauauucugug

SEQ ID NO: 4126319 - RNA, 75 nt, Human
caucagagccguuucaaagcacagcucacauugcaccuucuacugcgagccuucugcuuuggauuugcuuuuuug

SEQ ID NO: 4126320 - RNA, 83 nt, Human
caucagauuaaucuuuauuuauugagcacuuaauguauaauggacacugugcuaggugcuugggauaaguggaggacauggug

SEQ ID NO: 4126321 - RNA, 60 nt, Human
caucagcuuuucuauguggugaccagcacugucaguuuaauagccaccaaaaagcugaug

SEQ ID NO: 4126322 - RNA, 55 nt, Human
caucaggaaaggacgucuagccagcuguguugucggcccacuccccuuccugaug

SEQ ID NO: 4126323 - RNA, 57 nt, Human
caucaggauaaguuccagguggguggugcuuugcucaaccuggugugugccugugug

SEQ ID NO: 4126324 - RNA, 88 nt, Human
caucagggagaauuaagccucuuauuuuuaaacuguauuugccauugcaaaagcaguuaucugggaggaauuuaaaagcuucuuggug

SEQ ID NO: 4126325 - RNA, 94 nt, Human
caucagguagaaaugggcuuagucuccacagguccagcaggauggccuggggccugccccugggccugggaggccaggucuucaccaaccuaug

SEQ ID NO: 4126326 - RNA, 55 nt, Human
caucaguguguugccuugcucagacaccugggaugggaguugucugccauuggug

SEQ ID NO: 4126327 - RNA, 68 nt, Human
caucaucucucugaaucuguugucucauucccaaaauuggcaaaagaugccuaacucagaagaugcug

SEQ ID NO: 4126328 - RNA, 59 nt, Human
caucaucucuggcccuugaaguccccaagacagagagguaauacaaggccugagaugug

SEQ ID NO: 4126329 - RNA, 60 nt, Human
caucauuaccuuguaaccaauaguucaggauccugagguagcuggcuauaguuagugaug

SEQ ID NO: 4126330 - RNA, 120 nt, Human
caucauuucauaacguaaguaaaauagagagggagugaaauggaauagagagagaauaaaacucccauuacucuguggcuauuugauucucuauguauuuuauucacauaaugaaugaug

SEQ ID NO: 4126331 - RNA, 82 nt, Human
cauccaaucaugaaauauucaccacccacuuccugugugccaagcacugaggcugggcugaggguauagagagauaaagaug

SEQ ID NO: 4126332 - RNA, 62 nt, Human
cauccacucguuuaaaaauaucauugcuaccacugggacaccaaugaaugaacgaauggaug

SEQ ID NO: 4126333 - RNA, 61 nt, Human
cauccagcaucugcacugcagcgugcuccucguccagcacacuguggugugagggcugaug

SEQ ID NO: 4126334 - RNA, 68 nt, Human
ccaaacuuuugaauaccuugucucauguuaaugggaaacugagcaagaugaaggauucaagacgaagg

SEQ ID NO: 4126335 - RNA, 66 nt, Human
ccaaagaauuuggaaaaucugauggugugagcagcagccguuaguaucaggguuucccauucuugg

SEQ ID NO: 4126336 - RNA, 77 nt, Human
ccaaagacccagccugguuuuuauaggccagacauaaaucugagaaaguguuuauaaaauagacugggucuaucugg

SEQ ID NO: 4126337 - RNA, 58 nt, Human
ccaaagagcuagaauuauaggcaugagccaccacacccagccuauaacgguuuuuugg

SEQ ID NO: 4126338 - RNA, 76 nt, Human
ccaaagauauuaguugcuguuucuaccuaguuauuuaaauaaaauggcuuuuaaaaauagcauuuaauugagaggg

SEQ ID NO: 4126339 - RNA, 71 nt, Human
ccaaagccuaugcuguuugagcaaaaugccgagaaaagggagcgucacagacucaagggcauaggaucugg

SEQ ID NO: 4126340 - RNA, 65 nt, Human
ccaaagcuguccucucauuguuuguagcuacucccauuaucaacaugaagguaggaugguuuugg

SEQ ID NO: 4126341 - RNA, 58 nt, Human
ccaaaggccaggcacugagguucuggccuguuucucugcuucuggggccuggccuugg

SEQ ID NO: 4126342 - RNA, 69 nt, Human
ccaaagucaauacagcucguuaguuuuuagugauagggucaguaaauaacucagaugcucugacucagg

SEQ ID NO: 4126343 - RNA, 59 nt, Human
ccaaaguccauaguuugcauuagggcucacucuuggccuuguauauucuguggguuugg

SEQ ID NO: 4126344 - RNA, 60 nt, Human
ccaaaguccuuucuccaccugcaaagccaaauauguggaggccgagaacagggacucugg

SEQ ID NO: 4126345 - RNA, 58 nt, Human
ccaaagugcuaggauuacaggcaugagccacugcauccagccaucccaagcauuuugg

SEQ ID NO: 4126346 - RNA, 58 nt, Human
ccaaagugcuaggauuacaggugugagucaccacgccuggccuccgcguggccuuugg

SEQ ID NO: 4126347 - RNA, 129 nt, Human
ccaaauacagcucuggcuuagcaagaguuccauucugcgauccucaagcacauaagcggcauguaaacgcuaaugacucugggccuaccucgcugucccuacucucauccggggccuacccuguguugg

SEQ ID NO: 4126348 - RNA, 116 nt, Human
ccaaaucugugggugacuagauguccuguguaagccaggacaauccugagaaaucauggucauugucaaccguggccuacacuugaaagguauggcauguccccauuuucccuugg

SEQ ID NO: 4126349 - RNA, 61 nt, Human
ccagagucugcagcuacugugguguuggggaugagcugccagcaccaaaugcaggcucugg

SEQ ID NO: 4126350 - RNA, 129 nt, Human
ccagaguuugcugguggaccucaggauucgaagugugcaacagacggagugcgcuugcuguucagggcggccccgugcaggagcaccagcucacccucaggcaucucggacuggagggccagcagaagg

SEQ ID NO: 4126351 - RNA, 91 nt, Human
ccagauacaagugaauuuaagcccacauguauugaagcugcaagcuuaguuugcaauuuaugugcaagugguuuuguauuuauugaucugg

SEQ ID NO: 4126352 - RNA, 62 nt, Human
ccagauacuccuucccagucaacucaauuaucugcaccaaugaacugggaaaaaggcacugg

SEQ ID NO: 4126353 - RNA, 86 nt, Human
ccagauccauuuucuucucuaaucucaaugaucucaucuauaaagacaaguuggucuaaggguuaggaacgacagugcaggucagg

SEQ ID NO: 4126354 - RNA, 88 nt, Human
ccagaugacaggugcuguguaaaaaugaagcaaguuuuucauguucuauaaaacaugauaacuucauuacacaauagucagaguaugg

SEQ ID NO: 4126355 - RNA, 60 nt, Human
ccagaugagaccacacugcuggaaagacuuccugcucagauaguggguggucucucacgg

SEQ ID NO: 4126356 - RNA, 63 nt, Human
ccagaugcagcaaaaugacaggcuaaagaacaugugaaggcaugccuuuaauuugcuauuugg

SEQ ID NO: 4126357 - RNA, 73 nt, Human
ccagaugccagagccccaggacagcucuaguugccccagcggcuacaguggcacugggcuuuccuggcacugg

SEQ ID NO: 4126358 - RNA, 70 nt, Human
ccagaugccaggugacaguauggcucacguguggguuuguguccaccuuggcccugucccuggagccugg

SEQ ID NO: 4126359 - RNA, 87 nt, Human
ccagauggcgucaccucaguuaccauggcuugguccaagcagugacuucuguucaugggcucuggaauugaguggccaaaaaucugg

SEQ ID NO: 4126360 - RNA, 68 nt, Human
ccagauuaagucuugugaacuguuugaucuuucauuuuucauucuguucaguuccacacuuuaucugg

SEQ ID NO: 4126361 - RNA, 94 nt, Human
ccagauuauccaggauaaucauaucugaaaaaucuccuuugucaugaaagguaacauucacagguuucaggaaugaggaccuggauauauuugg

SEQ ID NO: 4126362 - RNA, 103 nt, Human
ccagcaaaauauccggagagagaugauguuuacuaugauguaaccuauguauaugcauacauuaccuuuuggaaaauuguauauucucugcauccccuuuugg

SEQ ID NO: 4126363 - RNA, 77 nt, Human
ccagcaagcaggcaugggaggccauccuauuggggaaagaugaggaugccaucagagugucuguguacaagggcugg

SEQ ID NO: 4126364 - RNA, 65 nt, Human
ccagcaagugcaugguauggucuccauuccugggugcauugauguggccugccaugcccugcugg

SEQ ID NO: 4126365 - RNA, 58 nt, Human
ccagcaagugugcacauacaugguuacugauaaucaggagugugcacuuugauccugg

SEQ ID NO: 4126366 - RNA, 100 nt, Human
ccagcaccucaaauuauuuaggcuugcaauuaggauggaaaguggacaaaugccacauuccauccuauuuguaugccuaaauaaugugcaggggugaugg

SEQ ID NO: 4126367 - RNA, 61 nt, Human
ccagcacuccugucucaagucuacauugucuacauugguguuugagauuaggagagccugg

SEQ ID NO: 4126368 - RNA, 64 nt, Human
ccagcacugaguggagaaucaauuugagccugggaaggcccggccauccaucucccuuugcugg

SEQ ID NO: 4126369 - RNA, 71 nt, Human
ccagcacuuccuggaguaaguuaagauguuccugcuuuggcccucagggaauuggacacuccagguguugg

SEQ ID NO: 4126370 - RNA, 63 nt, Human
ccagcagcagcguccaaggagaauggcagaagcugaggugcccuguggaggcugcucagcugg

SEQ ID NO: 4126371 - RNA, 57 nt, Human
ccagcagcccacaggcgucccuugucagcaaaaagcacccuggaaauggguggcugg

SEQ ID NO: 4126372 - RNA, 57 nt, Human
ccagcagggaaaaacccaccaacagaauuagugggacgcugggggacucucugcugg

SEQ ID NO: 4126373 - RNA, 68 nt, Human
ccagcagggaaauucaguuucuguccugggaggaaacagacucucauggaaagacuuggaugagcugg

SEQ ID NO: 4126374 - RNA, 70 nt, Human
ccagcagggacauaagaggaacauggaacaccuaaaggcuaguccagcugugucauuuggguccuucugg

SEQ ID NO: 4126375 - RNA, 55 nt, Human
ccagcaggggaauauuuuuaggggaaauacuucccuaaaaacauaacaccucugg

SEQ ID NO: 4126376 - RNA, 99 nt, Human
ccagcagguggucugcagagagaccccugggccagcacagguugaaucaauugucacugagcaguagagggucucuuuaggacacuuaggucugucugg

SEQ ID NO: 4126377 - RNA, 56 nt, Human
ccagcagucagguggagggaaugagaacuacagcucucccugccuuuuacugcugg

SEQ ID NO: 4126378 - RNA, 69 nt, Human
ccagcagucggaucugagccuguacauggaagacaucacgucauucuccugcucagagucccccugcgg

SEQ ID NO: 4126379 - RNA, 70 nt, Human
ccagcaguguggguagggauguagguaggugcauaguuagcugcucuccugcucccaacugcugcacugg

SEQ ID NO: 4126380 - RNA, 62 nt, Human
ccagcauagaucugucauauccuguugucagcggcagagugggugggcagaugugugcaugg

SEQ ID NO: 4126381 - RNA, 72 nt, Human
ccagcaucuguccuuucccucacaccugagaggaugggaggagacgaggacagcucagacugcaagugcugg

SEQ ID NO: 4126382 - RNA, 57 nt, Human
ccagcaugagaaaaugaaucagacgaugaccgcuuugagaaaugggcucugugcugg

SEQ ID NO: 4126383 - RNA, 94 nt, Human
ccagcauuuaggagggucuggcagucacuuuugcuugugcccugugguucacaugucugucuggcaugagugagguggguugaccucuuucugg

SEQ ID NO: 4126384 - RNA, 63 nt, Human
ccagccaccgcuuguuugcacucacaaguaaauugaugccgacaaccuggagcggagggcugg

SEQ ID NO: 4126385 - RNA, 56 nt, Human
ccagccagaaccacuggaacggugauucuuccugugaccacucugguucugcuugg

SEQ ID NO: 4126386 - RNA, 63 nt, Human
ccagccagagaggaaggaaugcacaguuucccuuugacggugagauuuccugcuucuuguugg

SEQ ID NO: 4126387 - RNA, 80 nt, Human
ccagccccacggcuucagucucaucaucgccugggcuggaguuuauccggugagauggaugaggccaggaaggggucugg

SEQ ID NO: 4126388 - RNA, 57 nt, Human
ccagccccuugaccuccuguccgggacuccauccacugaaccaggacaaggggcugg

SEQ ID NO: 4126389 - RNA, 87 nt, Human
ccagccccuugguuuagagagugugguuaccaggcaacuguuguucucuucucagccuuugugaccucuuucugagccuacgguagg

SEQ ID NO: 4126390 - RNA, 82 nt, Human
ccagcccuggcuuggaagccaccagauacucagcccauuguugccucgugacugggcagaucuuugguggcuaggccacugg

SEQ ID NO: 4126391 - RNA, 79 nt, Human
ccagcccugguccaucagugcagacuguaaguuggaaugucauaaucauguaacacaacugcuugagguccagaguggg

SEQ ID NO: 4126392 - RNA, 127 nt, Human
ccagcccuuagggggccugaggcuugcgggaccagugcuguugggcccagagagagaaccccuuuccucugcaguguuggcgagcccacuguguccugucuggcucugugccccccagcaggcuugg

SEQ ID NO: 4126393 - RNA, 73 nt, Human
ccagccgggccuauaccuugagcagggcggcccccacgacaggacaggagcagcccugagggugccaagcugg

SEQ ID NO: 4126394 - RNA, 89 nt, Human
ccagccuucgguggggugcggcagggggccugccuccaccaggcauagcauggaggccaccugaccugcuguuuccuacaugacccugg

SEQ ID NO: 4126395 - RNA, 56 nt, Human
ccagccuugcaccgagccagcccagccagggaagaguggagaggaggcaaggcugg

SEQ ID NO: 4126396 - RNA, 56 nt, Human
ccagcgcuucccaucagggaggacugcuuauaacucccuggauggaggagcccugg

SEQ ID NO: 4126397 - RNA, 57 nt, Human
ccagcguaaaccauaaaaguagaauuuguauaaggauucacagggugguuuaugggg

SEQ ID NO: 4126398 - RNA, 60 nt, Human
ccagcucagggucacauggcacauggcucauuugaggcagagccuguggcuugauguugg

SEQ ID NO: 4126399 - RNA, 62 nt, Human
ccagcucagggugcagcacaguuccuggagcugcaggagaacggcaccccaugggcuacagg

SEQ ID NO: 4126400 - RNA, 60 nt, Human
ccagcucaucucagugaaaugcccucaguccaaugaacacauucucaggagaugccuugg

SEQ ID NO: 4126401 - RNA, 63 nt, Human
ccagcuccaggucagugcaccccuguguuccacagcaggggagccccugguccugguggcugg

SEQ ID NO: 4126402 - RNA, 63 nt, Human
ccagcuccugaaagcuuugcuucuaagagugugcaccuuugaaagcuacuuucgggucacugg

SEQ ID NO: 4126403 - RNA, 87 nt, Human
ccagcuccuggacagagguggcaaggcggggggacucaaaggucuuugagggacucccggcccugccagccacguuucaggcccugg

SEQ ID NO: 4126404 - RNA, 59 nt, Human
ccagcugcuaucaugccauuucuuggaaaaugccugaaauucuguuaugguagaguugg

SEQ ID NO: 4126405 - RNA, 78 nt, Human
ccagcuggucuagaugcgggcagggaccuugucuguuuucacucaucucugcguccccagcaucgagcacaugucugg

SEQ ID NO: 4126406 - RNA, 56 nt, Human
ccagcugugccguguggauagcguuagauuccgcagcuuuccaccugcgcugcugg

SEQ ID NO: 4126407 - RNA, 59 nt, Human
ccagcuguuucugaugcuaggcaagacacguucugccagugagcaacagaaacauaugg

SEQ ID NO: 4126408 - RNA, 83 nt, Human
ccagcuuaugugaucuugggcaagucccugcccucccuggaacgaagggccagggggcuggacuuucccacacaacuugcugg

SEQ ID NO: 4126409 - RNA, 81 nt, Human
ccagcuuggucgcugcuguguugccagugucaccuuucuggagccagguggcucucuuaagggcagcguuuggucagcugg

SEQ ID NO: 4126410 - RNA, 62 nt, Human
ccaucauuucccgagagcccaaauagaacgcagugugagugugugugggugcugggaugagg

SEQ ID NO: 4126411 - RNA, 74 nt, Human
ccauccacguccucugcuucaugcccugaugcguguuucugcaugaagggacacggggcaggggagugaggggg

SEQ ID NO: 4126412 - RNA, 79 nt, Human
ccauccaguaagugugaggacugugcuaagugccaugagaaacucaggacacacugcaagagccuggcacuuacugagg

SEQ ID NO: 4126413 - RNA, 88 nt, Human
ccaucccaaaugcuuuuuuuacaaugugauguugacauuucuccaucaagaggugggucaguguuacauuauauagaacuuggggugg

SEQ ID NO: 4126414 - RNA, 55 nt, Human
ccaucccauuagaaaaaggucacacaucuuuggccccuuuuaauuucaggggugg

SEQ ID NO: 4126415 - RNA, 62 nt, Human
ccaucccccaucugguagggcauaguguuaagcugccugccuggagacagauggaggagugg

SEQ ID NO: 4126416 - RNA, 79 nt, Human
ccaucccucugcugugucccuggucuccuggcucuccacuaucuuacugucagccccagcggucaggcagcugggaugg

SEQ ID NO: 4126417 - RNA, 89 nt, Human
ccaucccuuuccuugagagccacugucuugguguaaugugaccacacugccuagucucaggagcaggggcuaaucuggggauggggugg

SEQ ID NO: 4126418 - RNA, 94 nt, Human
ccauccuuauccuccuaucccacagauccaauacacaugucaaggguuucaaauccugugcaauguugagguuucaggagaggggcagggaugg

SEQ ID NO: 4126419 - RNA, 69 nt, Human
ccaucguggaacuauggaccuagaguuggcaauggagaaaauagcuaccuagaaauacguuuuacaugg

SEQ ID NO: 4126420 - RNA, 120 nt, Human
ccaucguuauuacaguguugggugagagaaccuguuuauguuaccugcgacauuaugagaaaugcagauguaggaaaauaaacguauuuggcuuaguuucacaaagcaaauuuaccaugg

SEQ ID NO: 4126421 - RNA, 80 nt, Human
ccaucucaacuuggucccaggcucuucaaggaagacugcaaaaagggcaggauuucucuagcuuggacaaggcagggugg

SEQ ID NO: 4126422 - RNA, 66 nt, Human
ccaucucaauccccacaccccuggcccaguggucagagcuguggucacuguuggggaaugaggagg

SEQ ID NO: 4126423 - RNA, 75 nt, Human
ccaucucguuggcuggaacauuugcuuuuggagcccaaagcugccaugcaagaaguccaaccaucccgagguugg

SEQ ID NO: 4126424 - RNA, 80 nt, Human
ccaucucuuaagucuuugcuuuaaucauugagaguugaauauauccucucagauuucaaugugagcauuagugaguaugg

SEQ ID NO: 4126425 - RNA, 58 nt, Human
ccaucugacugccacccaggccaaggaccauccuuguaaacugggggggcaucagugg

SEQ ID NO: 4126426 - RNA, 63 nt, Human
ccaucugauaugugugggcucauacagaaaacaugcuguaaugugaagacauaaaucagaugg

SEQ ID NO: 4126427 - RNA, 99 nt, Human
ccaucugcugagggugaggggccuguggugcgcuauuucagacaccugcagguagacuggggucagggaucagagagcuccauaugcucagccuccugg

SEQ ID NO: 4126428 - RNA, 59 nt, Human
ccaucuguaggugacacaugagugaucaagcaggugcucauuuacagauuuacagaagg

SEQ ID NO: 4126429 - RNA, 74 nt, Human
ccaucuucaguuccuaagcacugugcauucuuuacuguagaagaauaaauguuggacuuaggaaagaagaaagg

SEQ ID NO: 4126430 - RNA, 72 nt, Human
ccaugaccauaccugggccugaagugacaaggaaaggaagcauuguugcuggagagggcuggauggccaugg

SEQ ID NO: 4126431 - RNA, 59 nt, Human
ccaugagauccuaugaugugauaguuaauuugaugugucaucuucacugggucacaagg

SEQ ID NO: 4126432 - RNA, 69 nt, Human
ccaugauggcaccagcaccuagauggggccucaauagguagcuguugaaggugguggugcaaagugugg

SEQ ID NO: 4126433 - RNA, 61 nt, Human
ccaugcaaagaaugugggcauagguggauaacggugacuaaaucccacagaauuugugugg

SEQ ID NO: 4126434 - RNA, 57 nt, Human
ccaugcagaaacugccagugggagugauguccgagucccacuggacgucugugcugg

SEQ ID NO: 4126435 - RNA, 63 nt, Human
ccaugcagcugaagaaagagugguuagaugaauguguccagcccccuuucuugagcucuuugg

SEQ ID NO: 4126436 - RNA, 113 nt, Human
ccaugcagucauucucaaaagggacaaucuggcagcucuccucggcggacucauccugugcaugguccuccaggguggcggcugccacuucuugguugguuuucuucucgugg

SEQ ID NO: 4126437 - RNA, 82 nt, Human
ccaugccugcucugcuccgcuguggcugccuggggauacggacgucucugcaccaagcccagcuggagaaggaaggccaugg

SEQ ID NO: 4126438 - RNA, 64 nt, Human
ccaugcucccuggaccugcauguccccaucggugaccuacauggauggagguccaggaguaggg

SEQ ID NO: 4126439 - RNA, 65 nt, Human
ccaugcucugggcuuuugaaguggcugaugacaucacuaguuuguuuacucagauaaaugcaugg

SEQ ID NO: 4126440 - RNA, 59 nt, Human
ccaugcuucucuuuuccucaccuaacucaagguagaaucugccuagggcgggaagcagg

SEQ ID NO: 4126441 - RNA, 58 nt, Human
ccauggcaauggucagucuauucaaacauaagccuggcauggugcuggccucccaugg

SEQ ID NO: 4126442 - RNA, 65 nt, Human
ccauggccaggaaagccaagguaaagcuccccagggucaaggagcccagguauccuaggacaugg

SEQ ID NO: 4126443 - RNA, 124 nt, Human
ccauggcuauguuauuucucauuuuuaguggaguaaaauuauguggugguuuauuuaagaaaaaauuuuugacauuuucuucaguaacacaaaccauuaccacugugugggaaaacugaccagg

SEQ ID NO: 4126444 - RNA, 68 nt, Human
ccaugggaacguauguugggaauauuguuccagccacugcaaaagggcucccagcauugcuucccagg

SEQ ID NO: 4126445 - RNA, 63 nt, Human
caucccagaucccagccugcagaauaaagauaacuaaacucugacagguugggauauggaaug

SEQ ID NO: 4126446 - RNA, 68 nt, Human
cauccccaugugcugggauuacaggcaccuuguaaucugccaguuuguccccauggccaugugagaug

SEQ ID NO: 4126447 - RNA, 64 nt, Human
cauccccuugugggcuggcagcauuuuugcuaacacugccuuaaaugaugcuacuggcaggaug

SEQ ID NO: 4126448 - RNA, 63 nt, Human
caucccugauuccuaguacagucaaaccugcguuuuaggccaugguggguacagggagggaug

SEQ ID NO: 4126449 - RNA, 74 nt, Human
caucccugguuccuguguuuaaauucuacauuacaagacuagaugcugagaaggaagagggaaagccagggaug

SEQ ID NO: 4126450 - RNA, 74 nt, Human
cauccuaagaacauuuccgaggguuugccaagggucaaucaugauuccaggcucccuuggagguguaaggacug

SEQ ID NO: 4126451 - RNA, 72 nt, Human
cauccuacagcaguuaugugucucuugacuucgauuuauucacuaaaauaguuugcauauaauugaugggug

SEQ ID NO: 4126452 - RNA, 121 nt, Human
cauccuagucucagauugugugggcccuguauccaagucccaucuguuaaauuuucuaguaagucccucugaaaagaagaugggaauugggcugggcgccagccauauaaugauuaagaug

SEQ ID NO: 4126453 - RNA, 63 nt, Human
cauccuccaacuccaugguucucagauucugucugucagaugaaaggggaccauggugugaug

SEQ ID NO: 4126454 - RNA, 62 nt, Human
cauccugccucagcugaggccgcuccacacaggugagcaggcgcagcaggagguccaugaug

SEQ ID NO: 4126455 - RNA, 98 nt, Human
cauccuucucucaagacagcucucggggcguggauggucagugcaggccggcagcaccgccugucucccauccaccccgagccuguucauccagggug

SEQ ID NO: 4126456 - RNA, 59 nt, Human
caucgacagccaagucuucuauuucagaauauugauuuauuucgcuuuggcuuuugaug

SEQ ID NO: 4126457 - RNA, 66 nt, Human
caucgcucagcaagagaggcagccugugauccugguuucauggcauuguccugcuucugaguguug

SEQ ID NO: 4126458 - RNA, 63 nt, Human
caucuaaguuuucuggaauaacuuggagcauuuugugcuuuuguuauuacaugaaacuucuug

SEQ ID NO: 4126459 - RNA, 71 nt, Human
caucuacuuauugugagguauugagauucacucaguagugaagcaaacauauauaguaagaucccuggaug

SEQ ID NO: 4126460 - RNA, 65 nt, Human
caucuaguaagcagcagagcaggggcagauucuagaacccuggcucucaauggcuguacuauaug

SEQ ID NO: 4126461 - RNA, 72 nt, Human
caucuauguaggggaugguucccuagaaaaccgggaagaauauaaaggauuucaggguccccccuggagaug

SEQ ID NO: 4126462 - RNA, 61 nt, Human
caucucagauccaucacuggauuuucuagauuuugucuagauuuguguuugggaugagaug

SEQ ID NO: 4126463 - RNA, 89 nt, Human
caucuccuugccaggccuugugagcugucugaaggcugcuggugcugccccugcugccucugcacagcucacucaagccagggagcaug

SEQ ID NO: 4126464 - RNA, 57 nt, Human
caucuccuuucuggagccugcucagggacagauucuggaagguggaaaugggugaug

SEQ ID NO: 4126465 - RNA, 60 nt, Human
caucucucugucucauccccucugaccgccucagccagggggagagaauggagcucggug

SEQ ID NO: 4126466 - RNA, 114 nt, Human
caucugauauuuuguaguugguauacagcaaaaguuaacuaacagaguaauuacagucuuauucugugaacaugguuaaucuauuuuuuugaugccaauacaauuaaucacaug

SEQ ID NO: 4126467 - RNA, 69 nt, Human
caucugaugggaauauaagagcucugaugggaaaaggauuuggcaggucuuuuacauucagucaugaug

SEQ ID NO: 4126468 - RNA, 76 nt, Human
caucugauguuucaaagguuauacagucaaaauugaaucaaugugauuguaaugugccuuuccaaaaaagaagaug

SEQ ID NO: 4126469 - RNA, 72 nt, Human
caucugcucagugcuuaucucuaaaguuggaaggaaacuaauugguuuuuagauugauggcauuaauagaug

SEQ ID NO: 4126470 - RNA, 75 nt, Human
caucuggaacucggucuuuggccuaaaaucacaauuaugugaaaacauuuuauacuuaagacagaguuuaaggug

SEQ ID NO: 4126471 - RNA, 90 nt, Human
caucuguacaugugcaucuauaucugauaacagucuuaauuuugcccagaaagugcuuuuauuauauacaggagucaugaauguacagug

SEQ ID NO: 4126472 - RNA, 96 nt, Human
caucuguccuucuucucugugauuuucguuauggcuuggggagcauuuaugucagaaccaccaugcuaggaacucucagggaaauaaagaucagug

SEQ ID NO: 4126473 - RNA, 66 nt, Human
caucugucuucauuuaugcaauuagcaauagaaauauggugauaaacagcugaugaagaccaguug

SEQ ID NO: 4126474 - RNA, 84 nt, Human
caucuguuccuggcaccugcaggaugagccagggccuuuuacagcgaaggccuuuguuuuaaugcauugcuacaagauuggaug

SEQ ID NO: 4126475 - RNA, 70 nt, Human
caucuguuugugccaacaucucaggucccugaauguaccccuucuccugagguugaaguauaaauugaug

SEQ ID NO: 4126476 - RNA, 81 nt, Human
caucuuaauuccuagaaccucugauuauguuacuugucauggcaaaaggagcuuugcagauggauuaaggaccuugagaug

SEQ ID NO: 4126477 - RNA, 90 nt, Human
caucuuagauuugccaguguucaguaugcauuaaguguucaauaaauguguguccacuugagucugaggcuguguguuuauucucugaug

SEQ ID NO: 4126478 - RNA, 75 nt, Human
caucuucccgucuucucuuggaaaugcccucucugaucagagacggaugagguaguuuggagaagagccaggaug

SEQ ID NO: 4126479 - RNA, 87 nt, Human
caucuuccuucaauuuaaaacuuuugggugguauagcaguacagauguuaaauauuuucuguguaugacuccagaggguaggggaug

SEQ ID NO: 4126480 - RNA, 105 nt, Human
caucuucguuuuuuccgagaaucugcaucuuagucaaaaucuguuuacuugaggcagauguuuguacuaggagguaaagauggauggcugaagcaauggaagaug

SEQ ID NO: 4126481 - RNA, 70 nt, Human
caucuucugggacuucucaguuggaucaguaggaucaguugaccugaaaagaggagucuuguagaaaaug

SEQ ID NO: 4126482 - RNA, 79 nt, Human
caucuugccugcuauucuguuguucaccauacucucccccacacuuaauggugucuggugcacaguagcagugcaaaug

SEQ ID NO: 4126483 - RNA, 75 nt, Human
caucuuggcuuugaaauccagucauuaggugagaaaccccuggacuaaaaacugucuuuccuaaagcaggagaug

SEQ ID NO: 4126484 - RNA, 88 nt, Human
ccaggcuguucucaaacucuugccuugugaucugccugccuuggccucccaaagugcugggauuacaagcgugagccacugcaccugg

SEQ ID NO: 4126485 - RNA, 58 nt, Human
ccaggcuugaagcuucagaguauguaagagaggugcagcucugguuauugaagcaggg

SEQ ID NO: 4126486 - RNA, 61 nt, Human
ccaggcuuuuagcugcauggcagaguuuguccugagaaagaucuugcccagcucagccugg

SEQ ID NO: 4126487 - RNA, 57 nt, Human
ccagggaagauuagaagccacucaucugacugagacgcauccucugacuuuucuugg

SEQ ID NO: 4126488 - RNA, 126 nt, Human
ccagggaagcugugguacuuggcuacaagugagagagaaggagguagcaguugaaguaagucucugccaucaguuuuucuuugccuugaaugcuuauuccaugaguuuuagcaguuuaauccuugg

SEQ ID NO: 4126489 - RNA, 58 nt, Human
ccagggacagaucaccuguuagccaaaaacagauauguuagcuaccuugauccccugg

SEQ ID NO: 4126490 - RNA, 77 nt, Human
ccagggacaugcuaaaagagugcucagaugcaugucuucauuccaagacccugcccagccccucuggcaaucccugg

SEQ ID NO: 4126491 - RNA, 56 nt, Human
ccagggaggagcauuucauggugugugucuugacaacaugacaaugcuaguccugg

SEQ ID NO: 4126492 - RNA, 65 nt, Human
ccagggaguucuugugaccuggcuaagguugugcaacuagcuugcuccagguacagaacuccagg

SEQ ID NO: 4126493 - RNA, 128 nt, Human
ccagggauauuucucuuauuuggcauuauggaaaauuuuggaggcugagaaguaagagaccagaccaucaaaucuuauuucauugauuucuaagacuaauagugaugucuuaaaagaauauguuaugg

SEQ ID NO: 4126494 - RNA, 59 nt, Human
ccagggcccacggccagaauagguggccagcccccgcccagugcuggcccuggcucugg

SEQ ID NO: 4126495 - RNA, 81 nt, Human
ccagggcccaggcaggcaggggaugugccagugguccuugccacgggccaccagcuuugccacccugcuccagggcccugg

SEQ ID NO: 4126496 - RNA, 61 nt, Human
ccagggcccaguauaaggcccaguagguacagaagagcuauugggccucuggugccucugg

SEQ ID NO: 4126497 - RNA, 67 nt, Human
ccagggcgaggcucacuggcuucaagacgagcucaucucucaccagccaggggaucuugggcccugg

SEQ ID NO: 4126498 - RNA, 65 nt, Human
ccagggcugugucccuaggggagcugcagaaagcagugcucuucuugucugggacacuugcaugg

SEQ ID NO: 4126499 - RNA, 80 nt, Human
ccagggcuucggcuggauguucaauuucccauccucuuuuuuacuuugcggaaacuucaagauucaagccuggagccugg

SEQ ID NO: 4126500 - RNA, 57 nt, Human
ccaggggagugugugauaaugugcagauucgcaugaaugcacacauacacccuuugg

SEQ ID NO: 4126501 - RNA, 64 nt, Human
ccagggggggaccacaccucaggggguggccucccccacacuccugaggguuucccagccuugg

SEQ ID NO: 4126502 - RNA, 69 nt, Human
ccagggucgguggcuugguugccaggugaaggaagaucugcuccuggcuucuuagaccaguggccuugg

SEQ ID NO: 4126503 - RNA, 71 nt, Human
ccagggucugagggacagaguccuggcccugcuccagauagccagguaagcacuuuggcuucagguuuugg

SEQ ID NO: 4126504 - RNA, 73 nt, Human
ccagggucugccccaggagcagggucugccucccuggauggacugguggcuccuugggcaggagggucccugg

SEQ ID NO: 4126505 - RNA, 68 nt, Human
caugcacaacauacucaagaggccuaccaucccaacacuuuuagucaucuugugugugugugugugug

SEQ ID NO: 4126506 - RNA, 76 nt, Human
caugcacaagggaugaugaaaucaaaucaccugucuaugacaucuuauuuuuaauuuauuauccaguguugucaug

SEQ ID NO: 4126507 - RNA, 61 nt, Human
caugcacagaucuucuaaaggguaguuccaacuugagcucuggaguuagugaucugggcug

SEQ ID NO: 4126508 - RNA, 74 nt, Human
caugcacagcgucugccugagucccuccacagugcccccuguauuuggacaccaaguagaagugacugaacaug

SEQ ID NO: 4126509 - RNA, 79 nt, Human
caugcacaucuuacagaugcagagaucaugacuucgguggaugagacuaaucuguaugaagcuguaggauauauguaug

SEQ ID NO: 4126510 - RNA, 70 nt, Human
caugcacgugccuccuggugugagagugucucugggauacaugcuucacagaccaggaggcugugauuug

SEQ ID NO: 4126511 - RNA, 59 nt, Human
caugcagaaggucaaagcaagauguaucauccuacucuuagucaggaccuuucugagug

SEQ ID NO: 4126512 - RNA, 67 nt, Human
caugcagacaauuagugaacaugggccccacuacaggcaaacugcauuuuuacaaguucuuuguaug

SEQ ID NO: 4126513 - RNA, 58 nt, Human
caugcagucuggagccuucuguacaacguauuucacaggagcacuuugugucugcaug

SEQ ID NO: 4126514 - RNA, 65 nt, Human
caugcaguguuguuaaaagauuagaaacuaaaagcaguucuaguguacuguucagcacuugcaug

SEQ ID NO: 4126515 - RNA, 70 nt, Human
caugcaguucacauucugaaguuuugaaaagcccuguuccuggggguagagccaggguggacacuguaug

SEQ ID NO: 4126516 - RNA, 67 nt, Human
caugcauauuuucuacuauaucgaaguggaaaauauauccaugugauauagugaaaaauaucucaug

SEQ ID NO: 4126517 - RNA, 67 nt, Human
caugcauggagcucacccucccagaacuccacacuuaaugcccacugaggaaggagagaaaugcaug

SEQ ID NO: 4126518 - RNA, 100 nt, Human
caugcauguguguauagauggauucauggacuuauggaugcauggcuauauggcuacauacauggauucauggauucagugaugcauugccacaugcaug

SEQ ID NO: 4126519 - RNA, 57 nt, Human
caugcauguuuauagggugcuuccugacacccaggaggcacucaggaaaugugagug

SEQ ID NO: 4126520 - RNA, 65 nt, Human
caugcauuauggcugagucucucaguggccaaauccacugaauuagaacacucaauaaugcacug

SEQ ID NO: 4126521 - RNA, 58 nt, Human
caugcauuguaauuuuuagucugcugugaaauuagagacuugaggaagaacaauguug

SEQ ID NO: 4126522 - RNA, 99 nt, Human
caugccaaggggagaguggaaaggugcacagagguaaauugcaugugugugucacacacagguguuuguuauacucaguuaucucacacccauagcaug

SEQ ID NO: 4126523 - RNA, 92 nt, Human
caugccuuuaacuucauugaagggaggaacaaugugugucugagcuagccacugaaggcacagccucccuucacaugagaaguuggggggug

SEQ ID NO: 4126524 - RNA, 56 nt, Human
caugcggauuuugaugucucuguaaucccacagagacaaauguuaguaguuuguug

SEQ ID NO: 4126525 - RNA, 110 nt, Human
caugcuacaauggcacacuugaguagcuucaauaggaacugcauggcagagccuuaggaauugaccgucuagcccugugaggaacaauucugugcccuuguucuagugug

SEQ ID NO: 4126526 - RNA, 63 nt, Human
caugcuaucugagcugucauuuuguuaccugacugaagguaaaggaguuauugccagggcaug

SEQ ID NO: 4126527 - RNA, 57 nt, Human
caugcuauuugugagugucuucguguaugcaaguguauauauguacaagugugugug

SEQ ID NO: 4126528 - RNA, 77 nt, Human
caugcucaugcacacauuuggaggaggcuugggccugcguucccaguaguagguuucuccuuuaaagcaugggugug

SEQ ID NO: 4126529 - RNA, 72 nt, Human
caugcugagucugaaacagcucaguggccguucucugucacagauagauugagcugugugggcucacucaug

SEQ ID NO: 4126530 - RNA, 56 nt, Human
caugcuuaugauuugcuaagccauaaagaaacuggauacugcagaucagaagccug

SEQ ID NO: 4126531 - RNA, 68 nt, Human
caugcuucucuucacagggaucauccugugggcuggggagccugggaugagagcugggacagaagcug

SEQ ID NO: 4126532 - RNA, 98 nt, Human
caugcuuggcaugugugacaguaaugggcaagacaauaugucuccugcuuucauggaauauauguucuccuucccaguauugcaucuuccacagcaug

SEQ ID NO: 4126533 - RNA, 58 nt, Human
caugcuuguccgaggugaguacuuucucaguaagaaagcuucuagggugggcaagaug

SEQ ID NO: 4126534 - RNA, 60 nt, Human
cauggaaccguuugcaguuuggguuaggccauaggcguuugauacaggaaugguucuaug

SEQ ID NO: 4126535 - RNA, 115 nt, Human
cauggaagugaugaaugugaagggugcauugcgcggggcugcacagccagcuguuuugcuguuacugucuucacagucucucuuguagugcagcuaguuccaguuuucuucuaug

SEQ ID NO: 4126536 - RNA, 66 nt, Human
cauggauuuuggagcaagcuggagagaacaucuccauauugacugauucuuucuaugccuuucaug

SEQ ID NO: 4126537 - RNA, 74 nt, Human
cauggcagaagacagagucuacauucuagacccguugacugagggcuugguugugugacuugguuugagccaug

SEQ ID NO: 4126538 - RNA, 71 nt, Human
cauggcagguggcacagccugggaccuggccucucccucuagguuucaugagcacuguuccaacugccaug

SEQ ID NO: 4126539 - RNA, 64 nt, Human
cauggcauuaggaccaugagccuggucagagagauacguauguccaggucaccccugagccaug

SEQ ID NO: 4126540 - RNA, 58 nt, Human
cauggccacagcgugguccagggagacaaagagcccaugagccaggcugacggcugug

SEQ ID NO: 4126541 - RNA, 70 nt, Human
cauggcccuguuuaugguaaggcuuagccuugagaccaaucauuuucuuugccuucuuugaacauucaug

SEQ ID NO: 4126542 - RNA, 111 nt, Human
cauggcucagagcucaaggggcccagcaguguccuggggcccuaaggccagcagccgggaaguuccugggcaguggguuccccaaggcacgguccccacagcucccacaug

SEQ ID NO: 4126543 - RNA, 60 nt, Human
cauggcugcgagaagaguggguugacagaaaagaaagauuuuaguugacucgaggcugug

SEQ ID NO: 4126544 - RNA, 55 nt, Human
cauggcugggugcagugauaguaggaagugugccuaugugucucuguguagccug

SEQ ID NO: 4126545 - RNA, 82 nt, Human
cauggcuugcucacacuagccucacauuaccuugauguuguuacauuccagguuggugcaggguagcucugagauggccaug

SEQ ID NO: 4126546 - RNA, 64 nt, Human
caugggaagggaaggaaagaaccagcaguagacauccagugacacuguuggccuuccacccaug

SEQ ID NO: 4126547 - RNA, 66 nt, Human
caugggcaauauugucuaccaguaugagucugacuagagacuuacacaguauccaagguucuuaug

SEQ ID NO: 4126548 - RNA, 62 nt, Human
caugggggugcugaggggcuuggcugggacuuugcccccugcccacuuggccaccuucuaug

SEQ ID NO: 4126549 - RNA, 70 nt, Human
cauggguauaugagaaccauggaggugcuaaagaaaaauagaagcauuuucuuauuaucauauuaccaug

SEQ ID NO: 4126550 - RNA, 65 nt, Human
caugggugggauggggucaacauguaccuggagagacuagaagcauaguccccuucccaaaggug

SEQ ID NO: 4126551 - RNA, 79 nt, Human
caugguagauggugacugagcagaacaaugggagccgauaccuugguuuauucaucucugcugcauaccauuugcuaug

SEQ ID NO: 4126552 - RNA, 58 nt, Human
caugguaggugcuuagauuucugcuaacugacuagcuuaguuauaguaucuagccaug

SEQ ID NO: 4126553 - RNA, 77 nt, Human
cauggucaagguguaagcagguugguucuuucugggggaaauacccguuccaggccucucugcuuagcuuguacaug

SEQ ID NO: 4126554 - RNA, 68 nt, Human
caugguccggagaggugggggcagcaucugggcccccuugcucagucaggcuccuugccuuucccaug

SEQ ID NO: 4126555 - RNA, 56 nt, Human
caugguuaaaauauggaaaauccagcuuuuccuagggaguccaaaaauuagccaug

SEQ ID NO: 4126556 - RNA, 73 nt, Human
caugguuaggagggguggccaggcuuaggcguuuaauuugauuaaugauaagcauacauucucuccuuuccug

SEQ ID NO: 4126557 - RNA, 104 nt, Human
cauguaaccaauuccuugcauucaagucccuuugccuugaacaaucuggugguuucucuuuccugguuggauucugauuaaugcaagacugaguugugaaugug

SEQ ID NO: 4126558 - RNA, 86 nt, Human
cauguaagaaaugugacuauccugagaccaccacacuguacaaaauacaagcuauauauggagguccugcaggauggcacaucaug

SEQ ID NO: 4126559 - RNA, 106 nt, Human
cauguaccaggcaugacaguguuuuguguuaagaaaguacaguauugaaacagcagagaaacuauugucauaguuuaauacagaacuugucagggccaguacacug

SEQ ID NO: 4126560 - RNA, 66 nt, Human
cccaaauaugucagggguggaaguggagaaggaauucacuauuucagugauucugcagaaguuggg

SEQ ID NO: 4126561 - RNA, 82 nt, Human
cccaaaucucuuucaguuuuauuccaaugugcagcacaguuucauuauuuuguguaugugccacaauggaaagagguuuggg

SEQ ID NO: 4126562 - RNA, 60 nt, Human
cccaaaugcauaguuuauaagaagguucccucuugguuuuguauaaucuauggguuuggg

SEQ ID NO: 4126563 - RNA, 89 nt, Human
cccaacaaucgagccuuguuuaugaaccuacauuuauuaagugaaaguauuuggaaacugaugguacauucaagcuugguugccauggg

SEQ ID NO: 4126564 - RNA, 81 nt, Human
cccaacaccuauuuuacugaugaucuggaggggcuggcaugguagccauuuugaucucugucauguguaauagccucuggg

SEQ ID NO: 4126565 - RNA, 64 nt, Human
cccaacuccaggcagggaggccacugagccacuugaaucagccucuuguucgcugcuuggaggg

SEQ ID NO: 4126566 - RNA, 63 nt, Human
cccaacucuaggaaaacagcaaacugguuuaugcugaacacagaugauguuccaggaacuggg

SEQ ID NO: 4126567 - RNA, 59 nt, Human
cccaacugccaggcccugggcagagauaaaagaauguggaugaguggcaggcagauggg

SEQ ID NO: 4126568 - RNA, 127 nt, Human
cccaacugggggaucuuccuguaacauuuuuaucuggugcuuucauagacaccauuuguguuugccaauaacagaauuaaaguguuuguggagccauagaauuuuaucagaacguuuaacuuugagg

SEQ ID NO: 4126569 - RNA, 87 nt, Human
cccaacuuugauuaccuaucacaggaaaaucugcccacacaagacugguaagucgauggggugauauuucuugaggaaucuuugagg

SEQ ID NO: 4126570 - RNA, 63 nt, Human
ccaggguuccagcagaggaggguuuguccagaauaaggaacccauggucugguggggcccugg

SEQ ID NO: 4126571 - RNA, 84 nt, Human
ccaggguuucauauaugcaauaauaauuuggugucuuuaaauuaaauuucuggcacuguauuuuggguguauuuucuuuucugg

SEQ ID NO: 4126572 - RNA, 76 nt, Human
ccagguaggcaccucagucaguuauuaugccagucacacaugugacagggcagguggcuacuggucauugccucgg

SEQ ID NO: 4126573 - RNA, 66 nt, Human
ccaggucuggaccauguggcuuucaucuagacaauggagaagcacuacgauaggugguccuccugg

SEQ ID NO: 4126574 - RNA, 59 nt, Human
ccaggugcaaugagacagcucugggcuacccaggccuuccugucucccauuguuucugg

SEQ ID NO: 4126575 - RNA, 93 nt, Human
ccaggugcugcgcuaggcucugggaacagacgggugggcaagagagcccaagcccacugcucagagccaagcaucuacuccagcauaucuugg

SEQ ID NO: 4126576 - RNA, 63 nt, Human
ccaggugggauguguggauccugagugcugaacagguaacaguaacgagauguccuaacuugg

SEQ ID NO: 4126577 - RNA, 57 nt, Human
ccaggugucaaaauaccauuucaggaaauaacucggaaaugaauuuugaucaccagg

SEQ ID NO: 4126578 - RNA, 62 nt, Human
ccaggugugcucugcaguggauacagcuguacguucggugacaguucggcagauacgcuugg

SEQ ID NO: 4126579 - RNA, 72 nt, Human
ccaggugugguggcacucaccuguaaucccagcuacucaggaggcugaggcaggagaguugcuugaaccugg

SEQ ID NO: 4126580 - RNA, 62 nt, Human
ccagguguuggaagggcaguggguaagguucccaagccagcccccacacccuucccacuugg

SEQ ID NO: 4126581 - RNA, 75 nt, Human
ccagguuagagauauuugaggcucuuuaagcaugaaaaugccccucauuaacacaaugucauuucuuagccaugg

SEQ ID NO: 4126582 - RNA, 60 nt, Human
ccagguucaaaaguggccuguaaaaucuuguuuacaagagauucuauguuuugagcuugg

SEQ ID NO: 4126583 - RNA, 72 nt, Human
ccagguucaagccauucuccugccucagccuccggaguagcugggaguacaggaaugugccaccacaccugg

SEQ ID NO: 4126584 - RNA, 69 nt, Human
ccagguucuuauguuuugucaguggagaaggguuugagucuagccagacuggcaauagcaaaugcuugg

SEQ ID NO: 4126585 - RNA, 109 nt, Human
ccagguucuugcuucaucccagccauagugggagccagcagcuugggggagcuucuguuccaucugcuuggcucuuagcaugugguugggacaagcuuucugggccugg

SEQ ID NO: 4126586 - RNA, 72 nt, Human
ccagguugaacccccaagaccuaugccucacccccgacccaggcagcaggaacucagggaguucucaccugg

SEQ ID NO: 4126587 - RNA, 57 nt, Human
ccagguugcuggcucuuggcagcccgaagcugaacuccgagcugagaguagcacugg

SEQ ID NO: 4126588 - RNA, 67 nt, Human
ccaguacauauccuuuacguuuuguucaucaacuuugauagacagcauagaggaaauguggaacugg

SEQ ID NO: 4126589 - RNA, 76 nt, Human
ccaguaccuaguauaucuuuaguacauagucacagcucuuaucccugcuggacugugaguucgagggcaggacugg

SEQ ID NO: 4126590 - RNA, 59 nt, Human
ccaguauuugcauguuagggaccuagacuaggucacugagagcacccaagucccucugg

SEQ ID NO: 4126591 - RNA, 99 nt, Human
ccagucaaaaaggcaaauucuguauguuuccacuuauaugguaccuagaguagucaaauucauagagaccaaagugaaaugaugguugccaggggcugg

SEQ ID NO: 4126592 - RNA, 106 nt, Human
ccagucacagcaugcauuuucugaguuuauuuccccuuagagaaucucaaggaaauuuauacuuugaaagggaaauaaacuccuuggagaaaugguugauucuagg

SEQ ID NO: 4126593 - RNA, 63 nt, Human
ccagucacagguguguuuauauaaguguaucacuggugugauuaugaauaugcacuguucugg

SEQ ID NO: 4126594 - RNA, 59 nt, Human
ccagucaguuucauuugccagcucucacauaccucaagagcuguuugaagcuauauugg

SEQ ID NO: 4126595 - RNA, 110 nt, Human
ccaguccuccuggucuugccuguccgcugugcauggggagggaagcgcucaggccuguuaccugccuggaguccucaacggggagaggcggagggagccggcuggacugg

SEQ ID NO: 4126596 - RNA, 58 nt, Human
ccagugcaggugagcaccaggugcagguggcugugccaggugucagggccaugccugg

SEQ ID NO: 4126597 - RNA, 63 nt, Human
ccagugcuggacucugcugcugggccuuggugggcaggggcagcaagagagguucagcuuugg

SEQ ID NO: 4126598 - RNA, 78 nt, Human
ccagugggcccuuacccugugccugucccagugugacccagcacaaagggggacugcagagggucuccugcccacugg

SEQ ID NO: 4126599 - RNA, 75 nt, Human
ccagugugcugucauuagcaucuagagggugcaacgugaauucaaucuucaggagucaagugagagcaugacugg

SEQ ID NO: 4126600 - RNA, 84 nt, Human
ccaguguggcuggagcuuagugaggugcaagacacagugggugagguaguugaugucuuguugauuucauucuagauacacugg

SEQ ID NO: 4126601 - RNA, 61 nt, Human
ccaguguuaaauuucuaauuugugaucauugaacuaugguuaugugagauguuuacauugg

SEQ ID NO: 4126602 - RNA, 63 nt, Human
ccaguguuccagagagcugauguggaccacaggggaagccucugccuucuggaacaucccugg

SEQ ID NO: 4126603 - RNA, 68 nt, Human
ccaguguucugguguucauuucaccaaggaaacccuuauuuuaaaaaaugaauauuaacagcuucugg

SEQ ID NO: 4126604 - RNA, 127 nt, Human
ccaguuaaauuugaauuucagauaaacaacgcguaaucaucugggauaaguacgucccaugcaauauaugggauauaccuauccuagaagauuaugcguuauuuaucugaaauucaaauucaaaugg

SEQ ID NO: 4126605 - RNA, 88 nt, Human
ccaguucccaguuugacaauugggagauauaaagcucagaguagaaaaguaaaaguuuuaaggucucucaguugguauuuuguuuugg

SEQ ID NO: 4126606 - RNA, 59 nt, Human
ccaguugauguuuagacucugcauggacacucaaugacauucucucuaggcacagcugg

SEQ ID NO: 4126607 - RNA, 75 nt, Human
ccauaaggaccgaggccuccucgccgccaccgccgccgggguggggccugggccuggggccgcgagucucguugg

SEQ ID NO: 4126608 - RNA, 60 nt, Human
ccauaaggagccagacauuccagaauuugaaggaaagggcagaaaauggcauccuuaugg

SEQ ID NO: 4126609 - RNA, 87 nt, Human
ccauacacacacuaaguaaagacaugacacauuggagaguaacuacacauauaugucaguguuguaauguuagauuaggugguuagg

SEQ ID NO: 4126610 - RNA, 55 nt, Human
ccauacccccaacaccccuuucaccagaacccucugugcagcacuuggggguagg

SEQ ID NO: 4126611 - RNA, 61 nt, Human
ccauaguggucauacagacuuguauuaguucuuggaacucucacuagcucugugaccuugg

SEQ ID NO: 4126612 - RNA, 67 nt, Human
ccauaucaaacgaaguuauuuuaauuacuuuacucuuucuucuuuuaguugaaauuguuugauaugg

SEQ ID NO: 4126613 - RNA, 77 nt, Human
ccauaucacaaaugaggaaaucgagcaucagagaauuuuccuaacuuucucaaauuugcucccucauaagugguagg

SEQ ID NO: 4126614 - RNA, 57 nt, Human
ccauaucucaauuucuugucagugugguuucuauauugagcaggugcagggaagugg

SEQ ID NO: 4126615 - RNA, 60 nt, Human
ccauaugaaauugccauuuuuauggaccaaaaaugguugcauaucagaaauuucauaugg

SEQ ID NO: 4126616 - RNA, 60 nt, Human
ccauauguuaaguaugaaaggugaccuuguuauuuggacaguuuuuacucuuaacugugg

SEQ ID NO: 4126617 - RNA, 80 nt, Human
ccauauuggaaugaaaucauugggguugaauaauccauucuuugguuuguuucagaaacauguguguuugcauuucuugg

SEQ ID NO: 4126618 - RNA, 57 nt, Human
ccaucagguaauuugcaccuaguugaauucucucaauaacugcuaaauucccugugg

SEQ ID NO: 4126619 - RNA, 81 nt, Human
ccaucagucugaguagucuggaguuuuccucugagagucauaggcauuagaaagaacuuuagauaucaugugucuugaugg

SEQ ID NO: 4126620 - RNA, 72 nt, Human
ccaucauuuuacaaacauuucagaauuuuaccuuuuagaaggaaacaguucugccuguuugagaagugcugg

SEQ ID NO: 4126621 - RNA, 78 nt, Human
ccauccauuauguuucccaggcucugcauccaggcuuuaucacacagacaacuuccuaugcagacuaagcauggaugg

SEQ ID NO: 4126622 - RNA, 76 nt, Human
ccauccccugggaaguuguaccuucuguuaugaagaugaccagccuccuaaugacagucaacucccagaugggugg

SEQ ID NO: 4126623 - RNA, 72 nt, Human
ccaucuaguggccaccaugccagcucucgggggacucgagggccccgggaggguggccaagcgagagauugg

SEQ ID NO: 4126624 - RNA, 89 nt, Human
ccaucucaguuaggccuugucacaggaauacauuacuaccuucugaggaagacagacugugcucuugggcaauagcugccacugugugg

SEQ ID NO: 4126625 - RNA, 58 nt, Human
ccaucuccacugucccugucaaacucccagcaaaugugcacagggaggguggggaugg

SEQ ID NO: 4126626 - RNA, 77 nt, Human
ccaucuccagggaaggcucugccugcuuggggccaucccaaagcacgcaguuuguuuuuaacccucaggacgaucgg

SEQ ID NO: 4126627 - RNA, 67 nt, Human
ccaucuccucgcaggccagaacacgccacgucacuccaggacgguucgccaccuuugagaagagagg

SEQ ID NO: 4126628 - RNA, 57 nt, Human
ccaucugcauacacaaacaggaagacuaccauagcuggccuggaaaaaugcagaugg

SEQ ID NO: 4126629 - RNA, 73 nt, Human
ccaucuggcuugaaguuaugcaccagcucagugugagacuaaacugugcuauggcugccacucaagccaaugg

SEQ ID NO: 4126630 - RNA, 62 nt, Human
ccaucugucaagauagacucugcauuacagagaagaugguggugaggucugcugacaguugg

SEQ ID NO: 4126631 - RNA, 113 nt, Human
ccaucugugccacccgcaugggacugccugggguccagugccuggcaaggcccugcuucuagaagcccucccugaugccagcccugagcucccagcccugugggaggcagugg

SEQ ID NO: 4126632 - RNA, 126 nt, Human
ccaucuuggccucugcauccccuuuccucacaucccugccaccuccuucuuuuccacccugggaaaaucuggcugagagauggagagcacuggggcugaggagagggcuugggaggcuggaggugg

SEQ ID NO: 4126633 - RNA, 71 nt, Human
ccaugaauguuaaacagcuuuuauauucacuaggaaaauauugugguguuuaaugggcuguuuauuucagg

SEQ ID NO: 4126634 - RNA, 96 nt, Human
ccaugacguacaucuuaaggaucauaguaaacauugauguggaagccauuuguuuuguaaucugguguggcugugauccucagaucugaaauaugg

SEQ ID NO: 4126635 - RNA, 82 nt, Human
cccaaccauguaucagcuuguaauuugugguguuggaagagcgaaacuggcuaacacaguacaagcaugauacauaacaggg

SEQ ID NO: 4126636 - RNA, 83 nt, Human
ccaaagggacugcaguuugacuacaucaugguuuacauuuucaguuugugaagaauaaaugguugagacugagucccagcugg

SEQ ID NO: 4126637 - RNA, 128 nt, Human
ccaaagguaaguguuuuaugaacgucacucaaugcuggugcuuacuuuccucaaaccugccccuguauaugucacagacacauugcaggagaguaaauaaaaggauuugggggcuucauuuuauacgg

SEQ ID NO: 4126638 - RNA, 59 nt, Human
ccaaaguccauaguuuacauaaggguucacucuuaguguugugcauucuauggguuugg

SEQ ID NO: 4126639 - RNA, 59 nt, Human
ccaaaguccauaguuuacauuacagcucacucuuaggguuguacauucuauggguuugg

SEQ ID NO: 4126640 - RNA, 59 nt, Human
ccaaauagucuuucauugaauuucacauauuaguucuuguuacuauggaagacauuugg

SEQ ID NO: 4126641 - RNA, 126 nt, Human
ccaaauaucugcauguuagaggcuuauguguuuaugaguaggcaggugucuucauggaacucugguaucuuccagauguucauagguauaucuggaacgaugaguaucuggccaaguaauauaugg

SEQ ID NO: 4126642 - RNA, 80 nt, Human
ccaaauccaggaacaaagccccauccaccuucaggacuuggcacaugagguaccuguggccugggguuuguucugagugg

SEQ ID NO: 4126643 - RNA, 56 nt, Human
ccaaaugacaguucucucugaguacugugcuagguacugaauuucugucauuuagg

SEQ ID NO: 4126644 - RNA, 79 nt, Human
ccaaaugucaauaguacugccguugugaagcucuuagaaggcauucugugaagcucugaacagcagcuaaggcaucugg

SEQ ID NO: 4126645 - RNA, 57 nt, Human
ccaaauucacauauacauuauuccuuccuuggggaggaguagugagguggaaugagg

SEQ ID NO: 4126646 - RNA, 70 nt, Human
ccaacagacacugacaggguccauggaauucuucgggaaauccuccaaggacucuugucagcuguguugg

SEQ ID NO: 4126647 - RNA, 79 nt, Human
ccaacaguucuggaggcugggaagucgaagaugaagaaccagcagguucagugucugaaaggcuuuuucucacagaugg

SEQ ID NO: 4126648 - RNA, 67 nt, Human
ccaacauacauguaaaggaaauuaugacauuaagugccauucauagugagaaacauguauguguagg

SEQ ID NO: 4126649 - RNA, 66 nt, Human
ccaaccagggaauuucuugaggguagaauguguuucaugaucccuggcaaaaucccugguacaugg

SEQ ID NO: 4126650 - RNA, 105 nt, Human
ccaaccauguauucugguuuguuguuguuguuguugcugcuguucagaaaauaagauccccagagccacagcaagauuaagggcagaaaauuacauuacuggugg

SEQ ID NO: 4126651 - RNA, 58 nt, Human
ccaacccacgaccguccuggauuccucucacucagagaagcugaggucaggugggugg

SEQ ID NO: 4126652 - RNA, 61 nt, Human
ccaacuguacaauggcuauaauacccucucccuuagagggcuuuuugggacauguaaaugg

SEQ ID NO: 4126653 - RNA, 59 nt, Human
ccaacuguaccucaaacucuggaaccugauuaaggaccagaucgcugaugugcacuugg

SEQ ID NO: 4126654 - RNA, 72 nt, Human
ccaacuugcuguauucagaagcucacucugccucccuggcuucaguucuccaaucugaaugggaugaguugg

SEQ ID NO: 4126655 - RNA, 92 nt, Human
ccaagaaucuuguaguucauuagcacaaaauaaauaaagugagcauuuaugauaaucuuauuaugugcuagagaauguacuagauacaaugg

SEQ ID NO: 4126656 - RNA, 58 nt, Human
ccaagacgggcuggcucggacuuggccaaccgcuauguccagagccggccugcugagg

SEQ ID NO: 4126657 - RNA, 77 nt, Human
ccaagagacccuggagcacauggcaggaggccuucccagccaaggcuccugcagagauguuccaugguuagacuugg

SEQ ID NO: 4126658 - RNA, 91 nt, Human
ccaagauuuuaaagauguuuagguaaaaaguuuuucaagagacaagacaaggacugauuaagugccuaaaaucuuuuagaaagaaugaugg

SEQ ID NO: 4126659 - RNA, 68 nt, Human
ccaagcaaagguuggaaauguuuaccaaaguagugauuucuugggcgucuucagcuuuuuaaguuugg

SEQ ID NO: 4126660 - RNA, 56 nt, Human
ccaagcaauuaaguccaucagaacggaacaaccguuaaggaaggugaauuucuugg

SEQ ID NO: 4126661 - RNA, 105 nt, Human
ccaagcagaggaacugccucucggggcagccaagaaccacagacccaggcggcugcagcuccuacuucugaacuucuggucucccgagugacagcuucugcaugg

SEQ ID NO: 4126662 - RNA, 82 nt, Human
ccaagccaaacccuccugaacuggccacugggugacaaucaucugccuguuccagaggcccagugagagggcuguagcuugg

SEQ ID NO: 4126663 - RNA, 67 nt, Human
ccaagcucuuccugcaccuguggcugagcucccugggccucaguggcaguggcugggcagagcuggg

SEQ ID NO: 4126664 - RNA, 56 nt, Human
ccaagcuucuuuccuacuacaguaacuuauacuauuucgcagugggaagaguuugg

SEQ ID NO: 4126665 - RNA, 57 nt, Human
ccaaggaagaagcugcccgacauaccugacugacuugucuggaugcccuucucuugg

SEQ ID NO: 4126666 - RNA, 55 nt, Human
ccaaggagaaugacaccauggauacuauacuguuuccugaagugaucuuucuugg

SEQ ID NO: 4126667 - RNA, 114 nt, Human
ccaaggaguuugguuuuguuuggguuuguucuagguauggucccagggaucccagaucaaaccaggccccugggccuauccuagaaccaaccuaagcucgcgcaucauuccugg

SEQ ID NO: 4126668 - RNA, 64 nt, Human
ccaaggcacacucugcaagguugaucucagaaagaaauauaauggugucugcagagguaccugg

SEQ ID NO: 4126669 - RNA, 60 nt, Human
ccaaggcccauaguuuacauuaagauucacucuuguguuguacauucuaugggauuuugg

SEQ ID NO: 4126670 - RNA, 90 nt, Human
ccaaggcucucuugcauugcucaggcccugggccauccugaagcuggcaggauggcuuugggcuuagccucaauaguggguggguucugg

SEQ ID NO: 4126671 - RNA, 55 nt, Human
ccaaggcuggagugcaguggcgcaauccuggcucacuguagccucugccuccugg

SEQ ID NO: 4126672 - RNA, 62 nt, Human
ccaaggcugggaaacaugcaggccucagcuccacccccaugcugagcccucuuccagccugg

SEQ ID NO: 4126673 - RNA, 57 nt, Human
ccaaggcugucauucaguagcugcugaaugcacgcucugcugagucacuggccuugg

SEQ ID NO: 4126674 - RNA, 57 nt, Human
ccaaggcuguggggcugugcagggccucucaagugguacagccguaaugguccuugg

SEQ ID NO: 4126675 - RNA, 81 nt, Human
ccaagggauggcauuaaaguucuuucucuuauuugguagcucuaacuaccaaauaagccaagggcuuuggauauuccuugg

SEQ ID NO: 4126676 - RNA, 101 nt, Human
ccaagggccuguuuucuuaccguugggguacuuguaucaaagcacagauaugaccgguuugugcggaucgguguccuccaaagaucaacagcggcucuugg

SEQ ID NO: 4126677 - RNA, 84 nt, Human
ccaaggguuucugcuucuucuugcuuuugcuuuaagcagggcagcuagaaaacauagcagggguaacagaaggaaagaaaaggg

SEQ ID NO: 4126678 - RNA, 92 nt, Human
ccaagguccaggugaguaggaggcucgcuggucgcacagccugcccccaccuuugggugcuggcucaagugugcuucccaccuggcaccugg

SEQ ID NO: 4126679 - RNA, 112 nt, Human
ccaaggucugacuggugcaggaagcuaggccuucauguuuugaagauuagaauaaacagcugcaauauuaggaucucaccauagaaggaagcugggcccaggaaggagcugg

SEQ ID NO: 4126680 - RNA, 57 nt, Human
ccaaguaagggcuagcaauugugcgcauuguugcugugguuguuuuucuuauuaugg

SEQ ID NO: 4126681 - RNA, 62 nt, Human
ccaaguccucuaccauuccuggaguguauaugguuccccaggagggugcaggaaggacuugg

SEQ ID NO: 4126682 - RNA, 128 nt, Human
ccaagucugcccugaguuuaguuccuugguugugaaacguggcucugcagugucaaugauccaacuugaagcagcugcugccaagcccgugcuccuggcccucaggucuuggauucagcaggaacugg

SEQ ID NO: 4126683 - RNA, 62 nt, Human
ccaagugagguggggagggauaggcuggagcagaucaguggccuugaugccucauuccuugg

SEQ ID NO: 4126684 - RNA, 62 nt, Human
ccaagugccccucauuguguucaucaucccccaaggcugagcauuaccugaggccacugugg

SEQ ID NO: 4126685 - RNA, 60 nt, Human
ccaaguuaaggcuuugggaacuugcccuaacuggcccaauaccuaaaguuugaacccugg

SEQ ID NO: 4126686 - RNA, 70 nt, Human
ccaaguuuguggcagagcuggaacugguacucaguuacuuggcuccgaguccagagcucccucaacuagg

SEQ ID NO: 4126687 - RNA, 71 nt, Human
ccaauagcagcugccuauucagggcuuggugaguccuugugcuuagcccuuucuggccguugcuucauugg

SEQ ID NO: 4126688 - RNA, 77 nt, Human
ccaauauauuucccugaaauuugaagaggaauuggagauuccuccuaaguugccaggaauuauuuagaaaugugugg

SEQ ID NO: 4126689 - RNA, 97 nt, Human
ccaauauuaaugagaaaugagucacuuauuauuggggugcaaauagagagauaaaugacaucaguaauuaagucucaagcccucuuugguauaaugg

SEQ ID NO: 4126690 - RNA, 72 nt, Human
ccaaucaaauuagagguuuguuuugaugaguucuuuauggugaaaugaucaaugaaaccuuauuugaauugg

SEQ ID NO: 4126691 - RNA, 95 nt, Human
ccaaucaacuuugcauuugcccuggggcuggccuggcagugcugcuaucagaauucagauacuggcccagcccugcucuagggccugaaguuugg

SEQ ID NO: 4126692 - RNA, 129 nt, Human
ccaaucaggagccggccugaccccgcccccucuucucacguuauuggcugagaggcccccagaugggcggggccggccgugggguuggggagggcagggggcggggaggaggaggaaggcgcuggcggg

SEQ ID NO: 4126693 - RNA, 69 nt, Human
ccaauccccucuuugccagcaucucugccuggccuaccuagcugagcaggccagcaauggaagggaugg

SEQ ID NO: 4126694 - RNA, 111 nt, Human
ccaaugaacacauuacguccucuguaugguuuuuaucaaguaacugccccagugcucccaugacgcugggcagguccacuuguuaggccagugagggccauaguucguugg

SEQ ID NO: 4126695 - RNA, 72 nt, Human
ccaaugauaagcagcagcaggauuaaagagggugcugugaggcauuuuuuuccuaaaugcugccugcuuugg

SEQ ID NO: 4126696 - RNA, 105 nt, Human
ccaauggggucagcaucauccaacagguugagagucugaauagacugaaaaauugaaugaaaguugaauucucuuucugccuuauugcuugaacugauauauugg

SEQ ID NO: 4126697 - RNA, 70 nt, Human
ccaaugggugguguuggagaugguugcauuaaggcauccuuaauacgacucauaauuuaacauaaauugg

SEQ ID NO: 4126698 - RNA, 55 nt, Human
ccaaugugaagucaagggagcagccagccugccuggacuggaagcuucauguugg

SEQ ID NO: 4126699 - RNA, 61 nt, Human
ccaauguuugugaucuacugacucguaagcucccuaugaggaaaauggaacaaaauauugg

SEQ ID NO: 4126700 - RNA, 58 nt, Human
ccaauucaccuccuaugcacauuuuucauaucauaaauuacugcaggguggugacugg

SEQ ID NO: 4126701 - RNA, 61 nt, Human
ccaauuccucagucguuugagccaaaauacuuccuuguugcuuaaaccacuaaggguuagg

SEQ ID NO: 4126702 - RNA, 98 nt, Human
ccaauugcucacuauauugcuugaggccaggaggugucaaccuccuggaguuagguaucuggucaaccuccuggccucaagcaauccuccugccuugg

SEQ ID NO: 4126703 - RNA, 67 nt, Human
ccaauuuucugauuggagaguugaggcuagaauuucauuuacuggaacacuucaagcagaagguugg

SEQ ID NO: 4126704 - RNA, 73 nt, Human
ccacaagccucucagguugguauucaucuccacaucuuacagauugugaacugaggcccagcgaggcuucugg

SEQ ID NO: 4126705 - RNA, 87 nt, Human
caugugcguguguacuuguuaaugugguagugcauaucugcuuguuuguguaugaaugugugcccacuuggugugcagauguaugug

SEQ ID NO: 4126706 - RNA, 73 nt, Human
caugugcucaggucauucagaacuuggccccagagcgugccugggccucugguucguggugaccuacgcuaug

SEQ ID NO: 4126707 - RNA, 60 nt, Human
caugugcuguagcagagaggaacccacuacagcugggauccuggacugacacagcgagug

SEQ ID NO: 4126708 - RNA, 76 nt, Human
cauguggcauuuuuaauacagauaacugaaugacaaaguaguaaucaguuuauagauauugcugaugucaaacaug

SEQ ID NO: 4126709 - RNA, 58 nt, Human
ccagcuccauugcuuaguguaagcagcuucacugcuuaguguaaggccaugcagcugg

SEQ ID NO: 4126710 - RNA, 129 nt, Human
ccagcuccuggggucuccagauagcacaggcugggccaucaggagacuccauccccuugaccacagugauuggcucagggaaagagcuccugucugucuagcgaguccuaaucccuagacuuuuucugg

SEQ ID NO: 4126711 - RNA, 73 nt, Human
ccagcucucucuucucauagcuaguucuuccuuugccccuauauuggaggaggcucugcuuaugaaaggcugg

SEQ ID NO: 4126712 - RNA, 73 nt, Human
ccagcucucuguccuccccacaguggacugcagccacaaugcucuccccaugugagauggaaaggggagcugg

SEQ ID NO: 4126713 - RNA, 61 nt, Human
ccagcugacaguagguuuacaguuuauaaucuggccuuuguaaaagcauuugucagccugg

SEQ ID NO: 4126714 - RNA, 55 nt, Human
ccagcugcagaauguuggggaagagggugccugauucucuggcuucuguagcugg

SEQ ID NO: 4126715 - RNA, 60 nt, Human
ccagcugcccauccugggaaauguauggaugguggcaaauauacccacugggguagcugg

SEQ ID NO: 4126716 - RNA, 61 nt, Human
ccagcugcucuucuggccugucagcccauucguggcagugagaagccauuagagcaggugg

SEQ ID NO: 4126717 - RNA, 57 nt, Human
ccagcuggaagagugcagaacuaacauaaaugauguccugcuagcaucugcagcugg

SEQ ID NO: 4126718 - RNA, 62 nt, Human
ccagcuggcacuguggcugcccucccaguggggaggccuccugcagccugggccacaucugg

SEQ ID NO: 4126719 - RNA, 76 nt, Human
ccagcugggccuugccaggggugucucgugacccagucccuuagagaaacaugcagacaucucagcaaggagcugg

SEQ ID NO: 4126720 - RNA, 77 nt, Human
ccagcugguggugcagguguugaugcaggacuuuucagaagagcgcuucugugggagaaacgccugcuguccagugg

SEQ ID NO: 4126721 - RNA, 60 nt, Human
ccagcuguucauuguugccaccccucgccacugucaggagguggcaaugagggcaguugg

SEQ ID NO: 4126722 - RNA, 62 nt, Human
ccagcuguuggaguaaagcacuuagauugaacuaugucuggguuuuaaagauccaaagcugg

SEQ ID NO: 4126723 - RNA, 68 nt, Human
ccagcuucuuacgagcugguacuuuuaauaauuuacuagaguguccuugagguuccuaggaaugcugg

SEQ ID NO: 4126724 - RNA, 60 nt, Human
cccaugggcagcugcagcagugguguguaucuuucauuuguugcuuuagcugugcagagg

SEQ ID NO: 4126725 - RNA, 83 nt, Human
cccauguucugcuuuuuucacuuaacaucauaucaugagcaaguuuccuugucauuacacaguucaguggaaagagugaaggg

SEQ ID NO: 4126726 - RNA, 86 nt, Human
cccauguuggcuguuggagcuuucuuuucccucauuuguuaugagucaauaaagaagcagaagguuuggacgugcuagccaguggg

SEQ ID NO: 4126727 - RNA, 92 nt, Human
cccauuaaccugaagacaacaaugcugaacugaggaaagccagguacuuauaaagcuuuucaucacaguguaguuccuucuagcuuaagagg

SEQ ID NO: 4126728 - RNA, 121 nt, Human
cccauuaggagaggguggcagguuugcuucaguaaugguagggcugucauuaucaucaccauugcuggaauggcaccugcuauauacugagcaccugcuugggccagacucuguccuaggg

SEQ ID NO: 4126729 - RNA, 81 nt, Human
cccauugcagucaaagauuggaccaauugcaguuuccaggacaucuggcuaaaauuaaucaguccaaguuugagcacuggg

SEQ ID NO: 4126730 - RNA, 59 nt, Human
cccauuuaucccaagguuacuccauguccaccaucuuaagucugccacugggauaaggg

SEQ ID NO: 4126731 - RNA, 61 nt, Human
cccauuucuugacucugaauuuggaauacaacaagacugcuuucagaaauaaggaaugagg

SEQ ID NO: 4126732 - RNA, 77 nt, Human
ccccaaacuuuggacggcggggcggggcccgagcccaggccauccgcggcgcuguccccgcgaguccagagcugggg

SEQ ID NO: 4126733 - RNA, 62 nt, Human
ccccaaaggggaugcucagugcaggggugaacacagccugcacugagacccucuuugcuggg

SEQ ID NO: 4126734 - RNA, 75 nt, Human
ccccaaauucugaguuucauuuugccuauaguucuuugggggaccauaucgcucaaaaggaaggucuguuugggg

SEQ ID NO: 4126735 - RNA, 62 nt, Human
ccccaacacugcacgugcagccucagaguacagccugcagggugcacaguggggugccgggg

SEQ ID NO: 4126736 - RNA, 57 nt, Human
ccccaacaugagagauccuucaugagagauugggucaacaugguauucuuucagggg

SEQ ID NO: 4126737 - RNA, 110 nt, Human
ccccacaauaucuucuuucuaucuuuuggaugucugcauaugauauggcuuggaaccguguccccaccaagucuucugucaaacugugacuucuaaugcuggaggugggg

SEQ ID NO: 4126738 - RNA, 68 nt, Human
ccccacaauguagaggcugaaagcaauuaacuaucuguuauugcucacaaaucuuuaggucagcgggg

SEQ ID NO: 4126739 - RNA, 65 nt, Human
ccccacaguccgugaggagccaugagaucuugcuuggagggccucuuacauggacugcucugggg

SEQ ID NO: 4126740 - RNA, 73 nt, Human
ccccaccaggcacucacagggaagacagggaaggaucuugagaaaguuuccuuugugcaggccuugggaaggg

SEQ ID NO: 4126741 - RNA, 120 nt, Human
ccccacccugcuacucaagaccauugaggccacgggguuugcugaaacuccucaaaaacugacaaguuuccacuggagacacuguggagaacauggucucagggaaauaacucucugggg

SEQ ID NO: 4126742 - RNA, 102 nt, Human
ccccacuagcgcugcccaaguccauuaggccccugccugaucugcccacuaauaaucccggcugucaggugccucaggaugagacaagcagaggggaugggg

SEQ ID NO: 4126743 - RNA, 55 nt, Human
ccccagaacacauggacaugaaucuaccuauucugugauucucugaguuuugggg

SEQ ID NO: 4126744 - RNA, 79 nt, Human
ccccagaacaccugucagacgcccugugguucguuagcuggcuugcagagcagccacaccuguccugccagcucugggg

SEQ ID NO: 4126745 - RNA, 66 nt, Human
ccccagaauuuuugaccugggaggaaucuuugcugagauguggauccuaggguagaaacagguagg

SEQ ID NO: 4126746 - RNA, 68 nt, Human
ccccagagcccagcacacggugcucaggggccaccugcuggcagucaggggcaugugugacucugggg

SEQ ID NO: 4126747 - RNA, 77 nt, Human
ccccagcacaugcaccuguagagaagcccccagguguugcagagagccccugagggaggguauaggcugugcugggg

SEQ ID NO: 4126748 - RNA, 62 nt, Human
ccccagcagcaccuggggcagugggucuccagcuuuacaccaaugcccuaggggaugcgggg

SEQ ID NO: 4126749 - RNA, 78 nt, Human
ccccagccagucugcuggcugucccuaccuggcuggauuucggccaggcaaagcgggggucaggggaagcaggcgggg

SEQ ID NO: 4126750 - RNA, 55 nt, Human
ccccagcccccagccucacccucauagaccaggagucagaggcugccagcugggg

SEQ ID NO: 4126751 - RNA, 129 nt, Human
ccccagccuuuaucuuugugugcaauugauuugugcuaauccuggaaugaguuugcugauuggaagccuuguccucaguagucuaggauuucaccuucaacccugucaccaucuggcuggacugugugg

SEQ ID NO: 4126752 - RNA, 56 nt, Human
ccccagcucugccaucaucugccuuugccugaaggugagaaacugcggaguggggg

SEQ ID NO: 4126753 - RNA, 58 nt, Human
ccccaggccaggagcauggcauugguggugcccaccaaauaggcuuccuggguugggg

SEQ ID NO: 4126754 - RNA, 128 nt, Human
ccccagggaguguggccucccuccaccccaugacucucgcuaccagggcccgguggucacuaugccacaaacucccaagcagggugcagaggcauggagggggcaacccuaaucauccucacaugggg

SEQ ID NO: 4126755 - RNA, 67 nt, Human
ccccagguggaggcaggaguugacagcauggauagagacagguaaggccacugaccuacaucugggg

SEQ ID NO: 4126756 - RNA, 76 nt, Human
ccccagucugaaugaugagugggacucugaauuccuuugacagagguggacccauucaaucaucagugaaaugggg

SEQ ID NO: 4126757 - RNA, 67 nt, Human
ccccagugcaucuguuaagacagugaguguugcccaauuugcaaguuguccaagguaugcacugggg

SEQ ID NO: 4126758 - RNA, 97 nt, Human
ccccauagcacaggcagcaagugugaggcacagcacagagcacauguacacgaguauuugugugcgugugugcgcaugugugcgcgugugaaggggg

SEQ ID NO: 4126759 - RNA, 60 nt, Human
ccccaucacaucaaaccuacucucagaaaagaacugaugaguccucugauguguggaagg

SEQ ID NO: 4126760 - RNA, 107 nt, Human
ccccaucccuagaagcccuugcuaacccagucuccucguguaaaccuuuccccagguuuacacuccaggcuggggugggcaaacaggggcucagcuauaggaugggg

SEQ ID NO: 4126761 - RNA, 57 nt, Human
ccccauggcaacugcugggggugagaggacgggucccaaggcagggaggacaugggg

SEQ ID NO: 4126762 - RNA, 74 nt, Human
ccccauuuaacacagaguuuuccaaccucugcacuauggauauuuugggcuggauaaucuuugucuuggagggg

SEQ ID NO: 4126763 - RNA, 78 nt, Human
cccccaaagcuggcuaagcccaggcugggcccucaucagccacgcggaaucagggcugggcuuguggccagcuggggg

SEQ ID NO: 4126764 - RNA, 72 nt, Human
cccccaaccugaggccuucucugcacaugccagaacaucugcaggaaaaaagugccuggggcagguacaggg

SEQ ID NO: 4126765 - RNA, 70 nt, Human
cccccaagaggcuuauagucuuccugucacucuccuugugagcauguaaauuggaaagccuuccuggggg

SEQ ID NO: 4126766 - RNA, 105 nt, Human
cccccaagucuuuuuacugauacaaaauauuuuacauguuuauggggguacauguauuuuuuauguacauaaaauguauaaugacugagucagagccuuuggggg

SEQ ID NO: 4126767 - RNA, 55 nt, Human
cccccacagggcggagauuaucugugaaagaaaauaucugcagcuccuggggagg

SEQ ID NO: 4126768 - RNA, 59 nt, Human
cccccagccagcagugcucagcuaaccuucuggagcaagcagugggguugguguggggg

SEQ ID NO: 4126769 - RNA, 96 nt, Human
cccccccugggcucauauggggaccugggccuuggauugacacuguaugcagcaaagacagcgucaaaggguccuggauaaaggcucugggagggg

SEQ ID NO: 4126770 - RNA, 130 nt, Human
cccccgggaguagagccucuggcagugagucaccacagccuccaucgcccguggccuuggacagagaagagcucggcgggccaugugggcagaggaggcuguacugcugggcaggccgcucccagcgggg

SEQ ID NO: 4126771 - RNA, 130 nt, Human
cccccuagagccauucaucuuuuuauguaugugcucugucucuccaauuagauuauaagcucuuaagaaaaagacccuugucuugauugaagagauagaaaaaauauuuagaaauguagcuccuucaucg

SEQ ID NO: 4126772 - RNA, 115 nt, Human
ccccgaccuuuuccuaguaaaaccccuuauuucucaucagauauaaguuugccuggaagauauaugucuggaauuugagguucaguuugcaugaggaggacaauuuuacuugggg

SEQ ID NO: 4126773 - RNA, 79 nt, Human
ccccgccccacaggaagcuggagacccuugaccuguccuacaaccggcuggugcacgugccccgcuuccugccgcgggg

SEQ ID NO: 4126774 - RNA, 128 nt, Human
ccccgcuugcucccaagacucuuguuguccugcuucaccguccccacaguaaccaggcccugcugccgucaauggaggcgagggggcgggagacagcagugacgucaaagcggaagaagggggcgggg

SEQ ID NO: 4126775 - RNA, 57 nt, Human
ccccgugacugugcccaucuuguggccuguaccugggcugguggcucagucaugggg

SEQ ID NO: 4126776 - RNA, 73 nt, Human
ccccgugguucugcuucucuuauuuucagcuggaauucuucagcugaagaaaugggaagcauucaacacuagg

SEQ ID NO: 4126777 - RNA, 78 nt, Human
ccccuaaaaugcauggcagccugcccugcuugccuugccaucgcuaguugcauuagccugggcaggcugcaaaagggg

SEQ ID NO: 4126778 - RNA, 95 nt, Human
ccccuaagagcugugcagagaaacucagauagcugauggucaauggacuaaaugagcuucacuguuuuucuaaugccagcacagacucuuauggg

SEQ ID NO: 4126779 - RNA, 93 nt, Human
ccccuagaauauuaaaugauaaaccuguggccacuaaauuugcuauaaggcugauuuuuaucuaaggucuucucuauuucugugcccuggggg

SEQ ID NO: 4126780 - RNA, 95 nt, Human
ccccucacucccggaaacgacguucagucccuggauuuagaguucuuuugcucaaauuggauuuuaaacuguugguuuucuguuuguuuaagggg

SEQ ID NO: 4126781 - RNA, 63 nt, Human
ccacaggaagaucucccagaggugcaaugaagaaacaccucuggauuggguucugucccgugg

SEQ ID NO: 4126782 - RNA, 59 nt, Human
ccacaggaccagaggagaucaccaugauaugguggagaaguccaaauauggugccuugg

SEQ ID NO: 4126783 - RNA, 55 nt, Human
ccacaggacuguggaaggaucucuugaggucaggaguuugagaccagccugcugg

SEQ ID NO: 4126784 - RNA, 60 nt, Human
ccacaggcacugcuaacuugggagggguucagauaccccuccugggcacaggccugaugg

SEQ ID NO: 4126785 - RNA, 76 nt, Human
ccccggaagugacugcaccuugcgguccuguggcuggagcaauucucccaggaaugaggggcggaggcuuccaagg

SEQ ID NO: 4126786 - RNA, 98 nt, Human
ccccggcuccuguuuuccacgugguucucacugcgguuacacacagccuguaggauauuguagaauacccaucauucuggaagucaggagaccuaggg

SEQ ID NO: 4126787 - RNA, 55 nt, Human
ccccgucagccucuccuuucugagaacugaguauggagucagggucuggcugggg

SEQ ID NO: 4126788 - RNA, 109 nt, Human
ccccgugcccuccucugcagacgugacacccgcaugccacugugccaggcagggcuucuggaggacgcaggugugggguuguuuguguugcauguggcccggcucgggg

SEQ ID NO: 4126789 - RNA, 91 nt, Human
ccccuaaugcacaucaauuguaaguugacuuaaaguuguacagauccuuccuuucugugcauugagucauuucaguaugucuauggagggg

SEQ ID NO: 4126790 - RNA, 64 nt, Human
ccccucaaagguucuuugagaacucugugcacauuuaugcagaauugauggagaacuuaagggg

SEQ ID NO: 4126791 - RNA, 129 nt, Human
ccccuccccgugucauaauaaaucucacguuuucugccggcuggaggcuuggagcggugaggugacguucauuucggccgcgugaaguuuucuuucaaacugggauugguggggaggccgggggaaggg

SEQ ID NO: 4126792 - RNA, 130 nt, Human
ccccuccugugaaguguuaagguccucguuuuuauuaaaugcaagugcuccugggagggcuaauagcuuaaguugagggaggcucuugcagaggaaggaugggaacagagacaguuuucuaggagguugg

SEQ ID NO: 4126793 - RNA, 83 nt, Human
ccccugccaaccaauggugcuggugcuggguguguuucauggcccugcccagcaggccucaugcaccagcuaccaugcagggg

SEQ ID NO: 4126794 - RNA, 62 nt, Human
ccccugcccaugauccgggacuagaggagcuauaaauccagucagugcgggauggucagggg

SEQ ID NO: 4126795 - RNA, 58 nt, Human
ccccuggagaauuucaacagagugguccauagaccacuugaaucaaauucuuaggugg

SEQ ID NO: 4126796 - RNA, 75 nt, Human
ccccuggcccauucauaaguaaaugauuaccuaauugugagguugggaauggaagacauuaugauggggcagggg

SEQ ID NO: 4126797 - RNA, 58 nt, Human
ccccugggaagugguaaagaaaauguggcagcuacuuuagaccaucuuccacaguggg

SEQ ID NO: 4126798 - RNA, 59 nt, Human
ccccugggccuggcgggucggcucugcugccggagccgguuuucaaguguccaucaggg

SEQ ID NO: 4126799 - RNA, 65 nt, Human
ccccugguguccgcaacgggcagcgcgucccggucgggucccgcauggucaguggccagcagggg

SEQ ID NO: 4126800 - RNA, 71 nt, Human
ccccuuccacucuguccccugugggaccgccgaccccuggggguuccgggaggaaagggagggaucugggg

SEQ ID NO: 4126801 - RNA, 128 nt, Human
ccccuuccccgccaccaccuccgucacaggccaucugucccugcacugcccacucucagcccuuuuaauagcaugggccuuggggaggaugguguccagggugguuucauaacaggccgggggagggg

SEQ ID NO: 4126802 - RNA, 77 nt, Human
ccccuuccccuccuagggcaguugaccugguggccucaucucucagcauccagcagccugccuugggagcuuagggg

SEQ ID NO: 4126803 - RNA, 62 nt, Human
ccccuucugcuuauuugcucuugcauuauaauccucacagcaaccuugagugggagaagggg

SEQ ID NO: 4126804 - RNA, 66 nt, Human
ccccuugcuacugauugaccuuggagaggugacuuggccucucugagccucaucuguaacaugggg

SEQ ID NO: 4126805 - RNA, 77 nt, Human
ccccuuggguaggaaagggagugaagggaaggucacuccugaguuuccaugcuuuccucuuucucuccuugaggugg

SEQ ID NO: 4126806 - RNA, 74 nt, Human
ccccuuuccagguaaggucacauucugaaguacuagggguuaagauuucaacaugucuuuuuuugguagagggg

SEQ ID NO: 4126807 - RNA, 94 nt, Human
ccccuuucccucucgggacuccucuagaaguugaggcccaugugcguggcgagcaucagcuaucugacgagugggcacugggagggugaggugg

SEQ ID NO: 4126808 - RNA, 82 nt, Human
ccccuuugccuccauggguugucuuugucuccacuuccagcuuuuauggggguggugagauguagcugauggggguuggggg

SEQ ID NO: 4126809 - RNA, 83 nt, Human
ccccuuuuccacuugagggucucugggcuacaaauugacaagcugagcagccucagagccugaggcccugagaggggaagggg

SEQ ID NO: 4126810 - RNA, 58 nt, Human
cccgaaggcggagguugcagugagccaagauugugccaccauugcacaccagccuggg

SEQ ID NO: 4126811 - RNA, 73 nt, Human
cccgacuuguuccucuagucucuguauuuccugccaacaggaagcugaauccagagacaggguccgauucagg

SEQ ID NO: 4126812 - RNA, 55 nt, Human
cccgaggaaccagagguagcuccguuuuggaaagagcuuccugguugcccauggg

SEQ ID NO: 4126813 - RNA, 84 nt, Human
cccgauuugcaucagugcucugagguccagggugaaaggaaagaauccccagcagcccgggccccagggcaaguggaggugggg

SEQ ID NO: 4126814 - RNA, 83 nt, Human
cccgcauggagauagacuuggguauauauguugcuacagaccuguacagacacuucugaauauguuuaucaucucuauauggg

SEQ ID NO: 4126815 - RNA, 91 nt, Human
cccgccgccgccgcgcucacgggcugccggguggcggcugagguuggcagugccgagcugccccgaggcggcgggaagcgcgcggcgcggg

SEQ ID NO: 4126816 - RNA, 57 nt, Human
cccgccuuggcaccaccaaguggccaucagcugaggggccgagggggugucaguggg

SEQ ID NO: 4126817 - RNA, 82 nt, Human
cccgcgucggcgccuucaggcccuuuuuguuguuaauaguuuuucuguguuaauugcagggagccugggggcgucgcuuggg

SEQ ID NO: 4126818 - RNA, 85 nt, Human
cccgcuucuuccagaccaaggaaggcugggcugugggagcuugguguuccuguccaguguccucguuuguaaaaugagagguggg

SEQ ID NO: 4126819 - RNA, 95 nt, Human
cccggaacggcaaucuccucacguguaaaguggagagagugacugucagucaccuggucagucagucacacucacugagguaggccugugguggg

SEQ ID NO: 4126820 - RNA, 55 nt, Human
cccggaggcagauguugcagugagcagagauugcaccacugcacuucagccuggg

SEQ ID NO: 4126821 - RNA, 55 nt, Human
cccggaggcggagcuugcagugagcugagaucgugccacugcacuccagccuggg

SEQ ID NO: 4126822 - RNA, 129 nt, Human
cccggauaccaguucaccauuugucccuucauucugcccaaaaaacugauggcuuccucugaaucugucaguaaggcaagugauuaucuaggaauugacagaagugauuaucuaggaauggagucuggg

SEQ ID NO: 4126823 - RNA, 61 nt, Human
cccggauccucagucgugcgggagucugggaggccuggcuuccucaggggugagguuuggg

SEQ ID NO: 4126824 - RNA, 111 nt, Human
cccggcacuuugggaggcugaggcgggcggaucacgaggucaggagaucgagaccauccuggcuaacaaggugaaaccccgucucuacuacaaauacaaaaauuagccggg

SEQ ID NO: 4126825 - RNA, 56 nt, Human
cccggcccagacucugggagcccccaaaggauggcucugaggaaguugggcacggg

SEQ ID NO: 4126826 - RNA, 57 nt, Human
cccggcgaggccccgaagcucucugaaagcuggacagccagucggggccaugcuggg

SEQ ID NO: 4126827 - RNA, 59 nt, Human
cccggcucagccuccugacccaggcccuggcuaagggcugcaggagucugugagucagg

SEQ ID NO: 4126828 - RNA, 56 nt, Human
cccgggaggaggaaguugcagugagccaaguucaagccacugcaccccagccuggg

SEQ ID NO: 4126829 - RNA, 69 nt, Human
cccgggccagccuucaccugcucuggucccagcugcccuugcuugggagagcuguggggccuggcaggg

SEQ ID NO: 4126830 - RNA, 64 nt, Human
cccggguucuggcuucagcaaacugaguaaaugauagugcuguuucuugagcuaggaaccuggg

SEQ ID NO: 4126831 - RNA, 92 nt, Human
cccgucauucccucagcacuuggcugaagacuagauguuuacucucuuauugggguaaaaugucaggauucuaggcacagcugaggguaggg

SEQ ID NO: 4126832 - RNA, 58 nt, Human
cccgucccuuuugcccgcuggugcaucugccuacucagcagcagggguugggggcggg

SEQ ID NO: 4126833 - RNA, 130 nt, Human
cccguccucacccccgggcucgucccccagccuccgccggcccgccugugaaugguggauuuaaugagcguuuguguggcguuggccggcgguucugaagaugcgcugaccuggagggagggcgcgaaag

SEQ ID NO: 4126834 - RNA, 81 nt, Human
cccgugauuuaguuauuuguacuauuugcaucauggagcuuuacccauagcucauccaaggucacauaacuugucaaaggg

SEQ ID NO: 4126835 - RNA, 62 nt, Human
cccguguuccugcucagagcuggcacaaccgaccaaggcagaagcucugagaggggcauggg

SEQ ID NO: 4126836 - RNA, 67 nt, Human
cccguuuucuguggguaauaccucauaccgugaccaggcacagaggcggaggagaccccgggauggg

SEQ ID NO: 4126837 - RNA, 99 nt, Human
cccuaaaggucuugugauuucagagucagagcuccauggaguuggugaggggccaacuuuuuggggaguugagcuuuugagucaaauguugacaaaggg

SEQ ID NO: 4126838 - RNA, 59 nt, Human
cccuaaccaaagggccuaaggaaugaccguuugguauuccuugggacccuuggugaggg

SEQ ID NO: 4126839 - RNA, 55 nt, Human
cccuaagacccucaagaucuccuaaaaagagagccuuccauccuaggguuuaggg

SEQ ID NO: 4126840 - RNA, 76 nt, Human
cccuaauuuuugaacugugucugcccgugaaguccuggaguuccauggcugugccucaaggcuacucaagaaaggg

SEQ ID NO: 4126841 - RNA, 67 nt, Human
cccuaccaggaggcucccaaggggcuaggccagguuuuggcaaggcccugguguuucagauguaggg

SEQ ID NO: 4126842 - RNA, 88 nt, Human
cccuagauggcacuucaguuuucccuccugcagguagcaucagcacuaggcacuguagugggggagaaauggucugagaugcacaggg

SEQ ID NO: 4126843 - RNA, 79 nt, Human
cccuaggaauuacagguuguguauucagugaucacagaguauagugauucacugaaggaagacacugucauaccugagg

SEQ ID NO: 4126844 - RNA, 80 nt, Human
cccuaggaguuuacaugacguguauuucaggcaaaccacuuaaccuuuccuaugaaaccaaucauguuugugucuuaggg

SEQ ID NO: 4126845 - RNA, 95 nt, Human
cccuauaaaaaugcaaacgcugcugggagggaucguaaaucauuaauaccacucugugaguuuaucagaucacuccuugcuauguuguaggaggg

SEQ ID NO: 4126846 - RNA, 107 nt, Human
cccuauauaaguagacuacaucuuguaaaacugcuugguauggucuaauagcacauuagauguacagagcuguuuuaaccauuugaccuaguuuuuacugcccaggg

SEQ ID NO: 4126847 - RNA, 78 nt, Human
cccuaucacugaccucuugucggagcuccagauauauccuguugucugcuggagaucuugacauugaagucuaugggg

SEQ ID NO: 4126848 - RNA, 118 nt, Human
cccuaucuccaucuucuuucuucuaggguauaauugacuuacuagguuuguuggaaauccuucugugugacucuucaguacaauaauaucuccaagaaguaauauuuguuagguaggg

SEQ ID NO: 4126849 - RNA, 66 nt, Human
cccuaucugucuccagggcaucugggcugagggcagcccuggagggaagcacugaggcagagaggg

SEQ ID NO: 4126850 - RNA, 105 nt, Human
cccuauuuucaaauaaggccacauucugaggcucagggaguauaugaauuuugggugacacuguucaacccccuagaguuggggagaguggcuguuggucuaggg

SEQ ID NO: 4126851 - RNA, 76 nt, Human
cccucaaagacuccugccuccucuguuugcugcaguagccauccugaagggcaagcaagcagguagagcugauggg

SEQ ID NO: 4126852 - RNA, 90 nt, Human
ccacagggaagggggcuggcuuucucgugugggucagagaauaguuuccaaggacaccacagagagugucagccuuugcaggccuuuugg

SEQ ID NO: 4126853 - RNA, 59 nt, Human
ccccuguccuuggaugcucuaugcaagguccauuaaaguacaggagaucuggcagaggg

SEQ ID NO: 4126854 - RNA, 78 nt, Human
ccccuuacuggaacaccauuuccucucugcuccucucccauagggagcacaugagcugauggugggcuggugaggagg

SEQ ID NO: 4126855 - RNA, 122 nt, Human
ccccuucccugaaauauguauggauuuaaguaaaauucuguuuccuuagcuuguaaguaaguagaugcaaaauggaguuuagauaugcuuauguucauguuuuggggaaaaaaaggaagggg

SEQ ID NO: 4126856 - RNA, 61 nt, Human
ccccuucccuucugggagauccauucugcuucagggccuggguccuugggggcggaagggg

SEQ ID NO: 4126857 - RNA, 95 nt, Human
ccccuuuacuggggucucagaaugguuuaguuaagacugaguguaaacugaaacaaauuaguuuuuaaacuauggaguauuugaagaaaaggugg

SEQ ID NO: 4126858 - RNA, 56 nt, Human
ccccuuuguuuugcccuugcagcagcaaaugaugcucuggcaggaagacggauggg

SEQ ID NO: 4126859 - RNA, 99 nt, Human
ccccuuuuagagguuuagcuggcagcugguacagugggucugcuauccucucuccuggaacagauccuguaucaggcacagcccagcuuugucuagggg

SEQ ID NO: 4126860 - RNA, 70 nt, Human
cccgacuagcugggauuacaggcaccugccaccacgccuggcuaauuuuuguauucuuaguagagacggg

SEQ ID NO: 4126861 - RNA, 57 nt, Human
cccgacucugggcugagccagggcccgaggcuggccccaggcgcugcccggagcggg

SEQ ID NO: 4126862 - RNA, 80 nt, Human
cccgaggccaugcagcagcuacuugggaaggaaagagugacccucccauuccuacccaaagcuuuggaugcaucuuaggg

SEQ ID NO: 4126863 - RNA, 64 nt, Human
cccgaggucagaggccuggugugagcuugguaugcccugccagggagcccugcugaccagaggg

SEQ ID NO: 4126864 - RNA, 61 nt, Human
cccgagugcaccugcguuccugcugguccgggagcugaucagguggauucacuaauuuggg

SEQ ID NO: 4126865 - RNA, 74 nt, Human
cccgcaaugcgccugcuuggggcucccugcagccucugggggaggcagggcggcccagagcaggccugugcugg

SEQ ID NO: 4126866 - RNA, 87 nt, Human
cccgcacgccacugcuggggguagcucugcguaggacuccacaauguuccccgcauuguuuugugcugacugcgcccagcucgcggg

SEQ ID NO: 4126867 - RNA, 58 nt, Human
cccgccaggaaccccugagggugaguggucccuguucuucccuaggggcuccugaggg

SEQ ID NO: 4126868 - RNA, 63 nt, Human
cccgccgccucaagccagcaguucuggaaaaugagugaaugcagacugccugcagguguuggg

SEQ ID NO: 4126869 - RNA, 73 nt, Human
cccgccggcccccagcucccaucccugccagccuucccacggcagggagccuuccuggcugugguguuccggg

SEQ ID NO: 4126870 - RNA, 103 nt, Human
cccgcgcuguccuggggagcgguuugcuuuccuaacucaucggauguaccacccuggauacacacccuugauaggacugcggugcucggccgggcagccuggg

SEQ ID NO: 4126871 - RNA, 77 nt, Human
cccgcuagugggccuaauuugcagugacccccuuuaccuuaagucauaguaucugcaacaaggccucauuucuuggg

SEQ ID NO: 4126872 - RNA, 70 nt, Human
cccgcugccaaguaaugccugggcucccgggcuacacgcugcuuagggcuccggcuuuugcaaggagggg

SEQ ID NO: 4126873 - RNA, 77 nt, Human
cccggaacaaacacggguagauggcaccaccugguggccgcacugccacacagccaucccagccugugguuccaggg

SEQ ID NO: 4126874 - RNA, 56 nt, Human
cccggagagcaggcuggccgugucggagcugagcugggccggggagcucuccaggg

SEQ ID NO: 4126875 - RNA, 56 nt, Human
cccggagggcccugcccaugguggcugaggaagaagugcaggugggcccuucuggg

SEQ ID NO: 4126876 - RNA, 90 nt, Human
cccggcgugggaacuggcagcuguaggaugcaugggugucaacccugccugccacguucagcuguaaccagagccgcccacggagccggg

SEQ ID NO: 4126877 - RNA, 55 nt, Human
cccggcucugagggccccaugugcuuugacuugguggaaggcugcucugccaggg

SEQ ID NO: 4126878 - RNA, 59 nt, Human
cccggcugucucuggcagcucagcggucagcagcgaugagaagccaggggagcgugagg

SEQ ID NO: 4126879 - RNA, 81 nt, Human
cccgggagccaucuuuaccagacaguguuaggagcuucacaauuagaccauccaacacuguacuggaagauggacccaggg

SEQ ID NO: 4126880 - RNA, 62 nt, Human
cccgggcggguuuccaucgcuggggguggccugguacccccaaagcugaguucccgccuagg

SEQ ID NO: 4126881 - RNA, 66 nt, Human
cccggggcguggguggcggccugguucugagucgcugcgcggggcuucagccgcccagucccuggg

SEQ ID NO: 4126882 - RNA, 72 nt, Human
cccgggggccccucggacacgugcgggccagaugccggccaccgggccccgccgugucgacaggcccugggg

SEQ ID NO: 4126883 - RNA, 129 nt, Human
cccggugacuuaauaggugagggccucaggugacaccgucgucugaagucuuggagaaaccuuuacuguccaggggaggagaggacuggcggucgguggggaucgaggcccagcacacaucacugggug

SEQ ID NO: 4126884 - RNA, 73 nt, Human
cccgguguggugguggaugucuguaaucucagcuaccugggaggcugaggcaggagaaucaccggaaccuggg

SEQ ID NO: 4126885 - RNA, 60 nt, Human
cccguagcucuuugccauuucuuagcuagaaggccagcuuucaguuacaggcacuguggg

SEQ ID NO: 4126886 - RNA, 60 nt, Human
cccguagcugccuuugggcuccugcuggggucucucccacagcggcgcgguagcggcggg

SEQ ID NO: 4126887 - RNA, 120 nt, Human
cccgucuugcagaauguucccuaagugccaggcuggcgucaggggcuguacauagauuaucucugauccccucuaagauugcuguugugguaagugugaguggcccauuuugcugauggg

SEQ ID NO: 4126888 - RNA, 57 nt, Human
cccguucagagccucaccgagccgugcugaggccucuguguagccaggucuggaggg

SEQ ID NO: 4126889 - RNA, 84 nt, Human
cccuaaaguguuaugaaugaucucuuaaaagauuuuaaugacuccaucagucaugaucuaguaggaaauggcacauucaaaggg

SEQ ID NO: 4126890 - RNA, 71 nt, Human
cccuaacuuccuuguacugacuccauuaaggcaacucaacaguauagucugaguacauagucaagcugggg

SEQ ID NO: 4126891 - RNA, 60 nt, Human
cccuaagaagcuaagacuaucuggguaaguguguacccaguagccuaaccuagcuuuggg

SEQ ID NO: 4126892 - RNA, 89 nt, Human
cccuaauacccagaaaaauacuugacacuggcaaguggcagucggcacucaaugaaugucuacaccguauguuguuguuuucugaaggg

SEQ ID NO: 4126893 - RNA, 63 nt, Human
cccuaaugagguguucuaucagucaggguccccccaggaaacagaugacauacucacuuaggg

SEQ ID NO: 4126894 - RNA, 114 nt, Human
cccuaccuccaucuugcaaacagcaggugucugauaggugugugguucauggcccaguggacacauuacauuggagaaggcacacccaccucuguuuucaggaugguggacggg

SEQ ID NO: 4126895 - RNA, 91 nt, Human
cccuacuccucaauuucauugucaucuaucuuagauauguguaguuacuacaaguucccaauagauggcaggaaaguguuuugaggaaggg

SEQ ID NO: 4126896 - RNA, 93 nt, Human
cccuacuggcuguguuacaucauauggaauuuaaagucacuggaauugagguagcagugagaagcaucauaugauuuaaaauaaagcuuuggg

SEQ ID NO: 4126897 - RNA, 85 nt, Human
cccuagauagaaggcaagugucauaugccacugcauccccaacucugaggacaaagccugguggcagguggaccuucauucaggg

SEQ ID NO: 4126898 - RNA, 65 nt, Human
cccuagccccagccucuugccaccuaaguguaaguguaaacucucaccaggagauggaggcaggg

SEQ ID NO: 4126899 - RNA, 60 nt, Human
cccuaggggcaaugauggugcuggggugugauguuuucaguaugaaguugugcuuggagg

SEQ ID NO: 4126900 - RNA, 58 nt, Human
cccuagguaagggucacaguucauauuccaaauaugacugggaugauauugcacaggg

SEQ ID NO: 4126901 - RNA, 81 nt, Human
cccuagguguccucucaaggagccgagauuaccauggcuauuggugggcugaggggccuugaugacaggcagcaccaaggg

SEQ ID NO: 4126902 - RNA, 84 nt, Human
cccuaugaugaagaaauacuaggaauauucauaauggaaagccuuuuuguguaugucugugaauguccuguauuaucaauaggg

SEQ ID NO: 4126903 - RNA, 55 nt, Human
cccucacuguccuugggcccuuggccucugcugagggcgugggggacgguguugg

SEQ ID NO: 4126904 - RNA, 75 nt, Human
cccucagccucaguuuucuuuccaggaugacgucuucacagaguugugauggaggugaaaugagauuuuguaggg

SEQ ID NO: 4126905 - RNA, 82 nt, Human
cccucagggaauagcaacuuuggcuuuguucuugggauuuuggugaaaucagaguagaauugagccaggguccugguuaggg

SEQ ID NO: 4126906 - RNA, 59 nt, Human
cccucauacccugccccacugaggcugacucuucagugcuaaaagagcuggugugaagg

SEQ ID NO: 4126907 - RNA, 58 nt, Human
cccucaucuuuggcccugacacccucggauugccaggcuugucucagaagaugcuggg

SEQ ID NO: 4126908 - RNA, 68 nt, Human
cccuccaggaaagucaggcuuagauaucccuugcuguguuucugccuuaucuuugcugagacgauggg

SEQ ID NO: 4126909 - RNA, 64 nt, Human
cccuccaggcacugcccucuuccagagaaacccuccaggccacagagagggcugcuggggaggg

SEQ ID NO: 4126910 - RNA, 59 nt, Human
cccuccagggcgcugggggugucuccauguaucacaccauccugcaguuccuaggaggg

SEQ ID NO: 4126911 - RNA, 100 nt, Human
cccucccagugcugauccugccugccugccaagaaccguguugcccucgggggacaacagugguuucagguucccuccaggaagcaugccuggggagagg

SEQ ID NO: 4126912 - RNA, 76 nt, Human
cccuccccugcacucacccugauuuuuuucucccucuaauugagggagcaaagguuucaggguuguggccucuggg

SEQ ID NO: 4126913 - RNA, 86 nt, Human
cccucccucaggggcugugcauuucccagccaucucuuugaaguuaggcuuuuuggguuggaggaguaguuugccuuuuggauggg

SEQ ID NO: 4126914 - RNA, 64 nt, Human
cccucccuuugcagcagugcaucucacgguacagauuagaguuuagccugcagaaaaggcaggg

SEQ ID NO: 4126915 - RNA, 97 nt, Human
cccuccgcccccagcuccuuggccugggucacaccagggucccggucggauuuagccgggcugcuccgggucgggugaggcacugggugcguguggg

SEQ ID NO: 4126916 - RNA, 129 nt, Human
cccuccuucaauacgcccuugaaauuccccugcuucacagccuuacugagauccacuucuagcacuuuucugaaggccucuggaggacucccaguaagauguccagagggcacauuuagggacgugugg

SEQ ID NO: 4126917 - RNA, 72 nt, Human
ccagcuuggaauaugccauuguaccuucaaucucagaagugcuacaucacaauaguauaaaauucaugcugg

SEQ ID NO: 4126918 - RNA, 56 nt, Human
ccagcuuguuugaagcucgucaggauguuccuugcagaccccgcuuagccagcugg

SEQ ID NO: 4126919 - RNA, 92 nt, Human
ccagcuuuaagggggcuuagacagacagagaauuuaaauaccucuuuagguuauaguggagauauuuagcugugucuauaaggcccagcugg

SEQ ID NO: 4126920 - RNA, 59 nt, Human
ccagcuuugugcaaugcagucucuaaacacuccucuagggaugacaauucaagggcugg

SEQ ID NO: 4126921 - RNA, 62 nt, Human
ccagcuuuucagaaucugccugaaaguggccuaagaauggcacaggccuucaggauggcugg

SEQ ID NO: 4126922 - RNA, 76 nt, Human
ccaggaaaauaccaagcuuuaacccaguuggcaguuccuuguggcauacauuugguuagacuuggguuuuuccugg

SEQ ID NO: 4126923 - RNA, 56 nt, Human
ccaggaaagaggaagaacgcauauguaaaccaugccuaccguuuuccuuuuccugg

SEQ ID NO: 4126924 - RNA, 64 nt, Human
ccaggaaagcaaccaguccacauuggagcaggaaaacuccaggcuucaggagugguuuccaagg

SEQ ID NO: 4126925 - RNA, 80 nt, Human
ccaggaagccagaagcuucguggcucuucaaaugaagucucuuucagaagucugccugccggggccuuuguguuaccugg

SEQ ID NO: 4126926 - RNA, 61 nt, Human
ccaggaagccucagaugcugagcuucccacauuccugcucccagcucccugaucuuccugg

SEQ ID NO: 4126927 - RNA, 59 nt, Human
ccaggaagugauggagagaguaucugggcugcucuggguaaaucccauccuuucucugg

SEQ ID NO: 4126928 - RNA, 75 nt, Human
auggguguaagauuauuuugugcaauaaucggaaaccaccaaauauuaacaaaguaauuucuacuuugcagacau

SEQ ID NO: 4126929 - RNA, 63 nt, Human
auggguuaacacaugcaauugcacuuugcaaauucugaagugacauacaaauguguuguucau

SEQ ID NO: 4126930 - RNA, 66 nt, Human
auggguuuggacauguugagucugauaugccauugugacauucagguagcaguguccgauagacau

SEQ ID NO: 4126931 - RNA, 61 nt, Human
augguaacuuguacauuucccuguguucacagcagcacaguggaaagaaacgaauuagcau

SEQ ID NO: 4126932 - RNA, 83 nt, Human
augguaaggguauguguuuuuaaguaaacauuuguucauguguauauguguuagauuaccuuguaaaacauauuccuuauugu

SEQ ID NO: 4126933 - RNA, 73 nt, Human
augguaggccaagguauacaaugacuaugauaaugaaugauauaauagucauuguauaccuuggccuauccau

SEQ ID NO: 4126934 - RNA, 81 nt, Human
augguaucuggaugcccauaaaauagagucuaaacucuugauugugauguaaaggcucucaauaugauccaguccuaccau

SEQ ID NO: 4126935 - RNA, 102 nt, Human
augguauguaucugcuuuuccagaguuguaaguguugacaaagacaaugucauucuggauauugucaacacuuacaacuccggaaaagcagauacauaccau

SEQ ID NO: 4126936 - RNA, 121 nt, Human
auggucccacucuacucugcaauuggucagcuuauauuuuuaguguaauagucuguucuggguaucacauuuuauguagaauauagguacaccaagaaguauucagaggagggaggaccau

SEQ ID NO: 4126937 - RNA, 74 nt, Human
auggucuacaaagccauucaggaucuagcccucacuuuuuuugguagaucccuugugguuuuuaguucagccau

SEQ ID NO: 4126938 - RNA, 82 nt, Human
auggucuugaucuccucaccuugugauccucuugccuuggccucccaaagugcugggauuacaggccugagucaagauacau

SEQ ID NO: 4126939 - RNA, 79 nt, Human
auggucuugccaauauuagcuguguaacucugguuggauaaauugcuuaaccuuguugaguuuggcuaaccaagaccau

SEQ ID NO: 4126940 - RNA, 76 nt, Human
auggugaaguacuucucuccugauggcugaacuguggcucggggcugcauguagaccaggagggacauuucagcau

SEQ ID NO: 4126941 - RNA, 81 nt, Human
auggugagcuuaugauguuuacauaaaaguucuauaagcuguguauacaguuuuuuauguaaaauauuaaaagacuaugau

SEQ ID NO: 4126942 - RNA, 86 nt, Human
auggugaguccuuggaaggcaggaacccugugugcgccuguuucugcagagcacagugcaguuucugcuaacagagggccuaucau

SEQ ID NO: 4126943 - RNA, 56 nt, Human
auggugaucagcccuuguaucuuucaccaauaagaaaacagggcucuggacgccau

SEQ ID NO: 4126944 - RNA, 86 nt, Human
auggugcagagaguguggggucuucucuuggccugggcugauugccuguucucugugccuaggcagaaacccccacacccaaccau

SEQ ID NO: 4126945 - RNA, 68 nt, Human
auggugccaagugccuuuucacaaugucuuguguaauccucauaaagacccugagaaguaggcaucau

SEQ ID NO: 4126946 - RNA, 66 nt, Human
augguguguaugugugcaaauguaaauauauaccuguguauucauuuauuuacucauccacgcuau

SEQ ID NO: 4126947 - RNA, 80 nt, Human
augguuaaguguccuggaguuauaaugccugaacauaagugaccauuaaaugauuagguuuuucuuugacacuuuacuau

SEQ ID NO: 4126948 - RNA, 55 nt, Human
augguuauuucauggaaaaauuggagaauuaccauccuuucaugauauuggccau

SEQ ID NO: 4126949 - RNA, 105 nt, Human
augguucuuggguguugacacuggaugcagaagcagaacuuacacagucugaacaaacgggugguuagaaaagauuguuucaagccucuguguuccuaagaucau

SEQ ID NO: 4126950 - RNA, 64 nt, Human
augguuguuacuuggugucucuggcugcauuuuguuugucgcugcugguuccgugacuguccau

SEQ ID NO: 4126951 - RNA, 83 nt, Human
augguuguucagcuguuagucaaaucaguugagacauucaaacauugucuauuugauuucuucugacaacggagcaucaccau

SEQ ID NO: 4126952 - RNA, 94 nt, Human
augguuuagauccagucagcuccaacagauagcccucggaauuccccuaaggucuugucaguguuggcagcuuucaacugguguucauugccau

SEQ ID NO: 4126953 - RNA, 57 nt, Human
auguaacaguaagccugugagcugcagaagaacagcaguuccaaggaucuguaacau

SEQ ID NO: 4126954 - RNA, 68 nt, Human
auguaaggcaaaggggaaguuaucauucuuugaccuagauugaauuaaccagaauucccucugcucau

SEQ ID NO: 4126955 - RNA, 130 nt, Human
auguaauaaauuggugaacgucuacuuuagaaggguggcaccacauaucauagaaucauuaauuuucuguugauuauuauuguggaauugcuacuuuuuuguagggcaauauuuucacuuuagaaugcau

SEQ ID NO: 4126956 - RNA, 88 nt, Human
auguaauggggugcgucagcuggauccgaguuagauauugcuguaaauguugcuuagcuuugccaucugucacauacucuuuuugcau

SEQ ID NO: 4126957 - RNA, 100 nt, Human
auguacaauauguugcaagauuaucuucuucuuguuaggauucugaauuuaauugauucaugcaauaaaaagggaauaugguuuuguggcacucaaacau

SEQ ID NO: 4126958 - RNA, 68 nt, Human
auuuaugcagcacuuuacauuuggaaagaggucaaugaaaucuagacagauuugagugcugccuaaau

SEQ ID NO: 4126959 - RNA, 102 nt, Human
auuuauguuccgaggcucuucccaucuugcauugaucaaaguuugggcucugugggcuaaccuuuguucaauguaagaugggaacagccuaggaacauaaau

SEQ ID NO: 4126960 - RNA, 59 nt, Human
auuuauugacuucagugagucuuggguuacagauuuccaaacagagcugaguaauagau

SEQ ID NO: 4126961 - RNA, 63 nt, Human
auuuauuggaugcuuacuugggccaguauaucucccauuggcgcagguaagcaucuaauaaau

SEQ ID NO: 4126962 - RNA, 83 nt, Human
auuuauuucagcucagaggaaagggaacauagucaaaagacuauuaaaacauguaauccuuuuuuucugauaaauguauaagu

SEQ ID NO: 4126963 - RNA, 72 nt, Human
auuuauuugcuagugaggccagugacauauauuaaguuaacuuacuauauauaggaccucagugaagugaau

SEQ ID NO: 4126964 - RNA, 56 nt, Human
auuuauuuggggaauuggcucacaaacuauggaggcugagaagucccaugauaggu

SEQ ID NO: 4126965 - RNA, 80 nt, Human
auuuauuuuauaaaguguuaugagaacuaaguggguuaguaaauguaaagcacuuagaauauagcacugacaaagugaau

SEQ ID NO: 4126966 - RNA, 93 nt, Human
auuucaaaacauggcuuuuccaggcagcaaauuuucugaauguaucgcaaaagaagauaaauugcaugucuauguagaucaugucaaugaaau

SEQ ID NO: 4126967 - RNA, 80 nt, Human
auuucaaaauguuuccaaaccucaucagugaaggacauaccuacauuucuaacccagaugagguuuuugaaauguggaau

SEQ ID NO: 4126968 - RNA, 63 nt, Human
auuucaaggauguuauauaaauggaaucguacaauauauagccuuuugagauauccuugagau

SEQ ID NO: 4126969 - RNA, 66 nt, Human
auuucaccuuguaagcaaauggaaggcuuugaguaacaugaucgcaagcaggcugcagggugaaau

SEQ ID NO: 4126970 - RNA, 67 nt, Human
auuucagagugagagugcucaaggcugcaggugcaagacagcacugguaaggacucuuagcugaggu

SEQ ID NO: 4126971 - RNA, 87 nt, Human
auuucaugaaacauuccccuugagaaauaccugaguaaaauuaauucacaaucaguagaaacccagugggaauguguucaucgaaau

SEQ ID NO: 4126972 - RNA, 70 nt, Human
auuucauguuucaucuaccuaauaagcauaauucuucccuugcagaacuagugggggugaaauaugagau

SEQ ID NO: 4126973 - RNA, 66 nt, Human
auuuccaaaaccacuuauugccuuucaggcugauguaagaauaguuaugagugguuauaagggaau

SEQ ID NO: 4126974 - RNA, 58 nt, Human
auuuccaguccuaaugaucugguagcuuuucagguauuuguuauuaagauugguaaau

SEQ ID NO: 4126975 - RNA, 123 nt, Human
auuucccaguaguucccuaaauuuaguaaauauuagaaucaucuggaaaguuuguuucaauguaguuucauuggaccaauuccugauauuuuguuuacuauauauggaguggauuccugaaau

SEQ ID NO: 4126976 - RNA, 94 nt, Human
auuucccgaguuagauaauguauuugaguuaugaaagagaauauucauguuuuuuaggaaacauacacucaaguauuuagggauaaagggggau

SEQ ID NO: 4126977 - RNA, 66 nt, Human
auuucccuuugcuuuuaaucuuuguacauccuuuucaguagggugugggauuagaggaggggaggu

SEQ ID NO: 4126978 - RNA, 65 nt, Human
auuuccugacaguggaaccuuauaguucuugauuuuuaagagagagcauucuucuguuaguugau

SEQ ID NO: 4126979 - RNA, 87 nt, Human
auuuccugauuaucagcuuguuauguuuuaucaacuuuguuaguugaauccuggcuaaaguuuguuauaugauaaggaacaggaaau

SEQ ID NO: 4126980 - RNA, 115 nt, Human
auuucgcacuccacuaaagaaaaaucaaaaugcuucucuuuacaaagacuguguauucaauaccuuaaacgaacuugaaguggagcuuuugaaauuuguguccgaagugcagaau

SEQ ID NO: 4126981 - RNA, 130 nt, Human
auuucuaaauacauuugccacuugguugccagcuggagagaccgaaagaggcugagggcauggagagcugcauuuucuaaaugguuucaggccccuggcauuucagcaauagguaauacaaaacagaugu

SEQ ID NO: 4126982 - RNA, 78 nt, Human
auuucuagacuaacagucuccgcuugaaacccugaaauuuaccaauuuggguuuuaaaguagauuauuagcuagaagu

SEQ ID NO: 4126983 - RNA, 129 nt, Human
auuucucauuucauaguuacauaguguauucaguucuuaaaugacugauaagaggaagucacagugcacuucuaagagcugcugucaucauuugaaugcuguaggaccuuuggcugaaaugaaaagacu

SEQ ID NO: 4126984 - RNA, 70 nt, Human
auuucugccauuggagaauauucuauuugauagcacuauuccagauuguaaauuccucaaggacagaaau

SEQ ID NO: 4126985 - RNA, 88 nt, Human
auuucugccuugaaauuuugcuacaguugguggaaaaaaugcacucaaacccauauuuccaugcuguuguuagagagggggcaggaau

SEQ ID NO: 4126986 - RNA, 59 nt, Human
auuucugggcucuaauccaggaacauugaaucagaauaucugggggugagccuagaaau

SEQ ID NO: 4126987 - RNA, 56 nt, Human
auuucuguggcuucauucuccugugauggccgaugaaaccauggagccacagaagu

SEQ ID NO: 4126988 - RNA, 86 nt, Human
auuucuuaucuuaggauauagguucauaguguuacagcuugcagucuguaaucuuaguauuaggaucauauuugaagaucagaagu

SEQ ID NO: 4126989 - RNA, 86 nt, Human
auuucuugcaguccucucagcauauuucugaucacagucccaaaugacauugagaagcccugauaggaaaaugcuguguaagaaau

SEQ ID NO: 4126990 - RNA, 129 nt, Human
auuucuugugcagacucagaaaauagcuuacuuaucacacugugccugucagcugcauuguaggugccagccuagugcagugguaugauggguaaggccgguucugggugaugucugugcugcugagau

SEQ ID NO: 4126991 - RNA, 58 nt, Human
auuucuuuccaugagccuauguacccauuucuguuggguauauuccuaggagagaaau

SEQ ID NO: 4126992 - RNA, 95 nt, Human
auuucuuuguaccaucuuuuccucugccuccuugguuaaagugauuacuaaggagcuacaaaggagugaaaaaaaucaggugguguguaaggggu

SEQ ID NO: 4126993 - RNA, 80 nt, Human
auuugaauguuggauugacuuaguaaaagccaaugugcacaauuagaguuggcaacucuaagcaauauagccuucugagu

SEQ ID NO: 4126994 - RNA, 115 nt, Human
auuugagcauagacuauuagacgauacugaauuaauguuaauugucuuaggugugaugaugggauuauaguaaucuaagagaauuuucuuauuuuugguagauacaugcugaaau

SEQ ID NO: 4126995 - RNA, 125 nt, Human
auuugaggaaaucuuacuauagauuuuguuuacauggaauguguacuaaguuacucccuuaaaggagagcaugacuuuuguucauuuuucuguauauauucaucuauauauccaucuguucaaau

SEQ ID NO: 4126996 - RNA, 60 nt, Human
auuugagguaugguaagguaaaaucuuuuaaaaugaggaugccuuuauaaugcuacaaau

SEQ ID NO: 4126997 - RNA, 77 nt, Human
auuugauguuuuauaaugucugcagagccacacaaccucaguaggcugugggggccauagacguuuuauuuucagau

SEQ ID NO: 4126998 - RNA, 64 nt, Human
auuugcagagcucugaauuuugaccucuuugcugcaagccugugaauuuucagaacucucagau

SEQ ID NO: 4126999 - RNA, 78 nt, Human
auuugccagugcuguguuggcugccggcacaggaggcccguucuguauucugcugcuggcaccgggggauaugcaaau

SEQ ID NO: 4127000 - RNA, 58 nt, Human
auuugcugagcucaaagaaaaggcauuacaaaugcaguugaucuguggcuuaguagau

SEQ ID NO: 4127001 - RNA, 57 nt, Human
auuugcuuggucuucucuccguagauaaugggguuaagcaugggggaacaagcaagu

SEQ ID NO: 4127002 - RNA, 77 nt, Human
auuugcuuuaaagaucagacuguuuggacuaagccucuuaauaggaaggcucuggcaacagcugguguuagguagau

SEQ ID NO: 4127003 - RNA, 56 nt, Human
auuugcuuugggacagcuuaaacugaaaacuuucugucuuguggaccaaagcaagu

SEQ ID NO: 4127004 - RNA, 77 nt, Human
auuugcuuuuccuuuucucucuauucuuaaaaagcauuggagaaacuguaggagggaaaggaaggaggguggcagau

SEQ ID NO: 4127005 - RNA, 56 nt, Human
auuuggaagguuuacaaagagagauuacuacuuuucucagugcagauuguccaagu

SEQ ID NO: 4127006 - RNA, 61 nt, Human
auuuggaaguuuggagugaagggaaacaauaagcuuacuuuuacauacgcaaacuccaaau

SEQ ID NO: 4127007 - RNA, 63 nt, Human
auuuggcagacagagggaggaagaaacaagccuacaagaauucuuaccagccuccugccugau

SEQ ID NO: 4127008 - RNA, 129 nt, Human
auuugggugcaguucacuugcuaggaaggaggaagccacccagcuuugauagaccccaaacgccuagaaugagacgguuuauucaccgcaggugcuucccucuggaaccuugcucacacacaccuaagu

SEQ ID NO: 4127009 - RNA, 74 nt, Human
auuugggugggagcaggaagcaguugggaauuagagggauauggaaagauauuuucuccagcuugcacuuaaau

SEQ ID NO: 4127010 - RNA, 68 nt, Human
auuugguaucuguuccaggcacucagcuccugugugcagaaguaagagggcccagaaugaggcuaaau

SEQ ID NO: 4127011 - RNA, 70 nt, Human
auuuguaagauaguuuuauuuuauuuacauucuuaugagaacuaauugaaaugagacuggugauacaagu

SEQ ID NO: 4127012 - RNA, 60 nt, Human
auuugucccauugaccccaagguaagucacaugaccaagcccaagaucaguggggcagau

SEQ ID NO: 4127013 - RNA, 74 nt, Human
auuugucugaggcauguuugagagagcacugcuaucaaaguaguaaguaguuccauccaaacagccagaugggu

SEQ ID NO: 4127014 - RNA, 85 nt, Human
auuuguggauaaagucgaguucugauuuugccauugggaugaugguuguggcacauuaacuuuggcaagucagacuucugcaaau

SEQ ID NO: 4127015 - RNA, 113 nt, Human
auuugugugaugguauuucagguaguauucuguuuucuaaucuguguacuggaacacacuuucauaacuggcacacagauuaggaaacagaauacuaccugaaucccacaaau

SEQ ID NO: 4127016 - RNA, 62 nt, Human
auuuguguuguauuaagcugcuaagauuauaguaauuugugaugcagcaauagaagacaaau

SEQ ID NO: 4127017 - RNA, 55 nt, Human
auuuguguuuucccauacuauugagacauuucaguagcuaauggaaaccauaagu

SEQ ID NO: 4127018 - RNA, 100 nt, Human
auuuguuaaaaccugaaaugcaguaauuuagguccauguucguucauccuucugaaucagcaggcuucuaaauuuuuaacuguguccuauggaaauaaau

SEQ ID NO: 4127019 - RNA, 81 nt, Human
auuuguuugauucugaguaacauguauuggaaggccaagucuaucugcaugccuuuucagguguuauucugacagaggagu

SEQ ID NO: 4127020 - RNA, 77 nt, Human
auuuguuuguggaguuaaagggcucacaagguaaggacagcuguaagaacugucugcccugagcucccagugcaggu

SEQ ID NO: 4127021 - RNA, 88 nt, Human
auuuuaaauuugagccuuuauaguugguagcaguuuauauaaagucuccauuagcugauauaaaauuacagaggagcaguuuugaaau

SEQ ID NO: 4127022 - RNA, 97 nt, Human
auuuuaauuauauuaggucagauuugaugugguuuucuaauaaagcagauucuugcuuagagcgacuacgcauuaaaucaauuaaauaugugaaaau

SEQ ID NO: 4127023 - RNA, 75 nt, Human
auuuuacauaaucuguacguaguucuaaucuguauauagucuuggagguuaugauuugccacagauugguuggau

SEQ ID NO: 4127024 - RNA, 56 nt, Human
auuguacagguuggaggaaguggacuucaguuuguccuuagcaacacuguuauaau

SEQ ID NO: 4127025 - RNA, 60 nt, Human
auuguauuguuugcgucuguguucccagugccugugagcacagugccugacauauauggu

SEQ ID NO: 4127026 - RNA, 74 nt, Human
auugucacauuauaugugaggauagcucauuuuuuaaauauaccaaugcucuaucuucaggguggugugagaau

SEQ ID NO: 4127027 - RNA, 61 nt, Human
auugucacccauuguuucuucuucccugacaccagggagucugauuuuuuauggguguagu

SEQ ID NO: 4127028 - RNA, 74 nt, Human
auugucucuuaauugucuuagucugugcaggcugcuguaacaaaguaucacagacuggguaauuuauaaucaau

SEQ ID NO: 4127029 - RNA, 57 nt, Human
auugucuucuggucuuaucuuuucuauuggaucaggaacuauaagacagaagacaau

SEQ ID NO: 4127030 - RNA, 57 nt, Human
auugucuucugucuuauaguuccugauccaauagaaaagauaagaccagaagacaau

SEQ ID NO: 4127031 - RNA, 89 nt, Human
auugugaauaaaugaaugacugucuacuuuggggaaaauuuaauuccccaacauaauuaauguggcauaguuagucauuucuucagagu

SEQ ID NO: 4127032 - RNA, 64 nt, Human
auugugaauagugcugcaauaaacauaugugugcaugugucuuuauagcagcaugauuuacaau

SEQ ID NO: 4127033 - RNA, 64 nt, Human
auugugaauggugccacaauaaacauacauguccaugugucuuuauagcagcaugauuuauaau

SEQ ID NO: 4127034 - RNA, 79 nt, Human
auugugagcaaaucccugaguucuaauuccuaucucugcagaggagauaggagccaggacuuaacaacucuaucauaau

SEQ ID NO: 4127035 - RNA, 96 nt, Human
auugugaucagcucuacuuuauaaguauauaagucaauuugaugguuauauggagggcggauuuuacuuaucaagguagaagggaaggagaacaau

SEQ ID NO: 4127036 - RNA, 56 nt, Human
auuguguaaaaucuuccaguuuuguaaugucagcaagauguuuagauuuauacaau

SEQ ID NO: 4127037 - RNA, 66 nt, Human
auuguuaaacucucaacagagaaccacguguaggacagcguggucuugcaggugagaguagauggu

SEQ ID NO: 4127038 - RNA, 57 nt, Human
auuguugcuuuauuaucucuagguucuccuccuucccuggagucuggggguggcagu

SEQ ID NO: 4127039 - RNA, 57 nt, Human
auuguuggaugguugucuuccaaaguggcuguaccauuuuacauccccaccagcaau

SEQ ID NO: 4127040 - RNA, 59 nt, Human
auuguuuuguuucccagugacuuguugcugccacaacuccaaugaggagauaggacagu

SEQ ID NO: 4127041 - RNA, 72 nt, Human
auuuaaacauaaagcaguucauuucucaucuuuucauggagaaagggacugaucugcuccuagugugaaaau

SEQ ID NO: 4127042 - RNA, 64 nt, Human
auuuaaaugcuuaagaggguuuugcuuauuacuauuguaaguuuacccugccaggcaugugaau

SEQ ID NO: 4127043 - RNA, 104 nt, Human
auuuaacaaacuauauuuuauagaacacuuauuuuacucaauuccgaugguuaguuuauugaggaguguuuagggugagguuucaugagcaaaguuugggaaau

SEQ ID NO: 4127044 - RNA, 79 nt, Human
auuuacauaaccaguucuuugugauggaaauuuagguuguuuacagucuuuuucuauuacaaaugaugcuuuagugaau

SEQ ID NO: 4127045 - RNA, 72 nt, Human
auuuacccauuuuuuuucaugagagacagguuauacauguuugaucugugauaggaaaauaaauggcuaggu

SEQ ID NO: 4127046 - RNA, 65 nt, Human
auuuacucgugucuccagugcugucaaaacuucuuugacauuuuuggccuggugaaugagagaau

SEQ ID NO: 4127047 - RNA, 87 nt, Human
auuuagaacaagacuucuguucaaauuagaaguuccccuaaugcaugauuacugagcucuagguuuugaacccugaaguuucuaagu

SEQ ID NO: 4127048 - RNA, 56 nt, Human
auuuagacaccagcuuguaagguaccaaaacugcuuucccaggugguguuauaaau

SEQ ID NO: 4127049 - RNA, 94 nt, Human
auuuagcuucuuugauugcgucuauaacuaauuggauaccuuccugugagugugcaggaaagccaguuaguuaaaggcgcaguaugguucaaau

SEQ ID NO: 4127050 - RNA, 114 nt, Human
auuuaguuuccugcugguugauaauuaacucauuauagauauauguccaaggguauucauuguauacuuuauuuaugaaagguauagucuuuaucaaaaagaaauauacugaau

SEQ ID NO: 4127051 - RNA, 69 nt, Human
auuuauaagacauuugacaaaccauuuuuugucuccucaggaaaugaguuuccucaauguccugugagu

SEQ ID NO: 4127052 - RNA, 116 nt, Human
auuuauaguuagccucagggagaguuuaugauauuuuaugagauuaucacauuucagguagaauguauuccucaugcaagagucggccaaauucauccaggaguuugaaaaugaau

SEQ ID NO: 4127053 - RNA, 77 nt, Human
auuuauauacugccaggccacagcuaaagaggauucuuuacagaaucaaauuucuugugguuguuccguauacaagu

SEQ ID NO: 4127054 - RNA, 92 nt, Human
auuuauaugguuuccuguauucuaaagggaaagguauaugcacuugucuucuuuuuaaacuuuuccucuuaugaaucaguagcaguaugaau

SEQ ID NO: 4127055 - RNA, 94 nt, Human
auuuauuaccaugaaucucacuuucuaaaauugcuagcacuauuaaaguuucugacagugaagcaagccauuggaacauguuuguggugugaau

SEQ ID NO: 4127056 - RNA, 89 nt, Human
auuuauuauucaaagcccaguaaacauuggggaaugacaucuuaagccaaauagucuaucuugugcucacuggcuuugaaucauuaagu

SEQ ID NO: 4127057 - RNA, 91 nt, Human
auuuauuuaacuguugagcaauguuuuguugaaugaauagaccacaguuuauucauucccauagcauacuggguuauaguuuuuuuuaaau

SEQ ID NO: 4127058 - RNA, 74 nt, Human
auuucaaagugaugugggagaguauagcuaggggaauuaacuaguccauggcauggauucacacacuuuagggu

SEQ ID NO: 4127059 - RNA, 79 nt, Human
auuucaaugucauauauuuaguugugcaacagugggacaaugggguacuaugugaacagcuaacuguguggaaugagau

SEQ ID NO: 4127060 - RNA, 56 nt, Human
auuucaggauagccuaguuuugcuuuguguauuugcaugcaaguuauccuagagau

SEQ ID NO: 4127061 - RNA, 84 nt, Human
auuuccagccaaagagaauucuggugcuaacaagguauauuacuaccuguuuuuuuagagaguugucauuguuuagcuggaaau

SEQ ID NO: 4127062 - RNA, 56 nt, Human
auuucccaggacuagaaauauacucauaauugcaggcaucugguuucuaggggagu

SEQ ID NO: 4127063 - RNA, 63 nt, Human
auuucccaggguuaccucgugggcucugccuuugcccucagaaacggcugacccuggagaagu

SEQ ID NO: 4127064 - RNA, 73 nt, Human
auuucccccuccuuugggugaauuccucucuugauuagcucaggaacggaaugugauccaaucugggcaaaau

SEQ ID NO: 4127065 - RNA, 82 nt, Human
auuucccccugcuucuuuuccugcuaugaacacuuauugaaugcuuguguuuacaaagcguugagacaaguacaagggagau

SEQ ID NO: 4127066 - RNA, 77 nt, Human
auuucccuuuagcuaaauuagccuauauuggaaacugagacacuauaaaccuauagguucacuuagcugugggaaau

SEQ ID NO: 4127067 - RNA, 56 nt, Human
auuuccucccuugucauugcuucagugugcucaaaagcagguguaaaggaggaaau

SEQ ID NO: 4127068 - RNA, 58 nt, Human
auuucuagaggcagcuucuagguauacauaacaacuuggauuuauggucucaggaaau

SEQ ID NO: 4127069 - RNA, 56 nt, Human
auuucuagcaaaggcucugcuaauuaaagcagggaucugcagaaccuucuggaaau

SEQ ID NO: 4127070 - RNA, 77 nt, Human
auuucuagggaaccgggggguagagucuggggucugugacucagucuacaguucccucaggucccuacagcagaagu

SEQ ID NO: 4127071 - RNA, 85 nt, Human
auuucucagggcucuuucggguuuccagcucuaagaugcaguaaaugcaaagagaaacuuagaagccugaaaggcgguggggaau

SEQ ID NO: 4127072 - RNA, 55 nt, Human
auuucucaucuuugugaauggucccaucauccaccuacuuauuuaggugagaaau

SEQ ID NO: 4127073 - RNA, 76 nt, Human
auuucuccaccucauuugaagaacgagcuucguagcccacggagcugagguuaguauaaauguggaagggagaagu

SEQ ID NO: 4127074 - RNA, 118 nt, Human
auuucugacaucccuaauuccccguggccucucagcucugacaggaggcaucugggguaauggggggcagggacgcagagcugggagaaugcagggaguuaauuggagagacggagau

SEQ ID NO: 4127075 - RNA, 108 nt, Human
auuucuguauuaguuuucuaagguagucagaacuuugaaauuuauuguucuucaguuuauuuuacuucauuugaaaugccuaauugaagaguuaaugggcaaugaaau

SEQ ID NO: 4127076 - RNA, 69 nt, Human
auuucuguucuaguuauucacaguggagagaggaaauguccguaggcuguauuugacuugagcggaaau

SEQ ID NO: 4127077 - RNA, 71 nt, Human
auuucuuguucuccucauuuagagguuuuuauugaaaucaaugucccuucaaaaugaugaaaggaagagau

SEQ ID NO: 4127078 - RNA, 61 nt, Human
auuucuuuacuuuggauucuauuacucauucguuagaguguaagucuggaguaaaaggaau

SEQ ID NO: 4127079 - RNA, 122 nt, Human
auuugaaaauauauuaguguuuugagauaaacagauuaugaagcauugaccuugugagaaucacacaguccaaggcaggugcuuaugacuugcuccucucaccacucugaaguuauucaaau

SEQ ID NO: 4127080 - RNA, 119 nt, Human
auuugaacuaaguaauucauagaauacuacuacauuucauuugcaguauggauaaugcuaaauuauccacaucuaaagagaaauguucuugggguuucugguuuucccuuauuucaagu

SEQ ID NO: 4127081 - RNA, 112 nt, Human
auuugaagagguaaagucaguuaaagcugcaugugucagugguuaggaugacaggcuucuauucuucugauacaaugucugcuuuauaccaaaacuuucuaccucuuugaau

SEQ ID NO: 4127082 - RNA, 107 nt, Human
auuugaagauguagcacaguuuaaaugagugacugcaguggcuauuucaaucuaccaggggaggucuuugcaucuuauuuauuauggauuaucuugcaucuuuaaau

SEQ ID NO: 4127083 - RNA, 81 nt, Human
auuugaauauauaggcaaggagauuucuaagcaaaauguugaaggugcugccugguuucuucuugcuccguauaguaaaau

SEQ ID NO: 4127084 - RNA, 105 nt, Human
auuugagcccuuuaaaugugugauaaagauuaaaucaaauuggucaaagcuauucuuggaaugaucuuuuuaauuugaaucuguauuuguugaagagcuucaagu

SEQ ID NO: 4127085 - RNA, 69 nt, Human
auuugaguuagugagugaaucaagccugguuacaucacaaccaggaauauuuugcucauuuauuuugau

SEQ ID NO: 4127086 - RNA, 57 nt, Human
auuugauagaucuuuaauccagaaguuauuuaguacucuggcaguggucuuucaaau

SEQ ID NO: 4127087 - RNA, 99 nt, Human
auuugauucucguauucacaguuauuuucccagcauuuagagcugcaucaggcauuguuuaggugcuggaaaauauuuguugaaugacuauaaauaaau

SEQ ID NO: 4127088 - RNA, 75 nt, Human
auuugcagucuacuuaagaaucucaggaaugcaucgaucagccuuacauccuugaggucuguguaggcagcaagu

SEQ ID NO: 4127089 - RNA, 57 nt, Human
auuugcguuaaagaccucuuuggcaaugcauuguugaaagagguuaauauuguaagu

SEQ ID NO: 4127090 - RNA, 73 nt, Human
auuugcucuguuaugcauaagcaucaguguauaaauaaauaugacuggagaugcaguguaaacaguggcaaau

SEQ ID NO: 4127091 - RNA, 77 nt, Human
auuugcuuacugguaguggagguuacagcuguacaugaagcauguacugacuguacuuuuaaauugguuugucaagu

SEQ ID NO: 4127092 - RNA, 57 nt, Human
caccuccuugcucuuucucuuugugacccaguaacacaggaugaugggaagguggug

SEQ ID NO: 4127093 - RNA, 65 nt, Human
caccucgccucaucauccuaauuacagaaauccuaagguuagaauggagauggggcuccaaggug

SEQ ID NO: 4127094 - RNA, 59 nt, Human
caccucucauuucuacagauucccuccaguguggacucucugaugguagaugagaugug

SEQ ID NO: 4127095 - RNA, 130 nt, Human
caccucugaacacgagcgaugaaguccaggcucaggaugaaagucauggugaggaugaauguuaucacacgugagguucuauccugauuugauuuugccugggauuucagaggcuauguggaaguuuuug

SEQ ID NO: 4127096 - RNA, 117 nt, Human
caccucuggcaaguuuuaaaaguacugaugccugggcuccaccugcuccugugauuuggauucaauuggugugggaugaagccccaguguaaguaauuuuuuuaaguuauccaagug

SEQ ID NO: 4127097 - RNA, 100 nt, Human
caccucuuggcucguggagacugccagaaugugaggccugcggcuggggcucaucuugcugauuugggcuucccgucacuggcagcucccacagcaggug

SEQ ID NO: 4127098 - RNA, 56 nt, Human
caccugaacggacguccacggcaugggggaccucaucuguggcaucugucauggug

SEQ ID NO: 4127099 - RNA, 56 nt, Human
caccugagcaacccugugcgggggagaaacucaguuuugcauuggaugugcaggug

SEQ ID NO: 4127100 - RNA, 59 nt, Human
caccugcgucgugugggcagugaccuggacacucagggucaccccucgaugacagggug

SEQ ID NO: 4127101 - RNA, 72 nt, Human
caccugcuuuagagcccagcuugguggcucaccguauccaaggaggaccgccggcuuugcuccagagaagug

SEQ ID NO: 4127102 - RNA, 72 nt, Human
caccuggagaacagaccacagucaggcuccuggucaaagccaagccagcuaagucggucauuaauccaggug

SEQ ID NO: 4127103 - RNA, 86 nt, Human
caccuggcagcuuauuagaaaugcagucucaggcccugccccaaaccuacugauuaaaaucugcauuuuaacaggauccccaggug

SEQ ID NO: 4127104 - RNA, 60 nt, Human
caccuggcuauucccucaaucugggcccuggggccauggcaauguggaaugguccaggug

SEQ ID NO: 4127105 - RNA, 105 nt, Human
caccugggagaugugacaaaauacagauuccagggucuuaccccagagagucagcaauucugaaaugaggcucaagaaucugcauuuuaauaaaccucccaggug

SEQ ID NO: 4127106 - RNA, 71 nt, Human
caccugggaguguucuaggucacauuuuacuggcgaacgcaucucuugauggacggagcgcugcugaggug

SEQ ID NO: 4127107 - RNA, 57 nt, Human
caccugguaaccugccugacuaauggauuaauuguccuuugguuuguugcuuaggug

SEQ ID NO: 4127108 - RNA, 82 nt, Human
caccuguccacgcagucugccuaaauccuggccaggaaaaacguggugggagugucagaggaggacugcgugagggggagug

SEQ ID NO: 4127109 - RNA, 71 nt, Human
caccuucaaaugggcagacagggagcucacggcaccugcuguaugcuuugguuguuucucugaugugggug

SEQ ID NO: 4127110 - RNA, 77 nt, Human
caccuugggcaggaaggcccaccuguccuguggcuguggccauagcacucagugugggucuccccaaccagaaggug

SEQ ID NO: 4127111 - RNA, 123 nt, Human
caccuuguacucacucccaggucacuguccugcagccgggggucccaagcugggcugcuccucaaggcgagcacaugaaggcuggggccuggcugggggcuggcagggagcugugcggaggug

SEQ ID NO: 4127112 - RNA, 69 nt, Human
caccuuuacuaacaccauacaugcugcaaaaaaugugaguguguguauguauguauguguuagugugug

SEQ ID NO: 4127113 - RNA, 58 nt, Human
caccuuuccuauguuucauauauuccuuggagugcugggguggguggaauuaggagug

SEQ ID NO: 4127114 - RNA, 68 nt, Human
caccuuugaccuugcagcgcacucccaaacaugcaggugugcuuguccugagguuuauuuugggggug

SEQ ID NO: 4127115 - RNA, 60 nt, Human
cacgagcccuguaggaaucucucaacuguugcugucauugacuccugccugcaggccgug

SEQ ID NO: 4127116 - RNA, 121 nt, Human
cacgaggccccuggccacccaggaaccugucagucccuucucaaagugugcgggaaacagcagguccccaaacugugcggaggagggugggaggcgcugaguggacccacaggggcuagug

SEQ ID NO: 4127117 - RNA, 70 nt, Human
cacgaucacauuccucucaacaugccugccggggucuguggagccuaggggcugaugggaggguggggug

SEQ ID NO: 4127118 - RNA, 72 nt, Human
cacgaugguaaacaacacaaaucauuugacccguaugaguuuuugccucagguguaugugugugugccugug

SEQ ID NO: 4127119 - RNA, 66 nt, Human
cacgcacuguuuaauuuaggauuagguaacuaaggaaauaucuaccucuaaaguacaguuugugug

SEQ ID NO: 4127120 - RNA, 83 nt, Human
cacgcaggaggcagugcagugcagugguuaggagccaggcagcuuggguuugcauccuggcucugccacuuacugccugugug

SEQ ID NO: 4127121 - RNA, 63 nt, Human
cacgcaugugccaugugugcagauauguaucgugugugcauguacaugcaugggcacugugug

SEQ ID NO: 4127122 - RNA, 78 nt, Human
cacgcauguggaucagaugaagggacauuugcguauuuccccugcucuucaauuuguauaauccauauguaacaagug

SEQ ID NO: 4127123 - RNA, 74 nt, Human
cacgccuggcagcaggugggcccgugucagcaacagaaaugaggucacuuacuacccugccugccacccgcgug

SEQ ID NO: 4127124 - RNA, 129 nt, Human
cacggagaaagagauuacaauauagcagaggaagcucuuccagggcuccuacagggaccuuugggacaaagauucagugggcuuugggacagcuugacuucaacuagaugguauuugaauaaucugcug

SEQ ID NO: 4127125 - RNA, 91 nt, Human
cacggagcugucugagaacuucaaaugugacaaugugaauauuccaaggaaaaguucaaguuuacuuugaaguuuacuuuuaaguacuuug

SEQ ID NO: 4127126 - RNA, 74 nt, Human
cacggccacauuuacugauguauguauugucuaugacugauuuugugcuacauugguagaguucaguaguugug

SEQ ID NO: 4127127 - RNA, 56 nt, Human
cacggguggaaucagggacucccucuagacucccagauccucugguaccacccuug

SEQ ID NO: 4127128 - RNA, 59 nt, Human
cacgguguggcuaccugggccugacuccacagggacggggggcaccuuggcuaugccug

SEQ ID NO: 4127129 - RNA, 64 nt, Human
cacgucuuugcacacaucccuucccgagaugucaugcagguugggccggauugugaaggacgug

SEQ ID NO: 4127130 - RNA, 93 nt, Human
cacguuagcucauuaugguagcuagaaugcuucgugauauguuaggcaucuauucuguacuaccaggcguucuagauugcagagcuccacgug

SEQ ID NO: 4127131 - RNA, 82 nt, Human
cacguuuagccuaucuuauuaaacacugcuuaucuacuaaaggcagucagcagcauguuuaaucaaagucagggcagaugug

SEQ ID NO: 4127132 - RNA, 69 nt, Human
cacuaaccauauucacacuaugcccagugugugugcugugcugugugugugugugugugugugugugug

SEQ ID NO: 4127133 - RNA, 74 nt, Human
cacuacaaagaccugugaucacauggaaugagaugguuagaugacucaucuauggcugucagagguuuauggug

SEQ ID NO: 4127134 - RNA, 64 nt, Human
cacuaccacaccacacuccacuauaugaaguuccaagcaauguggaaucugugcuguuuuagug

SEQ ID NO: 4127135 - RNA, 125 nt, Human
cacuacucucuaaguccuuggcuuacccggcuccaguuccugaauguauauuucauuugguuauuucucaugagacaugacuucaggccuuuggagucucacugggccuuggucugaagagugug

SEQ ID NO: 4127136 - RNA, 82 nt, Human
cacuaggagaguugagcagugucuuucauauccuccaucggguuuacucaucugugcagguuuaggaagcagcuccuccgug

SEQ ID NO: 4127137 - RNA, 69 nt, Human
cacuaguccugguuucaugcuauucaaaaacuaaaugaaaaaugaagaaauugaggcucagagacggug

SEQ ID NO: 4127138 - RNA, 88 nt, Human
cacuauagauuugcaagauguuaacauagggagaaacugaguaaauguacaaaggauuucucuguauuauuucuuacaaguacauaug

SEQ ID NO: 4127139 - RNA, 97 nt, Human
cacuauaucucuccuuaugaagcauuauacucaauuguuagcucuuacuguuagagcuaacaauugaguauaaugcuucauaaggagagacauagug

SEQ ID NO: 4127140 - RNA, 63 nt, Human
cacuauaucuguucuuguuuauugauauuuccccagcaaugagccaaaguccagguguuugug

SEQ ID NO: 4127141 - RNA, 78 nt, Human
cacuauaugauuccucucacuuauauaaugaaucauagaguaauacuuaggguagacagaaagcggaaucauacagug

SEQ ID NO: 4127142 - RNA, 66 nt, Human
cacuaucucuuucucaaaauguaagcaaguuugguuuauuuguuuuaguaagagagggagagagug

SEQ ID NO: 4127143 - RNA, 70 nt, Human
cacuauguuggccaggcuggucucaaacuccugaccucaggugauccaccagccucggccucucaaagug

SEQ ID NO: 4127144 - RNA, 56 nt, Human
cacuauuccauaaugcauggcaaagauggauugucaagcaauaauugguaauagug

SEQ ID NO: 4127145 - RNA, 62 nt, Human
cacucaaacaggcagcacuaaucucugguaauagaaaucaggauagugguuaccugggggug

SEQ ID NO: 4127146 - RNA, 64 nt, Human
cacucaaucauuuccugucacaggugcagccucuaugcauuauccugccaugauugauagagug

SEQ ID NO: 4127147 - RNA, 76 nt, Human
cacucaauccugugucaauuccucauucucuuucccccaagaaaagagaaaugacaagacugaucaggagaaggug

SEQ ID NO: 4127148 - RNA, 59 nt, Human
cacucauauuggaacaagcuugggguggaagauuuaggccgugugagcaugugugagug

SEQ ID NO: 4127149 - RNA, 86 nt, Human
cacucaugguugguauugaggggugaugaggcacuggcuuugggggagccaggcagacucucuuucuucuucuccuucguggguug

SEQ ID NO: 4127150 - RNA, 105 nt, Human
cacucauugagaggcuuugcuuggagugguccguuuacaaaugaauaaugugagauaagugaauucccacuauaugccaagcauguuuuaggcccugggugugug

SEQ ID NO: 4127151 - RNA, 82 nt, Human
cacucccccacuguccccggagcuggcaaauaaacaaauccacaaacaaauuauccgugugcuccggagaggcggcggcgug

SEQ ID NO: 4127152 - RNA, 60 nt, Human
cacuccucuggugagcagacaguuaucgaauccaucucugugaaugcuuguuauggagug

SEQ ID NO: 4127153 - RNA, 62 nt, Human
cacuccuguuccacuaaaugagaccaguuuguauaaggucaugggugugaccucaggcagug

SEQ ID NO: 4127154 - RNA, 60 nt, Human
cacuccuugggaaaucacuagcacugcuagaaacagagacuagggauuuccccagggcug

SEQ ID NO: 4127155 - RNA, 60 nt, Human
cacucgugggcccccagaagccagcaaguguccuuguauuuucuggguggcugcauagug

SEQ ID NO: 4127156 - RNA, 56 nt, Human
cacucuaaccuccaucuuccaucaagaguagcaacgaugaagggugggguggggug

SEQ ID NO: 4127157 - RNA, 98 nt, Human
cacucuagcugccagggugugagggccucugcugcuccacauaugcuaauaugaggcagcacaugggauugucagacucccugauuuuugcuagucug

SEQ ID NO: 4127158 - RNA, 55 nt, Human
cacucugcaggccaaaccaaagaugucuguuggcccaaucuggcuugcagagcug

SEQ ID NO: 4127159 - RNA, 89 nt, Human
cacucuuauuuuccauaaagaguuguuccauaugugcugcuugcugagaaaaacacacauauguggcaacuguagaugaaauauacgug

SEQ ID NO: 4127160 - RNA, 61 nt, Human
cacucuuccccaaacacacaguaauuaaaauugccuuaugugucuguuuagggaggaugug

SEQ ID NO: 4127161 - RNA, 74 nt, Human
auguacagcaaauauaugcucucuaauagguauguacucauaccuggaaaaguuauaugugugugucugugugu

SEQ ID NO: 4127162 - RNA, 67 nt, Human
auguacauucuucucaccgaagggguauacuuauuuucuuaccuuuagucuuugaaguaauguacau

SEQ ID NO: 4127163 - RNA, 57 nt, Human
auguaccaguguugagaaugagagaucugguuuccucucuucuuauggcugguagau

SEQ ID NO: 4127164 - RNA, 56 nt, Human
auguacuaaguguguuggauauuuauugauguguaacaaucuacacuuaggcacau

SEQ ID NO: 4127165 - RNA, 84 nt, Human
auguagauacguuaucacauguauguguguuuagugauacaaauuguuucauagacacagaucuauauauguguaugucuauau

SEQ ID NO: 4127166 - RNA, 64 nt, Human
auguagauucuugguucccauuccugauguaccaauucugauggcagagacccagaaucuacau

SEQ ID NO: 4127167 - RNA, 86 nt, Human
auguagcucagcagugcaacagauucgagaagcaauuagauucaacugcuucaguaugauuuuugugcaucauuaagaaguuacau

SEQ ID NO: 4127168 - RNA, 78 nt, Human
auguagugggagucccuguccccauacgagcaggaggccuucaaggcauguaugccgggcaggggcuuugcuuaacau

SEQ ID NO: 4127169 - RNA, 61 nt, Human
auguauaguggugaugauuacacaacgaugugaauguauguaguaucacugaacuguacau

SEQ ID NO: 4127170 - RNA, 95 nt, Human
auguauaguguguggcccucuauuugcguucuuucccaaaccugcauauguugagggugggccugcaggaagagggaugacugacucauuuacau

SEQ ID NO: 4127171 - RNA, 95 nt, Human
auguauauauauguauguauauacuuacauguguggaaggauaugcacuuaccuacuuuuaugcauguaaguauaugcuuacaggccuaaaacau

SEQ ID NO: 4127172 - RNA, 58 nt, Human
auguaugaugcuaggcucucaguguccccggcacaaguuccauuguugcaucgugcau

SEQ ID NO: 4127173 - RNA, 56 nt, Human
auguaugggguguaugggaucaucauaucuuaagaugaucucauauugccaggcau

SEQ ID NO: 4127174 - RNA, 82 nt, Human
auguauguaaagcaauaggguaaucuacucauuaaacaaauuaauaaagugacguugauucuuuuauugcaaauauguauau

SEQ ID NO: 4127175 - RNA, 101 nt, Human
auguauuaucagcuacucuggguguagcccaguaugagguaugggggauccaguagaaucccaguuccuuuggagcuauacccaguaggaaaaauaugcau

SEQ ID NO: 4127176 - RNA, 81 nt, Human
auguauuuuaauacaggauuucaccucauauuuugguauuauuguguuaaaagaugaaauggugucuuggaagaaaugcau

SEQ ID NO: 4127177 - RNA, 75 nt, Human
auguauuuuccaggaaaacaguuggaaguuucgacuuugugguuuacuuuuggcuguguuuuauggaaaucacau

SEQ ID NO: 4127178 - RNA, 95 nt, Human
auguauuuuuuuguucuauugaugucuuuuauggagaugucauaaaaagaagauuaugacuucucauuaugaggcagauggaggagaagaugcau

SEQ ID NO: 4127179 - RNA, 99 nt, Human
augucaaggaacaugcccaagguggcauguggcuccucucccggagguugauuucucaaagggcuacugccugccuucaggacugguguuuguugaugu

SEQ ID NO: 4127180 - RNA, 55 nt, Human
augucaauuuguucucucgaagcagcugaaaaaaagugugagaauaaauggacau

SEQ ID NO: 4127181 - RNA, 55 nt, Human
augucacaggcaacaagauugccaagaaugugcaauauccugagugccuugacau

SEQ ID NO: 4127182 - RNA, 62 nt, Human
augucacaugacacaaauaucuauaugacaauguagaauaugaugagugucaugaaagauau

SEQ ID NO: 4127183 - RNA, 58 nt, Human
augucacauggucaccucuagcugcaaguaaccaguuugaggugaaacauguugacau

SEQ ID NO: 4127184 - RNA, 72 nt, Human
augucaccuguugcucugggcuaucugagaaaggagguaggugccacuuucccagccccaguauagagaugu

SEQ ID NO: 4127185 - RNA, 79 nt, Human
augucacugggcuuuugggaagucggguugagcacuuaccagagugaggcuuucugggcuucuuucagccauaguacgu

SEQ ID NO: 4127186 - RNA, 72 nt, Human
augucagaacucaaacguauauuugaguuucuguucgucagaacugaaacauauauuugaguuucuguucgu

SEQ ID NO: 4127187 - RNA, 61 nt, Human
augucauguuggcugaaauucuggagcucuuaauugcugcugguauuucaggacaagacgu

SEQ ID NO: 4127188 - RNA, 81 nt, Human
auguccaaguuaaccaauacaaauauuguuaugcuucuagauucugcgauguaugcaguauuuguuagcuuuucaggaugu

SEQ ID NO: 4127189 - RNA, 64 nt, Human
auguccaugcuuugcuccagaaacuuuucuuuaacacgagaagguuuuggcuuaggugggauau

SEQ ID NO: 4127190 - RNA, 72 nt, Human
augucccuuuaagaguuaaacuuugaccugaguuuaaagggcuggaggggucaggaaugacugggaggacau

SEQ ID NO: 4127191 - RNA, 130 nt, Human
auguccuacuucaagugaccuauuaaaauagcucucaauaguuugcuuuaauacaacugccuuuaauagcuuuuaaauuuaguguuuguuugaguagacuuuauggugauuuguaaaaugauauggauau

SEQ ID NO: 4127192 - RNA, 85 nt, Human
auguccuucauaugaguauugugcagaugacacgagaucacggcugcagcauaggccuggcacugacagggugcucaagggauau

SEQ ID NO: 4127193 - RNA, 69 nt, Human
augucuagugucuauugaccggaaagaaugacauguuuuauugcauuuuucucaguagcacuuauccau

SEQ ID NO: 4127194 - RNA, 97 nt, Human
augucuccucugaaccagaguuaauacugaguuuauuaaccagaguauauuaaccagaguuaauaacagaguaucaacucugguucagaggacacau

SEQ ID NO: 4127195 - RNA, 71 nt, Human
augucuggacauugacaaucauggcuagacauccccuuccugacugaacauaaucaccaaugacuagacau

SEQ ID NO: 4127196 - RNA, 89 nt, Human
augucugucaagcagaucuguauuguaucacagucuuaaugauuuugacuguccagaagauagaaauauagauuaaauuugauugacau

SEQ ID NO: 4127197 - RNA, 56 nt, Human
augucugucuuuguacuccacagugccuagggcagugcuggguacacagcagacau

SEQ ID NO: 4127198 - RNA, 109 nt, Human
augugaaagcacaccacuuaaauguuuucuugauagacaaggaacaagcauguaguuuuuuuuaauugaaaagaucuguuccaugacuguauagaauucauuuucacau

SEQ ID NO: 4127199 - RNA, 70 nt, Human
augugaagaucaggguccuagaguaaccuaauauuuuguacauugguuauuugacuccucauuuuuauau

SEQ ID NO: 4127200 - RNA, 116 nt, Human
augugaauaguaagaaaagaucacuuuaaggggaauuuuguuuuaucuucauuguaaguugauguuuuuuaaaugcagcaguuucuguucuaaagcugauuacuacugugccacau

SEQ ID NO: 4127201 - RNA, 86 nt, Human
augugagaaaguacauauauuuaugauucuagagaaggccaaaaaugaguauggucaugggauuaugaauauauguauguacacau

SEQ ID NO: 4127202 - RNA, 78 nt, Human
augugagccaagcccguccaucacaggcacaguggugugagugaggcccaauggcuggauggagggaugagcccacgu

SEQ ID NO: 4127203 - RNA, 67 nt, Human
augugaguucaugcaauuauauccccaagcacacagccuaggcagauguauauaugagccgucacau

SEQ ID NO: 4127204 - RNA, 69 nt, Human
augugauaugcacauacaauggaaucuuauuugacuguaaaaaugaaguuccaguauaugcaguaacau

SEQ ID NO: 4127205 - RNA, 59 nt, Human
augugauguggugagaagaguacuacuucaccuccaugguauucuucucaaauauccau

SEQ ID NO: 4127206 - RNA, 74 nt, Human
augugauguuuugauauaugcauacauuaugggaugauuacaucaagcuaauuagcauaugcaucacuucacau

SEQ ID NO: 4127207 - RNA, 65 nt, Human
augugauuuuaagagaugcaccucuuaaaauugugucuuaagagaugcaucucuuaaaauugcau

SEQ ID NO: 4127208 - RNA, 65 nt, Human
augugcaaaaugauauccugaagcaccauaggaaauauaaaugguacgcucucaugcuugcacau

SEQ ID NO: 4127209 - RNA, 58 nt, Human
augugcaauuauuaagaagagaccugccagauuggguucuauugagguauuugcacau

SEQ ID NO: 4127210 - RNA, 65 nt, Human
augugcacugaugccagggacagaaaccacugcauccaccacugucaccagcaccaaugccacau

SEQ ID NO: 4127211 - RNA, 84 nt, Human
augugcauguuauuaugcuguggaaaauacaaagacaaauuaauuuugucuccaggcuacuuauacaagauaacaaaugcacau

SEQ ID NO: 4127212 - RNA, 73 nt, Human
augugccuacgaaguaauaagccaggcuugguacaauugugaaaggcuguccucucuugcucagugggcauau

SEQ ID NO: 4127213 - RNA, 65 nt, Human
augugcucauauguguguuagugacauguaugugcacaugucuggguauaugcauaugaucacgu

SEQ ID NO: 4127214 - RNA, 68 nt, Human
augugcuuaaagacacacagccagcaagugauggaaccaugaaaccauuucuagguguguuuggccau

SEQ ID NO: 4127215 - RNA, 56 nt, Human
augugcuucaggaugucagugucuggucaugaaaacagagaccauucuagccacau

SEQ ID NO: 4127216 - RNA, 66 nt, Human
auguggcaaaguaggggucuguugggggaaaaaaaaggccucaagagccaagcuucuuucucacau

SEQ ID NO: 4127217 - RNA, 102 nt, Human
auguggguagauauuucuaagccucaauauucuguaaaaugggaaaaacaagagcauuuaccuuacagcauuguucagaggcuuaacggaaauaauccacgu

SEQ ID NO: 4127218 - RNA, 65 nt, Human
augugguacagugugacuuuggagugaagccaaagguucucaccccagcuacacuuuacaaucau

SEQ ID NO: 4127219 - RNA, 57 nt, Human
augugguuuuuaugguucuggaguuccacauggcccagucucuuuccaaaaucacau

SEQ ID NO: 4127220 - RNA, 65 nt, Human
auguguaugguuguuguagagagaacaguagaacagauuuuucuguccaggcuuacuauauauau

SEQ ID NO: 4127221 - RNA, 81 nt, Human
augugucagcuaggaaaugauagggucugcccccuguagggcaaagggaaccuguacguuguccuugaaggacugacauau

SEQ ID NO: 4127222 - RNA, 78 nt, Human
augugucauugcugcuuuuaguuggauagaaggaaaacaguuucuuucugcugaaaacagccauguaaaacuacauau

SEQ ID NO: 4127223 - RNA, 60 nt, Human
auguguccauuaucaguucugguuguuacaaugaucaaauuaacuggauaauggccacau

SEQ ID NO: 4127224 - RNA, 77 nt, Human
augugucucagaguaucccugaacuggauguccucaucucaguuuagaguucaggguuucucaggaugaugauacau

SEQ ID NO: 4127225 - RNA, 63 nt, Human
augugugaauuccaccaagugugguuuaaaauggccccagauacacugagugaauuagcacau

SEQ ID NO: 4127226 - RNA, 55 nt, Human
auguguguguuuaauccucaaagcauuccugcaguuuguagauuaugccacauau

SEQ ID NO: 4127227 - RNA, 58 nt, Human
auguguuaguuugugauuauacagacuuacaauaagugugauuauuugauuaacaugu

SEQ ID NO: 4127228 - RNA, 56 nt, Human
auguguuuauaauuacucaaucacuauuuugugguugcagugauuuugaaauaugu

SEQ ID NO: 4127229 - RNA, 123 nt, Human
auguguuuccagccacaccaaaaggugcuugggguggagggcugggggcauagaaggucaggccucaggaggccucaaguucgcauucagcuuugccacuguaccaggugggcugacgcacau

SEQ ID NO: 4127230 - RNA, 84 nt, Human
auguuaaauucagcgauccccagaaagccuggcacuaggcuucccuggccagugacuggcuuucugguguguagaagaaaauau

SEQ ID NO: 4127231 - RNA, 61 nt, Human
auuuggacauaugaaaguagccuuugcuucuucuaccugugguugcuuucuagcuucagau

SEQ ID NO: 4127232 - RNA, 127 nt, Human
auuuggacauucuaaugcuaucaaaauaacauccaagccagucucaguuccuacuuucucaaucucaaguauggagcuucacgggggacagcauuuggaaguaaauugcuguauaaggacaucaaau

SEQ ID NO: 4127233 - RNA, 78 nt, Human
auuuggaccauggaccauaguuccuauuaagcaaucauaauagaguagagauggcaaacuaugguccauggaccaaau

SEQ ID NO: 4127234 - RNA, 71 nt, Human
auuuggcaggguuccucucuagcauuugguaauaauuccauaccaaaugcuagggagaaacucucccaaau

SEQ ID NO: 4127235 - RNA, 63 nt, Human
auuugggcaaagguagaaggagagggguaaaaccuacuauuuuauucugauuuuugcacaagu

SEQ ID NO: 4127236 - RNA, 64 nt, Human
auuuggggcucugaaaaagauguaguaaaaauauauuaugaguuuguuauuuagugccccaaau

SEQ ID NO: 4127237 - RNA, 89 nt, Human
auuugguuuuggagcuguaaggauuugacagcuaugugacucacagaaauauuuaacaggaguuguaaauacaguacugaaacucagau

SEQ ID NO: 4127238 - RNA, 91 nt, Human
auuuguaaaccagucacuggcugaggaaguugccacuguuggcuuagaucagggguaggcaaacuacaguuagcugccuguuuuuauaaau

SEQ ID NO: 4127239 - RNA, 130 nt, Human
auuuguauuguuauggaaaugaauaauaugauucugggaccaauagucuuucaacaaugugacacaauguacuggcacauuccucacauuuggagaaagccugccugggacagaaucugacagggcagau

SEQ ID NO: 4127240 - RNA, 60 nt, Human
auuugucaauacacuucuuccaaguuuaaaagccagucauuggagggauuguuggcaaau

SEQ ID NO: 4127241 - RNA, 86 nt, Human
auuugucaauuuucacaaagguauucucauuuuggaagcaagugucuuguucuccaauuggcauacuuuuaagaaguaugacaaau

SEQ ID NO: 4127242 - RNA, 56 nt, Human
auuugugcuuuggguuucuguuggagcuuccuccacaugagaucacaaagauaaau

SEQ ID NO: 4127243 - RNA, 74 nt, Human
auuugugggggcgaguggccagucucuucauguguaaaaucagaacaguaacaccuacucugucccccucggau

SEQ ID NO: 4127244 - RNA, 78 nt, Human
auuuguguccacguccauguuucuguguguuguguguaugcuugauugcacacagagaggugguaugucaucauuugu

SEQ ID NO: 4127245 - RNA, 79 nt, Human
auuuguucugcgucaugccacauaaccaguucacuuuccaugaaaucaacugauuguuuggcauuggauacacacagau

SEQ ID NO: 4127246 - RNA, 60 nt, Human
auuuguuucaaagaaagaaaauauagaugguauuuguguguuccuucucugagaccugau

SEQ ID NO: 4127247 - RNA, 120 nt, Human
auuuuaacguuuggccauuuuggugauaaucugaaauagucuuaucugagcauugacucacugaucuauauugagggguuugagguaagguauuuaguacaaucaccggugacuuaagau

SEQ ID NO: 4127248 - RNA, 77 nt, Human
auuuuaagaagaaucaggcaaauuucuuuuucucucucaucuagaaaggaaaggauuggcuucucugucauuaaaau

SEQ ID NO: 4127249 - RNA, 68 nt, Human
auuuuaaucaguucuucuguuuuucagagacaauucuguuuccuggauuaauagggagcuguugagau

SEQ ID NO: 4127250 - RNA, 68 nt, Human
auuuuacaacuuggugugaauaauuuaacucuaccuagagugugagcucuucuaacuaauuguggaau

SEQ ID NO: 4127251 - RNA, 128 nt, Human
auuuuacauaggacacaaaaaauggaaugcuuuuggacuuaaaccuguuuucuuuucaacuccuucugccuagaggagaugguagccucagaagaguucuuacuuccccuuccuagaacugugcaaau

SEQ ID NO: 4127252 - RNA, 103 nt, Human
auuuuacuaauaggagcaccaaauccuucagggccaggaaagcucuauuuaaccaugaauuuccucccuugggguuucguuauguuugguuacaaaguaaaau

SEQ ID NO: 4127253 - RNA, 66 nt, Human
auuuuagaucccaacaaaggacauggccauaauaaggcaucuaggccauaaucuuaggaucaaaau

SEQ ID NO: 4127254 - RNA, 89 nt, Human
auuuuagcugucucuugaguaacguaauuuguggaagggguagggcucccucuaugccuaccuccaaaauauauacucccaguaaaaau

SEQ ID NO: 4127255 - RNA, 62 nt, Human
auuuuagucuugggacauuuagggugguggcaaauaacucugcaguguaacagcgcuugaau

SEQ ID NO: 4127256 - RNA, 124 nt, Human
auuuuauaauaaauacaaaauaguuucagaauuacguuaccucuaaaaaauuagaagccuaucauguaagugucaauauuuuuguagguuuugguuuuguuauuauuuuuuucuauuuuagaau

SEQ ID NO: 4127257 - RNA, 78 nt, Human
auuuuauaauuucaccuuuuacauuuagguaggugaucuauuuuagguuaacuuuaguguaugagguaagauaaaagu

SEQ ID NO: 4127258 - RNA, 79 nt, Human
auuuuauauggaaaaaaauuggcuagcuucagguaauuuuaaugaauuggaagaaagccuauuuuguuucaucugaaau

SEQ ID NO: 4127259 - RNA, 56 nt, Human
auuuuaucaaggucuugcugggaugcuugucaguuuccaaaaugccuugauaugau

SEQ ID NO: 4127260 - RNA, 58 nt, Human
auuuuaugcagaacugcgagcccaguucuuuccugcguucuucaguuuaauauaaaau

SEQ ID NO: 4127261 - RNA, 60 nt, Human
auuuuauguaugugguguuuaccuaauauuuuaaaggguaagaugucauccacauagagu

SEQ ID NO: 4127262 - RNA, 80 nt, Human
auuuucaauuugacugugcuuugaucuuaugaauccacuuucaaagaugaccguaugucagagccagucuuauaagagau

SEQ ID NO: 4127263 - RNA, 64 nt, Human
auuuucagguuuugccauuguauuguauguauguaagauguauauaugggggaagcuggaugau

SEQ ID NO: 4127264 - RNA, 63 nt, Human
auuuucagugaucauagcacacaaaauuaauuuuugauagccuuuugugauuuggcuggaaau

SEQ ID NO: 4127265 - RNA, 62 nt, Human
auuuucagugucaauuuuuaaauauauuuuucuuuguguauucugguggugacguuggagau

SEQ ID NO: 4127266 - RNA, 64 nt, Human
auuuucaguuauagaaugguagagaaaagugcauuuucccaucuacaucuuguggccugaaaau

SEQ ID NO: 4127267 - RNA, 106 nt, Human
auuuuccuuugcaauuuggccacuggaggugccuagaugagcucuuucuccccaaagcugcugagagucgugaggcaguuuccccaucccacugcagcuggaaaau

SEQ ID NO: 4127268 - RNA, 61 nt, Human
auuuucucagccuccuugcuggagcacugggccugggcuccagcagaaagggcgaguggau

SEQ ID NO: 4127269 - RNA, 104 nt, Human
auuuucucucacauccuccucacccacccacugcucauuggccuauauuuugugugccaagaaagaacagcagggaaguggaggaagggggguugagagauagu

SEQ ID NO: 4127270 - RNA, 69 nt, Human
auuuugaaauacuugaaggaaaaagguuaagaacguaguuucacaaaccagucuuuaaguugucagagu

SEQ ID NO: 4127271 - RNA, 68 nt, Human
auuuugagcuccuauuaugugcccaguguggcauuagacacuguggggaaauaauaggagauaaaaau

SEQ ID NO: 4127272 - RNA, 70 nt, Human
auuuugucaugguuuccucaguuguucuucagcagugaacaugaagguauuuaagguuuaccagcaaaau

SEQ ID NO: 4127273 - RNA, 72 nt, Human
auuuugugagcccagguugaggcugcagugaacuaugaucaugccacugugcucuagccugggcaacagaau

SEQ ID NO: 4127274 - RNA, 85 nt, Human
auuuugugguuuggauuuacagcuuguuuuuuaugccuuuaaauuuacugaauaaaaugacaauaaaaguccaugccuacaaagu

SEQ ID NO: 4127275 - RNA, 90 nt, Human
auuuuguuaggacacauugcaggaaaguucauuauucuaggccuucaacagaauaaucuuagcaaccuccagugugauagagaacagagu

SEQ ID NO: 4127276 - RNA, 76 nt, Human
auuuuguuaucuuuaccagaaggaccagaggcaaggaugaaacuaagaagucaccuuugcuccuucuggucaaaau

SEQ ID NO: 4127277 - RNA, 62 nt, Human
auuuuguuguuguuguuguucccaggcuagaaugagccagaauuuagaaaacaacauaaaau

SEQ ID NO: 4127278 - RNA, 65 nt, Human
auuuuguuuuguucuugggcugguguuaagaucuuuaaacauaaagucuuugauaaagacaaagu

SEQ ID NO: 4127279 - RNA, 104 nt, Human
auuuuguuuuucaucagagccucuuugauugaguuucugaugcuugccaauauguugcugugguugagauucucaacaaagaguagcaaugaugacuccaagau

SEQ ID NO: 4127280 - RNA, 97 nt, Human
auuuuuaaaauuuggguuaaaauuaucauguacaucucuaguaaauuuuguauguuucguaugagaagaacaggugacuuuggcccacagugaaaau

SEQ ID NO: 4127281 - RNA, 71 nt, Human
auuuuuccucuuugauugacuacacgccuuuuuuaugaaaaagauuuguggauuuaaggauauggaaagau

SEQ ID NO: 4127282 - RNA, 55 nt, Human
auuuuuccugggugcuuuaguuuuuccauuuguacuaaaguaccccuggaagaau

SEQ ID NO: 4127283 - RNA, 93 nt, Human
auuuuucugcaauuugauaggguuguuuuguaacuuacggucuuaaaauuucuugagaauuuuuggcagaaacaaccuucaguguauaaaagu

SEQ ID NO: 4127284 - RNA, 62 nt, Human
auuuuugaagguuaauggaacugaaaaccccacuuuauaaguuccuaauaaccugaagaaau

SEQ ID NO: 4127285 - RNA, 80 nt, Human
auuuuugcuuggugugaacuuguucuucauccagacuaaaugguggucuugaaagaaggggucuacauccaauggaaagu

SEQ ID NO: 4127286 - RNA, 55 nt, Human
auuuuuguaauacugcugugugaaguauaguucuacaaagcaguaggauaaaaau

SEQ ID NO: 4127287 - RNA, 79 nt, Human
auuuuuguauuuuuaguagagguggguuucaccauguuggccaggcuggaccccuucuccuauuaaaauaaccaaaaau

SEQ ID NO: 4127288 - RNA, 93 nt, Human
auuuuuguugucacgcagaacagauuauauaccauuguuguaagugauuaauacauacauaugaaugauuuggcucagguaagcagcagaagu

SEQ ID NO: 4127289 - RNA, 77 nt, Human
auuuuuuaaacauuguacauucuguagcugugucugcuucaaaauuauagcugcacgugguaaauguaaaggaaaau

SEQ ID NO: 4127290 - RNA, 92 nt, Human
auuuuuucuguuuuccuugaaagcccagggcauacaaccagggacagaucauuuuuccccaugcuucucagcucaaggcaaacagcaaaaau

SEQ ID NO: 4127291 - RNA, 82 nt, Human
auuuuuugccaguaaaguuuuaguuccagucccuguuggugagaggguagcaaggcugggagaugaggccugugcaagacau

SEQ ID NO: 4127292 - RNA, 88 nt, Human
auuuuuuuaacugggcaaguauuuguguaaguuuuggaaguaagaacuuuugaagaauuaugcaaaagccaaaaccauguaggaaaau

SEQ ID NO: 4127293 - RNA, 73 nt, Human
auuuuuuugauccaguugaaagugaugaagacauagcaagugaucaugaugaugagcuggguucaaacaagau

SEQ ID NO: 4127294 - RNA, 94 nt, Human
auuuuuuuuauuuguuaucaguagaauuauuauaaaacauuggcuuuuuguagauuuuuuaaaguugugguucugcguuacauaugaaggaagu

SEQ ID NO: 4127295 - RNA, 114 nt, Human
caaaaaaaugaugaaaucaaaauauagaaacaagggagaggauucugacauacuagacaaugccaguaauguuguucuuuguuuuuccauuuuuuguuuuuguuuuuguuuuug

SEQ ID NO: 4127296 - RNA, 91 nt, Human
caaaaacaaaagcuucaguucuggggcaaugagaaaauuaaucaaacaucugcuucuuugaccccgcauggauugggaguuaagugcuuug

SEQ ID NO: 4127297 - RNA, 69 nt, Human
auuuuaccuacuucaaacuuuuaccugguuauaguaaugaauuguggaggaaaagaaguugggugaaau

SEQ ID NO: 4127298 - RNA, 92 nt, Human
auuuuagcuuuaaagcacuguaaagaaguaaguaugggugugggggaugggcuguauauuuuuauucuuauaauuguugagggaguugagau

SEQ ID NO: 4127299 - RNA, 63 nt, Human
auuuuauaaccaaaaauuugugcugcuuaaguaaaaaagcaggaagaguuuagguuguagaau

SEQ ID NO: 4127300 - RNA, 83 nt, Human
auuuuccaguucaauucuucaagugcuuuggagauagguauuacuaucuuuaugcacauaaagaaacugagacuuuggagaau

SEQ ID NO: 4127301 - RNA, 85 nt, Human
auuuucuaucaccuuuuggauaggaguugggcuuuuagaguaaacauuuucaugagccucugcuuaugcaaagguaauagaagau

SEQ ID NO: 4127302 - RNA, 61 nt, Human
auuuucucuggcuucucaggacccauauuaagaaaggcacccugcagcaccagaaggagau

SEQ ID NO: 4127303 - RNA, 62 nt, Human
auuuucugugugcagauaaauaacaaagugcuuuuauaguuguuuauuuuuauagagagaau

SEQ ID NO: 4127304 - RNA, 68 nt, Human
auuuucuuucucacuugcuucccugugucugacccuggcauuugggaagagcagguggguaagaaaau

SEQ ID NO: 4127305 - RNA, 77 nt, Human
auuuugaaauauugucagaaaaauaagugggagccacauuuuggaggauauugcauuucugacagagugcucagagu

SEQ ID NO: 4127306 - RNA, 111 nt, Human
auuuugccuucgcuuucucacacuaaguuaugcuuaugcuucauggucauaucaagcucaguuugggagauggggagauaauauuucuucugugagaaaguguuuugaaau

SEQ ID NO: 4127307 - RNA, 59 nt, Human
auuuuggaauuuauacaguaaugguugguaaauaucaccuauugccuaaauaccagaau

SEQ ID NO: 4127308 - RNA, 80 nt, Human
auuuuguaguuuucuagcacauggaaaaguaaccaggcacaaaauacauuugguuuccaaauguuggacaacuguauuau

SEQ ID NO: 4127309 - RNA, 66 nt, Human
auuuuguaugugcugaaauuuugaaauacugugcacugacguguuucacaaugagcauuacagaau

SEQ ID NO: 4127310 - RNA, 81 nt, Human
auuuugucauguguagguacacuuugaaaauaaaggaauaaaagccucuguucacagaaauuguguaccucaaauuaaaau

SEQ ID NO: 4127311 - RNA, 127 nt, Human
auuuuguuaugggaaacugaagauggguaaacauacaaugauaauaguacuuuauagggcuaaaucuaaaagccuuaaagauuaauauuauguuuggauaaaugcugaauaaguuuacauaaagaau

SEQ ID NO: 4127312 - RNA, 83 nt, Human
auuuuuaaauucuguaucuauuuugaaguuccuuagucuauagaauuacaugaggauucagaauguaugcaguggaaaaaaau

SEQ ID NO: 4127313 - RNA, 99 nt, Human
auuuuuaauuguaaaaacguucacagcuauucucauguauuuuucauuaaaaaaacuugcaaaguaaguggcuauuagcuguguuuuacagauaagaau

SEQ ID NO: 4127314 - RNA, 61 nt, Human
auuuuuagcaucgaaguaaauuuagguuauauacauagucuaggcuauagguguuggagau

SEQ ID NO: 4127315 - RNA, 92 nt, Human
auuuuuagcuuggcauggcauuuagagaauuaacauaacuccgguuauaacugguaaagaauugguucucuguaaauaccugcugcuugaau

SEQ ID NO: 4127316 - RNA, 62 nt, Human
auuuuuagugucuugcuuugggaaagggugcuacuggccuuuaguguacagacacuagaaau

SEQ ID NO: 4127317 - RNA, 72 nt, Human
auuuuuauuugguuugauuuucucaauucuuguccagaucuggggucuuuugaaagauugcuaaguaaaaau

SEQ ID NO: 4127318 - RNA, 66 nt, Human
auuuuucacucaagcaucuacagggauucagcugaucuaggcugggcucuaagcuuugggaagaau

SEQ ID NO: 4127319 - RNA, 123 nt, Human
auuuuuccuuucucauguuauugucuauuuuggggugacaaggugagaauagcuccauaaaaugaguugggaaauauucuugucuuguuuucucuggaagaguugguauaagauuggaauuau

SEQ ID NO: 4127320 - RNA, 88 nt, Human
auuuuuggaaagguggaccaagguggaagauaaaaauugugaagacaagcacaugauuuuguuucuagcuugcacugucccuaaaaau

SEQ ID NO: 4127321 - RNA, 66 nt, Human
auuuuuggagaaucuuucaaggccuguuccucaauuuuagcaggcagaaaauagucauccaaaaau

SEQ ID NO: 4127322 - RNA, 56 nt, Human
auuuuuggcaauguguguugcuucuacuuccagaagauaaagcacauagcaaaagu

SEQ ID NO: 4127323 - RNA, 66 nt, Human
auuuuugggccacaagccaugggaccaucucagaaugauggucuguuggcaugugcuaauuaagau

SEQ ID NO: 4127324 - RNA, 55 nt, Human
auuuuuguauccccagcuccuggcacagggucugcuagagagaggauauuaaagu

SEQ ID NO: 4127325 - RNA, 103 nt, Human
auuuuuucuagcauuagugagacaacagagcauaaugucuagcacacagcagguguucacuagacauuauuuguacuaucaucuaagccauguugcuaaaagu

SEQ ID NO: 4127326 - RNA, 97 nt, Human
caaaaaaugggucuuaaccuggagucuaugaaccucugcaaugacaugcaaaaugucauauguuuauacuuuucuugggugaagaucccuagguuug

SEQ ID NO: 4127327 - RNA, 130 nt, Human
caaaaaauuaggagggaguauaucccauguugaacugaacauuucuucccuuuagcagaaacaagccuuguuucugagagcugaagaaauguucaguucuacaugggauauaugcccuccuaauuuuuug

SEQ ID NO: 4127328 - RNA, 130 nt, Human
caaaaaggcugaccuucccuugacugagagagaacucagcuuaccuguuuucaugcuggaacaucauuauuuucuuuggacuucagcugaaacacuggaucuuucugggucuggaauguaucagccuuug

SEQ ID NO: 4127329 - RNA, 65 nt, Human
caaaaccaaauauucuagggaauguuaggcaaggaggacuuguuugcauuaauuagaagguagug

SEQ ID NO: 4127330 - RNA, 62 nt, Human
caaaaccagcaagauuuugcuuugcaggaaagaucugucuuugcaggauuuuguuuguacug

SEQ ID NO: 4127331 - RNA, 82 nt, Human
caaaacccauaagcagugguuauugcauugugaaaaaccaugucuuacacagagaaugaugagucacuguggugguguuuug

SEQ ID NO: 4127332 - RNA, 68 nt, Human
caaaaccuucaaauggauucagugagaguugcucccaugggggccuugcugcuuccagaaggugcuug

SEQ ID NO: 4127333 - RNA, 63 nt, Human
caaaacuagauuaccacugcuagaauuucagucuggucugugucugagcuagucuuaguuuug

SEQ ID NO: 4127334 - RNA, 104 nt, Human
caaaagaauacuuugcucugagcuuuagcugggauuuucuucucucacauuauuuuggcuuuuucaggauuucaguuugaaguuuaaguagagucauucuuuug

SEQ ID NO: 4127335 - RNA, 66 nt, Human
caaaagaguggcagagcuggcugcggaugagaaaaugucauuggcaaaaagcucugcaaugguuug

SEQ ID NO: 4127336 - RNA, 59 nt, Human
caaaaggcaggggaaagagugccauuaaaaauacguacaaaccuuuuuccuuccuuuug

SEQ ID NO: 4127337 - RNA, 70 nt, Human
caaaaguaaggaaccagcuaauauuguuaguccugacuggaaaacaagaauaagugguuucuggaaguug

SEQ ID NO: 4127338 - RNA, 85 nt, Human
caaaagugccuuugugggagcuuugggauucaggcaggaaguuacuaaaacuuguugcuacccaagaccuaggaagguugauuug

SEQ ID NO: 4127339 - RNA, 68 nt, Human
caaaaugaagcugaagaaacaggcugugaucagauuaugacaggccuugaguuuugggcuuuauuuug

SEQ ID NO: 4127340 - RNA, 129 nt, Human
caaacagccagacagaauuucaggguauugaaggaacuugccacagaaaagaaguucauuugugaauuaugaucuuucauguaguagauccuuuguacucccucaucacgaacauucuuggcauccaag

SEQ ID NO: 4127341 - RNA, 84 nt, Human
caaacagcuguuuucaauaaugcagguaaauucuagucauaggaaaaucucuauuacugccugagcuauuggaaaaguuuugug

SEQ ID NO: 4127342 - RNA, 86 nt, Human
caaacaggagccaccaugaggucagggggagccgguauugaaagccccgagugccaggccucugcuacgcucaguccuucuguuug

SEQ ID NO: 4127343 - RNA, 68 nt, Human
caaacauagcccuuucuuguuuaacugcauuuuguucaauguuuuaagcucuagaaggggaaucuuug

SEQ ID NO: 4127344 - RNA, 86 nt, Human
caaaccaugugagguauacguugguucagucuggaaaggugagccugccucucuggaccaaaccaguguauaccucacauguauug

SEQ ID NO: 4127345 - RNA, 63 nt, Human
caaacugguagggccccacauccuuagaauuuaaguucuaagacaugagacucagccaguuug

SEQ ID NO: 4127346 - RNA, 97 nt, Human
caaagaaccacucacuaaagcuuucuaguugacagcaugccagguaucaaagaguucacagugccugccuuuaacuuaaagcaugacagguuuucug

SEQ ID NO: 4127347 - RNA, 71 nt, Human
caaagaaccuucgagacagggcagguucauggcugccucguccacaaaagcccuguuuucuggguuccuug

SEQ ID NO: 4127348 - RNA, 87 nt, Human
caaagagaaaaaggcgguaucuuguuaucaggaaaacaguagcuuuuacagaggagcuucccgguagacaacugccuguucucauug

SEQ ID NO: 4127349 - RNA, 76 nt, Human
caaagagaacuaucagccacugggguuaaaacucaauaaggaggcauuccagugugcaugguacacaauuccuuug

SEQ ID NO: 4127350 - RNA, 82 nt, Human
caaagaugaauaaagcaggguccuugcacuagaggaaaccuugaggauucagaagugaaggcacucauuuuaucuaucuuug

SEQ ID NO: 4127351 - RNA, 80 nt, Human
caaagcagcaucuccugugcagagggacuguuuggaagauauagugaggagugcucagcgucacaggggagugcucuuug

SEQ ID NO: 4127352 - RNA, 61 nt, Human
caaagcauaguucaucuguccaugugacaugaaguauucauggaaggugaagcuagaagug

SEQ ID NO: 4127353 - RNA, 63 nt, Human
caaagcccuggaaucucuccaugggaaaguggauguacaaucucagaggauuccugggccuug

SEQ ID NO: 4127354 - RNA, 67 nt, Human
caaagcugaggccagaguuccccgagucauggcaccucaucugggggacucuuugccucuggacaug

SEQ ID NO: 4127355 - RNA, 104 nt, Human
caaagggagccacucagagggggccuuuggagaauccagucaugguccgaggcuacccugaacggacuccaggggcugcuaacuggacugugugagcucuguug

SEQ ID NO: 4127356 - RNA, 71 nt, Human
caaagguuauggcaauauaaucaucugcucuugcucugcaagggaaacucaauauugccuuaauuacuuug

SEQ ID NO: 4127357 - RNA, 71 nt, Human
caaaguaauuaaggcaauauugaguuucccuugcagagcaagagcagaugauuauauugccauaaccuuug

SEQ ID NO: 4127358 - RNA, 69 nt, Human
caaaguacagugcuuccugggaaauggaguuuuucaugugcucauagucucagaaugggcuguacuuug

SEQ ID NO: 4127359 - RNA, 58 nt, Human
caaaguccauaguuuacaauagagcucacucuuguuguuauacauucuauggauuuug

SEQ ID NO: 4127360 - RNA, 59 nt, Human
caaagugcuggaauuacaggugugagccaccgugccuggcaaggagccagauacucuug

SEQ ID NO: 4127361 - RNA, 55 nt, Human
caaagugcugguauuacaggugugagccacugcacccaaccugagccacauuuug

SEQ ID NO: 4127362 - RNA, 126 nt, Human
caaaguuguuuguucuuuuuguuuguuauuccuucgaguuuauuuuuaaugguuguugauuauaagaacaaugaauuugaaagcauauuaggacugaauuaggauacaaacacauacacaacugug

SEQ ID NO: 4127363 - RNA, 129 nt, Human
caaauaacauccuuucucauccuuuuuuugaaugcagaacucuucauuuuggaacuguaaauuuggcacuuguaugucauuuaucuucagaauuucuguuaauggaagcaaaugaggaggagauuaugg

SEQ ID NO: 4127364 - RNA, 78 nt, Human
auguuaaccauuuucuaugcauuacuuaggagcauccucacagaagcccugugauguagcuagaguagggaccaacau

SEQ ID NO: 4127365 - RNA, 69 nt, Human
auguuaaccuuccugaggaaagucuaagauauggucaucacacuuauuuggaucuuaugaagguggcau

SEQ ID NO: 4127366 - RNA, 62 nt, Human
auguuacagagaaaguggaagcuaucagaaaugaaguuuccucaauccuuucucucuggcau

SEQ ID NO: 4127367 - RNA, 79 nt, Human
auguuagaagaucuaguuucugguucuugcucuggugcuaaccagccagaucacucaaccagagcucuuuauccaacau

SEQ ID NO: 4127368 - RNA, 72 nt, Human
auguucacugauuuagucauuuauaucugacugugcaaugcaguggcaugguugacugcaguaaaagaacau

SEQ ID NO: 4127369 - RNA, 129 nt, Human
auguucagaaaaauggucagguccucagggaauaguuaaaacugugcaggacuagacuacuuagguuuauaucccugccucagugcuugacagcucugggaccuugggcaccucaguuuucucaucuau

SEQ ID NO: 4127370 - RNA, 90 nt, Human
auguucaguugcagguggggaaguaugaacggaaggccugggaaucucuuccauuagaccacuggggugccccuuccuguagcucaacau

SEQ ID NO: 4127371 - RNA, 55 nt, Human
auguucauauccccauucugaucagucacugaugcaggaaacagggaaugggcgu

SEQ ID NO: 4127372 - RNA, 61 nt, Human
auguuccuaccucuggcccagacgcccaccugcugagggagccaaggaggcuagagaacau

SEQ ID NO: 4127373 - RNA, 72 nt, Human
auguucucugugacacauaaaauuauauguauguauauguauccguguguguacagaauaugcuaugaacau

SEQ ID NO: 4127374 - RNA, 88 nt, Human
auguugaacugugaacuuuggaaaugagaagccaccuuucgccgcuucugaaggugacucacaaagccaguuucacuugguuccacau

SEQ ID NO: 4127375 - RNA, 84 nt, Human
auguuggcagucccuccaacacaguauuagaauacuucugucucuauucuacauuauguuuauugggacuggggaggcuaacau

SEQ ID NO: 4127376 - RNA, 77 nt, Human
auguuggguacaauguagaguaaaauauguuaggauacucaaauucuuagcaaucaccaccucuauauuuacugcau

SEQ ID NO: 4127377 - RNA, 66 nt, Human
auguuggguuuguuucccuuuucugccaacugcuuucuggcuggagagagaaaaagccuuaaacau

SEQ ID NO: 4127378 - RNA, 103 nt, Human
auguuguaucaaaauguagauauaguauauaguggcgcuguaugcuguauucagcauaugguauuaguggugcuaugugcuauuugcaguauguauacaauau

SEQ ID NO: 4127379 - RNA, 59 nt, Human
auguuguugaacucuuugcauguuauuuaguaugaugugcagaaaacacuuaagaacgu

SEQ ID NO: 4127380 - RNA, 55 nt, Human
auguuuacuuguucugcugaauucugacccccauuaggauggcaagcaagugcau

SEQ ID NO: 4127381 - RNA, 63 nt, Human
auguuucaccagcaaauuaccucgaugaguccuuccuggggauuuguaauuuguuugauacgu

SEQ ID NO: 4127382 - RNA, 82 nt, Human
auguuuccuaagggggagccaugcaauauguugaucuauuaacagauauuaugguuucuccuuaggcuucugaugcaaacau

SEQ ID NO: 4127383 - RNA, 62 nt, Human
auguuugcuuuagguauagaauccaucugagcuaucuuugaaggaaucagccaaaguagcau

SEQ ID NO: 4127384 - RNA, 81 nt, Human
auguuugcuuuuuauagugucuuucuucacaggcacuaaagguguugugagaaaaggcauuaaagucagagcuauuaacau

SEQ ID NO: 4127385 - RNA, 62 nt, Human
auguuuggaauuugcauacugggaaaguugggguguuuugcagaaugcaaauuuuauaauau

SEQ ID NO: 4127386 - RNA, 77 nt, Human
auguuuuaugccaaggaucaauauguauauuuaauagaaauugggauauuuaacuauucuuuggcgaucugaaauau

SEQ ID NO: 4127387 - RNA, 64 nt, Human
auguuuuuaauacuucauuacuuagguagggucaauuuguauugugagguauuaggaccuacau

SEQ ID NO: 4127388 - RNA, 59 nt, Human
auuaaaauagaauuggaagcagaguuaggaaauuucuaaucugucaguuuuguguuaau

SEQ ID NO: 4127389 - RNA, 97 nt, Human
auuaaacuaagagaucugugacaguacagacauauauaaauauaguaaaugucuugauauuuuacuguuuggaaaacacagagcauauuaguuugau

SEQ ID NO: 4127390 - RNA, 69 nt, Human
auuaaauucucugugguaugucauagcaaguggcaauuguauuuguuagauacuacagcaggaucagau

SEQ ID NO: 4127391 - RNA, 129 nt, Human
auuaacagaguuuauuuucuagcagaaugcaauccuaucuuaguucuagagucuaaucuauuuagaaauuucuucuugcagggcugaugggaagugcaguaguuggagacuaaaguaagaaaugaagau

SEQ ID NO: 4127392 - RNA, 129 nt, Human
auuaaccuuauaguucacaauuaugaaauauaugcaaacuaaguuguuuccuuuuucccucuaaauauucugggacaaugaggaacaacuagugauugacagaucauaauuugauaaauaauggcuaau

SEQ ID NO: 4127393 - RNA, 78 nt, Human
auuaagaauuucuagccuaaaacguuuaaguuugaacgacucaacggggaguccuugaauguuuugaaaucauauaau

SEQ ID NO: 4127394 - RNA, 64 nt, Human
auuaaggagguaaacuaugguugcaaaauccuuucuauaccgcaaaguaguuuucagccuuggu

SEQ ID NO: 4127395 - RNA, 81 nt, Human
auuaaguaggugcaaaaguaaugcagguuaugccauuauuuucaauggcaaaaacugcaauuacuuuugcaucaaccuaau

SEQ ID NO: 4127396 - RNA, 81 nt, Human
auuaauaguuuaugaaugugucagacauaggacccaguuucuauccuaugaggucugaaucacauuuauuaaaauuuuaau

SEQ ID NO: 4127397 - RNA, 72 nt, Human
auuaaugaggcaggaaaggcguaucugggaaauaaaaucaucaucuaagcauggcuuuucuucuuuguuaau

SEQ ID NO: 4127398 - RNA, 125 nt, Human
auuaauggugcgaaauuaauuugaaguuacagcaauuuugugcacaagugcuuuuaauucuaagcucaaauuugaagauuguuguguugccucugaccucaguuuuuaaucugugcaccauuaau

SEQ ID NO: 4127399 - RNA, 75 nt, Human
auuaauucugcucugaagccaggauucuggggagucuuuacuccagauaguaaccuuucuagagcgagaagggau

SEQ ID NO: 4127400 - RNA, 72 nt, Human
auuaauuuacacauccauguuuugacuuuggcguccuuaaggaaauagaggcaacauguauguguauauaau

SEQ ID NO: 4127401 - RNA, 55 nt, Human
auuacaagaugggaaagggaagugugaccgggacacucugagagccacuuguagu

SEQ ID NO: 4127402 - RNA, 76 nt, Human
auuacaaucaaauuaguauugcgauucauuagcaguacuacuguuaaauaguaguaguaguaguugagguaguagu

SEQ ID NO: 4127403 - RNA, 74 nt, Human
auuacaaucauucaggucacuuggaagguuugcaaaaaucacauguuucaaguguccugauuaauggaaguaau

SEQ ID NO: 4127404 - RNA, 68 nt, Human
auuacagaaacagcgugguuagaacuccagaaaucuggguuuuuccaauucugauucuauuauguaau

SEQ ID NO: 4127405 - RNA, 101 nt, Human
auuacauguagagauguuuuuagucugacuauuaccuccaagaauucuuauggagugugaaaagugguauucauuaaagacagaauuuaugggcaugcaau

SEQ ID NO: 4127406 - RNA, 85 nt, Human
auuacguuggugcaaaaguaauugcggguuuuuuggccaguggaaguaauggcaggaacugcaauuacuuuugcaccaauuuaau

SEQ ID NO: 4127407 - RNA, 130 nt, Human
auuacucccaauaucaacaguggguguacacuccuccugugauauuguuuguuauaucuaagaaagaagaggaugauauuacugucaauaucacagaagguguacagccccuugugauguuguuucuaau

SEQ ID NO: 4127408 - RNA, 97 nt, Human
auuacuccgaaaggaccuuuugaagauaagcuauuuugaugggguuagaauucacaugaguauuauuuuccaaaguaauuguaacuuucugagugau

SEQ ID NO: 4127409 - RNA, 66 nt, Human
auuacucugcauuugugaagaugcaccuccuccaaugaucagauguauuacagaugcaucagugau

SEQ ID NO: 4127410 - RNA, 84 nt, Human
auuacuuugcagaaauaaagauauuaucaggcaagaaaagcuacauuaugcugcagugacaaaaucuuauugacuuaaaguaau

SEQ ID NO: 4127411 - RNA, 130 nt, Human
auuagaacaccugggagagcuguuaaacaauauauaagucugggccuccuucccagaggugguaauucaguuggucugugauggggcguaggcaugaauauuuuuagaaaaaucccccagugcuucuaau

SEQ ID NO: 4127412 - RNA, 98 nt, Human
auuagagaaaaaguagaaaaccaccgcuguuguauguuuuuuaauugcuuacuauaauuauuaugacaacaauugcuggguggauuuccaucucugau

SEQ ID NO: 4127413 - RNA, 66 nt, Human
auuagagaauaaacgagauuuggcauguuuauuuguguucauguugaacuuguuuuguuuucuaau

SEQ ID NO: 4127414 - RNA, 72 nt, Human
auuagaguaguuugaagcacaugaauggcaaggugaaugcccuuagcuaacauuaaaucaggcaacucugau

SEQ ID NO: 4127415 - RNA, 95 nt, Human
auuagagugugguuuuacucuauaaauuuacuaaaaaugaguggauuguauacuuacaacuggugaauuuuaugguaugcaaauuacacuucaau

SEQ ID NO: 4127416 - RNA, 130 nt, Human
auuagauuuuugaguaucuuucugcucagguaaguuaugcuuuuaagucuugcuucuuucccuaaauaucacagcuuugcuugcaagauagguuacuuaaauagcagauuucuguucuuuugauuguagu

SEQ ID NO: 4127417 - RNA, 129 nt, Human
auuagcaagcaagccacacuagacuuuaaaauugaacugagggcccugcugaagcacagcuucuauuguucuguaaugaguguuuugcagaguccuuucaaaaguaaacuguauuguucccuugcuagu

SEQ ID NO: 4127418 - RNA, 81 nt, Human
auuagcaugaccuuggagagggcuuggaucacacuguacucagcgguugugugguucccuuuuuuauguuuccaugcuggu

SEQ ID NO: 4127419 - RNA, 91 nt, Human
auuagcgaagaaauuuccuuuucugagagggccaagauuacguuuuguguaaucuugcuuuccauagaagugaccacuuucaaguacuaau

SEQ ID NO: 4127420 - RNA, 64 nt, Human
auuagcgguugaagggaggaagaguuuugauaucccuggcuugauccuccaaccagcugcuaau

SEQ ID NO: 4127421 - RNA, 61 nt, Human
auuagcuaauguggacucuaucaaaguuaaguuucugauuuugauaaucauguuagagaau

SEQ ID NO: 4127422 - RNA, 55 nt, Human
auuagcuccaccauuuggcccugaaauucccccaagggccagagguacuacugau

SEQ ID NO: 4127423 - RNA, 62 nt, Human
auuagcuugguaugccauaaagugguaguacuauuuuccauacugugggauauggagcuggu

SEQ ID NO: 4127424 - RNA, 69 nt, Human
auuagcuuuguccucacugcaaguuuauuguucguugagguaagcaagugguagaaggacaacguuaau

SEQ ID NO: 4127425 - RNA, 58 nt, Human
auuaggaaucaaauuccgaaagggcuagaucauugcucuccgggagcugauaucuaau

SEQ ID NO: 4127426 - RNA, 81 nt, Human
auuaggaguaacaggauccaaagaauguauugaacuucauuguuuuaguuggcaucuuugcgagccuuuuaaugaucugau

SEQ ID NO: 4127427 - RNA, 56 nt, Human
auuaggauuugguauggucauaaggauagagcccuuaugaaaggacuaaugcugau

SEQ ID NO: 4127428 - RNA, 83 nt, Human
auuaggcuggaccauaggaaauugcuauuuuuuguacgucagagaugguuaaugauuggcaguuggcugugguucaaccuaau

SEQ ID NO: 4127429 - RNA, 62 nt, Human
auuagguuaggggucucaagaugagaucauccuggauuauccugguggccccuaaauccaau

SEQ ID NO: 4127430 - RNA, 59 nt, Human
cacugaacuggucuuaggaggugaauguuagagaaacaugucuuuugucuagcucagug

SEQ ID NO: 4127431 - RNA, 76 nt, Human
cacugaagauacggugacaaaauggagacgugcaaaauuauauucuucuauugacauucacuguaacucuucagug

SEQ ID NO: 4127432 - RNA, 59 nt, Human
cacugaagcuuucauucucuugucuuccacagacuuugagagaaaaaugagcuucauug

SEQ ID NO: 4127433 - RNA, 85 nt, Human
cacugacaaaaagccuggggcuggaacguucugugcugccugcauggcauguacaggaccgcggcccccuggagcugguggagug

SEQ ID NO: 4127434 - RNA, 76 nt, Human
cacugagaaggcaggagaggagaaauucagagggaggaguccuccagcagccugacuucccucuugacucucagug

SEQ ID NO: 4127435 - RNA, 63 nt, Human
cacugagcuaggaguuaggaagcuggacugccuguccaggcuuucugacuuuagacucugaug

SEQ ID NO: 4127436 - RNA, 63 nt, Human
cacugagcugauagaauuccaguuagaaagcaaagaaacuuggcauuuuaguuagcuucagug

SEQ ID NO: 4127437 - RNA, 101 nt, Human
cacugaggugaggagggcaccagggcugaagggucuccaaggcaggcgugugauaucagacugucauguaaccuuucugagccuugguuccccaacuugug

SEQ ID NO: 4127438 - RNA, 87 nt, Human
cacugaguauauauguuuguuuagaugguaaaucaguauugagauauacuggacuuaaugaugaauuguauauacaaauauucagug

SEQ ID NO: 4127439 - RNA, 82 nt, Human
cacugaguaugaaagaagauaaaagcuguguguuauuaaaauauucugcauugacuuuuauuuccuguagauguaaucagug

SEQ ID NO: 4127440 - RNA, 62 nt, Human
cacugauuggcuaagauuuggucaccugacugggaugccaucaaaugauuggccauucagug

SEQ ID NO: 4127441 - RNA, 59 nt, Human
cacugcacuccagcgugggcgacagagcaaaacuccaucuaaucaggcugggugcagug

SEQ ID NO: 4127442 - RNA, 61 nt, Human
cacugcagaucagaggcugagaggguaauaacggaauaucccgagcagcuuuaugucagug

SEQ ID NO: 4127443 - RNA, 66 nt, Human
cacugcagggcagagggagaaucucuggaaaacucacuagaggugaaagaauuuggcucugaagug

SEQ ID NO: 4127444 - RNA, 55 nt, Human
cacugcaguggucagagcagagguggugagagcuugggcuagagacuuagcagug

SEQ ID NO: 4127445 - RNA, 81 nt, Human
cacugccuaggcagguucguuccacaauggaccugagugcaaagggcucccagggggaugaacacugccuggagaugcgug

SEQ ID NO: 4127446 - RNA, 111 nt, Human
cacugccuggauguuugguagacuugaauagcauguuuagugcauaugaguuuaucuuucagauuuucauguauaugcaugcauucaaaggcuauaaaaauuccuccagug

SEQ ID NO: 4127447 - RNA, 59 nt, Human
cacugcuaguguguuccugauaaaaugguacacauuguucauuguacaccuaguaugug

SEQ ID NO: 4127448 - RNA, 93 nt, Human
cacugcucuucagcauuaaucauugguggaugacugaaauaaacagaauuuaaaguauucugaggucauuguugcauuaauugaagggcugug

SEQ ID NO: 4127449 - RNA, 61 nt, Human
cacugcugcuguuuuucaauucauuuugguugacuaacauugaauuuaaaauacaguggug

SEQ ID NO: 4127450 - RNA, 65 nt, Human
cacugcuucuuuccuuggugacuucacuuucacuguugcaguccuuaggagaggaaguaucugug

SEQ ID NO: 4127451 - RNA, 56 nt, Human
cacuggaaccaagacccagggccuagacugcagaguccagggucagaaguucagug

SEQ ID NO: 4127452 - RNA, 57 nt, Human
cacuggaauauggcguugaaccugucuucuugcugucauggccuuuguauucuagug

SEQ ID NO: 4127453 - RNA, 56 nt, Human
cacuggacuccccaagggccaggugugcaguucguucaccucagggagauccagug

SEQ ID NO: 4127454 - RNA, 82 nt, Human
cacuggaggucuaaugaaagauguaggaacuuuaugccugauaugugugugguuuuuguuucuuugguugcuucuuuuugug

SEQ ID NO: 4127455 - RNA, 70 nt, Human
cacuggcagauuuucucuggaggaguugauuucacgcuccaaaauacagaaggaucugacucuuccagug

SEQ ID NO: 4127456 - RNA, 79 nt, Human
cacuggccagguagaggggaccuagcggggagcuccaacaguguggaugcuacaggauucuccuuaucuguguucagug

SEQ ID NO: 4127457 - RNA, 66 nt, Human
cacuggcuggcagaugcucuugcuuaagucacaugacuauguagaacaggaaguacugcagcagug

SEQ ID NO: 4127458 - RNA, 70 nt, Human
cacugggagaugaacaacuagaaauguaaauucaaacaguuuuacauucacaguuguucaucucccauug

SEQ ID NO: 4127459 - RNA, 64 nt, Human
cacugguggaaagcaucugauagccgucuuauuucucuucggacccagugcuguucauucagug

SEQ ID NO: 4127460 - RNA, 68 nt, Human
cacuguacuggguugaaggacgucccccccaaaaauauguguccuguauacaaacccugguaccagug

SEQ ID NO: 4127461 - RNA, 70 nt, Human
cacuguauguagaauagcugacaacugugaaguugggauaacaaugaauuugucaugcauucuuacagug

SEQ ID NO: 4127462 - RNA, 76 nt, Human
cacugucacugaggaugcacgguccucuccuugcccuggaagcagagaacgggaaugugcagccacagugagugug

SEQ ID NO: 4127463 - RNA, 64 nt, Human
cacugucuguguguccuuggggcaaauuccuucacuucucauccuucggauugcauauacagug

SEQ ID NO: 4127464 - RNA, 58 nt, Human
cacuguggugccaaaccuggaguucucaaaucuccaagguuccaagaaaucaucagug

SEQ ID NO: 4127465 - RNA, 80 nt, Human
cacugugucaaauaucuuugcaguucugauuaaauagccaacauuaucuguucuucaguaagcugcaagugaagucagug

SEQ ID NO: 4127466 - RNA, 107 nt, Human
cacuuaaaauuaaucucuucucaggaaaacuguauuugaauaacuuggggcaacuacuaauguuuucugggugaauggguuuucagagcugcuggauugugugugug

SEQ ID NO: 4127467 - RNA, 82 nt, Human
cacuuaauuaauuaguuaagcauguaaacacugagauaaauuccuguauuauuaaauaugcuugaauaaugugaugugagug

SEQ ID NO: 4127468 - RNA, 92 nt, Human
cacuuacaucucccaauauauuucuuguuauucucguugaguacugcauucagacagagguugccaauaaaguuuauuguaggagcuaagug

SEQ ID NO: 4127469 - RNA, 104 nt, Human
cacuuacuuauccaugagcccaggucuucacaucugugaaaugggguuaauauuguuugacagaguugugaggauuuaaugaauggcucauuguuagucaagug

SEQ ID NO: 4127470 - RNA, 69 nt, Human
cacuuagaaggucagccuuggauuugguagcaguaugugaaaugcucagagauaaaacugaucagagug

SEQ ID NO: 4127471 - RNA, 58 nt, Human
cacuuauaaaauguggaaagucaucaaaacauaggaugauggucaacaauuuugagug

SEQ ID NO: 4127472 - RNA, 80 nt, Human
cacuuauccgaaguggccacuagaagcucagcuggucaggggggugcugaaggcagagggcaguggucaggagugaagug

SEQ ID NO: 4127473 - RNA, 61 nt, Human
cacuuaucugcagaccgguuucuuccuucuguguggcaagaagcauggcuguagauuccug

SEQ ID NO: 4127474 - RNA, 59 nt, Human
cacuucaagagcaagggugccacaaauuuaguguauucuaacacaugcucuaagaagug

SEQ ID NO: 4127475 - RNA, 68 nt, Human
cacuucaauacaccucaggcagcaaagucucagcuuuugagccguggucucugaggguguuggaugug

SEQ ID NO: 4127476 - RNA, 65 nt, Human
cacuucaauugcguuaggaggucuuugcuggucuccucccuaaagcugccuucgcaguuggucug

SEQ ID NO: 4127477 - RNA, 69 nt, Human
cacuucaugccuuggguuugucuucugucaguauccucagcacccagaacagagccgggcacaaagcug

SEQ ID NO: 4127478 - RNA, 67 nt, Human
cacuugaacuguuugaaugagaaagguguucauuaaaagacauuguuuauucaaauacuuugggaug

SEQ ID NO: 4127479 - RNA, 71 nt, Human
cacuugacacagaauuuggcuaucacauuucaguggauuguggggcuguggaguaauuguguguguaugug

SEQ ID NO: 4127480 - RNA, 70 nt, Human
cacuugaccccugggacacagauuccagcauaagaaugugccugugccagccugucccaggaggcaggug

SEQ ID NO: 4127481 - RNA, 59 nt, Human
cacuugaguucuuaauagucagucaccccaaaaggaggaauggcuauaggaacaaagug

SEQ ID NO: 4127482 - RNA, 57 nt, Human
cacuugauggaagagcagaagagaacuaacccacucccucaagcucuucuauaagug

SEQ ID NO: 4127483 - RNA, 70 nt, Human
cacuuggaaaugcaaauauauugaaucugauuuuauuuuagaaguucaaagugcauguuccucagaagug

SEQ ID NO: 4127484 - RNA, 57 nt, Human
cacuuggaguuuuuacuuguauuuaaaauuuaaagcagcaagugaaaacuaugggug

SEQ ID NO: 4127485 - RNA, 124 nt, Human
cacuuggauauggagaaugcuggacagagagaaauuaguugguuugcucaagauuacccaauuaauaauuggcaggauugguuucuuguaccugguucgggguucucuguauuccaucauagug

SEQ ID NO: 4127486 - RNA, 59 nt, Human
cacuuggcccugagguuaucaucuaggauccugcaaugagaggcagcagggcucuggug

SEQ ID NO: 4127487 - RNA, 68 nt, Human
cacuugggauaagguaugugaaguacuuagccaagggcuugguacauggcccuccuugucagcaugug

SEQ ID NO: 4127488 - RNA, 59 nt, Human
cacuuguagaggcauuauuccaaaggaguucacagguuccuauguaaacccugcaggug

SEQ ID NO: 4127489 - RNA, 78 nt, Human
cacuugucauuggauuuaggggccuccuggauaauccacaaugaucucgucuggagguccuuaacauagugauaucug

SEQ ID NO: 4127490 - RNA, 65 nt, Human
cacuuguguggcaagcuguaugcuagacccaaggguuggcgagcaaaauaguuucuaccccugug

SEQ ID NO: 4127491 - RNA, 61 nt, Human
cacuuuacaaacuccucacuguugguuggcaacuaaacacagcaagagggagugugaugug

SEQ ID NO: 4127492 - RNA, 66 nt, Human
cacuuuggaauguugggauuuaaguguaugacuuaagugcauugccaucauaagcauucaggagug

SEQ ID NO: 4127493 - RNA, 70 nt, Human
cacuuugggaggcugaggcggauggaucacuugagguaaggaguucgagaccagccuggccaacauggug

SEQ ID NO: 4127494 - RNA, 65 nt, Human
cacuuuucaaaguacuacucaguucagcaguuccuuucugcugcuguuugaagacuuuguaagug

SEQ ID NO: 4127495 - RNA, 55 nt, Human
cacuuuugauuuuuucccagaagaaaauauuucauccaggaaaguuuuaagagug

SEQ ID NO: 4127496 - RNA, 60 nt, Human
cacuuuuucagacuaauagggcauaauuuacuuuauuguuuucuauuaccugagauugug

SEQ ID NO: 4127497 - RNA, 106 nt, Human
cagaaaacacacacagacacacauauacacacaugcuccggccuuccugggaaaucaagucugcaggucagggcagcggugcuuguguuauggguguuuguuucug

SEQ ID NO: 4127498 - RNA, 77 nt, Human
cagaaagaaggguggcugaguagauggaagagcauaguauggccuuucccucugugccagcuucuccgucccugcug

SEQ ID NO: 4127499 - RNA, 56 nt, Human
cagaaauaaacuucucacaucguuaguuccugagauugugugaguguuuguuucug

SEQ ID NO: 4127500 - RNA, 78 nt, Human
cagaaauauaaagauagaaugcuuuccuguguguugaaugagucgauuuauggaagucauucuuuuuuaucuaauaug

SEQ ID NO: 4127501 - RNA, 73 nt, Human
cagaaaucagcauaggauguggagccaggauugaaauccagaucugugacucuccaguccgugcuuuuuuuug

SEQ ID NO: 4127502 - RNA, 113 nt, Human
caaaacagaugacuaauaggugcuugaagcucugauagaaaugcuugcaaacuagaacauuuacaaguaggugccaacaguauuucugccaaagcaagcgcuguacuguuuug

SEQ ID NO: 4127503 - RNA, 68 nt, Human
caaaacauucagagagcucacuugacccaaccgaggguuuuacuuggugagccuuucuaguagucuug

SEQ ID NO: 4127504 - RNA, 130 nt, Human
caaaaccugauauguggcaaaauacugaaagaaugcagaagacugaaaagcugaaguccucuucuuccccagagcugcuucuguccuuugaaaaacauucuguacauauucaaggcauauuaaucucuug

SEQ ID NO: 4127505 - RNA, 64 nt, Human
caaaacugccuuauaauaugucaacagaauuacuuccuguugcuaaacauagaggggcaucuug

SEQ ID NO: 4127506 - RNA, 76 nt, Human
caaaagaagcugcuuuuggagacaucuuaggauauagaacccuauaaacuauauguuagccagagggcuuuuuuug

SEQ ID NO: 4127507 - RNA, 81 nt, Human
caaaaggguggagggagguuagauucaagcuccgugucugacugcuugagcuaggacaucaaucuucuucugccuucagug

SEQ ID NO: 4127508 - RNA, 71 nt, Human
caaaaguaccuugugugcuuuguaaccuuucuggguaacuccuuaaaugaacauacaagggugcuuguuug

SEQ ID NO: 4127509 - RNA, 74 nt, Human
caaaaguauauucccaugaagagguagagaguucuuuucuagaggucucugggaaauggagaauuuuauuucug

SEQ ID NO: 4127510 - RNA, 56 nt, Human
cacaagguuggcucuuucuuugugccugaagagcacacaugaguucucaucuugug

SEQ ID NO: 4127511 - RNA, 75 nt, Human
cacaaucagaaagacccaaugguauuuggcaaugaaaaguuuuauacaggaacuguuggcucccuuuugucugug

SEQ ID NO: 4127512 - RNA, 61 nt, Human
cacaauucacacuggucuccagucaguagaccauguugcugagugggauuccugugcugug

SEQ ID NO: 4127513 - RNA, 72 nt, Human
cacaauugucagugcuguuuaaauuguauccucucucucucuuaauugaacuuuugucacugacauguugug

SEQ ID NO: 4127514 - RNA, 68 nt, Human
cacaauuguucuaggucauccuuauuacucccauguuagagaugagaaggcucaggcuuagagaggug

SEQ ID NO: 4127515 - RNA, 93 nt, Human
cacaauuuauuuaagcagucgccuauugaucaacauuuggguuguuucuaauccugugcuguuaauagugauacugcaaugaauaaccuugug

SEQ ID NO: 4127516 - RNA, 70 nt, Human
cacacaaauauaauaauccuuacugaaugagaaaaaugccuuuuuucuugaaggaaggguucuuugugug

SEQ ID NO: 4127517 - RNA, 70 nt, Human
cacacaccccucuguagagcccucugcucuaaauaagaucuacggaagcguucucagcaggggcaaugug

SEQ ID NO: 4127518 - RNA, 69 nt, Human
cacacaccuuucagguccagacagucgaggcggugcccgaggucugugaauuccugagaaaguagagug

SEQ ID NO: 4127519 - RNA, 90 nt, Human
cacacagauuucugucuacauguacuauucacugucaucugaacuucccacucaaugcagcugauaauuacauguucuggaagcugugug

SEQ ID NO: 4127520 - RNA, 96 nt, Human
cacacagccccagauuaaaugugggaaccagcagagugggguuuagagucaggcagcccagauucaaucccagcucugcuacuuccuggcugugug

SEQ ID NO: 4127521 - RNA, 85 nt, Human
cacacauaaagauuaggcugaggagggauguugcuuauuucuuuaggaaaauaugauccuuagugagacugaucucaaauguaug

SEQ ID NO: 4127522 - RNA, 58 nt, Human
cacacauuucagaugcuacaaugccguaaacaggcacagugaucauagugggugugug

SEQ ID NO: 4127523 - RNA, 89 nt, Human
cacacccagcacuggcucacgaggguccuggggagagcuagaacagacuggcacugccuggcagggccccacgggagccacugacugug

SEQ ID NO: 4127524 - RNA, 81 nt, Human
cacacccccuguaccccaguggcuuuugcccagguuggagucauuuuauccgcaguggccccuggggcuucauggucagug

SEQ ID NO: 4127525 - RNA, 79 nt, Human
cacacgcauucugucuucgaggcuaauaguggcuccaugugugcagcugccugugcccuggaaggagagagugucugug

SEQ ID NO: 4127526 - RNA, 67 nt, Human
cacacuuguugcuaacauaugcuucucccaguggucauuaagagaagcuauuuagcugcacuuugug

SEQ ID NO: 4127527 - RNA, 61 nt, Human
cagagugcauggugcuguucauuugagcuuaaaguugccugugugcauggccaugugucug

SEQ ID NO: 4127528 - RNA, 77 nt, Human
cagagugggagcucuagaaagauuguugaccaaucaucuuauugacuagaccaucuuucuagaguauaacuauuuug

SEQ ID NO: 4127529 - RNA, 68 nt, Human
cagaguucacacucagugcacccgguauauacaggaagcacucagggugugagcacaucaugcaucug

SEQ ID NO: 4127530 - RNA, 64 nt, Human
cagaguucuuuugagcauggauuaccuguaucuuacagauaaaaguuguuuaaaauuuauucug

SEQ ID NO: 4127531 - RNA, 90 nt, Human
cagaguugcaggcggccccuugggauggagaaugggggaagcuuuaucccaagcuucagcccagccuccgccuccacugccccaucucug

SEQ ID NO: 4127532 - RNA, 67 nt, Human
cagaguuuaauucacagugcuuggcaccugguagggguucaauaaacagcuggugaauuaaagacug

SEQ ID NO: 4127533 - RNA, 77 nt, Human
cagaguuuacucaugcagauguucugagucacagcacaguuguccugugucuucacauuugugugcuauuaacugug

SEQ ID NO: 4127534 - RNA, 72 nt, Human
cagauaaaguuuauuggcaccaccauguccuccuucccugggcugugaguggacgugaccaauaaacugcug

SEQ ID NO: 4127535 - RNA, 58 nt, Human
cagauacgcagacccgggugugaguucaggcucugcugcucccuggcugugugaccug

SEQ ID NO: 4127536 - RNA, 55 nt, Human
cagauagcaaauggguaagcuaggacuaacaccuaguggucuuauugcugaucug

SEQ ID NO: 4127537 - RNA, 77 nt, Human
cagauaggaggcaaugggcuauagcauugcaccagggagugacuguguccgggagcaaagcguccugccuccauuug

SEQ ID NO: 4127538 - RNA, 73 nt, Human
cagauaguugagaucuuuucuuugugaggugaccuaaaucuuuauuucugcagugaaugacucaauaguucug

SEQ ID NO: 4127539 - RNA, 65 nt, Human
cagauauaccaggaggccgaaacugcuccuggaggcuggggcaggagagggccaccuggaaucug

SEQ ID NO: 4127540 - RNA, 61 nt, Human
cagauaugguugucaugaaggcuaaauaagguaauaugaaguccuuagaacacuguaucug

SEQ ID NO: 4127541 - RNA, 85 nt, Human
cagauauuaucacaucaauguuuuaaaaugcaugguucagucagguaauccgaacaaauuuuaagagauugaaaugguaaauuug

SEQ ID NO: 4127542 - RNA, 78 nt, Human
cagaucagaaacccauacuacacuaugcauggauguaggccaaauucacacuacucuguguugugugguucugugcug

SEQ ID NO: 4127543 - RNA, 128 nt, Human
cagaucccgugguggagguggucagugccaugcaggacuuggccguggaggaggguggcucggcugagcuccucugccaguauucacggcccgugcaggccacguggaagauggacgagcgggaggug

SEQ ID NO: 4127544 - RNA, 60 nt, Human
cagauccuuaggacaaccauccacagugugcagggcaaggaggauguccccgagggccug

SEQ ID NO: 4127545 - RNA, 66 nt, Human
cagaucucuguguaguucagucuucuugcuccuuucugaggacauuuucauuccacagggaaucug

SEQ ID NO: 4127546 - RNA, 77 nt, Human
cagaugagccagaaauguagaauugcuuaacugaaacaaacauucagaccuggaacucuacauuccuguaagcacug

SEQ ID NO: 4127547 - RNA, 98 nt, Human
cagaugaggaaacugaggcucagguagguuaacucacuauaucaggucauacgaguugacauguggcuuugacccaggauuuggacucagcccuccug

SEQ ID NO: 4127548 - RNA, 85 nt, Human
cagaugcaaaaauagacacagaugaucagguguggacgucaguaaaaaauguugugccacuucuuucauuucuccuuuguuucug

SEQ ID NO: 4127549 - RNA, 67 nt, Human
cagaugcuauagugcugccauaaacauucuuguucagguuuuugggggacauauauauggcuuucug

SEQ ID NO: 4127550 - RNA, 64 nt, Human
cagaugcucagagaaguuaaggaauuuacucaaggacccaaguaaaugcagucucugagaucug

SEQ ID NO: 4127551 - RNA, 68 nt, Human
cagaugcugagagaucaaggcaggauuuuggccucuaauaauaaggaugcuuuguuuccagcacacug

SEQ ID NO: 4127552 - RNA, 58 nt, Human
cagaugcugguaugggggaggugaugugaagcagcuaaacccucauagauaguguaug

SEQ ID NO: 4127553 - RNA, 112 nt, Human
cagaugcuguccucauucuggagauuaaguucucagccacaaaguagauuagaguauuuauccacugucuugguagugggaacuucucccugagcugagacgagaguguuug

SEQ ID NO: 4127554 - RNA, 77 nt, Human
cagauggaacaagggcuggcccugggaagaguucagacaggauguccacugguuccuggccaccucuuccaccacug

SEQ ID NO: 4127555 - RNA, 63 nt, Human
cagauggcaacagcucugugacugccguaucacaccgcaaccucauaucugcuuugcugucug

SEQ ID NO: 4127556 - RNA, 61 nt, Human
cagauggcagggcagcucugcagguaacuucuggcgccgucugcugcugccuccgccucug

SEQ ID NO: 4127557 - RNA, 76 nt, Human
cagaugguacauguggaaauggguuggauggaguauuuuaauacccacacaucucuaauucaguucuacacgucug

SEQ ID NO: 4127558 - RNA, 70 nt, Human
cagauggugcuggcugcauuggcaagucaauuauccaucaguaacacauguuuguguagucaguuaucug

SEQ ID NO: 4127559 - RNA, 65 nt, Human
cagauguaaaagucauagucgggaaagacaucgcuuuagugguguuuucaaaugaccuuuaaaug

SEQ ID NO: 4127560 - RNA, 67 nt, Human
cagauguaauccauauugaucagccuacugagacacagagcagggugcagugugagguccacaucug

SEQ ID NO: 4127561 - RNA, 63 nt, Human
cagauguacaugaagggcaaugagaagcgcgugcaaaaauacauucuccuucaaugugcaaug

SEQ ID NO: 4127562 - RNA, 55 nt, Human
cagaugucauuucccaugcagccuaugaacuugguugauggugggugaugcucug

SEQ ID NO: 4127563 - RNA, 67 nt, Human
cagauguccacaguuugugcugaagaagguggcgccucaguccaagucagagagugugagacaacug

SEQ ID NO: 4127564 - RNA, 91 nt, Human
cagauguccccugacauuucauggccagaacuguaucacauggguugcccccaguuaaacgggccaugugaguguguaguggggcacacug

SEQ ID NO: 4127565 - RNA, 85 nt, Human
cagauguuuaaauguuacuguuuccugaagcagaugcaauacaucauuuacuguucuauuucaguaagcaggcaacaucaucaug

SEQ ID NO: 4127566 - RNA, 56 nt, Human
cagauguuuucuggaaaaugaaugacaugagccugucacauuaaggaaaacaacug

SEQ ID NO: 4127567 - RNA, 93 nt, Human
cagauuaagaaaguuugcuaagagauguuacuaaauguuguauguaacuaaacaugugucuugcauuucuugguagauacaauuuuuaagaug

SEQ ID NO: 4127568 - RNA, 63 nt, Human
cagauuagugcuucuacccuaggcagggcuuucuuggucuaaugguaauaagcaccgacacug

SEQ ID NO: 4127569 - RNA, 88 nt, Human
cagauuauucugguaccauaacguaaugaacuugauucucauccggaguacauuuuuuauuagucugugggaucagaggcaaaauuug

SEQ ID NO: 4127570 - RNA, 65 nt, Human
cagauugcugggccucuucccuggauauucugauugaauuguuuggaguggggccagugaauuug

SEQ ID NO: 4127571 - RNA, 59 nt, Human
cagauuggaacccuaggcaggcagauuugugaggucaaagccagcaggggucuguacug

SEQ ID NO: 4127572 - RNA, 66 nt, Human
cagauugggugagaugauuucauccucagcuccaagggugauucuuaauuagcuuaagucaaucag

SEQ ID NO: 4127573 - RNA, 67 nt, Human
cagauugguuaugucuguucuuaaacuucauauaaauggaaccauacaguacauaauccugagucug

SEQ ID NO: 4127574 - RNA, 60 nt, Human
cagauuuacucccugcugcugcccaguggcaauaauuggguacugcagagggugggucug

SEQ ID NO: 4127575 - RNA, 65 nt, Human
cagauuuagggccagauaggcuucuugauuuuugucggaugucuacaagccuggccuguagugug

SEQ ID NO: 4127576 - RNA, 55 nt, Human
cagauuucaaggaggcacuccacaacuuuaagagugagugccccuuuaaauccug

SEQ ID NO: 4127577 - RNA, 67 nt, Human
cagauuucuuuagcaagcuaaggagagggaaaaaaaaucacuuugagcauugcaaaaagaaagccug

SEQ ID NO: 4127578 - RNA, 129 nt, Human
cagcaaaagaguuuauuuuaucaauggcuagcagauagggggcacacuuuugguagauauccaaagcaggcaggcucuaaguggauaaaagucugcuuauuugggcuaugauuagaacaauuagaugug

SEQ ID NO: 4127579 - RNA, 67 nt, Human
cagcaaaaucugucguguugauaguucuaaaucagccaggcuaggaauguuuacacgacagaaacug

SEQ ID NO: 4127580 - RNA, 112 nt, Human
cagcaaagagcagcagagccagccugcagcuccggauuucuggggcccugacccugguccuugucaccccagucucuggagcuccagcccugcuucuuguggcuuucggcug

SEQ ID NO: 4127581 - RNA, 60 nt, Human
cagcaaagcuuaauuuauaucugagggaacugagacucagagagaugaacugacuugcug

SEQ ID NO: 4127582 - RNA, 63 nt, Human
cagcaacaacaggacugugaauuguuuaaccucugugguuaaagcuacagcuugaguugacug

SEQ ID NO: 4127583 - RNA, 71 nt, Human
cagcaagacaggauucccgugggcccagugucccuguccucgcugggauuuucucucuugagauuucacug

SEQ ID NO: 4127584 - RNA, 66 nt, Human
cagcaagcauuuugaagaggcaauuuucuaaauaaccuuuauuucaaaguguauuguuuauugcug

SEQ ID NO: 4127585 - RNA, 63 nt, Human
cagcaaguaaaagucauguaaugauaugauugaacuuuaagaauauucuaacaugacuugcug

SEQ ID NO: 4127586 - RNA, 58 nt, Human
cagcaagucauccaggaugaugucggauauggugcugaucuucuuggccagcuugcug

SEQ ID NO: 4127587 - RNA, 112 nt, Human
cagcaaugguuaaguguuggaacaaaguaauacagcuuuacauuaacaugguuuauucacuagaauuaaugaccuagagcaguaauugcauuuucaaaacuucagcuugcug

SEQ ID NO: 4127588 - RNA, 81 nt, Human
cagcacaaaccaagggcgcugggugucgagacucagaggggucagcugugucccucggcaucagcgucuaccaaggugcug

SEQ ID NO: 4127589 - RNA, 126 nt, Human
cagcacacugaaguccugagcccuccgccacccgcaaggccuuccucggagacagggaccuauccagagaugucucugucacugucaggaugcgcugcaaguggacaaaggguuuccuucguguug

SEQ ID NO: 4127590 - RNA, 93 nt, Human
cagcacagcugaggagcagccaacucuguaccauggggccugcaggaaagccucugagcugcuguggcagauuggauucuccuaagcuggcug

SEQ ID NO: 4127591 - RNA, 125 nt, Human
cagcacagugcuuggcacaagauggaccuacccucaguccacaccugcugcccauccaggccaggccuggagcaggugccagguguguggugggggcuuggccacuauggccgucaugaaugcug

SEQ ID NO: 4127592 - RNA, 57 nt, Human
cagcacaguuucccccaugagcucuuggggagcuggaggagggagauagcugugcug

SEQ ID NO: 4127593 - RNA, 67 nt, Human
cagcaccuaucucuggagucuacagaguuuccaucugucuggucuuugcuucagaaccugggugcug

SEQ ID NO: 4127594 - RNA, 79 nt, Human
cagcacuccacucgacaucauuguccguugucaugacaccaaguuacagcauuugaucaaugguuccugugccauguug

SEQ ID NO: 4127595 - RNA, 65 nt, Human
cagcacuucucugugaaaggaaagaacugacaccauguguguuagguguccuuacagggauacug

SEQ ID NO: 4127596 - RNA, 77 nt, Human
cagcacuuugagggcucuuaauccucacccugggcuaaagauuuggccgaccauuaaguagccauccgaagaugcug

SEQ ID NO: 4127597 - RNA, 56 nt, Human
auucucuggcuaaaaccugaagguuauacauggcauguagggaauagcuagaggau

SEQ ID NO: 4127598 - RNA, 63 nt, Human
auucucuucaaaaacugcaccuugcuggcagaguugcuacagaauguggauuuugaaaagaau

SEQ ID NO: 4127599 - RNA, 88 nt, Human
auucugaauuugaguucuuaguugugcuugugugugugcacauaguaaacacacacacagguuaaaauaauugggagaucauuagaau

SEQ ID NO: 4127600 - RNA, 57 nt, Human
auucugauugggauuuuaugaaauaaaacacuuguccauuugaucccucaucaggau

SEQ ID NO: 4127601 - RNA, 73 nt, Human
auucugccacacaauuacugcugcuaugugcucuucaguugcacuuuauuagcuguaguaauuguaguugagu

SEQ ID NO: 4127602 - RNA, 84 nt, Human
auucugggaucucaagauuccagaauugggagccuugaggaugauucuacaagucucaguuuuggauucaaaggauccugugau

SEQ ID NO: 4127603 - RNA, 56 nt, Human
auucugucucccauggccgaaggcuuauuccacaaagccgucauggagaguggggu

SEQ ID NO: 4127604 - RNA, 55 nt, Human
auucuguggcaauuuguuauagcagccugagcuaacuaagacagauuccuagagu

SEQ ID NO: 4127605 - RNA, 67 nt, Human
auucugugggcauugcccaugaaaugaaaucaaaacaauauuucucuucuguucagugcccaagaau

SEQ ID NO: 4127606 - RNA, 82 nt, Human
auucuguguacuuuagaaugugacuguauuugaagguaaggccuuuaaagagguaguuagguuuaaaugaggucauaaggau

SEQ ID NO: 4127607 - RNA, 70 nt, Human
auucuguguugcaucccuaagccaggaacaaaguccagcccaggccuggcuccaggggacacgcaguagu

SEQ ID NO: 4127608 - RNA, 55 nt, Human
auucuguucccuccuucccuccuucuauauuuacagaagaaggagggaagagaau

SEQ ID NO: 4127609 - RNA, 80 nt, Human
auucuguuuccuguugguccuggucuaggcagaguguacuucacuuucaagcccucuagagacaggacagguaacuuaau

SEQ ID NO: 4127610 - RNA, 70 nt, Human
auucuuaaggcucucugauggcagcaguugaggucucucugagccugcagccucagagaauuuugaaagu

SEQ ID NO: 4127611 - RNA, 70 nt, Human
auucuucacuaagugccgaguuuaguuccuuccccuggaacugugaugcuuaugccuuagccuaaagaau

SEQ ID NO: 4127612 - RNA, 115 nt, Human
auucuucagcaccaguucaauguguuaccuacaacauagucuucuacagauaaucacugagcauauacugaugaggguuuuguguguguucacuauugcaacuacagugagggau

SEQ ID NO: 4127613 - RNA, 78 nt, Human
auucuuccaucuggcuaucccuuagucaauucaaauaaauauuuauggggcacuuuggguaagccaggugcuaagaau

SEQ ID NO: 4127614 - RNA, 66 nt, Human
auucuucucauagagacaugauuauagaaaaauaaucaaucugugaugaugaucucugagcugaau

SEQ ID NO: 4127615 - RNA, 85 nt, Human
auucuugcacauguuuacuucaucgaguacuuccaacagcccagcugucgauagaauuuuucagaugaggugaaugaggcagagu

SEQ ID NO: 4127616 - RNA, 87 nt, Human
auucuuggacucagucagcccagcuacaugaacaacaaggucccaaacagccauuucaguauaauugcuggcacugacucccagaau

SEQ ID NO: 4127617 - RNA, 61 nt, Human
auucuuucaagaagcuggaagucugugugagggaacaggcuucaagguucuuggcaggaau

SEQ ID NO: 4127618 - RNA, 106 nt, Human
auucuuuccaggcaauguuaguuuuaaaaaguugcuagaguauuguuaaguauagaucacuuaaucuaugucacucuuuggaaagaaugcagugcauaaaaagaau

SEQ ID NO: 4127619 - RNA, 64 nt, Human
auucuuugcauuuuugagcacgaaguugagugguaauuuuguaauuuugaaaguagccaaggau

SEQ ID NO: 4127620 - RNA, 68 nt, Human
auugaaaggcaaaguaggaagcaauuugguuuuuuccuccccucugucaccugcuucugucugccagu

SEQ ID NO: 4127621 - RNA, 59 nt, Human
auugaagaaacccaaauaaugguugcaguugugcugccauuguuuuuguuauuauuaau

SEQ ID NO: 4127622 - RNA, 64 nt, Human
auugaagaacauaauagcuacuuguaguauauugacauaagugauucugauguguuucuuuaau

SEQ ID NO: 4127623 - RNA, 75 nt, Human
auugaagacggaaugagucuugaaaagugcuguacagccuaaccccacuuuuucacugguucucaccucuuuaau

SEQ ID NO: 4127624 - RNA, 129 nt, Human
auugaaguaaugaaaaaaaaucaagaaugcucuguauagggcugcugcagaugacaggaagcuuaugcugccuagugcagauggcugcgucccuugcugaggucuugauuuuguuugcauuuaagaaau

SEQ ID NO: 4127625 - RNA, 84 nt, Human
auugaauucuuuuugauugccuugucagauuucuuuuguauuuuauauaaauaagauaugacaguggcaaauuaguuuuucagu

SEQ ID NO: 4127626 - RNA, 69 nt, Human
auugaauuuuugggucucuccgggcaucucaucuggucccagagcccuagggggaaccgaggacucaau

SEQ ID NO: 4127627 - RNA, 66 nt, Human
auugagaagaaaaucuaauauaugauaaagcagcuguuugaaaccguaugugauuuucucaucaau

SEQ ID NO: 4127628 - RNA, 73 nt, Human
auugagaagucuagaaaucauguacugugaucugggcuagacuaggucaugaggauuuacuagacuagguaau

SEQ ID NO: 4127629 - RNA, 65 nt, Human
auugagaaugccauaagagcuauucauccccacucaagugauuauuuuuauauggcuuucuugau

SEQ ID NO: 4127630 - RNA, 98 nt, Human
auugaggacuuuuguagcaguacuuggucaaggaagcaggaaaguucacuaaaauauuauuguucuugccaagacaugaagcacugagaguuuacagu

SEQ ID NO: 4127631 - RNA, 67 nt, Human
auugaguacuuagugucauauacuaggaauuuccuuugguauuuucaugugcacuaugucauuuaau

SEQ ID NO: 4127632 - RNA, 130 nt, Human
auugauauaaagggcuaauagcaaagccauuggcauuucuguuagacucucauugacuugcauuuaauauacucugcugccagugggagcugaagggccaauuugcuuuggugcuuuuuugugcauuagu

SEQ ID NO: 4127633 - RNA, 70 nt, Human
auugauaucuaccgccauugauaucuaucuuucauuggauauacauccucaguguuggucaagaaucagu

SEQ ID NO: 4127634 - RNA, 82 nt, Human
auugauccugguggugagguggugauaaaucauugcagguggggggaaauugauuuuuauaccaccucucacuuauuucaau

SEQ ID NO: 4127635 - RNA, 129 nt, Human
auugaucuucaaagguggaguucuguggaaugucaggaggcuccuagggcucugucagagucaucuuugagcacugcuugguagcuuucucagucugaaacaucacuccauccuuacggagcaaaauau

SEQ ID NO: 4127636 - RNA, 64 nt, Human
auugaugccacuggaguuguuuacuaaccugaagaucacaauaaauaaaacaguuggugucaau

SEQ ID NO: 4127637 - RNA, 59 nt, Human
auugcaaaauuguccuguggaaacauucguaucaaugguaucuaugggcuuuuuguagu

SEQ ID NO: 4127638 - RNA, 58 nt, Human
auugcaaagcauugugagcgcaguaaaagcuacugaauuguacacaguacuuuacaau

SEQ ID NO: 4127639 - RNA, 62 nt, Human
auugcagagcuaggcagcggcaagcccacuuucacacagcgccagcugccuggcucugggau

SEQ ID NO: 4127640 - RNA, 95 nt, Human
auugcagccaccuguuuuucucauuuccaggagaaaggauuuuauguaugcaaugaagcaacuuuuuuuuggagaaagaaaauuugcucugcagu

SEQ ID NO: 4127641 - RNA, 81 nt, Human
auugcccaggcaggagugugguggcuauucacaggugcaaacaaaguacgcuacagccucaagcucuuggccugaagcagu

SEQ ID NO: 4127642 - RNA, 70 nt, Human
auugccuugacuccacucuuuccccgguggguggagacacagcugggcuaagaguagaggccaagccaau

SEQ ID NO: 4127643 - RNA, 67 nt, Human
auugcuagucuuucauuuggagcauuuuuuuaucaagaagcucuuuccuugaaaggcauacugcaau

SEQ ID NO: 4127644 - RNA, 129 nt, Human
auugcucucauuuuuaauaugacaaggauagauuaguuuugugguuguauuguuuuuaaaggaaauagauacuuauaacaauugugauauccuugcugaaacguuuuucauaaaaaaaagacaaguaau

SEQ ID NO: 4127645 - RNA, 129 nt, Human
auugcugcagggcgucgugugaggacugaguugcuaggggcacaguucucagaagcagggugggcagugagcaugcccugcaggagcugcuguccugcucaucuucucugccacacaguugcccugcau

SEQ ID NO: 4127646 - RNA, 60 nt, Human
auugcugcguggcuuuuagaaggucuguaggaaggaauaucuucugauuuauggagcaau

SEQ ID NO: 4127647 - RNA, 55 nt, Human
auuggacauguugagucugagaugacacuuagucaucuaauuaaaauugucuagu

SEQ ID NO: 4127648 - RNA, 64 nt, Human
auuggaggaugcuuagcagcaucccuggucucuaccaaucagaugcaguuaguauacuuccagu

SEQ ID NO: 4127649 - RNA, 62 nt, Human
auuggaguucuucucucuuaguaaauggcuuugugccauacaaguauggaaugauucucagu

SEQ ID NO: 4127650 - RNA, 64 nt, Human
auuggcauucauuaacgaaagucuuugcaguggaauugcagaaacagucauuaauguagcuaau

SEQ ID NO: 4127651 - RNA, 78 nt, Human
auuggcuuauuacccagggacuauuaguuguguauuaacaucaaguuaaacacuguaucagucuucaauaagcucaau

SEQ ID NO: 4127652 - RNA, 65 nt, Human
auuggcuuuuguaacgugugcaugucuuuuggaggaaaacucugagaacauuuaggagagucaau

SEQ ID NO: 4127653 - RNA, 62 nt, Human
auugggauucagugaugugguaugaguuuuguugacuggaguagaucugacugaguccugau

SEQ ID NO: 4127654 - RNA, 57 nt, Human
auugguaccuauugacuggcugcagugccauguaggccaggaaaaaggguggccaau

SEQ ID NO: 4127655 - RNA, 127 nt, Human
auuggugcuuccuggggucaccucuuguuuaaacuugggcauuuaaacuuggauauuaaacagauucugagacagagaugugugugcaagagguuuauugaggagugaucucaggaaugacauuagu

SEQ ID NO: 4127656 - RNA, 65 nt, Human
auuggugguugccuagggccagggagaguguagggauuggcaagaaaugggauuugacugccaau

SEQ ID NO: 4127657 - RNA, 104 nt, Human
auuguaaaagguggugugcauguguaugugugcaugcacaucugugauauguguguauguaagcaugugcauauguacagguauauguuucuauguuuuauagu

SEQ ID NO: 4127658 - RNA, 78 nt, Human
cacaugcacauaaauucugaucaaguuccuucugagcaaucagacaacucaggacacacagagaaacaugugcauuug

SEQ ID NO: 4127659 - RNA, 87 nt, Human
cacaugcacugugggguguggaugugucucugagauguccaugaaugagccucugggcacacaccaugcccacagauugaugcagug

SEQ ID NO: 4127660 - RNA, 57 nt, Human
cacacuuugugcuaaucuauuugcacucagcacauuaggcccugcacuaaaguugug

SEQ ID NO: 4127661 - RNA, 60 nt, Human
cacagaaauauugugucccuuguuaugaggcacugagaaggacacaacaucauuucugug

SEQ ID NO: 4127662 - RNA, 70 nt, Human
cacagacauucauauccucgguauucauucauuugcuaaaacagagucacccaggauauugaagucagug

SEQ ID NO: 4127663 - RNA, 62 nt, Human
cacagacccagaagggaugaaggucggauaugagaacgaacuucugccucugaugguuugug

SEQ ID NO: 4127664 - RNA, 68 nt, Human
cacagacucugaugacaguguuacagcuccauuaaaguggaagaguaauauuuauuagacacacugug

SEQ ID NO: 4127665 - RNA, 77 nt, Human
cacagagaaaacacauuucuaaauuuuuaccggaacuggcaguucuggcaaggauuuuaaaauguaagucuuuugug

SEQ ID NO: 4127666 - RNA, 66 nt, Human
cacagagacaugaugucauugcucugcccggauuuccuuggggacucaauuucaucauuuccugug

SEQ ID NO: 4127667 - RNA, 58 nt, Human
cacagagagcuacgugcagcgucguagcugagcaucugugucgucugcguucucugug

SEQ ID NO: 4127668 - RNA, 61 nt, Human
cacagagauuagaauuagacuaaauuaaaucaaagucuccuauuugaucugauucucugug

SEQ ID NO: 4127669 - RNA, 67 nt, Human
cacagagcccuugggaagugcagggacucuggcuucaagccaccuguuucgcuugcccagcuuugug

SEQ ID NO: 4127670 - RNA, 64 nt, Human
cacagagcuagacagcaagggccugccucaugcagacagcagcccuaaccugucauagugugug

SEQ ID NO: 4127671 - RNA, 57 nt, Human
cacagaggcaaccuucugggguuacagcauccuaaccuaauuugaauggucucugug

SEQ ID NO: 4127672 - RNA, 75 nt, Human
cacagaggcaugugauuguggggauggaguggggcuccucccucccuuccccaguagucaagaccguccucccug

SEQ ID NO: 4127673 - RNA, 59 nt, Human
cacagaguguuagcgcugguugggagcaguuagguuuccaaugagcaaaaauaucugug

SEQ ID NO: 4127674 - RNA, 130 nt, Human
cacagauaaagccuaagugcaauuagaguuugagaauuaccgugucaaguuucugaacuaguaaguaucagaauuuaaaauguguagauucucuaagacaguaauuccacuucuaggaaucugucuuuug

SEQ ID NO: 4127675 - RNA, 77 nt, Human
cacagauaccuagugaaacauauaaauuaucugaaaugacccaagaggaggcagauauguuuacacugacuacugug

SEQ ID NO: 4127676 - RNA, 88 nt, Human
cacagaucaaaggcgcagcccaggaggcgggagccccugcacacuuuccaccucugcugggcuuagccucuuggcugguuggucugug

SEQ ID NO: 4127677 - RNA, 71 nt, Human
cacagaugacaaaagauaucugguugguaauauaacacugcuauuuccagugaaccagguguuuuucagug

SEQ ID NO: 4127678 - RNA, 78 nt, Human
cacagcacaaaggcccagaagcaaaacagacaguuuuugggagcugauuucuuugcuucuaggcuagcccccacugug

SEQ ID NO: 4127679 - RNA, 70 nt, Human
cacagcaccaggaagccugagaaugcuuagggcucuagcccaggcuuuguaccaggcuuucuggugugug

SEQ ID NO: 4127680 - RNA, 129 nt, Human
cacagcacccaccuucacgucgaucacgcucccucuggguugccgauuucuacccucaaggcuguagccucgagggaccagggguagcugagauauuaagugcggaugaguguuugaggcgggugugug

SEQ ID NO: 4127681 - RNA, 70 nt, Human
cacagcagaggaaaagucugauacuugccuuaauuuugguuucaucauaucgcuuuuuucccuuugcuug

SEQ ID NO: 4127682 - RNA, 67 nt, Human
cacagccaaagaggugcucugcagccuggacagcuccuucaguuuggcagcagagugcgucucugug

SEQ ID NO: 4127683 - RNA, 55 nt, Human
cacagcccugcagcaccugcccuucccauggugagggguggaguugcggucugug

SEQ ID NO: 4127684 - RNA, 127 nt, Human
cacagccuuccuuucccauagacuccugccuucgacgccuccugguugcaaugaaaugguucuuacgaccgcuuggguuguuagggguuuugguagugcagguguuuuuugcaaggggagggcugug

SEQ ID NO: 4127685 - RNA, 78 nt, Human
cacagcuacaggagagcugggaugauccaguacccuguucagaaggaccuugacccagcuuuccccacaauggcugug

SEQ ID NO: 4127686 - RNA, 59 nt, Human
cacagcuuaugccacugauuggacauccuaauguggucccaugucagaugugggcugug

SEQ ID NO: 4127687 - RNA, 66 nt, Human
cacagcuucuuccauuccacucacaguuuccccugagagcugaacaucauggaaaggcuagcagug

SEQ ID NO: 4127688 - RNA, 68 nt, Human
cacagcuugaucucuuggaccugugugguaagaaccucaguuuacaguguuuaaaaaucagaucugug

SEQ ID NO: 4127689 - RNA, 65 nt, Human
cacagcuuugagaggcucucagaucagccacauuccaaucggacuggagucagaucagagcugug

SEQ ID NO: 4127690 - RNA, 57 nt, Human
cacaggaaucagcauuaauggcuccaaugccacguguuuuuaaucuuguuccuagug

SEQ ID NO: 4127691 - RNA, 57 nt, Human
cacaggagagcugggaggugccaaggauaagcuuuacucacuucucaguuuuucgug

SEQ ID NO: 4127692 - RNA, 115 nt, Human
cacaggagggagguugagcagacagagaggcugagcaguacauccaaggucaugcuaaaagugaaugguugaauauguguuucucauccuuuccuuuugauucagcacuccugug

SEQ ID NO: 4127693 - RNA, 66 nt, Human
cacaggaugcaccugcccuccucuccuccauggggugagcccaaggagccaggugcagcccuugug

SEQ ID NO: 4127694 - RNA, 66 nt, Human
cacaggcaccccugacugcucaauagcuagaaaugaauuuacagcggggagaggcagcgguuugug

SEQ ID NO: 4127695 - RNA, 68 nt, Human
cacaggcuaguggaggagcaugagcuugggcccuugucccugacucagcuccuauacuuuguccugug

SEQ ID NO: 4127696 - RNA, 69 nt, Human
cacaggcucuucucacuugauucccgguuuucuuuggagaugccauuagucacagagggaagagccuug

SEQ ID NO: 4127697 - RNA, 130 nt, Human
cacaggcuugccauggaaagaucugggggaaauggugcuuuguuaagucugaaauuggauggguuuuaauuuaagagcauagcuccaacccucaccucucucucuaagcagaaaaauaguuauguuugug

SEQ ID NO: 4127698 - RNA, 61 nt, Human
cacagggaaggauuuagugggaagaauauguuaguuuuccacugugucauucccuacagug

SEQ ID NO: 4127699 - RNA, 62 nt, Human
cacagggccugugaauucucccugcucugucccugggcaguuugaaauuguagucucuagug

SEQ ID NO: 4127700 - RNA, 95 nt, Human
cacaggucaggagagacccaguuaaucucaggaaggcugagagccccccacugcucuucaaggccuuccagguugaaggggucucaaguccugug

SEQ ID NO: 4127701 - RNA, 84 nt, Human
cacaggugcccgccaccaugccuggcuaauuuuuguauuuuuuguagagacauauauauugcccaggcugguuucuaacuugug

SEQ ID NO: 4127702 - RNA, 119 nt, Human
cacaggugccggccggaggggagccgcgagggugcucugagcccuuuuguauccgcccucugcugccagcuucaaaagggcucagagcacagccacgccccuuguccagcccagcagug

SEQ ID NO: 4127703 - RNA, 72 nt, Human
cacagguuggccaggugccugucacaccaaccccaaguguugcaggggucgugcagaccuguccagccugug

SEQ ID NO: 4127704 - RNA, 62 nt, Human
cacaguaagaaaugaagagguaauugauagugggcagacuccauccucugcauuuugcugug

SEQ ID NO: 4127705 - RNA, 96 nt, Human
cacaguagcauaagagcacuggaguagaaaucaaaauaaguaauuaguuaguuuggcuuugugaauuauuacucacaugaucuugggaacucugug

SEQ ID NO: 4127706 - RNA, 61 nt, Human
cacaguaguauuuuagaaaaccaugaauucuacaagauagauuuuauagacugcuacugug

SEQ ID NO: 4127707 - RNA, 62 nt, Human
cacaguaucccucuuucuccccucaccccaccagagauggcagaaaccucagggaugcagug

SEQ ID NO: 4127708 - RNA, 130 nt, Human
cacagugaaacauuuugcuuuucugaaagaacauuauauucauuuugcccuugcuagaucacugguaucauuacuuaugcuagucucuaggaggggaaaagagggauuuuauugaagugauuuacuugug

SEQ ID NO: 4127709 - RNA, 61 nt, Human
cacagugcucggguuuuaugucucuuguuuuauccugaauuauuuauccugagcaucugug

SEQ ID NO: 4127710 - RNA, 56 nt, Human
cacaguggcaaaggggcuugggcccugcauuggggaugaucagcccuggcgcugug

SEQ ID NO: 4127711 - RNA, 99 nt, Human
cacaguguccagcgauguguuuuuggucuuucccaugucuuuuugcagucugcuaagaugaauggugaagucugauaaggaaaaugcagguguggagug

SEQ ID NO: 4127712 - RNA, 69 nt, Human
cacaguucuggaggcugguuucugcugaggccucucuccuggcuugcggaccguuaccuucucacugug

SEQ ID NO: 4127713 - RNA, 60 nt, Human
cacaguuugguauagaagugauuguagcaacuucaugauuagaucacucuuaccauugug

SEQ ID NO: 4127714 - RNA, 76 nt, Human
cacauaaucucaggggauucacuggcacccauucaugggccccagucacgaacucuugaacuaaaaggauaaugug

SEQ ID NO: 4127715 - RNA, 59 nt, Human
cacauacauucauguuacucuacaacuuauuuuauaaagggugugugugugugugugug

SEQ ID NO: 4127716 - RNA, 102 nt, Human
cacauacucaugugugaguauguauauucacacauacucaugugugaguauguauauucacacauacucaugugugaguauguauauucacacauacaugug

SEQ ID NO: 4127717 - RNA, 77 nt, Human
cacauacugaucuuaaguaacauuauuuuauagaacuguuuaaauggguuuaaaugguguucuuuagaugaaaugug

SEQ ID NO: 4127718 - RNA, 82 nt, Human
cacauaguaauucuacuuuuaaacuguugaaggugacauaacuuuaccuuucuccuuccagucaaguaagaauaucugucug

SEQ ID NO: 4127719 - RNA, 67 nt, Human
cacauaucacacauaacuaagcugcacauaacucaauguugucacuagguagugugucagaucugug

SEQ ID NO: 4127720 - RNA, 98 nt, Human
cacaucauauuuuuucaaucuagucuacuauuaacaggcaauuagguuuauuccaugucuuuguuauuguggacaggggugaaaugaacaugcaugug

SEQ ID NO: 4127721 - RNA, 129 nt, Human
cacaucuaccacuggucauauaucaguaugauauauaauauuugcauuacugugauaauaaacaaagaggauagagucaagaaaaguaaauauuaauguuuaauguguuuccaaauauguaaaaaugug

SEQ ID NO: 4127722 - RNA, 63 nt, Human
cacaugaugguggaagccauagaaaugcaagaugaucuguguugcuggcaaagccaaugugug

SEQ ID NO: 4127723 - RNA, 58 nt, Human
cacaugcacacacgugcauguacgcaugcaugugcgcacgugugugugugugugugug

SEQ ID NO: 4127724 - RNA, 65 nt, Human
cacaugcuggcugccuuggauggcagcuaggaccguuccauuuauuccagggcaacuagagugug

SEQ ID NO: 4127725 - RNA, 57 nt, Human
cacauggccacacuuggguacucaggaaauguacuuuauauuguggcuggccaugug

SEQ ID NO: 4127726 - RNA, 57 nt, Human
cacauggccagccacaauauaaaguacauuuccugaguacccaaguguggccaugug

SEQ ID NO: 4127727 - RNA, 59 nt, Human
cacauggggagcaaggaaggcagaaugaacauuuuucuuccuccaggcacacccaugug

SEQ ID NO: 4127728 - RNA, 82 nt, Human
cacaugggggauggucagcuccagcacagcggggugguucgccccagagcccccucccuagugacuggaauuuccuccagug

SEQ ID NO: 4127729 - RNA, 63 nt, Human
auugucacuuugagguucuguuaacauuuuguaagacaacaaauaagacccucuaagggcagu

SEQ ID NO: 4127730 - RNA, 60 nt, Human
auugucagaguuugagaaaguaaaaccauuuguguucaaguguuuccuaaacucuacaau

SEQ ID NO: 4127731 - RNA, 60 nt, Human
auugucauuggcuucuaugucuauggcuuccuaagagugauaaauaaagccaugcacaau

SEQ ID NO: 4127732 - RNA, 72 nt, Human
cacauuaggccuugccuggcuucacacuuucaggcauuucagaggugaggccuguacaaagcugcagaugug

SEQ ID NO: 4127733 - RNA, 56 nt, Human
cacauuccccagagcuggggcuggccugagcccuaggcgcagaguggggaggugug

SEQ ID NO: 4127734 - RNA, 59 nt, Human
cacauucuauagcaagcugaucucaacgagcccuacuugggagagcugcuuggagugug

SEQ ID NO: 4127735 - RNA, 58 nt, Human
cacauucuuuuaacggcuuuaccugauucauaacuggacccagcugccagggagugug

SEQ ID NO: 4127736 - RNA, 68 nt, Human
cacauuguuaaucacaaagauaagccuguuugagagggcacugggcuuuguaguuagcaucaucugug

SEQ ID NO: 4127737 - RNA, 118 nt, Human
cacauuuaucacaaauacuuuccuguucuguuggcuuuuuaaaguuguguuuuauuguauuuaauaguaauaaaguuuaaaagucaauaguauaaaggauaaauuauagacaaaugug

SEQ ID NO: 4127738 - RNA, 77 nt, Human
cacauuucauaaaguaacauggaccuuaaaaauuauauugaagaauuugagguauugauauuuuaugacugaaugug

SEQ ID NO: 4127739 - RNA, 62 nt, Human
cacauuuccuuccuggggagggaaguauaaguuuuccccauccauccauggauggaaaugug

SEQ ID NO: 4127740 - RNA, 104 nt, Human
cacauuuuaccugguguucccagcauuccagaagcucgacugagucuuacauucuaguacaugcucagugguauucggaaacuggaagcaauucucugaaagug

SEQ ID NO: 4127741 - RNA, 84 nt, Human
cacauuuuauaauucaaaggaaaauaaguaguuccauuucugauuuacaggcaugguuauuugcacuuugaaggguaggcagug

SEQ ID NO: 4127742 - RNA, 109 nt, Human
cacauuuuccucucagaaauagcaaggaguagauagauucuaagcacuaaauaugauuuuggugucauguugggguuuauuuaccucccgugagauuaaggaauuugug

SEQ ID NO: 4127743 - RNA, 130 nt, Human
cacauuuucuuuauccaguucaccauuauuggacaccuagguugauucuauguuguugucucagugaauaaugcugugauaaacauaugagugcauguguccuuuugguaggauuauuuguuuuccuugg

SEQ ID NO: 4127744 - RNA, 129 nt, Human
caccaaaaaaauuagauguuauuacugauuacugaaagacugaauauuuaggauauauuuuauuuugauaguuuuaucaguagauaggacucaguagaaauagcaagucccuauauuuuuccugguuag

SEQ ID NO: 4127745 - RNA, 57 nt, Human
caccaaggcuaaaauaacauguucccuagaauuaggaacauuuggcuggcuuuugug

SEQ ID NO: 4127746 - RNA, 69 nt, Human
caccacacccagccauguucaguucucuagaguauauaccuagaaauggaauugcugggucauauggug

SEQ ID NO: 4127747 - RNA, 68 nt, Human
caccacauugcagcuucuuuuggcuuguccacagugcgaggcgaagcuaauggagagcugagugugug

SEQ ID NO: 4127748 - RNA, 111 nt, Human
caccaccacacacuugauggccugcaucguguccggagccuggagagugucgguggugacagcucagggccaggcgcguuucugcgggcgcaagggguguggaggcuggug

SEQ ID NO: 4127749 - RNA, 88 nt, Human
caccaccagcccaggagcagcuuccuguuugcaggcaugggcgcccguugccauggugacugcaggaggugcucccuccagguggcug

SEQ ID NO: 4127750 - RNA, 83 nt, Human
caccacuaagucuuguugacucuuaauuugcuuuugcagcugaagcaauaaauguaaagguuaagaaagaaagcuuuagggug

SEQ ID NO: 4127751 - RNA, 76 nt, Human
caccacucuuuucucuuacaagcucccgauauaaauagagaaaucaauuguauggcccuugaagagaaagugugug

SEQ ID NO: 4127752 - RNA, 55 nt, Human
caccagacagguguaugcauauaucaugugugaauauguguauguguguguggug

SEQ ID NO: 4127753 - RNA, 63 nt, Human
caccagaccagcucucugaagaaagaguuaaugaacucacuguuccuuggggaguuggaggug

SEQ ID NO: 4127754 - RNA, 58 nt, Human
caccagccccaccgggacugcagaguuaccgugcucuguccuuggucuuggcugagug

SEQ ID NO: 4127755 - RNA, 56 nt, Human
caccagcuacucggguuuccuggugauucccacauuugccccagggguggcaggug

SEQ ID NO: 4127756 - RNA, 61 nt, Human
caccagcuucccaucgcgggucucgaucuucuucacaaccggggcccugguggagcuggug

SEQ ID NO: 4127757 - RNA, 61 nt, Human
caccaggaagcugcaauuugaggaguggcaacacuggauucaagauacgguuuccaggcug

SEQ ID NO: 4127758 - RNA, 68 nt, Human
caccaggcuggauggagagggcccuguagcugggucuucccaguguggacucucuccuuuggcuugug

SEQ ID NO: 4127759 - RNA, 55 nt, Human
caccagggccccaggcugugccagucuccggcugaacuggccggcggcccaggug

SEQ ID NO: 4127760 - RNA, 62 nt, Human
caccaguauucgaucuggccaguucuacaaaggauccuuugguugacugggguuggcuggug

SEQ ID NO: 4127761 - RNA, 57 nt, Human
caccauccaggugagggagaccugccggcuucucuguaggcuccuccaggaugugug

SEQ ID NO: 4127762 - RNA, 67 nt, Human
caccaugacugguugagagaggcaggaagaaaggaggaaguguucuguuuuagcacuuguuauggug

SEQ ID NO: 4127763 - RNA, 64 nt, Human
cacccaagauagcaccuuuguggaaugucuguaaggcauacaacacagaggcgcuguauggcug

SEQ ID NO: 4127764 - RNA, 63 nt, Human
cacccagagucccaggacuuccaguuggaggacaaauaccaaagcuguguccaagggagggug

SEQ ID NO: 4127765 - RNA, 68 nt, Human
cacccagcaggucucaaucugagcaggcucuacucaugggaccugcucgucuuggacccaguugaaug

SEQ ID NO: 4127766 - RNA, 57 nt, Human
cacccaggcagguggcugagaaugggcaauuggccuacacgcaccccugucgggcug

SEQ ID NO: 4127767 - RNA, 59 nt, Human
cacccaggcauggguugagaugcuugggugcccaucccaucucugccagugacugggug

SEQ ID NO: 4127768 - RNA, 60 nt, Human
cacccaggccaggugcucuagaaucagacaaucucuguuugggugcuuccuggcccagug

SEQ ID NO: 4127769 - RNA, 87 nt, Human
cacccagguugugguacugcauuacagccuccuuaggaaacuuacacacaucuuccugggcuccuguuuaugcuaccacagaaggug

SEQ ID NO: 4127770 - RNA, 55 nt, Human
cacccauuaaccaaagagugaaugcugaaucuacucugguugguugaugcuugug

SEQ ID NO: 4127771 - RNA, 71 nt, Human
caccccaaggagagcgcuuccugcgugccuguuguugcaaaaacauaacagggcuuuggaagucuccggug

SEQ ID NO: 4127772 - RNA, 68 nt, Human
caccccagcuucucaggauagaauugggagccccaaaucccugcccugguuuguagaagccuggggug

SEQ ID NO: 4127773 - RNA, 93 nt, Human
caccccaggccccgcaggcugcagccaagaagagccacucaccccaggagggccucugggaagggcugagcacugccaagggucauugaggug

SEQ ID NO: 4127774 - RNA, 124 nt, Human
cacccccucuggccaccucccagggugagggcugaagauuguggccccucagagccugcccacuccaggcacuuggggcccagcucaguccuugcucucgacagggacuggcagguggugggug

SEQ ID NO: 4127775 - RNA, 65 nt, Human
caccccuaccugagucaggaguggagauuagcccaaauuaaagcucuggugacucaggagaggug

SEQ ID NO: 4127776 - RNA, 72 nt, Human
caccccugaccaagaggcuucacauguccaccugccuggccccuugcagcauguguaauuucugguugggug

SEQ ID NO: 4127777 - RNA, 84 nt, Human
cacccuaaucuuaacacuuuuguggcuccauggcuuccucagugauuuuaggaggaaaaaggccacagcaaguguguuggugug

SEQ ID NO: 4127778 - RNA, 59 nt, Human
cacccugacuggcccugcaggagaggguggcucuuuccccuggagacaaagacagggug

SEQ ID NO: 4127779 - RNA, 73 nt, Human
cacccugagaaugccuuggagagccuagaggcccugagccuugggccugggaaucggugcguugagggaggug

SEQ ID NO: 4127780 - RNA, 78 nt, Human
cacccugcuaucaagggcugaacacagguuucaggcccaacucugccuguuuccaaagcccaugcucuuguaguggug

SEQ ID NO: 4127781 - RNA, 58 nt, Human
cacccuggucuuugcaaagccaauccagcauggauugcauaugcagcacaucaggcug

SEQ ID NO: 4127782 - RNA, 58 nt, Human
cacccuugaagugaacuugagggcccagccccaauuucaggcugcaucuguaagggug

SEQ ID NO: 4127783 - RNA, 130 nt, Human
cacccuuguauaauccccuccuuuucaauguaguuagaaccuguuaccauaguacauaauacauuuuaccugagugaauaguuauguuauauggcacaguugaccucaagauagggagauuaucagggug

SEQ ID NO: 4127784 - RNA, 89 nt, Human
cacccuuucucuccuugcacaaccacauguugcuuuuggcuaagcccucugguacaguuacuguuauaugugcugcagagaagagggug

SEQ ID NO: 4127785 - RNA, 62 nt, Human
caccgggcccucuccggcgucugcuuuccacaaugcagcccccgcccaggagggcccaugug

SEQ ID NO: 4127786 - RNA, 63 nt, Human
caccguaggugcuuaauaaauguaucagagaacagggaagauuuuuauugagcacguacugug

SEQ ID NO: 4127787 - RNA, 80 nt, Human
caccuacucugcccagccccuaucccugggauuuaacuguacucacucccagagucagagguggggccugagaggaggug

SEQ ID NO: 4127788 - RNA, 64 nt, Human
caccuagacagaggcaagcgcauuacuucaucuugugagcugcauuacagccucuguuuucgug

SEQ ID NO: 4127789 - RNA, 106 nt, Human
caccuauuucuucaaacauaggaagaaacaucuuaucugcaugaucccuccuggggagcuaucuuacggucuuaugugauaaggugaccucuccuuugggugagug

SEQ ID NO: 4127790 - RNA, 56 nt, Human
caccucagcgccugcuuacuaccaugaaacccaucagaaaggcauggucuggggug

SEQ ID NO: 4127791 - RNA, 75 nt, Human
caccucccagagcagugcuggagaggugcagagagauggccuccuauuucuuguucccuccaaguucugggucug

SEQ ID NO: 4127792 - RNA, 73 nt, Human
caccucccauuuccuucuagcccaaguauugggcaaacuauggucauccucuuaggcuagaggacagggcgug

SEQ ID NO: 4127793 - RNA, 60 nt, Human
caccucccggcacggugcucagcugugacgccgaaauaaguuagggcuggccgggcggug

SEQ ID NO: 4127794 - RNA, 77 nt, Human
auuugguaggcauugcuucgcacaaucccaugaugccagcuugcuagcauggauaugcccagggcacccuaccagau

SEQ ID NO: 4127795 - RNA, 78 nt, Human
auuugguucccugcaggguucggggaagacauuuuggagcaggugauuuuuuuuccucugagcuuugaauaauuaagu

SEQ ID NO: 4127796 - RNA, 84 nt, Human
auuuguacauuuacaauaaaucuuuaggaagcucaaacucuccaugaggauuucuaauagagaauuuaauugugagaaacaagu

SEQ ID NO: 4127797 - RNA, 78 nt, Human
auuuguagagauaguagagacuguuuuuaagugcuguuuuguaauuugagaacuacuuuauuauucuuuuuacugaau

SEQ ID NO: 4127798 - RNA, 95 nt, Human
auuugucugcuuuuagucuuuuaggaauuuaucacagacuggauuuauuuuauuuauuuuugguacaaauuccaugggacuuuuggaagggaagu

SEQ ID NO: 4127799 - RNA, 86 nt, Human
auuuguggguggaagugaagcagcagucaugccuaugcucugacugucaggagaagggcuagugggcacuguugcagcucacaggu

SEQ ID NO: 4127800 - RNA, 76 nt, Human
auuugugugaacucuucaaguaugagcgcuggaaacccacuacagccaguuuaagcaggagggguaauuugcagau

SEQ ID NO: 4127801 - RNA, 83 nt, Human
auuuguuauaauuguuccuuggaagaacuugagguacugugcuaagaaccuucauguuuuccaaggaaaguguuguaaaaaau

SEQ ID NO: 4127802 - RNA, 62 nt, Human
auuuguucagcauugaauuuggauuuuugauuucugaauucuacgccugaugcugaacgaau

SEQ ID NO: 4127803 - RNA, 115 nt, Human
auuuguugccuuuugaugugccaaagaagagugggaauguucuaagaauucuuuuuggcuuaaucuuuguugaauugaaaauauguauaacucuucugcugaaaguguagcaagu

SEQ ID NO: 4127804 - RNA, 60 nt, Human
auuuuagaaauaacgaaacacucagugccacugguacugaauuuuggcauauucugaaau

SEQ ID NO: 4127805 - RNA, 81 nt, Human
auuuuagcugggcauauugaugucuggaacaaaagucuguauuuuccuaccucuuuugugcauggguauggccaaugagau

SEQ ID NO: 4127806 - RNA, 85 nt, Human
cagcugcaguuuuguuacauggauauauuguacaguagcgaaguuugguauuuuauuguauccaucacccgaauaauguacguug

SEQ ID NO: 4127807 - RNA, 57 nt, Human
cagcugcccaggccaccuggagcaaagguaagaagcugucccaggggcugggggcug

SEQ ID NO: 4127808 - RNA, 108 nt, Human
cagcugcugccccuggccuccauggucauggcagccacgcugucgggggcuguacccagaggcugcuuucauggccgccccauuuuggaggugaggggccugcggcug

SEQ ID NO: 4127809 - RNA, 55 nt, Human
cagcugcuuccacacaagcaaagcucaagaccagggccugcaugcuggaagucug

SEQ ID NO: 4127810 - RNA, 55 nt, Human
cagcugcuuuaguuuuccaucccucauuaauagaaucuggagccuacaguagcug

SEQ ID NO: 4127811 - RNA, 55 nt, Human
cagcuggacugggauguagcgacgguccaucagcucucugccuuccagccagaug

SEQ ID NO: 4127812 - RNA, 61 nt, Human
cagcuggcaauguaagucccuggaaagagaacaucacacccagggcacucuugccacucug

SEQ ID NO: 4127813 - RNA, 55 nt, Human
cagcugggccuccugagcccugggcaggacaggguuagugggccaggcccaggug

SEQ ID NO: 4127814 - RNA, 78 nt, Human
cagcuggucugcauugcugguacugguugcaucauccucauccucagagcuggcuucacaggcaguguggaagagcug

SEQ ID NO: 4127815 - RNA, 56 nt, Human
cagcugguggcugaugaccgucugcuuggggcugcagauguucacguuaccaguug

SEQ ID NO: 4127816 - RNA, 85 nt, Human
cagcuguccaggggucaccugccuggguggucaccugccuggguggucaggcugucucaccucaggagggcccccggaccagcug

SEQ ID NO: 4127817 - RNA, 68 nt, Human
cagaaauguacugacaugcaguucacaaacuggcacugguuuaaaauaagcacuguuguauguuucug

SEQ ID NO: 4127818 - RNA, 61 nt, Human
cagaaauguacuucuuuagucaauauguaguuugcuuuauauuaaaugaagagguaaucug

SEQ ID NO: 4127819 - RNA, 58 nt, Human
cagaaaugugauguacacacacccacauuacuuggagguuauauuacauuacauucug

SEQ ID NO: 4127820 - RNA, 63 nt, Human
cagaaauuaucaugggggagaaacaugauuuauuuacauguucccagacucccaagaugacug

SEQ ID NO: 4127821 - RNA, 120 nt, Human
cagaaauucuuugcauuauauguauauguggucauuuacauguggccagaaauuugagagaaacccuuucagcauuucuugagcucauggagaaaugauauacauggcagcagaaaucug

SEQ ID NO: 4127822 - RNA, 86 nt, Human
cagaaauuggcgaagaugcuuacugcaauauuuuuacaagggcuaucuuacaaaauugaggccaguaugccaucuuccaguuugug

SEQ ID NO: 4127823 - RNA, 59 nt, Human
cagaacacacgccuccuccauggggagaucuugcuucuuguggauaaccgugugcucug

SEQ ID NO: 4127824 - RNA, 82 nt, Human
cagaacacuuucaucacacuuuguugaaguuuucaugagccucguucaggaaacuuuuuaaagugagauucuuuugauuuug

SEQ ID NO: 4127825 - RNA, 119 nt, Human
cagaacagagcuagugauucgaaugcucuucagguuucugcucuggaaaacugacacccgcuguuccugacucuagguaaagcuugaagagcugugccucagcccccugcuuacauuug

SEQ ID NO: 4127826 - RNA, 94 nt, Human
cagaacagcaagagaggcagggcaaauagauggagaacaaccacaggcacaucaaguuuucccugaagccucuccccacagcauuuuuguucug

SEQ ID NO: 4127827 - RNA, 58 nt, Human
cagaacaggucaugcuugcugugcuagaauauagaacggcaggcccuaagccugugug

SEQ ID NO: 4127828 - RNA, 68 nt, Human
cagaacauucuugccaguacauucuuggguguaagauacuauucccuguuuguuuggcugauguuuug

SEQ ID NO: 4127829 - RNA, 63 nt, Human
cagaaccagccugggcuauaggccuccuauggaaacaggcaggcucaggcccaugcuuaucug

SEQ ID NO: 4127830 - RNA, 65 nt, Human
cagaacgcauugacaguauagcuuuaccuaugaauaucauuucaauagugcugcucaauguucug

SEQ ID NO: 4127831 - RNA, 89 nt, Human
cagaagaacagugccugccucagagcaucgcgcagagagccuagggcagcugggcugugcuugauguucucaguaguuguuagcuucug

SEQ ID NO: 4127832 - RNA, 58 nt, Human
cagaagagcauuuagucccucucaugacguccaucugagggcucaaaugugcuugcug

SEQ ID NO: 4127833 - RNA, 56 nt, Human
cagaagcagcugaucucgcgagcccgcccccugcucggcgagaacagagcuuacug

SEQ ID NO: 4127834 - RNA, 56 nt, Human
cagaagcagucagcagcaccuuuguggaccgugcagugggcuucuaacugcuccug

SEQ ID NO: 4127835 - RNA, 70 nt, Human
cagaagccagugaagagcuguugcagagauuuaaguaaagggaucccugaaucagccuugcauguaguug

SEQ ID NO: 4127836 - RNA, 68 nt, Human
cagaagccggcgccacaccauggcugcuagguucaccaucccagcguggauguggggcgcggcugcug

SEQ ID NO: 4127837 - RNA, 77 nt, Human
cagaagccuggccagccagggcugggguggaugcaccuuucccucccucccacccacucaccugccuggccugccug

SEQ ID NO: 4127838 - RNA, 60 nt, Human
cagaagcugugcugggggaucuguugggugaccugcaggacucccugggcccagcuccug

SEQ ID NO: 4127839 - RNA, 92 nt, Human
cagaaggacugccguguacguuucuguaaggacuuaaugcaaauuaggauuuguacuuuggggaaauguugaaggauaauggcguccuugug

SEQ ID NO: 4127840 - RNA, 71 nt, Human
cagaaggcagcagaggaaaggugcuuagugcaagccuaaggaucuuguaagccuuuguagcccggacucug

SEQ ID NO: 4127841 - RNA, 101 nt, Human
cagaagggcaguaggguggagggcugauguugccaccucaaguuuccaauuugauuuaggggucguuccugugagcuagccacucccuuccugccucucug

SEQ ID NO: 4127842 - RNA, 78 nt, Human
cagaaggugucaaggaggaagugagagaugacuauuuuaacaaagauguucuauuuucacuuuugcaaugagauacug

SEQ ID NO: 4127843 - RNA, 103 nt, Human
cagaaguaacgugcuugcuaaagagaaauggcuuugacaacuugccuuaaauaaucuggcaagugaaucuccuuucuuuauucauuagggauauuugcaccug

SEQ ID NO: 4127844 - RNA, 93 nt, Human
cagaaguacagacuugcugagcugagccaaaucugucuauccaauuacuggguaagagagcugacuguagcuuuaggcaaaaccuguaaucug

SEQ ID NO: 4127845 - RNA, 81 nt, Human
cagaaguccaaucugccccaagaaggcccucgcuucucucuggaguucaagagaaccuucuggguauuccagauaccucug

SEQ ID NO: 4127846 - RNA, 117 nt, Human
cagaagucugugggggaaauucauuucuuaguuuaccaaaauagacuuugaggccaagaauguugaagccuucuaacuaauuggaaauggaaccuggauucaaaccuaagacuucug

SEQ ID NO: 4127847 - RNA, 76 nt, Human
cagaagugaagagguacaaguccucagauaacauucuguaaauugugucugaacaaacucugccuccugccaucug

SEQ ID NO: 4127848 - RNA, 81 nt, Human
cagaagugagaacucuucuuccuuuaaaaugauuaacagaggauaauaucauuuacaaggaucaagggaucucuaccuuug

SEQ ID NO: 4127849 - RNA, 130 nt, Human
cagaagugccugagaggugcagggcccgagucugguuaggugacagcgggucaagaggaggacauuguccucucucuuguguugcugcagaugccacaaaacugggccacggcacgaucaggcaguucug

SEQ ID NO: 4127850 - RNA, 63 nt, Human
cagaauaaaagucccaaggcaucauauccugacccugggguuaccauauugggacuuuuacug

SEQ ID NO: 4127851 - RNA, 98 nt, Human
cagaauacagugaauauaccagugagguagacagcuuuuucucucucaugagaaagagaaagcuuagguaucucaacuuuuaguagucaaaacuuuug

SEQ ID NO: 4127852 - RNA, 62 nt, Human
cagaauaccagaaucauuuuauguugguguuacaugaaacauuugaugaucuuuggacucug

SEQ ID NO: 4127853 - RNA, 106 nt, Human
cagaaucaccuggaagucuuguucaaacagagcucugcucucagauucaaaacgucuguguggagccugggaauuuagaguucggacaaguucccagguguuacug

SEQ ID NO: 4127854 - RNA, 127 nt, Human
cagaaucaccugggaaagugaauuuaaaaucuagauuucugggcuccaaccccagugaacucugaugcaguaguucugggguggagcuugggaaucuguaauucagcauguucuccagaggggccug

SEQ ID NO: 4127855 - RNA, 60 nt, Human
cagaauccuguuuuacuucaucaaccucaagguuaugacuuuuuggcaaaagggauucug

SEQ ID NO: 4127856 - RNA, 63 nt, Human
cagaaugacaggaaagguuacauuuuucauucuaaauggaguguuuuucucugucgucuucug

SEQ ID NO: 4127857 - RNA, 70 nt, Human
cagaaugcacccagugucuggacuauaacacugaugucaugggccauaccaacuugggcugccuuuucug

SEQ ID NO: 4127858 - RNA, 71 nt, Human
cagaauggccagcuuauaggggcucagggaucacccaguccccacugcugcuuuuaucagcgaggccacug

SEQ ID NO: 4127859 - RNA, 58 nt, Human
cagaauggggagacuagcagcacuucugggcagcccaugaagcagccucuucccucug

SEQ ID NO: 4127860 - RNA, 82 nt, Human
cagaaugguucauguuuguguauugcucauuuagcuuucgacguccuuuggaaaguugaggaauaaacagguggacaauuug

SEQ ID NO: 4127861 - RNA, 61 nt, Human
cagaauguugucauccugggaugggaaggccugacaccugcuucucugcuugacaguucug

SEQ ID NO: 4127862 - RNA, 112 nt, Human
cagaauguuuacuagauucucauggcucauuauuggacacuucuucugcacacauucuacagcaucuuguguggaagauucuucaaucuguagaaauuaggaaacagcacug

SEQ ID NO: 4127863 - RNA, 73 nt, Human
cagaauucacuaauucaguguuugcagcaacuuuauaaaacauaaugauugcaaacauugagaacugacucug

SEQ ID NO: 4127864 - RNA, 72 nt, Human
cagaauucgaaugagcagaaucaggaagucuggauauuucuggauguuuucugcucauucaaauaaauuuug

SEQ ID NO: 4127865 - RNA, 70 nt, Human
cagaauugauuucuuacucuuccaaggucuguacauuaugacagcaugggaauuacaggaaucauuucug

SEQ ID NO: 4127866 - RNA, 88 nt, Human
cagaauuggacauguugaauuuuagauggcuaugggauaugcaggagcagguauccugggggcagcuggaaacaugggucuggagcug

SEQ ID NO: 4127867 - RNA, 61 nt, Human
cagaauuggagagcaacagaauuugaguggccccuucagagaauguccuucuucauuuuug

SEQ ID NO: 4127868 - RNA, 59 nt, Human
cagaauugggaguguccugauaucccgauaucuugagaacagaagcauuccuaauuuug

SEQ ID NO: 4127869 - RNA, 68 nt, Human
cagacaaaaaugcuuggacuuaauaaaucuaggagagagguuuguuuaucaaggucuagcauuguuug

SEQ ID NO: 4127870 - RNA, 62 nt, Human
cagacaauaggagcacauucugcaguugccgcuacugcuacuacagauacuccugcuguuug

SEQ ID NO: 4127871 - RNA, 66 nt, Human
cagacacaggauccaggguugagggguuagucaguuuguccuucagcuggggcccccucuguccug

SEQ ID NO: 4127872 - RNA, 73 nt, Human
cagacacguggagaugguugacaaauguugcccgaaaauuugggaucuuggcaaucaauucugacgucuucug

SEQ ID NO: 4127873 - RNA, 91 nt, Human
cagacacuagaaguuaaagggggcuacagugugggguugggcucagaaagagcaacacacagguaagccucuuucaaaacauuagucuuug

SEQ ID NO: 4127874 - RNA, 55 nt, Human
cagacacuaggugacagagugccacagggcagacaacucgcuacgccugggucug

SEQ ID NO: 4127875 - RNA, 55 nt, Human
cagacagaccugcaagggcacagacccugaggagggagugugcuugguuaguuug

SEQ ID NO: 4127876 - RNA, 76 nt, Human
cagacagagguuugacacugaucaaauacauaucgaaugaaugaauaaaugaaugagugaguucagaccucgccug

SEQ ID NO: 4127877 - RNA, 58 nt, Human
cagacagccaacuggggagggcaugccaggggaugcagccuccucucuuggcuuaaug

SEQ ID NO: 4127878 - RNA, 88 nt, Human
cagacagccugggcuccggaaggcagccuugcauugucacaaagucggcccugcagugcuuggcaaccuucugaccagccugcuucug

SEQ ID NO: 4127879 - RNA, 57 nt, Human
cagacagggagggagcgcggcugggccagaaggcugaucaccgccugcccccugcug

SEQ ID NO: 4127880 - RNA, 63 nt, Human
cacaaggccugaacaugaggagaugggaaucuuagaaucugucuaacauaccaggucuaugug

SEQ ID NO: 4127881 - RNA, 71 nt, Human
cacaagguuaucuguagguuagaugugagcacccaaacaaaauauuuagccaacuauaugacuaguuugug

SEQ ID NO: 4127882 - RNA, 67 nt, Human
cacaagugcaggucucagcuacucucuggcccaguuucuuaagagggugcaggccugaugcacagug

SEQ ID NO: 4127883 - RNA, 93 nt, Human
cacaauagucuuucucuucaucucaguaaaugugugaucugggcaaauauuccaagauagggacaaagcuagagaagagaauugaagauugug

SEQ ID NO: 4127884 - RNA, 67 nt, Human
cacaaugcagggagugggguuuagauagcaaaggaguugagagugacucacagucccuguaggagug

SEQ ID NO: 4127885 - RNA, 57 nt, Human
cacaauggcaccuguagggcguugcucuggggcaucccugcagagagugcuuuugug

SEQ ID NO: 4127886 - RNA, 57 nt, Human
cacaauuagcagcucuuuauuugcaguuuucauacauauauggaggugcuguuugug

SEQ ID NO: 4127887 - RNA, 63 nt, Human
cacaauuccauggcauucuuugucaguaccugucaaaauauaccuaagccguuaggaguugug

SEQ ID NO: 4127888 - RNA, 56 nt, Human
cacaauuccuaacccuagaggugauaucaguauagcucuggaggcaagggagagug

SEQ ID NO: 4127889 - RNA, 71 nt, Human
cacacacguauguguuagccaacuguuuaucauauguacauguuauacauauguguuaacaaaugugugug

SEQ ID NO: 4127890 - RNA, 74 nt, Human
cacacagaguccuuacugagguagaccagcugacagaauaaacgccauagggaugcuuguaagaacucagugug

SEQ ID NO: 4127891 - RNA, 98 nt, Human
cacacaguacaaaagcagaguggggcuuuaaaggcucagauucugcacuuagacaggccugagcugcaguccuggcucugccauuuuccagcugugug

SEQ ID NO: 4127892 - RNA, 67 nt, Human
cacacauaugccauuacagcaaaaaugcauugagauguauguguuuguuuguaugugugugugugug

SEQ ID NO: 4127893 - RNA, 68 nt, Human
cacacauauugucccuaguguggcacuucuuucucccauacuccaccacuaaugagacaguuugugug

SEQ ID NO: 4127894 - RNA, 57 nt, Human
cacacauggcugccagggaggucagcgaauauaauguuuacucugggugccugugug

SEQ ID NO: 4127895 - RNA, 61 nt, Human
cacacaugugccaucacagaccacguaaaucagaaugccuuggcauggagguagcagugug

SEQ ID NO: 4127896 - RNA, 57 nt, Human
cacaccauaugauuccauuuagaaauccuagacaaggcgaaacuaaucuauggugug

SEQ ID NO: 4127897 - RNA, 82 nt, Human
cacaccauuuauuucaauaaauacauugauagcuugaauuggugccauucuuuuccauuaaggugucaauguauuuggugug

SEQ ID NO: 4127898 - RNA, 71 nt, Human
cacacccugacaugacacugcacaccaggaaaacaaggugugcagcucugaacagucaugaagguggugug

SEQ ID NO: 4127899 - RNA, 67 nt, Human
cacaccgugggucucgcugugaggacgggccuaagcucacagguagccucagagacagauacgggug

SEQ ID NO: 4127900 - RNA, 100 nt, Human
cacaccuccuauggcugaggugcuauggaggauacguagcaccuuauguccuccacauagcaccuguauucuccacagcaccuuagcccugggaggugug

SEQ ID NO: 4127901 - RNA, 89 nt, Human
cacaccuccuuuuuuaagguagcuccuccucagcugcccuccagugcucugugggaggagggacccuagcagagaggaaaccaggugug

SEQ ID NO: 4127902 - RNA, 68 nt, Human
cacaccucuguguacgcaggcgugcgcgugcgcgugcgugugugcgcgcgugugugugugugugugug

SEQ ID NO: 4127903 - RNA, 71 nt, Human
cacacggcuguugacagaaccggaugcuguugcccaugggcccgaaggucugaguuuguuguuggcuggug

SEQ ID NO: 4127904 - RNA, 80 nt, Human
cacacucuccuggauggaccuucucuuauuucuccaauccaaaauccaguaagccagaucaaaguguccaggggggugug

SEQ ID NO: 4127905 - RNA, 68 nt, Human
cacacugccuuucuaaguggauaauuguaaucaauguuugaucauccauacuauugagaggcauauug

SEQ ID NO: 4127906 - RNA, 55 nt, Human
cacacuguguuuugaugaagccauaccacuaggcuucucccaaguaugcaguuug

SEQ ID NO: 4127907 - RNA, 71 nt, Human
cacacuguuguggcaaauguguccugggucccuucuaguccaggguuuuauacuuugcuaguaucagugug

SEQ ID NO: 4127908 - RNA, 70 nt, Human
cacacuugcuucagagucaaguuuuaaugggaaucuuucaaguuagugaacuuuggggccaaaaagugug

SEQ ID NO: 4127909 - RNA, 58 nt, Human
cacacuugugaccgauauaaugagccacuggauggcacuguggguccaugcaaaugug

SEQ ID NO: 4127910 - RNA, 64 nt, Human
cacagaaaggcucaaaucccaaggaaacuccucccugggaugugaaaagucucaauuuucugug

SEQ ID NO: 4127911 - RNA, 60 nt, Human
cacagaaaugauguuguguccuucucagugccucauaacaagggacacaauauuucugug

SEQ ID NO: 4127912 - RNA, 75 nt, Human
cacagaagcauuuuaguaaugaacuugagaaaaacuaaaaauuuucaggaacgugcuggaaugucaggcacugug

SEQ ID NO: 4127913 - RNA, 82 nt, Human
cacagaagucaaagucuggauuuuuaagguggaucucugagugaucaauauugcugaggauugaggcuugaauuucauagug

SEQ ID NO: 4127914 - RNA, 71 nt, Human
cacagacaggcucugaggcagauuuucguuuuagcuuuaggaugaucacucuggcucaagggaugugugug

SEQ ID NO: 4127915 - RNA, 101 nt, Human
cacagacucucucgggucugggaaaguuaauguaucucauguaacuaacugacauucaccaaacguaagaacagauaaaguuucccccgacagacccugug

SEQ ID NO: 4127916 - RNA, 61 nt, Human
cacagaggcugcgcuugggaacggaaugaacaaccaggagcugugggaggcaggcuuugug

SEQ ID NO: 4127917 - RNA, 58 nt, Human
cacagaugaguagaugggugcagcguugacaauaacugcagucauauuguucaucuug

SEQ ID NO: 4127918 - RNA, 73 nt, Human
cacagaugcaggugauucacaguuuaggcugggcugauaacagcccccgccagcugagaauggggccuuugug

SEQ ID NO: 4127919 - RNA, 122 nt, Human
cacagauggugcucugcagaccucucugcuguggcacuucccucccugaauggcuuccugcaagaggugcuaauugcaaguaagggauggagugcggcccggaccgcagagcuuauuucgug

SEQ ID NO: 4127920 - RNA, 67 nt, Human
cacagcauagcugggaaggguuugccaugcuuccauggcugcaucauccugguugagaauugcuuug

SEQ ID NO: 4127921 - RNA, 87 nt, Human
cacagcccagauuaaggagucaggaguuaugcuccaccucugugaguugcccuaagaggugggcauccugaguuuauuaugguuaug

SEQ ID NO: 4127922 - RNA, 72 nt, Human
cacagcccugagaaugucccgaaugguuuccucucaccuggagagauuggggaugaaucuuucuuggcugug

SEQ ID NO: 4127923 - RNA, 60 nt, Human
cacagcccugcgccccaguuugggggugaaacuagacucagaaccaggggcaggucugug

SEQ ID NO: 4127924 - RNA, 55 nt, Human
cacagccuaaacucagaacuccaagggcaguuggaggucaggggagaggcugaug

SEQ ID NO: 4127925 - RNA, 56 nt, Human
cacagccuuuaggguacacacagauacauuugggcuggacacccuaaagugcucug

SEQ ID NO: 4127926 - RNA, 60 nt, Human
cacagcucugacacaguacaaaauucaguggcucucugaaguaugcugcccagagcuuug

SEQ ID NO: 4127927 - RNA, 62 nt, Human
cacagcugcccuaacuguacucaacucucucuuuuuugucuacaucaaaguacgcagcugug

SEQ ID NO: 4127928 - RNA, 72 nt, Human
cacagcuggugacagagcccagacuucccccagguuucuggcggguccgggggucucuccuccccagcugug

SEQ ID NO: 4127929 - RNA, 58 nt, Human
cacagcuguauucaaguugcaaggcuugucaacuuugcuauuuuucugugcagcucug

SEQ ID NO: 4127930 - RNA, 98 nt, Human
cacagcuucuuuauaucuggcugggguccauccucuaauauacacccucuaauggugaguugcagugagcggagccucagugcugugaacuggcugug

SEQ ID NO: 4127931 - RNA, 70 nt, Human
cacaggaaaugauucugcagcagagcaucgccuugaauucucucugcugcuuugugauuuuuuccugcug

SEQ ID NO: 4127932 - RNA, 121 nt, Human
cacaggacagaugcuacaaguaaaguagaaaacagaagcaaucuaugaaugguucauauguguaaaugcauuuguuuaagcuauuuggaaaacuugguuaguauuuucacuuaguucugug

SEQ ID NO: 4127933 - RNA, 64 nt, Human
cacaggagcccugaggccucccucugucuggggccucccucucuggggggcuucagggccugug

SEQ ID NO: 4127934 - RNA, 59 nt, Human
cacaggaggcaaugguaagauuggaauucuguauuuugaacugcccuguccuucaugug

SEQ ID NO: 4127935 - RNA, 81 nt, Human
cacaggcaccacucuaacuuuuuugauaugugccccuuguuucgcaggcauucuucgaaguaaguaguguugugucgugug

SEQ ID NO: 4127936 - RNA, 59 nt, Human
cacaggcagggaccucuugaguucccaagcaacagggaaugugcaagacuugucugaug

SEQ ID NO: 4127937 - RNA, 97 nt, Human
cacaggccaaagaaacaggccccagauggagucccguggaguucugccaucucuuuggcugagcugaauugcugccauuugccugcaucugucagug

SEQ ID NO: 4127938 - RNA, 91 nt, Human
cacaggccacacuuugagcagccagugguugaagaugcagucuccucauaggaucucuccucugccucugagcaggcagguguggcuaaug

SEQ ID NO: 4127939 - RNA, 81 nt, Human
cacaggccgugugcuccuuuugguuuguggugugucuggaaaacaaaaggaacacaggagaaaggggaagcucggccugug

SEQ ID NO: 4127940 - RNA, 64 nt, Human
cacaggcuuggggcucagacagaucuggguuuauaucucacuucugcugcugaccaacacugug

SEQ ID NO: 4127941 - RNA, 63 nt, Human
cacagggaacaacuagaacaaaggccuugagauguggcaguuuguggcaaauuguuuauugug

SEQ ID NO: 4127942 - RNA, 61 nt, Human
cacagggcagagaccugggugcagaggggacccugcccucuuccucaggccuuucccugug

SEQ ID NO: 4127943 - RNA, 59 nt, Human
cacagggcagguacucucagagcauccauacuuccgcucugcccuucacccgcuuugug

SEQ ID NO: 4127944 - RNA, 96 nt, Human
cacagggcccagcuucagugaauguugaguaaggcuucagugauuguuagcgcuucaucuuguucuauguuugaaaccagaaguugcgcaccugug

SEQ ID NO: 4127945 - RNA, 60 nt, Human
cacaggggacaggaagaugguaguggauggcuuccuucccacccuccacuguucacugug

SEQ ID NO: 4127946 - RNA, 72 nt, Human
cacagguagcuuuugauauuagggcuggcuggaaugucugaugucaucccuggaguccggagcucaccucug

SEQ ID NO: 4127947 - RNA, 73 nt, Human
cacagguuggcagggucucugcucuacauggcuuuucagcgagccaggcuagcagagacuccacugucuugug

SEQ ID NO: 4127948 - RNA, 80 nt, Human
cacagguuguuggggaaggugggagaauguaaguguggucugcagacgucaacauggucacucuuccuuguguaccugug

SEQ ID NO: 4127949 - RNA, 76 nt, Human
cacaguaaauacccggggcugugauuuuugugacuuuggucaaugggacgacaggcucugugguagacuggcugug

SEQ ID NO: 4127950 - RNA, 71 nt, Human
cacaguaacacagacagccacuaguaauuguucccuaaaaauucugugugggaaugucugagauguuugug

SEQ ID NO: 4127951 - RNA, 92 nt, Human
cacaguaccagggcaucuggaucaggauggcuucugcaucaaacuacauagugugcacaggaagcuauucucucuaaucauccuguccugug

SEQ ID NO: 4127952 - RNA, 61 nt, Human
cagcugucucugccuuaugguccagggcaaguuucccccuguaauauacacagacagacug

SEQ ID NO: 4127953 - RNA, 109 nt, Human
cagcugugcccacauaugucugacaggguguguuagaaugauuauguguggguguggcuacaugcaucucugggacacauguuugcauauguguggcacacgaaggcug

SEQ ID NO: 4127954 - RNA, 97 nt, Human
cagcugugugggaggaggaggacuccuacccuggucgaaguugaguuucuuagcuggaggaguuucuccuagcccuucaauauccaccacgucacug

SEQ ID NO: 4127955 - RNA, 57 nt, Human
cagcuguuguuaugucugcaggggaaucacagucuuuggcagccccuuacacagcug

SEQ ID NO: 4127956 - RNA, 64 nt, Human
cagaaagaugugaguucaaaccucagugaauggacugagguguccggcugcauaaucuuggaug

SEQ ID NO: 4127957 - RNA, 66 nt, Human
cagaaagcagagcugagccuuucacaauuuaggaguccaaguucagcgcugcuucuaacacaucug

SEQ ID NO: 4127958 - RNA, 56 nt, Human
cagaaagccgacuuacaauggaauaucauucagcuguaaaaacgacggacuuucug

SEQ ID NO: 4127959 - RNA, 88 nt, Human
cagaaagggugcggccuggcugacagcuuaauuccagcuuuacgaaacccugaguagagaauucagcuaaggugagcccagauuucug

SEQ ID NO: 4127960 - RNA, 127 nt, Human
cagaaaucacuaacaucuuauggaaaagcuuugaaagccauggcugcaucagccugccucucccacuuagagacgggaaaguuuaugugagccagggucgaggcuguuugggacugugugaucucug

SEQ ID NO: 4127961 - RNA, 55 nt, Human
cagaacagaaucguguggugaggccuucugcuucugccaauuuuguuuuguuuug

SEQ ID NO: 4127962 - RNA, 70 nt, Human
cagaacagagucaaaaguaugugcaaugucauuauuaauuauuguaaacauaaauuggauucucguuuug

SEQ ID NO: 4127963 - RNA, 77 nt, Human
cagaacucuuaaaagcaauauuuaaagguuugcaacucucuguuggaaucaauucauguugcaaauagugagaucug

SEQ ID NO: 4127964 - RNA, 64 nt, Human
cagaacugugagggcggcccaugcugcaggcuguggcugucagcaggcugcuucuccacagcug

SEQ ID NO: 4127965 - RNA, 109 nt, Human
cagaagcaggaugccgaucccggggaggugccagggggcucaaaggagagugccaggcaggugggcgagccucuggaguccucuggagccuccuuggcugcugcuucug

SEQ ID NO: 4127966 - RNA, 85 nt, Human
cagaagccugggagucuggguuucaugggcacuggcucucugccauaucagccggucccaucuuaauccaagcauccagggacug

SEQ ID NO: 4127967 - RNA, 58 nt, Human
cagaaggagcgcuaaggucccaggugugauaggaugagggcacccuuagccuccucug

SEQ ID NO: 4127968 - RNA, 72 nt, Human
cagaaggcuuauuuugauaucugaguauggccugaaggcuaugcugagugagugaaacccagagcacuucug

SEQ ID NO: 4127969 - RNA, 78 nt, Human
cagaaggguaaguaagcgcugugggcgugcgaggaggcagcucugccucuuccuagugugcagcguggccaccuucug

SEQ ID NO: 4127970 - RNA, 128 nt, Human
cagaagguccugggucccaaaguuccuguuacucacugcugauugggcacagaugagagugccuaguuuucauucagcagccuguuguggguacaggguuauggcugcaaugaagcagggccuuucug

SEQ ID NO: 4127971 - RNA, 80 nt, Human
cagaaguacaauggaacuuguaauuauguccucuuugauaacaugaauuuggauaugacgaguuuggugauuggcuccug

SEQ ID NO: 4127972 - RNA, 69 nt, Human
cagaaguauuuagucuucauuccuguguuugaagcagaaaaaaagguauugagggcuaaccagacucug

SEQ ID NO: 4127973 - RNA, 60 nt, Human
cagaagucuuucuguuucaccuuuaauuugagguuaagaacaguauauggaaagcuucug

SEQ ID NO: 4127974 - RNA, 70 nt, Human
cagaaucaguagagagcccuagggcucaaguguguguggcuucuaugagccugggcuuucucuggagaug

SEQ ID NO: 4127975 - RNA, 79 nt, Human
cagaauccuucuggguaguuacugugacgauccuucaccuuggcaguggaggaaguucuaugauuacauccugguucug

SEQ ID NO: 4127976 - RNA, 59 nt, Human
cagaaucuucucuauuuucccucagauauuaguucucugcaggaaaccacaggguucug

SEQ ID NO: 4127977 - RNA, 91 nt, Human
cagaaucuugcucugucacccaggcuggagugcaguggcacgaucucggcucacugcaaacucugccucccggguucaagcaauucuucug

SEQ ID NO: 4127978 - RNA, 88 nt, Human
cagaaugaugcuggcauuguucacagaauuugcgaagaucugagcccucagguccuccauggucuugaaguaaugcccccaaucucug

SEQ ID NO: 4127979 - RNA, 75 nt, Human
cagaauuuggaucauaggguuuuugagcuacaagggauaugaguugucauugaguucaaauccuucauuuuucug

SEQ ID NO: 4127980 - RNA, 58 nt, Human
cagacacacacccuggccuagcgcuaagauggugcuaagaccccuggguguugaucug

SEQ ID NO: 4127981 - RNA, 80 nt, Human
cagacacagcugcaggagguggguaccugucuucgcugaaagcuagacuuggcucguccuaguucuuguuuagugugcug

SEQ ID NO: 4127982 - RNA, 58 nt, Human
cagacaccagccccucuguguccccagcacucggggagcagagcgggcggggguccug

SEQ ID NO: 4127983 - RNA, 67 nt, Human
cagacacuaugcuaagguacuaauaggaauuauauauuccucacaaugaccuuaagcaauagugcug

SEQ ID NO: 4127984 - RNA, 81 nt, Human
cagacacugagagaacaucuccucccacgugcaaucugugcaugugcucaguucugcacaaggagaauucauuagugccug

SEQ ID NO: 4127985 - RNA, 72 nt, Human
cagacacuguguacacauacuauucaaagagauggagcuagucauugcuguugaaaagugugugugugucug

SEQ ID NO: 4127986 - RNA, 100 nt, Human
cagacagcagggagaugcucuccaugaggauccaggugacaggcccaguggggaucugggagccucauggagacgagacaucccagcccugcccccucug

SEQ ID NO: 4127987 - RNA, 59 nt, Human
cagacaggaauucuggcguggucuacguuucuccagcgccccgcuggaaaucuuuuuug

SEQ ID NO: 4127988 - RNA, 78 nt, Human
cagacaggccagacaaauugggacauuguguuacaacuccucuugagaacaccaugccuccaaagucugguucuucug

SEQ ID NO: 4127989 - RNA, 88 nt, Human
cagacagggaggaggucacauggggagagggagaaggccaugccucuuccacugggccccaucccugguugccauuccuccuuggcug

SEQ ID NO: 4127990 - RNA, 57 nt, Human
cagacagggguaaccuuccucauuucucuguguuguauguaggaaggacccugucug

SEQ ID NO: 4127991 - RNA, 57 nt, Human
cagacaggguggguuucugggccucgggcugauaagaagacccauccugauccucug

SEQ ID NO: 4127992 - RNA, 67 nt, Human
cagacagguagggacagaacaugaguggcagcaagccagacuuggucuuagugcucuaaccugucug

SEQ ID NO: 4127993 - RNA, 55 nt, Human
cagacaucuguacccagccugugguuuugccuggcugguaggguacagaagucug

SEQ ID NO: 4127994 - RNA, 62 nt, Human
cagacauggcgccaagugcuagaccaguaucauaaugguccaggcacuucccaucaugccug

SEQ ID NO: 4127995 - RNA, 75 nt, Human
cagaccacuauuucuauugcaugugauagaggcaggagauaacuccuguaaaggugacaggcaaagaaugggaug

SEQ ID NO: 4127996 - RNA, 119 nt, Human
cagacccaucugcuggguuuguugcaguacagauugccgggccucgagagaaucugauuuggcaggucuacaguggggucugaguaucugcauuucuaacaaguuucccggagaugcug

SEQ ID NO: 4127997 - RNA, 127 nt, Human
cagaccccaagagacuggcaguaccaacccaagcgugcccuggcauguccuccuggcaugcccgcugugucccuuccaggauggccggggugugggcuggucugcagaggcucugcagcuggggcug

SEQ ID NO: 4127998 - RNA, 86 nt, Human
cagaccccagcccauuucucaggacuccaugggcgcgcacaggacgugcucucgucccugccagggaaguggcuccuggcggucug

SEQ ID NO: 4127999 - RNA, 63 nt, Human
cagaccccagcggccagcaggcuucaccaccucugccuucccugggcuggcuugcuggguuug

SEQ ID NO: 4128000 - RNA, 56 nt, Human
cagaccgguuaacuugcccaagaucuauagcuugcugcagugaucucaucggucug

SEQ ID NO: 4128001 - RNA, 58 nt, Human
cagaccugagguugaguaccagucuugacucuuacuaacugcuuggacuucaguucug

SEQ ID NO: 4128002 - RNA, 67 nt, Human
cagaccuggagggacccuggcccugucgcuguccaugugacacuggcccaggcucuccuccuuucug

SEQ ID NO: 4128003 - RNA, 72 nt, Human
cagaccugggcauguguccugcugugucacacaggugcucugugaccuugagcaagacacugguccucucug

SEQ ID NO: 4128004 - RNA, 61 nt, Human
cagaccuggguaaggggcugacaaagauucuuugcuugaccaaacuuuacucaggcuccug

SEQ ID NO: 4128005 - RNA, 95 nt, Human
cagacggagucgcacucuaucacccaggcuggagugcagugacacgaucucuguucacugcaaccuccgccucccggguucaagcgauuccccug

SEQ ID NO: 4128006 - RNA, 80 nt, Human
cagacggggucagggaggccccaccauggcuugucgagggcacgggcaccugcauggcggcgcucucccugccuccccug

SEQ ID NO: 4128007 - RNA, 57 nt, Human
cagacuccaccuccagaaagucuugugcauuaagucuacaagaggaauggaggucug

SEQ ID NO: 4128008 - RNA, 64 nt, Human
cagacuccagagaguucucuuguccucuuuuggccaugugaggauacaagaagauggcagucug

SEQ ID NO: 4128009 - RNA, 71 nt, Human
cagacucuuggcuuggaugagguaugcaugcacaggcaaaagcuaagcagaaguaccucguucuaguucug

SEQ ID NO: 4128010 - RNA, 79 nt, Human
cagacugaaaccugagccaugagccugcgcccagcucccugcgagguuggaaagcgaggaguuggcauuuuucagccug

SEQ ID NO: 4128011 - RNA, 57 nt, Human
cagacuggguggcuuaagcaacaaauauuucucacuguucuggaggcuacaagucug

SEQ ID NO: 4128012 - RNA, 55 nt, Human
cagacuuccugaaagcugguuuuuggucccugggaagccagcccacagugguuug

SEQ ID NO: 4128013 - RNA, 60 nt, Human
cagagaaaguugagaaguucccuuuggaaaaauccaaaccacacuuagcaguuucgucug

SEQ ID NO: 4128014 - RNA, 77 nt, Human
cagagaaaugcagcagcugaccagugaguccugcaaguaagaggcagaauugcaacucacucucauugcucucucug

SEQ ID NO: 4128015 - RNA, 91 nt, Human
cagagaagagccuccuggaggagagccugcacuuugaccaugcuguccggaugggugcagugcucuuuucugcaaaguguucacuucucug

SEQ ID NO: 4128016 - RNA, 89 nt, Human
cagagaaggaaagggaauccaugauuugagagcagccggcuucacugaacugguacuguucugcggaucagaagcuaagccuguaucug

SEQ ID NO: 4128017 - RNA, 55 nt, Human
cacaguacccagcacuacugagcaaacagauacucaguguguuccucuuacugug

SEQ ID NO: 4128018 - RNA, 81 nt, Human
cacaguaggagaaucuggcucaugucgucgcaaguauaugguucuugcugagauaagcuaugaccagggaauuccuauuug

SEQ ID NO: 4128019 - RNA, 90 nt, Human
cacagucauauuucccuuugucuuuguggugagccugcgugaaauaaaugaaugcaucagcacacacuggagcaaggagaugggacucug

SEQ ID NO: 4128020 - RNA, 129 nt, Human
cacagucaucuuccuucaagcuuggagaaaggacagucuucccuuauuccacucagagguguccauguguaggagaaaggggagggugggccucagcucucagcuccucugaucaaucuacgcugcuug

SEQ ID NO: 4128021 - RNA, 68 nt, Human
cacagugggcuggugucugauucuccccugagaaaucucaaggaugaaagauuggccauguagcugug

SEQ ID NO: 4128022 - RNA, 75 nt, Human
cacagugucaggcagcugaggacuuugcuaacauguccuguccucguucacagaguccuuggcuccgucauugug

SEQ ID NO: 4128023 - RNA, 88 nt, Human
cacaguguuuaagcuucagcuucaauaauggcugauggugauacauuugaguaauucuauuaccaguugaaugagggaagcugcugug

SEQ ID NO: 4128024 - RNA, 72 nt, Human
cacaguguuugguaaguacccaccuggguccagcacuguacuggacauuaggugaagcuuaucuucauagug

SEQ ID NO: 4128025 - RNA, 74 nt, Human
cacauaauaaggaaguugcagaaguggaauugaaucccagccuuccucacuuuguagccauccuuucacaugug

SEQ ID NO: 4128026 - RNA, 63 nt, Human
cacauauaaauuaccccauuugugugcacagacagggcacacacugggcaugguuuaugcuug

SEQ ID NO: 4128027 - RNA, 77 nt, Human
cacauaucagccagcuguccucccuuuccugggagcugguccagagacgaggggcagggcgucugguuuucauugug

SEQ ID NO: 4128028 - RNA, 72 nt, Human
cacauaucugaagggauauucugaggaaaguagaauaccucauaauguaaggcucccuacaguguauaugug

SEQ ID NO: 4128029 - RNA, 82 nt, Human
cacauauguuuaauaaggucuggauuuuaucuacuguauucaucagaaguauuacaaaguagaaauucaguaaauauuugug

SEQ ID NO: 4128030 - RNA, 107 nt, Human
cagagcggcauuccuggcauccucauucagcccgaaggugcgccguucaccuucggcguuauuucccugaggguugcaggugguuggugagcgaggaggcgucucug

SEQ ID NO: 4128031 - RNA, 69 nt, Human
cagagcgggugcuguucuggcugccaccacccuggaggggcuggaagagggaggggcacaaaggcucug

SEQ ID NO: 4128032 - RNA, 98 nt, Human
cagagcucccacacccccucugcagcuccugccucucugguugggccucccagguucagaaaagacucaggggcugagguggucuguauggaucgaug

SEQ ID NO: 4128033 - RNA, 84 nt, Human
cagagcucggguaacacuggcaccgucucacacuguuuucaaugauuucccuguguugcugcugugugucuaccuugggcuuug

SEQ ID NO: 4128034 - RNA, 69 nt, Human
cagagcucugaccuggccgcccugcugugcaguaacuagugcgagugggcaaaacagcucagagcuaug

SEQ ID NO: 4128035 - RNA, 58 nt, Human
cagagcugagaauguugaugcugaggcuuucuuguuuccuuuccauuuucugagccug

SEQ ID NO: 4128036 - RNA, 72 nt, Human
cagagcugcuguuuucuaggguuguuggcccagggcugaacacccagggccuuccagggaagacagggccug

SEQ ID NO: 4128037 - RNA, 60 nt, Human
cagaggaaaugggaaggagauaagccauacugauuuccuuguaagaccuauuuuugucug

SEQ ID NO: 4128038 - RNA, 65 nt, Human
cagaggaccugcucgaccguggccccacacacgcuuuggaacuggccagggaggagaggccccug

SEQ ID NO: 4128039 - RNA, 62 nt, Human
cagaggcacaagaaagcaaggcaugcauggagcagcgcaguuguuugguuugaggccaucug

SEQ ID NO: 4128040 - RNA, 130 nt, Human
cagaggcuagagaaaugugaagauauggucagcacugguggaaaaugugacuauucuaaaguuguaguucauuaucacuuuagaaguauguguucuaguugugcagaucuaauuucugcuugagcccuug

SEQ ID NO: 4128041 - RNA, 60 nt, Human
cagaggcuucuuucugauuugcguaugugugccauagugccugaucuacaaggggcccug

SEQ ID NO: 4128042 - RNA, 64 nt, Human
cagaggcuuggcauuaucaugcagagcaaaaagaagcuccucacaugaagaaucaagacccuug

SEQ ID NO: 4128043 - RNA, 71 nt, Human
cagagggaaaauuacccagagugcaccacccaacaauaccaguguuaacauuucaacgaauuuuccuucug

SEQ ID NO: 4128044 - RNA, 66 nt, Human
cagagggaauuugcagguuguuuugagaaagauuucuuaaagcaauuugagcaaguucuaucuuug

SEQ ID NO: 4128045 - RNA, 60 nt, Human
cagagggagaguucuggcagaauuuggaccugaguucugguugcccaugacaucccgcug

SEQ ID NO: 4128046 - RNA, 62 nt, Human
cagagggagcccuccaggagcagggaagucauauccguggaccauuuguagguuucccucug

SEQ ID NO: 4128047 - RNA, 55 nt, Human
cagagggcacucggagugacauuuucuggggaagauccuccuggugacuuuucug

SEQ ID NO: 4128048 - RNA, 59 nt, Human
cagagggccauaggugcauaguugagaacugaguuuagaauuugaacuauggucaucug

SEQ ID NO: 4128049 - RNA, 79 nt, Human
cagaggggagcucugauaugaaugucuagcucuuccucgcagaggaacaugugaaaucucauaguuagucucucuucug

SEQ ID NO: 4128050 - RNA, 75 nt, Human
cagaggguacccagguggcucugacggggguuccaguggaaaugucugugggguucaugugccucuugccuucug

SEQ ID NO: 4128051 - RNA, 65 nt, Human
cagagguauauauucuccauauugggguuucuccaaccauaauguggguguuaauagugccucug

SEQ ID NO: 4128052 - RNA, 107 nt, Human
cagaggugaaguaauuugcucaaagugacauaguaguggggccaggguuugaacucaggaaguuuaacuccagagcccauacucuuagcuuagcuauacuaccucug

SEQ ID NO: 4128053 - RNA, 60 nt, Human
cagagguggagcucuuggcaucauggcagacuaaguugauguugacaguucccauugcug

SEQ ID NO: 4128054 - RNA, 81 nt, Human
cagaguaagacugaaaagugucuguugaguuaaugaaaaagugaauuaacuaguugauguuacuuuucuagguuuacucug

SEQ ID NO: 4128055 - RNA, 98 nt, Human
cagaguagaagucugacugaccuggaaugaauauacauucauuccauauuuauuccacuggaauacauucauuccaggucagucagaguucuauccug

SEQ ID NO: 4128056 - RNA, 105 nt, Human
cagaguaugucacguggagauggggcaagggcucacggucugcugggacugggauaccaccaccuagacacugugugagucuuugccucugccaccugugcucug

SEQ ID NO: 4128057 - RNA, 59 nt, Human
cagagucaaucuuaucaguuaauaaagucaaguuguugauucagagaagauuggcccug

SEQ ID NO: 4128058 - RNA, 83 nt, Human
cagagucagcgugcggggccagcgcaggcugauaaccgcacggaacuucccaggcacccuguguggccgcacugcucccucug

SEQ ID NO: 4128059 - RNA, 58 nt, Human
cagagucaggauuacccaaucuguacaagcuuuguguaaaggaaggaaccugagucug

SEQ ID NO: 4128060 - RNA, 55 nt, Human
cagagucaguaacauauaugguacaaacauucuuauacaugugucacugauucug

SEQ ID NO: 4128061 - RNA, 92 nt, Human
cagagucaguucauggucagcuagugguugcaucugaguauuaagagaaugaauguccagccaaccacuggauugagaaagaggagaaguug

SEQ ID NO: 4128062 - RNA, 57 nt, Human
cagagucauaucagagaauaugaacugucaguguuuccaauguuucucuuggcucug

SEQ ID NO: 4128063 - RNA, 77 nt, Human
cagaguccucucuuggcuauccaaguuauccauaauuuuuucuggauuuucuuucugaauagcuucaaagaggccug

SEQ ID NO: 4128064 - RNA, 99 nt, Human
cagagucuagaccuuuaaccacuguguuaugcuuuccauggguaaagcaaccuaaaaaagccccuggaaucaguuacaugugguuggagacuaacucug

SEQ ID NO: 4128065 - RNA, 76 nt, Human
cagagucugauuuugacaacugugcaguuuguauugaaggguacaagcccaaugacguuguccggauccugcccug

SEQ ID NO: 4128066 - RNA, 80 nt, Human
cagagucuggagaggagcaccauggccaugaacacugacucuggaaagaaccagauggccugggcucgauuccaacucug

SEQ ID NO: 4128067 - RNA, 130 nt, Human
cagagugaaggguuccaugauucucuugguccuucccucagaguugccuggugcuuuuugcagauucagccaugucuucacaccgggcagcaggaaggagaaagagaaggggagucgcacuuaccaccug

SEQ ID NO: 4128068 - RNA, 68 nt, Human
cagagugaccuacuuagaacucaaguuaauagauaaagguaagaugagcuuuuguaguagucacugug

SEQ ID NO: 4128069 - RNA, 61 nt, Human
cagagugagggccugcaccugccccggguccucuguccggaaaugguuuaauccuuaccug

SEQ ID NO: 4128070 - RNA, 77 nt, Human
cagagugcagggugugcagcggcaugcagaggacagucgucaccauguccucagcugcugcacagcuuuucaaucug

SEQ ID NO: 4128071 - RNA, 62 nt, Human
cagagugcucucucucauccucuuuccaccauaugaggauacaacuagaagauggcagucug

SEQ ID NO: 4128072 - RNA, 91 nt, Human
cagaguguggagugaaguggagaaguaaauaucuguuuauagcacuagaagagugauacacagauuuacaucaaucaagcuacauagucug

SEQ ID NO: 4128073 - RNA, 92 nt, Human
cagaguguguauuccuacuacauuaauaaaacauucaguacccacugaaaguuugagaauaguggaggaauagaauagaauguuauagucug

SEQ ID NO: 4128074 - RNA, 63 nt, Human
cagaguguuucuuugggugggugaagaaagaaucaacaccucauauaaugagagaugcuucug

SEQ ID NO: 4128075 - RNA, 80 nt, Human
cagaguuccagccuuucaaagucguuuucaauccuguuuuuucaggucauguauuugcgagguuaggaaaaccuacucug

SEQ ID NO: 4128076 - RNA, 123 nt, Human
cagaguuggaugcuaggaaagauugauuuuguaucuuacggggacuaauugaaagaggacccugcuaucacuuuucauuaugguucacgugauguagauagucuuugauggguuucagcuuug

SEQ ID NO: 4128077 - RNA, 78 nt, Human
cagaguuuccaguauucaggcuucgagaaacagugagaaugugauguuccugaagccugagugaugacuaugauucug

SEQ ID NO: 4128078 - RNA, 55 nt, Human
cagaguuugcuggaggcgggaaaguaggccgcgguuuccaccccagccagcucug

SEQ ID NO: 4128079 - RNA, 94 nt, Human
cagaguuuuguuugcuuaauagcuugacuauucuaugauguuggaguuacuaaccauagagaauguuaaguaccaaaaugaauacuaaacucug

SEQ ID NO: 4128080 - RNA, 67 nt, Human
cagaccacaaaugagcuggcaggggcucagggacugccaagucacccagccuuggcggguuugucug

SEQ ID NO: 4128081 - RNA, 69 nt, Human
cagacccaucugcagggcuuuuugaaacaugguccacuggacuucacuuucagagucucaguaagucug

SEQ ID NO: 4128082 - RNA, 61 nt, Human
cagacccccugaagagaggaagcuggaccacuuugugcucuaaggucagggcgaaggucug

SEQ ID NO: 4128083 - RNA, 72 nt, Human
cagacccucauguauagguccauagugaauguuaucuaacaugauuuugguuuauuacauccaugggugcug

SEQ ID NO: 4128084 - RNA, 112 nt, Human
cagacccuggcuggagccccuauggcuugggguggggagugggaguacccaccccaggcccuccccuuccuuccucagacagccuccuugagggcucaagccauuucuucug

SEQ ID NO: 4128085 - RNA, 69 nt, Human
cagaccgcuggcaaugcguacaucugcaugcuguacaggccagaagcugcagcucauugcuggggucug

SEQ ID NO: 4128086 - RNA, 58 nt, Human
cagaccucaaagcugcagugcuggacaguggggcugaaagcaaagccuuuagaguuug

SEQ ID NO: 4128087 - RNA, 59 nt, Human
cagacuaaaaaucguguccuggaaggaaacuacagguacuaccagggauuuucagucug

SEQ ID NO: 4128088 - RNA, 70 nt, Human
cagacuauuuauguccaaguguuuuaaccaaggaguuaaaugguuagauuucucauucauagauuguuug

SEQ ID NO: 4128089 - RNA, 65 nt, Human
cagacucuuggucuccagcacagaaucucugauucagggagucuggaguggggcccaagaaucug

SEQ ID NO: 4128090 - RNA, 60 nt, Human
cagacugccuggggcacaauauggcucuggcugggccacaugcucucucuccagguucug

SEQ ID NO: 4128091 - RNA, 57 nt, Human
cagacuggcugaaggccgaguggaguggguuaaagcuuggccccgaagccuagucug

SEQ ID NO: 4128092 - RNA, 63 nt, Human
cagacugggugcugugggcucagagguggcaaacaugucuggaugucuggagcaucgugucug

SEQ ID NO: 4128093 - RNA, 74 nt, Human
cagacugugggaagacagccagguggcacgacuccggcagccacuugccgcccggccaucucggcucccaucug

SEQ ID NO: 4128094 - RNA, 56 nt, Human
cagacuugacggcagcugcuuucaugggugauacccggguucuagcccucaaucug

SEQ ID NO: 4128095 - RNA, 64 nt, Human
cagacuuugugugcauuucugugcauacacaugaagauucaaauguguacaggagugcagucug

SEQ ID NO: 4128096 - RNA, 123 nt, Human
cagagaaaagaagaguuaggaaggaaaaacauucuauuuugcuaaaacagcuuccucagaacuucucaugcaauguuuucaaagugagugugcauaaagucuaccaaugacuucuuauuucug

SEQ ID NO: 4128097 - RNA, 89 nt, Human
cagagacacaugccugaacaccgugugugugugcgcgugugugugugcacacacacacgugcucaacacgcuccaugcagaauacuuug

SEQ ID NO: 4128098 - RNA, 64 nt, Human
cagagacuguacaaugccgagacuaacuccugcucuaaugagcggaggggcauuugcagcucug

SEQ ID NO: 4128099 - RNA, 87 nt, Human
cagagagaagaguuugcggggacucagccuuugucagccccagcugacagugaggcuggcaaggcugguauuugaaauauuccucug

SEQ ID NO: 4128100 - RNA, 88 nt, Human
cagagagacaguauguugaaauagaagggacaugugacuaagaucuuagugaccccacauguguccuagcuauucuccuauuucccug

SEQ ID NO: 4128101 - RNA, 86 nt, Human
cagagagaggccucacagcacagguguccucacagggggugccucacagggcuucccuaacacaccugcugguagcuucugcucug

SEQ ID NO: 4128102 - RNA, 82 nt, Human
cagagagauguuaauggcuuugcucaaguuuagccagcugguaaguggcaaagcuggggugugagccauucauauuauugug

SEQ ID NO: 4128103 - RNA, 87 nt, Human
cagagaggagcaaggacuauaagacaaaagcuuugagaaaaaccacuggcugugcuugguguccuuggaugauuuuuucacucuuug

SEQ ID NO: 4128104 - RNA, 82 nt, Human
cagaaacuuuaguuaggggagcaacuagguauauauuuguuuuuaaccaaguucuaccucaguuucccacuuaugguuucug

SEQ ID NO: 4128105 - RNA, 90 nt, Human
cagaaagccuguaccccucagugaccuauugcauucaggcuagcuuuguguggaacacaagucauugaggggccgcauaaaagcuuauug

SEQ ID NO: 4128106 - RNA, 85 nt, Human
cagaaaggaccaccuuugcaacucccauguguugaugcuguaugguaacgcaguaauaagcuggaggguguggaggugcugacug

SEQ ID NO: 4128107 - RNA, 75 nt, Human
cagaaaggcacagugauuucugcaagggcucugaguuuguaaaugacagagcugggauucaucuaugucuuucug

SEQ ID NO: 4128108 - RNA, 78 nt, Human
cagaaagggacuugugucuguguuuuuguuaacuaugcacaucgauuugacugagagacauagcacaguuuuucgcug

SEQ ID NO: 4128109 - RNA, 78 nt, Human
cagaaaguagaacuuccauauucuugguauuuucuaggggaagcuggccccuggaagggaauggugguuguaugguug

SEQ ID NO: 4128110 - RNA, 57 nt, Human
cagaaauguuuaugcuuuugaagaguggcauugagcccuuuagaaguugaaacucug

SEQ ID NO: 4128111 - RNA, 55 nt, Human
cagaacagaggccuuauguuucagaaacuaaugggaauuauggucacuguuccug

SEQ ID NO: 4128112 - RNA, 65 nt, Human
cagaacagucgccugcauggaucugcuuaccuuaccguccaagguguguaugcagguggcuucug

SEQ ID NO: 4128113 - RNA, 65 nt, Human
cagaaccacauugaagagagagaguggcugcucucagcacguuguuuucauugugguuaaaccug

SEQ ID NO: 4128114 - RNA, 65 nt, Human
cagaacucugcccugcauuucuguuucuugcuucugaaugcaguuaugugagggcaugauuucug

SEQ ID NO: 4128115 - RNA, 118 nt, Human
cagaacucuuggcugccugcagggcucugggcagaggacagcccccuugucugggaggcuguaauuccgaggccagggcugccuucccaaucaccucaggcaagcaaaugaggcaaug

SEQ ID NO: 4128116 - RNA, 55 nt, Human
cagaacugaacuguaaaauugaaaccagaagguugcaaauuucaguuaguucaug

SEQ ID NO: 4128117 - RNA, 57 nt, Human
cagaacugaccucugauucuaggacugaccucugacccuggaacugauucaguucug

SEQ ID NO: 4128118 - RNA, 92 nt, Human
cagaagaaaggugaccguuucaugagucagagaccucauggagagagacagcaugaggucucugacuuagagauggaugcuuggauuaucug

SEQ ID NO: 4128119 - RNA, 61 nt, Human
cagaagaaaguggggagacaagaggcugcucuuguuacuugauuucuuugcuuuauuucug

SEQ ID NO: 4128120 - RNA, 68 nt, Human
cagaagaccguccccaggaugugggcacuucucgccagaggguccugagccuggggcgcacucuucug

SEQ ID NO: 4128121 - RNA, 120 nt, Human
cagaagagcacaggaaggcuaccuuuucagaaaaguauuuugagcacuuuaugauauuagcuuccuuguaggguaaggugccaagguaauuucagucuccccugugauauaaagcuucug

SEQ ID NO: 4128122 - RNA, 61 nt, Human
cagaagagguuuuuaagggaagguuugcauaucacaccuuucccugguuaaccauuuucug

SEQ ID NO: 4128123 - RNA, 57 nt, Human
cagaagaucucuuaguggaggguaagguccaacccucagcucccaugagaucugcug

SEQ ID NO: 4128124 - RNA, 77 nt, Human
cagaagaucugagauuuucagcaucacuucagcaaaaauuguuaugguaauaauaugaaggucuuuaaaucuugcug

SEQ ID NO: 4128125 - RNA, 98 nt, Human
cagaagcauauaagguaacuuccuggccauugccauggcaaguugacauggcauuuauaaacugucauggcacugguaggagugucuuuaugcuaaug

SEQ ID NO: 4128126 - RNA, 98 nt, Human
cagaagccagagcuucucucucacugaugguggaaagccuuucuacaacccaagaggaggccauucucucaguagcagcagaggcucagguguuuaug

SEQ ID NO: 4128127 - RNA, 82 nt, Human
cagaagcucccaguguggguaaaguacauguagaacuuccaacagacccucuucuauuuugucuucugcucaucaccuucug

SEQ ID NO: 4128128 - RNA, 61 nt, Human
cagaagcugaggagugaggcaauuauuugaagaauucaaccccacuucaggcagcugucug

SEQ ID NO: 4128129 - RNA, 63 nt, Human
cagaagcugggaaaaaaugggcaguucaagaaaauaaaaugacugcaaauaccuaguuaucug

SEQ ID NO: 4128130 - RNA, 89 nt, Human
cagaagcuuuuugauagccuuuggcuacaagcgcugcaauccuaaccuaccuggguuaaagugucagaagccaaaauuaaaaucucaug

SEQ ID NO: 4128131 - RNA, 82 nt, Human
cagaaggaaagagcugagagggcgaucagaggaagaaaagaacuuuuuccacugcuacaaccucccagaaucccuuccucug

SEQ ID NO: 4128132 - RNA, 62 nt, Human
cagaaggauagagcugggaguuuccccuaucacugggugaggcuacucagcuguccgaacug

SEQ ID NO: 4128133 - RNA, 59 nt, Human
cagaaggcauagaccggauuaugcaaucacugagaaguagcuucuggauguguuuucug

SEQ ID NO: 4128134 - RNA, 65 nt, Human
cagaaguagaaucucagguaggcuauggguaaacuugguaggcuagcuggcauucuacauugcug

SEQ ID NO: 4128135 - RNA, 84 nt, Human
cagaauacccaacucagacuggauuaaauaaaaggggauuuucuugcuuauuuaacucuagauucagugguaaauggguuucug

SEQ ID NO: 4128136 - RNA, 84 nt, Human
cagaauaccuaauucagacuggcuacauuuucauggugcucaauagcuauauggagcuaauggccacuggauuggauagcacug

SEQ ID NO: 4128137 - RNA, 108 nt, Human
cagaauaccuucuuccuugcgauuuauguggacagacauaauccuaauuucucaggcaaguaaauugauauuagauuugucucagugauaccaagaugauaauuucug

SEQ ID NO: 4128138 - RNA, 130 nt, Human
cagaauaguauuuaugaaaaucuucagcuuccuucuuagauuuguagaaaccagcaccaguaggcuugguagcuuauuucagcuaaaauucuuaauuaaagggaagccucagauuuguuguacuauauug

SEQ ID NO: 4128139 - RNA, 90 nt, Human
cagaaugaaauggagauggcuauuuuagagaucaaggagguaacuucuugacuggcugaaauaccauauuuaguuccuuucaauauucug

SEQ ID NO: 4128140 - RNA, 58 nt, Human
cagaaugauuuguuaccgcauuuucuucuuggaaagaaaugcaugagaaaguauucug

SEQ ID NO: 4128141 - RNA, 68 nt, Human
cagaaugugagguuguaugugaaaaugacaaguugaauuguugcuuucacaaugcaauccuacuucug

SEQ ID NO: 4128142 - RNA, 60 nt, Human
cagaauucuuaaaacuuauggacagguugaaauaacuuuccauuuguauuaggaguucug

SEQ ID NO: 4128143 - RNA, 60 nt, Human
cagaauugagagaggcuguucucugggcacacuugcuuuauguggucuuuucaauugcug

SEQ ID NO: 4128144 - RNA, 121 nt, Human
cagaauuguuuggagagcuuguuaaaacacaggaugacaggcuucauccucagaguucuuaauucaguagcucugcaguagggccugaguuuguauugcuaccaaguuccaaaugauacug

SEQ ID NO: 4128145 - RNA, 80 nt, Human
cagaauuuaaacccaggagccagagucugcaguguaagagcuuuacccugaaauuaggcuccucucuguaguagaugcug

SEQ ID NO: 4128146 - RNA, 68 nt, Human
cagaauuuucauuagaaugacugagaaauuaugcaugaaguuucuuacuugcuuugaugaacauucug

SEQ ID NO: 4128147 - RNA, 91 nt, Human
cagacaaaauaaaaugcccaguguuuaggaauaaaauguaacugugcauaucccuggauuaacugaagcuauuuugauuugaaaaaaucug

SEQ ID NO: 4128148 - RNA, 79 nt, Human
cagacaaagugauuuugaauaaguguuuuuaagccaaauuauaagagagcacagauggauguauucauuauuuugucug

SEQ ID NO: 4128149 - RNA, 86 nt, Human
cagacaaguaacaguugcuauaauaucuucauuuuucauagaauaaacaaaaauguagaccuauagggaccucagugauugucaug

SEQ ID NO: 4128150 - RNA, 74 nt, Human
cagacaaugaagaagccaauugguaggcugaguuaaacuguggcaguuugucugauggcuguuucaauggucug

SEQ ID NO: 4128151 - RNA, 71 nt, Human
cagacaaugguuggacaguuauuuguuagcuaaaauccuacugaaauuauuguuuaaucaaacuuguccug

SEQ ID NO: 4128152 - RNA, 64 nt, Human
cagacaccaagacuguagaacaguguuguccaacagaacuuucugcaguguuggaaaugaucug

SEQ ID NO: 4128153 - RNA, 62 nt, Human
cagacaggacccaucagccaggcacugugagagcacagagcagggagguuggguccugccug

SEQ ID NO: 4128154 - RNA, 55 nt, Human
cagacagggcccugugaugguacccaacaaugaacuacaaacuaggcccuuucug

SEQ ID NO: 4128155 - RNA, 71 nt, Human
cagacagucuuucaaagaaaagaucacuucauuuuugaagugauaagcuacuuucugugaggacuguacug

SEQ ID NO: 4128156 - RNA, 63 nt, Human
cagacauacaucagucaggaaaggucuuaugacuaaggcauuucugaugagggaugugguaug

SEQ ID NO: 4128157 - RNA, 114 nt, Human
cagacauagaauguucgcugccuuucuaaugacauucacagaguuauuuuuaugcuuaaucaaaugagucucagacagcuuuugaauauggaaaggaugauacacaaauguuug

SEQ ID NO: 4128158 - RNA, 62 nt, Human
cagacauaucccugcucccuuagauuuuauggucucaugguggaauacagggaaguguguug

SEQ ID NO: 4128159 - RNA, 72 nt, Human
cagacauugugaaaguugccacaccaguugcaaggugcuggucagagcaacugcucacaaauuucuuguuug

SEQ ID NO: 4128160 - RNA, 114 nt, Human
cagaccaccucucaacugcuacucaaccugugucucuccuuacaagacuggucacgguuccugcuagucuguacuuauggcagagaugaugugagggcauaugagauguggcug

SEQ ID NO: 4128161 - RNA, 56 nt, Human
cagaccagacacucgcaucgacauuaccugcuuggcuucugcgaugucuguguuug

SEQ ID NO: 4128162 - RNA, 61 nt, Human
cagaccagcucuaugaacccaauccucuuugcgucccagguguuguggucaagcugggcug

SEQ ID NO: 4128163 - RNA, 102 nt, Human
cagacccuaucucccgugcucuuuuacaguggcuauuucauuuaguacuagggggcuuuuugccuguauuuuauaaaugagcaaagaggacuggagggucug

SEQ ID NO: 4128164 - RNA, 68 nt, Human
cagacccuguugguggaucagauugggcuugagaugaggugcccagcccuguccagcagagggugcug

SEQ ID NO: 4128165 - RNA, 55 nt, Human
cagaccucgugauccgcccgcuuuggccucccaaagugcugggauuacaggcaug

SEQ ID NO: 4128166 - RNA, 56 nt, Human
cagaccuggggccugggagcccgcccugggcaggugaguucuggggccucaggcug

SEQ ID NO: 4128167 - RNA, 66 nt, Human
cagacgagacacaggugguuccugucaggaacagcauuuccugguaugggaagccuguucucucug

SEQ ID NO: 4128168 - RNA, 64 nt, Human
cagacgucugggcucgcggugucacagaguggcccuuccuccggcucuggagcacagacgucug

SEQ ID NO: 4128169 - RNA, 75 nt, Human
cagacuagggagcugcuguugggggagaagcaugguuucugagagccacugaacagcaacacagcucucuuacug

SEQ ID NO: 4128170 - RNA, 113 nt, Human
cagacuaugaauuauuuugaacgauugauaauuuugguuccagguuggcccaguaauaauuuauuaauucaacuugacaacccaaauuacugguaucacuuauuuuauuuuug

SEQ ID NO: 4128171 - RNA, 62 nt, Human
cagacuccuccacagaccuacugaaugagaaucugcauuugaacaggacugcuggggguaug

SEQ ID NO: 4128172 - RNA, 71 nt, Human
cagacuccucucugucacaccaguggccccuagcauuuuaaagggggccauggggacagagggugaaucug

SEQ ID NO: 4128173 - RNA, 68 nt, Human
cagccuggcuccgugucacgugcccucugcuguucccuaggcacugggacgcugcacugaccagucug

SEQ ID NO: 4128174 - RNA, 72 nt, Human
cagccugggugggacugaagucugaggggucuguuucugacccuucccuccucucacccauucucucggcug

SEQ ID NO: 4128175 - RNA, 89 nt, Human
cagccugguaguccucuguggaccaggguauaaggaaugaaugugcuuccuucuaaagccuugcacagagugaugguuuuucgggacug

SEQ ID NO: 4128176 - RNA, 56 nt, Human
cagccugguccccggcucacccggccgcauccagcaccucguagccguggccgcug

SEQ ID NO: 4128177 - RNA, 67 nt, Human
cagccugugacucugugaaaccauguucagacuccauccucucaugucacuuguggucacuaggcug

SEQ ID NO: 4128178 - RNA, 58 nt, Human
cagccaauuaauuaggguaggagguggaagccccccauuucuuuggcuaaauugggug

SEQ ID NO: 4128179 - RNA, 64 nt, Human
cagccacagggaggcguuuucagggcccaucugggguuggaagacauugcuuuccuuuguccug

SEQ ID NO: 4128180 - RNA, 63 nt, Human
cagccacaugguggaagagcaucagaaagugcaagugcucaggaugcaauuccaucaaggcug

SEQ ID NO: 4128181 - RNA, 73 nt, Human
cagccaccugagauaagagagcucacaccggucagagguaugaugcgucuccucuuucagguauuuaggguug

SEQ ID NO: 4128182 - RNA, 102 nt, Human
cagccacugaacugggccuggggaggcaaaggcaagucugucuucauuacuagagaggcuguguaaagugcuuuccccuucccacccagcaucaugugguug

SEQ ID NO: 4128183 - RNA, 98 nt, Human
cagccagaaccagauaaaacuacuuugggccauuuguuuacugacauuaaaguggauuuauggagaccgaaagucuuucuauugucccuucugggcug

SEQ ID NO: 4128184 - RNA, 61 nt, Human
cagccaggaaugcaugcucugcuguaaauagagacagcagggggcugaguagucuugguug

SEQ ID NO: 4128185 - RNA, 64 nt, Human
cagccauaaaauuaauauguacuauguauauauauuuauauggguaaauaauaauuuuaggcug

SEQ ID NO: 4128186 - RNA, 85 nt, Human
cagccaucccugacucaucuccucaacucagagcuugagcccaucacccucagcucagagcucgggaggauggggcuggaggcug

SEQ ID NO: 4128187 - RNA, 82 nt, Human
cagccaugcuuuucucuacauuuuaauaagcugcuuacaaaauuggugauugaugaguaagaaugaggaggaugcagggcug

SEQ ID NO: 4128188 - RNA, 57 nt, Human
cagcccacagcccagcacuuguggagaaccauguuaguguguuuaggcugcggguug

SEQ ID NO: 4128189 - RNA, 59 nt, Human
cagcccaccuggcacguguguuauccccgauagccacggcccuucaagguggcuugcug

SEQ ID NO: 4128190 - RNA, 55 nt, Human
cagccccaguucccuggaagucugugaauagcaagaaauggggcaggcugggcug

SEQ ID NO: 4128191 - RNA, 107 nt, Human
cagccccuccuccuugcucggccugccuuugccugucgccugguccucucuggaagcugcucugccucuggaccagccgaggggguaggaugagcuggguggggcug

SEQ ID NO: 4128192 - RNA, 83 nt, Human
cagccccuuucacaggaccuucuucagaggccagccucugguggggaauagaggcacccuggaggagacugugccagcugcug

SEQ ID NO: 4128193 - RNA, 97 nt, Human
cagcccuagggucauccuuggugcucuguuacccagcaaccccagcagugacagcccugcuucuggaguaacagggugacugugguccuggggacug

SEQ ID NO: 4128194 - RNA, 85 nt, Human
cagcccucagauggucugugagcugugagaccuguugggaaucagagccagcaggggcucuaaagaucauggaagcugagagcug

SEQ ID NO: 4128195 - RNA, 58 nt, Human
cagcccucaucucagcuucuuuggcaaaccucuagcaggguugcugaaacagggacug

SEQ ID NO: 4128196 - RNA, 82 nt, Human
cagcccuccccauccuggcgccacacggcucuacuuccccuuccagauuggggcuguuucagugccaggcuugggaacgcug

SEQ ID NO: 4128197 - RNA, 77 nt, Human
cagcccucuaauuucacagcuggucuaugggaaagacacaugcauccuuggcccauaugauucuggaagugcugcug

SEQ ID NO: 4128198 - RNA, 60 nt, Human
cagcccugccauggagccuccugaagacuccacucuuugcaggucugaaugucagggcug

SEQ ID NO: 4128199 - RNA, 71 nt, Human
cagcccugcggcuccuggaccuccgcuggaucgaggauguuaaagacucccagcuccgggaguugcugcug

SEQ ID NO: 4128200 - RNA, 60 nt, Human
cagcccugcucuuagugucuccaacuccaggguggggugacaaaaaacgagggcaggcug

SEQ ID NO: 4128201 - RNA, 62 nt, Human
cagcccugguagccugcugccauugugcugugccagaugcugugcuggcuaaccaugggcug

SEQ ID NO: 4128202 - RNA, 55 nt, Human
cagcccuuaaauagauauacaguguaucugugguauuaagucuauauaaggggug

SEQ ID NO: 4128203 - RNA, 64 nt, Human
cagccgcagagccucccuugccauuugccucaagcccagggcagugccaggagggcucuggcug

SEQ ID NO: 4128204 - RNA, 101 nt, Human
cagccggggcucagggagaccucuggacacugcauccuuccagggcauagagagugagguagggauagguguccagagaccuuagagcugaggccuugcug

SEQ ID NO: 4128205 - RNA, 84 nt, Human
cagccgugcacccuggaaacgaagcuuaacuuuucugagcuacugccccagauaaagaaaguuucgggucgcggacgccggcug

SEQ ID NO: 4128206 - RNA, 58 nt, Human
cagccgugccccuaccaugcugggcuuguggacaggcaagagugggugucacaggcug

SEQ ID NO: 4128207 - RNA, 56 nt, Human
cagccuacugugccuaccgaggcuccacgugggucucagcaggcaccagaaggcug

SEQ ID NO: 4128208 - RNA, 92 nt, Human
cagccucaccacggcagugccugggacccggcuguguguaucccaccuggccaggcuccaaguacuguucagaugacuguggcaugaggcug

SEQ ID NO: 4128209 - RNA, 84 nt, Human
cagccucacccagugacccuugacagggccaagaauggaccuccggcucugggguccaguccugcucaccacuuggugcugcug

SEQ ID NO: 4128210 - RNA, 90 nt, Human
cagccucauuucccuaacaaucagcagggaggcucugugcccugcggguggguggggcuaucggggccuugucugcagaggagggggcug

SEQ ID NO: 4128211 - RNA, 129 nt, Human
cagccucccaaagugcugggauuucaggugugagccaccgcguccggccucauaaagaguucauuuuaaaaguccuuauuggccgggcgcgguggcucacgccuguaaucccagcacuuugggaggccg

SEQ ID NO: 4128212 - RNA, 59 nt, Human
cagccuccccucaaaagugagauuuuccuggaaugucacuagucgcggggggagguaug

SEQ ID NO: 4128213 - RNA, 65 nt, Human
cagccucccgaguagcugggauuacaggcaccugccacaaugcccagcugauucgguggugguug

SEQ ID NO: 4128214 - RNA, 62 nt, Human
cagccucccugggcgcucuugugccccacacggccggugccugagagcuggggaugaggcug

SEQ ID NO: 4128215 - RNA, 87 nt, Human
cagccucuccuuuccaaagaucccaaagagcacaccucugcaaaccagugucuccagggagcuuggaaagacccgggaggaagacug

SEQ ID NO: 4128216 - RNA, 57 nt, Human
cagccucugagccuuggcagaugcuauuacuccccauagcacaggcucagggagcug

SEQ ID NO: 4128217 - RNA, 72 nt, Human
cagccucuggaagguuggcucccaguuccaucuccugucuagaagaacugggugccugccugcugugggcug

SEQ ID NO: 4128218 - RNA, 56 nt, Human
cagccugcagcucaucccgcuuaccacugccuuuggagggagacagcucugggcug

SEQ ID NO: 4128219 - RNA, 80 nt, Human
cagccugcagugcacaggacacucggccuccuggucagcaaacuguuaggcagcccaagaugucagcggcaccacgguug

SEQ ID NO: 4128220 - RNA, 55 nt, Human
cagccugcuagggcaaugccuuugccuuccauagccccuuugucuuagcaagcug

SEQ ID NO: 4128221 - RNA, 55 nt, Human
cagccuggccauauucugcucaaaaaaagcaaagaggcagaaagagcccaggcug

SEQ ID NO: 4128222 - RNA, 67 nt, Human
cagccuguacaacccaugagucuacauuucaguaguuuucuacaucaaauacuacauggguuggcug

SEQ ID NO: 4128223 - RNA, 108 nt, Human
cagccuguucuauaugccagagggcacuggguuucaaugucaguauuuauguucuuuugauagcuuguuagaauuuaguugcucguggauuucuguagaacucugcug

SEQ ID NO: 4128224 - RNA, 81 nt, Human
cagccuuagcaaucugggugacccugggcaaggccuauccccucucugggccuuuguuucuccaccugugcaaugaggcug

SEQ ID NO: 4128225 - RNA, 68 nt, Human
cagccuucaaccuagcuagagcaguucauccugaacaaugcugggacccgcuggguuuugaaaagcug

SEQ ID NO: 4128226 - RNA, 58 nt, Human
cagccuucagccuuagagaauguggcugagaggcuauggaagauaaggcugaaaguug

SEQ ID NO: 4128227 - RNA, 85 nt, Human
cagccuuggugaccuugagcacguugaagcgcacugucuugcucagaggccggcacucgcccacugugacgaugucaccgaucug

SEQ ID NO: 4128228 - RNA, 123 nt, Human
cagccuuuuccccuccccucugaaaucugccugcccacagagagggugcauucugaguuucucucucucucagcuaugcucuaagcuuagugaggcagagucuacccuuguaggaaugagcug

SEQ ID NO: 4128229 - RNA, 93 nt, Human
cagcgacaaggauuccggcagugggcgccaggucuccgcuaggucaaagccggggugaucuaguccacgguugaacucuuacccuguuugcug

SEQ ID NO: 4128230 - RNA, 77 nt, Human
cagcgacuaguuagacaggaggcagcagcuucucaagaaauuccuucacagcugccaucuccugaggacaggagcug

SEQ ID NO: 4128231 - RNA, 117 nt, Human
cagcgagaaaauaaaauaaauggaaaaguggauuaugaucgugaaagauuggcuuauacagcauuugauaggaacaguuucaggauguuuuccccccuucaauuuguauuuuuccug

SEQ ID NO: 4128232 - RNA, 78 nt, Human
cagcgaucuaaaagagcauggaaaguucaggaaacaacaaauacuuuuucauaacuuuuacaugcuugggagguucug

SEQ ID NO: 4128233 - RNA, 84 nt, Human
cagcgcaguuugagggggcucagcucauuguggauccggucugcgucauguagaaucuucuggagcucccccuggcucguguug

SEQ ID NO: 4128234 - RNA, 67 nt, Human
cagcgcgggcacuggcucugggcagaucccagcgcggagcugacucccugggcccgugccagcggug

SEQ ID NO: 4128235 - RNA, 68 nt, Human
cagcgcuuucaucaucaacuggcagguaaguuaccacaacuuacacagaaugccaaugaaugagccug

SEQ ID NO: 4128236 - RNA, 71 nt, Human
cagcggcauauuuccaaauucuucucagcauuuuuaaacaguaacugggagugaagcaaauaaugcuggug

SEQ ID NO: 4128237 - RNA, 79 nt, Human
caguggucuguucucauuguuuucauccagaaagacacugauaauaagauuuccugagugccaugagagcaccccucug

SEQ ID NO: 4128238 - RNA, 64 nt, Human
caguguaaaauuuaagaagugugugcgugucuacugacagcaagacaguuuccuaagugcucug

SEQ ID NO: 4128239 - RNA, 76 nt, Human
caguguagaaaucggagcuuggaagcuuccucuuaaccgggagaaagccauagcccagcuuuacgauuucccauug

SEQ ID NO: 4128240 - RNA, 71 nt, Human
caguguagcaagaggaauuucuggaaggaggccaaauuuggcuucggaucauuucucuucaacacacacug

SEQ ID NO: 4128241 - RNA, 68 nt, Human
caguguauacacauguguaugugcaugcaaauauggauguguagccgcauguguacucuuauaggcug

SEQ ID NO: 4128242 - RNA, 127 nt, Human
caguguauggggaagacuuuuguguccucacuucuugacuucugggugcccucugggggaacacagcccggggaaggggugcccagagaggcaaggccuaggcccagaugauuuccccuccuagcug

SEQ ID NO: 4128243 - RNA, 72 nt, Human
caguguauuaguuguccagcaguuggauuugaucaccgaaaaugcuaaaauugugagauuacuaucacacug

SEQ ID NO: 4128244 - RNA, 103 nt, Human
caguguccuggggagccgcuggugcuggcaacagaguagggagccccuucagccccauggugugcucagcacugcaugaacacuuuccccaggggacucacug

SEQ ID NO: 4128245 - RNA, 55 nt, Human
cagugucucaguuucacuugaagauuugcccagcauuuagaaacuguugacacug

SEQ ID NO: 4128246 - RNA, 103 nt, Human
cagugucuccccuaaagugagcuccauacacauuuauuuggccucuuugugauuacaucgggauaaaugaguguuaugcagguuccaguauaguuuuccacug

SEQ ID NO: 4128247 - RNA, 64 nt, Human
cagugucuccggcuuuuccaugcugaucugaugccuauuuuagauccaugugggcuggaaacug

SEQ ID NO: 4128248 - RNA, 65 nt, Human
cagugucugccuuucuguuuggcuucaguccuuaaagcugucaacagaccagagaggcggagcug

SEQ ID NO: 4128249 - RNA, 58 nt, Human
cagugugcuacacuuuaugugucggugaccaggagucacagaugggaugagcacacug

SEQ ID NO: 4128250 - RNA, 60 nt, Human
caguguguuacaagguucccaauucuuauuuauaagacauggaaucaggguaauguacug

SEQ ID NO: 4128251 - RNA, 66 nt, Human
caguguuaaaggaucuuugucauuaauauauuugugugaauuaaugauucagcucuuuucuagcug

SEQ ID NO: 4128252 - RNA, 58 nt, Human
cagcucugugggagcguauguguguauauguguguguguuugcucuccaugguuguug

SEQ ID NO: 4128253 - RNA, 69 nt, Human
cagcucuuagagggagacagaccuagacucuucuugaacuggaaauuagugugucugucagagaagcug

SEQ ID NO: 4128254 - RNA, 56 nt, Human
cagcugaaacuauguucucauaaaacuuauuugucucuguggccaugguucagcug

SEQ ID NO: 4128255 - RNA, 84 nt, Human
cagcugaaccugacucgccaccaaucaaugcagcaaaauggugaacauuuguccauuuuauuggauggugggcaaggaagacug

SEQ ID NO: 4128256 - RNA, 64 nt, Human
cagcugaacgacauccucucauuuauucauggggcgugagaggagugauuguaaaauucagaug

SEQ ID NO: 4128257 - RNA, 105 nt, Human
cagcugacagccagucgcucccucauauacccagcgagagcucccacucagcuuucagugggcauaggagggaacccagccaagaccagaagaacugcccagcug

SEQ ID NO: 4128258 - RNA, 61 nt, Human
cagcugagcaggcauuuuccccaaagccucucuugaccgggcuccagucucugcucaguug

SEQ ID NO: 4128259 - RNA, 56 nt, Human
cagcugccccgcuggcugaccacaaacuuaugagcaagcccagcugaggucagcug

SEQ ID NO: 4128260 - RNA, 71 nt, Human
cagcugccccugcugacugcccuucucuccucccucucaucccagagaaacaggucagcugggagcuucug

SEQ ID NO: 4128261 - RNA, 103 nt, Human
cagcugccucaacccaguccuguacuuucuuucaaggggggcaaaaauagagucaggcuccuccagaaacugaggcagaacaaguugggugagcauccagcug

SEQ ID NO: 4128262 - RNA, 89 nt, Human
cagcugccugguggacagcagccagcagccuggcagcguggggcuggugagcugcugcugcuaucuacccaggcaacuccauuuugcug

SEQ ID NO: 4128263 - RNA, 104 nt, Human
cagcugcucaucauaggcuucauggacaaaagccucacuacuuauuagaguaucuucuucugggucuuuuuauuuauggcaggucuaauuucuugaugcugcug

SEQ ID NO: 4128264 - RNA, 63 nt, Human
cagcugcuggcauggagacucugggucccgaagcuccugggcccugccuccaucccagcucug

SEQ ID NO: 4128265 - RNA, 59 nt, Human
cagcugcuguucaguuuuguuuccuucuuuucauuggccuccaaaacugacggcaucug

SEQ ID NO: 4128266 - RNA, 112 nt, Human
cagcuggagccgcugggcaacagcccaaugggccuggagagagcuggcuucccaccgggccugggaucggaccugcagggcugugcugggccuguggcgucagcggcugcug

SEQ ID NO: 4128267 - RNA, 76 nt, Human
cagcuggaggccuuuguggagcucauggcagggucagcuuuaaucaucagccaggcugcuccagggaggccagcug

SEQ ID NO: 4128268 - RNA, 55 nt, Human
cagcuggcaaguggagcagggugggggcucaaccuccucaccgcuugaucagcug

SEQ ID NO: 4128269 - RNA, 57 nt, Human
cagcuggccugaucccuguggcgccaggcggguccugcagggcgggcagggcagcug

SEQ ID NO: 4128270 - RNA, 79 nt, Human
cagcugucaacaccucugggccucugguccauucucccuguuaagaaagagaaaauggcaagagccacagaggcggcug

SEQ ID NO: 4128271 - RNA, 84 nt, Human
cagcuguccagagaagaaaucugagcugugaguugcuuaggaugaggguuuguucagucuauccagcucagauccuugcagcug

SEQ ID NO: 4128272 - RNA, 82 nt, Human
cagcugugucucuccaggauacugcucucugcugcuggaaauucccuugcacaaaaguaugucaucuuuuagaaagcagcug

SEQ ID NO: 4128273 - RNA, 60 nt, Human
cagcuguuacugaaguaaaaugccacuguuugggugaagaaguguugcugggugacacug

SEQ ID NO: 4128274 - RNA, 58 nt, Human
cagcuguuccuggaaggagacccaguugaaagggguuguuauggaccaggaacagcug

SEQ ID NO: 4128275 - RNA, 64 nt, Human
cagcuguugaucucuuaagccuugccuuaagaugcuagaaagcuucagagcaucacuucagcug

SEQ ID NO: 4128276 - RNA, 59 nt, Human
cagcuguuucaguagcguuacuggguugaaagcccaaugacagugagcugagggaguug

SEQ ID NO: 4128277 - RNA, 93 nt, Human
cagcuuacaagggcagagaguugcugguuugaaccacagaccccugguuuaacaucuguaaucuagucaaccccuccucuuucuugaaggcug

SEQ ID NO: 4128278 - RNA, 80 nt, Human
cagcuuccguguugcugagcacagacuugggggaaacgaagaucccagagccaaugauggugcccacgaugauggagaug

SEQ ID NO: 4128279 - RNA, 61 nt, Human
cagcuuccugccuugauccagagcuugcacccguggcagggcucccuugcaaggagggcug

SEQ ID NO: 4128280 - RNA, 61 nt, Human
cagcuucuccagaugacccucagggcagaggugaccuggcagugucuugcuggggcagcug

SEQ ID NO: 4128281 - RNA, 60 nt, Human
cagcuucuuccugaacucuugcaacaucacugcugauucugcacuuugggggacaggcug

SEQ ID NO: 4128282 - RNA, 58 nt, Human
cagcuugcuucacagcucagcuuauagguguccgagcugagauuugaagcaaguucug

SEQ ID NO: 4128283 - RNA, 116 nt, Human
cagcuuggacuauagaauaugacagaaaugaucauguaauuucagaagcugggucauaaaagaagaugugacuucuguccuguuggaugaaucauucauguuugcagcccgagcug

SEQ ID NO: 4128284 - RNA, 61 nt, Human
cagcuugggcuggaaaguuucucagcauauaaacuguuuguaaagcuacagcccaggucug

SEQ ID NO: 4128285 - RNA, 73 nt, Human
cagcuuguaaguggugggguuaagguuagaacuagaggcuagucugaagauucuuuccacuauucuucagcug

SEQ ID NO: 4128286 - RNA, 57 nt, Human
cagcuugugcaaagguccugggguaggaauguguccaaggaacagcaaugcaggcug

SEQ ID NO: 4128287 - RNA, 65 nt, Human
cagcuuguuuuauuuggggaccagcaagugggugauauuuugagaacuucaggugauacaagcug

SEQ ID NO: 4128288 - RNA, 63 nt, Human
cagcuuucugucucaugacugacacccuuccuugguuccugucaucuguagccagguaugcug

SEQ ID NO: 4128289 - RNA, 63 nt, Human
caggaaaaagugaccuugguagcuagucuccaaagauggccaccaccaauacuugccuuccug

SEQ ID NO: 4128290 - RNA, 70 nt, Human
caggaaaacaauaaacguuuaaguaucguccaugcauuacuugggacauacugaaacuguuguuuaucug

SEQ ID NO: 4128291 - RNA, 58 nt, Human
caggaaacaaagccuugcucauuaugugcuagaacaauggguaaacuuugcuuucuug

SEQ ID NO: 4128292 - RNA, 69 nt, Human
caggaaacgggaaggcagaauauuguauggggauaccuaggcacugauucuguuuuccauguguagaug

SEQ ID NO: 4128293 - RNA, 112 nt, Human
caggaaagaaaggucuguuggguccagagcaugcagaucaucaagauauagaccaugugcuguggccuuggugaucugguguacucuguucccaauaggccugugccuccug

SEQ ID NO: 4128294 - RNA, 56 nt, Human
caggaaagguagucacaauguagcaauaaucguaacaauguuggauugcauuccug

SEQ ID NO: 4128295 - RNA, 57 nt, Human
caggaaauucaagagaggcugccuucuuaaaucagauagccauuccaagauuuccug

SEQ ID NO: 4128296 - RNA, 101 nt, Human
caggaaauuuccaucuuuaacuauacucuguaaaugugcuguccaauacacagauagcuacugagcacuggaauauagcuagucugaauggagauguucug

SEQ ID NO: 4128297 - RNA, 125 nt, Human
caggaacaacuggaagcuuguuaaaacugcaaauuucugggcccuaaaccagcucuauuaaaucaaucucuguggagguggggcucaggaaucuguauuuuaauaagcuucaucaguuguuucug

SEQ ID NO: 4128298 - RNA, 57 nt, Human
caggaacagaguggcauugucuggccagcuggguuccuggagaaugccucuguacug

SEQ ID NO: 4128299 - RNA, 99 nt, Human
caggaacaggccauuuucacuucuuuugugauucuucaguuacuucaggccaucuggauguauacgugcaggucacaggggauaugauggcuuagcuug

SEQ ID NO: 4128300 - RNA, 88 nt, Human
caggaacaguuuucuaugguagaagcaugaguucauuugcaauuuugugccauguuuuccauugccauggaaacucacaauuuuccug

SEQ ID NO: 4128301 - RNA, 68 nt, Human
cagacuccuucagaaacuucuggugucaaauaacucuuauuuucagcaaguuuuucuuaaggugucug

SEQ ID NO: 4128302 - RNA, 70 nt, Human
cagacucucaugcucuucucuuaugacuauggaaggcacucaugucugaguagagugugauuuucuucug

SEQ ID NO: 4128303 - RNA, 81 nt, Human
cagacucuuauuuagugauagaagcaaggacugaauuaaugguuauagcuccuugguucauuauaaaugaaauggaguaug

SEQ ID NO: 4128304 - RNA, 62 nt, Human
cagacucuuucccugugacagagucuugaugaaauucugcgggcuucucuagggaaggucug

SEQ ID NO: 4128305 - RNA, 81 nt, Human
cagacugagcugggacauggggagagccucuguccccagguuguuuucugcugggcaacuccccuccagaguucaguucug

SEQ ID NO: 4128306 - RNA, 58 nt, Human
cagacugcaccaucuggagcaccuccccucagggcagcaguuacaaaugugcagacug

SEQ ID NO: 4128307 - RNA, 75 nt, Human
cagacuuaugaagucagacauaauucuaacauuguuauauaaucagauuuaucugucuggcaguggcagaguuug

SEQ ID NO: 4128308 - RNA, 58 nt, Human
cagacuucaacucuaaacaacgggcuauucuggcaucgauguuggaggcuggggucug

SEQ ID NO: 4128309 - RNA, 71 nt, Human
cagagaacgaauagauguauuaggaauacauuauccuugcauuccugagacuuaucuguuucccccaucug

SEQ ID NO: 4128310 - RNA, 68 nt, Human
cagagaacggggaggaaggaggcucacuacccaaggaggugagcugauggcaucccuguuucuuccug

SEQ ID NO: 4128311 - RNA, 90 nt, Human
cagagaagaaaugcauuaugcugcgguuuuauauuucagucggaagauggcuggagaacuaguuaaacacgugccuaggaauguucucug

SEQ ID NO: 4128312 - RNA, 69 nt, Human
cagagaaggaggcaagaggaggguccuggaaaacugugaccuggggcuucuuucugccaccgaccuuug

SEQ ID NO: 4128313 - RNA, 106 nt, Human
cagagaaggaugcagucaguucaagcuguuuuugacugauguuucagauuguggucuaguaaacaggucugaaaauagcuacuuuuuuaaagacuguaaauuccug

SEQ ID NO: 4128314 - RNA, 60 nt, Human
cagagacauuaagugccaugauuaaaucuucauaguugaucuuugcacuagauguuucug

SEQ ID NO: 4128315 - RNA, 73 nt, Human
cagagacccaccuugccuuacagugucuugauaguggagccacaccaagcuacucaggcaagaugugucacug

SEQ ID NO: 4128316 - RNA, 74 nt, Human
cagagacuacgucuguuuuugaggcuaucuucucucuccuugggcaggaagaaaguagaaaaccgugguuucug

SEQ ID NO: 4128317 - RNA, 95 nt, Human
cagagacuugggacaggagaugacuuggccaaaggauuguugcuacaauaggcuuuguguuuuguuauccuuuguaacuaccccaacacuuucug

SEQ ID NO: 4128318 - RNA, 57 nt, Human
cagagagauagguugguguccuaaguucuagggcagaugcugagauuuauuucugug

SEQ ID NO: 4128319 - RNA, 73 nt, Human
cagagagauguauucugagaggcagagcuugugagugaauacuuauaugcauuucuaagaaaacauacgacug

SEQ ID NO: 4128320 - RNA, 59 nt, Human
cagagagcaggaggcagcgggacguggcagggccucuguccccucccucuugccuccag

SEQ ID NO: 4128321 - RNA, 57 nt, Human
cagagagcucaggaaaaugggagaaggacacacccccaggagccugaguccucucug

SEQ ID NO: 4128322 - RNA, 77 nt, Human
cagagaguuccacccauguguccaaggccacaauagcuaauccaugauggagcuggaauuggacccagggcucucug

SEQ ID NO: 4128323 - RNA, 77 nt, Human
cagagaguuccacccguguguccaaggccacaauagcuaauccaugauggagcuggaauuggacccagggcucucug

SEQ ID NO: 4128324 - RNA, 85 nt, Human
cagagaugaaaagcccuggccagacaccaguucauuaguggaaauaaaagcuuccuaaauugcagggaacuggcugggcuuucug

SEQ ID NO: 4128325 - RNA, 72 nt, Human
cagagaugaggcagaguggagagaaacaacucuggcugagccagagucuccagccacuacuucuuauuccug

SEQ ID NO: 4128326 - RNA, 79 nt, Human
cagagaugauuucagaagcaagaggagguggccaggagcaccagccaaaccaccagcuuccuuugggagcucaucucug

SEQ ID NO: 4128327 - RNA, 67 nt, Human
caggagaaagaugguuaguuuucuuguuaacauucauuaaucuugaaaucuagucauuuuuagucug

SEQ ID NO: 4128328 - RNA, 57 nt, Human
caggagagaagauuuggagcaagccaggguccccuggugauccagccuccucugcug

SEQ ID NO: 4128329 - RNA, 109 nt, Human
caggagagauagagaacggacggaggcagagacuccaccuucaggccaaagagccucuggugggggucaucuugcccuuuuccauauuccaacuuuuaucugcuuucug

SEQ ID NO: 4128330 - RNA, 79 nt, Human
caggagagggagauauaguaagagguugucgggaacaaacaaagacaucccugacaauagcgauuuaucuugcuaccug

SEQ ID NO: 4128331 - RNA, 70 nt, Human
caggagauugugccagugccuuggguauuaggagucugguuccaaucgcacuggcucauuuagaguccug

SEQ ID NO: 4128332 - RNA, 82 nt, Human
caggagccaggguguccugggagccauuuuagaggcugccuauugcagugugucucuuggcuuccucaucuacagggcccug

SEQ ID NO: 4128333 - RNA, 57 nt, Human
caggagcccagggacagggcggaugucgaugcuuugacaagcccugcucuggucgug

SEQ ID NO: 4128334 - RNA, 60 nt, Human
caggagccgccaggcacguuggcagggccgaacucacccuucccggcggcggcggccuug

SEQ ID NO: 4128335 - RNA, 79 nt, Human
caggagcucagaggauucuggggaggacauugggaaggacccuguggaggacucuugggagugcucuggagaagacuug

SEQ ID NO: 4128336 - RNA, 63 nt, Human
caggagcugagaagcagcgcuugauuuccugggggaaaucaagaaaagugcuuucggcuccug

SEQ ID NO: 4128337 - RNA, 61 nt, Human
caggaggagacauacuauaggaauauaguuauuaaauuacccuucagacuugucuucccug

SEQ ID NO: 4128338 - RNA, 60 nt, Human
caggaggagagagaugcuaugggauuaucuccuccaccccaacacauuccuuuucuucug

SEQ ID NO: 4128339 - RNA, 57 nt, Human
caggaggcccggccacagcccaggugcugcuccugaggaagcggcugacgucuccug

SEQ ID NO: 4128340 - RNA, 127 nt, Human
caggaggcugagcccgaggacaggucagugaguucccuuacuuucugguuuccagcuggccucagccuauggcagcccagcagagucuaggaaggagggaacgauggguccagggcuuuguucccug

SEQ ID NO: 4128341 - RNA, 56 nt, Human
caggagggaggccugugggacuuucugcuguggcuguuuacaaggcuuugcuccug

SEQ ID NO: 4128342 - RNA, 61 nt, Human
caggagucuguuccucauuuguauucuaaaccaggucaugguggggagucaggcauucuug

SEQ ID NO: 4128343 - RNA, 61 nt, Human
caggagucuugaaggacaggcagaguuagggcgcuaacucugaggaauguacaggacccug

SEQ ID NO: 4128344 - RNA, 100 nt, Human
caggaguugcagcuuuuuaugcucaugagguagccuguucugguaacgggcacugcuuccugagccugaguuccauuuuugcuugcacaacuuagucuug

SEQ ID NO: 4128345 - RNA, 62 nt, Human
caggauaugaugguuguccuaggugcaucccuguggaccagcuaggguagcacaucucccug

SEQ ID NO: 4128346 - RNA, 116 nt, Human
caggaugcauuugaguucccagggcaucuuguuaaagugcagauuuugauucaguaggucagggauaggccugagaaucugcauuucuaacaagcucccauauacugcugcuccug

SEQ ID NO: 4128347 - RNA, 79 nt, Human
caggaugcucaacaaacacugaagaccuaucugguaccagcuuuggugaccaagaaagaaaaucagugagguacuccug

SEQ ID NO: 4128348 - RNA, 65 nt, Human
caggaugggugucggccagcaccucaaacaccuccuaauuugcauuaccacugacacccuucuug

SEQ ID NO: 4128349 - RNA, 85 nt, Human
caggaugugcagggcccaagggugcccagcagaggagcaaggccucuucucuucucacuuugcccuguaccuuggguugcaccug

SEQ ID NO: 4128350 - RNA, 65 nt, Human
caggauguucuguuuuugcuuauuuugcuuugaugagggaaaaggcagugcaagagaggguccug

SEQ ID NO: 4128351 - RNA, 79 nt, Human
caggauuacuccagcugcuggucugagacugacaggaaggaagcaaagucagcugagagggagugggguauuggaccug

SEQ ID NO: 4128352 - RNA, 92 nt, Human
caggcaacaagguuuuuagaaagcaaacggaguggcuggacuuuguaauaaauuaagagucugguugauuccuuugcacuacucccggcuug

SEQ ID NO: 4128353 - RNA, 57 nt, Human
caggcaaggagcuggcucaaguaggacagggccuacugggccagcuacuuagcacug

SEQ ID NO: 4128354 - RNA, 72 nt, Human
caggcaagggacguggccuuggaguuggacagauguggcucugaauucugcuccaccacuuccagcagcgug

SEQ ID NO: 4128355 - RNA, 85 nt, Human
caggcaagucugcuggcaagaaauauauaucuuagguuuguuucauuugaggaugucuguauuuugccuucguucuuuaagugug

SEQ ID NO: 4128356 - RNA, 69 nt, Human
caggcaaguggcuaggccagugaccuccugugaagagcauaaaaaugaagucucuggcuugucugccug

SEQ ID NO: 4128357 - RNA, 78 nt, Human
caggcacagugaugagccggcugaggcugugggaucguuuauuggggcucuguccagccaggcugcagcacccgccug

SEQ ID NO: 4128358 - RNA, 81 nt, Human
caggcacccaccaccaugccuggcuaauuuuuuguagagaugggguuuugaaauguuggccaggcuggucuugaacuccug

SEQ ID NO: 4128359 - RNA, 76 nt, Human
caggcacugugcugagcucugcaccuuuaagaggcagcaagucgugacugguucagagcuggcucagagcugccug

SEQ ID NO: 4128360 - RNA, 70 nt, Human
caggcagaaaguauucuguguaauguuuuguuagauacacauugauagggaacaaauacugcucugccug

SEQ ID NO: 4128361 - RNA, 69 nt, Human
caggcagaaugagauuacuucaagguuucucuuaauuguuuucuuccuuuaaguaaagagcacugccug

SEQ ID NO: 4128362 - RNA, 88 nt, Human
caggcagcagggagcaaagcaggagagccugggugagcgcacgaagggugagucucccaucccggggucuccuccgccucugugccug

SEQ ID NO: 4128363 - RNA, 60 nt, Human
caggcagcccugcaccaagugugggauugcccagcaccacugguuuugcagaggcgcccg

SEQ ID NO: 4128364 - RNA, 87 nt, Human
caggcagccuuaucugucauccuagaacuccaggacagucccacauuguguugggaguggccacgacugggagauggaucugcucug

SEQ ID NO: 4128365 - RNA, 69 nt, Human
caggcagcugggucaccgucccgugggucuuguugucacgcugcgaucuuaaagugaccacgcugcuug

SEQ ID NO: 4128366 - RNA, 65 nt, Human
caguuuuggcucuggugcgggcuccugcgcuuucagccgcaccugcuccaucagggccaugauug

SEQ ID NO: 4128367 - RNA, 69 nt, Human
caguuuuucaagacaaccugcaugugauaaagucuggcauggggacuacaggagguugcuuggcagcug

SEQ ID NO: 4128368 - RNA, 59 nt, Human
cauaaaaguaggaccaacuuacauuaccaccaauaguguaugugagccuuauuuuuaug

SEQ ID NO: 4128369 - RNA, 60 nt, Human
cauaaauagcuuuuugcuuuccaauuucuaaaagaugcuugaaggcagaaguuggauaug

SEQ ID NO: 4128370 - RNA, 61 nt, Human
cauaacuugguguuggaaacugaccuaagccaauuugcuuauacacagcauccaaguuaug

SEQ ID NO: 4128371 - RNA, 80 nt, Human
cauaagaaccaguaacagugaucaccugugggaauuagaugggagauucucacaaaugaccaugguuacuaguuucaaug

SEQ ID NO: 4128372 - RNA, 76 nt, Human
cauaagacccauuuuccugauaggcgcccugcccguagaagaagagcugcagcuuuggcccagucgggaggguaug

SEQ ID NO: 4128373 - RNA, 78 nt, Human
cauaagauauaaugcuguacaucacaauuugcuguaaaacauuuuauaguauuuguaugagcagguaauuguuuuaug

SEQ ID NO: 4128374 - RNA, 74 nt, Human
cauaaggaacuugguaaauugugucagauaccaugaaaaugcaucuuuucauaguuaaccacagauuguuuaug

SEQ ID NO: 4128375 - RNA, 72 nt, Human
cauaaguuucagcuguugucaucaucacuauuauuguugcuauugugaaagaggacagcuuagggcuuccug

SEQ ID NO: 4128376 - RNA, 73 nt, Human
cauaaucucucugagcaaagcagccugcucauccuggacaagauuuggggugaaggguugcuuugagauuaug

SEQ ID NO: 4128377 - RNA, 72 nt, Human
cauaaucuuaggcaccauuugccaagugacuccucuguguuacugaugguggagcugguauuugagccuaug

SEQ ID NO: 4128378 - RNA, 60 nt, Human
cauacaaauguguccaggcucucaacugaggccucgaagaauaggagacaucuuuguaug

SEQ ID NO: 4128379 - RNA, 83 nt, Human
cauacaacaaagugaguuaaaguaccuuuguauguguuaacuacacauaccucuggguagcuuucaacuucuuuaguugcuug

SEQ ID NO: 4128380 - RNA, 113 nt, Human
cauacauaaauuaugauauauccaugcaguagacaaguucucagaaauaaaaaugaaugaaccauugauacaugcaacaauguggaugaaucucaacauaauuauguucaaug

SEQ ID NO: 4128381 - RNA, 97 nt, Human
cauacauaacaacagguaguucucagcuguucccuuggugccagacauacauuuuaucuaaagagacagcagacagaacuaccugcugcuuccugug

SEQ ID NO: 4128382 - RNA, 79 nt, Human
cauacauacauaugcauguguguauauauagcacauguuuccaugauggccucucuguacacacacguguguaucuaug

SEQ ID NO: 4128383 - RNA, 130 nt, Human
cauacaucagaauccccugggagcuuauuuaaaaugcagauuucugggcuucaccaccucugaccaggagguccaagguagggcccagacauggacguuucugucaagaucccagggaaugcugaugcug

SEQ ID NO: 4128384 - RNA, 69 nt, Human
cauacaugcaugauacaaaguugcccuacggagauagaagggggcugauuuugucacauagcaaggaug

SEQ ID NO: 4128385 - RNA, 61 nt, Human
cauacauugaauuugcacguguaaaaggauuuucuaucacagcacugaaauucaauguuug

SEQ ID NO: 4128386 - RNA, 57 nt, Human
cauacauuuauacacaucuauguauauaaauguacguguguguggaguauguguaug

SEQ ID NO: 4128387 - RNA, 129 nt, Human
cauaccaaucccagggugggucuaguaggcaggacagagauaagcuuugacucagugaaccgagagcugggagaggaggcagaaguuuaccucugccuugcuuaccagacccacccugggauugguaug

SEQ ID NO: 4128388 - RNA, 57 nt, Human
cauacucucuagaagagauagaucugcgggaaagagggauucuguccagggagugug

SEQ ID NO: 4128389 - RNA, 81 nt, Human
cauagaaauauagauuuacucaagagaaagggaacugaacccaauccugccuucucccaaugguaagucaugugaccugug

SEQ ID NO: 4128390 - RNA, 112 nt, Human
cauagaaucuauuuaagucaccuuagagagucuucuuuaggccauuuauagaaaacaugaaugaagcccaggggagagucucugcagugaaaaaugcugaagugggcucuug

SEQ ID NO: 4128391 - RNA, 66 nt, Human
cauagaauuguuucaaaugucuagauacuguagccucacaguacucuuauuugaaauaugcagaug

SEQ ID NO: 4128392 - RNA, 69 nt, Human
cauagauucuuauuuccaucuuaguucuaucaaaucaaauuaucugagaauggguccugagaaacuaug

SEQ ID NO: 4128393 - RNA, 56 nt, Human
cauagcaaggugcuuuccacaucucucaucugagaaguggaaaaaccuugcauaug

SEQ ID NO: 4128394 - RNA, 105 nt, Human
cauagcaggagucaguuuggaggguaauucaggcucaagaccgagacaugaaaaaguggcucaguuugggggauugaagagaugcacuuuuuuguaaacugcuug

SEQ ID NO: 4128395 - RNA, 79 nt, Human
cauagcauuccacuauguagacauggcguaauuuguccaaccauaccgcaaugauugcuauuuacauaaaaaugcugug

SEQ ID NO: 4128396 - RNA, 58 nt, Human
cauagccagccauugcucccaauuguuauucacaacaauggagagccucuggacugug

SEQ ID NO: 4128397 - RNA, 56 nt, Human
cauagcccggggggcggcugcugggggaacagcagcaggauuuucguugggaugug

SEQ ID NO: 4128398 - RNA, 83 nt, Human
cauagcuagaagguagaaggaccagaauuuaucuuugauguuauaauuuaagcaauagauggaaggucauguuuucuacugug

SEQ ID NO: 4128399 - RNA, 84 nt, Human
cauagcuccaagacaaguuacacuuuacaauuuuuuugacggccugaaauaguagaaaucuuugaaguguaauguguaguugug

SEQ ID NO: 4128400 - RNA, 60 nt, Human
cauaggaagccaucucagucaccuacuuguaaaggcaacuaugguccuugcuucccuaug

SEQ ID NO: 4128401 - RNA, 57 nt, Human
agaccugcuuuuccaaagaccauuacagggaacuccuguccuuaaaaaagcaguucu

SEQ ID NO: 4128402 - RNA, 68 nt, Human
agaccuggaagaacugaggccuuguggcuuguacauaaggggauacucuugguucuugcccaagguuu

SEQ ID NO: 4128403 - RNA, 67 nt, Human
agaccuggccugcacagcccuuacugcagacacucacaaacuggucaggacuccuguaggccaggcu

SEQ ID NO: 4128404 - RNA, 113 nt, Human
agaccugggcaagucauuuagccucuugguaacuguuuccugagcuguaaaaugaggaugccaugccgcaagguuguuguaugacuuaaaugaggaaguaauuguaaaggucu

SEQ ID NO: 4128405 - RNA, 129 nt, Human
agacgaggacuuaacacuauagaguuggggucaaaagccagguuuuugucaucuauuucuggugauauuucuaucaucagaaaccuugaggaaacugcuuaauuuuucuaaguauuagugccuugaucu

SEQ ID NO: 4128406 - RNA, 91 nt, Human
agacgauuaggaaggggccacucccaucuuguuucuugugcucugagugguggucacagagaacugugggagugugcacuucaugucuucu

SEQ ID NO: 4128407 - RNA, 70 nt, Human
agacgcugacaucugaagacgcuuucuaauauuccaugaauaugugaaauucaaaaugucaguauagucu

SEQ ID NO: 4128408 - RNA, 63 nt, Human
agacgggcacgcucacgcagaacaucuugaccuucaacaagugcugcaucagcggccgcgucu

SEQ ID NO: 4128409 - RNA, 67 nt, Human
agacuaaagaagcuagcaaucuauauugccccaaccaagguauuauguuaagagacuucuuugcucu

SEQ ID NO: 4128410 - RNA, 72 nt, Human
agacuacauccagggagauacuggcugccaagcuuucuucagccuccuaauuuccugugaauuacacagucu

SEQ ID NO: 4128411 - RNA, 65 nt, Human
agacuaccucacucaucugguaagugucagcgaugauuuguuacacaggugugugguuagaguuu

SEQ ID NO: 4128412 - RNA, 64 nt, Human
agacuaggggugauguggcccacaggcagacaguucccacccugggccacucuucccugggucu

SEQ ID NO: 4128413 - RNA, 130 nt, Human
agacucacaggugggguuaagcggagugacgggaagguuaauucuggaugcacagggaaucugaagauggaauugugaaacauucauggauuugccccaguauuccagccacccaugccugugugggucu

SEQ ID NO: 4128414 - RNA, 125 nt, Human
agacucagcugaggaacauuugaaaauauuagugcucuggguccacuccagaccaauucuaucagaaucucugggguggggcccaggcaucaauguauuuuuuuuuuaauuccccaggugagucu

SEQ ID NO: 4128415 - RNA, 59 nt, Human
agacucaguuuucauuucaugagcagguauacaaucuguuuuaauggagacugauguuu

SEQ ID NO: 4128416 - RNA, 118 nt, Human
agacucauaaacugguuugaacuagcuccagcucaccacugcuagagucuauuauaauacuuugcuuuuaguagacacggaauggugguaaggaugcuaauaaaaagaacaugauucu

SEQ ID NO: 4128417 - RNA, 56 nt, Human
agacucugguccucuugaauuuuauuuucuagaaaaaucaccaggcuccugagucu

SEQ ID NO: 4128418 - RNA, 55 nt, Human
agacugaaggucucagcaugugaaagguaccaccccucacaaggccucuuagucu

SEQ ID NO: 4128419 - RNA, 66 nt, Human
agacuguaauuuguggccuccuuaucagaugccaugcaaaauguuuucugugggucacaacaguuu

SEQ ID NO: 4128420 - RNA, 69 nt, Human
agacuguguuggcuuuucucuuguacuuuuacaggaaaaugggaaucuacaaaagaaggcuuacagacu

SEQ ID NO: 4128421 - RNA, 75 nt, Human
agacuuagacaugcguaggaauaaagaaucucaacuucuacagaagcacugagagauucuccuguugucaagucu

SEQ ID NO: 4128422 - RNA, 75 nt, Human
agacuuagauuucagagaggcuucaaaucuugcuaaccguagaggagaucauggcuucugcugauaaauaugucu

SEQ ID NO: 4128423 - RNA, 105 nt, Human
agacuugucgcauggaaguacucaugguccagagcccccuuuccagcuuugaggcugggcucuggaaaugggagcuccuauuaucuccccauugcaguuaagucu

SEQ ID NO: 4128424 - RNA, 57 nt, Human
agacuuguuccacugccaaagaagucacucucugauuucaacaaagggaauaaguuu

SEQ ID NO: 4128425 - RNA, 102 nt, Human
agacuuuuaaaagguaugagcaugauagguauuuaauuaaauaaaaagauguaggcaucauuuaaaaugaguaccucucguuguuuauuauuuauaaaaucu

SEQ ID NO: 4128426 - RNA, 122 nt, Human
agagaaaacuaggugccaauaggcucaugcaguuacugucuuauauggcuagagcuuuuguucuuugaacuaagcucuuuucauaagagcaaacguauguaaagcagguauuuguuuucuuu

SEQ ID NO: 4128427 - RNA, 89 nt, Human
agagaaauuauaccuaagccacuagucuguuaugaaggugcuaccuuauucauauuugacaugacuuauggcugauuuaagauuucucu

SEQ ID NO: 4128428 - RNA, 129 nt, Human
agagaaauuccucuguccucugacuucuucacuuaguacgcugcgaccuucccauguuguucaacauccucaacucggagcgucacuggcuggagguggucuauaaauggaauuggcuuaacuaucucu

SEQ ID NO: 4128429 - RNA, 74 nt, Human
agagaagaauguacaauuucugagagaacuaccuuggagacuaaaccacucagaacauugacauucuuauuucu

SEQ ID NO: 4128430 - RNA, 62 nt, Human
agagaagcagggagucaucugugaugcucuucuaauuucccagaacaacaccccuauucucu

SEQ ID NO: 4128431 - RNA, 99 nt, Human
agagaagggaucauagugcagcucccuuucacaguucccagaaacagaguauuuauggaaucagaugaggggcagagcuaaagcuaaggucucuuuucu

SEQ ID NO: 4128432 - RNA, 80 nt, Human
agagaagucaucagagaacauuuugccuuaccucucacuguccuauagauaaggugaagcucccgaugagaacuaucuuu

SEQ ID NO: 4128433 - RNA, 63 nt, Human
agagaagugagugugacucagcagauggaauguuccaaugcuggugaguaaauucaguuuccu

SEQ ID NO: 4128434 - RNA, 62 nt, Human
agagaaguguugcuguguuguuauuuuuaaaauuaaggagcagcugaaaggcaaacuucucu

SEQ ID NO: 4128435 - RNA, 77 nt, Human
agagaaguuugaaauuaggagaaaucuggaaaaaucugugucacaaaaauuuguccugagucaaacauguuuucucu

SEQ ID NO: 4128436 - RNA, 81 nt, Human
agagaaguuugaggcaugaugcuggaagccacagggcaugcuguauuuuggccaugugccuuucaucaugcuuuugucucu

SEQ ID NO: 4128437 - RNA, 59 nt, Human
agagaaugauuaauguaagcccuucuguaacuagccagaggcuuaaggaauucuuuucu

SEQ ID NO: 4128438 - RNA, 74 nt, Human
agagaaugcucugucucugacagugguugggaucucaucacuggagauauccacacagggacuguauuacuacu

SEQ ID NO: 4128439 - RNA, 124 nt, Human
agagaauuccuuaaaacuaauguaguuucaguaacuuaccauuguagcaucaucaaugauggaguaauuugccuggugcagauagugguguaguauauuacauaguaaacaugaaggauuuucu

SEQ ID NO: 4128440 - RNA, 82 nt, Human
agagaauuuucuauggagcuguuucuguguuagaugagucuuaggaaaggcuagagaagcaugaaucaguucugaauuguuu

SEQ ID NO: 4128441 - RNA, 56 nt, Human
agagacaagaaauaccugggacagagacucacuguucauggguagcugcuugcuuu

SEQ ID NO: 4128442 - RNA, 79 nt, Human
agagacacauuagaugacucuuucuuucuguucaucacuaacacuaagcuagaggggaagaacaauuuaauuuguuucu

SEQ ID NO: 4128443 - RNA, 80 nt, Human
agagacaggugaccacaggcauugguucggccacucaaugagguuagaacuggaauuuugugguuuucuugccuuucucu

SEQ ID NO: 4128444 - RNA, 59 nt, Human
agagaccugcccagagccccuuucacucugaguuauggaguauuuggucuggcagcucu

SEQ ID NO: 4128445 - RNA, 80 nt, Human
agagacuagcuuuggguaggggacguggaagaaaagaauagcuuuuuuuaauuucuucuacucuuaaaaagcuuuuuucu

SEQ ID NO: 4128446 - RNA, 69 nt, Human
agagacuggcucagaaucugucauguucuauugauaaugaugaaaauaugauucugaggcccuguuacu

SEQ ID NO: 4128447 - RNA, 57 nt, Human
agagacuggcuucuaaaauggcaagaaauccauuuagucauaaaagaaacaguuucu

SEQ ID NO: 4128448 - RNA, 58 nt, Human
agagacuguccuuuccucauuaugucuucuuggcaaguaugugaaagaucaguugucu

SEQ ID NO: 4128449 - RNA, 65 nt, Human
agagagaagcaagaugcuauuuccuggauccaaauuucccaggacaaaacuucuugcauuucucu

SEQ ID NO: 4128450 - RNA, 61 nt, Human
agagagagagagagaaauuugauggugaaguauuuccuauagaaacaaccucucuuucuuu

SEQ ID NO: 4128451 - RNA, 85 nt, Human
agagagagaguuguacauuugcuuauguacaaggcgauuucuucagaugucgccccagaugcaagacaaagaacagucucucucu

SEQ ID NO: 4128452 - RNA, 55 nt, Human
agccauuauugagugccugcugcgugcauagguuuguaguaggcacugugggguu

SEQ ID NO: 4128453 - RNA, 117 nt, Human
agccauucuccugcaacuuguccaugauaggugcuaggcccaugagguuugcuggaccuacaagagccccaggcagccaugugggaccuugagcaagaggaccacgcaggagaagcu

SEQ ID NO: 4128454 - RNA, 62 nt, Human
agccauuuucguguuuggcaucuucaugcaggcgucaggaagcugaauuacaaaaaggagcu

SEQ ID NO: 4128455 - RNA, 76 nt, Human
agcccagaaaccagccuagaaugugggggaggacaucggcacuccauccccucauuacaggcggggagcugaggcu

SEQ ID NO: 4128456 - RNA, 57 nt, Human
agcccaggaguccuuaaggacccagguggguggaguaaaaccaggagggccugggcu

SEQ ID NO: 4128457 - RNA, 55 nt, Human
agcccaugcagaccuucccagagcugcucacugugucuguggggacugcuggguu

SEQ ID NO: 4128458 - RNA, 93 nt, Human
agccccauccaggguguggagagagcucuugaccacagguggaggugcccuuccccacaccugaugagcucuguccacacuuggagaccagcu

SEQ ID NO: 4128459 - RNA, 99 nt, Human
agccccgggagccucacacagcuggggagaggccaaggaucucgcagucacuagccaggcucaggaucaggggccuuuccuuggcugggcacuggggcu

SEQ ID NO: 4128460 - RNA, 129 nt, Human
agccccugagaacacagcuccucaccauggacuguaccugggggauccgcuucuugguggcagcugccacagguaaggggcucccaaguaccagugaugaggaggggauugaguucagucaagggggcu

SEQ ID NO: 4128461 - RNA, 81 nt, Human
agccccuggaggcugcagagaagucugagacuggagaaaggaggcucggacagaauucugcuucugugugucccagggucu

SEQ ID NO: 4128462 - RNA, 61 nt, Human
agccccuguauuugcaaaucaagagaccaguugucugcuugaggacaauuuacaugguguu

SEQ ID NO: 4128463 - RNA, 55 nt, Human
agccccuguccucucugaugaccaccuguccagguugucccaggacugagggguu

SEQ ID NO: 4128464 - RNA, 66 nt, Human
agcccgaaguccugggggcagcuguguccagcagacgcugcacccagcagucuuggggguugggcu

SEQ ID NO: 4128465 - RNA, 105 nt, Human
agcccgauauguuuccuccauauaaguacagcugcacugucacauugguaaguaugcagcuagguggugguggguugacauggagguuguuuugauuuugugguu

SEQ ID NO: 4128466 - RNA, 71 nt, Human
agcccgcaccaggagugagaaugaagggggcauccugggcauuaccccccuuccuugugacugguggggcu

SEQ ID NO: 4128467 - RNA, 59 nt, Human
agcccuaacucccaguaucuuggaaugugacauuauucagaaauuggguuguuacaguu

SEQ ID NO: 4128468 - RNA, 55 nt, Human
agcccucucccuuucuucuuagggcucaaauucaggaucugaaauggagggggcu

SEQ ID NO: 4128469 - RNA, 65 nt, Human
agcccugaagcuggccaugucccggucugcggggugggaagagacagguggcgggcugcagggcu

SEQ ID NO: 4128470 - RNA, 86 nt, Human
agcccugcccugcuucucuugggacagagacgaacuugaagauucuuaaggauucaguugucacuagugaagaaucaggcugggcu

SEQ ID NO: 4128471 - RNA, 61 nt, Human
agcccugcugugucccuggcuuucucuccuggcuggggggauggaagggacaggcaggacu

SEQ ID NO: 4128472 - RNA, 85 nt, Human
agcccugggcaaauuauguuacucaugguuucugaguuuccccacauggaugaaggggugaguaguauacuuauugcauaggguu

SEQ ID NO: 4128473 - RNA, 64 nt, Human
agcuauugccuaguauuugcagagaaauauaaaugauucugaauggcaagcauuaggcaagguu

SEQ ID NO: 4128474 - RNA, 99 nt, Human
agcucaaguagauaauaaauuugaguaauuugggcuaccaaaauaacccacauauuccuggcagcauuaauuauucagguuaauguuuuacuuugagcu

SEQ ID NO: 4128475 - RNA, 117 nt, Human
agcucaauucaguucaguugugcuauauguacaugcacauguaucuauauacaaauuguguauaauuugggcuauggauacauuguaguacauucaauugaaagugaagugggagcu

SEQ ID NO: 4128476 - RNA, 56 nt, Human
agcucaccagcugcguuggagggcucugucuuccacccccagacagcuggugaccu

SEQ ID NO: 4128477 - RNA, 77 nt, Human
agcucacuuuucuguaauugcagggugcaauucucuguuuuucuucccucagugcaaaaaggcagacuggugaugcu

SEQ ID NO: 4128478 - RNA, 63 nt, Human
agcucagacuuaaaagaauuguuuaaggcaaaaagcuacuguucauuuuauugucugauugcu

SEQ ID NO: 4128479 - RNA, 82 nt, Human
agcucagagauauaauaauuuacaaguguacagagcgcugcaguuuacaaagcauuuuugaguguauuaucucauuuggguu

SEQ ID NO: 4128480 - RNA, 76 nt, Human
agcucagccuccagcugcuccaacccagcgggcuucagucagagaagccagcuguucuggggcagcaacuugagcu

SEQ ID NO: 4128481 - RNA, 58 nt, Human
agcucagggcaaagacucaaauccaagcuggcuggcuuuagaguuguagcucucagcu

SEQ ID NO: 4128482 - RNA, 57 nt, Human
agcucagugagauauugacuccacuuuuccagugaggaaauugaggcucacagagcu

SEQ ID NO: 4128483 - RNA, 59 nt, Human
agcucagugaggguuacaggaagcauggcaagcuuugcugcuugggggcuucaggagcu

SEQ ID NO: 4128484 - RNA, 62 nt, Human
agcucaguucugcugcugccuagggugccaugcuggccccgguuccaaugcagagccuggcu

SEQ ID NO: 4128485 - RNA, 56 nt, Human
agcucaguuuuuuuaagagccaugcuaauuaaacaguauggucuuaagagacugcu

SEQ ID NO: 4128486 - RNA, 108 nt, Human
agcucaugaguuaaugugucagcaauuuaggcuggguucagcugggugauucuucuggucuccucugggcccacuuaaaucuggcaguuaucugacuuaucaucagcu

SEQ ID NO: 4128487 - RNA, 109 nt, Human
agcuccagagucccuguucuuaacuagccuaggcuacuucuaauaucauguuaugcuaagaaguucccuggaugagcuaaaaauugagacgauguuagugcuuugggcu

SEQ ID NO: 4128488 - RNA, 66 nt, Human
agcuccaggcagcauaguggaugugguaacuaaagccauggucccuagcacagcuguccuagagcu

SEQ ID NO: 4128489 - RNA, 126 nt, Human
agcuccagggccuugcccccuuuucuuucuuacaaagaaaacgguggcuugacucagcaaaaacuaagaaggguagcuguuucuccaggucaggaaggauacgggggucagcacuuccuggcaguu

SEQ ID NO: 4128490 - RNA, 85 nt, Human
agcucccagcauuaugguauagucccauaguccugacuggucagaagccauguggagacuauagccauaacaagcuguaggugcu

SEQ ID NO: 4128491 - RNA, 61 nt, Human
agcucccagcuccuuugagagagaaaagccuaaaguguuugcagggagcugagauggagcu

SEQ ID NO: 4128492 - RNA, 98 nt, Human
agcucccuggaaagccagccauggccagucugcagccccuggggacucugugagagucuggaugcagacaggccaggggcugccaccucaggaaagcu

SEQ ID NO: 4128493 - RNA, 72 nt, Human
agcuccuaggcaugcaaauaaaugugcacacuggaaauugaguucugcaauuuuuccaugaccuagaaagcu

SEQ ID NO: 4128494 - RNA, 58 nt, Human
agcuccuuuucugacauagggaauucuguguuuguuuuucuuauugucuugaggaguu

SEQ ID NO: 4128495 - RNA, 64 nt, Human
agcucuaggcccuggggaauacaacaguggcccaaacagacaugggcucugcccuccuggagcu

SEQ ID NO: 4128496 - RNA, 73 nt, Human
agcucuccaggaggaugaggggcauagaaaguuugagaaccacugcucuauaguauguuauccauccucagcu

SEQ ID NO: 4128497 - RNA, 61 nt, Human
agcucucuuccaguggcuuugauuucucagagagagagcaaagggacauggaagaggaguu

SEQ ID NO: 4128498 - RNA, 57 nt, Human
agcucugacugaagagaugcaagauuuucucagaugauuugugugucagucagaguu

SEQ ID NO: 4128499 - RNA, 69 nt, Human
agcucugaggcuuguucuauguaugaucugauuaaggaagauuucauauuggaaccaguuaacagagcu

SEQ ID NO: 4128500 - RNA, 71 nt, Human
agcucugcaccaucguaugcuuaauuaaaauaucuaauacgguuuaauuaaguaugcaauggugcagugcu

SEQ ID NO: 4128501 - RNA, 62 nt, Human
agcucugcagaacaauuccugcuguuaacagacuuaacagucuacugaauaucugcguggcu

SEQ ID NO: 4128502 - RNA, 70 nt, Human
agcucugcauuaaaaugugccucucuuuaagucaagugcuuuaaguucaggucuuuucagugcaacugcu

SEQ ID NO: 4128503 - RNA, 55 nt, Human
agcucuggaccugacaucuggugcucggugucucauugauguuaggccaugaguu

SEQ ID NO: 4128504 - RNA, 58 nt, Human
agcucugggauucucaggccaccggcaguuaugacccacuggcuauaauuccagagcu

SEQ ID NO: 4128505 - RNA, 68 nt, Human
agcucuguaggucuuaucuuaggaggaucuuugacuccuuaaauacacaucagauaagcuucagagcu

SEQ ID NO: 4128506 - RNA, 57 nt, Human
agcucugugccacaugcaguguuauguuaagcauauagcagccauuucacagagacu

SEQ ID NO: 4128507 - RNA, 56 nt, Human
agcucuuggcaagacucucccaauuuauggggcuuugggagacacagccuugagcu

SEQ ID NO: 4128508 - RNA, 67 nt, Human
agcucuuggcagucuucaucaguucugggggcaacauauuuagaacuuaagaauacugucuugaccu

SEQ ID NO: 4128509 - RNA, 64 nt, Human
agcucuuucugugugucucagcaagcuguguccccaggguccagcucagcacauaggagguacu

SEQ ID NO: 4128510 - RNA, 72 nt, Human
agcugaaccuuagucuggagugacccuaccaagguccaucacacccagggagauccaggcugagagucagcu

SEQ ID NO: 4128511 - RNA, 56 nt, Human
agcugaaguuuagaauugugaaaaacucaugguugcuucacaacuugaacucaguu

SEQ ID NO: 4128512 - RNA, 62 nt, Human
agcugacauucuguacugugagcagugagcugcucccaugucuggcagcugcaguuguagcu

SEQ ID NO: 4128513 - RNA, 59 nt, Human
agcugacauuggagaagugccuggagugugcugggcacuuuauugaccccaggucaguu

SEQ ID NO: 4128514 - RNA, 76 nt, Human
agcugacuucugugucuuucacaaagguugacuucaguucagaaguuacuuuauguagaagaaaucauggucaguu

SEQ ID NO: 4128515 - RNA, 87 nt, Human
agcugacuucuguucagaucuaauuggauuauuauuguuucuccucauaauguggcugaucgcagagcucuuacuagaaagucaguu

SEQ ID NO: 4128516 - RNA, 107 nt, Human
agcugagagguggguuugugcuuguggcauuuagcuuggcaggauagaauguaaauuacaccucuuguccuaagagcuggauucuagcacagucuccaucauuagcu

SEQ ID NO: 4128517 - RNA, 58 nt, Human
agcugagcagccuaagcaaauuuccaaaacagaaaggaaagaauaggugugccaugcu

SEQ ID NO: 4128518 - RNA, 61 nt, Human
agauuuuauagauaauuucccaggcugcuucuuccaaagccuaacggaagcuguaaaaucu

SEQ ID NO: 4128519 - RNA, 98 nt, Human
agauuuugacacuugccuccauuccauguccccuaggauagagcuggagagcguuuaggguccauauggaugaauggcaggaugaaggucaagcaucu

SEQ ID NO: 4128520 - RNA, 77 nt, Human
agauuuugugcuugcugagauaaaugcugucuucaugguggcuggagauuaguuuuauuuaucuuuguaaaaaguuu

SEQ ID NO: 4128521 - RNA, 80 nt, Human
agauuuuguugguuguguuggggauuaguacacagacauuucaguuugugugcaauucuuaacauacauacugaaaaucu

SEQ ID NO: 4128522 - RNA, 112 nt, Human
agcaaaaaagacaagagagaggaaaggaggaucuuugaauuucucuaugcucuaauuaucauguugggaaaucagggguguugcuuucuuguuuucuuuguuuguuuuagcu

SEQ ID NO: 4128523 - RNA, 82 nt, Human
agcaaaaugcaagagguuggauuuuaagagccuaagcuaaguuucuuaacacucuuaauaauuauaaucaguugcuacagcu

SEQ ID NO: 4128524 - RNA, 67 nt, Human
agcaaacccaugcauugauugacaggaaaguaaaaucaauuuacauugaaaucaauggaugugugcu

SEQ ID NO: 4128525 - RNA, 61 nt, Human
agcaaagacagggacgaccaagguaagucucacuaggagaucugcucucucuguauuugcu

SEQ ID NO: 4128526 - RNA, 65 nt, Human
agcaaaggacagcccauccugggauuuugcugaagcaguuaaagaggaggcugucucuuucagcu

SEQ ID NO: 4128527 - RNA, 78 nt, Human
agcaaagggcuaagacaauucuucagucacaauacaucuauuuccuguguugccuaaaucuuguuuuacacuuuggcu

SEQ ID NO: 4128528 - RNA, 82 nt, Human
agcaaauaaaugacagagccagaacuagaccuuguauuuuuuaaccuacagucuaaucuuguguuuuguaugcuuguuuguu

SEQ ID NO: 4128529 - RNA, 64 nt, Human
agcaacaccaucuucuguggcuuaugagcuuuugacuugucagcaacagugggugaguguugcu

SEQ ID NO: 4128530 - RNA, 62 nt, Human
agcaacaggaccauggagcccaucauuauguguuuuggcuuuggaacauggucuguguagcu

SEQ ID NO: 4128531 - RNA, 60 nt, Human
agcaacaguguauaucauaggcccucaacaaacaaugccugcuguuucuuuacuguugcu

SEQ ID NO: 4128532 - RNA, 77 nt, Human
agcaacauccuugggcaugcauccaugcacugaguacagguauuucugcaggauggaugcucagaagucuaauugcu

SEQ ID NO: 4128533 - RNA, 65 nt, Human
agcaacugauauuaacaggcaagugagugcugguaaagccucuggcucuguugagauuuguagcu

SEQ ID NO: 4128534 - RNA, 57 nt, Human
agcaagaaggcuucagagcccaggagcuucaaguuccuggucuaguacuuccuugcu

SEQ ID NO: 4128535 - RNA, 67 nt, Human
agcaaggaaauuuugaaucagugucucucauuaacugugugagagagauuauaacauuuaccuuguu

SEQ ID NO: 4128536 - RNA, 58 nt, Human
agcaaguugaaauacuguuuuaucugucaaauuagaaaaacaguuuuugcuaacugcu

SEQ ID NO: 4128537 - RNA, 101 nt, Human
agcaaguuuuuguuuguuuguuuguucguuuguuuuaagucaagcuaucccaacuagcuguuauuggccaaacagaguucaacagacaucaugaaugugcu

SEQ ID NO: 4128538 - RNA, 87 nt, Human
agcaauguuuuguuucuuguuaguacaugaaaaaucauuggagauugucaguuacccuacuaacaaugagaacaagccagauaagcu

SEQ ID NO: 4128539 - RNA, 60 nt, Human
agcaauucauucuucucugcacagaagucccccacucugacccagagcaguaugaauguu

SEQ ID NO: 4128540 - RNA, 82 nt, Human
agcaauugauggcagcaguuuggagucuuuggugaauucagucaagaaagaaauccccagcugucuaccauugcaguuagcu

SEQ ID NO: 4128541 - RNA, 56 nt, Human
agcaauuuccagucucuaaggguggggacaugaauuuaccucagaggcaaauuguu

SEQ ID NO: 4128542 - RNA, 95 nt, Human
agcacaaaaacuuauaaccaaagagagaccuuucuucucagugcucaagucauucuuugagaaagaagcucuuuuugaucaugaggcuuuaggcu

SEQ ID NO: 4128543 - RNA, 81 nt, Human
agcacaaagagauggaggaaggcugaacucacucucugccugcauuuugagcucagacaccauucuucugccuuuuguacu

SEQ ID NO: 4128544 - RNA, 82 nt, Human
agcacaacuguuauuucugaaugccauccacguggcucagccacugagaugaagcaccauucagaagaagcaaaugugugcu

SEQ ID NO: 4128545 - RNA, 87 nt, Human
agcacacaggccuaacagccuucgacaguuggaguaguguuccauuuauuuuaguccccuaucgaugggauuuagguuguuuguguu

SEQ ID NO: 4128546 - RNA, 56 nt, Human
agcacagaauggcuuggaagccccuaaacaugguccuccaagucagaguuuaugcu

SEQ ID NO: 4128547 - RNA, 128 nt, Human
agcacagaccccacaaacccuccacuuucuuuauuucaggccuggcguaaaggagaugggacucacacccaagaggaugcauuuccauacacccauuucugaaauaugaagagguguccagucuguuu

SEQ ID NO: 4128548 - RNA, 89 nt, Human
agcaugggcugaaggcaaacagagacaaugaaugcuauggauguguaguguucauucaaucuauuugcuucagccucuugaaacaugcu

SEQ ID NO: 4128549 - RNA, 86 nt, Human
agcauggggcauuauuagagguguugacgccaagguagacacauccauguauaucuuugcaaauaucucuaaguguuucuugugcu

SEQ ID NO: 4128550 - RNA, 75 nt, Human
agcaugggguucuguuugaccuguuuggcuaauguuucuaggugccuuaacauuuaggaaggaccuccucaggcu

SEQ ID NO: 4128551 - RNA, 63 nt, Human
agcaugugagguccuuggugugcuuagcucaugccuggcaggugguaaggauuucauaaagcu

SEQ ID NO: 4128552 - RNA, 59 nt, Human
agcauguggcuaucuuugggggccuuauuuugccuaccauauucauuuagccacaagcu

SEQ ID NO: 4128553 - RNA, 76 nt, Human
agcauguuaaaaaauaaugcaggcacuugacugacugggcucaggacagugauuugcaguauuuacuaauagaguu

SEQ ID NO: 4128554 - RNA, 69 nt, Human
agcauuacaacacagcuuuccucaaguuuauuuuauaucuuaaauaaggauacuguguguguuauagcu

SEQ ID NO: 4128555 - RNA, 80 nt, Human
agcauucauuuuggggagcugagaaacaacauucuaacccuagauuguucuugccucuguucauugccauaaugaauucu

SEQ ID NO: 4128556 - RNA, 84 nt, Human
agcauuccacaauagcugcuucagucuaggucucagaauacauuuagaugaaggagaccagaaugaagacaaagccuggagucu

SEQ ID NO: 4128557 - RNA, 59 nt, Human
agcauucggagaguucaugaagacccggguucccaucuugauccugcuacucacgagcu

SEQ ID NO: 4128558 - RNA, 68 nt, Human
agcauuuagagcaggguguggcacaucucaacucuaaaugaauguuaccugcuccugcugcuacugcu

SEQ ID NO: 4128559 - RNA, 71 nt, Human
agcauuucugggagaauucuaaguuugguuaccaucuugacagauaauacagaggcuuccaguaaaauguu

SEQ ID NO: 4128560 - RNA, 60 nt, Human
agcauuucuuggcccauuguaggugcucaguaaacacuuacgggaugaaggagauaagcu

SEQ ID NO: 4128561 - RNA, 55 nt, Human
agcauuugcuuaccucagggcccuugcagucguuauucccugaggcuagcaugcu

SEQ ID NO: 4128562 - RNA, 56 nt, Human
agcauuugugaauuaagcaugucaacauuacuguguugcuuguuaggcacacugcu

SEQ ID NO: 4128563 - RNA, 65 nt, Human
agccaaagucacuaagugaaccacugggugacaaguugcccaggcccaguuggugauuuauggcu

SEQ ID NO: 4128564 - RNA, 60 nt, Human
agccaaagugguauauagggaacuucuguggacccagaaucucuacacuuucacuaggcu

SEQ ID NO: 4128565 - RNA, 75 nt, Human
agccaacacucacagguagaauaacaacaucacaguacagagaugugaguggcaucugccuuugaguaagggacu

SEQ ID NO: 4128566 - RNA, 71 nt, Human
agccaacuucucugguugagguccaauuucuguggcaccugagauuccccuggcuagagaagcugugugcu

SEQ ID NO: 4128567 - RNA, 66 nt, Human
agccaagaaucggguaggccaaugcaugucuaagugcuacaggcucagauaucuguguuccuggcu

SEQ ID NO: 4128568 - RNA, 59 nt, Human
agccaaggagaggggccucaggccagcacaagagcacagggcaggcaccucuuccugcu

SEQ ID NO: 4128569 - RNA, 58 nt, Human
agccacagcuccuugguggagacucuuaccucuggacaaacaggaccugugaaaagcu

SEQ ID NO: 4128570 - RNA, 56 nt, Human
agccacauacuguaacuucuggggcguccugguucagaagccuggggaauguggcu

SEQ ID NO: 4128571 - RNA, 61 nt, Human
agccacauauuccuggggacauagaucugaguuagaucuuuaccaccaaagaaugcuggcu

SEQ ID NO: 4128572 - RNA, 81 nt, Human
agccaccuuuguuucgcagccucucucuggcaccuccauccacugcauuguguggagggaggcugaaggagcugaggggcu

SEQ ID NO: 4128573 - RNA, 88 nt, Human
agccacugacaacucggugggcuauuaggaccaggccaucuuuucccaaugugguacucuucuaaugggcacgcugggcucgggagcu

SEQ ID NO: 4128574 - RNA, 61 nt, Human
agccacugucugaacuucuguggaggucuggugcaggggaggugugaacagauaggaggcu

SEQ ID NO: 4128575 - RNA, 66 nt, Human
agccacuuccuucugucagcucaaagaagcuccugcaggguucagggcagacagaagagaugggcu

SEQ ID NO: 4128576 - RNA, 56 nt, Human
agccacuuucgagauggcucaguuacauggcuggagcuggcaaguugaagguggcu

SEQ ID NO: 4128577 - RNA, 59 nt, Human
agccagaauuugaacccacaaaugucugauugcagcauggcaggugcagauucugugcu

SEQ ID NO: 4128578 - RNA, 57 nt, Human
agccagagacugugucuguaauguucagaaaaugucugagggacacagcucauggcu

SEQ ID NO: 4128579 - RNA, 130 nt, Human
agaggguuagaugauacggguuaaguuucaauugcacagcugaauauuuuggggcuuauccaaccugagccuuucaagacucauugaguauugguguaaguugacccuguggcuugaucgucuuccuucu

SEQ ID NO: 4128580 - RNA, 56 nt, Human
agaggguuguaugaauucucauggaacaucaaguccaauaguuuauuuagccuucu

SEQ ID NO: 4128581 - RNA, 129 nt, Human
agagguaagcaaaguccuguauuaccugcaagauggaaauggaaaugaguacaugauaauugauguauauauuucuuucauucuagagcugcagaaaaucuagagggauuuuuaacagaugcugcuucu

SEQ ID NO: 4128582 - RNA, 58 nt, Human
agagguagugcaagugugaagcauguggucauuuuggcauacucaguguauaacuucu

SEQ ID NO: 4128583 - RNA, 129 nt, Human
agaggugaaagcugauauuucuaguuugugaaagcuauuuuuuucuguacaacucucaucuaaagauauaggacagucaggaaaaauugauaauuuuguuaaaguggcagauaaacagcuuguaaaucu

SEQ ID NO: 4128584 - RNA, 68 nt, Human
agagguggagcccugagaaccggaggaaaacauccaucaccuccagccccuccagggcuuccuccucu

SEQ ID NO: 4128585 - RNA, 130 nt, Human
agagguggagggguggagagagggggcuuuugaacaucagccauuugaccuugggggccagaguucaaaucccccagaggucugaaaagguugaaaagauaucauuaucccuucucccucccccgcgucu

SEQ ID NO: 4128586 - RNA, 61 nt, Human
agaggugucuguuaggaauaggcagccaguguucaaaggauggccuccucucagaugcucu

SEQ ID NO: 4128587 - RNA, 68 nt, Human
agaggugugagagucaguacaacacuuugccaucggcagaggucuuugggcuggcucucgaugccucu

SEQ ID NO: 4128588 - RNA, 55 nt, Human
agaguacauucagagcuaccuacgaaauaggugugaaauaugcuugaagugcuuu

SEQ ID NO: 4128589 - RNA, 66 nt, Human
agaguaccauuacucacuuauuuuuuggggccaaugugcagaauuuacaguugcugaugguacucu

SEQ ID NO: 4128590 - RNA, 57 nt, Human
agagucagucacuggcacuuugucuguuuggugacaucauguuucccugacuguucu

SEQ ID NO: 4128591 - RNA, 62 nt, Human
agaguccaugaagacagcugagagucucucauaucagugaucuucagcuuccuuuuggcucu

SEQ ID NO: 4128592 - RNA, 82 nt, Human
agagucucugucacccaggcuggagugcagugggacgaucuuggcucaccacaaccuccgccucccggguucaagugauucu

SEQ ID NO: 4128593 - RNA, 80 nt, Human
agagucugucgcccagccuggagggcaguggugggaucuuggcucacugcaaucucugccuuccaggcucaagcaauucu

SEQ ID NO: 4128594 - RNA, 79 nt, Human
agagucuguguuguucgaacuggucaguuuagcccacuguacaaugcucaugacaguacugauauuaacagacaacucu

SEQ ID NO: 4128595 - RNA, 77 nt, Human
agagugaaguuuuugaaagugacaaguguuccagaggcaaaaaggagaggaaaguugacuuucaaaaauggcauuuu

SEQ ID NO: 4128596 - RNA, 70 nt, Human
agagugaauguaagugauuugcuaagucauguaacuagugagugauuguucuggauauuuacauugcucu

SEQ ID NO: 4128597 - RNA, 78 nt, Human
agagugacaaugucuccauuauuauaagccugagacucaaagacauccuggagugugauauuugaguauugucaaucu

SEQ ID NO: 4128598 - RNA, 59 nt, Human
agagugacagccacugcaguaaccacaagaccguggaugacuuagucccugcucucucu

SEQ ID NO: 4128599 - RNA, 68 nt, Human
agagugaccaagugcucuguguauuaggauguccaccagguauccuaaauuggcagggcagguacucu

SEQ ID NO: 4128600 - RNA, 80 nt, Human
agagugcagggcucagagcaaaagggcacaguggccccuucccagucucagugccccuccccucugcccuuugucacucu

SEQ ID NO: 4128601 - RNA, 76 nt, Human
agagugcuauuaugauggcucccauucaacuauaggcuuccuucagacagucuuaauggauaggagcucgcacucu

SEQ ID NO: 4128602 - RNA, 98 nt, Human
agaguggagauuuaaguaagauuagguaauuugcucaaggcaguuaguagcagagccagauucaaacuuacguagucuuacuacaaaauccacacucu

SEQ ID NO: 4128603 - RNA, 56 nt, Human
agagugggaauuuucucccagggaccccauuucucuuuggcuggaauucccgaucu

SEQ ID NO: 4128604 - RNA, 65 nt, Human
agaguuaaccuuagagccucgacuagugcuuuacauauaggcacuagucuaggugcuaagauucu

SEQ ID NO: 4128605 - RNA, 56 nt, Human
agaguucauauucagagaucgcuaauacauguuaaugaugucagaagaugaagucu

SEQ ID NO: 4128606 - RNA, 92 nt, Human
agaguuccuugccucagagaccugacaguacagagggaccagcacaagccgaucaucugaacauguugcagcucugggcaaugauggcgucu

SEQ ID NO: 4128607 - RNA, 55 nt, Human
agaguugaggcuggagagguaugcaaaaaaucagaucuuaaaaggucuuaacuuu

SEQ ID NO: 4128608 - RNA, 76 nt, Human
agaguugcccaggccgccuggggagaggcccugucaagguccagcagggccucuggggggaggcuugggaggcucu

SEQ ID NO: 4128609 - RNA, 90 nt, Human
agaguugcucugucacccaggcuggagugcaguggcgcgaucucgaucucagcucacugcaaacuccaccucccagguugaagcgacucu

SEQ ID NO: 4128610 - RNA, 76 nt, Human
agaguuuggaaaugauugcgcucauucagauucucuucugauguuugaauugcugccaucauauuucuagugcucu

SEQ ID NO: 4128611 - RNA, 130 nt, Human
agaguuuuucuuuguagagucuuugcaaggcuuagugcacuuuuccacauccauagcagauaacgauuuugcucugggcuugguuagggcuguugaaggcucacuguuugacgauacggugacagacuuu

SEQ ID NO: 4128612 - RNA, 127 nt, Human
agauaaaaacuaauuggcuaucauuguugugauaaucuuacucaugucuucacccauucuaaaaauaguuuggggugugugaaauuaugucauuuggcaaugaugccuuauuucaguaaauuuauuu

SEQ ID NO: 4128613 - RNA, 85 nt, Human
agauaaaauucaugggcaggccucucauuucuguaaauaaaguuuuacuggaacauggccaugcccauuccuuuauguuuugucu

SEQ ID NO: 4128614 - RNA, 62 nt, Human
agauaaauuauuuaggauauuuggguuugugguauaaaaagaauauccaaaugauuagaucu

SEQ ID NO: 4128615 - RNA, 75 nt, Human
agauaacaugauuugcuauuuagauaucagagauagaaaugcguaggcugggaucaaaguggaaaucaauuaucu

SEQ ID NO: 4128616 - RNA, 123 nt, Human
agauaacauguguaaaaacacuucgcacaaucucuggcacauagucagcacucaagaaauuuggacuuauuguuuguguauguauuuguguguguguguguguguguguguguguaugugucu

SEQ ID NO: 4128617 - RNA, 62 nt, Human
agauaagucaggcuguuccuguccaaaauuccuguaaggggaauuuauagccugacuuguuu

SEQ ID NO: 4128618 - RNA, 63 nt, Human
agauaagugucuaccacuuuaagagaggcacacauuuuagccuuuucuguaaggcauuaaucu

SEQ ID NO: 4128619 - RNA, 79 nt, Human
agauacuguuucagguacugggaaugcagaagugaacagaacagucaaacaucccugcccucaugccuauaauauaucu

SEQ ID NO: 4128620 - RNA, 63 nt, Human
agauagaaggauuggagugaccacugugcugcccucugcauggaguugauguccuucugugcu

SEQ ID NO: 4128621 - RNA, 69 nt, Human
agauagagacuauaaugcucuuugugccgguaaggaaaacaagcucgaggagauuaaagucuguuguuu

SEQ ID NO: 4128622 - RNA, 87 nt, Human
agauagauuggaggucuuagaagaaaaaucaugucaguugugcaaguggacaaaacaaugauuucuucaagguccucauuuuuuucu

SEQ ID NO: 4128623 - RNA, 101 nt, Human
agagcugcuagagaccauccugcccauccgaguucugagauugggacugugauguugggaccugaggacuggaugguagaauacuggggucccccagcucu

SEQ ID NO: 4128624 - RNA, 62 nt, Human
agagcugcugcuguacugggauccaauuucacuuuaggaauuugcucaggcagagaagcuuu

SEQ ID NO: 4128625 - RNA, 59 nt, Human
agagcuggccagggaucacucuguccaccauccuauaccagcuguuccugaccagcucu

SEQ ID NO: 4128626 - RNA, 62 nt, Human
agagcugggacuuggacucaauucugauucagaaggaaaugcugauccacucucauugcucu

SEQ ID NO: 4128627 - RNA, 64 nt, Human
agagcuguuuccagaaucaaagcaaaagggucugccuccuucauccuggccuggagacaacucu

SEQ ID NO: 4128628 - RNA, 76 nt, Human
agagcuuuaaaaauaggaaaauauuuaacaagauaauacuuauuuuuagucugugaaaucauuuccuguaagcucu

SEQ ID NO: 4128629 - RNA, 73 nt, Human
agagcuuuaguacuugugaguaaaacauaguaguuacaaauuauuauugacuauucagaaugugcugcacucu

SEQ ID NO: 4128630 - RNA, 83 nt, Human
agagcuuugccuuagaucaguaguugguaagggucauaggauguaaucccaggccaacuggcugaucucaaagccugugcucu

SEQ ID NO: 4128631 - RNA, 64 nt, Human
agaggaaaaacagaaaaauucauggcagcucauaaucugcugauauauucuaguuuucuccucu

SEQ ID NO: 4128632 - RNA, 78 nt, Human
agaggaaauucugcucuuaacauaauguagcuuaaaagaaaaugcugcauuuugucaaagagucagcgaugagccucu

SEQ ID NO: 4128633 - RNA, 103 nt, Human
agaggaagaggcuggagcgcaggagguagcuggugcugggcuccuagucuuggcagaggagcccaaagcacuuggcugcccugcgugucacucaucucccuuu

SEQ ID NO: 4128634 - RNA, 64 nt, Human
agaggaagcaguggaaaaagcccuguggacucucuggguccccagggaagccauuucugacuuu

SEQ ID NO: 4128635 - RNA, 130 nt, Human
agaggaaggcacugcaaaaucucgacuuacuucugacaacaucuuugugcuuuuguggaguuucuagcuuaaguuuucaaaaaacacagaugucuguguaguauuuguaucuuuuuuuaaggucuuucuu

SEQ ID NO: 4128636 - RNA, 63 nt, Human
agaggaauaugggugcacuagaaccaggagggucccaaaucccuuaugcacucauauuuuucu

SEQ ID NO: 4128637 - RNA, 75 nt, Human
agaggaccagcaagaaaucauugaauuauuugcuaauugugagcaaaauuuguauugauuuuucucugucucucu

SEQ ID NO: 4128638 - RNA, 76 nt, Human
agaggagaaggcaaagaguuuuaccagcuauuuuggucuuuagcaaaauaauguuaggccuuugcucucuaaaucu

SEQ ID NO: 4128639 - RNA, 69 nt, Human
agaggagagggagagauggaaaagggagaacucaccuuuguuaacauacugcuuucuaauaacucuuuu

SEQ ID NO: 4128640 - RNA, 56 nt, Human
agaggaucuaagugaguccucaccuuaacugugugaaguagauaucacuguccucu

SEQ ID NO: 4128641 - RNA, 63 nt, Human
agaggcaaguaguccaaagcuggcaugaugaggccacccaucauuguuagggacucuaacucu

SEQ ID NO: 4128642 - RNA, 122 nt, Human
agaugaaauaaaaugaauucguuacaagacauuguggagauguugcuaagcccuuuaauuuuuggaaacucaguauaauuuucaucaguucuugugaaacuugauuuaugcucguaucaucu

SEQ ID NO: 4128643 - RNA, 73 nt, Human
agaugaauuugacaaauacccauuagaccagccaacggcuugcucagugacuccuauuugcuugaauuuauuu

SEQ ID NO: 4128644 - RNA, 130 nt, Human
agaugacaugcugauaggaugccauguuguuccaaaugcuguaccacacuuuuuauucugacucauaguguggucccuaggaaagcaguguuggaaaaucagcucaagauggcagaagcaacuaauucau

SEQ ID NO: 4128645 - RNA, 69 nt, Human
agaugacuaugauguauuuugcaucuagcuauagcgguuguauagcauuuguuuaucauucauucaucu

SEQ ID NO: 4128646 - RNA, 62 nt, Human
agaugagggcaagcuauagaauauaaggggaguccauagcaucccaggaguuugcucuuacu

SEQ ID NO: 4128647 - RNA, 62 nt, Human
agaugagggggaugugggguagcaaacccuaaaaacgagcuacugaccacuucugccugucu

SEQ ID NO: 4128648 - RNA, 119 nt, Human
agaugaugcauaugacauuaaagcuugagaugcacugcacuagaaugcaggggcgucauuuugcuugcugcuguauccuuagugucagaacaguacuuagcacaucauaagcacucacu

SEQ ID NO: 4128649 - RNA, 77 nt, Human
agaugauguccuucuuagaagagauucauguuuuuaauuguauguuuuauuucuccaagagggagcuuauauugucu

SEQ ID NO: 4128650 - RNA, 114 nt, Human
agaugcauuuguucaggaugcauuuauucaaguugcauuuguucaggugcauuuguuaaggauguauuuauucaggauguaacuguuugggaugcaucuguuccagaugcaucu

SEQ ID NO: 4128651 - RNA, 75 nt, Human
agaugcccaaacugacauuggcaguucuaaccucuuuccugagcuccaggcugccugauguccagcaggacaucu

SEQ ID NO: 4128652 - RNA, 78 nt, Human
agaugcuagacucaccaagaacaaggcacuggauaaaucucuaaaccauucuaagucacugugaaaggugaagcauuu

SEQ ID NO: 4128653 - RNA, 64 nt, Human
agaugcugaggcaggaauggggaaaaguggaggagacacugaacucacuuugcuuuagaaaucu

SEQ ID NO: 4128654 - RNA, 75 nt, Human
agaugcugagguuguggagugcauugaauaguuuuaaauaagauaaaggcagugcgacuccaaauuuagccaucu

SEQ ID NO: 4128655 - RNA, 55 nt, Human
agaugcuguaacugguauaaaugcacagaauuuauacacugcagaaccagcauuu

SEQ ID NO: 4128656 - RNA, 63 nt, Human
agauggaauaugcucuuugggagaccagguugagugcccuucccucaggccuuaucuccaucu

SEQ ID NO: 4128657 - RNA, 67 nt, Human
agauggcagcagaacaaacaggaaagucaugaucauuaauguggucuguucuuuuagcugaucauuu

SEQ ID NO: 4128658 - RNA, 78 nt, Human
agauggcuuauucacaugccuggcaaguuacagcugacucuuggcaggaguccuuuguuccuugccacauggacaucu

SEQ ID NO: 4128659 - RNA, 56 nt, Human
agauggcuuccuucucacuguguccucacauggcagaagagacaaggcagcucucu

SEQ ID NO: 4128660 - RNA, 130 nt, Human
agaugggaaaaagcaggacugaggaccgagucugcagcaaggggcccugauaggcaccauaggccucaugagugggucuacaccucuggcuagucugggucuuuccagcucuugcugagcccacaauucu

SEQ ID NO: 4128661 - RNA, 87 nt, Human
agaugggagaagcagugggacaguagccccagaacaugcaccguucauagauaggagugcuagucucacuccugcucuuucucaucu

SEQ ID NO: 4128662 - RNA, 75 nt, Human
agaugggauuugucuuaauaugugcauucuguuugccaaggcauacauagcauguuuggacacauggucucauuu

SEQ ID NO: 4128663 - RNA, 63 nt, Human
agaugggccuucgagcaugcccccacuucuugggcugucauaacuccccuugaagaguccucu

SEQ ID NO: 4128664 - RNA, 66 nt, Human
agauggggcuguuggggaaacacaugcuuauuucccugcuggugaccacugcagcaguucccaucu

SEQ ID NO: 4128665 - RNA, 62 nt, Human
agaugggguccaugaggguagucagaggauucugagauucccauacccucagggccucauuu

SEQ ID NO: 4128666 - RNA, 55 nt, Human
agaugggugccuucuuucuuuaaccucuuguggugaagagagaaaucaucuuucu

SEQ ID NO: 4128667 - RNA, 88 nt, Human
agaugguguuuucuacagcugggcuaaaaauaaauaaauaaauaaaaagucugugcuuuguaaaagcccaagcuguaggggcccuucu

SEQ ID NO: 4128668 - RNA, 60 nt, Human
agaugguucgaguguuuuuguuccccucuagauguugaacuccugaaucgugagccaucu

SEQ ID NO: 4128669 - RNA, 75 nt, Human
agauguaaguuguggcaguuugcauuuuauagugauagccuguaagauuuuuaaaauguccucagaaauacgucu

SEQ ID NO: 4128670 - RNA, 83 nt, Human
agauguagaccucaaacuuagguuaucaauccuggggacaguaaucugcucagaauuuagggcucugagguuggucugcgucu

SEQ ID NO: 4128671 - RNA, 60 nt, Human
agaugucccugguggaggcuggcagccucauccugcagccagugucuuccaggggaggcu

SEQ ID NO: 4128672 - RNA, 96 nt, Human
agaugugaguguuguacauggaaaucuuccaggagggcauuucuuuuguucucauagaggcuugucuccuucuggggccauacaacucugacauuu

SEQ ID NO: 4128673 - RNA, 87 nt, Human
agaugugcaacaaugugaaggugcuuaaugccacugaacuguauacuaaaagugguuaaaaugguaaauuuuauguuauguauauuu

SEQ ID NO: 4128674 - RNA, 77 nt, Human
agaugugugcauuuuagugucucagacuaaauucgagaaucauuaguuuaaguuucagaagcuaagaagugccaucu

SEQ ID NO: 4128675 - RNA, 108 nt, Human
agauguuuaaagcacuuauaauaaugucuagguaauaguauagcuuaauaaauguuagauauuuuuauuuauugauauauuauuucuaacugguagguugcaacauuu

SEQ ID NO: 4128676 - RNA, 85 nt, Human
agauuaauuuuguugauuucuauugaguuccuguaauauuugaucaaaagcuagcaaaagcacaguagaaaaggaaaauuguucu

SEQ ID NO: 4128677 - RNA, 71 nt, Human
agauuacagcaugggaaugggauuuaggcucgucacauuugguugacugagcaauucuuaugcucugauuu

SEQ ID NO: 4128678 - RNA, 112 nt, Human
agauuagauucaccugugaagccuucgaaaguccugcugcuuaggccauauuucagaacaauuaaguuagaaucucuggggguaggacucaggccuuaguguuuuuauagcu

SEQ ID NO: 4128679 - RNA, 57 nt, Human
agauuaugcuggcugcuacaaguaaacagaauaugggaagugggaguuaguuagucu

SEQ ID NO: 4128680 - RNA, 75 nt, Human
agauucagggcaagucucagaagguucuggagcacuuuaaauccauaaaauauaaugagugcuuacucuguuucu

SEQ ID NO: 4128681 - RNA, 83 nt, Human
agauucaucaauggaucaaggauuccuaacccagauaauacuucuuguuccuauguuuagacuccuuggucuucugugagccu

SEQ ID NO: 4128682 - RNA, 92 nt, Human
agauucaucugcauuuuacaaaaugcuuuucaugggauuuuuuaauuuauuuacuuuaagucuuaggaaauagcaaagaugaagaugaauuu

SEQ ID NO: 4128683 - RNA, 61 nt, Human
agauuccuaguguuauuucuguccuuuggaauauuauccagcagagggaauuuuaggaucu

SEQ ID NO: 4128684 - RNA, 77 nt, Human
agauucuaaugguaucauggcugagauucaaucauggcaaaaucucggauuucucagucacaugaaccaaugaauuu

SEQ ID NO: 4128685 - RNA, 88 nt, Human
agauucuuccacugauucuuucuccaccaauucaugauaguuacauauauguugaagagguacaagaagaggauaugucagagagucu

SEQ ID NO: 4128686 - RNA, 93 nt, Human
agauugaaauucauagaucuccagcucacagauagcgugggauauuuccaaauuccccaaguuaauuuguagcugaaaauggaauuucagucu

SEQ ID NO: 4128687 - RNA, 72 nt, Human
agauugagaaaucggaugguugccaugucuguguagaaagaaguagacaugggagacuuuucauuuuguucu

SEQ ID NO: 4128688 - RNA, 72 nt, Human
agauugagaaaucggaugguugccaugucuguguagaaagagguagacaugggagacuuuucauuuuguucu

SEQ ID NO: 4128689 - RNA, 72 nt, Human
agauugagaaaucggaugguugccgugucuguguggaaagaaguagacaugggagacuuuucauuuuguucu

SEQ ID NO: 4128690 - RNA, 79 nt, Human
agauugauuccuacagagggcuaugagggagacucuguuccacuuuucucuucuagcuucuugugguuugcugcaaucu

SEQ ID NO: 4128691 - RNA, 87 nt, Human
agauugauuucaggagcugucgcuguguuuaugacaagaagcauauagagucauuuauagaagugggcaguaauucuccuguuaacu

SEQ ID NO: 4128692 - RNA, 65 nt, Human
agauugccaggaaauagugcugugaucuuacaaauuugagaguguaucuacuuucuggacagucu

SEQ ID NO: 4128693 - RNA, 130 nt, Human
agauuggguuaauagcacugccaccugguuuucuaguuugcaaugguaguuguugcuccaugacuauggagcaauaucuccauuacuuuugcagcuccaaccucaguuuuauaaguguuagcagcaaucu

SEQ ID NO: 4128694 - RNA, 59 nt, Human
agauugugcaguaaaguccuuuucauuuucccuggguaggacagugucuagcacagccu

SEQ ID NO: 4128695 - RNA, 56 nt, Human
agcaagucauccaggaugaugucggauauggugcugaucuucuuggccagcuugcu

SEQ ID NO: 4128696 - RNA, 57 nt, Human
agcaaucagcuucuuuguguuugaccaaugacggaugagcacaugguuuuguuugcu

SEQ ID NO: 4128697 - RNA, 57 nt, Human
agcaaucuccagaguaaccuuggagcaguaaucugaucucagauuguucugggagcu

SEQ ID NO: 4128698 - RNA, 77 nt, Human
agcaaugccauucacugaauuucaugauuauucccauucaaaaggaauaguuuuaaaaccucaggaagcaugugacu

SEQ ID NO: 4128699 - RNA, 79 nt, Human
agcaauuacugguccacagaaauucuaaaaccuagcuggguacauagcguuaguuucuggauuagggcucaggauugcu

SEQ ID NO: 4128700 - RNA, 100 nt, Human
agcaauuuggugugcaggacugcuggaauaaaugugaauuagagcuuugcgaugugaguaacacugugucuuuuuacauuuauccccgccaucaugugcu

SEQ ID NO: 4128701 - RNA, 67 nt, Human
agcacaaaagugguuucccaguucaguaguaacaacagcuaauauuuaugagcucccacuaugugcu

SEQ ID NO: 4128702 - RNA, 129 nt, Human
agcacaauuugcuaccaagacuaaugacuagacuucaguguugguucauuacgauuuuccugucaaaucaguguaugcaugaauauaauacagaugauccaguuuaacuugcauccaaauuccauugcu

SEQ ID NO: 4128703 - RNA, 56 nt, Human
agcacacagaauugauucacuguuaucaaaauugaaggacagugguuugaugugcu

SEQ ID NO: 4128704 - RNA, 121 nt, Human
agcacaggccacaccugcgucugcucacagcaaggcccugcaaccugacuugggucuuuuccccaagugauaguuggugcagccuaauugugaucagaugggggguuucacaggucuggcu

SEQ ID NO: 4128705 - RNA, 81 nt, Human
agcacagugauuggcagauagcaagugaaggaggggcaaggcugccaccacuucuggcuucuggugaaauuuuacuggacu

SEQ ID NO: 4128706 - RNA, 76 nt, Human
agcacaguguagacuaauaauagauaacuaguaauugaauaguacucuuucuguuaaugugucugagacuguugcu

SEQ ID NO: 4128707 - RNA, 64 nt, Human
agcacauucugccuugcuuugcauguaaaaguauagaauccaaaccuagggcaguaauggugcu

SEQ ID NO: 4128708 - RNA, 89 nt, Human
agcaccauuugaugguuugaggauucaugucagaauucaaauacaucucugaauucaaaugaauucuuaaauauaugccauuauguguu

SEQ ID NO: 4128709 - RNA, 129 nt, Human
agcacccgcagggccucgucuuccuccuggucggcacccuucuccagcagcaaagcugccggcuucagcagcuucuccugguacagaacugggccgcucaugaacuggaagggaggacauugggcaguu

SEQ ID NO: 4128710 - RNA, 92 nt, Human
agcacccucaggggcccuuuuucaccagcagugugcaucucacgagucugcucuugaaaaaguauuucaggcuccugcugggaagaugugcu

SEQ ID NO: 4128711 - RNA, 64 nt, Human
agcacgcaugguaaauccacugacuuugcuuuugaaagucaagugccaccaccauguaucugcu

SEQ ID NO: 4128712 - RNA, 59 nt, Human
agcacggggcgccggucaucccugagcugaugucagggcagccuaaggcaccucaggcu

SEQ ID NO: 4128713 - RNA, 55 nt, Human
agcacuagagccaaaauuugggcacauuucugucugucuccgaagccuacgugcu

SEQ ID NO: 4128714 - RNA, 85 nt, Human
agcacuagagcgugacagggucuggcuggucauccuuuaguagaugaccaguuaagucauccugucuacuuaguucuucagugcu

SEQ ID NO: 4128715 - RNA, 56 nt, Human
agcacugggaacgcauggggccggggggcuccccacagcucagcagacccagugcu

SEQ ID NO: 4128716 - RNA, 69 nt, Human
agcacugggcuggggcucauucuccaucacucacuguaaacguuggguccagagccucagcccagagcu

SEQ ID NO: 4128717 - RNA, 65 nt, Human
agcacuggggcagugggcagugguucccggcgugcaccggggcaguggcugcugccuccagcucu

SEQ ID NO: 4128718 - RNA, 61 nt, Human
agcacuguaguuauagcuaacauaaauaggcaacaaugaccggaaagcauggcacagugcu

SEQ ID NO: 4128719 - RNA, 129 nt, Human
agcacuguuccugucgauagcggcuggagggguauugaucccacucauaagcacacaggagcccacucgggcccagagucacaugggguguucaauaccccuucccgcuaaugagcagcagcuucaccu

SEQ ID NO: 4128720 - RNA, 87 nt, Human
agcacuuauagaagacugaacucuuguaguccauguuuuucacuuuacaugugaggaaacugggccucagguuaguuauuugguguu

SEQ ID NO: 4128721 - RNA, 66 nt, Human
agcacuuggauuugaacccagguaguugauaauucagauuucuugauaauucaaaucccauaugcu

SEQ ID NO: 4128722 - RNA, 57 nt, Human
agcacuuugggagauaaagcugauaauuaguaaagagcuucaaacccacuaagugcu

SEQ ID NO: 4128723 - RNA, 83 nt, Human
agcacuuuugucauugagaaaauaaguauggauaaauauugauuguuuuucuggaaaaugcuuucuuauuucaaaagucagcu

SEQ ID NO: 4128724 - RNA, 58 nt, Human
agcagaaauuaaguaaguaagggguaaauuuuuccuaaauuauauacuugguuucucu

SEQ ID NO: 4128725 - RNA, 87 nt, Human
agcagaaccacagcacuguugaggaacacccccuucagagcaacaaacagaacagaaaggcagucaguaacgggcucguguuuugcu

SEQ ID NO: 4128726 - RNA, 67 nt, Human
agcugagauuaugcucuucucaugguguaccaugcccaaugacugagcaagggccuaauaaguagcu

SEQ ID NO: 4128727 - RNA, 96 nt, Human
agcugagcaguacuucccugggcuggguuuacccucuucccaggccccagagauggaggaguccgacccuggcccaggaaguuccuggcuccugcu

SEQ ID NO: 4128728 - RNA, 56 nt, Human
agcugagcucaggcugauguaaucaugcaucccgggaaucagcccagagcccaguu

SEQ ID NO: 4128729 - RNA, 76 nt, Human
agcugagguggaggcagcucuggauaggaauuugggagaucugaaaacuggacucagugcugccauucccuuggcu

SEQ ID NO: 4128730 - RNA, 62 nt, Human
agcugaguauucugauauacaugacaagauaaugauuuugcagagagguuaggaacucaguu

SEQ ID NO: 4128731 - RNA, 108 nt, Human
agcugagugcuggccgcauugcucuggccucccugggauuucacauuugaucgcuuuucaguguggcugcaaaggaaggcugcaggagccauuuggugggcacuggcu

SEQ ID NO: 4128732 - RNA, 60 nt, Human
agcugcaagauuucuuuuguaugucugcaucugagauacaaugauuauuuugucuuagcu

SEQ ID NO: 4128733 - RNA, 57 nt, Human
agcugcaggguuucgccaguugugcaauacagccagccauaauacgaacccagcacu

SEQ ID NO: 4128734 - RNA, 58 nt, Human
agcugcccaauccugcagggcgagaacugaggaccuucaucucugcuaaugggcagcu

SEQ ID NO: 4128735 - RNA, 58 nt, Human
agcugcccagucuccucacucuggaaaguuacugaugaaugagaggcuuaaggcagcu

SEQ ID NO: 4128736 - RNA, 61 nt, Human
agcugccucagcaacacagaccagguaccaaguccugguacuuccaacacugaggcaggcu

SEQ ID NO: 4128737 - RNA, 62 nt, Human
agcugccuggagucauuuccugcaggaauuccaugucuucccauugaaguguuucagcagcu

SEQ ID NO: 4128738 - RNA, 56 nt, Human
agcugccuguguagaaccaucugcagcucuucagaaugggaaccacacaggcaguu

SEQ ID NO: 4128739 - RNA, 63 nt, Human
agcugccuucccucucauuaggguaugacuuauaggaaggagugacugauagggguggcagcu

SEQ ID NO: 4128740 - RNA, 87 nt, Human
agcugcucaucagaggaguccugugucuuccaggaaaagggcugacuuaguauuccugaugcacacagucauuuacagugagcaguu

SEQ ID NO: 4128741 - RNA, 65 nt, Human
agcugcucuucauuuccccccagcaaaacaagaggaaauggaugguggagaugguggagacagcu

SEQ ID NO: 4128742 - RNA, 97 nt, Human
agcugcugagccccucccuccagcuggcuggucugagcagucgcagcccagcugugggcucuaauggcagcagacagcaggcaggggcccagcugcu

SEQ ID NO: 4128743 - RNA, 64 nt, Human
agcugcuggauucagcccuuuucugugucccucagagagcuaugagaacugaaccagagcagcu

SEQ ID NO: 4128744 - RNA, 69 nt, Human
agcugcuggcacuggagugagcccauguaggacccuucugcccaggccaccuuccaguugccugcaguu

SEQ ID NO: 4128745 - RNA, 79 nt, Human
agcugcuggcagccaggaagcaguuagauggguuuucucagaaagaacuaagacagcauuccuggugaugauuguagcu

SEQ ID NO: 4128746 - RNA, 73 nt, Human
agcugcuuuggcaaaacuugcucuucuccugcaagauccaaaaagagaaccucaaguccuuugccaaagugcu

SEQ ID NO: 4128747 - RNA, 82 nt, Human
agcuggaagucugaauucaaagccgcuugggaaucagagugugaugagauaccggguugaguggcuuggacccagaguagcu

SEQ ID NO: 4128748 - RNA, 104 nt, Human
agcuggaggaccuugaugcaguuuugaaggcuguucuaggagagugggaauggaggguuccaucuuaucucuuagagcuccucugcccauucuucaaucuggcu

SEQ ID NO: 4128749 - RNA, 68 nt, Human
agcuggauggucuuggcagcauacaguuggauuggcagaaguaaucccaagggcugcuggcuucaguu

SEQ ID NO: 4128750 - RNA, 62 nt, Human
agcuggcaguaugacuggugacuggugaaucuaggaugaucucacucacaugccuggcaguu

SEQ ID NO: 4128751 - RNA, 63 nt, Human
agcuggccauugugaguggccuuccagcaagugcccauaguaaccacucggaaugugcuagcu

SEQ ID NO: 4128752 - RNA, 70 nt, Human
agcuggcuuuaugguuggcuaagggauucuucccgagucucacugcagccugccgaccaggaggccaccu

SEQ ID NO: 4128753 - RNA, 73 nt, Human
agcugggcagcggggaagccucagugacuggccccuaccuagacugggccauuuccccagcugccagccagcu

SEQ ID NO: 4128754 - RNA, 89 nt, Human
agcuggguauggcugagacaucauaguaugcugagaaaucuuccaaaugcaugugcuauagaugugaauuaaauuuuagccuucuaguu

SEQ ID NO: 4128755 - RNA, 69 nt, Human
agcugguguuuuauaaacgguguuugguggucuaagaaaccagucaccauagaauaaaacauauauguu

SEQ ID NO: 4128756 - RNA, 59 nt, Human
agcuguaagcaacagaaacauucuaauaagugauuuauuagaaaggcuauugcauagcu

SEQ ID NO: 4128757 - RNA, 78 nt, Human
agcuguagauuaggaguugggaggugaaaccaauaagcgguuuugugguucugggccaaucucuuaaucucugcagcu

SEQ ID NO: 4128758 - RNA, 78 nt, Human
agcuguauggcugcagagaccugaagaaggaaagcuuaaguccccuuuuugaucuuguuucuggggcuaugauaugcu

SEQ ID NO: 4128759 - RNA, 63 nt, Human
agcugucaaguucacaugcauccuugcuacccccaggugagcaaugccaagugaacuccugcu

SEQ ID NO: 4128760 - RNA, 58 nt, Human
agcugucaggcagaacugagcuucuuggcuucaaucugcucaguguggccugaguguu

SEQ ID NO: 4128761 - RNA, 95 nt, Human
agcugucuuccaucucauagggauagggcucugacucauuucuauuucugcagcucuuuggucaggagcucuucccuggugugacuagaauagcu

SEQ ID NO: 4128762 - RNA, 76 nt, Human
agcugugauguggagggugcugagacgggcuuugguaucaagugaggccauuaaucgucccuccugcuucacugcu

SEQ ID NO: 4128763 - RNA, 76 nt, Human
agcuguggacaaucaguuuuuauuaauguagcucgugauuacauuagcucuuuugguagacauuucuccugcaguu

SEQ ID NO: 4128764 - RNA, 102 nt, Human
agcugugguuucuucuuuacagauuuagagagagugaagaaccccuaauacaaaacuaaagaaugcauuauggaauaaccuuucugaaauuguaucauagcu

SEQ ID NO: 4128765 - RNA, 100 nt, Human
agcuguguaaguggaggguguaccacuguauaagcaaaaugaaauauaagaauguucucaaguauguacguggcacaaacguaacuucauaugcacaacu

SEQ ID NO: 4128766 - RNA, 77 nt, Human
agcugugugaccuuguucagauugaccccuguuuuugagauauuucaucuggaacaagguaauaauagaacauagcu

SEQ ID NO: 4128767 - RNA, 75 nt, Human
agcugugugucaggaggguauuuuuggccuuuaguaugucgucuaaguugcuagugcuuuucugagauuguaguu

SEQ ID NO: 4128768 - RNA, 59 nt, Human
agcuguguuuuguuaacuuuguacauaggaucuucuuuagcaacuagggagacacagcu

SEQ ID NO: 4128769 - RNA, 78 nt, Human
agcucuucguuuucuuugugggaaccgugugggacaagaaagcccacaaguccuaauuuuaggaggagaggggagacu

SEQ ID NO: 4128770 - RNA, 72 nt, Human
agcucuucuagcauaaacucuucugugcaauuuagcugcaccgaggaaacgggaguuuuucuggaagggacu

SEQ ID NO: 4128771 - RNA, 62 nt, Human
agcucuucuagccagcacauacuucuaucauccuacaagucuggggucugguagaacgagcu

SEQ ID NO: 4128772 - RNA, 56 nt, Human
agcugaaucuugacuaggaagaacuuauuccuuucuuucuguccuuuccaucagcu

SEQ ID NO: 4128773 - RNA, 68 nt, Human
agcugagccagcagcaacaggacagacuauaauuaugacaaguuacauccuguuguccuggcucaguu

SEQ ID NO: 4128774 - RNA, 63 nt, Human
agcugagcuaguaguuccagugccuagcacuacacccaaaggcgcaaaccacucgcucuaguu

SEQ ID NO: 4128775 - RNA, 70 nt, Human
agcugaggccagugaggucaagucaucucccuaagccaggcuggagcuggcucugcacccaggccucgcu

SEQ ID NO: 4128776 - RNA, 55 nt, Human
agcugaggccugauuucgccguggcugggggcuggggccggaguugggcccggcu

SEQ ID NO: 4128777 - RNA, 76 nt, Human
agcugaggcgguuggaucaccugaggucaggaguucaagaccagccugaccaacguggugaaacccugucucuucu

SEQ ID NO: 4128778 - RNA, 77 nt, Human
agcugaggcguauggaucaccugaggucagcaguucaagaccagccuggccaacauggugaaacccccgucucuacu

SEQ ID NO: 4128779 - RNA, 67 nt, Human
agcugagggaaaacauuuggagcacagauugcaaagcaccugaauuugaaauguuuauuucuuggcu

SEQ ID NO: 4128780 - RNA, 87 nt, Human
agcugagggccucagaggggaugcuuggagaagcugaaaaauccacaagcuguucucugaaauuuccuccccuggggcagccucacu

SEQ ID NO: 4128781 - RNA, 69 nt, Human
agcugauaaucaugcauggcuauuaugaggcagaaggugggaccuucuguccuuugcuaucaaugagcu

SEQ ID NO: 4128782 - RNA, 84 nt, Human
agcuuucuccagagacuugcaugugcuuggauuaacaaacuugcgauccagggaugcuaagcaggugccuucugugaccaagcu

SEQ ID NO: 4128783 - RNA, 68 nt, Human
agcuuucuuuuuacagucauggucacucauagcuacaaucuaugagaggauauuuugggaggauugcu

SEQ ID NO: 4128784 - RNA, 75 nt, Human
agcuuugagaagcucaugucuuacuuggauaaugaucaucugagcagguucccagagauagagcuguacgaggcu

SEQ ID NO: 4128785 - RNA, 61 nt, Human
agcuuugaucuagggaggaaggccauaggaagaugugcagucauaaacuaguaucaaaguu

SEQ ID NO: 4128786 - RNA, 63 nt, Human
agcuuuggagcugggugaaagagcuggucuuaaccauggaaucuggagcccgucucuuaagcu

SEQ ID NO: 4128787 - RNA, 57 nt, Human
agcuuuggauuucuuauagcccaccgaagugugugugguuauaagcuggccagugcu

SEQ ID NO: 4128788 - RNA, 100 nt, Human
agcuuuggguguuuucuaagcacagagggacauuccuacuagagcugcacaagucucagcccaagcaggaguguccccuggcuguuagaaagccagagcu

SEQ ID NO: 4128789 - RNA, 93 nt, Human
agcuuuguuuaacgaaguaacauuuugagcaguaggcuuuaucaauaauuuguuaggccuaagauaaagugauacucuguauuaggcagggcu

SEQ ID NO: 4128790 - RNA, 75 nt, Human
agcuuuguuucucuuuaaggugauuucugcuacuaauaagccauaguauggaaauaucuuggaagucaagaggcu

SEQ ID NO: 4128791 - RNA, 80 nt, Human
agcuuuucagcaucccucuguugcagugauuuuagauaaacgucaauccuauucauacaaggaggguguucaaagaagcu

SEQ ID NO: 4128792 - RNA, 64 nt, Human
agcuuuuccaaaugagcagaacaagcauauugggcuauuguagguauuuguauuugggaaaguu

SEQ ID NO: 4128793 - RNA, 81 nt, Human
agcuuuuccuaugaaagucaauccccaaguguccccuaaaacaugaggacaggggaauuuacugucauuaagcagagagcu

SEQ ID NO: 4128794 - RNA, 58 nt, Human
agcuuuucuauguauuauauccaggaaauauuucuggaaggguacauaggaaacugcu

SEQ ID NO: 4128795 - RNA, 58 nt, Human
aggaaaacaauauugagagcagccugugaccuuucuggcagcuuucaauuucuuuccu

SEQ ID NO: 4128796 - RNA, 67 nt, Human
aggaaaagggguucccaacuccuccugcagaaauaauuuucaugggaccuggggacuccuuguuccu

SEQ ID NO: 4128797 - RNA, 77 nt, Human
aggaaaagucauuuguauauacccuuuauuaaaaaauuagacaauaaaaguauguguguaugaauggaucugauccu

SEQ ID NO: 4128798 - RNA, 59 nt, Human
aggaaacaggagggcuagagagauagcgcucaaguuuucuuucacagucccuguuuccu

SEQ ID NO: 4128799 - RNA, 55 nt, Human
aggaaacaugaaucugccuugaagggauguguccccaaugcauuucauguuuccu

SEQ ID NO: 4128800 - RNA, 123 nt, Human
aggaaacugagguuccaaaagcuaagugaauggaugaacaagugguagggucaggauuagaauccauguccaccugaauccaaaaccagugcauuuuccacuaggcauguggcucauuuuccu

SEQ ID NO: 4128801 - RNA, 70 nt, Human
aggaaagaagaguucugcaugacuaugggucacacuuaacucuaucaaacacuuggaacucauuuuucuu

SEQ ID NO: 4128802 - RNA, 101 nt, Human
aggaaagacuggagcuaaggcaagauggaauggcucccugccccaggcugcccugggcuaaggggcagugccaguccucccugcagggcuccagagagccu

SEQ ID NO: 4128803 - RNA, 76 nt, Human
aggaaaggaacaagauaguccccugaguugccauguaaucucuauuuaggcuucuggaauacuaaguuccuuuccu

SEQ ID NO: 4128804 - RNA, 76 nt, Human
aggaaagguuuggcuuuucaguagaugaugaccaauaauuuaccaucucugcugagauaaaggcaaauuuugcacu

SEQ ID NO: 4128805 - RNA, 61 nt, Human
aggaaagucuuguguagaugucucuucaaagaaugagaagacuucuccaacaagcuuggcu

SEQ ID NO: 4128806 - RNA, 76 nt, Human
aggaaaguguggcuaguuggcagagaacagggugaacucaguuggcucccaaaauggcuacugaauuaauuuucuu

SEQ ID NO: 4128807 - RNA, 93 nt, Human
aggaaaguucugggcauguuacauucugucuuuuacauucuguaacuacaaauagcaguaauagugcaugcuaagaaaauaaaugacuuuccu

SEQ ID NO: 4128808 - RNA, 114 nt, Human
aggaaauaacuuggaggauacuggugggggcuauacguuuggugaaauccaucagugauauucaagccaagcaaauaaucacccacuaauuuguguuuuccacuuaaaauucuu

SEQ ID NO: 4128809 - RNA, 79 nt, Human
aggaaauaguugaucaauuuucuuuggcuuucauaaucuuaaauuuagaucaagucagagaaaugacaauauauagccu

SEQ ID NO: 4128810 - RNA, 64 nt, Human
aggaaauauuucacaugugggaaacauaagugaaagcauuauguguuucacugugcaguaaccu

SEQ ID NO: 4128811 - RNA, 55 nt, Human
aggaaaugccgcggcucucuuuaggccuaggguuggcuacaauguggcauuuccu

SEQ ID NO: 4128812 - RNA, 64 nt, Human
aggaaauuaacccaggcagcaggagcuaaaggacaccaaaccagcugccaagccuggguuuccu

SEQ ID NO: 4128813 - RNA, 104 nt, Human
aggaacaaauaagauagauaguacuccaaaacuugucaugcagaaucuuuauguuccuucuugagacucucugguauuggcaaguuuuauacuauuaauuuccu

SEQ ID NO: 4128814 - RNA, 83 nt, Human
aggaacacaggguaggaaguguuagagaauccugagucuaaacaggccuaagagaucucuagcacuuccuguacuggugucuu

SEQ ID NO: 4128815 - RNA, 65 nt, Human
aggaacagacuccauuaccuggcuuuauaaaaaggucaagaguaaauuuggguacaccugucucu

SEQ ID NO: 4128816 - RNA, 83 nt, Human
aggaacaggaggcaggaaaggaagagaauccuucucagacaauggugcugcagggccccuuuuucccugagcuccugaauccu

SEQ ID NO: 4128817 - RNA, 60 nt, Human
aggaacaguaguggucaauaugccaggguccacacuguaaaucagccagcuacugucucu

SEQ ID NO: 4128818 - RNA, 59 nt, Human
aggaacaucucagucaaacccagcacugugagguguuggcaggaaaugagaauguuccu

SEQ ID NO: 4128819 - RNA, 59 nt, Human
aggaacauucucauuuccugccaacaccucacagugcuggguuugacugagauguuccu

SEQ ID NO: 4128820 - RNA, 60 nt, Human
aggaacccggucugucacugugccuugugcuuaggaggugcucagugacucuggcuucuu

SEQ ID NO: 4128821 - RNA, 57 nt, Human
aggaaccuagaaauuaccuaaccuauuucccaaauagggcuguaccaucagguuccu

SEQ ID NO: 4128822 - RNA, 64 nt, Human
aggaacucugucuccagaguugaauguugaauuccuauucucaaagccagagucaacguguccu

SEQ ID NO: 4128823 - RNA, 62 nt, Human
aggaacugucauuggggacaucagccaggaggcuauugauaauagaccaagugaaaguuuuu

SEQ ID NO: 4128824 - RNA, 64 nt, Human
aggaagaagccugcuguuagugugaacucuauuugaacuaggugugacagcagguuucauucuu

SEQ ID NO: 4128825 - RNA, 56 nt, Human
aggaagagaaaggcaaggaguuuugugaaugccaaaauaauggccuuucucugcuu

SEQ ID NO: 4128826 - RNA, 84 nt, Human
aggaagagaagacauguggauucuaguuuccucauuuccauacuugauuaugaggccaaauugaguauuuaugacuugccuccu

SEQ ID NO: 4128827 - RNA, 78 nt, Human
aggaagagcaucaggucauguuuuuugagaacuaacuaccugcagaggcagcaauaaacauguuugaugcgcuugccu

SEQ ID NO: 4128828 - RNA, 76 nt, Human
aggaagagcuuaaaguuguaaauuagagaaaguuuggcuuuugcuaucucugaguuauuucuuuguccucugcucu

SEQ ID NO: 4128829 - RNA, 65 nt, Human
aggaagaggguaggaucuagcaugcaggccauagcuugcugaacccugcccucuaauaaauuccu

SEQ ID NO: 4128830 - RNA, 79 nt, Human
aggaagaggguuggaguaggcuaggaauaggagcacaaauuaaagcuccuguucacuuugacuucuccaucccucuccu

SEQ ID NO: 4128831 - RNA, 105 nt, Human
aggaagaguuuuuuuggccucucuggaaagauuuacacggggaaagaauguucucuuccucauuuuguuaauuuuacaucagcaaccagaaugaaucucuccccu

SEQ ID NO: 4128832 - RNA, 113 nt, Human
aggaagauaaugcuauuauguugaaccauaugaaauugucauauuuuauaggucagaaaugguugaaucuuggcaguuucaugugauucaacugaauacuauugcauuuugcu

SEQ ID NO: 4128833 - RNA, 59 nt, Human
aggaagcaauguugaagaauuuguuugaaaaccagcacaggcucuuaaucagugcuccu

SEQ ID NO: 4128834 - RNA, 66 nt, Human
aggaagccaggcccuuggguggugccaucacgagccuucacuggugcugcaccagccuggcugccu

SEQ ID NO: 4128835 - RNA, 85 nt, Human
aggaagccgagguggccuugagugggggugaggggucacugcuggccccagcccuggaccuuagcccccacgccugguggcuccu

SEQ ID NO: 4128836 - RNA, 84 nt, Human
aggaagcgguaucugaauggcugagagagagacuggagcaaggacaaaguggcauuucucugccucagcuucugccgcagaccu

SEQ ID NO: 4128837 - RNA, 78 nt, Human
aggaagcuccagaggaugcaggugagggccaggcccagggcagagacccucuugccugucuccugguuugaugcuccu

SEQ ID NO: 4128838 - RNA, 76 nt, Human
aggaagcugaucucacuucuuaggagacugaaaaaaauacaucugugucauucuccucuggaaaaggcagucuccu

SEQ ID NO: 4128839 - RNA, 81 nt, Human
aggaagcuuauuuuauaggagaacucuuaaaguugcugaauguguuuacaaugcuugguuuuucuagaaacuugucuuccu

SEQ ID NO: 4128840 - RNA, 67 nt, Human
aggaagcuugcuccuaccucauagcaggcuuaucagaggcuguuuauagcagagcaagccucuuccu

SEQ ID NO: 4128841 - RNA, 94 nt, Human
aggaaggaacaaagucuccaggcuuaaucucagcuucucagaauucugagaagccgcaguucugggccuggguuucugcuuucccauccauccu

SEQ ID NO: 4128842 - RNA, 123 nt, Human
aggaaggacagaguguuuccagacuccauacuaucagccacuugugaugcuggggaaguuccucuacacaaguuccccuggugccacgaucugcuucacgagucugggcauguccugacuccu

SEQ ID NO: 4128843 - RNA, 85 nt, Human
aggaaggaggauguaauguuugcuuugcagaaguaacucuuacagagauuugcagccuagacauucuggucaucauuaccuuccu

SEQ ID NO: 4128844 - RNA, 83 nt, Human
aggugucagauagugacuguggggaauuuuugagggagcuaacuggagaugaaucauuccauggucaugauuucugcauaucu

SEQ ID NO: 4128845 - RNA, 61 nt, Human
aggugugucuuuggcgaugucuggacagcucuguccauuagagaugcuaaaggacaucccu

SEQ ID NO: 4128846 - RNA, 89 nt, Human
agguuaaagggugggauggcacagguaauggaggauagugguucuggauagugcuucuggcuuaucucgugccuucccaucuguuuccu

SEQ ID NO: 4128847 - RNA, 76 nt, Human
agguuacaggcuagcugguucuucugcucggugucucaccaggcugaaaucuagggaccagcuagggcugugaccu

SEQ ID NO: 4128848 - RNA, 81 nt, Human
agguuaugauaaguaucaaaugguagcauauguauaaagcaguacauaaauguaagauacuauuuugauauuuuauaagcu

SEQ ID NO: 4128849 - RNA, 70 nt, Human
agguucaaguguaagagggguuaaauuuagccuuuuagagcugaaaccccagauuaccacaaaugggccu

SEQ ID NO: 4128850 - RNA, 78 nt, Human
agguucaauaacauccuuugguuccaaaacaaggucucuugagccucccuuuguugcaagggaaaagucacugaaccu

SEQ ID NO: 4128851 - RNA, 67 nt, Human
agguucagaggucagcagcuugcccaaagugcucaacuaguggguagcagggcugagcugugagccu

SEQ ID NO: 4128852 - RNA, 66 nt, Human
agguucaugcuauguaaucaugagaaguaaaguuuaugaagacaaugauagcaugaaaaaaugccu

SEQ ID NO: 4128853 - RNA, 55 nt, Human
agguucccaguuuucuuaggggagaaauccuggcagagguauauugggaggaccu

SEQ ID NO: 4128854 - RNA, 77 nt, Human
agguucguuugcaaaagcaauugcaguuuuugcaauuacuuuaauggcaaaaacugcaauuacuuuugcaucaaccu

SEQ ID NO: 4128855 - RNA, 93 nt, Human
agguucugguugguuaagaguuuugugucaaguucuuuuaguugcaaacaauggaaacuuaucugacacgaaccuaaacacaaaagagaauuu

SEQ ID NO: 4128856 - RNA, 72 nt, Human
agguucuugggguuccacaaugggaacugcuuguuugguuuuucgcuuccucggcugggccccaggcuuccu

SEQ ID NO: 4128857 - RNA, 102 nt, Human
agguugaugggagaaauguguauaauaaugugagcuaaaguacauuagaaacuauagcgugccauuauauacauuugcucauuugauuucucccaauggccu

SEQ ID NO: 4128858 - RNA, 64 nt, Human
agguugcccugagaagacuucauaacacagggcugucacucauaagcucuucucagggucaccu

SEQ ID NO: 4128859 - RNA, 64 nt, Human
agguugcgcauucuaguuuugcacaccuuucccucuccucgcauguccuggagcuguguaaccu

SEQ ID NO: 4128860 - RNA, 59 nt, Human
agguugcugugcugcuaggcagaggaguugugaagugaaacagagcacagcaugcaccu

SEQ ID NO: 4128861 - RNA, 101 nt, Human
agguugcuguugaaauguuuggagucuccuucaggauaugugauaucugaaaucuuucagguuuugugucaugagguuugagucucauuugucuguaagcu

SEQ ID NO: 4128862 - RNA, 62 nt, Human
agguuggaaaaauucagacugugcuccaucuugaggccaggaagcuggguuuccauacaccu

SEQ ID NO: 4128863 - RNA, 76 nt, Human
agguuggccaugaacucgggcauggagacgguguccaucagcacgaagucugccuugccgaauuccaggcucuccu

SEQ ID NO: 4128864 - RNA, 76 nt, Human
agguuggugccaaaguaauuacgguuuuggccauuauguucaaugacaacaaccacaauuacuuuugcaccaaccu

SEQ ID NO: 4128865 - RNA, 71 nt, Human
agguuucugcaauguguguacacuggagccauuagaacgaagacccagacacacgaugcgugcagaagcuu

SEQ ID NO: 4128866 - RNA, 74 nt, Human
agguuugggcuucuguuccuuucacuugcagucagacauggaguuagugguagaaggaacagaagggguaaccu

SEQ ID NO: 4128867 - RNA, 81 nt, Human
agguuuguauugcuugagaaguuaguggagggagaauauucagggcucuuuaucaucuuguuuuuaaagcuaaauaaaccu

SEQ ID NO: 4128868 - RNA, 76 nt, Human
agguuuucccacauucauugcauucguaggguuuuuccccugugugaguccauugauggauagugaggaaugacuu

SEQ ID NO: 4128869 - RNA, 113 nt, Human
agcuaagccugcaaucggcagaaccuacaauacagauugcuauacuuacaagucugauuugugacaacuguggcaucugauuguguuuucuagauuuagcagcuucucuagcu

SEQ ID NO: 4128870 - RNA, 102 nt, Human
agcuaauaaucuaugagccauaauuucccaagagauugaaaguauguaugaaguuaaaacaaguacuuuuaaaguggcaaauuagguaguagaguuauuacu

SEQ ID NO: 4128871 - RNA, 64 nt, Human
agcuaaugaugagauacagauaguauaugcaccaugaaaauguuugugucuuauccaugagacu

SEQ ID NO: 4128872 - RNA, 57 nt, Human
agcuaauugagugcuuagugacuuguucuccaaggucauaaagauacuaagugaguu

SEQ ID NO: 4128873 - RNA, 80 nt, Human
agcuacagaacuaugagaaaauaaauaucuguuguuuuagccacagcaucugugauauuuuguuauggcaaccuguagcu

SEQ ID NO: 4128874 - RNA, 87 nt, Human
agcuaccacugugcaguugguucugucaaagucucauguuacagcugauuaacuggcugcuucugacagggccaaacaugacaagcu

SEQ ID NO: 4128875 - RNA, 125 nt, Human
agcuaccuuggcaaugcaggaugucacauuuucacgguauucacgaacauggaaugggagccuccaauuucuguaaucaagauauuugagaguugaugugcccaagguccucucuuuaaucagcu

SEQ ID NO: 4128876 - RNA, 79 nt, Human
agcuacgcauuucucuuccaguaagagucuuuaaaucaucaauauuuggaauucuuucucgaaguugguguggguggcu

SEQ ID NO: 4128877 - RNA, 56 nt, Human
agcuacuggagaacacaaaaccuugucugguuugguucaguguauccucaguggcu

SEQ ID NO: 4128878 - RNA, 79 nt, Human
agcuacuguugucuuaucaagggaggaaaaugagcaaacucaccgguuuauacuucuuugaaaaaggcagucaguugcu

SEQ ID NO: 4128879 - RNA, 68 nt, Human
agcuacuuauuuuuagaaagugaauucugagauuaagcuuagcauuuauuucuuagaaauugcuugcu

SEQ ID NO: 4128880 - RNA, 91 nt, Human
agcuaguguaucauagacuuuccacucuaagaacacaaaggcccagagcagcagcucuggcuuagaguguaguggugauuucccgcuggcu

SEQ ID NO: 4128881 - RNA, 56 nt, Human
agcuaguguuuucuaauauguuuauuaauuuguuuguaucagaucaaauacuggcu

SEQ ID NO: 4128882 - RNA, 78 nt, Human
agcuaugagccgagagcuuuccugacgguugagugguccuuugcaaucagcaguguuuucacccacagcucacuggcu

SEQ ID NO: 4128883 - RNA, 69 nt, Human
agcuauucucucugugucucauguuccuauuucguaaaauaggugcaucagcacagggucaaaauaccu

SEQ ID NO: 4128884 - RNA, 63 nt, Human
agcuauugcugaauguuggcauuucaugcaaucuggaaauaucaguauuuuaagcagugaguu

SEQ ID NO: 4128885 - RNA, 71 nt, Human
agcuauuggacacaauguugccuuagggcccacaggcagggccuguguguggagcauugugucuucaugcu

SEQ ID NO: 4128886 - RNA, 72 nt, Human
agcuauuuucaggacucucagaggcugaacucugcacaaaagggguagcagcacagaaagccuggagauacu

SEQ ID NO: 4128887 - RNA, 84 nt, Human
agcucaaagcacaucauguuguucagaccucagcuguuucuccuugacagaaggaagucuguccaggugaaugcuucaggagcu

SEQ ID NO: 4128888 - RNA, 74 nt, Human
agcucaauugacuacguccaugcaaagacuaaagaaauuuaguuuaacuuuguaaacgugaggcuugguuagcu

SEQ ID NO: 4128889 - RNA, 69 nt, Human
agcucacuaguugugagagaaaauguguauauggguauucaugugugcacaugcucuuaccuagaugcu

SEQ ID NO: 4128890 - RNA, 99 nt, Human
agcucagcgugggccccuuauaugcacugggugaggaaggagaaguuucuucuaaacgcagccauuucucucuuucuuucucugugcaccagcaaagcu

SEQ ID NO: 4128891 - RNA, 84 nt, Human
agcucaggaagggaggggagacagggaaaucaguuagaggcugacuaggauuuugcuuugucuuccgucuggauugcaggagcu

SEQ ID NO: 4128892 - RNA, 61 nt, Human
agcucaggcagauuugcugcccuccaucaaugcugguggaggaaaccaagucggcccugcu

SEQ ID NO: 4128893 - RNA, 114 nt, Human
agcucaggguggggagaaaucaggguucccccagugccaucuaaucaguggugaugcaccagcugcccucgcuggggccagaucccuggcuucuuccugcaugaucccuaggcu

SEQ ID NO: 4128894 - RNA, 55 nt, Human
agcucaugguucgcugcagaggcgucgucccagaccagcucugcagugcauggcu

SEQ ID NO: 4128895 - RNA, 67 nt, Human
agcucauucauaaaaauuaguuggcagcuaaucuuugcaugcuguucucugaacuugagugaaagcu

SEQ ID NO: 4128896 - RNA, 72 nt, Human
agcucauucgcacuggucuagacccguccagugagcugggggcaggucuugaaggugugauuugcaugagcu

SEQ ID NO: 4128897 - RNA, 80 nt, Human
agcuccaacaacaagcugaggcuuagcuaaaaauuuucucuaaagcuuuuuggagaguuucauucuuguuuuuacuggcu

SEQ ID NO: 4128898 - RNA, 78 nt, Human
agcuccagauuaacacggagcuuaacaugagagagaaaugaacuacguaucuuauuugagccauuguuauuuugggcu

SEQ ID NO: 4128899 - RNA, 71 nt, Human
agcuccagggaaagaguggaucaguaguucaaauauacuuauuccuuucugucuuuacucuggacauagcu

SEQ ID NO: 4128900 - RNA, 130 nt, Human
agcuccagugggaggcgggagauuucgcgcccagcuccauccugucuguggccucaggcuugcuuagucucugccaccaugagaugggcaguggucuggguggcccccuuccucucuccuccuggcugcu

SEQ ID NO: 4128901 - RNA, 56 nt, Human
agcuccaguuacuuaccuagagucaccugugauguaaguuagugaguaauugagcu

SEQ ID NO: 4128902 - RNA, 64 nt, Human
agcuccaugagugucaucucagcagcuccgaccuuggcggacugcaugugaccacuguggugcu

SEQ ID NO: 4128903 - RNA, 70 nt, Human
agcucccaggguagaugaccaagccucucaaaaggacacaggacuuuucaucagcuauccugucacagcu

SEQ ID NO: 4128904 - RNA, 76 nt, Human
agcuccguccaugcggcucuuuccaaaccggggccguuuuugccuggcuucucugguguggacuccgcgcggagcu

SEQ ID NO: 4128905 - RNA, 65 nt, Human
agcuccucuuucagcuaauuagauauuguucuacaaauugggcuguugucucugaaagaugagcu

SEQ ID NO: 4128906 - RNA, 62 nt, Human
agcuccuggggguuccaagcaggagcucccucuccuguguccuuucuaaugcccagagagcu

SEQ ID NO: 4128907 - RNA, 58 nt, Human
agcuccuggugccucagccgaacucccuugcagaagagcugcuguggcacccggagcu

SEQ ID NO: 4128908 - RNA, 71 nt, Human
agcucuaaauggaauuuugccuggaccugggagucuucaaaggaauaggaggaaaaauuguggauagaguu

SEQ ID NO: 4128909 - RNA, 58 nt, Human
agcucuaucaccugucaguugccauugcuaauaaaaauagcaucugcaugaugggguu

SEQ ID NO: 4128910 - RNA, 72 nt, Human
agcucuauccaaaguaccccgggcauagacaggguccucgggagcugaaguccucgcggugcuaaggaugcu

SEQ ID NO: 4128911 - RNA, 55 nt, Human
agcucuccaucuaucugugaugacagacucauuaaagaauaagauggaguuggcu

SEQ ID NO: 4128912 - RNA, 69 nt, Human
agcucucuagauacacacacagucaugugugcacaaacaugcauguguauguguauuuguaaggaggcu

SEQ ID NO: 4128913 - RNA, 59 nt, Human
agcucugaaaguuaugucgccggcuuugaccagcccagcccagcaccucucucaggguu

SEQ ID NO: 4128914 - RNA, 65 nt, Human
agcucugggggaaagucugcuccaaguuguuucauacuguuggcagaauuuaguuccuugagacu

SEQ ID NO: 4128915 - RNA, 83 nt, Human
agcucugucaagcaauaauuaccuagagcugcugagcguuugacccaagggccaagcagucugcuaggaguuuaagaagagcu

SEQ ID NO: 4128916 - RNA, 94 nt, Human
agcucuucucuacaccuucacaaaagguuuauugcuaugguuguuuacugagacccaaggcagagcagggccaguggagucaaagagaugggcu

SEQ ID NO: 4128917 - RNA, 80 nt, Human
agcucuugauccagaacagaccugccugaccuggggccacuguaccccacuuggagccaugguguguucaucaggaagcu

SEQ ID NO: 4128918 - RNA, 61 nt, Human
aggcuacugucucuuucuucccaaaauauucuguuuugguaauuaaguagauauuuggccu

SEQ ID NO: 4128919 - RNA, 77 nt, Human
aggcuagaguaguggcgugaucucggcucacugcaagcuccgccuccugagcucacgccauucuccuuccucagccu

SEQ ID NO: 4128920 - RNA, 62 nt, Human
aggcuagauagagggucaucuuaguauuaauuuuaaaaaaagauaccugcauauuuaugccu

SEQ ID NO: 4128921 - RNA, 80 nt, Human
aguauuuacuggauauggcagacaaaauauuguauguucauaaaauguuuccagguucuuccuauguccauaggaauacu

SEQ ID NO: 4128922 - RNA, 67 nt, Human
aguauuucauaauagaagccgcuggguuguugaacucagaaagcccuguuaacuguuuugaagugcu

SEQ ID NO: 4128923 - RNA, 122 nt, Human
aguauuuuaaaagugggaaaauggucaaagaaacauuugaaauaguucauucuuguaauuuuuugucccaagacugugcuauuuuaaaaaguaucugcugucaucuucaccuuuugaaaacu

SEQ ID NO: 4128924 - RNA, 104 nt, Human
agucaaaacaguaaggcacuagaauuagcugggcagauuccugaagcagauucagguggauaagaguuuaguuaauguauaguauugccucuguuuaagaggcu

SEQ ID NO: 4128925 - RNA, 60 nt, Human
agucaaaacgaagacacuuuugaauacuuaguguauuuaucugugggaguuguuuggauu

SEQ ID NO: 4128926 - RNA, 61 nt, Human
agucaaauaucuuaaaaggcuaaagugaaauugucaucucguuuguuucugauauuugacu

SEQ ID NO: 4128927 - RNA, 76 nt, Human
agucaacagcaaauucuagcaugaucuugauguucauggucaagauaugugccaauuguuauaauaugcuguugcu

SEQ ID NO: 4128928 - RNA, 64 nt, Human
agucaacauuuucauuagcuauuguuaauguuguuguuaacaauggaguuuugagaaaggggcu

SEQ ID NO: 4128929 - RNA, 80 nt, Human
agucaaguaugacaccauugcuagaagcuuucuauaacccaauguaagagaugcaggguacauggaaucaugauuugacu

SEQ ID NO: 4128930 - RNA, 60 nt, Human
agucaauuucagaucaaaauuccuucuaccuacaagggucugagguuucugaagugggcu

SEQ ID NO: 4128931 - RNA, 74 nt, Human
agucaauuuuauuuuguucuggagagcguguauuuuaaaacccguuugcuuuuccuuaacuguuaagauugucu

SEQ ID NO: 4128932 - RNA, 63 nt, Human
agucacaauaccgugugucaguauguguuucuccacagcuaugauaauuucgguauuugcacu

SEQ ID NO: 4128933 - RNA, 65 nt, Human
agucacacagacauaaaucaccaaaccauugcuguggcuacagugcuuuaugaucugcugucccu

SEQ ID NO: 4128934 - RNA, 61 nt, Human
agucacacagggccuccaaaucagaaggguacugccucugguuuaauacucugcuguggcu

SEQ ID NO: 4128935 - RNA, 77 nt, Human
agucacaggggacuguacgucauugaaggccauuuguaacaaccuggcaagguggcguauggaaauacccugcgauu

SEQ ID NO: 4128936 - RNA, 55 nt, Human
agucacauagaaguggguuuaaaugucaguugaguaacucacuugcugugugacu

SEQ ID NO: 4128937 - RNA, 68 nt, Human
agucacaugcaguuuuccagcagucuguuauugcauaaauccagacaggcugcugaagugugugugcu

SEQ ID NO: 4128938 - RNA, 65 nt, Human
agucaccagguuuuagagaccugcuaaaaggauggcaauguggucuaucugcaaucugaguuauu

SEQ ID NO: 4128939 - RNA, 59 nt, Human
agucacuuccagacaccugccuggugcccaggugugcacugaggcaggcuggagugacu

SEQ ID NO: 4128940 - RNA, 61 nt, Human
agucagaaguugcuuccaggcugauucuaaauaaaucuaccagggaaaaucaacuucuacu

SEQ ID NO: 4128941 - RNA, 60 nt, Human
agucagaauucgaucccaggucuaccagacaucaaaaccugggcgcuugaccucugcacu

SEQ ID NO: 4128942 - RNA, 65 nt, Human
agucagacagaaggaaggccaacaucugacugagugcagaugcuggcugcuucuuucucuccacu

SEQ ID NO: 4128943 - RNA, 65 nt, Human
agucagacugacugcaguguggucauuuuucuaacccauaacugcucacacugcagcagucugcu

SEQ ID NO: 4128944 - RNA, 111 nt, Human
agucagaggauucaaagucccauuauuucuggcuuugagggugaugggaauuagccuagauuuaucgccucucagagccaguagugaaaugaaggccuuaauccuaugacu

SEQ ID NO: 4128945 - RNA, 91 nt, Human
agucagcguauauuuuaaguguuuaaauuauuugcagggauuuuugacagucuaaaauugcaucuugagcacuugugauaaucgcugugcu

SEQ ID NO: 4128946 - RNA, 56 nt, Human
agucaggagauauuuugauauguuuauuucaaaucaaaauccuugucucccugacu

SEQ ID NO: 4128947 - RNA, 85 nt, Human
agucaggcaguagggagaugcuucugcguagauugcccugcaguuccuuucaagaucuacacagaggcagcugucugcucuggcu

SEQ ID NO: 4128948 - RNA, 58 nt, Human
agucagguaggcaucccaggguucaucugucacuagauauggaccugugcccauggcu

SEQ ID NO: 4128949 - RNA, 71 nt, Human
agucaguauagcuaaaaguuugucaauauuuucuaauccuuucagaggacaaauuuuugguuuuauuuauu

SEQ ID NO: 4128950 - RNA, 56 nt, Human
agucagucugcuagccuguggagggaccuucauccagggcaugcucagacucagcu

SEQ ID NO: 4128951 - RNA, 122 nt, Human
agucagugucuguuaugaauucauuggaaauagcaaugugaaaagaggaaugaauauuguagauuucuuucauugucauauuuguaaauuacugggugggauuuauaaacaaauuauugacu

SEQ ID NO: 4128952 - RNA, 62 nt, Human
agucaguuagcguaaucacugggggccuugccgggccuacagcagagcuacacuaacuuucu

SEQ ID NO: 4128953 - RNA, 59 nt, Human
agucauaacuguccugggugagaaaaaauggacccccacucggcuggacacugugcacu

SEQ ID NO: 4128954 - RNA, 80 nt, Human
agucauagcacccaccucgugggguuucagugaaaaaaaagccuggccagcagugaagccugaugcuggugggugugacu

SEQ ID NO: 4128955 - RNA, 73 nt, Human
agucaucugaagcccugucuuauggaagacuaguagcuuguucugcaugacuucaggguguccuaaaaugacu

SEQ ID NO: 4128956 - RNA, 60 nt, Human
agucaucugaccucuucucagaguucaggguuuuaccuucuccaggagguuaguguggcu

SEQ ID NO: 4128957 - RNA, 62 nt, Human
agucaugacaacugcaaaacaugggguaacaauauuuaccuugaaagcugguuguuaggauu

SEQ ID NO: 4128958 - RNA, 79 nt, Human
agucaugagccuuucauucuccagggugacugaguucuugcuuagaaccucauaagaaucgaaaguuauauuuaagacu

SEQ ID NO: 4128959 - RNA, 73 nt, Human
agucauggaauucucuaugcucuguuccaaauaaaggcaguuuccugaggaaaagauauagagcuccuugucu

SEQ ID NO: 4128960 - RNA, 78 nt, Human
agucauuaguuucuucuccuugaaaagcugcaucuuuucagauggcucuuugaaggggaauuuuuuggaauuaacgcu

SEQ ID NO: 4128961 - RNA, 73 nt, Human
agucauugugcuuuuuuucccuggugaauucgagaagaauuuauguucauuuaggaaaggaagaguauugacu

SEQ ID NO: 4128962 - RNA, 111 nt, Human
agucauuuaaccuucuagcauguaugcacauuguagccacacaauuacaagagcuaaagcaacauaacugugaggcuauaucauggcaaagcaacuaaaagcucagugacu

SEQ ID NO: 4128963 - RNA, 69 nt, Human
agucauuucccauucuucauauggcacauggcgcuuucuuuaaugacacaugugggcugggaaaugucu

SEQ ID NO: 4128964 - RNA, 92 nt, Human
agucauuuuauucagugaucuuugguaguacgauaaucaauggaauuuauggugucguagaaaaccaaaaauccauguugaauauagugacu

SEQ ID NO: 4128965 - RNA, 66 nt, Human
aguccacugccccagcuccucgugugucuuuugaacacauuaguauugugcugugcagaaaggacu

SEQ ID NO: 4128966 - RNA, 61 nt, Human
aguccacugcuuauaguagccuaggcuuuugauaagcuauaguugcuucaggcugugugcu

SEQ ID NO: 4128967 - RNA, 82 nt, Human
aguccagacuuuucucuugagcuccuguauucuguuucuuacuugacagcucuaccuggacaucagagagacacauuguacu

SEQ ID NO: 4128968 - RNA, 60 nt, Human
aguccagauguauaaucucaucccugaacauuucugauggugugauuaugacaugugacu

SEQ ID NO: 4128969 - RNA, 56 nt, Human
aguccagggcuuagucagcggggcccggaguggcuucccuggcuggcaucuggacu

SEQ ID NO: 4128970 - RNA, 61 nt, Human
aguccauuaugguggucucauggagugagucuuguuugguccaaguccauuaugguggucu

SEQ ID NO: 4128971 - RNA, 69 nt, Human
agucccucugugugugcaugcaugcgccugugugcaaacauccgcauguguagguacauauagauaacu

SEQ ID NO: 4128972 - RNA, 72 nt, Human
agucccuuccucauuccacuuuagagucuccuucuagcuucauauccucuggggccaagugaggaagggucu

SEQ ID NO: 4128973 - RNA, 68 nt, Human
aguccgcuuugauggaagcagccucaucuggagagccagcugcugugugccucccauuaggguguauu

SEQ ID NO: 4128974 - RNA, 63 nt, Human
aguccguggcaucgucugaggugggguccugcucagguuacuccauaacugaugcccugcccu

SEQ ID NO: 4128975 - RNA, 68 nt, Human
aguccuaauggagccucuguuuaucuggauccugagagucuauguggagcagaggcugccuggugacu

SEQ ID NO: 4128976 - RNA, 58 nt, Human
aguccugugaggggugcagcuuugcaacugcaggccaaagagcaaaccaaacaggccu

SEQ ID NO: 4128977 - RNA, 64 nt, Human
aguccuucaaaggcacgcaguuacaaaaacaccauuuuucuaauuugccuccuuugugagggcu

SEQ ID NO: 4128978 - RNA, 71 nt, Human
aguccuucauuuccugaucucuaaguuccuuuucuacccuacuauuuuaugaguacaaggaaggauggacu

SEQ ID NO: 4128979 - RNA, 62 nt, Human
agucgagaguagagccgugguuuuuggggcagugggaguagugagccuggcuuugcucugcu

SEQ ID NO: 4128980 - RNA, 75 nt, Human
agucgggggaggugugaagcugggcagguggccacguucuuauugucagccagcucgcacucuugccccuagacu

SEQ ID NO: 4128981 - RNA, 71 nt, Human
agucgguguuguuuucagccauuaaauuugcgguaauuuguuacagcagcaguaggaaauaacacaggauu

SEQ ID NO: 4128982 - RNA, 61 nt, Human
agucguacguugaggcaaagaggcugguccuuugaacccucuugccaaucagcuacagauu

SEQ ID NO: 4128983 - RNA, 65 nt, Human
agucgugaagguccuaagguugugaggauucucgugucuucagaaaauuaucacuuguacagacu

SEQ ID NO: 4128984 - RNA, 57 nt, Human
agucguggguacacgggacagcagacguaaaccugagcugucccuggucaccagacu

SEQ ID NO: 4128985 - RNA, 84 nt, Human
agucucacucugucaccgaggcuggagugcaguggcccagucuuggcucacugcagccuccgccucccagguuuaagugauucu

SEQ ID NO: 4128986 - RNA, 63 nt, Human
agucucagcaagcauggcuaguccuuuucuguaaaacguuucuaagccaguugguaagaggcu

SEQ ID NO: 4128987 - RNA, 88 nt, Human
agucuccaaaauccucuccuuugaguugcuuuuauugacuuguauuuuaaugucucaccguaaauguaacuuuagggcaagggagccu

SEQ ID NO: 4128988 - RNA, 57 nt, Human
agucuccagaaauauagcagugaaugaagcagucaaaaauccuugcugucuggagcu

SEQ ID NO: 4128989 - RNA, 63 nt, Human
agucucccuagaguuuucugguuaauuuagcacuuaauugaaaauauaauucuaggagaaacu

SEQ ID NO: 4128990 - RNA, 76 nt, Human
agucucgugcuccauugucuagaacuggcuuacuugcguaccagcaaaccagucacuggaaaaugggaaugggauu

SEQ ID NO: 4128991 - RNA, 72 nt, Human
agucucugccucucagaguggcugugggaauuaaauucagaaaugccagccugccugugaggcuuugagacu

SEQ ID NO: 4128992 - RNA, 59 nt, Human
agucucuuccuucaaggcugguggguaaaauucucccuugugccuuugaaugagggauu

SEQ ID NO: 4128993 - RNA, 101 nt, Human
agcugcuaaaagcuuugauuuuugagaggcuguagauacaaguaguuuuauaauaauaugugaagaucuacaggauuuuacagaguugaagucuuacagcu

SEQ ID NO: 4128994 - RNA, 58 nt, Human
agcugcuagaaaauuagaguauaucaguauaugagauugcuguagguuucguggcacu

SEQ ID NO: 4128995 - RNA, 59 nt, Human
aggggccuggugagagggucacaccagaagggccugguggagccacaucacaggcuccu

SEQ ID NO: 4128996 - RNA, 76 nt, Human
aggggcgccuccagacagcugggugcucuucuggcucaggcugugagucagggauccacugcucuucugugccccu

SEQ ID NO: 4128997 - RNA, 75 nt, Human
aggggcguccugagugaggcugggcagucccuugggccacguccucccagagcccgcccagcuucaccagccccu

SEQ ID NO: 4128998 - RNA, 94 nt, Human
aggggcuuagaacaacagaauauuuuauuuagaucacaauuuuguggauugucuugugauagaugggauauuugugauguuugugauggcucuu

SEQ ID NO: 4128999 - RNA, 84 nt, Human
agggggagcugcccaaguugccuggcuuguagaugggggccucaguccaccagccaggcccaggcugcccuacagcugcccccu

SEQ ID NO: 4129000 - RNA, 81 nt, Human
agggggcaggagagggaguuguuuucauguaacuuuugcuuuuauacagacugaagauauuuccccccauuugugucucuu

SEQ ID NO: 4129001 - RNA, 56 nt, Human
agggggcaggugggcgggaguggugggcucgcccugaccuggccgcugugcccccu

SEQ ID NO: 4129002 - RNA, 86 nt, Human
aggggguagagacaaagucagcucucugaggggucugggaccacccuuugcuccugucccaagcagggcuggccaugacuccccuu

SEQ ID NO: 4129003 - RNA, 71 nt, Human
agggguauugaucugaaggucuugaggcaggaguaaggacucacuguccaugggcgucaggcaggaaaccu

SEQ ID NO: 4129004 - RNA, 82 nt, Human
aggggugaucuggucaggauugaagcccaugaauaccuuccuuccaagguauuucugagaaccaacuuacccagaucccucu

SEQ ID NO: 4129005 - RNA, 67 nt, Human
aggguacagggccugcucuccccagcuucuccccuacaggcccaggacacaggccuugucugcgccu

SEQ ID NO: 4129006 - RNA, 77 nt, Human
aggguaccaggagguguuugcucaagugaggacaugcagggcucacuugagcaaagcucccucaugagucagacccu

SEQ ID NO: 4129007 - RNA, 70 nt, Human
aggguaguauuugucuguccuacucuggggccuuuugcagagucuggugcaugauaagcacuuggucccu

SEQ ID NO: 4129008 - RNA, 100 nt, Human
aggguaugcugcaaaguucagguauuuacuguuuuuucuuacacuuuggcaacaauuuguugagcuucaaaauaugugaauccugcuuuaagauugccuu

SEQ ID NO: 4129009 - RNA, 62 nt, Human
agggucaagucacugguucacgaucacacaucugauaaguguugaagcugggauuugaaccu

SEQ ID NO: 4129010 - RNA, 84 nt, Human
agggucauggaaauggagucugaggggguaagagaacugccugaccccagagcuucugacccucagaucauguccauagaaacu

SEQ ID NO: 4129011 - RNA, 75 nt, Human
agggcuuuccccuagaaauucugauucaguaggucuaaauuagguccuaggaaucuguuuuuuaaaaagagcucu

SEQ ID NO: 4129012 - RNA, 75 nt, Human
aggggacaaagugugcggagcccagggagggccguucgcaugaggcccagucuuggaugcggcacuuggucgucu

SEQ ID NO: 4129013 - RNA, 59 nt, Human
aggggaccagaggcugugcacaauuauggcuugauugucccuaacauuucuguuccucu

SEQ ID NO: 4129014 - RNA, 81 nt, Human
aggggaccagaugccugggccagagaguaagaaaggucauugguauggccaggcugaguaacuccugcccaguggaccccu

SEQ ID NO: 4129015 - RNA, 64 nt, Human
aggggaccuuuuuucugaucugcuguuguaaaaccacagcagcuguggggacaaggguaacucu

SEQ ID NO: 4129016 - RNA, 60 nt, Human
aggggagcaaggccgugguguaauaaucucuuugagauuuaccagaagucuuggucucuu

SEQ ID NO: 4129017 - RNA, 58 nt, Human
aggggagcaccggucgguaggacucuugguugaaucaguccagcuccguguucuuccu

SEQ ID NO: 4129018 - RNA, 60 nt, Human
aggggagcgcuccuguaugugugugugucuugcaucugugcacaugcuguguguuucucu

SEQ ID NO: 4129019 - RNA, 66 nt, Human
aggggaggagcugggggcucacaccucggaucuaacuccagaauugauguccucagccacugcccu

SEQ ID NO: 4129020 - RNA, 94 nt, Human
aggggaggauacagacuugggagggcagagacucagaaacagaauguucgcauuagggacaugguguugcggggagcugccucccccagccccu

SEQ ID NO: 4129021 - RNA, 76 nt, Human
aggggauggacacagugcucuagacggagacuucuuuauucaaaagagaauucucuggcgcgcugugcuaugcccu

SEQ ID NO: 4129022 - RNA, 61 nt, Human
aggggauggagcuggaaggcaguugagggucaccugaugaggccuuuuggugcagugccuu

SEQ ID NO: 4129023 - RNA, 59 nt, Human
aggggaugggagagcauuuagagauagcucuuaucucuuacuucucuucucccuccccu

SEQ ID NO: 4129024 - RNA, 56 nt, Human
aggggauuuuuugugcagguguauuagcuaucuauuauugcauaacaaauuacccu

SEQ ID NO: 4129025 - RNA, 85 nt, Human
aggggcaacuuauuggagaauuggagaaucagaauugcaaguucuuuuugucauugacuuugugccauuuuuauaaaaugccucu

SEQ ID NO: 4129026 - RNA, 57 nt, Human
aggggcaggcugggagucaucagaggccagauggggcucuauccccagcuucccccu

SEQ ID NO: 4129027 - RNA, 82 nt, Human
aggggcauagcacauugauaauuaaggccucccucugugacaaccuacaugcuggagguguaauuacguguaaauagcccuu

SEQ ID NO: 4129028 - RNA, 57 nt, Human
aggggcgagccuggguuuugaaguucaaacuagaguuuaaaucacaacucugccccu

SEQ ID NO: 4129029 - RNA, 129 nt, Human
aggggcuaguggccucuggagaggguauagguggcaggaggucagagaaaauuuuugagaggcugaaucugcagcaaacguuuguccggccccugcucuguaccuuccugggugcuggaacuagucccu

SEQ ID NO: 4129030 - RNA, 62 nt, Human
agggggcuuggagauugucauggacagaaguccauuuagacucucaccuccaccuguccccu

SEQ ID NO: 4129031 - RNA, 84 nt, Human
aggggggcagcugaggauggugagcaggacccaguggacugaccccacugcugucccagccuccucacauacaguuggucucuu

SEQ ID NO: 4129032 - RNA, 103 nt, Human
agggguaccaugguggucccgcagagaacacgggcacaagcaggcuggugguauacguaacuuugcugccuuuguacucugauggaauaaauuaugcucccuu

SEQ ID NO: 4129033 - RNA, 93 nt, Human
agggguauccuggucucagcugccugacuuguccaaggacuguccuaguuuguuaguccaggaaaauaagcuaggucagcuaucauauccccu

SEQ ID NO: 4129034 - RNA, 90 nt, Human
agggguccgggggggcuugucaggggcugagggggcucucccgaagcuccccacacuuucacuccuggcuggcccugggaccuggcccuu

SEQ ID NO: 4129035 - RNA, 84 nt, Human
agggguccguggcugggcuccgagcggcuugcugcucccuccucagccugaggccgccggagcccaggcuagacgcgcuccccu

SEQ ID NO: 4129036 - RNA, 98 nt, Human
aggggugccuugggugguggcaggaagaggagggugaacuucagugacucuccccugagcaguucccuucuuuuccagcugcccuuagcuggccccuu

SEQ ID NO: 4129037 - RNA, 72 nt, Human
aggggugcuggagccggaccagggacgguggcuggauagggucaccagcuggucagggcuuuucuaauuccu

SEQ ID NO: 4129038 - RNA, 90 nt, Human
agggguggggcuucaccagcagcuuucaccuccccgccuggaagcuucucucuacugcguggggagcugugacuacaggcucccaccucu

SEQ ID NO: 4129039 - RNA, 62 nt, Human
agggguuugugcuucaagacuugaucacuggguuuugugguuguuuuaaggcacaggccuuu

SEQ ID NO: 4129040 - RNA, 68 nt, Human
aggguaagacauagauuucucaugacccugucaagggcugcccuuaggagaagcuauguaacagcuuu

SEQ ID NO: 4129041 - RNA, 74 nt, Human
aggguaauuaaggguuccuuuugauagagcucagaaugcugaacuuauauucaaacagcucaagaaguuacucu

SEQ ID NO: 4129042 - RNA, 85 nt, Human
aggguacaaguagcucagguuuucuggcauuucugaaagaaucuugguuaugauguaauaggaggcuuaaagcugcucagacccu

SEQ ID NO: 4129043 - RNA, 62 nt, Human
aggguacagucaaugagugagugaaugaaugaauuauacgcuauugcaaauggcuggucccu

SEQ ID NO: 4129044 - RNA, 74 nt, Human
aggguagauauugcauagaaaucaucaggacugugguuuauguuuaauuugaagucuucaugauuucucucccu

SEQ ID NO: 4129045 - RNA, 58 nt, Human
aggguagguguaagauagcccuguagaaccaaaaguggguuucuugcuucugaucccu

SEQ ID NO: 4129046 - RNA, 63 nt, Human
aggguaucaguagauaaacggauugcauaaaacuaugugcaauuauagcucuucugauauuuu

SEQ ID NO: 4129047 - RNA, 89 nt, Human
aggguaugacauguuuugcuuucuggauaagcagggucucucuuaaauaugaagauggcuccaguguccagagggagacuaaaaucucu

SEQ ID NO: 4129048 - RNA, 79 nt, Human
aggguauguguccuuauaagaagaagagacaccagagaucucugucugccuugugagggcacagcaaaaacucaacccu

SEQ ID NO: 4129049 - RNA, 76 nt, Human
agggucagggagugaguauuuagugagccugcucggugcaccaacccacuuaauaugcuucaucuccugggacccu

SEQ ID NO: 4129050 - RNA, 115 nt, Human
agggucagggggaggccagagcaauuagccuggcugaggccucugcuaacucagaaacguaagugggggauugguccaggccucacuccagggcucuggccucgagccugacccu

SEQ ID NO: 4129051 - RNA, 78 nt, Human
agggucuacaggcuggggacccugcgggcuggaugaggacccccucacuggucuuuggcuucucaggcuggggacccu

SEQ ID NO: 4129052 - RNA, 82 nt, Human
agggucucugucacccaggcuggagugcaguggugugauggugcaaucacagcucacuguagccucgaccucaagugauccu

SEQ ID NO: 4129053 - RNA, 61 nt, Human
agggucugguguagaaguucuccacauucccuugcaacaugacucaucuacuccagacccu

SEQ ID NO: 4129054 - RNA, 86 nt, Human
agggucuugcucuaucacccaggcugaagugcaguagugugaucccaccucacugcugccucagcuuccugggcucaagugauccu

SEQ ID NO: 4129055 - RNA, 130 nt, Human
agggugaggcaaacgaggugccuggggucagcguugaagggcguacucacucucagguuccggcaugugguccccugagagugagugccuccuuaaauuuugugcccuaggugccuccuagcuucacacu

SEQ ID NO: 4129056 - RNA, 63 nt, Human
agggugaguccaguggucugaucuccaucuggagacaccuucagaaugcacugaauuuacccu

SEQ ID NO: 4129057 - RNA, 73 nt, Human
agggugauaaaguuuaaaaggguguuugcaucaagagugguuauuucaauuugcccuguuaaauuuucaccuu

SEQ ID NO: 4129058 - RNA, 73 nt, Human
agggugauuuguucauggccccaucuugguguccagucuggccuugaaagggggucuuggaacagguggcccu

SEQ ID NO: 4129059 - RNA, 80 nt, Human
aggguggaagaggaaaagcuucauuucaacucaggggucuuagaaggcuuuuaggaggaaagaagauuugaccuggcccu

SEQ ID NO: 4129060 - RNA, 56 nt, Human
aggguggggaggacgggugaccaagcgcagacgugggugacacguggccccgcucu

SEQ ID NO: 4129061 - RNA, 78 nt, Human
agggugguagggacacuaugcagaaaggcuuggguuaaugagcacuuucuggauugagugucucuccugauuaacccu

SEQ ID NO: 4129062 - RNA, 87 nt, Human
aggguggucuggagcagcuuggaggaggaucuaagagucucuggauuggugaaaucauagguccuccucaggcgaagccuucacuuu

SEQ ID NO: 4129063 - RNA, 116 nt, Human
aggguguuucucagccccaagcaggccugugccuuaacccuuuaggccccucaccaaggccucagggggagaggccagcucacccugcugcccucaggggcccccagaaggauccu

SEQ ID NO: 4129064 - RNA, 62 nt, Human
aggguuauguagaaaagcaguuuuucaaugcugauuagacuggcuugcuuuacaaggacucu

SEQ ID NO: 4129065 - RNA, 63 nt, Human
aggguucuuagagggugggcacgugauggaucacaaaagaaccaccauucucuccucuucccu

SEQ ID NO: 4129066 - RNA, 62 nt, Human
aggguuguauccucagggccuagcauaguggcugguacauaauagguccucaggaugacccu

SEQ ID NO: 4129067 - RNA, 72 nt, Human
aggguuguggaaagaggugaaaguuauucauuuaugcuuuuauauuugaaaccuuguacccucccacacucu

SEQ ID NO: 4129068 - RNA, 128 nt, Human
auaaaccugucuugacacaucauuauugcccagaguccauaguuuaccuuaggguucacucuugauauuguacauucuguggacuuggacaaaaguauaaugacauguauucaccauuacaguauugu

SEQ ID NO: 4129069 - RNA, 87 nt, Human
auaaacucucucuugcugucaaagcaggguagggaugaagagagaauauucccugcuucccugaaggcacaggagaugugaguuugu

SEQ ID NO: 4129070 - RNA, 57 nt, Human
auaaagcuuugaaauggagauaacucccaccauaccugucuccuauuauagcuuugu

SEQ ID NO: 4129071 - RNA, 67 nt, Human
auaaaguagccacuggaaagcugccuaauaaugugacacagacaaugauuugcagugguuccuuugu

SEQ ID NO: 4129072 - RNA, 58 nt, Human
auaaaguccucuuucacaaacagcuuggcaaacugugcaagucaaagaugggcuuugu

SEQ ID NO: 4129073 - RNA, 67 nt, Human
auaaagucucauggguaaaugucuagaaaacaauccuuauugcagcaauguuuacccaggauuuugu

SEQ ID NO: 4129074 - RNA, 87 nt, Human
aggcaaacuguuuaaagucuucucaccauagcaaaggucagugccuccauaaagugggagaagacguacuuuagacauuuuauuccu

SEQ ID NO: 4129075 - RNA, 67 nt, Human
aggcaaagaaaagcuguuguauggcccuuggcauaucuguuagccaaggccacaaacagccuggccu

SEQ ID NO: 4129076 - RNA, 56 nt, Human
aggcaaaucugagacauuuaaacauauuucuuaauuugaauuacuuagguuugcuu

SEQ ID NO: 4129077 - RNA, 121 nt, Human
aggcaagaaggagaugagggccagcaccccagagccagguuuuaguuuaaauugggcuucugaauccaauacuaaauugcaaccaggucucugucuuuguuguuguuuauuuucucugccu

SEQ ID NO: 4129078 - RNA, 68 nt, Human
aggcaaucagaaaauucaguggaauuuuaaagagggaaucucacucaaagaauucucuaaaauugccu

SEQ ID NO: 4129079 - RNA, 58 nt, Human
aggcacaaagacagaaaagcacugcccuuuugcggggcuuuacuaggucguugugucu

SEQ ID NO: 4129080 - RNA, 55 nt, Human
aggcacaguggcccuguuugggugaucucaccuggaaugcagucacacugggcuu

SEQ ID NO: 4129081 - RNA, 65 nt, Human
aggcaccucagcugagccuggguauaacaggcaaacccagccauucagugacugaggaacugucu

SEQ ID NO: 4129082 - RNA, 58 nt, Human
aggcaccucuuaggcugcuacugagcucuugaggaaacaacagcggccagaggagcuu

SEQ ID NO: 4129083 - RNA, 59 nt, Human
aggcaccuggccaguugucuugcuuuugucuucucuagcaaccagcugcuggguugucu

SEQ ID NO: 4129084 - RNA, 76 nt, Human
aggcacuaccuggaauuauauaaagaaugacaaagaugcgguuauccauuuauuuucuaggcaaguuaguuagccu

SEQ ID NO: 4129085 - RNA, 63 nt, Human
aggcacuaguuuauuacaguuccacuguguuacagcaguguuaucagaugacuaguaagaccu

SEQ ID NO: 4129086 - RNA, 82 nt, Human
aggcacugaaauguugagguuucgagguauaguaaguauacaaugcacuucacuuggaugccuuuucauuuuuaggcagccu

SEQ ID NO: 4129087 - RNA, 63 nt, Human
aggcacuucucaaauucaugccuagacauucaaagaguauggcaggaaggagagaggcagccu

SEQ ID NO: 4129088 - RNA, 101 nt, Human
aggcacuucugcauugggcugggucugucucaggauuguccagacaaaggauaugggcauauuuccaggagaccagauguaggcccaaugugagauagccu

SEQ ID NO: 4129089 - RNA, 58 nt, Human
aggcagaaaacaauaaccauuucaaggaucacuuaaggaauccugguguuuucugccu

SEQ ID NO: 4129090 - RNA, 56 nt, Human
aggcagagaacaugcugggcagaggagacaaggucaggucagccuguugucugccu

SEQ ID NO: 4129091 - RNA, 78 nt, Human
aggcagagccuggcucugguucccucagcucacugagguaugaguuuacaggggacagaggccauguuagcuuugucu

SEQ ID NO: 4129092 - RNA, 56 nt, Human
aggcagcaaagaaaugaugcuguccacagaacaaacagcagccucuccugcugccu

SEQ ID NO: 4129093 - RNA, 55 nt, Human
aggcagccaaucagaggcugacucacuccacugaguccucuucuaaggcugaccu

SEQ ID NO: 4129094 - RNA, 60 nt, Human
aggcagcuuacaccccccaagauucuggaccuccuccaggacugcauguggaaguugcuu

SEQ ID NO: 4129095 - RNA, 73 nt, Human
aggcagcuucuagaagcugaaaagggggaaggaaacagcuucuucccugaagccucuggaagggaguuagccu

SEQ ID NO: 4129096 - RNA, 97 nt, Human
aggcaggaagaucacuucagcccaggagguugaggcugcagugagcuaggaucacaucacugcacucaagccugggugacagagugagacccuguuu

SEQ ID NO: 4129097 - RNA, 97 nt, Human
aggcaggagaaucacuugaaccugggagguggagguugcauugaucugagauuaugccacugcucuccauccuaggugacagagugagacccugucu

SEQ ID NO: 4129098 - RNA, 98 nt, Human
aggcaggagaauugcucgaacccggaagguggagguugcagugagcugagauccggccacugcacuccagccugggggacaacagcaagacucugucu

SEQ ID NO: 4129099 - RNA, 130 nt, Human
aggcagggacacaaccucucugggccucuaugcuguucucucucgaaugagagcgcugcacuacacaagcugcagugacacggagagacagcauggcagagcuaagacgcagcaggcguguggcccuccu

SEQ ID NO: 4129100 - RNA, 62 nt, Human
aggcagggaccaguuguuuucuuuaagaauggugaaaacaugaucauggcuaguccuugcuu

SEQ ID NO: 4129101 - RNA, 66 nt, Human
aggcaggggccaggcugucugcugucagaggacgaagccugcagccuacugcccggaccccggccu

SEQ ID NO: 4129102 - RNA, 67 nt, Human
aggcaggguccacaccugggaaagauuaaggugccaucugucccagacauaaguggacauaccuccu

SEQ ID NO: 4129103 - RNA, 66 nt, Human
aggcagggucuugcuauguugcccagauuggacgugaacuccugggcucaagcaauccuccugccu

SEQ ID NO: 4129104 - RNA, 56 nt, Human
aggcagggugaugauaaugauuugcguaaguauucauuggcaggucauguugaccu

SEQ ID NO: 4129105 - RNA, 66 nt, Human
aggcaggugaaucacuugaguccaggaguuugaggccagccugggcaacauggugaaucccuaucu

SEQ ID NO: 4129106 - RNA, 60 nt, Human
aggcagguuucgggaagggggguggccaggggagggccaaaccccuuguguaacuagccu

SEQ ID NO: 4129107 - RNA, 116 nt, Human
aggcagucagucugaugccagagaccacauucuuaauugccaugcuguauuaacuccuaaaauuaaaccuagggcaugaggaugguugcugcauccaguacaaaugcugagggccu

SEQ ID NO: 4129108 - RNA, 55 nt, Human
aggcagugaugagucaugaauauuuccauucauguuaacaagcuucucauuguuu

SEQ ID NO: 4129109 - RNA, 69 nt, Human
aggcaguuuauccccagagccuggacaccuaaacacuauuugucauguugcucugggugguaaaugacu

SEQ ID NO: 4129110 - RNA, 63 nt, Human
aggcauaaccuuuuaucuggaucucccacucuuccuagccgauucagauuaaauguucugucu

SEQ ID NO: 4129111 - RNA, 74 nt, Human
aggcauccagcuacaaugaccaaaauguuuccagcuugcaaguguaucugaaucauggucauuaguuuaugcuu

SEQ ID NO: 4129112 - RNA, 89 nt, Human
aggcauccuucaacuuagaagucagcuccagagggaacaccaggacauuugcucuaguuuuagcuugaguugcagaagagaaggauccu

SEQ ID NO: 4129113 - RNA, 83 nt, Human
aggcaucuuguuccgguagagacauguugguuggggacacuccuagcccacuguuuucauuucucuguggagcaccccugccu

SEQ ID NO: 4129114 - RNA, 82 nt, Human
aggcaugaacuuccacauucucuguuacagauaaaguuuguccccuuuggcagagaugcuggagcucuuucuucuuaugccu

SEQ ID NO: 4129115 - RNA, 55 nt, Human
aggcaugauacgugcucugugagcucaaacuucacaguugggcuguagcaugcuu

SEQ ID NO: 4129116 - RNA, 58 nt, Human
aggcauggaacauggaauuaaauaugagcuacuagcauuauacauauguucucugccu

SEQ ID NO: 4129117 - RNA, 72 nt, Human
aggcauucucuuacaggaguaucccaaggccagggauuuucccacauguuuuugggccuguggcagaagucu

SEQ ID NO: 4129118 - RNA, 106 nt, Human
aggcauucuucuuuuuguuguauauaauugacacauaguaaucguacauguuugcaggauacauugugauguuucaauacauguauacacugaauaaugauaaacu

SEQ ID NO: 4129119 - RNA, 61 nt, Human
aggccaaaaggaacuuuuugaaggucacaggguuccaucugcaaccuucauuccuuugccu

SEQ ID NO: 4129120 - RNA, 61 nt, Human
aggccaaaccggauggaaaaggaggaaauuccaaagaaggagccuuucuguuuuguggccu

SEQ ID NO: 4129121 - RNA, 61 nt, Human
aggccaagugagcacuaaagcuuccugucauaaugaggaggcagugggggccacuuugcuu

SEQ ID NO: 4129122 - RNA, 64 nt, Human
aggccaauuuaauuagugugggcucuaagguaccuuaaguuagcccuauuaaauuaaaccgccu

SEQ ID NO: 4129123 - RNA, 92 nt, Human
aggccacaaagcuuguuaaauugaagaauuaggacgugaguacagaucuucuggugccaagucaguguucuuuaugacaucugagguggucu

SEQ ID NO: 4129124 - RNA, 72 nt, Human
aggccacaccauuagugauuaaaggcagaauguucauccccagagccccuuucuuuugaucacugugugccu

SEQ ID NO: 4129125 - RNA, 55 nt, Human
aggccacagauacugugaaguaacuuugaguaacuuugugugugugugugugucu

SEQ ID NO: 4129126 - RNA, 55 nt, Human
aggccaccacccuaucuccuggaauaagaaccuccacagagauauuggugagccu

SEQ ID NO: 4129127 - RNA, 82 nt, Human
aggccagaaauuuggaguauguggcuucuccaccucacacaauuugcccuaacuuuaauauauacucagaaauuacuggcuu

SEQ ID NO: 4129128 - RNA, 79 nt, Human
aggccagacgagcugcauuugaauuaccuugugcauaauuaaugaauuaauuaauuacaaauguagacucucauguccu

SEQ ID NO: 4129129 - RNA, 81 nt, Human
aggccagauuuucagaagggaccuugcuuuuggaauuugcagucccagagccuguacuuuucugugaaucuaauacugccu

SEQ ID NO: 4129130 - RNA, 61 nt, Human
aggccagccugcccaaagcugcccuuuaacugaggguugaucuuuaacuggaaggcugcuu

SEQ ID NO: 4129131 - RNA, 79 nt, Human
aggccagcugucacucagaaaggcccaggagcaagucaaggagucuaccaauggccauuucuggugacagcuauugcuu

SEQ ID NO: 4129132 - RNA, 64 nt, Human
aggccaggcugguuccuugaccuucagagcuggggcauccuuuaggugagaccagucauggccu

SEQ ID NO: 4129133 - RNA, 86 nt, Human
aggccagucacuccugccugaugcaucccuguugcacuguucauaaaaccuguaucauauggggaagcuucaaggcuggcaggcuu

SEQ ID NO: 4129134 - RNA, 77 nt, Human
aggccaucuguaauucacuagggucagcgaaggagaccguccccaucuuaugcucucuaugaauucacagcugcccu

SEQ ID NO: 4129135 - RNA, 57 nt, Human
aggccauguccuucucauuguuccguguuugcuacaaagaugauuggaacauggcuu

SEQ ID NO: 4129136 - RNA, 60 nt, Human
aggccauguggccccagagucugugguuuccccacuauacuuuguaggggcccaugguuu

SEQ ID NO: 4129137 - RNA, 86 nt, Human
aggccauuuucacgucuuuugugauucuucaguuacuucaggccaucuggauguauacgugcaggucacaggugauaugauggcuu

SEQ ID NO: 4129138 - RNA, 57 nt, Human
aggcccacaguggcucccgcggccugucugccggcuggccgacugccuugugagccu

SEQ ID NO: 4129139 - RNA, 88 nt, Human
aggcccaggguggcaagggccagaggccauccuccugcugcccugcucuggggcagacaugggcuccucggccugcguaccugggcuu

SEQ ID NO: 4129140 - RNA, 55 nt, Human
aggcccauaguagcucugggcaggaagagucccuuuggagcauaaacuauggccu

SEQ ID NO: 4129141 - RNA, 75 nt, Human
aggccccagcaauagauugcgagucuagauucaacaaacucuugccaguuuccucugacucacagccuggggccu

SEQ ID NO: 4129142 - RNA, 68 nt, Human
aggccccugcugugaccggggagcaggcccggguggggugucucucccuguuuuacgguugagggccu

SEQ ID NO: 4129143 - RNA, 67 nt, Human
aggccccuggcagugaccgguucuagagcuuuucccuggagccucuggagugucuggccaggguucu

SEQ ID NO: 4129144 - RNA, 97 nt, Human
auaacauucuuucauaucugaaaugaggcuucuguucacucacgcuggaccccugcccagcaguguuuuagccauuucugugugaaauguauguugu

SEQ ID NO: 4129145 - RNA, 56 nt, Human
auaacauuuucuuugcugugugcguuacacacugcacagugaauuucaaguguugu

SEQ ID NO: 4129146 - RNA, 60 nt, Human
auaacauuuugacaacuggugauccaggcacaguggaggauuucauugucagaaucuuau

SEQ ID NO: 4129147 - RNA, 75 nt, Human
auaaccgaauucugucacuuaggaggucauaaaaucagacacagacaugugacacugaauggcagaacuaguuau

SEQ ID NO: 4129148 - RNA, 100 nt, Human
auaacgggauaugucuguuacuucuugaaaauagccauguacauauguacaauauauguauuacuggguuuucaaguuacgaaccugacuuuuacguuau

SEQ ID NO: 4129149 - RNA, 57 nt, Human
auaacucuguucuuccuucucucgagcauucaugagaaggugggccugcugaguuau

SEQ ID NO: 4129150 - RNA, 87 nt, Human
auaacuuuucuuucugcuuuaggcaguuccugcagauccauuuauuaaagauagaaucuggcucaccuggguaaauaguugaguuau

SEQ ID NO: 4129151 - RNA, 63 nt, Human
auaagaagguaguuuccaagucacuggucugugaacacugcuugugauuaauuacccuuuuau

SEQ ID NO: 4129152 - RNA, 66 nt, Human
auaagacaaggucauaguggauuaguaaacauagccauguuuauccaacaugacuuauguccuuau

SEQ ID NO: 4129153 - RNA, 74 nt, Human
auaagauuucagggagggacaauugucaccuuugaagaaucaaagugaccaaugggcuucccucaguauuuugu

SEQ ID NO: 4129154 - RNA, 62 nt, Human
auaagcuguguaaguugcuugguucuagcuauagacgagugauuccacacuugcacgcuuau

SEQ ID NO: 4129155 - RNA, 64 nt, Human
auaagcuuccaaagggcucuagacucagcagugaaauugucgccugccuugcccugaaguuuau

SEQ ID NO: 4129156 - RNA, 86 nt, Human
auaagggacuugagcaucugaggauuuuccucugggagaaggagguauccuggaggcaauccccugaggauacuuuucuacuuugu

SEQ ID NO: 4129157 - RNA, 78 nt, Human
auaaguagaaguuaggaaauaggaauauuuacuugguguaaaacaguauucauguuguccuuugcguuucugucuugu

SEQ ID NO: 4129158 - RNA, 80 nt, Human
auaagugauguuagaaucucugaauguggucuugggaaucuguaucuuaaacccugcagaugaaucuaauguacauuuau

SEQ ID NO: 4129159 - RNA, 74 nt, Human
auaagugauugcuggcauuuuuaagauguguuuaagaugcuuucauaucucuauaauuccagcaugauauuuau

SEQ ID NO: 4129160 - RNA, 78 nt, Human
auaagugcucaugaggcuuaauuaucagugaaaugucuugcuuuagauuucacagcuuaauaaggcucagaggcuuau

SEQ ID NO: 4129161 - RNA, 129 nt, Human
auaaguuuucuuuaagugcaccccuuccaaaaaucagauaacugaaauaucauaccauccaaggaaggaauugugcuuuuaguuuagaaguuuaaguuuugguuggaggucuacugguaaugaacuuuu

SEQ ID NO: 4129162 - RNA, 81 nt, Human
auaaguuuucuuucuuuacaguacuugcuuuuaaugugucuucugcuuagagcugguauuucugaaggaaagaaaguuuau

SEQ ID NO: 4129163 - RNA, 68 nt, Human
auaauaauaaccuuggcuaguauugugccuugauggaaaggcacaauaacagccaagguuauuauuau

SEQ ID NO: 4129164 - RNA, 80 nt, Human
auaauaauauucuauauuggaagugagaaauucugccaagaagucucaugcugccaauagccuacaaagaaugaaauuau

SEQ ID NO: 4129165 - RNA, 81 nt, Human
auaauaauccuccgcauucugagucacucuuuagcacacagcagaugugugcuuacucagaguuuggauggucuugguuau

SEQ ID NO: 4129166 - RNA, 91 nt, Human
auaauacaaaugcaggacauaagcaucgacacaagcgacuucauuugccauuggugucucugugcauuugugcuucuugucuuuguaauau

SEQ ID NO: 4129167 - RNA, 62 nt, Human
auaauaugauuaguugaggcagacuuacagucuuaaguuagcuucagaaauaucaucauuau

SEQ ID NO: 4129168 - RNA, 55 nt, Human
auaaucaaaguccuaugacaucccagagacagggugaucuuuagguugugguugu

SEQ ID NO: 4129169 - RNA, 64 nt, Human
auaaucucaggguaaugaaagacgaaucuacucuggaauugccuucauauacaccugauauuau

SEQ ID NO: 4129170 - RNA, 66 nt, Human
auaaucugguuuggggauccuugugacuguuucaagugucuacauuuauucucuaaaucaguuuau

SEQ ID NO: 4129171 - RNA, 103 nt, Human
auaaugaugaugauaauaaccagccuucaguaagggcuuagcagguggccgggaacugugcuaagugaacccuaugagguugguacuauugucuucccauuau

SEQ ID NO: 4129172 - RNA, 65 nt, Human
auaauguagguauguguauuuauauguuaaccuauuaugcuauauaugcauguaucauacauugu

SEQ ID NO: 4129173 - RNA, 74 nt, Human
auaauguauauuagauguaacuuuggaugagugugaguacccuccacuuaagcaguuaauuuaucuuacauuau

SEQ ID NO: 4129174 - RNA, 78 nt, Human
auaauuaaucagagacaaugauuucuuuauggugagccccacuaucucacuggguauuaucuuugucucuguaguugu

SEQ ID NO: 4129175 - RNA, 111 nt, Human
auaauuauaagcacacacuuuuuucuacaaguuuguguuaaauguuaaauucauaugaauguggaugauguauaacuaaggggaauaaaaaagugagcugcugaugaguau

SEQ ID NO: 4129176 - RNA, 67 nt, Human
auaauucaugggccuuucaccuuggugaaauuuccacaaguucacugauguaggccuauugagcuau

SEQ ID NO: 4129177 - RNA, 73 nt, Human
auaauucucauucuaaggaagagccaguaggugaauugaaucucaccagcugccuuuucuuaguagggauugu

SEQ ID NO: 4129178 - RNA, 68 nt, Human
auacaaauccucugggaugguaaacacucuucaguauuuccaggcuauccuagggugaagauuugugu

SEQ ID NO: 4129179 - RNA, 63 nt, Human
auacaagacaguaggaaacugaacaacuaaauuagagggauuuuuuucacugcuguuuugugu

SEQ ID NO: 4129180 - RNA, 115 nt, Human
auacaaugcaugugauacaugucuguaagugagauuauauguacgggauaguauguucuauauguacucuaagucuuauauacagaugccuuuaucuacagaugccuaauuguau

SEQ ID NO: 4129181 - RNA, 66 nt, Human
auacacacaaguucuaaagauugcgcauaagcuaaugugcaaguccagaaagaacucuguuuguau

SEQ ID NO: 4129182 - RNA, 90 nt, Human
auacacagcacuguaccauaaugacccuagaccaucaagugcucuagaccaucaggugcucuagggucauuaugguacaguguuguguau

SEQ ID NO: 4129183 - RNA, 82 nt, Human
auacacaugcaaaaauauauuuaugauuaucuuucuaaauuaggaaaguaagcuauucauauuaugguguuugugugugugu

SEQ ID NO: 4129184 - RNA, 66 nt, Human
auacagccaagauauauguaugauuccauuuguauaaaaagagcauauauguauguuuguaugugu

SEQ ID NO: 4129185 - RNA, 78 nt, Human
auacagcuagucaccagcuacaggacagcuggagccagggggcuauugcuggucacagucgcuggugugugugugugu

SEQ ID NO: 4129186 - RNA, 62 nt, Human
auacaguauaacuaauaaacccugaaauagcauuaguuuugggggggaguaugugcaugugu

SEQ ID NO: 4129187 - RNA, 81 nt, Human
auacaguauuuugauuucucauagaugcuauagacagcagacucgucucuucuggccaucuuugagauuucaauucugugu

SEQ ID NO: 4129188 - RNA, 60 nt, Human
auacaguuagaaaaaaagccuuuucucuagguagguaguuauguuuuuuucugacugugu

SEQ ID NO: 4129189 - RNA, 99 nt, Human
auacauauuuucugaagcaccauguuaggaguuggggaguuacugauuaguaaaugcagcaauggucccugcccucuuggaauuucagguccagugugu

SEQ ID NO: 4129190 - RNA, 91 nt, Human
auacaucaugauuccauuauacuucugauucaaaaucaggauuacaguuuucugugucuuugcuucacaaguaugguucugacuguuguau

SEQ ID NO: 4129191 - RNA, 65 nt, Human
auacaucuaaagugucauaaguagcuuuauucuagggcugcagucuagucacuuuaaaaaugugu

SEQ ID NO: 4129192 - RNA, 67 nt, Human
auacaugaauauacauccugauggcaauaugaaaugaaauacaggccucuuguguguaugcaugugu

SEQ ID NO: 4129193 - RNA, 55 nt, Human
auacauggaagaugcuuagcacaugccuggugcagaguacacucuuacuaugugu

SEQ ID NO: 4129194 - RNA, 56 nt, Human
auacauguguauguguuuguguguauauuugcaccugcauccauauaugcaugugu

SEQ ID NO: 4129195 - RNA, 84 nt, Human
auacauuugcuucacucuuccuuuccuuccagcccuuaaggagguuauugucuaggaggagguaagaaaagcauaaaaaugugu

SEQ ID NO: 4129196 - RNA, 72 nt, Human
auacauuugcuuguaaauguaugccuuauuacaaugacuuauaguguaaggugcuuaaacaagcaaacauau

SEQ ID NO: 4129197 - RNA, 59 nt, Human
auaccacagcaaaugaggccaacucaaccccugagaugacacuaagcauguugugguau

SEQ ID NO: 4129198 - RNA, 65 nt, Human
auaccaucacuagaggaagcugcuuccuucagagcacagugcuuuuguuccucuccuggugguau

SEQ ID NO: 4129199 - RNA, 69 nt, Human
auaccaugaugggguucagggaaucucuacaucuaucaacuugugagcaguugugagccccaaaggugu

SEQ ID NO: 4129200 - RNA, 81 nt, Human
auaccauuuuuauugauucuaagaugcauuuugcccaacauuuaaaaaucucugaaauuggggugugucugacaaugguau

SEQ ID NO: 4129201 - RNA, 83 nt, Human
auacccuguguugcugcuagugagaugcaacugauauuacuuaauuguauaauauucugccucacuacaguugaauaugguau

SEQ ID NO: 4129202 - RNA, 61 nt, Human
auaccuccccuccagcaaaaacauaauuuguugcauagucaaaaugcuggaggcgggguau

SEQ ID NO: 4129203 - RNA, 75 nt, Human
auacgugggcucauggagacuuggcuccaccuugaugacagcuaggaugguaccauuucccaggagugugagugu

SEQ ID NO: 4129204 - RNA, 63 nt, Human
auacgugggcuguggcaucccuccacaguaguggcacugacgcuggagucugagcccagguau

SEQ ID NO: 4129205 - RNA, 79 nt, Human
auacuaagcuuuuucucaaacuaacaaugauuauauuccucugagggcuaugaauauguagaguuugaagguuuuaugu

SEQ ID NO: 4129206 - RNA, 69 nt, Human
auacuacugauugcuuugccaaaaguauacucaccacccauacuauuuguaaagagcaaacgguugugu

SEQ ID NO: 4129207 - RNA, 84 nt, Human
auacuaucugguuugugcucuucauucucccaaauaggaaauuuuccugagcaaggagagucaagaggauggccucagauguau

SEQ ID NO: 4129208 - RNA, 78 nt, Human
auacuaucuuuauacauuuguagcuauuuacuguauguacauuuguccgucgugcggccuaagcauagauguaaguau

SEQ ID NO: 4129209 - RNA, 129 nt, Human
auacucacaaaaagacugaagauguaacagauggugccuugggauggguggauguuauggaugcagaacugucaacacaccuaucucaauuccauuuuaacuuucacauuaugucucccuguggacugu

SEQ ID NO: 4129210 - RNA, 91 nt, Human
auacucguuuaugauaucucuguucucuaugugcaauuucaauuuacacagagaaggucucauucgcauggagaaggaguugcguggguau

SEQ ID NO: 4129211 - RNA, 64 nt, Human
auacugugugugcucaaggaaugaauggggcuucauaaacaucuauuccaagagcuaucaguau

SEQ ID NO: 4129212 - RNA, 129 nt, Human
auacuucagugagauuggaaacuccgaagggauagggacuuuuauuccucucuggccccacauuaucuaggaggaaagaaccccagucaauaccuguucccaucauggucaauuucaaaccaucaucgu

SEQ ID NO: 4129213 - RNA, 71 nt, Human
auacuuuagcuuuauaggaguuuuuaguaugcauaugucuaacuguguauuccuauauaguaauauagugu

SEQ ID NO: 4129214 - RNA, 107 nt, Human
auacuuuguguuuucacgucuucaauugcauuugaugggaccagacaugagcaccaaaccaaagcuuaccaaucagaugcagaugagaaacuggaacugagaaguau

SEQ ID NO: 4129215 - RNA, 79 nt, Human
auagaaauccaacuguguucuccaacuguagauuuugcaugguagagguucaguaaggaauacugaguaggauuuauau

SEQ ID NO: 4129216 - RNA, 70 nt, Human
auagaagauugggaaugacacacagcuuauauaauuguguguacugcuguaaauauucuucaucauuuau

SEQ ID NO: 4129217 - RNA, 56 nt, Human
gaaggaggucugauacaauauggucauguaagaugaccucugaucaguccuuuuuc

SEQ ID NO: 4129218 - RNA, 73 nt, Human
gaaggauccucucucguggcuucacuuguuuucucuggaagcagacaaggcgugacggagagaggaacucuuc

SEQ ID NO: 4129219 - RNA, 58 nt, Human
gaaggauggauaaaacauuaaugggcaaagaucuauuuggaaaguuuaucuaucuauc

SEQ ID NO: 4129220 - RNA, 57 nt, Human
gaaggauggccacagcgcugguuccugucccucugggucucaggcugggccuccuuc

SEQ ID NO: 4129221 - RNA, 56 nt, Human
gaaggcaagugagccaagagaaugcuuuuccacauuccuuacauucauauggcuuc

SEQ ID NO: 4129222 - RNA, 59 nt, Human
gaaggcacagauggcaguccacagcaccuggcugaaacacagauuggccucuugucuuc

SEQ ID NO: 4129223 - RNA, 79 nt, Human
gaaggcagaaaaggcuaauccagagcaacucuugaaagcagccccaaggagucuuccagaaaagccuuggucugccuuc

SEQ ID NO: 4129224 - RNA, 69 nt, Human
gaaggcagcccagagauguuaucuaguaucagaaauuacaguuaaauauuucuacuggguguuucuuuc

SEQ ID NO: 4129225 - RNA, 73 nt, Human
gaaggcaguguccagcuuccuggagucccuuugucuucugcaucucccuggcuccagcagcuggccugcuuuc

SEQ ID NO: 4129226 - RNA, 96 nt, Human
gaaggcaugggguaaugaaaacauauuggcuuagcucugugacuaacaagaaaaguggucacugguuaaguuaaugucuuugggcucuguguucuc

SEQ ID NO: 4129227 - RNA, 60 nt, Human
gaaggccggagagugacagcuuccagaccagagacucugcugcccacucuuccagcccuc

SEQ ID NO: 4129228 - RNA, 62 nt, Human
gaaggccuguguguauacauaaaaauauuaacauuaaauaaaauuuguaugcauaugcuuuu

SEQ ID NO: 4129229 - RNA, 65 nt, Human
gaaggccuuggccuagcccuccagggucccauacuguggaguuuggaggggcaggucuggccuuu

SEQ ID NO: 4129230 - RNA, 86 nt, Human
gaaggccuugguuaaaacauuucagcaccugauuccuggacagcaccagagccauggaacaggcucagagaugcugccuggccuuc

SEQ ID NO: 4129231 - RNA, 88 nt, Human
gaaggccuuuggaaguaaaagauuuuauaggaacaaggaaucaagaaggaugacagaauuuguuucuugagaucuuccccuggccuuc

SEQ ID NO: 4129232 - RNA, 71 nt, Human
gaaggcuaguuuguuucuuggucaagccugaucuuaacagaugagaccauggccauccuaggaaagccuuc

SEQ ID NO: 4129233 - RNA, 62 nt, Human
gaaggcucacggaggucagcgugguggccagagcgaugaguuaccuuacuucugugaucuuc

SEQ ID NO: 4129234 - RNA, 86 nt, Human
gaaggcucugagauuuuagucuauugggaagcuaacagguuagccugccacaguuucauggauucugguaaauuauaugagcuuuc

SEQ ID NO: 4129235 - RNA, 101 nt, Human
gaaggcucuucuuuuggggaaaccugaggaagggcgagaagcucucccugucuccuggaucugcuugcccucuuaggacccuuccccuuuggguuuccuuc

SEQ ID NO: 4129236 - RNA, 55 nt, Human
gaaggcugcgaggggagugccgggugcaguuucacgugccuuccccucagccuuc

SEQ ID NO: 4129237 - RNA, 84 nt, Human
gaaggcugugagaaggggcauugugucuggguuccuccuuaaagcagaucugaggaaaaccuaagccaguagcucccacccuuu

SEQ ID NO: 4129238 - RNA, 58 nt, Human
gaaggcuuagaaacaagggagcugggagaucuguccgggcuuuuggaggaagcucuuc

SEQ ID NO: 4129239 - RNA, 73 nt, Human
gaaggcuuuccuccuggcuugcagacagaugcuuucuugcuguguccucacaugguggggagagagagcuguc

SEQ ID NO: 4129240 - RNA, 58 nt, Human
gaagggaaugaggcuauauaaacaaagugauguugauuuguaaauggcuuuuuccuuc

SEQ ID NO: 4129241 - RNA, 66 nt, Human
gaagggaauuuggaggguuucaccacauagcugcugccuugauggaggcucccucacacuucuuuc

SEQ ID NO: 4129242 - RNA, 80 nt, Human
gaagggagcuugcaggugggaacccagcagggcccuggguguccuugggcacugacagggucccaacugugagcaccauc

SEQ ID NO: 4129243 - RNA, 67 nt, Human
gaagggcaugguaucuauucaggaaugcuccagugagcuuccugaauauaaagacacuagcuccuuc

SEQ ID NO: 4129244 - RNA, 112 nt, Human
gaaggggagggaaggaagagauugaguauuaguguuauguuaucugcuaggagcuaugcuagccagaugcugucacacacacuguuacugaaucccaacuucucuucuguuc

SEQ ID NO: 4129245 - RNA, 130 nt, Human
gaaggggaguaaacacaaccugagguuuauugugaucugauguugucagagccugggcugaagcuaagggcugggcuuauguuugucaagcaaucaggaaaaccucugucuucuucuuucacuacacauc

SEQ ID NO: 4129246 - RNA, 107 nt, Human
gaaggggaguugagauacuugcugucaugauguugauaaauuacuuuaaaauucuucagaauaaaguggaauaugaauguauauagcaaugcuuuuuacuucucuuu

SEQ ID NO: 4129247 - RNA, 86 nt, Human
gaagggguucauuggaggccucagguguuucuggagaaguaaucacucaugauuauuuccuagggaauuugccucccuuucccuuc

SEQ ID NO: 4129248 - RNA, 77 nt, Human
cugugguauuuuaucugacugugguauauuuaacaaauaauguaugcaaacaguucaggugacacauaauaucagag

SEQ ID NO: 4129249 - RNA, 56 nt, Human
cuguggugacaauaguuuuuaaaucuaaucaugauagaagaacuaugugauuacag

SEQ ID NO: 4129250 - RNA, 76 nt, Human
cugugguggcagugagaaggagagguguaggcucuucuuucgugcuuuucuuccucccuccuuucugucucugugg

SEQ ID NO: 4129251 - RNA, 94 nt, Human
cugugguuauuggguugggugauuuugauucuguucaacaacuggaugcuuugaguaaugaacuucagugcauaauuauccagcgaaaucauag

SEQ ID NO: 4129252 - RNA, 55 nt, Human
cuguguaacuucuuuucuuucaucuguugcccagaagaacuauugagguacacag

SEQ ID NO: 4129253 - RNA, 107 nt, Human
cuguguacuucagauguuucaugcuagcauguguguguguguguguguguguguguguguguguguacuguauauauguuccagugugugaaaugucugguggacag

SEQ ID NO: 4129254 - RNA, 56 nt, Human
cuguguagccucaugugggcuuuaauaaauuuugguuaaauaaaugagguugacag

SEQ ID NO: 4129255 - RNA, 59 nt, Human
cugugucaucuaaaaagagagauauuuuccaaggaaguucuaaauuuuggaagaugcag

SEQ ID NO: 4129256 - RNA, 70 nt, Human
cugugucccaguaccuuggguaacugccaucuucaugguuacaucacuauccagggugacugugaagcag

SEQ ID NO: 4129257 - RNA, 73 nt, Human
cuguguccuugugugagaccugauaaccagagccacacuggcucagggccaguucucgcagcaguaagcaugg

SEQ ID NO: 4129258 - RNA, 61 nt, Human
cugugucucuaccuccccaucccuggcuuuuucccugaggaugugguggugagccauuuag

SEQ ID NO: 4129259 - RNA, 60 nt, Human
cugugucugucacagcugagcaaauuuauauuagcagcuaaacugacagaccccacgcag

SEQ ID NO: 4129260 - RNA, 73 nt, Human
cugugucuuuagcaucucaaccuccugaaaguaagaagcuggggaguuggggguagcuagagggagagaccag

SEQ ID NO: 4129261 - RNA, 56 nt, Human
cugugugacccccagugaagccuugcgguaucggggagccauggguggucauggag

SEQ ID NO: 4129262 - RNA, 85 nt, Human
cugugugccagaggcuuucacaagguuaguuccagacuaccgcccacaguugggagcaauuucuugagauaagccuggcuaauag

SEQ ID NO: 4129263 - RNA, 129 nt, Human
cugugugcuccuucucaucuggauucucccuuccugaccacacugccuucugcuccaagucuggccaagcugauuugcauguuuguuugagagggauggaaaaucauuagaguuuagagugguauuuug

SEQ ID NO: 4129264 - RNA, 58 nt, Human
cuguguguagcauauagcaagagcauauaugguaugcaagagcaauaugguaugcaag

SEQ ID NO: 4129265 - RNA, 56 nt, Human
cugugugugcacgugcggggaaauaccauuucauugcuuaucuaguucacauacag

SEQ ID NO: 4129266 - RNA, 62 nt, Human
cugugugugucugcagcauacuauauaaaauaaaggaguuuucagggcugcuggccauacgg

SEQ ID NO: 4129267 - RNA, 58 nt, Human
cuguguuagucucucaagcuacuguaaauuaccagaaacuugaugagauaaacagcag

SEQ ID NO: 4129268 - RNA, 83 nt, Human
cuguguucaauuaagaggcuaaguuacucucucugugggagccuuugaagaucccagguaauggcuucuauaauucuacucag

SEQ ID NO: 4129269 - RNA, 57 nt, Human
cuguguucugaaggagaagagugucaugagauggcccauuugcucacaggacagcag

SEQ ID NO: 4129270 - RNA, 65 nt, Human
cuguguuuccaguucagaaagcaaggaucaucauuuuuccauugcucacuugcuaggaaaugugg

SEQ ID NO: 4129271 - RNA, 64 nt, Human
cuguguuuuaaauggaaauuugacucuguguuugcuguugucaaucuguuccauuagaacauag

SEQ ID NO: 4129272 - RNA, 98 nt, Human
cuguguuuuaguaauucgcagggagacaggcucucucuuuuccuauuauacuuggacagaagagccuuuuaccuugugaaaugaaauuguaacuacag

SEQ ID NO: 4129273 - RNA, 55 nt, Human
cuguguuuuggggaagauggcaagauaaugucuggcuuccacacaagaagcacag

SEQ ID NO: 4129274 - RNA, 57 nt, Human
cuguuaaaagaacaacucggagguaauuggauuugccccugaaacugcuuuugccag

SEQ ID NO: 4129275 - RNA, 85 nt, Human
cuguuaaaagcacugccauccugggugaauauggacuuaaacauuucaaacuuaaaaaggaucaggacagauguuuuacaagcag

SEQ ID NO: 4129276 - RNA, 100 nt, Human
cuguuaaggggcccccucuacuuuaacauggaggcacuugcugugacaugacaaaaauaagugcuuccauguuugaguguggugguuccuaccuaaucag

SEQ ID NO: 4129277 - RNA, 58 nt, Human
cuguuaaguguagauaauguggaaauuaaacauauaauauaucuggugcacuuagcag

SEQ ID NO: 4129278 - RNA, 69 nt, Human
cuguuaaucugcuugcaugaugaauaaaugaauaaacauguaugugaaaucaugguaagcaauagacag

SEQ ID NO: 4129279 - RNA, 112 nt, Human
cuguuaauugaugucaaagcugugucugcugggucuggcacucaugcgguaaagugaaauuuccaaacaaguccagaccccggcagcugguccugaguuuacaaggugauag

SEQ ID NO: 4129280 - RNA, 77 nt, Human
cuguuacaaaggaguagagaaggcuuuucuucuucagucuuaguacagaggcuuuuaaucuuagucucuugugauag

SEQ ID NO: 4129281 - RNA, 78 nt, Human
cuguuacaagaggaagcauugacauaaucuccauuagagcucuauauaggggcuuguuucauugcaaucucuuagcag

SEQ ID NO: 4129282 - RNA, 87 nt, Human
cuguuagcauucccagugccagcucuccccacaucugugcagcuuuuguccuguggcaggggaggauuuggaauggucugcuggcag

SEQ ID NO: 4129283 - RNA, 86 nt, Human
cuguuagcuucaaacauuuaggaggagggagggggaacgcccaauaaaguaauucucuccuauuucagaguguucaaauaugacag

SEQ ID NO: 4129284 - RNA, 55 nt, Human
cuguuaggacaugcauuaggcccuaacccaggggcucugggacauuucuuagcag

SEQ ID NO: 4129285 - RNA, 78 nt, Human
cuguuaucugguaaaagagccacuuaugaccucaggugcuacuuaaccuggggggcaauuguuucuuaggccuagcag

SEQ ID NO: 4129286 - RNA, 67 nt, Human
cuguuauugguaguaaguggaacacacuggguaaauacgucccaaguuauuccuuuacacuauacag

SEQ ID NO: 4129287 - RNA, 129 nt, Human
cuguucauagcaaaacagcugauguucuuuaaaauuagucauuuuuuagugguuuagucauuuauagugguuccacaugacuauaauuacuuaaauauguggcaguauagacagcucuccuaucugcag

SEQ ID NO: 4129288 - RNA, 60 nt, Human
cuguucaugagaugcuccuuguaccuggucaaguaugugucagacugcacucaaggacag

SEQ ID NO: 4129289 - RNA, 67 nt, Human
cuguucaugcugauucuguaugugaucuucgauuaauuugacaguugcauauaaguuagcauagcag

SEQ ID NO: 4129290 - RNA, 80 nt, Human
cuguucauuucugcaggccugaagggagguggggcuaguaagucucagccccuucucugcaagccugcucuaaacagcag

SEQ ID NO: 4129291 - RNA, 63 nt, Human
cuguuccaccucagcaugcucacagagcucggcccugccugcuggcucaguugcugggcacag

SEQ ID NO: 4129292 - RNA, 58 nt, Human
gaaacucucgcauccugggaaccccuucaguucugggcagaccaggagcgugggucuc

SEQ ID NO: 4129293 - RNA, 88 nt, Human
gaaacugggaaauuucccuuaucuugucaagcucaugggacucccaucauuuccuaaccccaaagccaggggagggauucccaauauc

SEQ ID NO: 4129294 - RNA, 59 nt, Human
gaaacuguuucuggcuuuggugcuuuguguacucacuacagccauuuuaccauaguuuc

SEQ ID NO: 4129295 - RNA, 59 nt, Human
gacaguuuagguucaaaucucauaucugucacuuggugacuguuuggccuagaacuguc

SEQ ID NO: 4129296 - RNA, 91 nt, Human
gacaguuucaccagaggccccggggcagagggucuucuccagcucuuccagggcggggcucaucuguuccugggccagagguggaccuguc

SEQ ID NO: 4129297 - RNA, 67 nt, Human
gacauaacagugaaccaugcggacccuuggccuucggggagcuuccugcaggucacugugcccuguc

SEQ ID NO: 4129298 - RNA, 101 nt, Human
gacauaagcuuguacuuuguggaaagagcagagacuuuggaaucagccuagguuugaauucuggcucuucuguuuaucaccuguguaaucuuggauauguc

SEQ ID NO: 4129299 - RNA, 74 nt, Human
gacauagaacagaaacagaugcacaguuccauagacccagaugauuucuguagcuuucugauuuuucucugguc

SEQ ID NO: 4129300 - RNA, 73 nt, Human
gacauagaacuucccagugagcagggucagcuggugcugugccuaauuaacaugcagcagaagucucuguguc

SEQ ID NO: 4129301 - RNA, 60 nt, Human
gacauagagagaguaguagcaucucaccugugguagaggcuucuacugcucacuuauguc

SEQ ID NO: 4129302 - RNA, 58 nt, Human
gacauagucucugucuucauggaguuuuugaucuaauaauggagauugagaugugauc

SEQ ID NO: 4129303 - RNA, 81 nt, Human
gacauauuugggcaugucuguguuaucuguagaauguuuugaaaaugauauucugaguacaacaagauguuuccuuauguc

SEQ ID NO: 4129304 - RNA, 67 nt, Human
gacaucacugauaccuuuauuuucauggauuugaguaugugcaugagaauauuguuuuagugagguu

SEQ ID NO: 4129305 - RNA, 88 nt, Human
gacaucagguagcaguaaugaggagaauagaauuuaguuuaauauugcuauuuuuaaauuccagccucauaauagcucucuuuguguc

SEQ ID NO: 4129306 - RNA, 79 nt, Human
gacaucuaaggaacucuagagccuugaacuugcuuugacaauauggcuucugguucuaauuuggggcuccuuagagauc

SEQ ID NO: 4129307 - RNA, 90 nt, Human
gacaucuucucagcacaggaauaugguggacaagagcaauauggacuccguccuuguggcacuuacauccuaguuugggagugugauguu

SEQ ID NO: 4129308 - RNA, 78 nt, Human
gacaugaaaauaaagcaaucuguuuuugaaacuuuguauuucaaauacuagggggucuauagcaggaauuuguguguc

SEQ ID NO: 4129309 - RNA, 64 nt, Human
gacaugaagggaaaagggcuguguucguguucucuagaggacucuaaccuuucucuuucaucuc

SEQ ID NO: 4129310 - RNA, 63 nt, Human
gacaugaaugaagacuuuacaaugcaaggaugcucaugugcuauugucaaguucauuuauuuc

SEQ ID NO: 4129311 - RNA, 56 nt, Human
gacaugaguaucagaguccuuccauaugagugagaggaaggcuucuuggcucaguc

SEQ ID NO: 4129312 - RNA, 74 nt, Human
gacaugcauggagggaaaaugucagugcauaauguacaacauuucauuuaggauguuuucccucuaugcaucuc

SEQ ID NO: 4129313 - RNA, 72 nt, Human
gacauggaaaacuaacugcuuuuuuaaaggauguuuucacagauaccuguugaaaucagauagauucauguc

SEQ ID NO: 4129314 - RNA, 80 nt, Human
gacaugggagggacaggaggugggacaaagagaagcaggacuuacuggaccaaagccuucugauaucucuuggcauaguc

SEQ ID NO: 4129315 - RNA, 60 nt, Human
gacaugucuauaaaauaauuucaguaaaaaccauuacaugggauuguucugugacauguc

SEQ ID NO: 4129316 - RNA, 56 nt, Human
gacaugucugugcuucuagcugcuaugcauuugagcugcaucucauagaacauguc

SEQ ID NO: 4129317 - RNA, 57 nt, Human
gacaugugucugcaaguugaucuauagagcaagaucaauuauugcaucauagauguu

SEQ ID NO: 4129318 - RNA, 76 nt, Human
gacauguguucugaggcagaugacugcgggacccacgggcuugauugguucucccuguucucaaggacaacauguu

SEQ ID NO: 4129319 - RNA, 66 nt, Human
gacauguugaagaauauuuggaaagaaaacaguuugacuuuguauccaaauguuuuaugacauguu

SEQ ID NO: 4129320 - RNA, 78 nt, Human
gacauuacaguuuaguccaagccagaagguaauugggucaaccacaccuggacucugaggauuuuaaauucuaguguc

SEQ ID NO: 4129321 - RNA, 73 nt, Human
gacauucccagguacaucauuagccaacugggacucaauaaggaucccuuggaaggugagucccuggguuguu

SEQ ID NO: 4129322 - RNA, 60 nt, Human
gacauuccugaagaagguauguugcccagcaucgaugggaauagaagaauuuaggaaguc

SEQ ID NO: 4129323 - RNA, 60 nt, Human
gacauuccuggcacagggcuuggucgcucauucaggcugauggccgcccuuugcccuguc

SEQ ID NO: 4129324 - RNA, 75 nt, Human
gacauugaaacauucagucaacaguguuugccacucaguaaguaaauacucauauauguuguauguuaaaauguu

SEQ ID NO: 4129325 - RNA, 67 nt, Human
gacauugacaguccuccuuauaaauggccuuuucugggcuuaagaugacagggcacugccaucuguc

SEQ ID NO: 4129326 - RNA, 69 nt, Human
gacauuguaaucaugcaucaguuaguuuuuggcucuuuaauuuugaaagcagauguuugauugcuuguu

SEQ ID NO: 4129327 - RNA, 67 nt, Human
gacauuucucagggaguuuugcuuaaagaagauuagaguaauugagcaggaaaccgagggugauguu

SEQ ID NO: 4129328 - RNA, 129 nt, Human
gacauuuucuuugguuaaauugagguugugcauuuuugguaagaauauaauggaagugauauuguuuccugaucagugcauucuaccaaaaggcacaugauauugauuuguccuguugcugguaauguu

SEQ ID NO: 4129329 - RNA, 60 nt, Human
gacauuuugcccuuccuuaagaaaauaaauaaauuaaucauaggugaggggcaccauguc

SEQ ID NO: 4129330 - RNA, 115 nt, Human
gacauuuuuauaaacaaucugugagaggaagacaucuccauauuugaagaauaaauuuugcuuuuccaaguacugagcugucaaacugguuggggauaaacugccuaaaaauguc

SEQ ID NO: 4129331 - RNA, 57 nt, Human
gacauuuuuguucauuucucuucagagugaauugaagugaauaugcagcaagaaguu

SEQ ID NO: 4129332 - RNA, 94 nt, Human
gacauuuuuuaagcgaauuuauaauaaauagggcuuuuucaauuauacaguaauguagguuccaaagugcuauuuuguggguuuucuguguguu

SEQ ID NO: 4129333 - RNA, 88 nt, Human
gaccaacuccacuaaacccuguccucucuugcucaucccguaccccucaagaaauagaggaaagguuugacuucugugaaggaugguc

SEQ ID NO: 4129334 - RNA, 61 nt, Human
gaccaacucgucugccccugugagcaauguuuauuauucaacagggcaugaugagacgguu

SEQ ID NO: 4129335 - RNA, 85 nt, Human
gaccaacugauaacugcacagcagagccuggaucugcucccauacugcuuccaauggggccucucugucagauagucaguuaguu

SEQ ID NO: 4129336 - RNA, 62 nt, Human
gaccacacgucccagagagcccagcuccaugaugggagagcagggccaggcugacugugguc

SEQ ID NO: 4129337 - RNA, 63 nt, Human
gaccacaucauccuauugugccccagguugucagaauaaccagguuuuuuagaugguggaguc

SEQ ID NO: 4129338 - RNA, 68 nt, Human
gaccacugugagacugguucugaacccagugaccuccaucucugggagcaguugcaucuccagugguc

SEQ ID NO: 4129339 - RNA, 63 nt, Human
gaccacuucaugcuuugauuuucacuguggggaaggauuucucaaagagguaggaagugaguc

SEQ ID NO: 4129340 - RNA, 58 nt, Human
gaccagaacuucuagucuaaguucuucauuguuaggaauuuaacuggccuucuggcuc

SEQ ID NO: 4129341 - RNA, 57 nt, Human
gaccagaauguuuagucaguuaguugugaauaucaauugcagaagaacguucugguu

SEQ ID NO: 4129342 - RNA, 60 nt, Human
gaccagcuaagaaggaacucagaggcuuugggaaaauuacucuucugggcuucagugguc

SEQ ID NO: 4129343 - RNA, 72 nt, Human
gaccaggaucaagacuguggggcuguuccauggaaacaugaaaacauacugcagcucccagcuugaaagguc

SEQ ID NO: 4129344 - RNA, 56 nt, Human
gaccaggcuuccccagaccucaggccacacucuucuggguugagucaagccugguc

SEQ ID NO: 4129345 - RNA, 102 nt, Human
gaccaggguuucucagccucggcacuauugacauuuggggcuaauuauucuuuugugggggcuguucaguggauuguagaaggcuuaguagcaucccugguc

SEQ ID NO: 4129346 - RNA, 59 nt, Human
gacccacagaccuggaaguauuugacuauuugaauaacugguacagguuuacugguguc

SEQ ID NO: 4129347 - RNA, 82 nt, Human
gacccacaucuaauuuuaggcuacugugacuuuccugagucccacuacagcugagcaucacuagucugguacagcauggguc

SEQ ID NO: 4129348 - RNA, 77 nt, Human
gacccagaagcccucucagaguuccaagguuggcuccugugggacgcucacugccauucucuagauguuucuggcuc

SEQ ID NO: 4129349 - RNA, 58 nt, Human
gacccagaggccugacagugugguuguguaaaauugucggugucggugucuugggcuc

SEQ ID NO: 4129350 - RNA, 87 nt, Human
gacccauauagcaaacuggagcuugcuuuacucauuaauucuaugguguguaugaguguuuccagguauuugcuuucuucucagguc

SEQ ID NO: 4129351 - RNA, 76 nt, Human
gacccauuacaauaagguuuauuuguagcauacauaguugcaaaguauguauuuaaauguugcuguguccaggguc

SEQ ID NO: 4129352 - RNA, 97 nt, Human
gaccccagggccgcaccuucccucccagugccggggccggcuaggggcucugugggcagcgcggccgccuggcgccggggugcgcccacguggaguc

SEQ ID NO: 4129353 - RNA, 68 nt, Human
gaccccaugugaucuaacccaggcaguccaaugaccgugccaggaggccugggcugggcuacaggguc

SEQ ID NO: 4129354 - RNA, 78 nt, Human
gacccccucuguuugauuguuaucccugcugccugaaagcccuggguggugauggccagucgcacuggaggaggcguc

SEQ ID NO: 4129355 - RNA, 56 nt, Human
gacccgaagccaagacagaugaacuugaguccccaaauucacacuuccuuuggguc

SEQ ID NO: 4129356 - RNA, 76 nt, Human
gacccuauaggcaccaugggggcauguguuacccauauuaugggucccuucagcucucauggagacccacgggguu

SEQ ID NO: 4129357 - RNA, 61 nt, Human
gacccugagccaaaccaguuagaugucauccauacagcauuccuuucuggagcucaagguc

SEQ ID NO: 4129358 - RNA, 63 nt, Human
gacccugggguuccaaugaugagcaagagaugcauggucucugccaucuuggagcucaagguc

SEQ ID NO: 4129359 - RNA, 56 nt, Human
gacccuuggcugcagcaucacauuuaacccuccuuggaaugcuacaggcagguguc

SEQ ID NO: 4129360 - RNA, 72 nt, Human
gaccgacguccuccccuuuuggaaguccagggagcagagaucccuggcucuggccaccgggagggcaagguc

SEQ ID NO: 4129361 - RNA, 84 nt, Human
gaccgagcagccugagcucaagaaggugaccagacggaggcagagcccuacacagugaucgccuucuuccucgggaucuugguc

SEQ ID NO: 4129362 - RNA, 92 nt, Human
gaccgcugggguggccuugcugggcuggcaggggaucgcccucucccugagcagaugaccagccccagcagggcccaggcucacggacgguc

SEQ ID NO: 4129363 - RNA, 61 nt, Human
gaccggcccagagcaggcuucaugccagcacugcagcccugccugcugccuguggccgguc

SEQ ID NO: 4129364 - RNA, 90 nt, Human
gaccggucauuuuuuaagcugguaguguuuauaaggguauuauucauauaauaauuuacuaagcucuaccuuuuuuuguguggccguguc

SEQ ID NO: 4129365 - RNA, 72 nt, Human
gaccuaaaggagaacaagacccaagucuucccauaccagggugacauucugucaauguugacuccguagguu

SEQ ID NO: 4129366 - RNA, 76 nt, Human
cuugugccucccgggaccaugcacugacuaaaggaggagaagggguccugccagggcagguguuggaaggcagagg

SEQ ID NO: 4129367 - RNA, 74 nt, Human
cuugugcgagugcugggaugcugucucuacuuccuuuuggguugccagaggcagcauuuagagcacaguguggg

SEQ ID NO: 4129368 - RNA, 79 nt, Human
gaaguuauucagugguuugagaacuuagaauuggaaaaucucuccuuuuuauuucccucaggacccaacuuguaacuuc

SEQ ID NO: 4129369 - RNA, 64 nt, Human
gaaguucaaugucagcaucuaugucuuaaccauuuuuguguuaauuguugauauugaaaacuuu

SEQ ID NO: 4129370 - RNA, 77 nt, Human
gaaguucagggucuuauaaggccaauuuuucucuuuaagauaagauggcauuagagcacccaauaccaaugaaauuc

SEQ ID NO: 4129371 - RNA, 92 nt, Human
gaaguucauuugcaagccuggugaccucucacuaugucacuggggcaacaugacaaagugaggucuucaguauugcacagaugugaaauguc

SEQ ID NO: 4129372 - RNA, 67 nt, Human
gaaguuccugggguuggggguuaguaguguaugcaaacacagaggcaugacccugcccuugagcauc

SEQ ID NO: 4129373 - RNA, 63 nt, Human
gaaguuggcagucugcaaccuggacgagggccaccagcacccucaucucggacuucuagcuuc

SEQ ID NO: 4129374 - RNA, 55 nt, Human
gaaguugggaggagaaaagguuuugaguaucuccccuagccucuuacccagcuuu

SEQ ID NO: 4129375 - RNA, 61 nt, Human
gaaguuuacacuaagcaggugugaggauaaaguaacuucacaucaguuuaggucagauuuu

SEQ ID NO: 4129376 - RNA, 58 nt, Human
gaaguuuagaguuuggaguccuuaauucaaaucuuagcucuaccaaauucuggauguc

SEQ ID NO: 4129377 - RNA, 66 nt, Human
gaaguuucuaguuucauuugcaggcaggaaaguucaacuuccuguuucaaaauaacaagaggguuc

SEQ ID NO: 4129378 - RNA, 65 nt, Human
gaaguuuguagucauauauuugcuccuaaaaucaaguuagucagauauaugacuuacgugauguc

SEQ ID NO: 4129379 - RNA, 59 nt, Human
gaaguuuuaugcacaaauauguuaagcccaaaaauguauuuguaguagcauagaauuuu

SEQ ID NO: 4129380 - RNA, 55 nt, Human
gaaguuuucugaggcuguagcuuuaugcaaauaugcuacucaagaagaaggcuuu

SEQ ID NO: 4129381 - RNA, 97 nt, Human
gaauaaacaguacuuuuauucuuaaugagauugcuuucuauaucuguaaagcccuuaucuuugguuuuauaagaagcaaugucugaguuguggauuc

SEQ ID NO: 4129382 - RNA, 63 nt, Human
gaauaagaauguggugccgcuggagaguuuagaggacuugacucucuaacgacauucccauuc

SEQ ID NO: 4129383 - RNA, 81 nt, Human
gaauaagugcacuucauuagagcagauaauauguguguucaguucauccugucaagcgcaccugcucuaaaguggcuauuc

SEQ ID NO: 4129384 - RNA, 76 nt, Human
gaauaaucccugcucagcucaccuggcagcucuucucucagguuaugaguuucaggugggcugggcgcggugguuc

SEQ ID NO: 4129385 - RNA, 103 nt, Human
gaauaauugcauuaguaacuugauaaguauucucugcauucucagugugguccugggacagccagcaugauaaucacuugagguuacucauuacaaauuauuc

SEQ ID NO: 4129386 - RNA, 102 nt, Human
gaauaauuuugcaaaugugucugaucuaucuaucuuuugaacucucuuggauaugguguccuaaggucuagauuuauagacagcauguuaguaagucuguuu

SEQ ID NO: 4129387 - RNA, 77 nt, Human
gaauaccaagugaaugaugugaaguguaaaccaaccauuguuguguuucauguuacugucauacacuuguuuccuuc

SEQ ID NO: 4129388 - RNA, 91 nt, Human
gaauacccagaagccuucuuuucugugucccuuauucuagcuuuugcgcugcuguacaaauuccacaagagaagaugcucuuuggauauuc

SEQ ID NO: 4129389 - RNA, 61 nt, Human
gaauacuugugugcaguugugcucaggucugacucugugcaugcaaagaauauagguguuc

SEQ ID NO: 4129390 - RNA, 69 nt, Human
gaauagaacuggcagauauuugcagacaugcagcuuuuggguaugccagcauuaucuccagucaaauuc

SEQ ID NO: 4129391 - RNA, 67 nt, Human
gaauagauacucagaaaugcuuucaccaucaagcugggguaugaaggcuccaucugaguaggaguuc

SEQ ID NO: 4129392 - RNA, 55 nt, Human
gaauagcuuagauuccuuagugccugagucagggccuaauaaauaauagcuacuc

SEQ ID NO: 4129393 - RNA, 73 nt, Human
gaauaggaaggagagaaaaccagagccacaggaagaggaacuugauauugguguacaucuccccuucauguuu

SEQ ID NO: 4129394 - RNA, 115 nt, Human
gaauaggaguguuucaaacuugauuaaugugcugaggguugauuuauguuuuaaaagccugugagcaggucgaaaaugaagagucaauuaaagcuaauccggucuccuccuacuc

SEQ ID NO: 4129395 - RNA, 73 nt, Human
gaauaguccccugaaguugagaaaaccacaugaccuuacagugugaaaucuacccuauucaggguggcuauuc

SEQ ID NO: 4129396 - RNA, 74 nt, Human
gaauauaaaagaugaugcagacuuugauguuccugccuucaagaagcucacagucuggcauagucuccauauuc

SEQ ID NO: 4129397 - RNA, 55 nt, Human
gaauauauaucuccacuguuacacuucuuuguguugcagugauuugucuauguuu

SEQ ID NO: 4129398 - RNA, 64 nt, Human
gaauaucaguauauuguaucagugagugauagagcuacaaaacugauuaacaugugugauauuc

SEQ ID NO: 4129399 - RNA, 73 nt, Human
gaauaucuuaggagugugauucugggauaucuuaaugcgauccaagauguuuuagaguuugacuugauauauc

SEQ ID NO: 4129400 - RNA, 82 nt, Human
gaauaugauugaccaggauacugcagggauggaacauuugauaaacugucuccuguagcuucuuggaaggcagagcauguuc

SEQ ID NO: 4129401 - RNA, 78 nt, Human
gaauauuccugaggugugggugguugguuuccuuacaagguaggguuugcaagcuccuuacauccacaggggcuguuu

SEQ ID NO: 4129402 - RNA, 67 nt, Human
gaauauugaaacggaugugagacgugcauuuuggguuacaguaacauguuuuaaguccucucuauuc

SEQ ID NO: 4129403 - RNA, 80 nt, Human
gaauauuggcuguuuguuuguguuuguugccucauggcugcaaaauugcugcuguggugucaagcaucucaaccauauuc

SEQ ID NO: 4129404 - RNA, 61 nt, Human
gaauauuuaaaacgaggccacuggacugcuuuucugcaguucacauaucuguuuuauuuuc

SEQ ID NO: 4129405 - RNA, 89 nt, Human
gaauauuuagaguggcgagugguauuuuaaaaucuaguuucaaaggagaacugaggguuuuaugguucacuugcaaugucauuguguuc

SEQ ID NO: 4129406 - RNA, 69 nt, Human
gaaucaacauaugcaugggaaagucuccuuuugaaauggcugauuauccaagggauguauguggaauuc

SEQ ID NO: 4129407 - RNA, 67 nt, Human
gaaucaacccuggugggaauauuugcaccuuggaaaucugcaaaugguacaaaucagggcuugauuu

SEQ ID NO: 4129408 - RNA, 100 nt, Human
gaaucacagggccagaauaauuuuuaguuuuauuuacuuggucuagauuuugucaucacaaaucugagaauggagcuaaaaaucacagccuguaggauuc

SEQ ID NO: 4129409 - RNA, 60 nt, Human
gaaucagguucugccgcugcucucugccugcuugccaacagugcagugcagagcccuuuc

SEQ ID NO: 4129410 - RNA, 120 nt, Human
gaaucauuaauuuggcuuuugaaaaccauuugcuuugcuagugacuggauuugggaacuccaacauccagaucucagcauggcuuuugagguuuacaagguaaugcucaugaugugauuc

SEQ ID NO: 4129411 - RNA, 60 nt, Human
gaauccucauggguagcucuggaaccucagagucagcgguucuagaaccgugggcgguuc

SEQ ID NO: 4129412 - RNA, 121 nt, Human
gaauccucuugaggguuuuuuaaagauaccagugcuuggcuccuuccccagauauucugauuuaauuggucuggaauggguuucaggcacugguuuccuuuaaaagcuccuuaggggauuu

SEQ ID NO: 4129413 - RNA, 79 nt, Human
gaauccugacuaauacacgagucuuuuagagauauuaccggauucucuuugaacucuguguauuaacuuuacaggguuu

SEQ ID NO: 4129414 - RNA, 58 nt, Human
gaaucgcgcgcucgcggaggcugggccacggccucggggccuuggcgggggccgaauu

SEQ ID NO: 4129415 - RNA, 61 nt, Human
gaaucuagccuuucaagggguagagucuguuuucccuccucuugaaccuaggcaagacuuc

SEQ ID NO: 4129416 - RNA, 78 nt, Human
gaaucugucacccaggcuggagugcaguggcaugaucucagcucacuguaggcucuaccucauggguuccagugauuc

SEQ ID NO: 4129417 - RNA, 84 nt, Human
gaaucuuauaagaaauuguuaguaugugugcuuacaucugcuaugauuauagcauuagauuaaaaauuuagauuugugauauuc

SEQ ID NO: 4129418 - RNA, 56 nt, Human
gaaucuuaugugguguuuucuaaauuguuuucuggaaaaugccacucccaggauuu

SEQ ID NO: 4129419 - RNA, 77 nt, Human
gaaucuucucuccucuucucacugcgccaccucugaucuccagcgcagcagcguggggacaggagcucagaugauuc

SEQ ID NO: 4129420 - RNA, 109 nt, Human
gaaucuuuuuccucuuuucuuauucuuuucugucaaaacuuagcuaagugacugcauucuuuuagacacuuuugaagaagaugggaauuuagaggaagcuaguugauuc

SEQ ID NO: 4129421 - RNA, 64 nt, Human
gaaugaaagugccauauguuauugcuauugucaguaguagcaacagcaauagugguauugguuc

SEQ ID NO: 4129422 - RNA, 116 nt, Human
gaaugaacaaaauacuuaagaauagaaagaacagauguguggugcauuuuuauuucaaaaucaccauugaaaaacagguuugauuuuugcuuguuugaaaguugguuggcuuauuc

SEQ ID NO: 4129423 - RNA, 56 nt, Human
gaaugaacuggaucaggguuucucuaacaauguuggagaggaagucagguuuauuu

SEQ ID NO: 4129424 - RNA, 55 nt, Human
gaaugaagcaggucacacaguuccuuuaaaagguauuugugaagcugcuuuuuuc

SEQ ID NO: 4129425 - RNA, 62 nt, Human
gaaugacagugagggaggcauuugaaauggaagccaguagaaugauccuacacauggaauuc

SEQ ID NO: 4129426 - RNA, 94 nt, Human
gaaugagcuuugagacucacugccuuagaaaaucauggaauauuaaaaguuuaguauuggauauaaucuaggaagagugcucuuaaucuuguuu

SEQ ID NO: 4129427 - RNA, 80 nt, Human
gaaugaguagaguauaaacaaaguucucccaauacaguaagagaugggcuuaaaauuuguuuguguuucuuuauuaguuc

SEQ ID NO: 4129428 - RNA, 65 nt, Human
gaaugauaccgccaauauuaccauauuacuuauggugauaugcauggcaguauaaucauacauuc

SEQ ID NO: 4129429 - RNA, 73 nt, Human
gaaugauauuuuguccugguuuuuaaguuuuauguuuuuaauuuaaggcuuauauacuuagacauugucauuu

SEQ ID NO: 4129430 - RNA, 81 nt, Human
gaaugaucaccugauggaaucucuaugccaauugaaauauaaagucacaugguagcacauugcauuaggagauacucguuc

SEQ ID NO: 4129431 - RNA, 79 nt, Human
gaaugcaaggaacucaacacaguauuugguauaguaacaggcccuguaugcucgagcuacaguguugaucauuacauuc

SEQ ID NO: 4129432 - RNA, 70 nt, Human
gaaugcagaugaaauucagaauugaggggucagugagaucuuuuggagaugaaaauuugaucuguuauuc

SEQ ID NO: 4129433 - RNA, 72 nt, Human
gaaugcaugaaugggucauuauuugaucaauuuccagcuuugauuagaccuuggaccaguuugagagcauuu

SEQ ID NO: 4129434 - RNA, 62 nt, Human
gaaugcauguuuucuaggcuuucacaaccaucuggaguugugggggugagaaaacugcauuu

SEQ ID NO: 4129435 - RNA, 76 nt, Human
gagcuacuccuuguuuucaggccuguaauuugcuaaaggauugagcacaacagagaaacuaaggaguuuggagcuu

SEQ ID NO: 4129436 - RNA, 67 nt, Human
gagcuacuguuuauuuugguuaucauuuuaguauggcuguuaagaaaggccgaaauaauaguggcuu

SEQ ID NO: 4129437 - RNA, 81 nt, Human
gagcuagauggugauagagcugggauuggcauauggauauuguuccaaaucccauguuguauauacaguaacauaaggcuc

SEQ ID NO: 4129438 - RNA, 78 nt, Human
gagcuaucaccuuaauaaacugagcugcuuauuuaaauaaauucaugcaagccacugagaguugggguugaugugcuc

SEQ ID NO: 4129439 - RNA, 63 nt, Human
gagcuauuucugccuaaugaccuguauguaaaagcaacagaaauauagaagguaggaauaauc

SEQ ID NO: 4129440 - RNA, 58 nt, Human
gagcuauuucuucgggauucaagcuaguaugcaacuggcuaaacaguggagaaagcuu

SEQ ID NO: 4129441 - RNA, 58 nt, Human
gagcucaaggccauguaggaggcaugcggcguugcagcagucagucaggccuggguuc

SEQ ID NO: 4129442 - RNA, 69 nt, Human
gagcucacaccauugaagcaggcuguugaggaucagucacuauuccugcugccauuucaagugcugcuu

SEQ ID NO: 4129443 - RNA, 99 nt, Human
gaggcaggagaauugcuugaaccugggaggcggagguugcagugagucgagaucgcgccacugcacuccagccuuggcaacagagcgagacucugucuc

SEQ ID NO: 4129444 - RNA, 98 nt, Human
gaggcaggagauugcuugaacccaggcgggagaaguugcagugagccgagaugguaccacugcacuccagccugggcaacagagggagacucagucuc

SEQ ID NO: 4129445 - RNA, 99 nt, Human
gaggcaggaggaucacuugagcccaggagguggaggcugcagugagcaaugaucacaucacugcacuccagccugggcgacggagugggacccugucuc

SEQ ID NO: 4129446 - RNA, 99 nt, Human
gaggcaggaggaucgcuugaacccaggaggcagagguugcacugagcccagaucgcgccauugcacuccagccugggcaacagagugagacuccgucuc

SEQ ID NO: 4129447 - RNA, 61 nt, Human
gaggcaggauccuggccucauagagcccccaaucugaggggagaggcaggauccuggccuc

SEQ ID NO: 4129448 - RNA, 57 nt, Human
gaggcaggcggccccugcucugcuucccugcugguguccuacagggccgcaggccuc

SEQ ID NO: 4129449 - RNA, 60 nt, Human
gaggcaguugcaguaauccaggcaagacuuguugagggccuggauuaaggcagugacuuc

SEQ ID NO: 4129450 - RNA, 56 nt, Human
gaggcauaaaucacaguguucagauuaaaguucugccugucauuuggaaaugccuc

SEQ ID NO: 4129451 - RNA, 56 nt, Human
gaggcaugaaugcaguguccuuuuccaggaaauguguggugcugacaucaugcuuu

SEQ ID NO: 4129452 - RNA, 99 nt, Human
gaggcaugagaauugcuuaaaccucggaggcggaggcugcagugagcugagauggcgccacugcacuccagccugggugacagagcaagacuuugucuc

SEQ ID NO: 4129453 - RNA, 66 nt, Human
gaggcaugcagagcuggagcagucaguguaaacuguucugggaagccagacucugcaacuguucuc

SEQ ID NO: 4129454 - RNA, 73 nt, Human
gaggcauucuagaaguagaaguagaaguagaaguagaauauuugugaauaaugcucuacauuagcaguguuuc

SEQ ID NO: 4129455 - RNA, 60 nt, Human
gaggccaaagcucugcuccugcuccuuagggugggagacauauuccagagcuggggcuuc

SEQ ID NO: 4129456 - RNA, 84 nt, Human
gaggccaaagggguccagaaggaggucaaguuggcugagcaggccuuuccagcucuggcuucuugcuggguccccuaacaacuu

SEQ ID NO: 4129457 - RNA, 65 nt, Human
gaggccagaagugccucgggcugagggggacccagacccucagcucaggcaacucugggccccuc

SEQ ID NO: 4129458 - RNA, 67 nt, Human
gaggccaggaccacacgacaggagaguccugcaaagggacccuccacagcugugugucuccuuccuc

SEQ ID NO: 4129459 - RNA, 56 nt, Human
gaggccauaagaaguucuuggguucuguuuuccauaauuaacuaauuaugugccuc

SEQ ID NO: 4129460 - RNA, 72 nt, Human
gaggcccagaugcugccaggccccucaguuuaccuugcgaaguuacuuacggaucagcagcauuuggucuuc

SEQ ID NO: 4129461 - RNA, 65 nt, Human
gaggcccaggcucuguuccccgaggagccaggucagccugcccuggggagccgagucugucuuuc

SEQ ID NO: 4129462 - RNA, 57 nt, Human
gaggcccuucuugguggcucaggacuggugggcaccgucucugggaggaagggccuc

SEQ ID NO: 4129463 - RNA, 99 nt, Human
gaggcccuuugcggacuggcuggccgcgcucuucgcacggggcgcuuuugcguggggucgcgcaggagccgcggagggccggaucgcugagggagcguc

SEQ ID NO: 4129464 - RNA, 70 nt, Human
gaggccuacccuggaggcuggcccugcugggcacugucugccaggcugccagaagccuucaggaggcuuc

SEQ ID NO: 4129465 - RNA, 76 nt, Human
gaggccuauaauuuuccaguaauuagacuuucaggcacauaugucuuguggcucgaauaugauucuguuauaccuc

SEQ ID NO: 4129466 - RNA, 65 nt, Human
gaggccuccucugagacaucugagccccucucuuauccuacugucaguguccaaauccaggccuu

SEQ ID NO: 4129467 - RNA, 67 nt, Human
gaggccucugagcuccagaguuagacacccggggccagucuggcucugucuggggcugaggggccuu

SEQ ID NO: 4129468 - RNA, 57 nt, Human
gaggccucugggccugcggguuuuaccucacuuggaaacguucaaggcagaggccuc

SEQ ID NO: 4129469 - RNA, 80 nt, Human
gaggccugcucuaggugcacaccggccccucugcaaauccccggcuggccgaacggugcccuggcagacaaauggcucuc

SEQ ID NO: 4129470 - RNA, 100 nt, Human
gaggccuggaucuuguccacacuaagcgauggcuuuacugcggggagauaauccuucuggaaaccucagguagagucugcauggggaaugagauggcuuc

SEQ ID NO: 4129471 - RNA, 58 nt, Human
gaggccugucgcuaggccucugcugccugggggacaaaaggggccuggaacaggccuu

SEQ ID NO: 4129472 - RNA, 74 nt, Human
gaggccuuggauuucucaguuugugugauauugucuuacuuuguuaagaucacugaauugaaaguaaugguguu

SEQ ID NO: 4129473 - RNA, 76 nt, Human
gaggcgcaacgcuuacccucguggaccaacaaucgaauuaacaugcugauacacacauggggugagugacgcccuc

SEQ ID NO: 4129474 - RNA, 68 nt, Human
gaggcgcucaggccuugaaggccugcgggaggucgaaaugguccuggggaggucgaggcugaggucuc

SEQ ID NO: 4129475 - RNA, 91 nt, Human
gaggcgcuccaccucugcacggccagggcugugggugcggcccccgcugcugcacugcgccuggggcccuggcugucucugggccagccuc

SEQ ID NO: 4129476 - RNA, 73 nt, Human
gaggcggagguugcagugagccgagguugggccacugcacuccagccugggcaacagagcaaaacucuuucuc

SEQ ID NO: 4129477 - RNA, 60 nt, Human
gaggcggcugaagucggagggaguggagcaaagggacucccuggccgcaauggccgccuu

SEQ ID NO: 4129478 - RNA, 65 nt, Human
gaggcgggcagaucaccugaggucagaaguucaaguccagccuggccauggugaaaccccgucuc

SEQ ID NO: 4129479 - RNA, 61 nt, Human
gaggcgggcagaucaccugaggucaggaccagcuuggccaacaauggugaaagcccgucuc

SEQ ID NO: 4129480 - RNA, 68 nt, Human
gaggcggguggaucaccugaggcugggaguuagagaccagccuggccaacauggugaaaccccgucuc

SEQ ID NO: 4129481 - RNA, 68 nt, Human
gaggcggguggaucaccugaggucaggaguucgagacgagccuggccaacguggugaaaccccgucuc

SEQ ID NO: 4129482 - RNA, 66 nt, Human
gaggcggguggaucaugaggucaggaguucgagaccagccuggccaauaugguaacacccugucuc

SEQ ID NO: 4129483 - RNA, 55 nt, Human
gaggcguguuuccugccuaugacaaccucauggaugugggcagcacagcagccuc

SEQ ID NO: 4129484 - RNA, 90 nt, Human
gaggcuagaaguugaagacuaagguguuggcaggauugguuucaucucgaggcaucucuccuuggcaugccgucuucucccuuuuacuuc

SEQ ID NO: 4129485 - RNA, 78 nt, Human
gaggcuaggcucaauuguguaccugugguccauuucaauucaggugggcagcucugcuaauugagccuggacucccuc

SEQ ID NO: 4129486 - RNA, 65 nt, Human
gaggcucacuuucauccucuucgauguaguucacuaugggccuggagcuggugaaaguguguuuu

SEQ ID NO: 4129487 - RNA, 106 nt, Human
gaggcucccaguguucccagcugagaacaaaguugaaaguuugccuggagcuccaugccacuccccgccugggccacugcuuuguuuucuucuaauguuuuuccuc

SEQ ID NO: 4129488 - RNA, 78 nt, Human
gaggcucuauuugggguagaagauggauaaaaccugcaaguaagcagaaauccuuugaacuacuccauccagagccuc

SEQ ID NO: 4129489 - RNA, 70 nt, Human
gaggcucuggggaaaacuaaaaagccuuggcucuagcaacuagcugccugccuaguuccacaguguccuc

SEQ ID NO: 4129490 - RNA, 69 nt, Human
gaggcucuuucccaaggaaaugaagcugauguuggugauagccuggagcauuucuuucauuccagccuc

SEQ ID NO: 4129491 - RNA, 129 nt, Human
gaggcugaggcaggagaaucgcuugaaccugaaggcagagcuugcagugagcugagaucucaccauuguacuccagccugggugacacaaguggaacucugucucaaaaaaaaaaaaaaaauggcaauu

SEQ ID NO: 4129492 - RNA, 67 nt, Human
gaggaaagaggagacaguauggcuuguagcuacacuuagugguugcuauauuuuuuccuauugucuc

SEQ ID NO: 4129493 - RNA, 77 nt, Human
gaggaaagauucuuaauucuuuugaugugccacguacaaauguguauucacaugagacaauuaaagacuuuuuuuuc

SEQ ID NO: 4129494 - RNA, 75 nt, Human
gaggaaaggagacauuugcagagcacccacuaugugcuagaucuggugcaagcagaugucuuccaaauaauccuu

SEQ ID NO: 4129495 - RNA, 81 nt, Human
gaggaaaggcucagggcgcgagggacguggcgggcaccgacaggaagugcaaucucauuucucuucgcugagcuucucuuu

SEQ ID NO: 4129496 - RNA, 77 nt, Human
gaggaaaguaguauuagcagcaguucaauccagugcacgaaauauuuguugccuguugggaugcaauacuacaacuc

SEQ ID NO: 4129497 - RNA, 74 nt, Human
gaggaaaucauuccagaaaaggaaaggccacaaacucacaaaggugucugcuguuuucuggaguaugucuccuc

SEQ ID NO: 4129498 - RNA, 60 nt, Human
gaggaacagcagccacauguccacucacagacucucucuggcacuuggcugcugcuucuc

SEQ ID NO: 4129499 - RNA, 61 nt, Human
gaggaacaguugguauuugugaacuggugaccuagaacauucaaaugaagcuguuggccuc

SEQ ID NO: 4129500 - RNA, 130 nt, Human
gaggaacauuuggaagaaauuccauagaaucagugcuguuaguacaaguagaaugcuacaagauugcaaaauuaguaguaggucugcugugauacaaauagauugguagcugggugcuuccccaugccuu

SEQ ID NO: 4129501 - RNA, 62 nt, Human
gaggaagaaccuggccaaggcucaauccaacauccaaagccagaggccauauuucuucacuc

SEQ ID NO: 4129502 - RNA, 88 nt, Human
gaggaagcacaguuaacgaugggggcaguguuacauugcuugaagccuuccuucucaaugggcuggccuuuugguauugugguuccuu

SEQ ID NO: 4129503 - RNA, 57 nt, Human
gaggaagggacuuuauuaucuggaauaucuccaaggaagaagagggucccuaucuuc

SEQ ID NO: 4129504 - RNA, 55 nt, Human
gaggaagguguacugggacccucaaaaugaggccuagacagugaggccuuuccuc

SEQ ID NO: 4129505 - RNA, 80 nt, Human
gaggaaguuugagaaacugcuguaguaacuagguuaaguuaaacaaauacacccaaguuuugcauaguucuguauuccuc

SEQ ID NO: 4129506 - RNA, 71 nt, Human
gaggaaugagaccuugccuuaggaggcauuuaguugucuucuguguagaaagguagcccuucacuuuccuc

SEQ ID NO: 4129507 - RNA, 60 nt, Human
gaggaauggaucacagugccgugggugggguugcaaaccucucccugucaucccuuccuc

SEQ ID NO: 4129508 - RNA, 66 nt, Human
gaggaaugugaaacagguggcugggacccagaaacccucuuacccugcaccucugucauacuucuc

SEQ ID NO: 4129509 - RNA, 68 nt, Human
gaggaauuaccuguauuuggcucugaaaauagccauacuauuagccauuuuauacaaguguauucuuc

SEQ ID NO: 4129510 - RNA, 58 nt, Human
gaggacaauaauuuuuacaggugcuaaaaaaugcaaacaugugaaagcuaguguucuu

SEQ ID NO: 4129511 - RNA, 61 nt, Human
gaggacaccucacagccucacaccugcugcagcuggaacggcaggaagguggggagucuuu

SEQ ID NO: 4129512 - RNA, 96 nt, Human
gaggacacuagagcugggcugucuggcuucaagucccagcucuguaacuuacuagcagugaggcugugggcaagccacuccccuucucugugccuc

SEQ ID NO: 4129513 - RNA, 66 nt, Human
gaggacagggguggaguggggacaugugcccgagccaccggggcagcugccacuccgcuugcccuc

SEQ ID NO: 4129514 - RNA, 66 nt, Human
gaggacagggguggaguggggauaugugcccgagccaccggggcagcugccacuccgcuugcccuc

SEQ ID NO: 4129515 - RNA, 68 nt, Human
gaggacaucugaggcccucagagccaccgaaucucaugcagagggccugcuggggccucagacaccuu

SEQ ID NO: 4129516 - RNA, 72 nt, Human
gaggacaugaaaucagacuugaauuuucaucuuauuuugcugagguugaaguuugguuugguugcuguuguu

SEQ ID NO: 4129517 - RNA, 71 nt, Human
gaggaccccccuuggugaucuugcuccgccccuuuuugaagcuugggguccucucacuuggagggguccuc

SEQ ID NO: 4129518 - RNA, 59 nt, Human
gaggaccuggacacagagcggagaacuggaccccacuagacacuccuuugucuguccuu

SEQ ID NO: 4129519 - RNA, 57 nt, Human
gaggcacaauacaugucucaaguuuuggaguacaaucuccccauagguauuggccuc

SEQ ID NO: 4129520 - RNA, 58 nt, Human
gaggcacaccagggagucuuguaagcaacuggugacaaagucaggcuucccuggccuc

SEQ ID NO: 4129521 - RNA, 82 nt, Human
gaggcacagagagggaagguaacuugcucaacaucacacagcagguaaaugucagagccuuuaaccacucuguuacugcuuc

SEQ ID NO: 4129522 - RNA, 73 nt, Human
gaggcacaggccauacuucugcuggagccaaguggugcagagccugggccacugcuccaaguagcugggccuc

SEQ ID NO: 4129523 - RNA, 68 nt, Human
gaggcacagggcauuacuucagguccuuccccugguccagugagggaguccugaguggugaccuccuu

SEQ ID NO: 4129524 - RNA, 79 nt, Human
gaggcacagguccaacccauccagugucccugcuagucacacacagcacucaggguacaauggagggcuucugugcuuu

SEQ ID NO: 4129525 - RNA, 63 nt, Human
gaggcacaugacucaccaauggaauauuuucucauuuugaauauugggucauauauuugccuc

SEQ ID NO: 4129526 - RNA, 99 nt, Human
gaggcacgagaaucacuugaacccagcaggcagagguugcagugcgccgagaucgcgccacugcacuccagccugggcaacagagugaaacucagucuc

SEQ ID NO: 4129527 - RNA, 86 nt, Human
gaggcacugcaaagucgaaacugcaguuuaggcuguaauuaaaucauccaggagacuaggcuucagguuugcuuugcagaaaucuc

SEQ ID NO: 4129528 - RNA, 99 nt, Human
gaggcagaagaaucgcuugaacccgggaggugaagguugcagugagccgagauugcgucacugcacuccagccugggcggcauagcgagacucagucuc

SEQ ID NO: 4129529 - RNA, 68 nt, Human
gaggcagacggauuaccugaggucaggaguucgagaccaaccuggccgacauggugaaacgcugucuc

SEQ ID NO: 4129530 - RNA, 73 nt, Human
gaggcagaggacuuauggcaguagcuagaggagucugcagucucuaaacuacucucccaugauucucugucuc

SEQ ID NO: 4129531 - RNA, 104 nt, Human
gaggcagaggcagagauuugcuugaacccaggagguggaggcugcagugauccgagaucacaccacugcacuccagccugggggacagaucaagacuccgucuc

SEQ ID NO: 4129532 - RNA, 63 nt, Human
gaggcagcaucuauggugggaaaacacacaugaucagccagucucaccaguugauucugccuu

SEQ ID NO: 4129533 - RNA, 80 nt, Human
gaggcagccagcuccuuauccagcauggcccugaagcaaaggcacaggguggcaguuacuggagcaaguccuggggucuc

SEQ ID NO: 4129534 - RNA, 85 nt, Human
gaggcagcuauucuguucuuggcugugccucuggcagcacaugcaaaaugggcaguaacaguggcagucacagguaaguagccuu

SEQ ID NO: 4129535 - RNA, 63 nt, Human
gaggcagcuggcccugacacgcagacuuccugaagggucucuuguuuaugccaagcuuuccuc

SEQ ID NO: 4129536 - RNA, 98 nt, Human
gaggcaggaaaaugacuugaacccgggaggcggagguugcagugagccgagaucgcgccacuguacuccagccugguggcagagcaagacucugucuc

SEQ ID NO: 4129537 - RNA, 96 nt, Human
gaggcaggaaaucgcuugaacccaggguggagguugcagugagccgagaccgugccauugcacuccagccugggugacaaagcaagaguccaucuc

SEQ ID NO: 4129538 - RNA, 73 nt, Human
gaggcaggaagccuagcacuaaggugagauacuuuuccaugaagucuucagugauauaggcuucuccuggcuc

SEQ ID NO: 4129539 - RNA, 83 nt, Human
gaggcaggagaaucacuugaacccaagaaguggaggucacuccacugcauuccagucugggcaacagagugagacuccgccuc

SEQ ID NO: 4129540 - RNA, 99 nt, Human
gaggcaggagaaucacuugaacccagaggguggagguugcagugagccgagaucgcgccauugcacuccagccugggcaacagagugaaacuccuucuc

SEQ ID NO: 4129541 - RNA, 96 nt, Human
gaggcaggagaaucacuugaaccugggaggcggagguugcagugagccaagaucgggccacugcauuccagccuggugacagcgagacucugucuu

SEQ ID NO: 4129542 - RNA, 97 nt, Human
gaggcaggagaaucgccugaauucaggaugcagagguuguagugagccaagauuaugccacugcacuccagccuggacgacagagcgagacugucuc

SEQ ID NO: 4129543 - RNA, 91 nt, Human
gaggcaggagaaucgccugagcugaggaagcugcacugagcuaugauuaugccacugcacuccaggcugggugacagagugagccugucuc

SEQ ID NO: 4129544 - RNA, 99 nt, Human
gaggcaggagaaucgcuugaacccaggaggcggagguugcagugagccgagaucacgccauugcacuccagcccugcugacagugugagacucugucuc

SEQ ID NO: 4129545 - RNA, 99 nt, Human
gaggcaggagaaucgcuugaacccaggaggcggagguugcagugagcugagaucaugccacugcacuccagccuaggugacugagugaaacuccaucuc

SEQ ID NO: 4129546 - RNA, 100 nt, Human
gaggcaggagaaucgcuugaauccgggaggcagagguugcagugagccaagaucaggccacugcacuccagccucggggucaagagcgaaacucugucuc

SEQ ID NO: 4129547 - RNA, 100 nt, Human
gaggcaggagaaucguuugaaccugggaugcggagguugcggugaguggauauugcgccauugcacugcagcccgggcaacaagagcgaaacuccgucuc

SEQ ID NO: 4129548 - RNA, 99 nt, Human
gaggcaggagaaugacuugaaccuggaaguuggagguugcagugagucgagcucucaccacugcacucccgcccgggugacagugcaagacuccgucuc

SEQ ID NO: 4129549 - RNA, 97 nt, Human
gaggcaggagaauugcuugaacccggcgguggagguuguggugagccgagauugcgccacugcacuccagcugggugacagagugagacuccgucuc

SEQ ID NO: 4129550 - RNA, 100 nt, Human
gaggcaggagaauugcuugaacccuggaggcggaggguugcggugagccgagauugcaucacugcacuccagccugggugacagagcgagacuccgucuc

SEQ ID NO: 4129551 - RNA, 99 nt, Human
gaggcaggagaauugcuugaaccuuggagguggaaguugcagugagccaagauggugucacugcacuccagccugggugacagagugagacuccgucuc

SEQ ID NO: 4129552 - RNA, 99 nt, Human
gaggcaggagaauugcuugaacgcaggaggcggagguugcagugagcugagacagcgccacugcacuccagccugggcaacagagugagacuccgucuc

SEQ ID NO: 4129553 - RNA, 99 nt, Human
gaggcaggagagucgcuggaaccugagaggcggagcuugcagugagccgagaucgcgccacugcacuccagccugggcaacacagcgagacuccgucuc

SEQ ID NO: 4129554 - RNA, 77 nt, Human
gaggcaggagcgcugugggugggagggcugcuuccugggcucugaguacagcacggugcauuuacuacucuugucuc

SEQ ID NO: 4129555 - RNA, 100 nt, Human
gaggcaggaggauugcuugagcccaggagguugaggcugcagugagcccuguucacaucacugcacuccauccugggcaacacagcgauacucuugucuc

SEQ ID NO: 4129556 - RNA, 63 nt, Human
gaggcaggcagagcaacugguccagagugaguucacugggguccagagguuuuggcugacauc

SEQ ID NO: 4129557 - RNA, 83 nt, Human
gaggcagguggugccauuagcccugcuguugggacugacagaucaguacugaaguggcaucaggguaggaagguaucagcuuc

SEQ ID NO: 4129558 - RNA, 57 nt, Human
gaggcaguauagucauuaaguagcuucagauagaccucagugacaggugcugaccuc

SEQ ID NO: 4129559 - RNA, 55 nt, Human
gaggcaguggaacagcucugggcuaaacugguugggucagcucuauccacgccuu

SEQ ID NO: 4129560 - RNA, 78 nt, Human
gaggcaguggcaguggagacccgagccugggugaggccagggaucuggggccuucucuaaacgcugcuuaaauggcuc

SEQ ID NO: 4129561 - RNA, 99 nt, Human
gaggcaugagaaucacuugaaccagggagguggauguugcagugagcugagaucaugccacuucauuccagccucggguacagagugagacucugucuc

SEQ ID NO: 4129562 - RNA, 69 nt, Human
gaggccaagggagaagaucucucuaaauauuuucccacaugggaucaaagauguuucccccuuggcuuc

SEQ ID NO: 4129563 - RNA, 58 nt, Human
gaggccacagucaguguucaucuauuuugugaagugcaucagcacuaccuguggcuuu

SEQ ID NO: 4129564 - RNA, 104 nt, Human
gaggccacugacggcugcagauaaggacauuucugacuaaugcagccaagcccuccauccugcauuccucaaaaugucuuggccugugauucucaaugagccuc

SEQ ID NO: 4129565 - RNA, 56 nt, Human
gaggccagaggcagcaggccuuuggagagaucuggaagggccugcucugugguguc

SEQ ID NO: 4129566 - RNA, 59 nt, Human
gaggccagccccucuugaaggcaguccuugaacucugccccaggugggaugguugccuc

SEQ ID NO: 4129567 - RNA, 55 nt, Human
gaggccaggagugcuguaaguuccauacaaugcuuaggacagccccccugcccuc

SEQ ID NO: 4129568 - RNA, 72 nt, Human
gaggccauauuuggaauucagauggcuuagggauauuaugccuaaguuuaucauaguuuuacauguuaccuc

SEQ ID NO: 4129569 - RNA, 55 nt, Human
gaggccauuucugcuuggacaccugcagcccuugguggcccagagaugcugccuu

SEQ ID NO: 4129570 - RNA, 76 nt, Human
gaggccccaggucgggguggggacaggcagagcccacugcucccaccaccucugucucuucccacucagaccccuc

SEQ ID NO: 4129571 - RNA, 88 nt, Human
gaggccucacugccuggcugcagaucauucagaauaaugaucuaccacacauuuaucugggauuuugcagucugcaaugcaaugucuc

SEQ ID NO: 4129572 - RNA, 79 nt, Human
gaggccucccaagcugugcugaacugugagccaauuaaacuucuuuccuuuauaaauuacccagucuugggcaguucuu

SEQ ID NO: 4129573 - RNA, 55 nt, Human
gaggccugggagccuguccuccacugcuggcuggaagggcagguuggagggccuc

SEQ ID NO: 4129574 - RNA, 78 nt, Human
gaggccuuuuagggcugcguggaauacggucauaaucgcuaacauuuguacagugccaugcaguuugcgaagugcuuu

SEQ ID NO: 4129575 - RNA, 68 nt, Human
gaggcggagcuugcagugagccgagauugugccacugcagccugggcgacagagcgagacucugucuc

SEQ ID NO: 4129576 - RNA, 59 nt, Human
gaggcggccccaccguggagcuucccccgugcaaggacgagguccacugaggcugccuc

SEQ ID NO: 4129577 - RNA, 65 nt, Human
gaggcggcggaucacgaggucaggaguucgagaccagccugaccaacguggugaaacccugucuc

SEQ ID NO: 4129578 - RNA, 67 nt, Human
gaggcggcggaucacuugaggucaggaguuggagaccagccuggccaacguggugaaacccugucuc

SEQ ID NO: 4129579 - RNA, 79 nt, Human
gagaucuugagcuggacacacacuggagguaaauggggugugcaggaaacacugaugccccggccccacccugagacuc

SEQ ID NO: 4129580 - RNA, 106 nt, Human
gagaucuuggugcugccuuccaugggucugggggcuccaggucauuccucuccucucuggggugcccugaccuguguuugacugaagauuggcuccagcuagacuc

SEQ ID NO: 4129581 - RNA, 60 nt, Human
gagaucuuuuuugucuuggucacugcugcguagccagugucugguucauaaaaggggcuc

SEQ ID NO: 4129582 - RNA, 55 nt, Human
gagaugagaagagagauggcagcaccaauucuccuccuucuucucuuccagucuu

SEQ ID NO: 4129583 - RNA, 62 nt, Human
gagaugaguuuggaugcuuuccuggaguuaucaggaagcuccagggauuaaugaagucaguc

SEQ ID NO: 4129584 - RNA, 59 nt, Human
gagaugcaguuuuaggggaaggguuggauauuagggguucagcuuuggacuugcauuuc

SEQ ID NO: 4129585 - RNA, 77 nt, Human
gagaugccaaaaguggauugaauguaucuugaaaguagaaccaacaggauuugcagguggauucaaugugggauguc

SEQ ID NO: 4129586 - RNA, 70 nt, Human
gagaugcucuugucagaugauucucaggagacggcaguagcuguuucuuagacauaugccaugacauuuu

SEQ ID NO: 4129587 - RNA, 82 nt, Human
gagauggaacaaggaauaacucuaaagguacaggaggucaggucaugccuacugucuuuggggcuguaccuguuuccaucuu

SEQ ID NO: 4129588 - RNA, 103 nt, Human
gagauggagcucagguuuuuuccuaagggaugcggcucaagggacugugacuucuaaaaauuccucuucaguguuaaucuugggagaagaaauccuucaucuc

SEQ ID NO: 4129589 - RNA, 99 nt, Human
gagauggagucucacccugucauccaggcuggaguacaguggcaugaucucggcucacggcaaccuccuacuccuggguucaagcgauucuccugucuc

SEQ ID NO: 4129590 - RNA, 72 nt, Human
gaguuccagccacuuuauacugcuaaagucuggaaacaggcugaagguagcaguguaaaguggcuagaacuu

SEQ ID NO: 4129591 - RNA, 69 nt, Human
gaguuccgguguccucggauucagggcagacuugggcagugccuguccugcaguugggggcaggaacuc

SEQ ID NO: 4129592 - RNA, 67 nt, Human
gaguuccuggauuugggguugcaagagauuucaacucugcaggaagacuucccaagccagaggaguc

SEQ ID NO: 4129593 - RNA, 68 nt, Human
gaguugaacagauuugugaagcuacucagcacagccaaaguugaauagcuuccagauuguuaauauuc

SEQ ID NO: 4129594 - RNA, 128 nt, Human
gaguugaauucugcuuacguuccuuaguugccaaugaguucugguucauuuuaugcuguuuuaaggaaaacucacaugaaauuaugaacuuuggauucaggcuuggauuuucaaauggaaagcaauuc

SEQ ID NO: 4129595 - RNA, 66 nt, Human
gaguugacauuuuaugaauauuuuaguuccauuauaaauuacucacuuguucagauaugucagcuu

SEQ ID NO: 4129596 - RNA, 63 nt, Human
gaguugaguauaugcaauauaucuugauugcagaaaagcaguugauauagcauuauucaauuu

SEQ ID NO: 4129597 - RNA, 80 nt, Human
gaguugauauuugacuauacuuuuuauugcccuuggaguguucaguccaagaguccaaaugugcaguuauguaagaauuc

SEQ ID NO: 4129598 - RNA, 64 nt, Human
gaguugaucccuacagaguuuguucugggcccacccuagaacuuccaauucagggcugcagcuc

SEQ ID NO: 4129599 - RNA, 118 nt, Human
gaguugccucagccaguggucuugccauaucuaccuagcuuaggcugaguguuauaggagaaagugcacuagcccgggcaccagauggaucagguaagacucuagcuuagguaagcuu

SEQ ID NO: 4129600 - RNA, 104 nt, Human
gaguugcugugaccuaauuguggaaacugauaaaauaaguacauuuuuaaaauguagucuugauuuuuguuauuguacuauacaauaagcuauuacaacaauuc

SEQ ID NO: 4129601 - RNA, 57 nt, Human
gaguugcuuggauuauuccuuugggcucuguuggguauccaguauaaccagcaacuc

SEQ ID NO: 4129602 - RNA, 90 nt, Human
gaguuggaaccuaaaggcagacacaaaaacauaagguaugauucaugcccaucaaaucuaugaauuguuucugaaauuagguuuucauuu

SEQ ID NO: 4129603 - RNA, 82 nt, Human
gaguuggcaaaaauuaauaauaaugagcccauuuugaguacacugaaaugaacugauuaucauugcaagcuguugcuaauuu

SEQ ID NO: 4129604 - RNA, 63 nt, Human
gaguuggcuguucgaagguagcuugacaucuggcuaccuaccauuuguggacagcucaaacuc

SEQ ID NO: 4129605 - RNA, 103 nt, Human
gaguugguaugaaugcgcguuuggguagaaacaaggcuggacuggguaagaaccuucacaggcaguucucauuuuacccagaggcuguuuuuuuccuuugcuc

SEQ ID NO: 4129606 - RNA, 74 nt, Human
gaguuguugauuuauuaguuuguucauucuuuuuacucguuguuagaauggcauggcuacuggaauggcgacuu

SEQ ID NO: 4129607 - RNA, 63 nt, Human
gaguuuaacagcccucccuccauccugggcaccuuaauuccaggaagagacaggucuguacuc

SEQ ID NO: 4129608 - RNA, 69 nt, Human
gaguuuagugcugggcaaaaugcauuuccugccuuuuaaaggaauauggauuugcucagcugaggacuc

SEQ ID NO: 4129609 - RNA, 72 nt, Human
gaguuuaugcauccuccugaguuauguuuaaauguguucacauagaacauucuuuggaggauuauucacauc

SEQ ID NO: 4129610 - RNA, 80 nt, Human
gaguuuauuaagacauccuggauguucaaaagaauuugaggcuuuccccuuuugauagaaccaggauaucuggauaucuc

SEQ ID NO: 4129611 - RNA, 60 nt, Human
gaguuuccagugcauggcaaaugcuuaauaagcugugauuauccacuggaauguaagcuc

SEQ ID NO: 4129612 - RNA, 87 nt, Human
gaguuucgcucuugaccccgaggcuggagugcaguggccugaucuuggcucacugcaaccucugccucccggauucaagcgauucuc

SEQ ID NO: 4129613 - RNA, 79 nt, Human
gaguuugaaaaagucauguuuuuguuuagcauaaauccaaauauuuauauguuauguaaaauacuuggcauuuaaacuc

SEQ ID NO: 4129614 - RNA, 70 nt, Human
gaguuugaacccuuggcuucuauggguuuucuccccaaacuggaguaaaaagaugucaaggguuugacuc

SEQ ID NO: 4129615 - RNA, 65 nt, Human
gaguuugagcccugacacugagggaguugguugucaccaaucagaugucagcuggcuuuccacuc

SEQ ID NO: 4129616 - RNA, 99 nt, Human
gaguuugaggaaggaacagcaggucuuucuucagagcuuggacucaaagaacuucaguuuaagcccugaagaaagagcugcugcuccuuccucaaacuc

SEQ ID NO: 4129617 - RNA, 92 nt, Human
gaguuugggucagaguaguguguuaaugaggacaaguuuugagggugaaucucauaaacauuauucauuauucauuauucuuauccacaguc

SEQ ID NO: 4129618 - RNA, 59 nt, Human
gaguuuguccuuugggaaugugucucaggaaagucacagugagauccaagggcaggcuu

SEQ ID NO: 4129619 - RNA, 68 nt, Human
gaguuuuaccaguuucauucggcagcucauaaggugauuuuaugugcaacugaaaaaauguaaaacuc

SEQ ID NO: 4129620 - RNA, 87 nt, Human
gaguuuuacucuugucaccgaggcuggagugcaguggcacgaucucagcucacugcaaccucugccucccagguucaagugauucuc

SEQ ID NO: 4129621 - RNA, 74 nt, Human
gaguuuugcucuccuugucaguaaaaugacugcaaccccaguuauucaauggcuuauaaggauuccaugagcuc

SEQ ID NO: 4129622 - RNA, 100 nt, Human
gaguuuuuaggauauuuuaaugguuuauggggaccgcaaacagauauuugaaauuaguuuugucuccaaaaaccugagauaaaaacuuauuuggaaacuc

SEQ ID NO: 4129623 - RNA, 65 nt, Human
gaguuuuugagaugagaggucaaugguaaauaaaaccagauugaaaugaucuauuucaguagcuu

SEQ ID NO: 4129624 - RNA, 64 nt, Human
gauaaaaguagaauuuggauggggaauaacuuccaauguugagaucccaaaauucuacuuuauc

SEQ ID NO: 4129625 - RNA, 77 nt, Human
gauaaaaguuaguguuuauugaaugcuaaguauauggcaaagugcuuagcuuuucacuugcauuaucucauuuuguc

SEQ ID NO: 4129626 - RNA, 90 nt, Human
gauaaagauacugaguucagagaguuacacaaauuguucagucauaucacuaguaaaugacagaacugaccuuugcacccaugucucauc

SEQ ID NO: 4129627 - RNA, 108 nt, Human
gauaaaggauuggagaccugaguuuaccaaauguaaucauucuaaucguuuguaaggauuagagaaugaauuuauguuugucugugaccaacauuuccaccuuuuguc

SEQ ID NO: 4129628 - RNA, 66 nt, Human
gauaaauguuugcuuaauuggagaaauucuaaaauaucuagaauugacuucaagguagacuuuguu

SEQ ID NO: 4129629 - RNA, 83 nt, Human
gauaaauuucugggcacagaauugcugggauaaaauauaugcauguuuuuaagccuuugguaauucuguguagagguuguauc

SEQ ID NO: 4129630 - RNA, 55 nt, Human
gauaaauuuugacuuuuuugugaacuucaaauucccagaaaucucgagauuuguu

SEQ ID NO: 4129631 - RNA, 58 nt, Human
gauaacauuuugaagugcuaguaacaaguacuuggaaaaugguguucaaauuguuguu

SEQ ID NO: 4129632 - RNA, 71 nt, Human
gauaaccauuagcaaaacaacuuuucuauugacaacagagcaaagaaagguguguuugcagaugaauuauc

SEQ ID NO: 4129633 - RNA, 71 nt, Human
gauaacccuucacuguggagguaggagcaggacagcuaucugacucugccacacuccuccauaggguuuuc

SEQ ID NO: 4129634 - RNA, 82 nt, Human
gauaacuaacuucaagugacaucaugucagcaaaguaucuggcauaguaccugucaugucaauguucaguugaacagauauc

SEQ ID NO: 4129635 - RNA, 97 nt, Human
gauaacucuuuugaaauugucaugcuuauguuacauacuccuaaauuuuaaaugcuggaguuauaaaaggagcacugauucugaaaguguauuuauc

SEQ ID NO: 4129636 - RNA, 81 nt, Human
gauaacugcuugugaacucuuugaacagugaggcuaacaaguuuguccuagaccucaagaaggaagacaagucaguugcuc

SEQ ID NO: 4129637 - RNA, 61 nt, Human
gagcagccacagagaguggaugggcaaggacucuccucuggccucucauguccugggcuuc

SEQ ID NO: 4129638 - RNA, 109 nt, Human
gagcagccugauugguaguaugauugcuuccagagagccccgccuggcccuggcaucccaccaggcagggagcuguuuggccucagcucugcgacgucggggccuguuc

SEQ ID NO: 4129639 - RNA, 56 nt, Human
gagcagcucaggcacuuagccaccaacucuggucccuuuuguguagagggcugcuc

SEQ ID NO: 4129640 - RNA, 78 nt, Human
gagcagcugcagccauguuucugcuuucaugucuuggggaucucgugcauguguggaggagaugugcuggagaagcuc

SEQ ID NO: 4129641 - RNA, 61 nt, Human
gagcagcuugcgcugucuucaccaugugauugcuuuuaucuggccagugcaggagcugcuc

SEQ ID NO: 4129642 - RNA, 93 nt, Human
gagcaggagaaagggcgccaccucuaccuggccggccuucccggcagaagccgccgagcuaagcccuggagaggucggcgccuggacuacauc

SEQ ID NO: 4129643 - RNA, 64 nt, Human
gagcaggauuacagaggaaggacuccuaagacugaguccccaagucacuaguaaccaucugcuu

SEQ ID NO: 4129644 - RNA, 74 nt, Human
gagcaggcuccccuuguuuccauggugacagcagcuggcucacaugugugguugcuuuggaaacgagucugguu

SEQ ID NO: 4129645 - RNA, 79 nt, Human
gagcagggagaagaguuuagacuaguuggaagugaccaaggaauggccaguucacugcuuaagccuuugaccaaugcuc

SEQ ID NO: 4129646 - RNA, 83 nt, Human
gagcagggcacagcucuuccuacccuaguuggggccagcugccaagaugccucuugggguugggaaaaggagcugagcugcuu

SEQ ID NO: 4129647 - RNA, 63 nt, Human
gagcagggcuguggccucacaaguacuaaggcagcuagaggcuacuagaggcaccugaagcuc

SEQ ID NO: 4129648 - RNA, 55 nt, Human
gagcaggguuugcuaguuguuggacaggcauuugacuuaacaguaagcccuguuu

SEQ ID NO: 4129649 - RNA, 59 nt, Human
gagcagugaaaucacaacuuuaguuuugaugcccaugauucguguguauuucacuccuc

SEQ ID NO: 4129650 - RNA, 79 nt, Human
gagcagugaagacagaaguacaaacaaacaauccccuccccaaaauacagauaguggccaguacuuuguuuuuauucuc

SEQ ID NO: 4129651 - RNA, 57 nt, Human
gagcaguggcuaagcucgcaugcauguguuuaugcgucauggaaguaguuacugguc

SEQ ID NO: 4129652 - RNA, 69 nt, Human
gagcaguguggguucuuugcaaauguuauuaucuugucgauuucucacgggauuuugcaaauacugcuu

SEQ ID NO: 4129653 - RNA, 74 nt, Human
gagcaguguugcuagggcuucuaaugacccccaggagugcugagguacaagaaaggcaccugcaaggacugcuc

SEQ ID NO: 4129654 - RNA, 75 nt, Human
gagcaucaucagaguguaaguucuuuccuaucuuugaagugaacagggacaaaugagcacuuugacacagugcuu

SEQ ID NO: 4129655 - RNA, 72 nt, Human
gagcaucuuuuuugcucuuugauguuaauaugcaauuaaugcacauuaguuucucagaucauuuaagugcuc

SEQ ID NO: 4129656 - RNA, 58 nt, Human
gagcaugcgguauuugugugggugucgagcauccucgaucacaggaaugauguugguc

SEQ ID NO: 4129657 - RNA, 79 nt, Human
gagcauuaaaccgagcacagggcccugugcguaggucacagaccccagaggccagcccuguuuuccagcuuuauugcuc

SEQ ID NO: 4129658 - RNA, 75 nt, Human
gagcauuccaauccuggaucagucacuguugcuggcuuuaugcucucagaaugguuacugaauccuuugaagcuu

SEQ ID NO: 4129659 - RNA, 56 nt, Human
gagcauugagguggguuucucuuauguaacuccaagagcaauaagaccucaugcuc

SEQ ID NO: 4129660 - RNA, 77 nt, Human
gagcauuuccaggcucgcuugcguacagugaaaagugaugacaguaagugaugucuugguuaaugaagaaaggucuc

SEQ ID NO: 4129661 - RNA, 90 nt, Human
gagccaaauuuggcaauucaccaaggcucgcuggaggccgacuucuccuccguuuguuggcugcuuggcgaguugcuuuuguuuugguuu

SEQ ID NO: 4129662 - RNA, 84 nt, Human
gagccaacagcugcaaaugccgugagagcaggcacucuuggagaucugauuucuuacagcauuuuggcaccucugguucggcuc

SEQ ID NO: 4129663 - RNA, 55 nt, Human
gagccaagcaccacauuaaguucugggaaugcagagauggauggggcauggucuc

SEQ ID NO: 4129664 - RNA, 78 nt, Human
gauguagaguugaauacuugagaaauccauacuucaguguguauuuccccuuagguauucauuuuuguuuauuucauc

SEQ ID NO: 4129665 - RNA, 62 nt, Human
gauguagcuguguaccuuuuucacuguuagcaccucuguaacaguuacauuccagcaacauc

SEQ ID NO: 4129666 - RNA, 66 nt, Human
gauguagggagaugcaagggacggaguaucaggagaacaguaccuguucugggcucuccgcuaauc

SEQ ID NO: 4129667 - RNA, 106 nt, Human
gauguagguuuuggcaguagauguagguuggcauaaaacucuucaaaauuuccuuaaauaacacugauuaaagguuuauaugccaaccucugcucuugacugcauc

SEQ ID NO: 4129668 - RNA, 67 nt, Human
gauguauuuuggaacacagacauuagaacuucaugaaguuuuagcuguugauuguuccccaagcauc

SEQ ID NO: 4129669 - RNA, 59 nt, Human
gaugucagcaugcucugaguuuggccuaucugagccaugccccagagucugucugcauc

SEQ ID NO: 4129670 - RNA, 67 nt, Human
gaugucccuguucuguggcucucaaagggaagaucccugagcacacaucagaaucacccaggacauu

SEQ ID NO: 4129671 - RNA, 62 nt, Human
gaugucucugucugguccaggaagaugucagccccacacugccccucccagauaaagagauc

SEQ ID NO: 4129672 - RNA, 130 nt, Human
gaugucugauguuuggcuaauuauucgcugcauucuaggcaaugucugguggcaagggcuagggccagauagaaaagaaggcaggaaaaaauauaauuuaagccccaaggcaagaaucagauaaagaauu

SEQ ID NO: 4129673 - RNA, 68 nt, Human
gaugucuggcuucugaaaugcugcuguuaucauuuuaucugcauuacuucuuucauaggucaggccuc

SEQ ID NO: 4129674 - RNA, 79 nt, Human
gaugucuucuguaauuaaugcagcaaggagugagaucuuuuguuccucaacucuuauaguauugguuauuaggagcauu

SEQ ID NO: 4129675 - RNA, 65 nt, Human
gaugugaauguugucuaacggcuugcuacucaaaguguaauccacggaccggcagcauuggcauc

SEQ ID NO: 4129676 - RNA, 89 nt, Human
gaugugcaauaacucuagucccaggcaugaaaaguaacuucagugaaaauauccauucaaugcuuauauggacuaauauugugccuauc

SEQ ID NO: 4129677 - RNA, 93 nt, Human
gaugugcacggaggccccucccugcccugggcagaagugggcgcagguguucacaacugccuccggggcacugauuggccccccuguaccauc

SEQ ID NO: 4129678 - RNA, 62 nt, Human
gaugugcaggcucucguucuugacaucugaaccuaagugcaagguuuaagugccugggcauu

SEQ ID NO: 4129679 - RNA, 125 nt, Human
gauguggaaacuuuaauggagaucacaaaacuuugugggagaugugguuugcacacacacagguacacacccccuacagcccugcgucagauuuugcacgagguuuugugauuuucuccugcauc

SEQ ID NO: 4129680 - RNA, 79 nt, Human
gauguggacacagugacuggcacauaguaagcgcuuaauaaguguuagauuggcggugucaaucauuuuuaggcacauc

SEQ ID NO: 4129681 - RNA, 70 nt, Human
gauguggggugggcugaguuaggccugaaauaugggccuccaggcugaguccugcccucuccaccacauc

SEQ ID NO: 4129682 - RNA, 129 nt, Human
gauguguaaagagguucgacuuccaaguaaagccucguccacaauccuugcacacauaagguuucuccccugaguguguccucugaugugugaucagguuugacuuccacguaaagccucgcccacauu

SEQ ID NO: 4129683 - RNA, 56 nt, Human
gauguguccuaguacgggugggucugaaggcauucccauguggcauaaggaucauc

SEQ ID NO: 4129684 - RNA, 59 nt, Human
gauguguccuuuucuccauccauaucuaacuccuauguggaggagagucaaggucacuc

SEQ ID NO: 4129685 - RNA, 67 nt, Human
gauguguguguguguguguguauauauauauaguuuguauauguauauguauacacacacauauauu

SEQ ID NO: 4129686 - RNA, 130 nt, Human
gauguguucucuguggguuauuuugaggguuggguaagugucugauggagcgaaauggucagagccuagcucuucuuucauauuucuccuuucugagcacaugaacccacaauaccgcuggagaacacuc

SEQ ID NO: 4129687 - RNA, 71 nt, Human
gauguuacuggaacaccuugcuccagaaagcaaagaugcuuucaagaauaggagagguguaccuaaauguu

SEQ ID NO: 4129688 - RNA, 63 nt, Human
gauguuagauguuagauggcuuacagauagcuuuauuucugauugcugucugaugcugagguc

SEQ ID NO: 4129689 - RNA, 62 nt, Human
gauguuaggcaaauaacuguggagcaucuaugugaacugcccgcuguuccuugcuugagcuc

SEQ ID NO: 4129690 - RNA, 69 nt, Human
gauguucuugcaauagacuugguucuucuguauauucucugcacagggcaacaggucuguuagauuuuc

SEQ ID NO: 4129691 - RNA, 96 nt, Human
gauguuggaagcaagguaguagcaaaagacauuagaaucagccuguucugagaucagcuggaacaagugucugaacuccucugaacuuccauauuc

SEQ ID NO: 4129692 - RNA, 106 nt, Human
gauguugguggagaagcucuaaguacacuugucuugaacagccuaaagauugauuuucagguuguggcagucaaggcuccaggguuuugugacaaagaaccagcuc

SEQ ID NO: 4129693 - RNA, 60 nt, Human
gauguuguauaggcaggccaaccacauacuguaauguugcccucugucuguacaaguauc

SEQ ID NO: 4129694 - RNA, 75 nt, Human
gauguuguugaugcugcuaguacaggcuuuguguagagcaagacucaaacuguaaugcaggaucaagaaaguauc

SEQ ID NO: 4129695 - RNA, 87 nt, Human
gauguuucuccuuauguauaaaugugugugcacguguacauauaugagcauauguauacuaacacaugcaguugugcaagaaauguc

SEQ ID NO: 4129696 - RNA, 91 nt, Human
gauguuugcagugugaagccagucuaguaacaguuuaaauguaauaauaaaucacaguggguacuagauugaguuuauuccacuagagguc

SEQ ID NO: 4129697 - RNA, 80 nt, Human
gauguuuggucuguauguuaguuuguggugucagugaaaauuguguacaauuacaacuacauaaucucagaagcaauauu

SEQ ID NO: 4129698 - RNA, 60 nt, Human
gauguuuguuaggcucugaauagauauuuauuuccucuucucaugaagccuacaaacauc

SEQ ID NO: 4129699 - RNA, 124 nt, Human
gauguuuucugugucggaaguaguaucuauguuuuuauuuguaaacaugcauucuuuugguuggauuuauggaagacuaacagaaacauggguuuuagcauugcggucuggcugccugugcauc

SEQ ID NO: 4129700 - RNA, 121 nt, Human
gauuaaaacuauauaagccucaaugucuucaucauaaaauugagauaacugugccaacuuaacgggguucuuaguucccuuaaauuuguucugaaauaaggcuuauugcaaguaaauaauc

SEQ ID NO: 4129701 - RNA, 130 nt, Human
gauuaaacagacaugaaagagaaacagcugccaaucuguucuccaggaagcucugcuccacgggccuucauuuaagaauccuggagcuucaguuuccuuucgucagcuuuuuuucuuaauggccaaacuc

SEQ ID NO: 4129702 - RNA, 100 nt, Human
gauuaaauacguggaguaagucuuuacaguuucuguugcccagguaauaagcaucugcuuuaacaguauugaagauaaacuaacuaaucauguacuaauc

SEQ ID NO: 4129703 - RNA, 77 nt, Human
gauuaagauuuauuagaugcuuaccugcgccaaugggagauauacuggcccaaguaagcauccaauaaauguugauu

SEQ ID NO: 4129704 - RNA, 129 nt, Human
gauuaagccuucuuugaaagcacaguuuaggacaauucaggagggucucuauuuuccuccaguuggcuggcagcuccuguggcagcucuucuggguucuguguguaggaauuggcggaggcuaugauac

SEQ ID NO: 4129705 - RNA, 87 nt, Human
gauuaagguuuuuaggcaaugcucauuucagugaucaagaaggucagccauuccuuucaagugagcguagcugaaugggccauaguc

SEQ ID NO: 4129706 - RNA, 64 nt, Human
gauuaauaguuccuucuacuaccuccugagagucuguuucaggaagugguaaaggauguugguu

SEQ ID NO: 4129707 - RNA, 69 nt, Human
gauuaaugcuugccuagguuacagugaagguacucauguuucacugugcucucuagauaggcauuaauc

SEQ ID NO: 4129708 - RNA, 59 nt, Human
gauuacaaugagaaaugguuggcaaugauauuucagcugucauuuaucuuauaguaauc

SEQ ID NO: 4129709 - RNA, 69 nt, Human
gauuacacguuuuuaaucacauaaguuccaugacugaugcaauggaaucucgguugauaacuugugauu

SEQ ID NO: 4129710 - RNA, 68 nt, Human
gauuacagcagcucaaacaaagggcauuucuucugugauuaagugcuuuuucuugagcugcugugauc

SEQ ID NO: 4129711 - RNA, 73 nt, Human
gauuacaguaaacauaauuuaccuguaggggaaauaucugcuauacugguguaauugcuuguuugucguauuc

SEQ ID NO: 4129712 - RNA, 107 nt, Human
gauuaccuggguuuggcacaccugguuagggcucugagugggaaagaggguccugaaaccaggcugagcccccagccagagccagagccaaugcuggagccgguguc

SEQ ID NO: 4129713 - RNA, 77 nt, Human
gauuacucuacccaggcuggagugcaguagugugaucccggcucacugcagccuccgacuucuggguucaagugauu

SEQ ID NO: 4129714 - RNA, 58 nt, Human
gauuaggcuuaaucacagaaagcagaagagcuuucaggugggccuuuugagcauaauu

SEQ ID NO: 4129715 - RNA, 57 nt, Human
gauuaguaagaguuuaccuauugucaugaggcaaaccuggguucaacuccuacaguc

SEQ ID NO: 4129716 - RNA, 64 nt, Human
gaguccggagccguggacggggcccuaggcgacaccagggcgcccugacugcggccucccacuc

SEQ ID NO: 4129717 - RNA, 63 nt, Human
gaguccggagcucagaagugagugaguuccaggcuggagcucacaggcuuugacucucgcauc

SEQ ID NO: 4129718 - RNA, 69 nt, Human
gaguccuccacccaaacucccuucucaagguacaagggcugaucccguaccagggauggguagggacuc

SEQ ID NO: 4129719 - RNA, 55 nt, Human
gaguccugaauccuguggcaacgugaaaagaugauguaaugcagggcagggacuu

SEQ ID NO: 4129720 - RNA, 89 nt, Human
gaguccuguuagcaaaagucuuuccuuagaauaauucuuuuauagaauagugaaagagaaggaaguggaagaaaaugcugauggcucuc

SEQ ID NO: 4129721 - RNA, 90 nt, Human
gaguccuuugugaaagcagcauguucauuacauuauucaguaucaaauuauuagacaaaaugaaauauguugccuucugccauagggcuc

SEQ ID NO: 4129722 - RNA, 86 nt, Human
gagucucacucuguugccuaggcuggagugcagugacaugaacucugcucacugcgaccuccgccucccagguucaagugauucuc

SEQ ID NO: 4129723 - RNA, 77 nt, Human
gagucucagagucgaggacugguggaagggccuuuccccucagaccaaggcccuggccccagcuucuucucagaguc

SEQ ID NO: 4129724 - RNA, 108 nt, Human
gagucucaguugguucaggguccuggagcuugcaguuuucuguuggguuucaaacgccaacuuuaaagaggaggcuuggguuccacucuuaaugcuaauaaaagacuc

SEQ ID NO: 4129725 - RNA, 86 nt, Human
gagucucgcuccgucgcccaggcuggagagcaguggcaugaucucagcucacugcaaacuccgccucccggguucaagugauucuc

SEQ ID NO: 4129726 - RNA, 64 nt, Human
gagucucuauaaugcaugucaccugaucucaggugauccugaggcagccugcauuaaagagcuc

SEQ ID NO: 4129727 - RNA, 60 nt, Human
gagucucugcuauguuuucucugguuauacuuagagauccuuuccaaccuagugagacuc

SEQ ID NO: 4129728 - RNA, 60 nt, Human
gagucucugggagggaaagaagcuguccuuccuccaugcuucucuuugguucagagauuu

SEQ ID NO: 4129729 - RNA, 64 nt, Human
gagucugagucuaauggccccaggauuaacgagaagcuacauccuauccccauaucucaggcuc

SEQ ID NO: 4129730 - RNA, 98 nt, Human
gagucugcaaaguuaguuaaagaaagucauccuuaggcauugggaaaauucaauuuucaucacagguccugaugacauuuccuuuaaacgccagauuc

SEQ ID NO: 4129731 - RNA, 72 nt, Human
gagucuggguggagggcgaggggcccagagggacuucccaggcucccugccuguccucagucaccccugcuc

SEQ ID NO: 4129732 - RNA, 56 nt, Human
gagucuguuuggaaucuguagggaaugaacucaaccuaaggaaagccaaagaggcc

SEQ ID NO: 4129733 - RNA, 63 nt, Human
gagucuucauuuaguugauccagaauguugcugcauacucaaucaaggucaugaaauagacuc

SEQ ID NO: 4129734 - RNA, 64 nt, Human
gagucuucuacgcucacacaaagccuuagugucagcuaggagugugugaauagcuggaggauuc

SEQ ID NO: 4129735 - RNA, 64 nt, Human
gauucuggcuugcaucaacgcucuucaaggacagcuccuuggaacauugauccaaacuggaguc

SEQ ID NO: 4129736 - RNA, 61 nt, Human
gauucugggccucacccucagaguaucuaauuuagaaagucugggagggagccucagaauc

SEQ ID NO: 4129737 - RNA, 62 nt, Human
gauucuggggagucaaagagaccugagcucaaauucagacuuugccauuuacucuccguguc

SEQ ID NO: 4129738 - RNA, 85 nt, Human
gauucuguagcagaugcugcucaccugauuaugaccuuaguauuuuggcugaaauagucagugaagacacacccuguccagaauc

SEQ ID NO: 4129739 - RNA, 68 nt, Human
gauucuuucucugcacauguaguaaauauuaaacauugaucagacaguuaugugcaugagaaaauauc

SEQ ID NO: 4129740 - RNA, 56 nt, Human
gauucuuuguuugcuucuuucccucagaacucuggagacuuugcuugcagagaguc

SEQ ID NO: 4129741 - RNA, 82 nt, Human
gauucuuuuaggccaccaggguuccauuuagagaauuacaauugccaugugcuaacugguacucugguagccugaaugaguu

SEQ ID NO: 4129742 - RNA, 63 nt, Human
gauugaaagacuguuugggagaugguuuuucacucucugucucucuccauauagucuuuaauu

SEQ ID NO: 4129743 - RNA, 61 nt, Human
gauugaaaggaaaaccagagugauguuaugacucagaaagugacucuuuuccuuuugaauc

SEQ ID NO: 4129744 - RNA, 120 nt, Human
gauugagacagguguauguauucagucuguaucauguuuauguguaggauauguuugcuucaaaauauuuccuugcaacuuaggcauguuuauucauuguuuauucuuacugcaucaauc

SEQ ID NO: 4129745 - RNA, 72 nt, Human
gauugcaaagauauuuauguuguuuguggcuuagcaagauaauuaaaggauauaaauuaaucaagugcaauu

SEQ ID NO: 4129746 - RNA, 73 nt, Human
gauugcucaaauaaaccuauucugaaauguauuugucaugcguugacauuucugcuagaauaggugaccaauu

SEQ ID NO: 4129747 - RNA, 61 nt, Human
gauugcugggucccacucccagggucucugauucaguauaugugggguggggcccaagaac

SEQ ID NO: 4129748 - RNA, 103 nt, Human
gauuggcauuuaagagaccuugauucaagaccuagcucagccauuaauuagcccuguagucguuggcuaagagcuugauauccaaggcucucaauuuccaauc

SEQ ID NO: 4129749 - RNA, 76 nt, Human
gauugguaucgccugguugcuauuugcuuaagaacaaauauuauacagaugagaucaggcauaauuuuaaaagauc

SEQ ID NO: 4129750 - RNA, 68 nt, Human
gauuguagacauauuagacugccauaguccaaaucaaugcugaucacauuuuaaugugugcugcaauc

SEQ ID NO: 4129751 - RNA, 57 nt, Human
gauuguaucuugaacuuguuuauuuuuaccuuaguaauuaagguucagguuacauuc

SEQ ID NO: 4129752 - RNA, 66 nt, Human
gauuguccaguuucagggucugcgcuuuuaaccaugaagccaaggcccuggaauugaaaggcuuuc

SEQ ID NO: 4129753 - RNA, 102 nt, Human
gauugugaugaugguuucacagguguacauagauguacauacauauguaaaaacuuaaauauguacaauuuguuguaugucuauaaagccguaaaaaugauc

SEQ ID NO: 4129754 - RNA, 74 nt, Human
gauugugcccugaaggauguguggugggaguggguaagcugggcucccaccuuaaccuucacaugagcauuuuc

SEQ ID NO: 4129755 - RNA, 61 nt, Human
gauuguggagguuuaaguaaugggaaacgagugucucuggugaaacuauacuucuaugguc

SEQ ID NO: 4129756 - RNA, 73 nt, Human
gauuguguguggagugugugucugccugugcgcccugugauguuuuugguucuuuuauauuucacacauauuc

SEQ ID NO: 4129757 - RNA, 118 nt, Human
gauuguugauuaaaaaccaugucacauucauugugcuuguaagguuucucuccacuaugaauuacaaggugugaauuuugaccuuuuaauuacaaggugugaauuuugaccaacgguc

SEQ ID NO: 4129758 - RNA, 85 nt, Human
gauuguuucaggaaucaaugguagauuaaguaaauuagauccuuucaggaugcguugcuuuuaguauuauuucuaagagacaguc

SEQ ID NO: 4129759 - RNA, 91 nt, Human
gauuuaaaaaauauggagacaugaaaaauaacaaaacacgguuuuaucguaugaccauguguuugcauuguuaauucagucccguaaaauc

SEQ ID NO: 4129760 - RNA, 77 nt, Human
gauuuacagcaaccuaaauccacuaacuagcucgcauuucaguugccuauuggugcauguaggugaugcuuuauuuc

SEQ ID NO: 4129761 - RNA, 63 nt, Human
gauuuacagguuagguccuguaaaagggcacuuguaugacccucuaggccugcgcuguauauc

SEQ ID NO: 4129762 - RNA, 68 nt, Human
gauuuacauuuuauuuggggauuuauugaccuuuggaaagguugaaaucccagauaguaauguauuuc

SEQ ID NO: 4129763 - RNA, 58 nt, Human
gauuuaccucugagggugugguugcacugagcgugaucacacuucaaaggguuagauc

SEQ ID NO: 4129764 - RNA, 61 nt, Human
gauuuaggaucagagacuuugaagguuagaagagaccuaagagaucuucugguccagaguc

SEQ ID NO: 4129765 - RNA, 79 nt, Human
gauuuaguaaucauucugauggucaaugcuagcaagucaagcuagcuauaugcauuugaaugcucauaauuacuaaauu

SEQ ID NO: 4129766 - RNA, 97 nt, Human
gauuuaguacgauugcuaauaagaacaacuaagguuuauugagcacuuaccauguggcagauaaauucauuuguuuguauuaauuuguauuguaauc

SEQ ID NO: 4129767 - RNA, 122 nt, Human
gauuuauaucuugaaugcaaauaggaauauauguuuaaauagcucuuguagaagaaauucaagaagugguuucuucuuggcuuuuugucauauuuuucugaaugcaaucuggguaauauauc

SEQ ID NO: 4129768 - RNA, 71 nt, Human
gauuuaucaucuguuauuuaugccugagucugaauaaaagauuugagagcagauuuugauagaagaaaauc

SEQ ID NO: 4129769 - RNA, 62 nt, Human
gauuuaugaccuucggcaguuagacauuuucuacugugcugcccuucgucaucuauaaaauc

SEQ ID NO: 4129770 - RNA, 60 nt, Human
gauuuaugcucuucucuaaaacacagauguggguguguguuugggggagaugcauuuguc

SEQ ID NO: 4129771 - RNA, 92 nt, Human
gauuuauuaggcugguacaaaaguaguugcgguuuuugccguuacuuucaauggcaagaaccgcaauuacuuuugcaccaaccuaaugauuc

SEQ ID NO: 4129772 - RNA, 78 nt, Human
gauuuauuggcucaucuaucagaaaguccagauauagugagggcuucagcauuguuggaugacaucguucaauacauc

SEQ ID NO: 4129773 - RNA, 77 nt, Human
gauuucagcagccucuccuagggcccuaccugacccucaaguuucaggguacauggagcaaaugggacucugaaguc

SEQ ID NO: 4129774 - RNA, 66 nt, Human
gauuucagucuaagauagaacucugaggcuaccauucuugggucuuggauucuauuugcugcuuuc

SEQ ID NO: 4129775 - RNA, 55 nt, Human
gagcccagucugcuccugcgcccaccgggcagggcugagggccgcagcugggcuc

SEQ ID NO: 4129776 - RNA, 56 nt, Human
gagcccucauugaaucugcauuuuauagcauguacugugcaaauuucggggguauc

SEQ ID NO: 4129777 - RNA, 65 nt, Human
gagcccugcaguuuccugccugcucuguaugccuuuugcaggccagcacgacagccgcaggccuc

SEQ ID NO: 4129778 - RNA, 80 nt, Human
gagcccugcucaaauuucagacucaugaacaaaauaaauaaauaauuguuguuucaagccucugaguuuugaggugguuu

SEQ ID NO: 4129779 - RNA, 87 nt, Human
gagccgcaugcaggggaguggcaggcccggacccagugcccagaccuggcucacgugacucugcuuuuuccacugugucugcggcuc

SEQ ID NO: 4129780 - RNA, 74 nt, Human
gagccgcccgcgccagccucuccaucucgcaaguuuuaauuaacgcugagggagaggcggcugacgggcggguc

SEQ ID NO: 4129781 - RNA, 68 nt, Human
gagccggagccggcgaaggagcggaaggagcagcuccagcuccagcuccagcuccggcuccgaagcuu

SEQ ID NO: 4129782 - RNA, 56 nt, Human
gagccgggacucucucugccuggccagacuuccagcaaagggagagaccgcggguc

SEQ ID NO: 4129783 - RNA, 100 nt, Human
gagccgugcacucgcuggauagacauuuaucuccauguggaggacugggauggucccuccacagggagauaaauguuuauccagcaggugcacgugucuc

SEQ ID NO: 4129784 - RNA, 62 nt, Human
gagccgugucugcaaauauuuuauucagcuuuagagguucagaaagugcacagauacagcuc

SEQ ID NO: 4129785 - RNA, 72 nt, Human
gagccgugucugggauagcagaaguaucuccgucucucccgugucaguacuucuguuucucaagcaugucuc

SEQ ID NO: 4129786 - RNA, 73 nt, Human
gagccuagggaggucuggcugcccugagcccccuaccccugggcuuugggcaguaaacgguaccuagagacuc

SEQ ID NO: 4129787 - RNA, 99 nt, Human
gagccuaucagccacaccagcuguucuccgaugaccccgugugccuggugccacgcugggcugguggagcagcgguuaagagugggcuucacagugcuc

SEQ ID NO: 4129788 - RNA, 73 nt, Human
gagccucaaaguagggguaagccaggcuccggaaggcccgggaggucagguuacgcaccucuuuguccgcauc

SEQ ID NO: 4129789 - RNA, 64 nt, Human
gagccucagggacggaggcuugcggauuccagggcugagucuggguuccaggucucugaggcuc

SEQ ID NO: 4129790 - RNA, 65 nt, Human
gagccucaguuuuaaauuucccaugagauaguaucccaugagaccugguuuaaggcaccugguuu

SEQ ID NO: 4129791 - RNA, 68 nt, Human
gagccucaugugauuacacuaagaagguggcauuugauugccaagucauggaaguaucauggagguuu

SEQ ID NO: 4129792 - RNA, 58 nt, Human
gagccugauacacaaguggaaggagacgggcaaaggccugcuccucucguguaagcuu

SEQ ID NO: 4129793 - RNA, 77 nt, Human
gagccugaucccuagcuguuucuccuacauacuaugugaugacaggcauugugaaggagcaugcagaggggugguuc

SEQ ID NO: 4129794 - RNA, 72 nt, Human
gagccuucaggaauccuggaaagccuaggacucaagcagacuuugagcaccuggaccagauucuggauguuu

SEQ ID NO: 4129795 - RNA, 130 nt, Human
gagccuugcagacuuucauuuggaguuugaaccuguuuugguugcauuucauuuuuggggaacuucauuaaugugagauuggcaaugcaaaugcaggugcaguuuucuguuaauguuaauucuguuguuu

SEQ ID NO: 4129796 - RNA, 58 nt, Human
gagcgcaccagccacaucucaauacauagcacugaaaaaaugggcuauggugcuguuu

SEQ ID NO: 4129797 - RNA, 63 nt, Human
gagcgccucagccuagagccggacgcuuuggcuucuucgccaucuggcccuagguugggccuc

SEQ ID NO: 4129798 - RNA, 55 nt, Human
gagcgcugggcugagaaguuaagcaaauguuguuuugugcugccagcugggcuuc

SEQ ID NO: 4129799 - RNA, 59 nt, Human
gagcgcuucccuccaaacgcccucagcccucaucucggccuggagaggaaaugcugcuc

SEQ ID NO: 4129800 - RNA, 61 nt, Human
gagcggccgccgggccacgugaccgguuuguuuacaaacacugccgggcccgcggccgcuc

SEQ ID NO: 4129801 - RNA, 116 nt, Human
gagcgugcuguggcccuucccugcgcugccucagggugccucccgcucgccgggacugaguuccgcgccggcguggccugcuggguuccaagcgccaggagucggcgcagccgcuc

SEQ ID NO: 4129802 - RNA, 56 nt, Human
gagcuaagaccugagggcaaguccaaggauucgcagcccccugccaggaucagcuc

SEQ ID NO: 4129803 - RNA, 55 nt, Human
gagcuaagagagcccagugucaauuagacauugacaagacaauggcucuuagcuc

SEQ ID NO: 4129804 - RNA, 59 nt, Human
gagcuaccuguggaagggaccucagcgaaaaccagugauugcccacacagcaguagcuc

SEQ ID NO: 4129805 - RNA, 72 nt, Human
gagcuagaauuaggccaauuucauaacacccaacagguguuauaaauguaauagauugccuaacuucugcuu

SEQ ID NO: 4129806 - RNA, 57 nt, Human
gagcuagacugggcucugauguaggugccaagcuauagguuggguccagaucugcuc

SEQ ID NO: 4129807 - RNA, 85 nt, Human
gagcuagccagcagaucaauguagaauauucugaauuuuuaauuuuaagugcuucuaaguugaaucaugcugaauauaaaugcuc

SEQ ID NO: 4129808 - RNA, 61 nt, Human
gagcuaggauaucaugaggguaucuccaguccucaggagaaauaucuuuauguucuugcuu

SEQ ID NO: 4129809 - RNA, 92 nt, Human
gagcuaguaucuugcagaauuaauuccagcggccaccauucacaaaaauuaugugaaaauaaugccucuggaguugcuuguaaaugaugcuc

SEQ ID NO: 4129810 - RNA, 86 nt, Human
gcaaacauggagagcugaagcauggacagggcguggcagggaggauccccgcugcccuccugcauguggucagcacuccugcuugc

SEQ ID NO: 4129811 - RNA, 77 nt, Human
gcaaacugacagauugauuaggcagggaaauugaagaaaauuaauauuccagaugaaaucauucagguuaguacugc

SEQ ID NO: 4129812 - RNA, 78 nt, Human
gcaaacugccucaucuguggucaaaauagaaacuucucaguugccuugauugaccuagaaauguuuuauguaauuugc

SEQ ID NO: 4129813 - RNA, 114 nt, Human
gcaaacugguccaagaacuugagguaggccugacgcuggggugcagcugcuggaaugaaguggccaccagagugggugagggugauggcuccgggaaauuggcuggccaguugc

SEQ ID NO: 4129814 - RNA, 59 nt, Human
gcaaagaacagccugagaguggagcuggcugcagccuggcuccuaaggacuggcuuugc

SEQ ID NO: 4129815 - RNA, 102 nt, Human
gcaaagaaggaaugcauggaguggcaggcggccaugaucuggcaggcgcuguucaggcccuguuugugagagggcuguucaccuagguggugccuucuaugc

SEQ ID NO: 4129816 - RNA, 84 nt, Human
gcaaagacagugcaugcuggcuuggaaggaaagcgcagcuggagcucuccauggugcuuccccaagccacagccuguucugugc

SEQ ID NO: 4129817 - RNA, 65 nt, Human
gcaaagacccaggugucuauccacuugcuagaaaccaucaugagaguuagauaccaguuuucugc

SEQ ID NO: 4129818 - RNA, 102 nt, Human
gcaaagauuuaaauguuggauugagcaguauuuuuuuccuguggaaugucuccagggaaucucugaguguguuccaaauucaagccauuguaaucuccuugc

SEQ ID NO: 4129819 - RNA, 61 nt, Human
gcaaagcaaggaagacacagaauuagauuuaaaucuagguaaugcaacuacuuugcuaugu

SEQ ID NO: 4129820 - RNA, 70 nt, Human
gcaaagcacacuggagaugucgauugaaaacucuccuuaaaaucugucaacaguuucccauggcuuuugc

SEQ ID NO: 4129821 - RNA, 82 nt, Human
gcaaagccaggccugggcaguccugggcgcuacagccccgugcacgggagccagcuccgcaggauggcgcgccuggcugagc

SEQ ID NO: 4129822 - RNA, 62 nt, Human
gcaaagccuucccuggcaccccuaguagaugccauugguuuuucucuaugccaggggccugc

SEQ ID NO: 4129823 - RNA, 61 nt, Human
gcaaaggaaaagauucaugaauucaggccauagccuggggccugagaacuuuuacuuaugc

SEQ ID NO: 4129824 - RNA, 81 nt, Human
gcaaaggaguguguuuucucuccagcaggcaguggggaccuuagacauuuguaagcaagagagaggcacauucagauuugu

SEQ ID NO: 4129825 - RNA, 64 nt, Human
gcaaaggaucuuucuuuuuaccauuuuaauagccugugcaaugggauuaagaaagaucuugggu

SEQ ID NO: 4129826 - RNA, 56 nt, Human
gcaaagguggcuaccagcugcuccaggauuguagcuuucuaguuuagccaucuugc

SEQ ID NO: 4129827 - RNA, 80 nt, Human
gcaaaguaugugacauaucucaguuugaagauuucuuaccucuucaggcuuccguaauauguuauucucaucauauuugu

SEQ ID NO: 4129828 - RNA, 64 nt, Human
gcaaagugauuaacauggagcuuuugcuaauuaaaucagcagaagauuuagguugacgcuaugc

SEQ ID NO: 4129829 - RNA, 84 nt, Human
gcaaauacagaagcagcaacauuacaugguccaggauauauauuaauaugugguaggagugugugugugugugugugugugugu

SEQ ID NO: 4129830 - RNA, 56 nt, Human
gcaaauacauguugagcaccuacuguaugccaggcucugugcucaguugcauuugc

SEQ ID NO: 4129831 - RNA, 96 nt, Human
gcaaauacugaguuucacaagugcugggcuugggagagcucuguccccuccauggggggagguccuguguccaggggccugugagucuggaguugc

SEQ ID NO: 4129832 - RNA, 74 nt, Human
gcaaauagaaauaaaaggauuugucauuuguagaaaucaaauaccuaaaaugacuaauaaguuuuacuguuugc

SEQ ID NO: 4129833 - RNA, 64 nt, Human
gcaaauaguucuagcucagaagcucuccugagguugcaguugagcuucagcugggacugcaggc

SEQ ID NO: 4129834 - RNA, 74 nt, Human
gcaaauauugauucugucccaaguugauguuuuccccuuaacauuauuauaaugagggauaaaaaucaaauugc

SEQ ID NO: 4129835 - RNA, 55 nt, Human
gagcuuccugaugccgaccaguaaauagauaauuguaccuccauucaggaaguuc

SEQ ID NO: 4129836 - RNA, 65 nt, Human
gagcuucgcagauggaaagugcuugagggggugcugaaugccuagguaauggucuauuucgucuc

SEQ ID NO: 4129837 - RNA, 57 nt, Human
gagcuucuaggcagcagaacugggacacgaacccagguauuucugacccuagagcuc

SEQ ID NO: 4129838 - RNA, 76 nt, Human
gagcuucucaagauuuguauugggccucuguagaaucugacuucuguaguggcucaauacaaaucuguggauacuc

SEQ ID NO: 4129839 - RNA, 70 nt, Human
gagcuucugccuucuuucugggugguucugagaacaugagaguugcuggguccagagaguggcaaagcuc

SEQ ID NO: 4129840 - RNA, 83 nt, Human
gagcuugguauuugcugugggguagaucuuucucaggaaugucacuuucugugaauaagauucucccacugaacuccauucuc

SEQ ID NO: 4129841 - RNA, 84 nt, Human
gagcuuguaaugccagagacacuuggagguagaagaaugaaguucaagacccgguucuaccacuaagugugcuuugaucagcuc

SEQ ID NO: 4129842 - RNA, 59 nt, Human
gagcuuuaagggcacuggucuuacagagccuguggggcuagaccgugugcucucaguuc

SEQ ID NO: 4129843 - RNA, 75 nt, Human
gagcuuucucagggcgcagugaggcagucaagguaacaucccuguagcugcgaucacagcuccugcugcaggcuc

SEQ ID NO: 4129844 - RNA, 63 nt, Human
gagcuuucuucuccuuugccauguguuuucauuucugccagacacuggcacuggggaagccuc

SEQ ID NO: 4129845 - RNA, 60 nt, Human
gagcuuuguuccgugguggcacacaaaucuuggcuugcuguaccaucauuggcaaaccuc

SEQ ID NO: 4129846 - RNA, 77 nt, Human
gaggaaaaaaaagguggaaagaagggcuagggacugagaugacacucugguuuuucuuccauuaagacauguuccuu

SEQ ID NO: 4129847 - RNA, 88 nt, Human
gaggaaaaaacacccagcacagugauuaugaguacuaauuaggaagaaaaacaguggcuuugaugaaucugugcuugguuuguuccuu

SEQ ID NO: 4129848 - RNA, 112 nt, Human
gaggaaaaagugcuuauugucagaggcuggaauauuagaaauguuuucaaaaaucccaugaagcauucuaaugaccaccucauauagaaagcuuagaaaagauuuuuuuuuc

SEQ ID NO: 4129849 - RNA, 62 nt, Human
gaggaaaacuguaagugguuggaagaaggcuuuguuuucuacaagacuuuuaguuauuccuc

SEQ ID NO: 4129850 - RNA, 67 nt, Human
gaggaaaauaacaacuaagggcuuccaaaggaaauguuugccuuuuguucuuuuuguuauuuuucuc

SEQ ID NO: 4129851 - RNA, 102 nt, Human
gaggaaacaggcaauauugcuucagguucuaguuguuuuuccaauaaauagaaaucaacagagcaaagccugaacaacauuguaacacaugccuguguucuu

SEQ ID NO: 4129852 - RNA, 94 nt, Human
gaggaaaccaugccaggaagcuggugugaggaugaaccgcaauccacaccuguuuucuccucagcacagcugucuccuaaggcauggacaccuc

SEQ ID NO: 4129853 - RNA, 78 nt, Human
gaggaaagagcauggaucuggggcucugcugcucaccaguuaggugaccugggcaauccccaggccucucuaagccuc

SEQ ID NO: 4129854 - RNA, 73 nt, Human
gaggaaagaugagugagagcaucaacuucucugacaaccuaggccaguaaguagugcuugugcucaucuccuu

SEQ ID NO: 4129855 - RNA, 86 nt, Human
gaggaaauagaugagagguaacacuguucagugggcacuuuuguacuagguccaguguuggagguuuuaccaucauuauuucacuu

SEQ ID NO: 4129856 - RNA, 72 nt, Human
gaggaacacaggcaagagugcaggucugagcugcuuagaaggcucagagaugugugucuguguuugacccuc

SEQ ID NO: 4129857 - RNA, 102 nt, Human
gaggaacccgaagcacuagggcaucuggcuucugggccagggcagacaaaguuguggcuguggacucagauggcuccucgccuugugugugcagaggcccuc

SEQ ID NO: 4129858 - RNA, 83 nt, Human
gaggaacgugcccccacagccagcucccuccccugcagggccugagggcucagugcgggauggggcugcagggcuaucuccuc

SEQ ID NO: 4129859 - RNA, 62 nt, Human
gaggaacuggcaguguuguguugugggugagccacuuacaauggguauacuuccauuuccuc

SEQ ID NO: 4129860 - RNA, 77 nt, Human
gaggaagaagggaagccggccauguggucuugugcugcugagucagcacuuucugcugccuggugcccugucuccuc

SEQ ID NO: 4129861 - RNA, 69 nt, Human
gaggaagagacccgcccugggagcccgcgagggaagguucccggcuggcuggcgggugcguccucccuc

SEQ ID NO: 4129862 - RNA, 77 nt, Human
gaggaagcagcuggugagauggagcaaaagauggggcagguuuuagccucgcugccugguuucucagcugcauacuc

SEQ ID NO: 4129863 - RNA, 56 nt, Human
gaggaagcagggcuuggcugagaugcaggcugugggcggcugagcugggcuuccuc

SEQ ID NO: 4129864 - RNA, 55 nt, Human
gaggaaggaagucgaggagccaggcaggccaggucuuaccucagcuucuuuccuc

SEQ ID NO: 4129865 - RNA, 92 nt, Human
gaggaaggaucucuugaacccaggcuuuugaggcuguagugagcugugaucgcaccaugguacuccagccugggugacagagaccuugucuc

SEQ ID NO: 4129866 - RNA, 120 nt, Human
gaggaagugcugagcccuagggcgagggagggugggucauucuuacaucagugaauguugaagagaaggcccugacccaccccguucugccugccagcucugggguguggcucugaacuc

SEQ ID NO: 4129867 - RNA, 88 nt, Human
gaggaauaccuuagaaagugacaaacgaaagacaugcuacagucuucuaagcccauucuguccuuuuugacguaucuuaacuucccuc

SEQ ID NO: 4129868 - RNA, 79 nt, Human
gaggaauaugcuuuuucuuacaaguacuuuauauauuguuugaguguacauucuguuugagguaggcaauuuuuuccuc

SEQ ID NO: 4129869 - RNA, 63 nt, Human
gaggaaugaaaugggaaagagacuagaugcugugcucaucauccuucgucccguuuucaccuc

SEQ ID NO: 4129870 - RNA, 88 nt, Human
gaggaaugaaguuucaccgugaaccgauuccucaccaaagaaacaaaaacugguggcaucgagacgcacgggaggacuucaaguccuc

SEQ ID NO: 4129871 - RNA, 73 nt, Human
gaggaaugggugucucgugauuagcugaaagucuacaucaccacacaguccccgcacagugcagccauuucuc

SEQ ID NO: 4129872 - RNA, 91 nt, Human
gaggaauguguacaggugaggugacaggcauggggucaugcagcugggaguggcagagcuggcacugaccccaggccugugucuguuccuc

SEQ ID NO: 4129873 - RNA, 60 nt, Human
gaggacaccauggucccagccuccaccucucaucucccuggccccagcccauggguucuc

SEQ ID NO: 4129874 - RNA, 102 nt, Human
gaggacacuaugaaguaagugauaggauuauucccauuuccaagauaagaaaauugaggcuuggagagguugaauaacuugucgaaggucacauggcuccuu

SEQ ID NO: 4129875 - RNA, 88 nt, Human
gaggacacugcacgcccccugaggcuggagugcaguggugcaaucauagcucacugcaaccucagucuccugggcucaagcaauccuc

SEQ ID NO: 4129876 - RNA, 61 nt, Human
gaggacagagccgccuggcaagcccaaaacauucccaacuggccuguuagacggaguucuc

SEQ ID NO: 4129877 - RNA, 94 nt, Human
gaggacagccugugcuuaacagugaccccugguggccaugagaccugauggcuuuaguguagguuucuguuguuuggaaauaggacugauccuc

SEQ ID NO: 4129878 - RNA, 111 nt, Human
gaggacagugagauuugauaggcucuggaauguuggauuacccacccuugccaacuuuucuguuuaagccauacauuucagacucugguuuccuuucuuaccucguuccuc

SEQ ID NO: 4129879 - RNA, 59 nt, Human
gaggacaguuguggcuuauauuauaggcucaggcagcccuaagcacaugaacaguccuc

SEQ ID NO: 4129880 - RNA, 60 nt, Human
gaggaccucagaggccagggaucuaggggccagugcuccgugugccucacccucugccuc

SEQ ID NO: 4129881 - RNA, 106 nt, Human
gaggacgaagcagagaagaaaauauggcaacacaggggguuacaaauuguucauuuacugaagguuucgaauucuuguguuugcuuuuacuuuaaugcugccccuu

SEQ ID NO: 4129882 - RNA, 99 nt, Human
gaggacugguuuauauguguuuggugaguaagauagagaaaaaguguuuaaucuuacaauuacaagacacucuagagaugaauauaaucuaguggcuuu

SEQ ID NO: 4129883 - RNA, 109 nt, Human
gaugggaaaaugcagcuuuauaggaaacacucauguguuacucuccaucagagaauucauaauggacagaaaccauaugaguguaagcaaugucagaaguccuuuaguc

SEQ ID NO: 4129884 - RNA, 58 nt, Human
gaugggaauccuguaaucuacccaugacugcggccgcuguacuuugcaggcucccauu

SEQ ID NO: 4129885 - RNA, 88 nt, Human
gaugggagaaaauucuucugaccuuggagugaaugggggcagguguccaguuauacuucuuuccccaaacucuaaaaucgucugccuc

SEQ ID NO: 4129886 - RNA, 64 nt, Human
gaugggagagcagagcagucuggagauccagcaauagcugggguuucagguggucugcaccauc

SEQ ID NO: 4129887 - RNA, 70 nt, Human
gaugggauaauaucaaauuuccuaugguuuagcaaacauugacaaauaggggaaauuaggauugcucauc

SEQ ID NO: 4129888 - RNA, 67 nt, Human
gaugggauuuuuuauguguucagggguaagcucuaccuacaggaaaaauuauauagagaaacccauu

SEQ ID NO: 4129889 - RNA, 78 nt, Human
gaugggcaggggcccugcuuccguuuaaccacagcccugugacaugccccaaaagggaagcagcagccgccuguccuc

SEQ ID NO: 4129890 - RNA, 92 nt, Human
gaugggccugggaggcagcagagcuuuguccuggcuccauuccuugcuggcuugcaguggacaaggcccuuagcucucuucaagcuuugguc

SEQ ID NO: 4129891 - RNA, 75 nt, Human
gaugggcucccuggcggcuugagaagcagagaaagggaaauagcacauucauugacaucugccuggagucccauc

SEQ ID NO: 4129892 - RNA, 69 nt, Human
gaugggcucuuuugaauauuuaugucaggacacaucuguucugggcuugaaaguuuaauaaagcuuuuc

SEQ ID NO: 4129893 - RNA, 81 nt, Human
gaugggcuggaaaacaggaguggagaggugccucuguguugccuacagccaucugggguccauuucuucucucugccuauc

SEQ ID NO: 4129894 - RNA, 62 nt, Human
gauggggcaggcagcagguaguguguugacuccugaauucuacaaagcuguauagccugguc

SEQ ID NO: 4129895 - RNA, 60 nt, Human
gaugggggccagggccugcuuuggcaacucccugccaguucuugggucugggcuuccguu

SEQ ID NO: 4129896 - RNA, 77 nt, Human
gauggguagcagugugcuucguuucaugagcuuuaaagaguugagaaggucaagcaaguugcauauugcuauucguc

SEQ ID NO: 4129897 - RNA, 66 nt, Human
gaugggucucuaaacucccagguacccucucaaacccagcuaaccuggcagguucaaaggccuauc

SEQ ID NO: 4129898 - RNA, 83 nt, Human
gaugguauuuaauauaauccauguaauuuuaaggauuuuaggaauaagguuauuguagauuauaggcaguuuaaaaggccauu

SEQ ID NO: 4129899 - RNA, 69 nt, Human
gauggucacuguguccccagcaguugagacccauuugacagagucucaggcagcugcaccgugaccauc

SEQ ID NO: 4129900 - RNA, 69 nt, Human
gauggucuuuccuggggacuccacuggugguugggaagaagguguguggcagugcccagggagaugauc

SEQ ID NO: 4129901 - RNA, 79 nt, Human
gauggugcauguagccaucaagauagcguccauccauuccucauguuugugucuuugugguacaagagcugcacugguc

SEQ ID NO: 4129902 - RNA, 61 nt, Human
gaugguguccguucuccauucugaccugcauacauguccccacuguggagacagaugccuc

SEQ ID NO: 4129903 - RNA, 63 nt, Human
gaugguuuacuucauccaaucuagauaauuauuuuaugucuauucugggaaagguaugcuauc

SEQ ID NO: 4129904 - RNA, 56 nt, Human
gaugguuuggaaugaaguagcuauucauggcagaaucuaccaucucccaaaccguc

SEQ ID NO: 4129905 - RNA, 64 nt, Human
gauguaacucuuuggaaaacauuuugguaguuccacaaaaagugaaacauagaguuaccauguc

SEQ ID NO: 4129906 - RNA, 121 nt, Human
gauguacaaccauguauuuguguaggcaggaugcaacagcuuguaguggacaaaaaaauagucuaacacuaacuugcugagugaccaugccaacucacuuacuuugggucuguuucacauc

SEQ ID NO: 4129907 - RNA, 66 nt, Human
gauguacaaucuuggucccuuuauuauggacggcaauaaaauucacaguaaccaaggcaguacauu

SEQ ID NO: 4129908 - RNA, 57 nt, Human
gauguagaaaucuggaaaucagauccuaaguuaccucugagccagucaagcuacauu

SEQ ID NO: 4129909 - RNA, 75 nt, Human
gauguaguggacagcgaaagugccugggaaguauauuauuauuacauuuuauuuauugagugcuguccuggcauu

SEQ ID NO: 4129910 - RNA, 69 nt, Human
gauguauagaguugugauuuggaaaggugcuuugcaugcaaaguucagccugguuuuaaugcuaacauc

SEQ ID NO: 4129911 - RNA, 65 nt, Human
gauguauuuucuguuuuguugaaaaguugugucgaagcaacaaaacagcaaaaugaaaauggauu

SEQ ID NO: 4129912 - RNA, 65 nt, Human
gauguccuaugaggugggacuguuggcagaaaguuuucccacauucaccacacuuauagggcuuc

SEQ ID NO: 4129913 - RNA, 82 nt, Human
gaugucuaugcaguuuuacaauuuaaaguagucauuuaaucaaacauaacuuucauuugugaagacuguauuccagaacauu

SEQ ID NO: 4129914 - RNA, 73 nt, Human
gaugucugaaaguagggcugaucuagagaaauuggaaacauuagagcagguuucaacuuuuucaugagauauu

SEQ ID NO: 4129915 - RNA, 87 nt, Human
gaugucugccaguucacaguguuuucuuugcauugcucaaggguaaagugaaagauaacaacacuguuuugaacauguuuagauguc

SEQ ID NO: 4129916 - RNA, 59 nt, Human
gaugucugucugagccgcuggacuccgaaugccuagagggcaggggcuuugacaggauc

SEQ ID NO: 4129917 - RNA, 60 nt, Human
gaugucuuacuaacuagccuuugcuuuauuauuagaaauggggaagugaguauagacauu

SEQ ID NO: 4129918 - RNA, 75 nt, Human
gaugucuugcaaaaauugcuggaaucuuuacaggagaaccacuuccaagaagaugagcaguuucugggagccguu

SEQ ID NO: 4129919 - RNA, 76 nt, Human
gaugugaacuacagaagaaacuaucacuauguuucucagacauaggaaugggaguuucuuuguguuuuuuugcauu

SEQ ID NO: 4129920 - RNA, 60 nt, Human
gaugugaacugaggcugaguguugguggaagaaauacaggcucaggcucagguucagguu

SEQ ID NO: 4129921 - RNA, 83 nt, Human
gaugugacuuugacuugaggauugucuccugugaugugcuccuaguggggcuacaggggucaguccuuugcuuugagcaccuc

SEQ ID NO: 4129922 - RNA, 72 nt, Human
gaugugagugguagcugggauucagcucucaaggaauggagaauaggaagcacuuagcuauccacccacauu

SEQ ID NO: 4129923 - RNA, 61 nt, Human
gaugugaugugagcaaaugcuugaaauguacuugcuuaguuaggcuugugcuuugucacuc

SEQ ID NO: 4129924 - RNA, 60 nt, Human
gaugugauuuauugaaaagagcuuggaaguugcuaagcucccugacaaauaaaccauguc

SEQ ID NO: 4129925 - RNA, 75 nt, Human
gauguggagauggggcaugcaaacaggaagaaauuaguaaacccauuccugcagcaaguaaccaucuuccuguuc

SEQ ID NO: 4129926 - RNA, 71 nt, Human
gauguggcuuuggcuucugucauuucuguuaaauccucuccagccagcucugacccuugccgagcuacauu

SEQ ID NO: 4129927 - RNA, 86 nt, Human
gaugugucgcuagucccauuuauccccaacaacccugugguuucuauuauccaguguugcauaggauggggauuuuuagacgcauu

SEQ ID NO: 4129928 - RNA, 58 nt, Human
gcacaggcaucaggcuuuuucugaauuagaaagacaaaaggcagcuugguaccugugu

SEQ ID NO: 4129929 - RNA, 79 nt, Human
gcacagggaaaaugcauguauguaauaugcuugucggcuucagcaacaacucauguauacauacacauuuacuauaugu

SEQ ID NO: 4129930 - RNA, 69 nt, Human
gcacaggguuucucaaccucaacacuauuuggaccagauaauucuuuguugugggaggcuguccugugc

SEQ ID NO: 4129931 - RNA, 84 nt, Human
gcacagguggccaccauggcaugauagucagucuaaagcucugccaccaaauagcugcaugaccaugagucagguugcuugugu

SEQ ID NO: 4129932 - RNA, 70 nt, Human
gcacagugaaaauucuauugauuucuguugacuuucaaaagucuagugaaagacaaugugauuauugugc

SEQ ID NO: 4129933 - RNA, 62 nt, Human
gcacagugauugauuuuuacuuucucuaguauaaaaagaaaguagacacauguuauuguugc

SEQ ID NO: 4129934 - RNA, 69 nt, Human
gcacaguggaguguguccagggaauguggauguuauugauucuguguauaauuagaccauuuacugugc

SEQ ID NO: 4129935 - RNA, 62 nt, Human
gcacaguuuagcuagguucucugcuuuagggugcaagccccaauucagauauuggcuugugc

SEQ ID NO: 4129936 - RNA, 63 nt, Human
gcacauaaauucaguucugccucuugguaaauacagcaccaagagcagggaauauuuauuugc

SEQ ID NO: 4129937 - RNA, 70 nt, Human
gcacauaagaauucucuagugcaaauuguuugauucuaacaauaggucaugccuaggagauuuuuuuugc

SEQ ID NO: 4129938 - RNA, 73 nt, Human
gcacauaucccgacuacuaacuacuguagaaagguuaacccaccuuucuacacuucgugguguuuuuaugugc

SEQ ID NO: 4129939 - RNA, 61 nt, Human
gcacauauuguaguucaccaggaugacuuugaaguuuuucugaaauagaacaauaugaugu

SEQ ID NO: 4129940 - RNA, 64 nt, Human
gcacaucgggcagcacguuucaggaggauuguuagacacucucaaccuccaucgugugucuugc

SEQ ID NO: 4129941 - RNA, 93 nt, Human
gcacaucuguaaacccuuuugagucuuuucugauguccgugugaguccaugaaaagccugacaucaugagagacuuaaauugagcaugauugc

SEQ ID NO: 4129942 - RNA, 60 nt, Human
gcacaugagcugcugggaugggcuugccccuguccugggcccuuacccagcuccgugugu

SEQ ID NO: 4129943 - RNA, 57 nt, Human
gcacauuccacacaguaauacucaauagagguuuauugagugcuuaaguggaauugc

SEQ ID NO: 4129944 - RNA, 100 nt, Human
gcacauugcuucaccugggcugcaugauggcauuucuuacauggaagaaaacugucacuaguugcccagaaaacagacucacauuugaagcauaaugugc

SEQ ID NO: 4129945 - RNA, 55 nt, Human
gcacauuuaacugagcucaggacgcugcaaugugauccuucaccgugaaaugugc

SEQ ID NO: 4129946 - RNA, 65 nt, Human
gcacauuucuuccacaugcugcuguccaccauacaggcggcuuuuaugaaaugggggaaaaaagc

SEQ ID NO: 4129947 - RNA, 63 nt, Human
gcaccaauuuacauauuuaccuuuguguaugagacuacauggaagguuuauauuuagaggugu

SEQ ID NO: 4129948 - RNA, 118 nt, Human
gcaccacaacgagauucucuuaccucugcgacugcacagaaccuuagaauaucuauaaagaauauaaaugugauuggaaauuuuguguaagauggugaagcuucuagauaugaggggc

SEQ ID NO: 4129949 - RNA, 82 nt, Human
gcaccacacgguguaaauacuaccuauaugcuuucaaucagaccgauaauaauauagaaggugcuauuuacaugguuugugc

SEQ ID NO: 4129950 - RNA, 100 nt, Human
gcaccacagugaucccuaggaaugcagacgugaagaagacagggaugcugccugcaaagggcucccugcaggugucucugucuagcguuccucugggugu

SEQ ID NO: 4129951 - RNA, 69 nt, Human
gcaccacgaagcaaaggcaggagcuugugagcuugugagcugaccccucuggccuuggccucuuagugu

SEQ ID NO: 4129952 - RNA, 70 nt, Human
gcaccagagaauaaaagggcauuccuuaggguugcugaggauuuucuuugauuguauucugcuaaugugu

SEQ ID NO: 4129953 - RNA, 92 nt, Human
gcacccaaucuuuaagggguccuuugcaacuguauucuggcugaaaaauagaguuucucucagaacugcagcugcagcuccuugacuggggc

SEQ ID NO: 4129954 - RNA, 64 nt, Human
gcacccagauauugccuugaccugucacccugguggcuacuggcaucaagguuuguucaggugu

SEQ ID NO: 4129955 - RNA, 59 nt, Human
gcacccagcaggaaagugacguuugaggguccccuucucaaccgcauugcugcuggggc

SEQ ID NO: 4129956 - RNA, 107 nt, Human
gcacccaggccucuggcugagcuuguccagagccaggcugucggccuuacgcuggggagagccacggccacccgcucaugggcacucacucaggguucccugguugc

SEQ ID NO: 4129957 - RNA, 109 nt, Human
gcacccauuaguaagguuccuuccucaccuccagcucuaggcugaagccugcagacagccuuuuguucuacagcuggggaaagaggccagaccugagcacaaugagugu

SEQ ID NO: 4129958 - RNA, 85 nt, Human
gcaccccccagaggcuguucaguguccagcuuguuuaacccugagcagggucuggaaguuagggaccuacaggcuaugguggugu

SEQ ID NO: 4129959 - RNA, 56 nt, Human
gcaccccugucuguacccccuaguucccaguauauggacuggcacacaggggcugc

SEQ ID NO: 4129960 - RNA, 84 nt, Human
gcaccccugucugugcaguccagcccuggacaccacgugguggugccaggguccugagggccuugcgcauaggucacggggugc

SEQ ID NO: 4129961 - RNA, 62 nt, Human
gcacccggaagcacaggcuugaggacgaugagcagcagagcaucuccagcgugcuccagggc

SEQ ID NO: 4129962 - RNA, 76 nt, Human
gcacccuccaggcggguucagggcugccauggcaacaaggacaugccgugagcaaaauggacacucccugaggggc

SEQ ID NO: 4129963 - RNA, 88 nt, Human
gcacccuccuccccacaucccuuguuagugacccccaagguauucagggaucugcagcauccuagggucugugaggaaggcaggaugc

SEQ ID NO: 4129964 - RNA, 80 nt, Human
gcacccuuaggccagaguccuugcgacugggacgggaggccccuguggcacaugcagggauucacugggcuggcuggugc

SEQ ID NO: 4129965 - RNA, 68 nt, Human
gcacccuuggcuggcauccagggaaauccagccagagaggucaaugcccuuuccuggaagccagcugc

SEQ ID NO: 4129966 - RNA, 60 nt, Human
gcaccgccuuggaccgcccgcugcgccagcagaccacggggaagcgguucuggcgguagc

SEQ ID NO: 4129967 - RNA, 69 nt, Human
gcaccuaugagaacgggggcgugugggacagcccagggccccgcacgacgcuuucguucucgccggugc

SEQ ID NO: 4129968 - RNA, 63 nt, Human
gcaccucagccuucugaagguggucccauugguccuuguggccugagcuucagaguugggugu

SEQ ID NO: 4129969 - RNA, 87 nt, Human
gcaccucugccgugggaguugcggccagguucuggcaggcaggggcucugccugcacugccuggcuccagguuccauucucaggugc

SEQ ID NO: 4129970 - RNA, 57 nt, Human
gcaccucuuggagccuuguuggccagcaaaacacuuacuggaggcuccaagagcugu

SEQ ID NO: 4129971 - RNA, 73 nt, Human
gcaccugaacuugacuccaguuucuacugaggauuuaaucacaaaauccugaguggggagcuaagugaggugu

SEQ ID NO: 4129972 - RNA, 92 nt, Human
gcaccugcaagguaguaucugaucucacuaaaaaaaguuagaggauuuuucuuaaaaaugguuuuuagugagaucgauaaaugcaugcgugc

SEQ ID NO: 4129973 - RNA, 65 nt, Human
gcaccugcuggaccacagggcagcccccagagaacaggacaagcucccugugcuccaggagaugc

SEQ ID NO: 4129974 - RNA, 59 nt, Human
gcaccuggcuggcaauuuauaauuuuuaaaaggugauucugauuaccagccaggcuugc

SEQ ID NO: 4129975 - RNA, 68 nt, Human
gcaccuguguuuucccucaguuucauuucuauucucucuggaugaaauaaagaaaggauauagugugu

SEQ ID NO: 4129976 - RNA, 79 nt, Human
gcaccuugaucuuggacuucuaaccugcagaacugggagaaaaucagcuucugcuguugaagccaccagucuguggugc

SEQ ID NO: 4129977 - RNA, 67 nt, Human
gcaccuuuggaaugaaaaguugcaagagguaccuccaaaauaaaguguaacuuucccauaagagugc

SEQ ID NO: 4129978 - RNA, 103 nt, Human
gcacgaaugcgguguuuaccucccuggggaagggcaagcaagcugcuggcgugguucagcaugcaccuuccccugggagcccggagagcacauuagcagaggc

SEQ ID NO: 4129979 - RNA, 57 nt, Human
gcacgagugcacgcugaaucauggccccuguucauggagaauguguuuacuucgugu

SEQ ID NO: 4129980 - RNA, 83 nt, Human
gcacgauguaguuauuuaugaaauuuauauugacucaaacccaauagagagucauccagagcuucauaaguaaagauguuugc

SEQ ID NO: 4129981 - RNA, 86 nt, Human
gcacgcccuccacggcuuggcccgcgcgcugcuguucccggccuacugggcccugcaccagcugcaggguggcugaggagggcggc

SEQ ID NO: 4129982 - RNA, 82 nt, Human
gcacggugaaauuccuuguggaaagugguaauuagacuggcuaugaggcuauuuucucauguuagggaucucaccgacuagc

SEQ ID NO: 4129983 - RNA, 70 nt, Human
gcacggugucuucuaguggggacaugugacaguaauuucuuuuccacauuaucugccauugacaccaugu

SEQ ID NO: 4129984 - RNA, 78 nt, Human
gcacguggggcggcagcggcugcagggaagagaggcuuguuaccuugggggugccagcugcuugucccccacaacugc

SEQ ID NO: 4129985 - RNA, 57 nt, Human
gcacguguguguguaugugugugggugggugagugugcacacauguguguuaugugc

SEQ ID NO: 4129986 - RNA, 60 nt, Human
gcacguguguuuccaaccaagcaagcacaauucucagaagugcuuugauggaaauacagc

SEQ ID NO: 4129987 - RNA, 73 nt, Human
gcacuacauucuuccuuuccugcaaaagcaucuguuuaaauacuuuuggccucaaaggaaagaacguuagugc

SEQ ID NO: 4129988 - RNA, 69 nt, Human
gcacuaguuuuagucccauuuuacagacaggacauggaaaccuaucuguaaagaucacagagcuggugc

SEQ ID NO: 4129989 - RNA, 58 nt, Human
gcacuauauuuaaaccuguggaugggaauauuccccauucuugguuacgcuguagugc

SEQ ID NO: 4129990 - RNA, 119 nt, Human
gcacuaugagagacccugaggcagaguauucacuuaaaccaugcccaaauucuggaccaacagaaacugagguaauaaguguuuguuuuucaaagucuuggguuauuaauucauugugc

SEQ ID NO: 4129991 - RNA, 59 nt, Human
gcacucaauuuagaacuccuuuaacaaguggucuugguucuaguuccuuaaauuggugu

SEQ ID NO: 4129992 - RNA, 80 nt, Human
gcacucaauuuucugccuagcaaaaacugugcgguuaugccaguucucauacaguuuuaguuaaaauagaagauuauugc

SEQ ID NO: 4129993 - RNA, 55 nt, Human
gcacucacuuauuucuaacagaagcuaaaaagcugucugagcgagaaaguagugu

SEQ ID NO: 4129994 - RNA, 60 nt, Human
gcacucccuucaggagccuaggacugcauuugucguccauggguggugagggggcagugc

SEQ ID NO: 4129995 - RNA, 117 nt, Human
gcacucugcaccucggggacguuauugcgcguggaacggcugcuuuuggaagacuuuugcccagaagaaaagauguuugguuuucacacgccaaagauguaccgaaguauagagggc

SEQ ID NO: 4129996 - RNA, 60 nt, Human
gcacucugcgcugggcgccagcgcccucagccggucgcucacguccacgcagcagggcgc

SEQ ID NO: 4129997 - RNA, 62 nt, Human
gcacugaagcaauauacugauaugauuauauuuugguaaccauugucaauauugcuggaggc

SEQ ID NO: 4129998 - RNA, 72 nt, Human
gagucacgggauuuugcagagagauauggcaagaggauuguuuaucuuggacucuuugcagugccauggcuc

SEQ ID NO: 4129999 - RNA, 70 nt, Human
gagucacuagucaguaugaaauugcucaaggaacucuaaccuugaugauuucuuuuugauucauuuauuc

SEQ ID NO: 4130000 - RNA, 77 nt, Human
gagucacuuccauaauaaccugagagaaaguggcaauuuuucauuuuuuaucucguauugcuuauggagcugagauu

SEQ ID NO: 4130001 - RNA, 60 nt, Human
gagucagacagggucacccagaaaggaagaggugcaucuucugaccgugucacaugauuu

SEQ ID NO: 4130002 - RNA, 81 nt, Human
gagucagcugagucagaugaacuaggcugcacuuggcugagcaacugcgcuucaaguccuaggucugauugaacuuggcuc

SEQ ID NO: 4130003 - RNA, 55 nt, Human
gagucagcugugaagaugguggcuguaacggacagcuucuuccaggcagugacuc

SEQ ID NO: 4130004 - RNA, 59 nt, Human
gagucaggucaggcuuguagauucgaguucuguugcgaguuugauugccccucugacuu

SEQ ID NO: 4130005 - RNA, 55 nt, Human
gagucagguccguggacaguuaagaagagcuuggcuaauuccaucagcuuggcuc

SEQ ID NO: 4130006 - RNA, 101 nt, Human
gagucagugucauaacagcaaugacugccauuaguacagguaguuuauagcucaaauuuuuaccuuuguauuuaccuagucucacuguuuugcgcugucuc

SEQ ID NO: 4130007 - RNA, 74 nt, Human
gagucaguugcaaacaucaggcacgcagccugcacuugaugcuggauaacuugcugauguuguauuccugacuu

SEQ ID NO: 4130008 - RNA, 78 nt, Human
gagucaucugcaauugauuucauaaggguuucuagacuuugcaacaaggcuaaaagacaucuuuauggguagagacuu

SEQ ID NO: 4130009 - RNA, 107 nt, Human
gagucauuaaaaauuaaaccauuaugaguacauugggaucaaagaacuaugaaguauuuaguagaagucugaaggauuuuguacucaaauuguaaauuuugguacuc

SEQ ID NO: 4130010 - RNA, 104 nt, Human
gagucauuaagaaacaugccacaguggccacaguucaacucuacacagucuuuccagagccugcacagugaccacugagcaagugcuauucuccacugugacuu

SEQ ID NO: 4130011 - RNA, 96 nt, Human
gagucauugugauguauuccuuugacuuuguuguuguuguuagugauuuccagugccagcaggaaacuuaaagguaauccaaauccaaaaacacuc

SEQ ID NO: 4130012 - RNA, 69 nt, Human
gagucauuuuucacugcauauagagucacuugagauauaaaaagucuuuuuguaguaaugaaagaacuc

SEQ ID NO: 4130013 - RNA, 74 nt, Human
gaguccaaagaaaugagucaaaacagcauauagaguucugcaauucaagagcugugaccucauucacaggauuc

SEQ ID NO: 4130014 - RNA, 119 nt, Human
gaguccaaauacgaaaauccacagagcuggggcucaaaucuggccucauugcuuauaaacccagcauguuuucugcaggaauccagagugagccuccauguggcagcacgaaugaucuc

SEQ ID NO: 4130015 - RNA, 118 nt, Human
gaguccaaguuggaggcugguucgcccagagaucuuguccuuuccagcccugggcaccccagcaguagaaaaguggaaagggagguaucucuagggaaacuuuccuugaguugaccuu

SEQ ID NO: 4130016 - RNA, 129 nt, Human
gaguccagaaccagagcucaggagcagagggcagggcgguuccuuggauucauugugggagggaggcaccuguuuccugagccccccgaguccaggguugcccucugagugugagcuagggcaggacuc

SEQ ID NO: 4130017 - RNA, 58 nt, Human
gaguccagacaccauaccugaugcaucccauucuauucagauuauggaugucugauuc

SEQ ID NO: 4130018 - RNA, 59 nt, Human
gaguccagagcugagggucaguagauucuagucacuagaccaccaggucugacuggcuc

SEQ ID NO: 4130019 - RNA, 56 nt, Human
gaguccagcagaaugagccaagcagugugaaauguguggaaacauguuguuggcuc

SEQ ID NO: 4130020 - RNA, 58 nt, Human
gagucccaccuccagagauggccuucccuaccacauccauccaugagagucuggauuc

SEQ ID NO: 4130021 - RNA, 58 nt, Human
gagucccaggaaugagcauagugggaagagagagaagccauugcucaccauggggcuu

SEQ ID NO: 4130022 - RNA, 80 nt, Human
gaguccuaugauuugucuuggaugaggauuaacagguuguagucuauuugaauaauauguucaggaggaaugaaggacuu

SEQ ID NO: 4130023 - RNA, 62 nt, Human
gaguccuggguccagcagguccucaggggagccccucuuugaagcccguagagccaggacuc

SEQ ID NO: 4130024 - RNA, 72 nt, Human
gaguccuguaacuuucuuccuaauugucaauucuagccaugaaagaaugugggaaaagaggugaaaggauuc

SEQ ID NO: 4130025 - RNA, 76 nt, Human
gaguccugucacuuauuauccuugugccuugcuuuugcuucacugguaaagugaaggucauaaugauucaggauuu

SEQ ID NO: 4130026 - RNA, 72 nt, Human
gaguccuuacuguuccugggacuggccaugaggaagaaacucccaucaggaacccaggagcccaagagaguc

SEQ ID NO: 4130027 - RNA, 69 nt, Human
gagucuauuauaguuccaguucaagggaaaauaaaauaccuugauuacuugauuauuguugauagauuc

SEQ ID NO: 4130028 - RNA, 78 nt, Human
gagucucacucuguggcccaggcaguggcacaaucauugcucacugcaaccuccaccuccuggguccaagugauucuc

SEQ ID NO: 4130029 - RNA, 86 nt, Human
gagucucacucuguugccuaggcuggaaugcaguggcacgaugucggcucacugcaaucuccgucucccagguucgagugauucuc

SEQ ID NO: 4130030 - RNA, 57 nt, Human
gagucucaucucuggcugucagagaguagaaaaagcugagggucaggacaaggacuu

SEQ ID NO: 4130031 - RNA, 85 nt, Human
gagucucgcucucucaccaggcuggagugcaguggcgcgaucucugcucacugcaaccucugucuucuggguucaagugauucuc

SEQ ID NO: 4130032 - RNA, 85 nt, Human
gagucucgcucugucaccaggcuggagugcagaggugcaaucucagcucacugcaaccucugacucccugguccaagcgauucuc

SEQ ID NO: 4130033 - RNA, 86 nt, Human
gagucucgcuuugucuccuaggcuggagugcaguggcacgaucucggcucacugcaaccuccgccucccggguucaagugauuuuc

SEQ ID NO: 4130034 - RNA, 60 nt, Human
gagucucuggaggggucagaccugggcauuaguaggugucucaagcuccccaggugauuc

SEQ ID NO: 4130035 - RNA, 108 nt, Human
gagucucuggcuggguggcaguggugggugggggagcgggcacacacauccuucacgcuugugugugugucuuugccuccucucaggccacagcaugaucagagauuc

SEQ ID NO: 4130036 - RNA, 76 nt, Human
gagucucuguugccuaggcuggagugcaguggugugaucuugguucacugcaacaccuccuggguucaagugauuc

SEQ ID NO: 4130037 - RNA, 80 nt, Human
gagucugcaguuuaucucuuuugaccaagauugguaugaagacuaaucuggacacuuaaagaggaaauauucuuugacuu

SEQ ID NO: 4130038 - RNA, 78 nt, Human
gagucuggaauguagagacagcuuaggagcucagaaucugaacauugucacuguagccugcucuccaguuucaaauuc

SEQ ID NO: 4130039 - RNA, 73 nt, Human
gagucuggcugcuuuagaauugaaacagauggacuugaggguuucuguaucuaauuuuacaguagcauaucuc

SEQ ID NO: 4130040 - RNA, 83 nt, Human
gagucuuacucuaucacccaggcuggagugcaauggcgcuaucucagcucauugcaaccuccuccuggguucaugugauucuc

SEQ ID NO: 4130041 - RNA, 85 nt, Human
gagucuugcucaucacccaggcuggagugcaguggggugaucucggcucacugcagcuucugucucccggguucaagcaauucuc

SEQ ID NO: 4130042 - RNA, 78 nt, Human
gagugaagggagcagggcuccuuuggguagcuuggucuugguagcucaccugcugggaagccuacguuucucucauuu

SEQ ID NO: 4130043 - RNA, 76 nt, Human
gagugaaguaucucuuuauugacaauaaaacuuuccagggaaguuuuauugucaaugaagacagagaagaccacuc

SEQ ID NO: 4130044 - RNA, 56 nt, Human
gagugaccugguuuaccaguucucugcacuuagacugguguuuauuacaggugcuc

SEQ ID NO: 4130045 - RNA, 60 nt, Human
gagugacugcccuacccccgggaugccuauccaugcccguggccuggggcagcuucucuc

SEQ ID NO: 4130046 - RNA, 68 nt, Human
gagugagacaguauacugagcaggaaaugaauuugcccuuugcugugauaggucauacugucucuuuc

SEQ ID NO: 4130047 - RNA, 65 nt, Human
gagugagagcugggggugaggggacagcugggaauucccccugcacugccugcuggcugucacuu

SEQ ID NO: 4130048 - RNA, 79 nt, Human
gagugaguucgcaauuaauucgggccacagugugccaaggcacauuuccaaacugggccuggauuggcgugucauccuc

SEQ ID NO: 4130049 - RNA, 70 nt, Human
gagugaguuuugguaguuucugucuuuagauaauugaucuauauuaucuaagauuuugcuaagaucauuc

SEQ ID NO: 4130050 - RNA, 68 nt, Human
gagugauuguaguucauugaaugaguaauugaauauccauacucaagguuaaugauugaaugucaguc

SEQ ID NO: 4130051 - RNA, 118 nt, Human
gagugauuuaguuuauuuaccuggcaacuucauuuauaaugucauuauguaaguauuaaaucauugaugaguaaauaagguugaguugauuugacuagggaaaaagacaaaauuauuu

SEQ ID NO: 4130052 - RNA, 62 nt, Human
gagugcaggccugagcaccaucugcaacaaugacaagcucuuacuugcucaggucuucauuc

SEQ ID NO: 4130053 - RNA, 58 nt, Human
gagugcaguaugagaggcugcugccugaguucuaaaugcaaccucucuuuugacauuc

SEQ ID NO: 4130054 - RNA, 55 nt, Human
gagugcuaaugcaugucaaguacuuuguacagaacguggcagguagugagcaguc

SEQ ID NO: 4130055 - RNA, 87 nt, Human
gagugcuaguuacagccaggccagcugucuugaguuugccaguagaaucagggccccuggccuaaggcaguuuuucuuuaugcacuu

SEQ ID NO: 4130056 - RNA, 61 nt, Human
gagugcugcuaaugcaagggugcuucugacuuagcacagugccaucacauggcgagcguuc

SEQ ID NO: 4130057 - RNA, 108 nt, Human
gagugcuggcuucuggacccagaggcugauucggggaacagcaaucuucuagcagaagagucugccuggucacuuggcugucugcaucugggucaauauucagcacuc

SEQ ID NO: 4130058 - RNA, 57 nt, Human
gagugcugucauacugagacagacagauuauuguucuggcucuaugugacagcucuc

SEQ ID NO: 4130059 - RNA, 76 nt, Human
gagugcuuauacaguuugccugaaauccauacauuaacagccuuuggauuuccaaacucauaguaugguguaucuc

SEQ ID NO: 4130060 - RNA, 57 nt, Human
gagugcuugguaauugcacugagccaaagacacucacuucgcaauuauugggcauuu

SEQ ID NO: 4130061 - RNA, 77 nt, Human
gaguggaaauuccuuggagucaaacagggagaaaauacgucucaguguuaaagacuuuccagagacuucuuccauuc

SEQ ID NO: 4130062 - RNA, 82 nt, Human
gaguggaaggagggcugggagaggcagcuuucggaucggcggucgcuuucuaugaagucuuccuuuccucccugcuucccuc

SEQ ID NO: 4130063 - RNA, 58 nt, Human
gaguggaaggugcuggccacagaggccucuacacagguuggggugagaccucccacuc

SEQ ID NO: 4130064 - RNA, 63 nt, Human
gaguggacuaacaggucagccuccugucccuucugacuccugcugccuggcuuuaguccacuu

SEQ ID NO: 4130065 - RNA, 62 nt, Human
gaguggagugaguggcagaaggagaucaacggucuucugaaugaaaaacccugacucuaguu

SEQ ID NO: 4130066 - RNA, 105 nt, Human
gaguggagugccgcgacgguguggccgcagccuggcugugccuucacgacgcagcugcaaucagaggagcugugggacgcugucccacguggacacagcccacuc

SEQ ID NO: 4130067 - RNA, 61 nt, Human
gaggaggcggcaagcuggugucuggggcagugaggauuucagaugcagcuccugccuccuu

SEQ ID NO: 4130068 - RNA, 56 nt, Human
gaggaggcucccuuuagguccagaucaguggaauuuggucccagggaguccuacuc

SEQ ID NO: 4130069 - RNA, 62 nt, Human
gaggagggaugggucuaacccagaaccacagauggcucugagccgggggccuguccacccuc

SEQ ID NO: 4130070 - RNA, 65 nt, Human
gaggagggccuggugucccuucguccuuggcucucuuuggccccgggccacaccaggucaucuuc

SEQ ID NO: 4130071 - RNA, 78 nt, Human
gaggaggggagagucuuagugugguuggggacugaguauggcagggacuccccagcauugagggucucucucuuccuc

SEQ ID NO: 4130072 - RNA, 55 nt, Human
gaggaggucaccuggugagcaaccaaguaagucuucauccagguccugcuucuuc

SEQ ID NO: 4130073 - RNA, 56 nt, Human
gaggagucucagaaaagaagcauggaagacucuucccaauuaacugagcauuccuc

SEQ ID NO: 4130074 - RNA, 66 nt, Human
gaggaguggcuauuugugcugguuuucugaacuuacagccuucaaaccuucuaaauggcucuucuc

SEQ ID NO: 4130075 - RNA, 55 nt, Human
gaggaguuccugcauauucuugcaccaucccgggugcuguugcuggggcucucuu

SEQ ID NO: 4130076 - RNA, 74 nt, Human
gaggauaagaagccaccauuguugugggcuuaaagugauccacuuucacuagggcucagagaaguggggcccuc

SEQ ID NO: 4130077 - RNA, 60 nt, Human
gaggauaagugcuuuuaaagcaaacaaaccugaggcguguuguuaaaggacacuugcuuu

SEQ ID NO: 4130078 - RNA, 87 nt, Human
gaggauauuuuauuuaagcuguuuugcaaaguuugauuagccuacugaauaguacaguuuaaauauuaauauaaggaaaggagccuc

SEQ ID NO: 4130079 - RNA, 84 nt, Human
gaggaucaaugggaauagaaaauguauucuauauuuuccuuguuacauagaguuagagcgcauauuuuauuaauguucauccuu

SEQ ID NO: 4130080 - RNA, 59 nt, Human
gaggaucgcuugaggccaggaguuugagaccagccugggcaacaacacagcgagaccuc

SEQ ID NO: 4130081 - RNA, 89 nt, Human
gaggaucuagcaaagaccaaagcuaguugaauguuugaaaauauguuuaggaaacaacugauuuggaaaguuuguuaucaagggaccuc

SEQ ID NO: 4130082 - RNA, 68 nt, Human
gaggaugcccaaaggguuguggcuacuuuuuguuucuguuaagugcuguaacaacuuauuugguccuc

SEQ ID NO: 4130083 - RNA, 60 nt, Human
gaggaugcuagccagcucuguggagucuguuucugagcagccagagcugcuggccucguc

SEQ ID NO: 4130084 - RNA, 76 nt, Human
gaggauggacgugacucccuggcccugcccuucucaguugcauauaggcagggcuucugggcaccacucccuccuu

SEQ ID NO: 4130085 - RNA, 123 nt, Human
gaggaugggaacaagaaaggaagaaacuggcaaauuggcagcugaagaggaacuuugggagauaaaugccuucugaggauuuugauuaguuguuugcuguuugauguuaaccguuuccuccuc

SEQ ID NO: 4130086 - RNA, 59 nt, Human
gaggaugguaugaggcaagcaaaugcaguuuagaguguuauuuaucucaggcuaucuuu

SEQ ID NO: 4130087 - RNA, 73 nt, Human
gaggauggucaguaaaguucuuucuugcugauuacacaguaaccaguugaaaagauuuuauucugaaagacuc

SEQ ID NO: 4130088 - RNA, 77 nt, Human
gaggauguugggguuuauugcugugaacagggucugcaagguccucacacagugguaaaacccugaacacaaaccuc

SEQ ID NO: 4130089 - RNA, 69 nt, Human
gaggcaaaacagucgaugccucccaguuucaagcugguuuggucaucaugggagagcguugcuguccuc

SEQ ID NO: 4130090 - RNA, 57 nt, Human
gaggcaaaugauccugcuccuugaugugaggaaaugucaaggguuugcauuggcuuu

SEQ ID NO: 4130091 - RNA, 66 nt, Human
gaggcacagucccgaggcaaggaaaacggacacagugauuccccgaguuucuggacauggauccuc

SEQ ID NO: 4130092 - RNA, 68 nt, Human
gaggcaccagcauuuggugaucaucuuaauccaguuaccuggauugauaugguucaaagcugggcuuc

SEQ ID NO: 4130093 - RNA, 100 nt, Human
gaggcaccuagggaaggaaaaugcaggaggcgcucaucuucagguggcaccgcaggacccugagcaucagcgccuccuuacauuuugcccugggcaucuc

SEQ ID NO: 4130094 - RNA, 72 nt, Human
gaggcaccucgcgggaggaggcggggugaggugucagugacacgacgaaaccucuucuugacgaugguccuc

SEQ ID NO: 4130095 - RNA, 63 nt, Human
gaggcagaaggcggcuccucuggcgccucuucuuaggguuccugaucguugucucucuaccuc

SEQ ID NO: 4130096 - RNA, 61 nt, Human
gaggcagaaggcugaggagugacuuccugagaucaccaccucaucaagcuggauuguccuc

SEQ ID NO: 4130097 - RNA, 59 nt, Human
gaggcagaggcagacccugagaaugcgugugucauuuucaagggagaggccucugaauc

SEQ ID NO: 4130098 - RNA, 80 nt, Human
gaggcagagucccaggggcagagagagccuggaaaggcaggcuggucuuguggcucucaugcccucugggcuuggcacuu

SEQ ID NO: 4130099 - RNA, 125 nt, Human
gaggcagaugaacagcgguuuggguuuugcaaugggagugcaccugggacacgaggaugguaugacuugagccuucccugugggcgcuccugaggcagaggacccacgccgugccuggucgccuc

SEQ ID NO: 4130100 - RNA, 60 nt, Human
gaggcagccagagguucucauuuggaaagcugaauggugauugcuucugagcagagccuc

SEQ ID NO: 4130101 - RNA, 118 nt, Human
gaggcagcccccggacacccuggcacuggcugggcgauggcagcggggccuggcugggcugcagcuggcugaguucugucgucugcagaggagcaggaccugggacgggggcucccuc

SEQ ID NO: 4130102 - RNA, 74 nt, Human
gaggcagcuauggauggaaagggccaagcuaauggagcaggucucugcaggcuggucuuucuuccauaugcuuc

SEQ ID NO: 4130103 - RNA, 70 nt, Human
gaggcagcuccagggacccaagagaaaagacuugccuaugguuuccucucucaguccuggcagcagcuuc

SEQ ID NO: 4130104 - RNA, 58 nt, Human
gaggcagcuggguccggucgggagcuuucccguuaccuucgccaugacccagccgucc

SEQ ID NO: 4130105 - RNA, 78 nt, Human
gaggcagcuuugcucuucaccacaccuuggacggaccaccuucuuucuguuccauggccugaaggagugcaucuccuc

SEQ ID NO: 4130106 - RNA, 99 nt, Human
gaggcaggaaaagcgcuugaacccaggaggcggagguugccaugagccgagaucgugccauugcacuccagccuuggcaacaagagugaacucugucuc

SEQ ID NO: 4130107 - RNA, 98 nt, Human
gaggcaggagaaucacaugaaccuggcaggcggagguugcagugagccgagauugugccacugcacuccagccuggccacagagcgagacuccgucuc

SEQ ID NO: 4130108 - RNA, 100 nt, Human
gaggcaggagaaucacuugaacccagaagguggagguugcagugagcugagaccaugccauugcacuccagccugagcagcagagugaaacucuugucuc

SEQ ID NO: 4130109 - RNA, 99 nt, Human
gaggcaggagaaucacuugaaccugggaggcggagguugcagugagccgagaucgcaccacuguacuccagccucggugacagagugagauucugucuc

SEQ ID NO: 4130110 - RNA, 103 nt, Human
gaggcaggagaaucacuugagccuugugggacggagguugcgguggugagccgagagcgcaccacugcacuccagucugggccacagagugagacccugucuc

SEQ ID NO: 4130111 - RNA, 87 nt, Human
gaggcaggagaauccagguggagguugcagugagcugagaucacgccauugcacucuagccugggugacagagcaaaacacugucuc

SEQ ID NO: 4130112 - RNA, 99 nt, Human
gaggcaggagaaucgcuugaacccaggaggcggagguugcagcgagcugagaucgugccacugcacuccagucugggugacagagcaagacucugucuc

SEQ ID NO: 4130113 - RNA, 100 nt, Human
gaggcaggagaaucgcuugaacccaggagguggagguuguggugagccaagaucgugccauugcacuccagccugggcaacaagagugaaacucugucuc

SEQ ID NO: 4130114 - RNA, 98 nt, Human
gaggcaggagaaucgcuugaacccgcaaggcagagguugcagugagccgagaucgugccacugcacuccagccuggugacagagcgugacucugucuc

SEQ ID NO: 4130115 - RNA, 99 nt, Human
gaggcaggagaaucgcuugaaccgggaggccgagguugcagugagccgagaucgugccacugcacuccagccugggcggcagagcgagacucccgucuc

SEQ ID NO: 4130116 - RNA, 99 nt, Human
gaggcaggagaaucgcuugaaccuggaaggcggagguuguagugagccgagaucgugccacugcacuccagccugggcgacagagcgaugcuccgucuc

SEQ ID NO: 4130117 - RNA, 100 nt, Human
gaggcaggagaaucgcuugaaccugggaggcagagguugcagugagcugagacugagccauugcacuccugccugggcaacaagagcgaaauucugucuc

SEQ ID NO: 4130118 - RNA, 96 nt, Human
gaggcaggagaaucgcuugaacucgggagucagagggugcagugagccaagaucgccacugcacugcagccuggagacagagcgagacuccgucuc

SEQ ID NO: 4130119 - RNA, 100 nt, Human
gaggcaggagaaucgcuugaauccagguggcggagguuguggugagccaagauugcaccauugcacuccagccugggcaacaagaucgaaacuccaucuc

SEQ ID NO: 4130120 - RNA, 97 nt, Human
gaggcaggagaaucgcuugauccugggaggcggaaguugcagugagccgagaucgugccacuguacuccagccugcgacagggcaagacuccgucuc

SEQ ID NO: 4130121 - RNA, 99 nt, Human
gaggcaggagaaugaugugaaccuggguggcagagccugcagugagcugagauggcgccacugcacuccagccugcgcgacacagcaagacuccgucuc

SEQ ID NO: 4130122 - RNA, 99 nt, Human
gaggcaggagaauggcaugaacccgggaggcggagcuugcagugagccgagauuacgccacuguacuccagccucggugacagaacgagacuccgucuc

SEQ ID NO: 4130123 - RNA, 96 nt, Human
gaggcaggagaauggcgugaaucugggagcggagguugcagugagccgagaucgcgccacugcacuccagccugggagacacagcgagacugccuc

SEQ ID NO: 4130124 - RNA, 104 nt, Human
gaggcaggagaauugcuugaacucaggaggcggaggucgcagugagcggagaucgcaccacugcacuccagccuggccuggguaacagagcaagacuccgucuc

SEQ ID NO: 4130125 - RNA, 98 nt, Human
gaggcaggaggaucaccugagcccaggaaguugaggcuugcagugagcugugauugcaaaugcucuccagccugggugacagugugagacuccguuuc

SEQ ID NO: 4130126 - RNA, 99 nt, Human
gaggcaggaggaucacuugagccugggagguugaggcugcagugagcaaagaugcugccacugcacuucagccugggugacaaagugacaugcugucuc

SEQ ID NO: 4130127 - RNA, 97 nt, Human
gaggcaggaggauugcuguagcccagggguucaaggcugcagugagcuauaaucaccuaacuguacuccagccugggaaacacagcaagacugucuc

SEQ ID NO: 4130128 - RNA, 66 nt, Human
gaggcaggaggauugcuugaggccagauguucaagaacagccugggcacuucaauacucuugucuc

SEQ ID NO: 4130129 - RNA, 68 nt, Human
gaggcaggagucucucuugagcccaggaguuugaggccagccugggcaacagagcgagacccuaucuc

SEQ ID NO: 4130130 - RNA, 67 nt, Human
gaggcaggcagauugcuugaggccaggaguucgagacuagcuugggcaacaugcgagagcccgucuc

SEQ ID NO: 4130131 - RNA, 71 nt, Human
gaggcaggcuggguagcaggugauccaggagcagugguacaccuggacccuggacugcccuggccugcuuc

SEQ ID NO: 4130132 - RNA, 98 nt, Human
gaggcaggggaauugcuugaaccugggaggcggagguugcagugagucaagauugcgccacugcacuccagccuggugacagagcaagacuuuaucuc

SEQ ID NO: 4130133 - RNA, 79 nt, Human
gaguggcacugggcugcaccuuuguaaaucucuuaaacauggcuuaauagaagacagcugcaucccaucacugccucuc

SEQ ID NO: 4130134 - RNA, 70 nt, Human
gaguggcaggaaaguggaagagaaaagcacugagcagcauccucuuauccaccuucucccaugcucucuc

SEQ ID NO: 4130135 - RNA, 66 nt, Human
gaguggccagugcugcucuggggcugcuuccugcaccccacaagcugcagaacugcaaagccucuc

SEQ ID NO: 4130136 - RNA, 77 nt, Human
gaguggccuugggcacaucccugguauuuuccuauaaaauaaagauggugggcauuaaauggccauaagaguugcuc

SEQ ID NO: 4130137 - RNA, 67 nt, Human
gaguggggcuuaggaccuuguggcgcuucugucagaagccucuguggucugucuaaugcaccugcuc

SEQ ID NO: 4130138 - RNA, 55 nt, Human
gaguggggugcagugacagggagucuggugggagcucugaggcugagcucuacuu

SEQ ID NO: 4130139 - RNA, 58 nt, Human
gagugggguucaggaggccugggaaguguccugaagcugccuccuggugccccaucuc

SEQ ID NO: 4130140 - RNA, 70 nt, Human
gaguggucaagagauugaauaauaacugaguagcaauaauacucagauggguuaugucuuuugacuauuu

SEQ ID NO: 4130141 - RNA, 91 nt, Human
gaguggugaacguuuguugcugauuuccccuugaguguucacuugagcuccgugcgcacacaagaugcggagacaugugaugcugcuauuc

SEQ ID NO: 4130142 - RNA, 76 nt, Human
gaguggugggguguggggcagaguggugugguaugguugguguuuuaagcagaugauucugucaucccagcuacuu

SEQ ID NO: 4130143 - RNA, 56 nt, Human
gagugguguucauuuucagaauggucucccagaagaucuucugugauacaucaguc

SEQ ID NO: 4130144 - RNA, 73 nt, Human
gaguguaaugguuugaggcaaauucaacauauuucuuaaaaacuuguugagucugcccaaauuaagaacacuu

SEQ ID NO: 4130145 - RNA, 57 nt, Human
gaguguccugcacagcaccuugcagaccucccauggcugccugcucuguagggccuc

SEQ ID NO: 4130146 - RNA, 100 nt, Human
gagugucgagauagguccccuuugucagucacugucuggaugugagucaccuauaauugugggugacuggcauccaggccugagccccaucucccagcuc

SEQ ID NO: 4130147 - RNA, 56 nt, Human
gagugucuaaucacguuucacaaggcaaauugguaagacaauguuguuggacacuc

SEQ ID NO: 4130148 - RNA, 64 nt, Human
gagugucugcauccaauaaguacucaauaaauacaaguuaauugacaaauggauguugacauuu

SEQ ID NO: 4130149 - RNA, 79 nt, Human
gagugugagaaaucugugagaaauucgacauauauuuauuuuucuuggaaauuagagaauaucuucacaguguacacuc

SEQ ID NO: 4130150 - RNA, 72 nt, Human
gagugugauaaggacuuugaaggauacauauuugauucugugggacuauguacccaaagaucugaucuacuc

SEQ ID NO: 4130151 - RNA, 62 nt, Human
gagugugcagcaggccucaucuccugggccuuagccaaggucucugaguacugcuggaccuu

SEQ ID NO: 4130152 - RNA, 112 nt, Human
gagugugguggcaugugucuguggugccagcuacucuguaggcugaagugggaggaucacaugagccuggcagguagaggcugccaugaauugugauugugccacugcacuc

SEQ ID NO: 4130153 - RNA, 79 nt, Human
gaguguguuuaaccugaaauucugaauucugagccuuucacuggaguaagaguguuugaaauucuagauaaacauacuu

SEQ ID NO: 4130154 - RNA, 70 nt, Human
gaguguguuuguguggcuaguucccugaagagcccaucaacuuaguaagcacucacacauucccacacuu

SEQ ID NO: 4130155 - RNA, 73 nt, Human
gaguuaaacauguaaguucagaucaccaucaugaaacagagcugaaggugcuucuuuuauugcaguauaauuu

SEQ ID NO: 4130156 - RNA, 70 nt, Human
gaguuaaauaguagucgccuuuuguaagcaacucuaacagagguuuacauuugggauuaauaguaaacuc

SEQ ID NO: 4130157 - RNA, 104 nt, Human
gaguuaaauguaaaaugugaaaguggaaucuaagaguuaacaucaagaacagugcuaguucaacuguucuaacuuucaagguccuuucacuuauugcaaaacuu

SEQ ID NO: 4130158 - RNA, 60 nt, Human
gaguuacaguggguuuggggcccaggcaaaaucugccucugguucuuucuccuguguguc

SEQ ID NO: 4130159 - RNA, 59 nt, Human
gaguuacuugguucaacuagaaugugaaaaaugugcauauucuauggaccaguauauuu

SEQ ID NO: 4130160 - RNA, 61 nt, Human
gaguuauauccugagucauauucuaucuuguaaaguccucccaauggcucaggaauggcuu

SEQ ID NO: 4130161 - RNA, 59 nt, Human
gaguuaucuucugugcuguuaaagcuuucuucuguuguaacauccacauuagaugauuc

SEQ ID NO: 4130162 - RNA, 63 nt, Human
gaguuauuggguggaaagguagcuuucucuuccuuguacagcuuuuuguuccucucauuagcc

SEQ ID NO: 4130163 - RNA, 90 nt, Human
gaguucaaucugcauguggauuaguuggcuuuauuuuggaaacaagcugaccaaacuucagccagcuuucacaaaugaagauuuuggcuc

SEQ ID NO: 4130164 - RNA, 87 nt, Human
gaguucaggauagugugcuuguugacagggguuuugguacccugucugucacagagcaacuauuucuugaucaaguugauaauacuc

SEQ ID NO: 4130165 - RNA, 73 nt, Human
gaguucauggccaugaaaauugguugggucuugauguccucugaucugucuuuuauucaugagcuaugcauuc

SEQ ID NO: 4130166 - RNA, 71 nt, Human
gaguucaugucuuauuuugucuugcuuggcacacugcugaguguagaguaggcauuuaauaaacaugaguc

SEQ ID NO: 4130167 - RNA, 100 nt, Human
gaguuccaagccucagggcaaguugucucuggcuggcaccccagggagugcacgcucucuggagggcuccaggcgggcacuguggccuuuggggacacuc

SEQ ID NO: 4130168 - RNA, 59 nt, Human
gaguuccucuuuuccucauuuacccuccugaaacacagaagggggagcagacugaacuc

SEQ ID NO: 4130169 - RNA, 65 nt, Human
gaguucucaccauaaaucaaaggacuaaaauucugguacauauguccuuauuagagugagagcuu

SEQ ID NO: 4130170 - RNA, 64 nt, Human
gaguucuggagaauagaagucuuaaaucaagguguggauaggcuuggcuuauucuugggggcuc

SEQ ID NO: 4130171 - RNA, 57 nt, Human
gaguucugugagccauccuagcaaauuaucaaaccuuaggaggggucaugggaacuc

SEQ ID NO: 4130172 - RNA, 83 nt, Human
gaguugacaggcuccaagaagucaucuaaacugucccuccugacaggaagccacagugaacaggugacuuggaugguuuacuu

SEQ ID NO: 4130173 - RNA, 88 nt, Human
gaguugaggguuguuuaugugagacuaaguccuguucacaaaugagaaaucuuuucuuauguggacguaccuguguacaguucagcuc

SEQ ID NO: 4130174 - RNA, 91 nt, Human
gaguugcucauggugagugaggauaggagcccagacugggucagacagaagugucuucaaacccuggcucuuccucuagccuugggaacuu

SEQ ID NO: 4130175 - RNA, 67 nt, Human
gaguugcuuaaccuauuuuucucauugaucuccauuuuaaugaugaaaacugaagguuaggaaacuc

SEQ ID NO: 4130176 - RNA, 63 nt, Human
gaguuguagcaccguggcuucaaggcugucuugaccagcagaggccuggcccugccacaucuc

SEQ ID NO: 4130177 - RNA, 80 nt, Human
gaguugugcagcuagugcugugagugcuguuucuguaucagggcacagauuucccacuccauguauuggcuccuaagcuu

SEQ ID NO: 4130178 - RNA, 58 nt, Human
gaguuguuauaauguauguaaggcauuuaguacagugccuuguacaugauaaagauuu

SEQ ID NO: 4130179 - RNA, 72 nt, Human
gauucucaugauacaucuucaugucaguguuacucuaguauuuuacugaaauggcagauauauaaaagaguc

SEQ ID NO: 4130180 - RNA, 55 nt, Human
gauucugcugucccuaagugccggcaagggcugggggaugaucuugaguaggguc

SEQ ID NO: 4130181 - RNA, 81 nt, Human
gauucugcugugcaucugaauuugaaaaucuugagcuuugaaauaaaagcagacucugaaaucuaggugcaaggcaugguu

SEQ ID NO: 4130182 - RNA, 85 nt, Human
gauucugcuuugcugguacccaagcauguccagugugcccacggggugcugggcacugucucuggggaagcagcaaaccagacuc

SEQ ID NO: 4130183 - RNA, 63 nt, Human
gauucuguaaccuuaauuuccucagguuuuuucagccuguggguacaacagggucacagaauc

SEQ ID NO: 4130184 - RNA, 57 nt, Human
gauucuguugcccuuagaguuguuaccccuacaguuuucacugggcuugcagaaauc

SEQ ID NO: 4130185 - RNA, 61 nt, Human
gauucuuaagcccagcuguggaccuacuaauuacaaugucugggggugaggccuaggaauc

SEQ ID NO: 4130186 - RNA, 75 nt, Human
gauucuuccucugccucccgugcucacucucuccccaaccauggugggcuuaggggugcugaggccgauuugguc

SEQ ID NO: 4130187 - RNA, 130 nt, Human
gauucuucuaggcucagacaaacauuaaaugggggagcagaagagggaguguggacauaagccaugcuggcagugggcaggugccagcucccugucucaguucccuugucuguaaaauagaaauugaauc

SEQ ID NO: 4130188 - RNA, 80 nt, Human
gauugaaacuagagggaggaugcugggugcuucugcuaugagcuccuugagcacccuccaacuucccuguagucuuuguc

SEQ ID NO: 4130189 - RNA, 98 nt, Human
gauugaaauguaggauugagugauagaggugguugcuguuucucaguaaagaugguugccuuuacucauuaaauccuggcuauuaaaacacuucacuc

SEQ ID NO: 4130190 - RNA, 60 nt, Human
gauugaaucauaugaaauuguggauguuuaacuguuuuugaccuacaaugugauucaauc

SEQ ID NO: 4130191 - RNA, 96 nt, Human
gauugacgagcuuaaucagcgaaucaggaggaagccuugggcaucaaucauugucagugugccuucuuccuaacuucugauuugcugcuuccaguu

SEQ ID NO: 4130192 - RNA, 55 nt, Human
gauugagucugaggaugcugcagauuucauuuggcgguaccaucacuuuucaguu

SEQ ID NO: 4130193 - RNA, 91 nt, Human
gauugcagaacaaggcaacagaagauaacugggaccagaacuaaaauauggggucuggauuauuugucuugcuguugcuguugcuguuguu

SEQ ID NO: 4130194 - RNA, 66 nt, Human
gauugcagagggaagcagauuccuuuacuucauuucuaaagaguaggggaaaaaucuucugcaauu

SEQ ID NO: 4130195 - RNA, 95 nt, Human
gauugcagggcauagcuaaaggaauuuaagacucuggaauucauacagccugacucuuuuaugcauuccuucagaaacuaguuagcccuguuauc

SEQ ID NO: 4130196 - RNA, 109 nt, Human
gauugcauaugcucagaggccugucccagaggcuuuggccacagugguuuauguccugaacgccacugugcccaggccccuggggauguuccccccugagguugucauc

SEQ ID NO: 4130197 - RNA, 71 nt, Human
gauugcaucuucugguugagccccugggaguggcaaccauagcagccauggggcugaaccuggaggugguc

SEQ ID NO: 4130198 - RNA, 65 nt, Human
gauugccaacuguagucaagagcuuugagagaguaaaaaggucuaaagcuacugaguugccaauu

SEQ ID NO: 4130199 - RNA, 116 nt, Human
gauuggcugauacaggauuagagaggaagagaaggggguaaacuggcuaacagcuucuguucuauguggcauuugcucccuuguguucaggucuucucuuuuguuucauaaccauc

SEQ ID NO: 4130200 - RNA, 61 nt, Human
gauugggacuagaaugacucuaaagucccuuucagcucuagaauucaaucuguuccacauc

SEQ ID NO: 4130201 - RNA, 68 nt, Human
gauugggaggcaaaguucucugucugccccaguuucuuucuacagagagagaagggacucuuccaguc

SEQ ID NO: 4130202 - RNA, 98 nt, Human
gauugguccuuaaugcauuuuuaaaaagcaacguauauggguaaggauaucaauaucuuaguaugcuguauucuguauguuagcucauuuuggcuuuc

SEQ ID NO: 4130203 - RNA, 68 nt, Human
gauuguaauucuacuuuccgcugacauuaaaauuucuagagauguuuguagcagagaggacuacaguc

SEQ ID NO: 4130204 - RNA, 115 nt, Human
gauugucuggucacuuaggcaggucagugcuguuauuugcucaugucaugagggcuggguguucuugaauagauggugacaguaugaccauaauuccuaacguguccagucaauu

SEQ ID NO: 4130205 - RNA, 62 nt, Human
gauugugcagauaguaauuaggaaagcugguauuaaaacuagguccuaucugucccacaguu

SEQ ID NO: 4130206 - RNA, 79 nt, Human
gauuguuauuugaucuuuucagguuucucuagucauguaguuagcacauuggaagcaagaaaagauaaacaguacaguc

SEQ ID NO: 4130207 - RNA, 72 nt, Human
gauuuaaagaacuauuaacgaggaagcugggacuguucccugcuuucuguagguaguuacuguuguuaaauc

SEQ ID NO: 4130208 - RNA, 77 nt, Human
gauuuaaguagacuauuucaaucuccuuuggugcuuuccuaccugagcacagagugggugagauguggauuuguguu

SEQ ID NO: 4130209 - RNA, 79 nt, Human
gauuuaagugguucuugcaagugcucuguaucugaauucaggaagcagugaaucuggcaagaauuuacaaacuuaaguc

SEQ ID NO: 4130210 - RNA, 106 nt, Human
gauuuaauuuacuuauauucuacuuucauccacaaagcuguugacuaugaguaacucacagucaacagcauuauggaugaaagcagaguaucaguaaauaggaauc

SEQ ID NO: 4130211 - RNA, 56 nt, Human
gauuuacagcuauacccaaugguauaacuguuaacuauuggguauaacuguaaauc

SEQ ID NO: 4130212 - RNA, 82 nt, Human
gauuuaguaggggcaccaggaagcuguuauagcaaacacccaggugauacugcuacauacauucuguugcgccugccaaguc

SEQ ID NO: 4130213 - RNA, 79 nt, Human
gauuuauccuugggaagggucaguuucuucauuaggacaaugaagaaaaauccagcugucccuuccaaggggagguauc

SEQ ID NO: 4130214 - RNA, 84 nt, Human
gauuuauuguaaaguacuuagcacagcacuagguacacauuagguguacugauaaugucugcuaaauuacuauuacacugcuuc

SEQ ID NO: 4130215 - RNA, 85 nt, Human
gauuucaagagaaagauuagaccauaaagaguucaauggagaaagcaguaucuccagcuuuggcucuagcuacacuuuugaaauu

SEQ ID NO: 4130216 - RNA, 60 nt, Human
gauuucacuaucaacaucauugcucuagaauucugaauggcuuuggugugaugggggauc

SEQ ID NO: 4130217 - RNA, 60 nt, Human
gauuucaggcccaccuuuccacagcuucaccacaaccugaacagaaagguccuagaaauc

SEQ ID NO: 4130218 - RNA, 57 nt, Human
gauuucaguggcugucucaaaugucaaaaugauggagaggacagagagacugaaauc

SEQ ID NO: 4130219 - RNA, 72 nt, Human
gauuuccuuuucucuuucaaucugcaguacuuuuuaugaagacuggucuuuugugauggaugaagagagguc

SEQ ID NO: 4130220 - RNA, 61 nt, Human
gauuucugggcccaacccuagagugugugacucaguaguucugggauggagcccaagaauu

SEQ ID NO: 4130221 - RNA, 58 nt, Human
gauuucugggcuuuauuucagaguuucuaaugcugaguggggaugaaguugggaaguu

SEQ ID NO: 4130222 - RNA, 69 nt, Human
gauuucuugauaaguagugugauauucccagguauagccuucauggggagagcucuuggcaaugaaauu

SEQ ID NO: 4130223 - RNA, 74 nt, Human
gauuugccaaaacacaggguuuucuggaagauuauccacacucgcaauaggaagcucuuuguuuugugaaaguc

SEQ ID NO: 4130224 - RNA, 107 nt, Human
gauuugccaaaggagcuguccuccuggugcaaagggccuagagagugguaucagucacaguuugaacuauguucucugcucuaggaugucacagcuuaccccaaauc

SEQ ID NO: 4130225 - RNA, 71 nt, Human
gauuuggacuucuggagugugguuaauuuaaguguucucaucaggccuugauauuucagauuuccguaauc

SEQ ID NO: 4130226 - RNA, 100 nt, Human
gauuugggguggagaguucgguagaugucuauuaggucugcuuggugcagagcugaguucaauuccuggauauccuuguuaacuuucugugucguugauc

SEQ ID NO: 4130227 - RNA, 100 nt, Human
gauuugggguggagaguucuguagaugucuauuagguccgcuuggugcagaccugaguucaauuccuggauauccuuguuaacuuucugucucguugauc

SEQ ID NO: 4130228 - RNA, 64 nt, Human
gauuuggguggaagguggcauuuuggcuggcuaaaauaaaugcagacagcuucacacaccauuc

SEQ ID NO: 4130229 - RNA, 80 nt, Human
gauuuguaguuuuaugugucagcuaacauaauagguacguucuuagauuggaaggugaauagauuuuuaacauauaaguc

SEQ ID NO: 4130230 - RNA, 56 nt, Human
gauuuguggugugaggaagagcgaugcccuaagaugcagacucacgccuucagauu

SEQ ID NO: 4130231 - RNA, 65 nt, Human
gauuuuagaaggaaugcuauggugaugauaauaaaauaacaccaucuagcauuuauuuggaaauu

SEQ ID NO: 4130232 - RNA, 81 nt, Human
gauuuuaugauacauacuuuuucuugcaagcaauuuugcagcaaguucuguugccuguaaagaaagguugaucauuuaguu

SEQ ID NO: 4130233 - RNA, 86 nt, Human
gauuuuauuuucuguauuuucuucuggaagcuuauggggcuuuuucuuuaucugaacuuucacaagaauaugcuuugauauggguc

SEQ ID NO: 4130234 - RNA, 58 nt, Human
gauuuucagaucuugcaguccccuccauggcagcugucacacaugggaucucagaguc

SEQ ID NO: 4130235 - RNA, 76 nt, Human
gauuuugaaggcaacggaaugauuugcaguuagggauaggacagaccucuuaacuguaucauacuguuucaauauc

SEQ ID NO: 4130236 - RNA, 77 nt, Human
gauuuugggucuauaccacccauccagagccagguguauuacaugagcuggaagucuguggucagaguccuaagauc

SEQ ID NO: 4130237 - RNA, 68 nt, Human
gauuuugucaugauccuucuguuaggugcaucucuuauuccagcccuaacagauugggugacaauauc

SEQ ID NO: 4130238 - RNA, 87 nt, Human
gauuuuuaggauauaauccauucagaaauugggaauuguguguccacuagcauguuauuccuauugagugauuucauuuaaagaguc

SEQ ID NO: 4130239 - RNA, 55 nt, Human
gauuuuuccacaauaaacauaggaugaggucuguguauagaaaguaggaaagguc

SEQ ID NO: 4130240 - RNA, 58 nt, Human
gauuuuucuacucuccuuaucucuuuagggagauaggacaggagaaguagcagaaauu

SEQ ID NO: 4130241 - RNA, 105 nt, Human
gcaaaacaaaaauaaaauuccacuggcucuccacuauggaugagaaguugcacaaaggccuagcuguuucguugguggagagcuacauggcugcccaaguuuugc

SEQ ID NO: 4130242 - RNA, 74 nt, Human
gcaaaacaaacacacagcaacaagaauagccaaagaaaccauuuggcuugcuucuucugcugucgucuucuugc

SEQ ID NO: 4130243 - RNA, 79 nt, Human
gcaaaagaagauucaguuaagcacuauacccuaaggcauccauugcauuguauguagugacuuaauuucucucuuaugu

SEQ ID NO: 4130244 - RNA, 77 nt, Human
gcaaaagagugcuuaaauugugugauccagugcuuaaagugggacagagcauuuaauuacaguuuaauuaucuuugc

SEQ ID NO: 4130245 - RNA, 83 nt, Human
gcaaaagucugaucuugaguugucaaagucuacaucuguuaacagagcuaggaaugaccacucucccuuggacagacucaugc

SEQ ID NO: 4130246 - RNA, 125 nt, Human
gcaaaaguuauuuuuggaaauaaaaauccuauauaggcugcuucuaccaaaauguaugaaagacacauccuuuauccauugguuagaaaaucaggcuuaguaugauuucucuuuuuaauuuuugc

SEQ ID NO: 4130247 - RNA, 83 nt, Human
gcaaaauaggcauggaugcagaaagagaauguaauguuauaggcagacauacuucuuuuuguaccuuuucauuugccuuuugu

SEQ ID NO: 4130248 - RNA, 95 nt, Human
gcaaaauccaggccaggaugcacuaggaaccagggucagaagugagugagaggcucagcccccugagucgccuguugaauuugccaugguguugc

SEQ ID NO: 4130249 - RNA, 62 nt, Human
gcaaaaugcaggaguucgaggcuguaugagcuaugaucaugccucugcacuccagcaugggu

SEQ ID NO: 4130250 - RNA, 82 nt, Human
gcaaaauguuagguggcacucauuaucaggugcugacaugcacuugcguggccuugagagugagugccaccuuaaguuuugu

SEQ ID NO: 4130251 - RNA, 74 nt, Human
gcagagcugucuaagucacuuccuuuuacaccuucagucucccaucugcaaaagugcucaguggacagcauugc

SEQ ID NO: 4130252 - RNA, 67 nt, Human
gcagagcuucagggaauaagaaugugcuuuucugcaagacccauuuccaccccugaaugcuccaugc

SEQ ID NO: 4130253 - RNA, 59 nt, Human
gcagagcuucuguccuucaggaguccaugaugugggaggaaggagaaagcaagugcugc

SEQ ID NO: 4130254 - RNA, 60 nt, Human
gcagaggacacaggagggcaaguugagcucccucaucccuaaauccuucagugccucugc

SEQ ID NO: 4130255 - RNA, 62 nt, Human
gcagaggauuauggagauggucucagcaacaagacugccuggauuuccauccuaguuccugc

SEQ ID NO: 4130256 - RNA, 60 nt, Human
gcagaggccaggccaccagcaagggccaaacugacacccuccuggaaaccucuucucugc

SEQ ID NO: 4130257 - RNA, 74 nt, Human
gcagaggcuggagguccuuggggucuacugggagguggcagucacaggcccuuggguccucuccacagccuugc

SEQ ID NO: 4130258 - RNA, 59 nt, Human
gcagaggggccauuguucugcccgcuccccaaaggaccgucagccgaguggccacucgc

SEQ ID NO: 4130259 - RNA, 57 nt, Human
gcagagggucagguagugaagucgaggaaacuaaaccagcugcccugaacuuugugc

SEQ ID NO: 4130260 - RNA, 84 nt, Human
gcagagggugacaguuuccauuuucauaguacaagguucuccuaaaagacucugggagaggacaaacaaaauguuacucucugu

SEQ ID NO: 4130261 - RNA, 111 nt, Human
gcagagguagcaauugguuagauggugagucaggaggccauacaggccucaccucucagagggcugcagcuuggccucugcaauggauucaccugauaaguuugccuuugu

SEQ ID NO: 4130262 - RNA, 95 nt, Human
gauaauugugaaaggugggugacaggcacaugggagcucaucaugcuuuugaauuugugugaaauuaaauguguuugcaaaauuuuuuacaaguc

SEQ ID NO: 4130263 - RNA, 73 nt, Human
gauaauuuggggcaaggaaaccagcagggauaucacccagaugagcaagcuggugaccuugccccaggucauc

SEQ ID NO: 4130264 - RNA, 75 nt, Human
gauacaaaagaggcaguggugaugaaugguuguuagugacccaauauccauacacacccuuugucuguuauuauc

SEQ ID NO: 4130265 - RNA, 67 nt, Human
gauacacagggcuaagauggauuuuaaaucauuuuaauuuucuauuauuuuggccacuguagucauc

SEQ ID NO: 4130266 - RNA, 79 nt, Human
gauacauacacccuucauuguuggguuacaugaggugauaccuuaacaagugauauauaauggaaggaaaaaguguguc

SEQ ID NO: 4130267 - RNA, 56 nt, Human
gauacauuccgggagggcuaccugguugaggugacaugagcccagcggagugaauc

SEQ ID NO: 4130268 - RNA, 109 nt, Human
gauacauuuauguuguauuuucauuucagcuugcuuagucuccuucucauucaggucugagagugacuugcugguugaauucaaugaaguuacuuaauauaucuguguu

SEQ ID NO: 4130269 - RNA, 63 nt, Human
gauacauuuuaucuccuaacaggcucaaauucaaugaacuacgaggagaauuagaaugauauu

SEQ ID NO: 4130270 - RNA, 81 nt, Human
gauacccauggagguggaagaaugaguuagaagacaaaaauaugcauauacucuaacucagaaaauucauuucuggguauu

SEQ ID NO: 4130271 - RNA, 78 nt, Human
gauaccuaucuuuagaggaagagaaucuucaaggcuauucgauuuacuucagagauuucucccucuaacagauguguc

SEQ ID NO: 4130272 - RNA, 87 nt, Human
gauaccugaauaauccaugucuagaguaaagcuaugucaaguaaaaaggaugacucuuuuuauuaaggaugugggacuucagguauu

SEQ ID NO: 4130273 - RNA, 123 nt, Human
gauacggcacaaguuuuggagauguaaucgccugaaagcauccaacuuugauuagagagucugagcucucauaguaacacagauugguagugcuucucaauucauuuucugaaacuguuuauc

SEQ ID NO: 4130274 - RNA, 70 nt, Human
gauacguuugcaugucucaguacacuccgauguugagguauucugaacaucaguauuaggcauguguauc

SEQ ID NO: 4130275 - RNA, 86 nt, Human
gauacuauaaaugacuggcaucucaaacaggcagauuuaaaagcaggggagucuggcuuuuugaugagcuuuauuuuaucaguauu

SEQ ID NO: 4130276 - RNA, 96 nt, Human
gauacuccagugccuuugcaaugggaaacaaacagcauuuaaagguguagggaagaaaauuuaaaucacuguucauuccacacaggcaaugagauc

SEQ ID NO: 4130277 - RNA, 56 nt, Human
gauacuguaggugaaaguguuuuuaaaaacugugaagggccauaacuugcaguguu

SEQ ID NO: 4130278 - RNA, 89 nt, Human
gauacuuucucuccuuagaagaaaguuacuuuuucgggccauuuuccuaaaaugugaaacuaucuucaaggcaagccagaguaauuguc

SEQ ID NO: 4130279 - RNA, 77 nt, Human
gauagaauuaacacaaggugugcuuugagcuucuggcuaugcccaguauuuuuaagcugcuuuguaacauuuuuuuc

SEQ ID NO: 4130280 - RNA, 90 nt, Human
gauagcccuggguagugcuaguuaaugcuaauuaacaaaugcuaguuaguauuguuaaacugaagcauuacuaaauaccaagauauuauc

SEQ ID NO: 4130281 - RNA, 65 nt, Human
gauagcugcuacugagauuguccuuaguaccuaucccacuggacucugacuuaguuauagcuauu

SEQ ID NO: 4130282 - RNA, 65 nt, Human
gauaggacacacuucugaggucuuucaugucaaaguaucuaacaugagacccugugugccuuguc

SEQ ID NO: 4130283 - RNA, 70 nt, Human
gauaggagaagucaccuugugguuuauaguuuaauaugcucagugaacucuaauggugcuuuucucuuuc

SEQ ID NO: 4130284 - RNA, 76 nt, Human
gauaggcaguaacagagguagaauucaaggucaggcucugccccugagcuuguuugcauuuuguuugguguuuguu

SEQ ID NO: 4130285 - RNA, 77 nt, Human
gauaggcugagccuugaugucccuuguccuggaggcuccuccaugcugaacaagcagcaucaagagccugcccuguc

SEQ ID NO: 4130286 - RNA, 81 nt, Human
gauaggggaugccucauccucagggggccaacccagccucuuccuagagccaggguccggcuucuggggagcaucuccuuc

SEQ ID NO: 4130287 - RNA, 75 nt, Human
gauaggugcccugucuuccugcuuaugacucugaaacccuguuuauuuguaucaaggacgguugguacuuuaauc

SEQ ID NO: 4130288 - RNA, 66 nt, Human
gauaguaacucuacacacgacacuagcaggccacaaugaaguacugaaguguuugggaguacuguu

SEQ ID NO: 4130289 - RNA, 55 nt, Human
gauagugcaaggcuuuucagaagaagcugauauuuucugagaagcaaacaauguu

SEQ ID NO: 4130290 - RNA, 63 nt, Human
gauaguggcacagccaagccucacucguuuugacuaaugagagccucaaagcuuugcuauuuc

SEQ ID NO: 4130291 - RNA, 72 nt, Human
gauaguguuaccauuccugggaccugcaccccaucugagggcaaacaggaccuggaaugcuugugaaauauu

SEQ ID NO: 4130292 - RNA, 107 nt, Human
gauaguuauuugcauuauggucaguacuucaccugucaaguucuuagcgaauaugucuuaauauacagugaaaaguagcuaacacaacagugcuuauuuaaacuauc

SEQ ID NO: 4130293 - RNA, 64 nt, Human
gauaguugccugggauuuggaaugcaccucuaccaucagugggauacagauccaggcagcuauu

SEQ ID NO: 4130294 - RNA, 80 nt, Human
gauaguuuggcaauuuguagaguaaauuagauuuaauuuggccugaaugccacugauuucucauauuguucaaaacaauc

SEQ ID NO: 4130295 - RNA, 82 nt, Human
gauauacuauuuaacugugcauauauuuuagaguuugguuuuaaaugacuagaauauuuguaugcacauggauaaguauguu

SEQ ID NO: 4130296 - RNA, 83 nt, Human
gauauauuuugguugcuagaguugcacuggacuuacagaaaaucaaagucacaaauccccucagcaacugccuaaaaaauguc

SEQ ID NO: 4130297 - RNA, 83 nt, Human
gauauauuuuuggaagggaaccaaaacaugggaauccuagagcauuuuggguggauauuugguucuucuucuguguauauguc

SEQ ID NO: 4130298 - RNA, 71 nt, Human
gauaucauaguagacugacuggucuuucccuccgagggacaacgugaucaguuaguuacugcuaagaucuc

SEQ ID NO: 4130299 - RNA, 80 nt, Human
gauaucgcuaacacuuguacuuacagaugaccuggacugauucuauggcaguauuucaguacagaguuuuugcugauguc

SEQ ID NO: 4130300 - RNA, 84 nt, Human
gauaugaaagggaauugagaagaagcgggaaaaggagcaugagaaauauucccuggguuuaugaauugcauucccuuuauuguu

SEQ ID NO: 4130301 - RNA, 59 nt, Human
gauaugacucauguugacccauuggggucaauauucucagggacaugaugugucauauc

SEQ ID NO: 4130302 - RNA, 101 nt, Human
gauaugcugaccccuguuucuuucugugcucugacuuucuccuggugccacccauuggccaaaccagaagcuggagcacaaggaggcugguugaguagcuc

SEQ ID NO: 4130303 - RNA, 74 nt, Human
gauauggaaagauaagcaggcuaugggcaugaggauuaugaggagcucugucuaaacuuguuuuaucucauauu

SEQ ID NO: 4130304 - RNA, 91 nt, Human
gauauggugucuguguguuuauuuuuaacgcuaugaccuuguuucaagaaagauuugaaggcagcuuuaaaaaagaugcauguacuauauc

SEQ ID NO: 4130305 - RNA, 64 nt, Human
gauauguaaucuaaggagccugcaucucauuguggcuuuacugucauucuuaugguuauauauc

SEQ ID NO: 4130306 - RNA, 76 nt, Human
gauaugugcucacaguaugaggacuagaacaagaaggcaguguaguuugguucagucucagcuggaaacauguguc

SEQ ID NO: 4130307 - RNA, 130 nt, Human
gauauguggcaguucuuaaucauaauagcuuagguuauaaccuccagcagguguuuaaaagaauuuucuuucugcuuaaauagcuggaggcuacaaucuaagguguuauuauuaagaacugccacauauc

SEQ ID NO: 4130308 - RNA, 77 nt, Human
gauauuaaaucuagaguucccagcauaaauaagauacguguucuauuucauggcuguggaacaucagauaaauuguc

SEQ ID NO: 4130309 - RNA, 60 nt, Human
gauauuagucuguaaauugaugcuugagacauacuuccuagcucacucuagacugguauc

SEQ ID NO: 4130310 - RNA, 73 nt, Human
gauauucgaugauuguuuccuauguacaccugguccuagauuagguauaugaagaugaaauaacacaaauauu

SEQ ID NO: 4130311 - RNA, 98 nt, Human
gauauucuaugccuugugcuucagaacaggcagucgaaagggaggaaaguugguuuuccuugagaugacugucuuguucccucauugguuugggauuc

SEQ ID NO: 4130312 - RNA, 71 nt, Human
gauauucuuugaugcuucugaaggugugagauuguuauuucacauaccaccauaaagucaaauaaaauguc

SEQ ID NO: 4130313 - RNA, 98 nt, Human
gauauugaugcugcugguccaggaaacccucuuugaguagcaaauggcuggaacaucucuccaggagggcuuccugugaugauggaaugcucuguauc

SEQ ID NO: 4130314 - RNA, 56 nt, Human
gauauuggauuaguuuccuaggguuccuaaaaucaggcccacucuaauccacuguc

SEQ ID NO: 4130315 - RNA, 72 nt, Human
gauauuggguaaaggauuaaucagguuuacuuccacuuuaaugaaaguggcugaauauauuuuacuaauguc

SEQ ID NO: 4130316 - RNA, 108 nt, Human
gauauuggucuguuuuauacuugcaucuaagguggauaacuuccagccauucuccccuaaggggagaaguuauccaccuuagaugcaaguauaaaacaaaccaguauc

SEQ ID NO: 4130317 - RNA, 80 nt, Human
gauauuguguaagguuaaacuuauuugugcccucaaauguuagacauuuuauggagcaccaaaguaacuagcacaaaguc

SEQ ID NO: 4130318 - RNA, 77 nt, Human
gauauuuaauucuccucuaaaaugucucaacaauuggucacccagguucuguuggcauuagaggguuauuguuuguc

SEQ ID NO: 4130319 - RNA, 93 nt, Human
gauauuuauccagccuggauuuggaaacaugagugauaaaauuaccuugugagauaaggcacuccugauuucaaauuaauguugaggcauauc

SEQ ID NO: 4130320 - RNA, 67 nt, Human
gauauuugcauuugcauaugaagaaguaaggggaaaaaccccuuaagucucugaaagugcauguauu

SEQ ID NO: 4130321 - RNA, 63 nt, Human
gauauuugcucgcacucucauugaucaaagacaaauaagugaagaaagaggcuggcagauguc

SEQ ID NO: 4130322 - RNA, 97 nt, Human
gauauuuuucucagguuuacaguauuucucagugaaaugacaggccuauuguguagcucaguuuaacaugcagaaauacagaacuagauaaaaauuc

SEQ ID NO: 4130323 - RNA, 64 nt, Human
gaucaaaccuuucauuaaagucuguaguucuucaugggaacucuaaggccucugagaguugauu

SEQ ID NO: 4130324 - RNA, 77 nt, Human
gagguugucucccaacagugcugucccucaaagaaaagacugguuauguggaaacagcacguuuggagagauuauuc

SEQ ID NO: 4130325 - RNA, 75 nt, Human
gagguugugucagagcgcucauuuucuacugcugcguaaaaaauugccacaaauguaguagcuuaaaacaacuuc

SEQ ID NO: 4130326 - RNA, 86 nt, Human
gagguuuaagaaguacaguaaagcugcuaugaauucccagcuaugggaauuuuccucaaagcuucauugucuaaacucugaaccuc

SEQ ID NO: 4130327 - RNA, 80 nt, Human
gagguuuagacaggauguucaagggaccuaugacuucauguccgugugucccucuggacauauaaucugccugugaccuc

SEQ ID NO: 4130328 - RNA, 78 nt, Human
gagguuuagaguaggaaaugcaguuuccuaaauuugaaauauaccaggccuaauuagcauugcuacucucaagaccuu

SEQ ID NO: 4130329 - RNA, 67 nt, Human
gagguuucucuagggcugaccaguucugauuuuccaucagacacuguaaaacugcuuuggaaacuuc

SEQ ID NO: 4130330 - RNA, 78 nt, Human
gagguuuggagucagcucuggcuuuggggagcuuccaggcugaggaggcucagcaggcagcagcucccucccacccuc

SEQ ID NO: 4130331 - RNA, 82 nt, Human
gaguaaaaggaucugggcugcaguccagucugagagaugccagcaaaggcuuccuaggcuaauucaguccaguaaaucccuc

SEQ ID NO: 4130332 - RNA, 75 nt, Human
gaguaacuagggagcagcccugccacuccucaugcgaugcaccaggagccagggaagcugcuuccuaggggauuc

SEQ ID NO: 4130333 - RNA, 75 nt, Human
gaguaagaugcuggaguucauauuggacauaagcaguggacauuguuuuccuucugauacuccauuuaucugauc

SEQ ID NO: 4130334 - RNA, 61 nt, Human
gaguaaggcugcugauggagugucuggauucucaucuccuuuucacuucgcugucuuucuc

SEQ ID NO: 4130335 - RNA, 79 nt, Human
gaguaaugcgagaguggaaaggaagccuuucuaaagugagagaaacuguaaucuagguuucuuuugcaccuugcagcuc

SEQ ID NO: 4130336 - RNA, 87 nt, Human
gaguaauggagggcuaaggggggauacaaaauggagagugccuuucugggucauucaaacuguaucacuugguaucuuccacugcuc

SEQ ID NO: 4130337 - RNA, 61 nt, Human
gaguaauuagagcaaugacuuuuagagacuucauuucagaaaaguucaugcuuuaauauuc

SEQ ID NO: 4130338 - RNA, 68 nt, Human
gaguaauuuccauuuuaucagaccagcuggggcuuguuuuugagucugugaaaagauaggaagugcuc

SEQ ID NO: 4130339 - RNA, 77 nt, Human
gaguacaaccaauuucuuguuaauucucaggccugucucggggccugagaauuaguaagaaauuuaucuugauccuc

SEQ ID NO: 4130340 - RNA, 75 nt, Human
gaguacacuuucauugauauaguuuuaaaaugcuguagcagcauuuuagugccugauuaauggguuuauuuacuc

SEQ ID NO: 4130341 - RNA, 57 nt, Human
gaguaccauucacaugugcaggcaguacuagggggcuugcauuuguuauuuguacuc

SEQ ID NO: 4130342 - RNA, 66 nt, Human
gaguagaacuagaacaaggauuugauuuugccuuaaaucaaaaagccucucuuuugguuuugccuc

SEQ ID NO: 4130343 - RNA, 62 nt, Human
gaguagaaggaaguuaucuacccaaccuagagggcauaaagaugauuuccuuggagcuacuc

SEQ ID NO: 4130344 - RNA, 124 nt, Human
gaguagcagacacacuugacaaagucaaaaugcucuccugucagugcccauaugaacuauuacaaugacagaagagcauuuuaauuuuguccaguucuucuuucuccuuuucacucugcauuuc

SEQ ID NO: 4130345 - RNA, 55 nt, Human
gaguagcaguggagccagcgcugaacccaacugccuggcuccaaagcugugacuc

SEQ ID NO: 4130346 - RNA, 55 nt, Human
gaguagcccacggacaccucgacugcaggcugagagaggguccagggagcggcuc

SEQ ID NO: 4130347 - RNA, 90 nt, Human
gaguagcuacagccauguuuuauguaaauauaaauugaauuccugcagcaggcaggucacuguauuugcugaugcauaaugagggugcuc

SEQ ID NO: 4130348 - RNA, 94 nt, Human
gaguaggaaggugucgccagggcucucuuggacaacugcugaucaugguuacucaguaugugugagagaaccaaacucuugccuuccgggacuc

SEQ ID NO: 4130349 - RNA, 92 nt, Human
gaguagggaauuacugacagucuuucaguaauaauacugucugguacaguguagguuaucugaaaggcuacggaucuucagggucucuucuc

SEQ ID NO: 4130350 - RNA, 56 nt, Human
gaguauaaugauuuucauucacaaaggcaaucuaugugggugaaauccauuaucuu

SEQ ID NO: 4130351 - RNA, 58 nt, Human
gaguauacacauaucuucuaggccuguaaaugcuagagcccucugauauguuaaacuc

SEQ ID NO: 4130352 - RNA, 62 nt, Human
gaguauaccugucuguaucgguucagaguucauggcgaaccugucaagugaagacacuacuc

SEQ ID NO: 4130353 - RNA, 72 nt, Human
gaguaucugguuccagaguauuucauuucaguuuuaaaaggacuuuacgaaugucuuucuggaauacuauuc

SEQ ID NO: 4130354 - RNA, 88 nt, Human
gaguaugcauauuaaguuuaagcuauacauuguuagaguugucuaacaacucugcuaaauguaaguugguaaauguaaguaaauacuu

SEQ ID NO: 4130355 - RNA, 61 nt, Human
gcagcuggagccagccagacaccggccaagagguggucuuggcuacaaguccagugccugc

SEQ ID NO: 4130356 - RNA, 66 nt, Human
gcagcugggacaugauagaaacagauucugcacuuaagaauucuacuuuuagaauguccaugaugc

SEQ ID NO: 4130357 - RNA, 111 nt, Human
gcagcugguggggauguuguuagcauuugggggguguuuucugaggaggaacagacugugucccuggcaaaacacucucuugagggccagcagacagaaacuuccaucugc

SEQ ID NO: 4130358 - RNA, 56 nt, Human
gcagcuguaaagcagaaauaguaauaacuauuucacagcuuuauuagcaaaagugc

SEQ ID NO: 4130359 - RNA, 57 nt, Human
gcagcuguagacugggcuggauucuuuuggagguuuccuaggcccagccugagcugu

SEQ ID NO: 4130360 - RNA, 75 nt, Human
gcagcugugggccucggagagcgcauuguacacacagauguuggguuucagcucuccggcucucgccagcuccgc

SEQ ID NO: 4130361 - RNA, 55 nt, Human
gcagcuuuaaucugaauaaguacugccaaagugcucuucagcaagauuaagcugc

SEQ ID NO: 4130362 - RNA, 85 nt, Human
gcagcuuuccuuccacagcaggaccauugaggcaucauccugaaaaacaugaaggaugugaagcagucauugcugaaggacaugc

SEQ ID NO: 4130363 - RNA, 58 nt, Human
gcagcuuucuugcccuaaucuuaucaccugccauuaaagaucagaauaugaaagcugu

SEQ ID NO: 4130364 - RNA, 57 nt, Human
gcagcuuuguggagaggcccauauagagagaaacugaggccuccugacaacagcugc

SEQ ID NO: 4130365 - RNA, 75 nt, Human
gcaggaaaaccugaucaguuccaacugggcaggauggacauuccguuugggguucagagugggaaugaucacugc

SEQ ID NO: 4130366 - RNA, 91 nt, Human
gcaggaaagccaggcccugaggagauuguggcuggggagugacggacaccaaagaccagcagcuucucaaaucaaccuagggcuaccuugu

SEQ ID NO: 4130367 - RNA, 74 nt, Human
gcaggaaaggcugacuucaugaacauguggccuguguagccacagagggccccaaguucagaaaggccucgugc

SEQ ID NO: 4130368 - RNA, 63 nt, Human
gcaggaaaguuuuaauucuuaaugcacaaaaauucccuaggagcccaagaagagcuuucuugc

SEQ ID NO: 4130369 - RNA, 79 nt, Human
gcaggaaauggccuucauaaccauucuccaauuuugcuggaggaucagggugguggaagucauuuuaaaaaccagcugc

SEQ ID NO: 4130370 - RNA, 79 nt, Human
gcaggaaggcagccuuuugaguugauucuuuaaaaaugggaagaauuuccuuuuuaaaaagacaaauugcccagucugc

SEQ ID NO: 4130371 - RNA, 73 nt, Human
gcaggacagacccaagcagucugguuucauagcacagcuuccuaaccaccgcacuguuuugcguuuugucugu

SEQ ID NO: 4130372 - RNA, 63 nt, Human
gcaggacaggcguugguccagucguuccuuuccuugcguugguccagucguuccuuuccuugc

SEQ ID NO: 4130373 - RNA, 76 nt, Human
gcaggacccauuccuucuggaggcuccaggggagaagccauuuccuugcccuuuacagccucuagagggugccugc

SEQ ID NO: 4130374 - RNA, 76 nt, Human
gcaggacugcuccacuaguaauucuugugcuggacuccccuguguccugcccaagacuuucuuagugcugcccugc

SEQ ID NO: 4130375 - RNA, 79 nt, Human
gcaggagaaggugcuuccaggagacaaggugugcaaggcuuaauguugcuuaccuguuuaccugcaccuguuuaccugc

SEQ ID NO: 4130376 - RNA, 71 nt, Human
gcaggagagggggcuccugcaggcccccagcccgccaugggguggugcagacaggagccccgcucugcugc

SEQ ID NO: 4130377 - RNA, 61 nt, Human
gcaggagccuggcuggcccacaggcuggcaguggacuggucuggccacccgaggccccugc

SEQ ID NO: 4130378 - RNA, 84 nt, Human
gcaggaggaaaauugcuagacuauacuguaauaccaaucuuacuaagauaaauuuagugucagccugguaaaauaucauucugc

SEQ ID NO: 4130379 - RNA, 55 nt, Human
gcaggagggggccuggagcccagucccacaucugggccucuccacccuuuucugu

SEQ ID NO: 4130380 - RNA, 63 nt, Human
gcaggagguugauucucugaggacccagcaugugggaggacccagagcacagccuccagaugc

SEQ ID NO: 4130381 - RNA, 60 nt, Human
gcaggaguuaggcgucguggaugucagauuuguauuccaaagcaguggcuaacucacugu

SEQ ID NO: 4130382 - RNA, 124 nt, Human
gcaggaucaaccaggagugagcagggagcacugcagagaaggggcccuccggacaugccccaacuggggagugcuggcaccccucuccaguucgcaucuacugccuuucaaaacuggcuccugu

SEQ ID NO: 4130383 - RNA, 58 nt, Human
gcaggaugggagcuucacucugucucaguugcucuggcaaagagaagccucaccuugu

SEQ ID NO: 4130384 - RNA, 55 nt, Human
gcaggauggguguagcccagcaggguggccgccugguguuaccuccuuccuuugc

SEQ ID NO: 4130385 - RNA, 86 nt, Human
gcaggauugauuaccuuuagagcugaguugacuccauuuuauuuaucauuugagaugugucuuuaguugcugaagggacugccugc

SEQ ID NO: 4130386 - RNA, 65 nt, Human
gcaggauuucauacaucuuuacugaauugaaauauuuauucauaagguguagugauaucuguugc

SEQ ID NO: 4130387 - RNA, 55 nt, Human
gcaggauuuuuuacuacaguguuuugaaaacugauguguaaaguugaaauccugu

SEQ ID NO: 4130388 - RNA, 82 nt, Human
gcaggcaacacugggcugugaguuuguccuccaugagauucuauuccauccagggcagccauggccugguggauuguuuagc

SEQ ID NO: 4130389 - RNA, 62 nt, Human
gcaggcagaaaaaugugaaaagagagacuggccuagucucccagccuacaucuuucuucugu

SEQ ID NO: 4130390 - RNA, 65 nt, Human
gcaggcagaugcugacaagaguuugagaaacauugccaucaccaacucacacaaguauugccugc

SEQ ID NO: 4130391 - RNA, 105 nt, Human
gcaggcagcaccacugccuguucucuuuucagugcugucuuguggccuuugcucccacagagucauucacugaugaaguaaauagcagcagugguguuuuucugc

SEQ ID NO: 4130392 - RNA, 88 nt, Human
gcaggcaggaagaaaaugugucccuuauuucacaggugacgaaaaugcauugucaggagccuugcuagggucacacaucucugccugu

SEQ ID NO: 4130393 - RNA, 79 nt, Human
gcaggcaggguguccccaucugcccaagucugucugaguccugggguuuuaugggcuucagaggggagguagugccugc

SEQ ID NO: 4130394 - RNA, 68 nt, Human
gcaggcccuuggaagguagcuggcaguagcugcaauugguuaagcaacugccacguuccaggcuuagc

SEQ ID NO: 4130395 - RNA, 55 nt, Human
gcaggccgggguccacgcagcauccagcuuugucugcagcuggguucugguuugc

SEQ ID NO: 4130396 - RNA, 63 nt, Human
gcaggcgcucugccuuugucuuacacggcugaaacaucuguugcagaggggcggagaggccgc

SEQ ID NO: 4130397 - RNA, 56 nt, Human
gcaggcggagguugcagugagcccagauggugccacugcacugcacuccagccugc

SEQ ID NO: 4130398 - RNA, 104 nt, Human
gcaggcucaguguccuggcccccaggucugaggcaaacagaggagugugcucucuacacuuuucuucugccucagaaucuuaagucagcauccccaaggccugc

SEQ ID NO: 4130399 - RNA, 64 nt, Human
gcaggcuccaaggccugggagagccuccaagccagggucuccaagccaggccucuggggccugu

SEQ ID NO: 4130400 - RNA, 65 nt, Human
gcagacaauccagacuagcacugucaaauagaacuuucugagugauggaaaugaucugggucugu

SEQ ID NO: 4130401 - RNA, 56 nt, Human
gcagacagacugcagugauuuuagggaaagauugacuggaaucagugacugacugc

SEQ ID NO: 4130402 - RNA, 57 nt, Human
gcagacauuuugaaucuaggcuacagagguuaguguucuggggacagcaauggcugu

SEQ ID NO: 4130403 - RNA, 67 nt, Human
gcagaccaggauagugguuucuaagcaugagcucugcagucagcuuggcuucacauucuguaucugc

SEQ ID NO: 4130404 - RNA, 62 nt, Human
gcagaccucaggacaucauuagccaacuccacggggagcuaaaauggcccguccgagucugc

SEQ ID NO: 4130405 - RNA, 55 nt, Human
gcagaccuccuguuucugggcugggucuucauuccugggaaaaggagugucuagc

SEQ ID NO: 4130406 - RNA, 92 nt, Human
gcagaccuugugcugggugggaguugggcugcagaaacagugagggguuuucugugcugcagggucagcacccuccuaggcaccagcccugc

SEQ ID NO: 4130407 - RNA, 55 nt, Human
gcagacgaacauuuagccaguaauuugggaguggccguguuagauguuuggcugu

SEQ ID NO: 4130408 - RNA, 76 nt, Human
gcagacuaagaagugccuugcaggugugauggcuaccuuuuguuauuauggauggaggcauuagucuuuucucugu

SEQ ID NO: 4130409 - RNA, 70 nt, Human
gcagacugagauucuccuuucagaacaguucacaaauacaacugggcugagggagggacuuugagacugu

SEQ ID NO: 4130410 - RNA, 83 nt, Human
gcagacugcagucaagcucaccaguucuggaaaguacaggaggcuuccugaagcuggggcugggaauggcuaaguaugucugc

SEQ ID NO: 4130411 - RNA, 72 nt, Human
gcagacugcugauguuuuuuaaaggaauuuaaugauacaguuucauucccaagaguaaacauaucagucugc

SEQ ID NO: 4130412 - RNA, 89 nt, Human
gcagacuggaauuggcugcaggccaccaaguugcagguucugacagcuccacugucacugggaggcaucuggagcugauuccaagcugc

SEQ ID NO: 4130413 - RNA, 86 nt, Human
gcagacuuaucuauccaauguuccaggguaaauguucuauuauuaacauuccugaggaaauacauucauggauauauauguuuagc

SEQ ID NO: 4130414 - RNA, 76 nt, Human
gcagagaacauaauuaucauaaacugagaauuuuucauuuugaagcuuaucuguuugugcuaaguaucuugucugu

SEQ ID NO: 4130415 - RNA, 76 nt, Human
gcagagaagaugggugccuguucccagaauacacucccaaguucuucaaugggcacagagucccaucugccucugc

SEQ ID NO: 4130416 - RNA, 68 nt, Human
gcagagaccaugauucacccaccacuguaucuucgggaccuacaguagugcucaaucaguguuuuugu

SEQ ID NO: 4130417 - RNA, 60 nt, Human
gcagagagucucgaaggugaugaccuccaaggccuccaucaucccuaaggacagcucugc

SEQ ID NO: 4130418 - RNA, 119 nt, Human
gcagagaugauaggggagcagaaagccaggcaggacauuuuucuuccuacaaugccuuucauagcagguuguuugacaugagaagugucaugucagucauuguguuuacccaucucugu

SEQ ID NO: 4130419 - RNA, 73 nt, Human
gcagagaugugaagaaagcugugaaauggagaaaauggggaagcugaccauuuugcacacuaugcagcuuugc

SEQ ID NO: 4130420 - RNA, 62 nt, Human
gcagagcaaggauggccggggccguggcgccugccagcccgcagccacccuccuucuccugc

SEQ ID NO: 4130421 - RNA, 74 nt, Human
gaguauggcaauauauuaaaaauuauccuauccucuugaggaaggaugaacauuaauacaucagcagacgauuc

SEQ ID NO: 4130422 - RNA, 109 nt, Human
gaguauggucuagauuucccauugauugggagagugugugaaugaaugagugaauguccuuucucacaucauuaagacuucuccugguuaaagaauuuagguuauguuu

SEQ ID NO: 4130423 - RNA, 81 nt, Human
gaguaugugugcagcuauauuucuauguguaucuggaagagcguguacauguaugagauauguguaucugcaugauggcuu

SEQ ID NO: 4130424 - RNA, 65 nt, Human
gaguauuagaagcagccuaauuuuagagagauuauccauaauccuuuaugugaguuguuucccuc

SEQ ID NO: 4130425 - RNA, 66 nt, Human
gagucaagagugcccugcucugagcucugcucccggcagacgcacucacugcagggcaugaugguc

SEQ ID NO: 4130426 - RNA, 102 nt, Human
gagucaagucuuuucaugaauaaugcuuuuacgacauguaccuuggauucuaacgauaugcauuuugugaaaacgucuucagauuucagagaauuaaaauuc

SEQ ID NO: 4130427 - RNA, 91 nt, Human
gagucaauagcucagcacugucagcacuccggagaguuacaggcuauaauuagauggcauggagguguaaggcaugcuuggcaguugauuc

SEQ ID NO: 4130428 - RNA, 111 nt, Human
gagucaccucacccuugagggcagagaguucuccaccucucuuugacaugguauaaaagccccaacuucccugagagguggugaggacuugucuuuaaugugaacaggcuu

SEQ ID NO: 4130429 - RNA, 74 nt, Human
gagucacgguaaucuaggacucccaggcuuucaggaagcuuaagcccuggcccaaccuugauuuuacgugacuu

SEQ ID NO: 4130430 - RNA, 83 nt, Human
gagucacugaaagcucggguaggugccagcgucuguucccagacugcucacgcauuacuugagcaggacauggauggugacuu

SEQ ID NO: 4130431 - RNA, 74 nt, Human
gagucacuugcugcuucagugggcucucuggggugucccagcaggccacugcagcuggagccagcggugaccuc

SEQ ID NO: 4130432 - RNA, 60 nt, Human
gagucagaugaagauaaaaggguuauuccauuuuugggucucuucuucuucaucuucuuc

SEQ ID NO: 4130433 - RNA, 56 nt, Human
gagucaggaguccugugugagacauccgcaaacaucucauaagcagcuucugaauc

SEQ ID NO: 4130434 - RNA, 78 nt, Human
gagucaggcacugcugcugcucuccgaucugccugcccugcuuccaggcugaguuaugcggcaacaguggccugauuc

SEQ ID NO: 4130435 - RNA, 63 nt, Human
gagucagugcaugcacacacaugguauacguguguguacguguguucguguaagcacuguguc

SEQ ID NO: 4130436 - RNA, 58 nt, Human
gaguccagcccuguucuaguaaaauauuacuuacaaaagcaggcagugggcuggauuu

SEQ ID NO: 4130437 - RNA, 70 nt, Human
gaguccagcucccagaacugaccauguugggcccagcgcccucugcuggucacucugggagcugcuccuc

SEQ ID NO: 4130438 - RNA, 66 nt, Human
gagucccagauucuucugugugggcacuuuccugggauaugcuaaaugaugggaaaucugggucuc

SEQ ID NO: 4130439 - RNA, 62 nt, Human
gaguccuggcucuacgggcuucaaagaggggcuccccugaggaccugcuggacccaggacuc

SEQ ID NO: 4130440 - RNA, 76 nt, Human
gaguccuugacacauaguaggugauuaauacauuuuuguuaaauaaaucagugccugaacuugcuguuagggacuu

SEQ ID NO: 4130441 - RNA, 57 nt, Human
gaguccuugucauaauucagugagauacuuauguauagcauugaauauagacagcuc

SEQ ID NO: 4130442 - RNA, 59 nt, Human
gaguccuuuucucuguccacuguaacacacagcuaagucuuggcagaggacaaggacuu

SEQ ID NO: 4130443 - RNA, 80 nt, Human
gagucuaaacaucacaccuuucuuagauuucuggucaguugcuaaagccaugaagacuauuugaaggugccugcagacuu

SEQ ID NO: 4130444 - RNA, 66 nt, Human
gagucuacuagcuacucauucaaauucugaggauaggauuaggagggagaggcaaguaauaacauc

SEQ ID NO: 4130445 - RNA, 89 nt, Human
gagucuacugccaaucucacauagcuaggaguagccaagcccuuucauccugcagcugccuccugccuguguggaggccuuauugacuu

SEQ ID NO: 4130446 - RNA, 57 nt, Human
gagucuaucucacucccccagguccugagagugcacuggagggaaagggguggauuu

SEQ ID NO: 4130447 - RNA, 58 nt, Human
gagucuaugucuuggaacgcugaaaugcauuucuucagauauauucaggauaugacuc

SEQ ID NO: 4130448 - RNA, 62 nt, Human
gagucucacuugcaagcuguggccuugcagacugcaaagaugcuggcucaguuugcagacuc

SEQ ID NO: 4130449 - RNA, 87 nt, Human
gagucucaguuccagauauuguuuguuucaccaaugcaagacauucugaaaagugcaaaauaucuuaaaaguaggugcuguggaguc

SEQ ID NO: 4130450 - RNA, 98 nt, Human
gagucuccugccaugugugucuuuguguguguguauacauauacauguauauguguguauguauacacauagauacguacauacugguacugauacuc

SEQ ID NO: 4130451 - RNA, 89 nt, Human
gagucucgcucuguugccuaggcuggagugcagugacacgaucucaccugcucacugcaaccuccaccucccggguucaagcgauucuc

SEQ ID NO: 4130452 - RNA, 86 nt, Human
gagucucgcucuguugccuaggcuggagugcagugacgcuaucuugguucacugcaaccuccaccucccggguucaagcgauucuc

SEQ ID NO: 4130453 - RNA, 83 nt, Human
gagucucgcugucaccaggcuggaaugcaguggcccgaucuuggcucacugcaaccuccgccucccagguucaagugauucuc

SEQ ID NO: 4130454 - RNA, 82 nt, Human
gagucucuaacccagauucuagagcagaggccuccccaaagaaccaggaaugccuccucuugagggucagggaaugaaucuc

SEQ ID NO: 4130455 - RNA, 55 nt, Human
gagucugagaacugggcucaguccacgggaacaacagccacaaaucucaggccuc

SEQ ID NO: 4130456 - RNA, 77 nt, Human
gagucugauccuguuauaauuuggaugugaaauaaauaguuccuuuucauauauuuuaaaauugaaauaggaaauuc

SEQ ID NO: 4130457 - RNA, 60 nt, Human
gagucuggcccugaugcaucauauucuaucugguguuauuucucagucagguauagauuc

SEQ ID NO: 4130458 - RNA, 65 nt, Human
gagucugggacauuagcagggaugaggagaggguccuuuccuuccuuuuacugucuccggagcuc

SEQ ID NO: 4130459 - RNA, 59 nt, Human
gagucugggcugucugcaggagucuggaugccccuucccaggcucugcagcugaggcuu

SEQ ID NO: 4130460 - RNA, 66 nt, Human
gagucugggguccuuuuggcuuuacccgcacauaaucucuuggguggaucaaaaccucuucaacuc

SEQ ID NO: 4130461 - RNA, 63 nt, Human
gagucuguuggagccuaggaugacagcaaacugaaaggcugacagaucuuggcccaacaauuu

SEQ ID NO: 4130462 - RNA, 87 nt, Human
gagucuugcucuugucacccaggcuggagagcaguggcaugaucucagcucacugcaaccucugccucccggguucaagcuauucuc

SEQ ID NO: 4130463 - RNA, 87 nt, Human
gagucuuggagaagucuuaaccaaauaaauguuacuugaauuaggucuuaaaaaaugagucgacauuuguuaggauuuuuauggcuc

SEQ ID NO: 4130464 - RNA, 71 nt, Human
gagucuuggcucuuuccucacacaggaagaugccuuuuccauguggcaauaggagacagcuaccaguccuc

SEQ ID NO: 4130465 - RNA, 80 nt, Human
gagugaaaagaugaacgauuuguccugauuucauuguguccuagcuugugaccuuggacaaaucucauuauuucugacuc

SEQ ID NO: 4130466 - RNA, 83 nt, Human
gagugaaaauggcuuagcagaguuagaagaguaaaugggcccaauaucuuccuucuuuuaauuccgguugcugccaguaucuc

SEQ ID NO: 4130467 - RNA, 82 nt, Human
gagugacaugaucugacuugcuuuuuaaaggaccaguuugucuacuguggaugguagaaaguaaguauggaguggaagacuc

SEQ ID NO: 4130468 - RNA, 96 nt, Human
gagugacggcaggcaggaccguggguccaagguugaugucugaguggagccagccaggcaugugacccuggacucaggcccucaggcugaucucuc

SEQ ID NO: 4130469 - RNA, 56 nt, Human
gagugacuguaucauuuuacauucccagcagcaaugucugagugauccaguuucuc

SEQ ID NO: 4130470 - RNA, 86 nt, Human
gagugaggagaauggggcaggaaaugggauaagggcuggguaguccugagccagcaauccucuuuuuguuaauucuuuccuuucuc

SEQ ID NO: 4130471 - RNA, 59 nt, Human
gagugaggcagggaaagaggauaauuuuuggaggauuaucuguuuucugugcguuucuc

SEQ ID NO: 4130472 - RNA, 74 nt, Human
gagugaggcugguccucaagggcacagccagauucccacaagugaggcugguccucaagggcacagccagauuc

SEQ ID NO: 4130473 - RNA, 57 nt, Human
gagugagggaggggaagaggagucuagaguugcugggacuggaccucugccuggcuc

SEQ ID NO: 4130474 - RNA, 61 nt, Human
gagugagggcagcaggggcugcacugaaccuugaggcuuccccgagcagcuacccucgcuc

SEQ ID NO: 4130475 - RNA, 71 nt, Human
gagugauguuguuauaucaugccuacaaauaccucaucugggucuguagucucugauauaucugcucauuc

SEQ ID NO: 4130476 - RNA, 76 nt, Human
gcaguucuaaggcaaacaggaaagcaggcaccacuuuuuauaaaggccuucucagauuuguucccuuagugacugc

SEQ ID NO: 4130477 - RNA, 66 nt, Human
gcaguucugggugccagcauggcugaguucuggugaggacucuguaccuggcauguggaugauugc

SEQ ID NO: 4130478 - RNA, 77 nt, Human
gcaguugcccuggggaggugcuggagagaagccuggggcucccaccaggagccaguuccaccccaggauaaggcugu

SEQ ID NO: 4130479 - RNA, 103 nt, Human
gcaguugggagcuguggggucuccagguggcuucugcccgaugucgucugagaacacaacgagcuccuuccgccucggggcccucacacugccgcgccccugc

SEQ ID NO: 4130480 - RNA, 55 nt, Human
gcaguugguagaagguccagggagaccacuuggaauaucuuuuguccccugcugc

SEQ ID NO: 4130481 - RNA, 75 nt, Human
gcaguuuaaccauugcauauccauaggcauaaauuaaaauagccaagagaguauggguauuauugguaagaaugc

SEQ ID NO: 4130482 - RNA, 68 nt, Human
gcaguuuacacuaugaaaagacuaacuacacaggauuuuuguuuguuuguuuguaugugugaaugugu

SEQ ID NO: 4130483 - RNA, 61 nt, Human
gcaguuuguuuguggacaccuugagcuaaugagaagccagggaagaaacaugaagggcugu

SEQ ID NO: 4130484 - RNA, 69 nt, Human
gcaguuuuaaauacauaggaauuucuucagcacugauauaauugucacuucuuuuguguuuaggguugc

SEQ ID NO: 4130485 - RNA, 74 nt, Human
gcaguuuuaguggaucuggggcagggccugagugucucaguuucugaaauguuccgaggugaugcuaaugcugc

SEQ ID NO: 4130486 - RNA, 86 nt, Human
gauucacucucauucacucacuuagcaagcauucaagugccugcaaucugccaagcaagcaucuggcuagguggggaagguguguc

SEQ ID NO: 4130487 - RNA, 64 nt, Human
gauucagagguagaacuggcccucacuuguaguuugagaaagugacuuuuccugccucuguuuc

SEQ ID NO: 4130488 - RNA, 65 nt, Human
gauucagccauacuaucgucuccucacuucaccagagggaauauauaugcugauggcugccaguc

SEQ ID NO: 4130489 - RNA, 60 nt, Human
gauucaggaagaacucuuaggaaaauuucucucucuucccagcugagacuuccugaacuc

SEQ ID NO: 4130490 - RNA, 81 nt, Human
gauucaggccucauuacagagauauaaucuacauucauacauuuauguuagugauucaaaucuauugggagagauugaauu

SEQ ID NO: 4130491 - RNA, 62 nt, Human
gauucagugugaagcuucugaaagccguaauuuaagguuccagaagccuccauauuacuuuc

SEQ ID NO: 4130492 - RNA, 82 nt, Human
gauucauacaggcuuugcucuuaggggcaccaaauaagauccaauacccaauuaaaugagaguacagucugguugugacauc

SEQ ID NO: 4130493 - RNA, 66 nt, Human
gauuccagagaaaggccuggcugcuguugagagacccaggaguagcuaaggccuuauucuggguuc

SEQ ID NO: 4130494 - RNA, 58 nt, Human
gauuccagcuugguauuuacucuggcugggugacgaugaugccaagcuaucuagaauc

SEQ ID NO: 4130495 - RNA, 67 nt, Human
gauuccuccucuggagagacccuggaggcucaucauccacaaauucugggggugcuagggagggauc

SEQ ID NO: 4130496 - RNA, 72 nt, Human
gauucuacagcccuugacaguggcagaagcaucuuucaagacauugcuuugcucucacuguaaggucuaauc

SEQ ID NO: 4130497 - RNA, 89 nt, Human
gauucuacugcugcaaaacaaauuaacccaauacugaguugcuuugcuuaaagcagcaaguauuuguuacuuuguaguuuauuuggguc

SEQ ID NO: 4130498 - RNA, 69 nt, Human
gauucuagguucaugggauucaguguugaacaaucagacaaugccccuguccccaugcaaccuacauuc

SEQ ID NO: 4130499 - RNA, 80 nt, Human
gauucuauuuucaagaaagaguggcuauuccauuuuuauaaauuagauggaauauccacucuuucuugaaaauaagaguu

SEQ ID NO: 4130500 - RNA, 76 nt, Human
gauucucacagaagcacgaagccuauugugaacugcgcaugcgaaggaccuaggcugugugcuccuuaugagaauc

SEQ ID NO: 4130501 - RNA, 98 nt, Human
gauucuccagagauacauuaucuccaaaucaaucaauaugaaggcucacuuugucuuuaaugggauccaucugguuaaugcuguguuucuugaguuuc

SEQ ID NO: 4130502 - RNA, 57 nt, Human
gauucucucugcucuccauuccaguggaaacugcucccaggagcccagaggugaguu

SEQ ID NO: 4130503 - RNA, 91 nt, Human
gauucugacuauauuucccuugacucguuuauauauugguauuaagcccguucuggagcuguggucaacaggaaauuuuauucaguuuauc

SEQ ID NO: 4130504 - RNA, 60 nt, Human
gauucuggaugaccaccuguccaggguccucaagaccccuggcugccagucaccagacuc

SEQ ID NO: 4130505 - RNA, 117 nt, Human
gauucuguagaaaauguaugacugcaugaacuuuucugaagcccagucaaacccgagguuaggaguuccugaauugagcuuuagaaacaguaauaaauacauugucuugcauuuauc

SEQ ID NO: 4130506 - RNA, 74 nt, Human
gauucuuaugagugaacuuuaccuagaagcuuacugacaaaauguucguaagucaaaguuuauucaaaggaauu

SEQ ID NO: 4130507 - RNA, 82 nt, Human
gauugaaaucacagggcugguuugucgaagaaaauuguccuaaugauggguuuucggauggggaaugcagcucuuuucuuuc

SEQ ID NO: 4130508 - RNA, 129 nt, Human
gauugaaguccagggaggaaaaggagcuuuccugaggucacugaguugguggcagagucagagcuaaggccuggguccacugaucaugcuccaguguucuuuacagcuuucuucuuuccccuuucaauc

SEQ ID NO: 4130509 - RNA, 97 nt, Human
gauugacuccaauuuuaaagaaguucuacuguggguaaaauguuauaaaauagcaugacgugccacagagaaccuuuuaugaaaguaagagucaauc

SEQ ID NO: 4130510 - RNA, 82 nt, Human
gauugagaaaagacagcucccuaauuuguuaaugcugguuaaagcacuuucauuacuuguuaaggguagaagucagucuauc

SEQ ID NO: 4130511 - RNA, 75 nt, Human
gauugaggaaacauugagcucuggaguggaaaagguugcagacuuuuagacucccaagucguuguagucucaauc

SEQ ID NO: 4130512 - RNA, 71 nt, Human
gauugaguauaucuguuuuuugcuguugauucuagaaggauauagcaauucagaauacauguacuacaauu

SEQ ID NO: 4130513 - RNA, 79 nt, Human
gauugagucuccugaccacccucugcuccaggugaucucucuagacgggaagcugcagcacagagagguggauucaguc

SEQ ID NO: 4130514 - RNA, 64 nt, Human
gauugauacuaaaugccugauagauuagggagaacuuaaugaaacucaguuuuagucaucaguu

SEQ ID NO: 4130515 - RNA, 58 nt, Human
gauugauagcugcugggauauuuuuagagaauuuugaaaagauuccacaguuuucuuc

SEQ ID NO: 4130516 - RNA, 57 nt, Human
gauugcaaggcauauaguuccccaguuugaggugaggcugggcaccugucugcaguu

SEQ ID NO: 4130517 - RNA, 56 nt, Human
gauugcaucuucccuggagggcugcagaguuuuagggcacucacggaggaugaauc

SEQ ID NO: 4130518 - RNA, 66 nt, Human
gauugcucugauaagugguguauacuguuuaauaaauuuuuaagcaugcaacuugcaguaguauuc

SEQ ID NO: 4130519 - RNA, 75 nt, Human
gauugcugcaucucaggagacgggucuuuucaggagcacuggaugauuaggccaaguuacuugggaaagccaguc

SEQ ID NO: 4130520 - RNA, 64 nt, Human
gauuggaacaaauuaguugcaagacugggggaauucauucuugaucacuaguuagucccagauc

SEQ ID NO: 4130521 - RNA, 128 nt, Human
gauuggcauaaauuuucuccaggcaauagcucuagugcgugguuuacagcuaguuaagcagauagcaaaagguggcugacaaaccucguuacaauggugcuuguccucuuuuucuguuucugcuaauu

SEQ ID NO: 4130522 - RNA, 81 nt, Human
gauuggguccauguucuccuggucugaggcugccucaucaucaucuggggacuccuggaucagagccagagaagcccaguc

SEQ ID NO: 4130523 - RNA, 68 nt, Human
gauuggucccucauggacacaugauaguggggagccuccgucauguuugggccaugaguggacuguuc

SEQ ID NO: 4130524 - RNA, 91 nt, Human
gauuguaaacucugggucuaugugugugucugguaucccauagugaacagagugcagugccaggcauguaguagacuugcaguaaauaauu

SEQ ID NO: 4130525 - RNA, 62 nt, Human
gauuguaauuuucaagagguaaggaguuuaaacucaugaccuaguuuuugagaauuuuaauc

SEQ ID NO: 4130526 - RNA, 58 nt, Human
gauugucugugaucaugagcaacuugaguuuuguugucaucuguguuacaggcauauc

SEQ ID NO: 4130527 - RNA, 73 nt, Human
gauugugcaggcaggagacauuugguugggacaaggcuucucugccaacucagcuucugcccugucaugaguc

SEQ ID NO: 4130528 - RNA, 72 nt, Human
gauugugcauauucaagguguacaaugugacaauuuuauauguguauacauuguauaaugauuaucacaauc

SEQ ID NO: 4130529 - RNA, 65 nt, Human
gauugugguggaggaagugcaguucuacuacagcaaaaguugaguuagaaauuccugccacaguu

SEQ ID NO: 4130530 - RNA, 102 nt, Human
gauugugucccacgccacugagucucugggacacugggucaguugucuagucuggcacaauuggcaggaaucccaagaaacagugugagugaggggacaguc

SEQ ID NO: 4130531 - RNA, 62 nt, Human
gauuguugggccccaccccgagaguuucugauuuaguagcucugggguagggcccaacaauu

SEQ ID NO: 4130532 - RNA, 66 nt, Human
gauuuaaagaguuauaguugguauguggugaaguuugccaaguaugggcuguacacacugaggauu

SEQ ID NO: 4130533 - RNA, 70 nt, Human
gauuuaacaugucuugacuucaucuuuucugugggaugggaggcaagguggagaauagauagguuggguu

SEQ ID NO: 4130534 - RNA, 63 nt, Human
gauuuaauuugugucuuuagcugaacucauguagaccauuuuagcuuuaggcacguuugaauu

SEQ ID NO: 4130535 - RNA, 67 nt, Human
gauuuagagaauguuuuguaaguggagacuucguccuucccuuaauguacaggaccuucuuuguauc

SEQ ID NO: 4130536 - RNA, 62 nt, Human
gauuuaggaaagucucuuggcugggagccacaguuggucccuucugagugcuuuccugaauu

SEQ ID NO: 4130537 - RNA, 71 nt, Human
gauuuagguggcaggagacacauggcauaguaaauuauauucauaugaugcugggucuucugcuguaaauc

SEQ ID NO: 4130538 - RNA, 70 nt, Human
gauuuauccagaguauugugaccauuugucaaucacugaugcugacugguuagauacuugcaauuaaauc

SEQ ID NO: 4130539 - RNA, 129 nt, Human
gauuuauguguguuauuuagaaagccaaaaguaaauguguuguggaugaaguucaagauccagcauucuguaggaagaugcaauuucauucugugacaacauguuuuaauaggaacuaacacguagauu

SEQ ID NO: 4130540 - RNA, 55 nt, Human
gauuuauugucccuguccugcuguuggugagcagugugaccuuuggcaaugcauc

SEQ ID NO: 4130541 - RNA, 96 nt, Human
gauuuauuuuguccauuugcaauuucaguauuuuagcucuaucucauaucauuuuuugguaggugcuguuaacauaugagguuaaagugguaaguc

SEQ ID NO: 4130542 - RNA, 87 nt, Human
gauuucaaaaugacugccaucucuaucuuuauugaaaucuuccauuauugugggaagacagguaaauagagaugcuggucagaaauc

SEQ ID NO: 4130543 - RNA, 56 nt, Human
gauuucaagcccccagagauucugauucacuggguuuauuguggggcuugggaauc

SEQ ID NO: 4130544 - RNA, 76 nt, Human
gauuucagacuuuguggggcccucccgaagccuggguggcagaacuagggcuggaagcuccagaaagucuggcuuc

SEQ ID NO: 4130545 - RNA, 59 nt, Human
gauuucagggugucuuccaacugaaaucucaauguuuucaguaugaaaaaccugaaauc

SEQ ID NO: 4130546 - RNA, 59 nt, Human
gauuucagggugucuuccagcugaaaucucaauguucacagcaugaaaaaccugaaauc

SEQ ID NO: 4130547 - RNA, 59 nt, Human
gauuucagugcacguaguuuauuugggacuugaucccaaggagacuggaagcauugguc

SEQ ID NO: 4130548 - RNA, 59 nt, Human
gauuucccagcaaaagcugguuucccuccuccaaaaccagcuuccugcagugggagguc

SEQ ID NO: 4130549 - RNA, 80 nt, Human
gauuuccuaugaguucauauuuaggcagcccagccacucuaaaagucugaggguucuuauaguaucagagcuaggaaauc

SEQ ID NO: 4130550 - RNA, 90 nt, Human
gauuuccugcuuguucuaagaaaugugaaagguccugcuguugcaaugauuuuaugacacgauucuuccaggaaaagcgcauaguaaauc

SEQ ID NO: 4130551 - RNA, 76 nt, Human
gaguggacuuugcccagcccuacaguaucaccugugagauuucacauggcugugcugcugcuguucaaaccccauc

SEQ ID NO: 4130552 - RNA, 56 nt, Human
gaguggaggugacuucugggcugaggcaguuaagagcacacaggccaccuccacuu

SEQ ID NO: 4130553 - RNA, 61 nt, Human
gaguggagugguaagggggaggaauuggacugcuucccuuuagaauucugccccuccucuc

SEQ ID NO: 4130554 - RNA, 58 nt, Human
gaguggaugagaggcuggacucagagucagaugagccaauuucaguuucuaguuccuu

SEQ ID NO: 4130555 - RNA, 70 nt, Human
gaguggauguuuuuaugaugcuugagggcacuuaaaaaguuuguucucauaaguaauuuaaacauuccuc

SEQ ID NO: 4130556 - RNA, 79 nt, Human
gaguggcaaaugcuaugauuuugaguuuccuuauuuuauuuacacacagggaaauucuaaaucguaacauuuaccauuu

SEQ ID NO: 4130557 - RNA, 77 nt, Human
gaguggcaggcauccggcaccuucuacccccuguuuccaccagccuuuaggaagagaggacuggggugcuugcccuc

SEQ ID NO: 4130558 - RNA, 63 nt, Human
gaguggccuggaaaggcuggucugaagaccucucuucccaugucugccgaccaggcuuugcuc

SEQ ID NO: 4130559 - RNA, 70 nt, Human
gaguggcgggcaggcuggugcaggcgucucagcagcacccuggaggcacagcacaccuggcccccagcuc

SEQ ID NO: 4130560 - RNA, 55 nt, Human
gaguggcuggguguuugaauccuugcuucuaguggcagagacugaccggcuauuc

SEQ ID NO: 4130561 - RNA, 62 nt, Human
gaguggcuuuuuuaugguaauguuuuauaacaacacaaacguacuuugucuuagagccacuu

SEQ ID NO: 4130562 - RNA, 59 nt, Human
gagugggcaccgugggcacacucggggaggugggaggagugggcaccgugggcacacuc

SEQ ID NO: 4130563 - RNA, 89 nt, Human
gaguggguaaguauuccagugagaacagagacaggggagcuacauacauaaaauaacucuuucauucauucuuucugaauauauucauc

SEQ ID NO: 4130564 - RNA, 66 nt, Human
gaguggguagagcggagccccuguagggcagagggaaucugacccuuggucuugcuuuuccuccuc

SEQ ID NO: 4130565 - RNA, 58 nt, Human
gaguggguuagggccagccuguggaggaccugggagccaggcugaguucuaugcacuu

SEQ ID NO: 4130566 - RNA, 77 nt, Human
gagugguggggugggcagcaccagggaaguguaucuaacacagcagcacugucccuugcugucacuccuuauggcuu

SEQ ID NO: 4130567 - RNA, 70 nt, Human
gagugguuagggaaugggucuggaagccagauuaccuggguuugaagccaggcucuuucaccugcuauuc

SEQ ID NO: 4130568 - RNA, 77 nt, Human
gagugguuuggguuuuguugcuguucauguguaucuuuuaaacauuaaggacccacgcacaggaaccccagccgcuc

SEQ ID NO: 4130569 - RNA, 99 nt, Human
gagugguuugucccaggcuguuggaaggggcagaguggcugcccucacccagggcuccuuuucagugcccuuuccauugcaccuuggcagcgcccauuc

SEQ ID NO: 4130570 - RNA, 75 nt, Human
gaguguauuuauguccuguggcugcccugacaaauuaucacaaacugggugguuuugaacaacagaaauguauuc

SEQ ID NO: 4130571 - RNA, 129 nt, Human
gagugucagaaucccuggggaagcuuguuagaaauacaaaugccuagauccuaccccggaaucaaacuuggggaggggaauucuggguguuuguauuucuaacaagcuccccagggcauuaugaugcuc

SEQ ID NO: 4130572 - RNA, 62 nt, Human
gagugucagcagggcagagcacugggugaggucuuaggccacucugaguuucugcugaccuu

SEQ ID NO: 4130573 - RNA, 64 nt, Human
gaguguccaguucuugcucucagcuacugaauaacuuguaaugaagguauuaccugagaugcuc

SEQ ID NO: 4130574 - RNA, 89 nt, Human
gaguguccugcugugggccugaugcugccaugagucccugcugcgcacccgcucugccuggccagcccucgggccacaccgugacccuc

SEQ ID NO: 4130575 - RNA, 71 nt, Human
gagugucuagaauaucuagaaagauccuaagcagagacugugugugguucuugguagcuguucuguggcuc

SEQ ID NO: 4130576 - RNA, 58 nt, Human
gagugugagcaggucaggagaugugagaggcagcaugauccuggagcugcuugaauuc

SEQ ID NO: 4130577 - RNA, 109 nt, Human
gagugugguucaauuuauuguacauggcauuuauagacgagaccuuuaauguucccaagacagggaagugucuccguuuuuaaagguuccaugacauuccuuuacauuc

SEQ ID NO: 4130578 - RNA, 65 nt, Human
gaguguguaggagaggcaccugucaccugugcagugagguagcugucaucuuuccugccaugcuc

SEQ ID NO: 4130579 - RNA, 84 nt, Human
gaguguuucccaaauaagauuguugauagcacuuuagcaaaaguccucucacacuuugcagagaucagcagguuugagauacuc

SEQ ID NO: 4130580 - RNA, 64 nt, Human
gaguguuuuuggcuguagcuggaaaucuggaagucaucaguauugggcaacaguuaauucauuc

SEQ ID NO: 4130581 - RNA, 66 nt, Human
gaguuaaagaaguguuguguggguuuuuauagaaaucaaaaguacaugcaauucuucugaaggcuu

SEQ ID NO: 4130582 - RNA, 70 nt, Human
gaguuaaagugagcuacuuuagguaagcaaggugagcuucagugagccuaagcagaagcuauuugaauuu

SEQ ID NO: 4130583 - RNA, 64 nt, Human
gaguuacacaguugguaggggcagagccaggugacaggcagucugaccccugugcuguggacuc

SEQ ID NO: 4130584 - RNA, 90 nt, Human
gaguuagaucucuacuaugaguuuaaggcuaaaauaggcauuucuuacuggacagcuuuaccuugaugauuuauacugaagaucuaacuu

SEQ ID NO: 4130585 - RNA, 93 nt, Human
gaguuagguaggggcaggaguguggccagggcucuggucuggcucuuugacagugcuccuuugauuccuguccacuucuacccaagccuuauc

SEQ ID NO: 4130586 - RNA, 67 nt, Human
gaguuauaugugaaaacacguauguguguguguauguauauauguguaaauuuuauaaaauuaaguc

SEQ ID NO: 4130587 - RNA, 82 nt, Human
gaguuaugagguagcuguggcuggcuggguuuugaugaaguacccauaauuucauaucagcugccacaggacuuucugacuu

SEQ ID NO: 4130588 - RNA, 59 nt, Human
gaguuauugaguauagaauguaaggucuuuacaugccuacuucuggauauucagaacuu

SEQ ID NO: 4130589 - RNA, 62 nt, Human
gaguuauuuugagcagaugguuauaggugguucuugcucaggaccgucguucagacggacuc

SEQ ID NO: 4130590 - RNA, 61 nt, Human
gaguucagugccuguccacagcuuccaguaaugagaagaagguagaagacacacuguucuc

SEQ ID NO: 4130591 - RNA, 82 nt, Human
gaguucaugguaaaauacagauucugacucagaguucugauucuggaaauucugauucaaaguuugagugggccuugaacuc

SEQ ID NO: 4130592 - RNA, 55 nt, Human
gaguuccggguuccacagcugggacaguguugcccagagcugauuccugggacuu

SEQ ID NO: 4130593 - RNA, 82 nt, Human
gaguucgggaugugcagcugugguggagccaggggcugggcacaccccuggcuccuggccuggcagcgucaucaucggaguc

SEQ ID NO: 4130594 - RNA, 59 nt, Human
gaguucucaagcaaucaaagagcaggagcucuaacuaauuguugccuugagauccacuc

SEQ ID NO: 4130595 - RNA, 60 nt, Human
gaguucugaacugugaaaugcagcaguugggaagugggcugucacucaccguuuaggcuu

SEQ ID NO: 4130596 - RNA, 55 nt, Human
gaguucuuagggagaacccaagguguguuggaacguuggagacacuugaggacuu

SEQ ID NO: 4130597 - RNA, 75 nt, Human
gaguucuuccugccacaggucuuagagguugaguguuuggacuaagcccugagcgugaggaggaaguacugacuc

SEQ ID NO: 4130598 - RNA, 78 nt, Human
gaguucuugccucuguguccuguccuuccuggaagucaggacucugcuuccucagggagcccggggaaggcggagcuc

SEQ ID NO: 4130599 - RNA, 63 nt, Human
gaguugaccgucacuauuuuauauucaaggacaaagacuugagcaaaugugaugguacaauuc

SEQ ID NO: 4130600 - RNA, 90 nt, Human
gaguugagccuguggagucuagagucugucagguugggauuccuuaauuucuuccaaaccaugaauggguucugguguaaggcuuaaguc

SEQ ID NO: 4130601 - RNA, 105 nt, Human
gaguugagcuuugucaagaaccaagggcugaaguucuuuuuguucagacuauguuucuguuaccaguauugagggacuaaggacuuucaagcccuucucauucuc

SEQ ID NO: 4130602 - RNA, 78 nt, Human
gaguugaggccggagacaagagacuuauuuuucaccuggcucagccaccaggucucuugcugucucugggccuuauuc

SEQ ID NO: 4130603 - RNA, 79 nt, Human
gaguugccugucaaaggcuggagggcaggaggagggccuggguuuggguucuuuccucccagccuuuggauggugccuu

SEQ ID NO: 4130604 - RNA, 78 nt, Human
gaguuggaaacccuguagguuugcucugaccuggcuuugcaagaacaguuuaacagaccucgcagccuguuucuacuc

SEQ ID NO: 4130605 - RNA, 69 nt, Human
gaguuggagcccugggucccaguccuggcuuugucacugaccugccagggaacccaagggccucaauuu

SEQ ID NO: 4130606 - RNA, 87 nt, Human
gaguugggagaccguugguuaccuucagaaaugaguugcgacaguuagugccgcuugcugaacaggaaccuggcagucuccagauuu

SEQ ID NO: 4130607 - RNA, 74 nt, Human
gaguugggggagaguuaaaaggaaacuauggaaauccuuuuuuaauuccuagacuuuuaagucccucuuuacuc

SEQ ID NO: 4130608 - RNA, 72 nt, Human
gaguuggggguugagcauuuuauuuuccuagagacuccuugguuucuagacaaauguguucauucccuacuu

SEQ ID NO: 4130609 - RNA, 57 nt, Human
gaguugguauaauuucugcagcccauuggcaggcuguggaaaauuuguauguaauuc

SEQ ID NO: 4130610 - RNA, 65 nt, Human
gaguugucuauucugaauugauuauagugagaggagauuagaagaucaguuaggaagaggcacuc

SEQ ID NO: 4130611 - RNA, 101 nt, Human
gaguuguggcuuuugcgaaugaggaacuggagcuuucauuuuagauaauuugaauuaaauuuaaauuggacggcgcaggucuggaggagccccugcaacuc

SEQ ID NO: 4130612 - RNA, 80 nt, Human
gaguuguuagggcuuuaguggggauguaugggaggcucugauaaggcuuuacaugauuucucacccugguacuaacaguc

SEQ ID NO: 4130613 - RNA, 60 nt, Human
gaguuuaaauaacacauuuccaagucacguagcuaguggcaagauguggaguuugauuuc

SEQ ID NO: 4130614 - RNA, 60 nt, Human
gaguuuaaucauuguucuauccagccuugaucucuaucaacaugaugggaccaugaacuc

SEQ ID NO: 4130615 - RNA, 61 nt, Human
gaguuuaguuuggcuuaaacugauuuuacaagagaaaucuggauuuagguucauugaacuc

SEQ ID NO: 4130616 - RNA, 113 nt, Human
gaguuucaugaacgucacauguuauuuuagagucuuuagagucuuaguguuugcugguugaauuuacuaagccaaugagcauuaaauuuuuacaaggcacgucugugaagcuc

SEQ ID NO: 4130617 - RNA, 72 nt, Human
gaguuucuuuccagggcuucugggcagccaguaccccucacuguccugaaggagcccaaggagagguaacuu

SEQ ID NO: 4130618 - RNA, 92 nt, Human
gaguuugacuauucgagauauauaagugaaaucauacaguauuugucuuuuugcgacuggcuuauuucacuuagcauaauguccgcaaacuu

SEQ ID NO: 4130619 - RNA, 57 nt, Human
gaguuugauggcuuaauaguagauguauuuaugucuuaguuguuugcugucuaacuc

SEQ ID NO: 4130620 - RNA, 59 nt, Human
gaguuuuaaccucagcucucugauuggucugucagaagacagcuugagaguucaggcuc

SEQ ID NO: 4130621 - RNA, 78 nt, Human
gaguuuuagagagaaauaaaugagauuuaaauugcuuagaacagugcaugucucguaaguuucacuucaauaaaucuu

SEQ ID NO: 4130622 - RNA, 65 nt, Human
gcagagcagggagaggaggcugggugccagguccgcagcuuggcugccagcuccucgccuugugc

SEQ ID NO: 4130623 - RNA, 61 nt, Human
gcagagccacagugguggcccacgugcuggcucaagcaucugggugacgcaguggcugugc

SEQ ID NO: 4130624 - RNA, 56 nt, Human
gcagagccaucaugauauggagugccauaagaggaagcccacauccauggcucugu

SEQ ID NO: 4130625 - RNA, 59 nt, Human
gcagagcccuggggguauggugggagauggugucccugagacccuugcaggggcucugc

SEQ ID NO: 4130626 - RNA, 59 nt, Human
gcagagccugugucugagcaaagcagaugauguagugcuugugagaggcagugcucugu

SEQ ID NO: 4130627 - RNA, 59 nt, Human
gaugcaaacugugacauagaguucaaggaaacuuauugagaucuaugcagguuugcauu

SEQ ID NO: 4130628 - RNA, 76 nt, Human
gaugcaaagccccugugugugcgcccucccugguggcccuuucaucucauugcacaaugcagaguggaguugcauc

SEQ ID NO: 4130629 - RNA, 77 nt, Human
gaugcaagcagucccagacccagaaggugggugcacagggacagccacccugaucggacucggagugcuuugccauc

SEQ ID NO: 4130630 - RNA, 84 nt, Human
gaugcacuuguccagauguuuguuaggucccuuguacucauguucucuagugcacaucaaaggcauuuggacaaauaggccauc

SEQ ID NO: 4130631 - RNA, 75 nt, Human
gaugcagaaaaacagugcugcauucauugagccagcccaaaugugagcucaugagugguacuguccuucuguauc

SEQ ID NO: 4130632 - RNA, 79 nt, Human
gaugcagacugcuuuuagaaaucuauagauuaaacugcuaaaaauaauagguuuauagaguucuguuaguauaaggcuc

SEQ ID NO: 4130633 - RNA, 94 nt, Human
gaugcagcugaugcuuuauuauuuugcagggaagggguggagggauccuauuauuuugcuuccaaaguguaaagcguucuuuuaugguuguguc

SEQ ID NO: 4130634 - RNA, 83 nt, Human
gaugcagcugugucucugcucucugcagucuugggcaggcagcaccgcugucuccugauacagaggguugaaugcacugcuuc

SEQ ID NO: 4130635 - RNA, 57 nt, Human
gaugcaggauagcuucacccagguagaagagaaaacuggcauagugagcuuagcauc

SEQ ID NO: 4130636 - RNA, 59 nt, Human
gaugcagggcagcucugggacagucgcugauugaaacaucccugaguucucugagcauc

SEQ ID NO: 4130637 - RNA, 72 nt, Human
gaugcagguuuaauggagauauuucagaaccuggauggcagcuuuugaaauuaagauauuguccauugcauc

SEQ ID NO: 4130638 - RNA, 63 nt, Human
gaugcagucauagugcuuccaggaaauuauauucgacauccuagaauaaucuuugacugcuuc

SEQ ID NO: 4130639 - RNA, 91 nt, Human
gaugccaagcugugcuaagugggaacugccugucucagcucucauccagcuccaagagcugagcaggcucccacuucagugccuuugaauc

SEQ ID NO: 4130640 - RNA, 72 nt, Human
gaugccaguagcacacugucuugauuacuauggguuuguaagaagucuuaaaauuagguaguguuugucauc

SEQ ID NO: 4130641 - RNA, 74 nt, Human
gaugcccagaacuugugcucaugguccagcaugguaacuaaggcaccagcuggcccaugagcacgucaggcauc

SEQ ID NO: 4130642 - RNA, 62 nt, Human
gaugcccaggcccaaccauggaugauuuugauuucacuggccuuggguguggccugggaauc

SEQ ID NO: 4130643 - RNA, 57 nt, Human
gaugccuggcaugggaaguguccagcugagaaauggaggcucccagaaaugggcauc

SEQ ID NO: 4130644 - RNA, 59 nt, Human
gaugcguugguugagauuacauccucuccuucgggaggggacagagggcagcccgcauc

SEQ ID NO: 4130645 - RNA, 95 nt, Human
gaugcuagcuccuggacaacauuuuuccacauacccuaggccagaagggaaauugcugccuuguggggaaggauuuaguccuggcagaauucauc

SEQ ID NO: 4130646 - RNA, 67 nt, Human
gcagccccaaccucuuugggccuugguuuccuuauuuuuggaacucggaggucaggagagguucugc

SEQ ID NO: 4130647 - RNA, 95 nt, Human
gcagcccuaacacccuaaaccaaagcuuuuccucucauuugccagaagcaagccucagacucauggcaggugacggggaugaguaugguuucugc

SEQ ID NO: 4130648 - RNA, 106 nt, Human
gcagcccucuugucuggcugaucaggaagcuacugccagcagccugcagcccugggggcgcacaggucugcugcagagcauggcuuuccucggcccagacggcugu

SEQ ID NO: 4130649 - RNA, 62 nt, Human
gcagcccugcagcuccacaccgccucuugcuaguugccugcuggaguggcugcaggcucugc

SEQ ID NO: 4130650 - RNA, 92 nt, Human
gcagccgcuuccccuggcgggcacugggucuucuccacgcagauugagacgucugcuggcgggguccuagcgccgaucugggaggccguugc

SEQ ID NO: 4130651 - RNA, 76 nt, Human
gcagccgguccuugccagggauggcucaugccccagcuccagagagaagcagguagacaucucugcaaggagcugc

SEQ ID NO: 4130652 - RNA, 64 nt, Human
gcagccuccccagguggggcaacacaccagcuccucaaagcugcuguggggcucggccugcugc

SEQ ID NO: 4130653 - RNA, 73 nt, Human
gcagccuccuaguucucugccagucgcugaaggacacccaggacaguuauugagugcagagcagggcugcugc

SEQ ID NO: 4130654 - RNA, 55 nt, Human
gcagccucgcgcucagucauguuggggcuaaaccugugccuggagaagaggcugu

SEQ ID NO: 4130655 - RNA, 58 nt, Human
gcagccugugcaaaagcuugguuuguccaaauaaagagaaggagaaugacacggcugc

SEQ ID NO: 4130656 - RNA, 66 nt, Human
gcagcgaucuuaugucugaacuuuacaaugguaucuauguuagaaaguucuagaaugacuuccugu

SEQ ID NO: 4130657 - RNA, 59 nt, Human
gcagcgcuguaggcccaaggcaccagggaauccgguccagcucagcccuacagcuuugc

SEQ ID NO: 4130658 - RNA, 63 nt, Human
gcagcggugacagcggugacagcagccuggccgguggcggcagcugcacguugucccgucugu

SEQ ID NO: 4130659 - RNA, 64 nt, Human
gcagcucgcacauuagucacucccugucacccaccuacacggcaggaggcugcugugcuggugc

SEQ ID NO: 4130660 - RNA, 69 nt, Human
gcagcucuaauguuacacugcaugguucauaguugcaaacuugaaagccaggaugcaaguagcagcugc

SEQ ID NO: 4130661 - RNA, 129 nt, Human
gcagcucuccaaagacgcaccaaggcugaccugacuuccucugcccucagccccucgcauccugccacucugcugagaugcugcuccacaggccagggcagccuugggagcggguacacagagacuugc

SEQ ID NO: 4130662 - RNA, 65 nt, Human
gcagcucuccucugugaggaaccugggaagaguuucuuccucaugccuccugaggaugaaguugc

SEQ ID NO: 4130663 - RNA, 59 nt, Human
gcagcucucuggccugcccuggugugauaaugcuaucagcugguugugggaguggcugc

SEQ ID NO: 4130664 - RNA, 55 nt, Human
gcagcucuggggcaggccugagacucugcauuucucucaagcucccaggugcugc

SEQ ID NO: 4130665 - RNA, 86 nt, Human
gcagcugaauaaauagaagcuauugaauuuauagcauauuuaaagcauugaauaucaggaauugaauggcuucaguuuaaagcugu

SEQ ID NO: 4130666 - RNA, 66 nt, Human
gcagcugagagaagaacagggccaguuaaccaaguuuuguuagcauuccuaacuauccuuagcugu

SEQ ID NO: 4130667 - RNA, 99 nt, Human
gcagcugagugugacccaugggagacagugcagggugggaagaaggggaggccagcgucucucccucacucugccuccugggguuuccacagcagcugc

SEQ ID NO: 4130668 - RNA, 62 nt, Human
gcagcugcagacccucagugcuuuuccuccacauauccugccacagagggucugccgucugc

SEQ ID NO: 4130669 - RNA, 63 nt, Human
gcagcugcucacauucucacaacucaacuguucaaaacucuguuguugaaugaaggagguugu

SEQ ID NO: 4130670 - RNA, 72 nt, Human
gcagcugcucagccuggccaggggcucugggcccauagggcaguccuggggaccaggcugaggacgggcugc

SEQ ID NO: 4130671 - RNA, 58 nt, Human
gcagcugcuggaaguuccugccaguaguaaaccuuucaggcagaaugugagcagcugc

SEQ ID NO: 4130672 - RNA, 71 nt, Human
gcagcuggcuggaugguauggaggagcucaggccuuucauggccucuggucccucaugcuguggcagcugc

SEQ ID NO: 4130673 - RNA, 66 nt, Human
gcagcugguggagcugggccugagcaggacuuccccaaaggacugagaaggaagccuccacucugu

SEQ ID NO: 4130674 - RNA, 69 nt, Human
gcagcugucauuuacaacagggauccccagccagucacuuggagccacccugcugugaggggcagcugc

SEQ ID NO: 4130675 - RNA, 55 nt, Human
gcagcuguucaaucugcagcaucuaggauuugguagcagcaggggaaacagcugu

SEQ ID NO: 4130676 - RNA, 74 nt, Human
gcagcuuaaaguguuguaucuccauuugcauauaaccugaauacaaaugcaauucaaugcauauuuuaaguugu

SEQ ID NO: 4130677 - RNA, 78 nt, Human
gcagcuuacauauuuauggugugaaguacuuaacucccuacauuuuaguucucacaucugaaaaaauauugagcaugc

SEQ ID NO: 4130678 - RNA, 68 nt, Human
gcagcuuccuagaucugugguacucagccucagcccaagcuguguauuagaauugucuggggaacugu

SEQ ID NO: 4130679 - RNA, 80 nt, Human
gcagcuuguggucuuuggcugcauucgaguugcuggaacauuuaucuaacaacccaaggugccagagcuacuaacgcugu

SEQ ID NO: 4130680 - RNA, 58 nt, Human
gcagcuuugcuucuuuuccauagcaaaugcuucaccgcugcuaggcaagcaaaggugc

SEQ ID NO: 4130681 - RNA, 77 nt, Human
gcagcuuugguaauuuuugcauuuagaaaauggaaacccacuuugcauuuucuacauucaaaaacuaccagaguugu

SEQ ID NO: 4130682 - RNA, 73 nt, Human
gcagcuuuguucuuucuaguagauugcuagagucuacuaaagauuuucauuugcacucuagaaauggggcugc

SEQ ID NO: 4130683 - RNA, 75 nt, Human
gcagcuuuucuugacagguaaaaugcuaccgcaauucaguggaaggcauuuaggaacugcaaucagaaaaccugc

SEQ ID NO: 4130684 - RNA, 83 nt, Human
gcaggaaaguuuuuauuuccccaagacccuggaggugucggggccucagagguucugugugggaagagagaggacuuuucugc

SEQ ID NO: 4130685 - RNA, 66 nt, Human
gcaggaacuugcaaaaugagcaauuaucucucuuaaauuucauuugauuagguuugcauuuccugc

SEQ ID NO: 4130686 - RNA, 62 nt, Human
gcaggaagcugugaguccaccaggcugcccugugcugggcaccugcucaacuggcuucucgc

SEQ ID NO: 4130687 - RNA, 69 nt, Human
gcaggaaugugcuugucuuggaaacuuguggaccaaaauauguucauccuuaagaaaagcacauccugc

SEQ ID NO: 4130688 - RNA, 87 nt, Human
gcaggaauuucauugcucugcugugugccccagugggaccugaugcccaacaaauggaacugaauauagaagagcaaugauuuuugu

SEQ ID NO: 4130689 - RNA, 55 nt, Human
gcaggaccucuggaugcaaugcguggcaaaguacgggguguuuccugaggcuugc

SEQ ID NO: 4130690 - RNA, 77 nt, Human
gcaggacucguguuuaagugucagaggcuuagaggggucagcucugaacuagaagucucucacauaucugguccugc

SEQ ID NO: 4130691 - RNA, 81 nt, Human
gcaggacuucucuucaggaaggagcuuuggaacuuccauagcauuuauuucagguaucaaaguuguccugugaaguuuugu

SEQ ID NO: 4130692 - RNA, 77 nt, Human
gcaggagacaacuggcuuucucugugguguucagugagccaccgcugaugccucauuagaacgcgagacacuccugc

SEQ ID NO: 4130693 - RNA, 67 nt, Human
gcaggagagagaugaacaacacuggauauucugcauuauccaguucuaggucacucucugggucugc

SEQ ID NO: 4130694 - RNA, 56 nt, Human
gcaggagagucugugccagguuccauacuccuuaucuuccacacgugaccuccugu

SEQ ID NO: 4130695 - RNA, 56 nt, Human
gcaggagauaugaagcuacacagucuuuaauggcuaagucuggcuuuguuccuugu

SEQ ID NO: 4130696 - RNA, 68 nt, Human
gcaggagcaaaucuguuauggugguccagacaggaggauuuaguucugggcacaguuuuugcaccugc

SEQ ID NO: 4130697 - RNA, 67 nt, Human
gcaggaggaugggcggcaucccugcaggucuuggucaccggcuuccagcaggugcugcgccuccugc

SEQ ID NO: 4130698 - RNA, 86 nt, Human
gcaggaggcuguggccaggucccugggggcaguguccugggggcagcgaccacuucccaagggacucaggaggcucagacuccugc

SEQ ID NO: 4130699 - RNA, 57 nt, Human
gcaggagugacauggauguggaucaacccaaaccauggcugcaccaguccuuccugc

SEQ ID NO: 4130700 - RNA, 61 nt, Human
gcaggagugaguuggggucuacacaaaccaugacaggucuguggcuucucuucacuccugu

SEQ ID NO: 4130701 - RNA, 56 nt, Human
gcaggauaaguuuuugagcuuguaauagcaagaaacugguuugaagaaaaucuugc

SEQ ID NO: 4130702 - RNA, 57 nt, Human
gcaggaugagggugcccaggaccaugcccagguugguccugcccacgcccaucuggc

SEQ ID NO: 4130703 - RNA, 58 nt, Human
gcaggauggcaguaagagggagaggcugggauauuucuuccucuugcuuccgccuugc

SEQ ID NO: 4130704 - RNA, 55 nt, Human
gcacucugggcucuuguuucagaauucucaaggauguuugggaagcccagagugu

SEQ ID NO: 4130705 - RNA, 82 nt, Human
gcacugaaaagagauccaccagggagagggcaauguuuaacuucaaagaaugccuuccuaauggugggguuucaggcagugu

SEQ ID NO: 4130706 - RNA, 60 nt, Human
gcacugaagacaaagucaggcccagagucaggcgcucuuuugucuugugucuccagcagc

SEQ ID NO: 4130707 - RNA, 78 nt, Human
gcacugaccugucugaacugcacugaaagacgcauuuuauuugcauuuaguuauucuagugcucagccauuucuuugc

SEQ ID NO: 4130708 - RNA, 73 nt, Human
gcacugacugaccuaacaaaggaagcugcccuggugccugucaccaggaaaaacacuguguuggugucagugc

SEQ ID NO: 4130709 - RNA, 65 nt, Human
gcacugaggcugggucacagacaaggcaggauggagcuggagacuucugaggcugagcccagcgu

SEQ ID NO: 4130710 - RNA, 62 nt, Human
gcacugagggcuccaccuagggacacuggcagcaagaccaacuccaguggugaguccaaggc

SEQ ID NO: 4130711 - RNA, 65 nt, Human
gcacugaggguuggcgucacaaguagaagcaccacuuucagcccagcgcaaacaacuggcagugc

SEQ ID NO: 4130712 - RNA, 71 nt, Human
gcacugcacagucccagaggaugccauucacagacucccaugcaaauagcuucccuggguuugugcagugc

SEQ ID NO: 4130713 - RNA, 56 nt, Human
gcacugcaguccugauggagcggcuuauggaaguuuuucugggaggcacugcuggc

SEQ ID NO: 4130714 - RNA, 59 nt, Human
gaugcuaucuuugacauuguucacuucaaggagugagauaacauggaagaguagcuauc

SEQ ID NO: 4130715 - RNA, 78 nt, Human
gaugcuauggaaggagcuaaggaccugggaccagaaugaaaucacauucuuccuaccccaguuaguugcuuccacauc

SEQ ID NO: 4130716 - RNA, 65 nt, Human
gaugcucaaaaaauaguuguggaauuugaauucucccaguucacaaaaugguuuguugauguauc

SEQ ID NO: 4130717 - RNA, 61 nt, Human
gaugcucaucuguccuuugaugcucauaaauugaaugugcacucagggacauguggguguc

SEQ ID NO: 4130718 - RNA, 61 nt, Human
gaugcuccuggcauccugcuuuuaacuacuucaggguuaaugacaggccugccagagccuc

SEQ ID NO: 4130719 - RNA, 73 nt, Human
gaugcugaaccagggcugggauaggucaggauggcucuggggcccugccuggcuucucaccuuguucuguguu

SEQ ID NO: 4130720 - RNA, 71 nt, Human
gaugcugaccagcuguuuccuuucuccgguaaguaccgacucugaggauaaacaggaaaacuguuaggauc

SEQ ID NO: 4130721 - RNA, 64 nt, Human
gaugcugagagauuggagacuaguuucauucuucuguauguggauauccaguuuucccagcauc

SEQ ID NO: 4130722 - RNA, 67 nt, Human
gaugcugagccaaaaagcagagcuugguaucuccaauuccagcugugcuuuuauugggcuuuacauc

SEQ ID NO: 4130723 - RNA, 69 nt, Human
gaugcugaggagauggcuugcucucacgugggcagcugcuccuuugagaaacaagccaugcgcaguguu

SEQ ID NO: 4130724 - RNA, 63 nt, Human
gaugcugaggaguaacauugagcaucacagauucccagggugcuggagauacugcucaguauc

SEQ ID NO: 4130725 - RNA, 66 nt, Human
gaugcugcugccuuaacuucuucgcuguccucugagguacgcugccgaaaagugaggccagagcuc

SEQ ID NO: 4130726 - RNA, 71 nt, Human
gaugcugucugucaggagcaggcaacagacgguccugggguccaucugugcuaaugcuucacaauagaguc

SEQ ID NO: 4130727 - RNA, 59 nt, Human
gaugcuucuuuaauucagauuugaagggaugaguuuccuuguucuggauuaaacagcuc

SEQ ID NO: 4130728 - RNA, 75 nt, Human
gaugcuuuaaaugucuuuugcuuucuuuccagaacuguuuaugaaggcagagagauaugcuuuuaguagaguauc

SEQ ID NO: 4130729 - RNA, 70 nt, Human
gaugcuuuauuguuaggucauguaaaaauaagccuuuguuguacaguuaaaugcccuaaaauggagcauc

SEQ ID NO: 4130730 - RNA, 77 nt, Human
gaugcuuugguccagagguuguuugagugaaguaagcauuuagguacuuguacacucaguacuucuagacuuccauc

SEQ ID NO: 4130731 - RNA, 72 nt, Human
gaugcuuuguaaaguauacauauauuagccuucgcuaguaauggugaugcuaacuuguauagcuaaugcauc

SEQ ID NO: 4130732 - RNA, 60 nt, Human
gaugcuuuguacagggccuggcacauuguaagcacuugucaguuccuguugcacagcauc

SEQ ID NO: 4130733 - RNA, 130 nt, Human
gauggaaaauacuuuuaaaauaaaaucugcggaggaagaagugugaucauguucugugucucuagcucgaguuuuaauucuggcaggaagaggaaaggucaacauuucucgcucacaaguuaaugcuguc

SEQ ID NO: 4130734 - RNA, 85 nt, Human
gauggaaauaagaucaucaugcccacuugagacuucagauuauucuuuagcuuagugguuguaugaguuacaucuuauuaaaguc

SEQ ID NO: 4130735 - RNA, 58 nt, Human
gauggaagcuauauuguugcuauugucagcuuuagcaauaauuuaggccuuuccuguc

SEQ ID NO: 4130736 - RNA, 63 nt, Human
gauggaauuuggacuggaaguccuuuaguggcccugguauaggacucaaguaccgaauugauc

SEQ ID NO: 4130737 - RNA, 55 nt, Human
gauggacugccaccuccuccgggcucugcuuagugucacagggguacaguucauc

SEQ ID NO: 4130738 - RNA, 77 nt, Human
gauggagguaaaggauguagaagguggcagguggcuuuaauaauuauauguacaucguugaauucaaauccucuauu

SEQ ID NO: 4130739 - RNA, 112 nt, Human
gauggaggucuucucuagacaugguugacuucuuugaugacaaccuaguagucacauaaacugcccaggaaucucaaagaaaggucaugauguaccccugaagaacgccauc

SEQ ID NO: 4130740 - RNA, 93 nt, Human
gauggaguuccaaagaaacugaaggcuuucccaaggucacaccacuaguuauugguaguacugggacuagagcccagccguccuaauucuauu

SEQ ID NO: 4130741 - RNA, 78 nt, Human
gauggauaccaaggccucagacucagugcguugugaccuugggcaggucgcucgcccuuucugggccauugaucccuc

SEQ ID NO: 4130742 - RNA, 72 nt, Human
gauggauuacaaucccauuuaugccuaguaguccauuauuggaaugcuaagcaugugggaguuauuuuuauc

SEQ ID NO: 4130743 - RNA, 55 nt, Human
gauggauuauuggaaaaucuguguacuccccugcacaguucaugauaacuccauc

SEQ ID NO: 4130744 - RNA, 98 nt, Human
gauggcaaucuggcugggacccagggccagcugauaauccuggugacaguaggagcugccaccaggaagugguggccugggccuggaccucagccauc

SEQ ID NO: 4130745 - RNA, 62 nt, Human
gauggccaagaauauuucucaaccuugaaacagguugaaaucuucaagaauguauuggccuc

SEQ ID NO: 4130746 - RNA, 75 nt, Human
gauggccuggguccccuuccggcccaggaauggaacugaagccagauaaugggaagggagggggugccuggcuuc

SEQ ID NO: 4130747 - RNA, 61 nt, Human
gauggcugcuugguguuugaagacaguucccagggcaugcauucauuuguugagcaccuuc

SEQ ID NO: 4130748 - RNA, 69 nt, Human
gauggcuuggagauacaagugguaccuccugaaaaagacacccagguagcaguuguaucugaaagucuc

SEQ ID NO: 4130749 - RNA, 91 nt, Human
gaugggagcacacuuagauuggaaucuugacccuagcugugcugguggccacacugacuggaaucaaggauguucagagguggcuccuuuc

SEQ ID NO: 4130750 - RNA, 61 nt, Human
gaugggaucuugcuauauugcccaggcuggucucaaauuccugggcucaagcaauccuuuc

SEQ ID NO: 4130751 - RNA, 57 nt, Human
gaugggaugcauggcuguggccagacucgcaucauggccucugccauuauuccuuuc

SEQ ID NO: 4130752 - RNA, 78 nt, Human
gaugggcuaggucagcacaggugcucaggccaggacagauacuucgucccuggccacccagccuuggccaugguccuc

SEQ ID NO: 4130753 - RNA, 79 nt, Human
gaugggcugggcuggaaggccaaggcaggcuucuuucaaugucuggugccuuggugcuucuucauguggcccuuccuuc

SEQ ID NO: 4130754 - RNA, 61 nt, Human
gaugggguuggcacuuccuucgcuacccugguacaaaguucacagagaugcuaaucugauc

SEQ ID NO: 4130755 - RNA, 74 nt, Human
gauggguaaggguguuugguuagggugacaauaauccugauuucuaaacccuacaucagaacauuuacccuauc

SEQ ID NO: 4130756 - RNA, 76 nt, Human
gauggguaccuccgugcugacugcugcucagcugcuggccuccuuuccagaagagcagucagggugguaagccauc

SEQ ID NO: 4130757 - RNA, 56 nt, Human
gauggguggaggagaaaggcaucuuacacccacggugcccuuccucuuucccccuc

SEQ ID NO: 4130758 - RNA, 64 nt, Human
gaugguaaagaucuggcugccaggauucaguaagaaaaggaggauucuggcuuucuuauccauc

SEQ ID NO: 4130759 - RNA, 77 nt, Human
gaugguggaggggacuggagcaggagggagggggcagcccuguccacucuccagagcccuuccggccccaccccauc

SEQ ID NO: 4130760 - RNA, 72 nt, Human
gauggugguagaagcacuaugugaacuucauuguccugaagcuauacagggaauugcugucuggucaucauc

SEQ ID NO: 4130761 - RNA, 68 nt, Human
gaugguguggggagcuuggguguuuguuucccauuucacaaaacaaagcagccaaccuuacauucauc

SEQ ID NO: 4130762 - RNA, 124 nt, Human
gaugguguuugugggguuuugcuugguuuuguucuguuuugcuuucacuuuuuauuauggaaaauuucagauauauguaaaaguagacagaauaguuucaugaacccccauguauguacccauc

SEQ ID NO: 4130763 - RNA, 57 nt, Human
gaugguuuuauaaggcagaguuucccugcacaaggucucuguuugccugcugccauc

SEQ ID NO: 4130764 - RNA, 66 nt, Human
gauguaaacugggacuuccuagggcaaacaaaaauguauagucacccuaucacucaaguuuacguc

SEQ ID NO: 4130765 - RNA, 73 nt, Human
gauguaacagugucaggauuacagauauaagaauauauuauaucuguaacagagacugacaaauguacccauc

SEQ ID NO: 4130766 - RNA, 65 nt, Human
gauguaauagauauagauugcuccuugacacucaaagugcaagaaagauccuauuucuuuauauu

SEQ ID NO: 4130767 - RNA, 62 nt, Human
gauguacaaugucacuaugaccucaggaaguggggagaaagaguggugaacauuuuauaauc

SEQ ID NO: 4130768 - RNA, 60 nt, Human
gauguaccuuuuggaucuggauauguagauuuguucccagaaaguuugagaagauacauc

SEQ ID NO: 4130769 - RNA, 92 nt, Human
gauguacugguagauauaauuuuucuguggccaguucuuaaagggaaugucuaaaagaaauugguauaguaacauuauuuuacuuauauauu

SEQ ID NO: 4130770 - RNA, 60 nt, Human
gauguagauucauaugugguguccuagaauuuccacuccauguauaguuggaacuacauc

SEQ ID NO: 4130771 - RNA, 59 nt, Human
gauguaguagaaacagccaaguuuuagagucaaacagaccuggcucuuuuuaugacauu

SEQ ID NO: 4130772 - RNA, 57 nt, Human
gauguauagcuuuaacugacccuggguuuugcagaccaggguuuguuuaauacacuc

SEQ ID NO: 4130773 - RNA, 59 nt, Human
gaugucacaagcagaacuaggcacuggucuuauuaugcauauuuucuguuggugacauc

SEQ ID NO: 4130774 - RNA, 55 nt, Human
gaugucacuuaauuugugugguaaacucucaccaagcaagcuuauuagugauauu

SEQ ID NO: 4130775 - RNA, 79 nt, Human
gaugucagagcacccuugggugccagccacaaguggcccuccagcaggcugagcacccagggggaggcugcccugacuc

SEQ ID NO: 4130776 - RNA, 103 nt, Human
gaugucaggucuucugugugcgggagagcugcacuggggguggaaugaugugcacauugcuucuacuugcccaggcaggcccagcacaggggcuuggaacguc

SEQ ID NO: 4130777 - RNA, 75 nt, Human
gaugucauguauuugacagugaguuguggauggugcucauguuuauucacgauaugccugucacuacauuuuguu

SEQ ID NO: 4130778 - RNA, 101 nt, Human
gauguccacauccuuaugcccagaaccugugaauguguuaucuuaauggcaaaagugacuuugcaaaugugauuauauuuaaggaucuuaaggaggagauu

SEQ ID NO: 4130779 - RNA, 66 nt, Human
gauguccagggggcuugacugguuucucugcuuagggucuuacuagauauuguccagccugggcuc

SEQ ID NO: 4130780 - RNA, 63 nt, Human
gaugucccccauccacaccuacacccugcaaucauucugucagagugcaggucugaugccauc

SEQ ID NO: 4130781 - RNA, 57 nt, Human
gcacugccacugcccagccgguggccuuagauagguggccuugggcagguggccugc

SEQ ID NO: 4130782 - RNA, 56 nt, Human
gcacugccaucaaugcaugacauuuaagagucauccaagguuuugaaggcagucgu

SEQ ID NO: 4130783 - RNA, 129 nt, Human
gcacugcugacguuugggacauuagucguggggacuguccugugcaccgugggauguuuagucauuccugaacuccacacugggugccagcagcauucucccuccccugauugugacaggcagcagugu

SEQ ID NO: 4130784 - RNA, 87 nt, Human
gcacuggaagacaggccugaggagaugcugcccuggacccagagacaugguucccaggcccugggcucuccuggucuggucaccugc

SEQ ID NO: 4130785 - RNA, 58 nt, Human
gcacuggaggguguaguugcuguaucuucccugcuguuaaacuacacuuuucagaggc

SEQ ID NO: 4130786 - RNA, 68 nt, Human
gcacuggauggcagcauauugacagcaucuuuuauuucaggacugugaugcaguugccauccagaagc

SEQ ID NO: 4130787 - RNA, 55 nt, Human
gcacugggugugaggcagcgucguuuccccuucgcgcucuucgaaugucaagugc

SEQ ID NO: 4130788 - RNA, 69 nt, Human
gcacuggugcaugcccaugaagcugguccugguggucauggaccagccucacuggcaucaccuaggagc

SEQ ID NO: 4130789 - RNA, 66 nt, Human
gcacugugguugggggcuggggcccugaccuucaccaccccaggggccaguccccuaauccagggc

SEQ ID NO: 4130790 - RNA, 74 nt, Human
gcacuuaccagagaggauccgcccucgaauggacacauuaccagugaaggggcauuucuugucaauguaggugc

SEQ ID NO: 4130791 - RNA, 90 nt, Human
gcacuuagcaaguaaccuggagugcugguuucacuggggugaacaagccagucaaagccagcauuccagccccuuuuuuguuccaagugc

SEQ ID NO: 4130792 - RNA, 58 nt, Human
gcacuucacaugccuuuuccuggacacaagcauaagucggggguaggcuagugggggc

SEQ ID NO: 4130793 - RNA, 89 nt, Human
gcacuuccccagugaucuuaguucuugguucuuaguucuugguuugguguccaggaugggagauaggaacagaucuugaggagaacagc

SEQ ID NO: 4130794 - RNA, 78 nt, Human
gcacuuggucugggggcaagcagacagcuguggaguucacagcccacggcaacucaccugcccucagguccagguagc

SEQ ID NO: 4130795 - RNA, 86 nt, Human
gcacuuuucauuauuuuuaucagagaaauggagggcgcuuacacugguaagugcuuuaaaauuuccugagcaaugauccuaagugc

SEQ ID NO: 4130796 - RNA, 103 nt, Human
gcagaaaagcaacugggcugcucugaaggggaagggaugggcagcaggucacaggaccauggucuucaccagcccugccucucagggccccugcuuuuacugc

SEQ ID NO: 4130797 - RNA, 107 nt, Human
gcagaaacaaugggaugaugguguuucaggucugcuuuccuugccacuguuagauuucaacgugucagcaaaggcaggccgggagcugcuagagcucagauuucagc

SEQ ID NO: 4130798 - RNA, 69 nt, Human
gcagaaacagcuuuagaggauaauagucauuauuaugauugucaaucuauccuagagcugcuauucugc

SEQ ID NO: 4130799 - RNA, 60 nt, Human
gcagaaacuuggagaagccaggcuuacagcccugucaucauucuucagcguuucccaggc

SEQ ID NO: 4130800 - RNA, 56 nt, Human
gcagaaagcuccuugcgaucugaaagcacaucacacagagcaaggaaguucuuugc

SEQ ID NO: 4130801 - RNA, 69 nt, Human
gcagaaaggcuugcuuuugcucggucgucuuacuagacagccaagcaccaauaagguuggcuccuuugc

SEQ ID NO: 4130802 - RNA, 73 nt, Human
gcagaaauaaagucaucuaggagcagauuuucugcauucugcaaaaucacuuaaauggcuuauuuucguaugc

SEQ ID NO: 4130803 - RNA, 80 nt, Human
gcagaaauaaguaguuuaguguugugaguucuggagccaguuuaucuccuccacuaacuaaauuacuuaaucuugucugc

SEQ ID NO: 4130804 - RNA, 66 nt, Human
gcagaaauuucaugugaacacacaguacuuuguccaguacgugcacucauaccugaaauguuuugu

SEQ ID NO: 4130805 - RNA, 63 nt, Human
gcagaacugccguguuugagaauugguaccaucccaauuagacauuuauuggccagauucugu

SEQ ID NO: 4130806 - RNA, 55 nt, Human
gcagaacugugcuagaauucauuuagucuucugaguucuauuggguagguucugu

SEQ ID NO: 4130807 - RNA, 64 nt, Human
gcagaagaaaaggaaaagagcgacaguuuguaagucuauuagcugagauuguuuccauuucugc

SEQ ID NO: 4130808 - RNA, 80 nt, Human
gcagaagaaggggacuugggguucaccuuaagagggaacgcccccguugagguucacuuccuggauccuuacugcucugc

SEQ ID NO: 4130809 - RNA, 93 nt, Human
gcagaagaaggugguucugcugcggaauauaauucauucgcuacuucaggcacuggauuuugaucugcaagguguacagcuagguucuuaagc

SEQ ID NO: 4130810 - RNA, 77 nt, Human
gcagaagagggcccauagaucgucagcuugcagccucugguuuaaagcaaaaucgcaucuggggccagcucaacugc

SEQ ID NO: 4130811 - RNA, 106 nt, Human
gcagaagccucgguuuguugcuacuguuaguuccuggaaccugucucacucucauuucuucaggguugauuuuccaggaagcaguuagcagccuauccuaguuugc

SEQ ID NO: 4130812 - RNA, 83 nt, Human
gcagaagcuagguacagaaggacuugagaaagacaguggugaggucuugugacuguuugagucuauuugaauucagccucugc

SEQ ID NO: 4130813 - RNA, 70 nt, Human
gcagaagcuguucgaaggccgccagcaguugccguucaguaaugaggucggccacggauuugccuucugc

SEQ ID NO: 4130814 - RNA, 77 nt, Human
gcagaaguucacauagcuggcagguggcagagcugggauuagaauggugaucugccuggcuccaggugagcugcugu

SEQ ID NO: 4130815 - RNA, 72 nt, Human
gcagaauccugugugacucuggggagaagcccagugcucuuggcccucauccacccucacuaggaaagcugc

SEQ ID NO: 4130816 - RNA, 75 nt, Human
gcagaauggcugccagggcaggagguacgcuggaauucuucauggagccuuuucuucccuuuagcagccaguggc

SEQ ID NO: 4130817 - RNA, 59 nt, Human
gcagaauguuguguuagaugaaguuucugcuugggaacuaaauuugacagacaacaugc

SEQ ID NO: 4130818 - RNA, 93 nt, Human
gcagaauuuaucauugcugaugugcugagauucaaggaaaauacucuccaccaugcuucuauuuucuacaugucaguaacugauaauaacugc

SEQ ID NO: 4130819 - RNA, 77 nt, Human
gcagaauuuauuagguuuacauaaagguuauggggaauaaaucacuggcuuuuaucuuugccugguaucaccuuugc

SEQ ID NO: 4130820 - RNA, 56 nt, Human
gcagacaaagacagcaucucagguucccuugucugggcgcccgcccuuugaucugc

SEQ ID NO: 4130821 - RNA, 58 nt, Human
gcagacaccuggccaggccaggaaguuccccuuaccuggcacaguccugggugccugc

SEQ ID NO: 4130822 - RNA, 94 nt, Human
gcagacacgguggugaucacauugcuuggcauuugcugggagcugagcccucuucucucuccaugguuuugucaagcuggcaccauaacuuugc

SEQ ID NO: 4130823 - RNA, 61 nt, Human
gcagacagaggaagggcuccaugagcugcccagaggcuucaggaagccuuucuuggucugc

SEQ ID NO: 4130824 - RNA, 63 nt, Human
gcagacagcauguugggcuauuaucccaccccgaauagggagggaagcccaggcaucgucugc

SEQ ID NO: 4130825 - RNA, 90 nt, Human
gcagaccuccuauuauucugucuuuggucucaaucaaggagaagaugccguugagaagccucaaagaaggaagcagaaaggagaauuugu

SEQ ID NO: 4130826 - RNA, 89 nt, Human
gcagacgagcaaaugccauagaaaguauuauggaauuucagauuaacauugaaguauuguagcuuuuuguguuguuauucaucauuugc

SEQ ID NO: 4130827 - RNA, 82 nt, Human
gcagacucaacaaagcuaguucacugaagccuaugcuauuuuauggaucauaggcucuucagagaacugaauggcagucugc

SEQ ID NO: 4130828 - RNA, 72 nt, Human
gcagagaaaagccaucccagccaagccacagaacuauuuccuaauaaaugguuuggggguguuuuguucugc

SEQ ID NO: 4130829 - RNA, 80 nt, Human
gcagagaagguacauauuauaaaauacagcuauuuucuuaagcuaaaugucuguguuuaaaauguguacauaaacuuugc

SEQ ID NO: 4130830 - RNA, 62 nt, Human
gcagagacaacaaguuuaacuauuuucuuuccaucugaugguuggacugguuugguuuuggc

SEQ ID NO: 4130831 - RNA, 56 nt, Human
gcagagacagacuaaugaaaagcuuuacaagacauuuucucaacugucuucucugc

SEQ ID NO: 4130832 - RNA, 67 nt, Human
gcagagacauuuuacaccaagacuucuucauuaauugacauguuugugugugugaguguguagaugu

SEQ ID NO: 4130833 - RNA, 87 nt, Human
gcagagacugaaugacaugaccugguagagacagauuugagauucaaggucaguguucuuucuaccuguuauguuuuuauaauuugc

SEQ ID NO: 4130834 - RNA, 87 nt, Human
gcagagacuggggaucugucaggugacacacuaggagcaaagaucgccuucugugcccucuguacccaccuacagccagccugcugc

SEQ ID NO: 4130835 - RNA, 68 nt, Human
gcagagacuuuuaucucuggaguuuaaagacuucuaucucuuuaaguccaagaggaaagguuuccugu

SEQ ID NO: 4130836 - RNA, 56 nt, Human
gcagagagcaguaaagugaaguggggucucaagagccccucauacacucuccuugc

SEQ ID NO: 4130837 - RNA, 59 nt, Human
gcagagauuggugcacugaugaauaauuauuuauauucucauuggucauuaagcucugu

SEQ ID NO: 4130838 - RNA, 59 nt, Human
gcagagcaggaaggaagucagggaauaaacaccauuaccuuucuuuucuccugcccugc

SEQ ID NO: 4130839 - RNA, 61 nt, Human
gcagagcaguacucucuugacucuacucaacgaucagaaaauuaaggaguauugauuuugu

SEQ ID NO: 4130840 - RNA, 59 nt, Human
gcagagcagugcuugcccagcgccuccguggcgggcgcugugcacgagccacugccugu

SEQ ID NO: 4130841 - RNA, 61 nt, Human
gcagagcagugggggucuggagccaggggcuggguccagguucugccgcuuacugcugugc

SEQ ID NO: 4130842 - RNA, 129 nt, Human
gcagagcauccccuaguuuccuggcuugaggguucacuggggaauggcugucuuugcaacuuuaaacagaagccuaaagccugcaaagaagccuuugccuucugccucccucggcuauauguguguugc

SEQ ID NO: 4130843 - RNA, 57 nt, Human
gcagagcauuggcucuaugugugccuccuaacacauccaccacaugccaggcucugu

SEQ ID NO: 4130844 - RNA, 57 nt, Human
gcagagcauuuggguuacugcuuuuacucuuuggaagcuguuaucaucuguaucugc

SEQ ID NO: 4130845 - RNA, 70 nt, Human
gcagagccaccucugagcccaaacccugugcuacaugagacgcagguugugugugcaaggccuggccugc

SEQ ID NO: 4130846 - RNA, 57 nt, Human
gcagagccagaauggccaggacccagagccagcucucucccucaguccuggcuuugu

SEQ ID NO: 4130847 - RNA, 55 nt, Human
gcagagccaggagagacccuugggcuuccuuccuucaaggccucuggucucuagc

SEQ ID NO: 4130848 - RNA, 79 nt, Human
gcagagcggcuccgcggcgggagcugagcggaaggcgcgggcugcgaucugcucucuguuccccuggauccgccuaugc

SEQ ID NO: 4130849 - RNA, 60 nt, Human
gcagagcucaagguguucagcuuucuuuucacucugagcuauguucacugagaguucugc

SEQ ID NO: 4130850 - RNA, 71 nt, Human
gcagagcugagcagguguggagaguggucgggugcccagcguugccccuccaccacgcgccggccguuugc

SEQ ID NO: 4130851 - RNA, 74 nt, Human
gcagaggagagggagaaggacuaucaggcugcccucuggggcaggauggcccaaccuucacccagucuuuuugc

SEQ ID NO: 4130852 - RNA, 69 nt, Human
gaugugauaggcagcuuguuuaggaggaaauaaugucgcguacggagugccugagcaugucuucagguc

SEQ ID NO: 4130853 - RNA, 77 nt, Human
gaugugcaaauuuacucuugagacauuguaauuuugaaagcaaaugucuucucuguagguaaauuuacugcauuuuc

SEQ ID NO: 4130854 - RNA, 104 nt, Human
gaugugccugagcuguauaauggcuuaauuaauuguugguguuuaugaaguggaaauacacauaguacaaucaguuaauuaguuuucuucacagccugaacauu

SEQ ID NO: 4130855 - RNA, 83 nt, Human
gaugugcuagcagugucuagguaggccaucauucguuuaguaaaacucuauauggauuugcuuauacacaugugcagaauauc

SEQ ID NO: 4130856 - RNA, 72 nt, Human
gauguggaacaguuaagacuaagcuagauuaugaacuccacuuucuggcuucuaugaauguccuuccacuuc

SEQ ID NO: 4130857 - RNA, 70 nt, Human
gcauuaguuuucccaucuuuaugguggaucauaugaagaacacuauaagguucaugugagaauuuaaugc

SEQ ID NO: 4130858 - RNA, 63 nt, Human
gcauuaugccuuagauauugaauggcuagauuuacuaguagcaauggcucugagcuaucuugc

SEQ ID NO: 4130859 - RNA, 55 nt, Human
gcauuauuuacucccacuagagaucaggccucccagucccaggggugagugaugu

SEQ ID NO: 4130860 - RNA, 88 nt, Human
gcauucacccggagccugucauccgcuuccauaaggcagccuuccugggccagugugggcugguggaggacaauuuccugaugaaugu

SEQ ID NO: 4130861 - RNA, 91 nt, Human
gcauucaccuaaggcucugaagcaacccuuugaagaugagagcccaucucaagcagggcaacuuagaaaacuuccuugggauuuugugugc

SEQ ID NO: 4130862 - RNA, 87 nt, Human
gcauucagagccuuucagcagagaaauuacauaaucauauucgugauuaaaaggaucuuuuuggcugcuggguggagaauaaacugc

SEQ ID NO: 4130863 - RNA, 70 nt, Human
gcauucagccuaaagagaaaagggcuuccuuuuaacaauuuccccccuuaaaucuuuuguguugcaaugc

SEQ ID NO: 4130864 - RNA, 67 nt, Human
gcauucauacaucaauaagcuuugcaugcugacaccuaauuuugcaggcuacuuugguuauggaggc

SEQ ID NO: 4130865 - RNA, 56 nt, Human
gcauucaucuaguaucacucugcaccagguagaaaggauauugagaugaauucagc

SEQ ID NO: 4130866 - RNA, 101 nt, Human
gcauuccaaggccucuguggacucaggcacucagcccucgccagggccccgcggguggggcugcugugaccuuugucuuccacaugaaggcgcuggagugc

SEQ ID NO: 4130867 - RNA, 130 nt, Human
gcauuccagcugauucucagccucucagcccugugcucuugaggcagcugaagcuucaaagaguccuccagacucugaggagacacuuaggcucuaacuugcacaggggaggcagaauuagauugggugc

SEQ ID NO: 4130868 - RNA, 71 nt, Human
gcauucccacggaugcuguagcuggcacugcacugggucauaccugaagccagcacaguacugggucuugc

SEQ ID NO: 4130869 - RNA, 90 nt, Human
gcauuccggggcccugaggaugccagcaugggugguccugggcucgcccucuccacagcauggcuggcguuccucgacugccgccggagc

SEQ ID NO: 4130870 - RNA, 75 nt, Human
gcaggcucccucugggcugaguucauggcccugcccccugguggccagagccggcuucacaggauaagagcccgc

SEQ ID NO: 4130871 - RNA, 76 nt, Human
gcaggcuguucagcuaaggaguuucacuguacugugaagaagcacaggcugugaagaaccuagugaaccuuacugu

SEQ ID NO: 4130872 - RNA, 58 nt, Human
gcaggcuuccagccagguagcccaggaggcugggcugcagggguugagagcuccuugc

SEQ ID NO: 4130873 - RNA, 73 nt, Human
gcaggcuuccccuugugcugccagcguggcucccgagccguaagagccagugaucagacagggaggagcuggu

SEQ ID NO: 4130874 - RNA, 73 nt, Human
gcaggcuucucuuaaguguggcaggcagggaacaggcuaacucacccugucuucaugccugaaagaagaaugc

SEQ ID NO: 4130875 - RNA, 60 nt, Human
gcagggaagggaaacagagaccagggaacccaggggacaggaaucucuuucccuuucugc

SEQ ID NO: 4130876 - RNA, 95 nt, Human
gcagggacaaggaggugucugugaugggagcgauccccggacugagcugggcugucugcuggcacgucacagauaauaaaaccgcgucguccugc

SEQ ID NO: 4130877 - RNA, 75 nt, Human
gcagggagcaggaaggccagaagggucaaaauugguaaauuaauggaagggcccugggcccucuagcuuguuagc

SEQ ID NO: 4130878 - RNA, 73 nt, Human
gcagggaggaacucuucagauauacaguacucucaagaucugaagaugggggucugaagguuuacaaccuugu

SEQ ID NO: 4130879 - RNA, 116 nt, Human
gcagggauucuuugacucuuuuguucgcugauauaucacagcuuacugucacagggccugauaucuaguagaugcuguagaaauacuuaugaaugaauggguagggaaccuauugc

SEQ ID NO: 4130880 - RNA, 80 nt, Human
gcagggauuugaagccuccuuauuaaaggauauguuauuaauaauauaaacuuuagcggaaggaggaguggucuuuuugu

SEQ ID NO: 4130881 - RNA, 58 nt, Human
gcagggcaaauggcauuuuuuccugugggcugaccccaaggaaggcuguuggccuugc

SEQ ID NO: 4130882 - RNA, 59 nt, Human
gcagggcaguaagagcuagagucagaagcucgucucuacucaacucucauuaguucugc

SEQ ID NO: 4130883 - RNA, 89 nt, Human
gcagggcaucaaggagagccccauccucgcagaauggaauacggaagaacacacgcacaaucgccaguauguggcugucuuugaccugc

SEQ ID NO: 4130884 - RNA, 79 nt, Human
gcagggcauguggcccaaacggguccagugaaagucaguccugggacuuuggcugggacuauuggggaacagccucugc

SEQ ID NO: 4130885 - RNA, 60 nt, Human
gcagggccgggcacgcagcaggcauucauggagugcugcugauggaugccuggaccgggu

SEQ ID NO: 4130886 - RNA, 63 nt, Human
gcagggcgcugaaauacuaacauggacagauguguuguacauggcuuuauuuucagcuucugu

SEQ ID NO: 4130887 - RNA, 60 nt, Human
gcagggcugggaagcagggggccuuugucaggcucacggccugagguuucuggccucugu

SEQ ID NO: 4130888 - RNA, 65 nt, Human
gcagggcugugugagcucuuacuguucccggcacugaggagucagcagugaaagcacagccaagc

SEQ ID NO: 4130889 - RNA, 57 nt, Human
gcagggcuuuucugcuuugcucuugcuguaaccucagagccuggcaaaagguccugc

SEQ ID NO: 4130890 - RNA, 68 nt, Human
gcaggggcaggaagggagcagcugaugccccaugcugagcagccugcuucccuuugugccccgucugc

SEQ ID NO: 4130891 - RNA, 55 nt, Human
gcaggggcucugggugaugugaggagcaacaggcacccuccuccacagccccugc

SEQ ID NO: 4130892 - RNA, 56 nt, Human
gcagggguagugucuuccugagucuccuuccucaccagacgcugugaggccccugc

SEQ ID NO: 4130893 - RNA, 79 nt, Human
gcagggguguggcuguguggcaaagggauuacaggggcacuaggagugugaugaggcccacacagguaggccccuuugc

SEQ ID NO: 4130894 - RNA, 80 nt, Human
gcagggguuaaagauggagaugaccuaggacagcaccuggcccacaggggacacucuuaguuagcucccuucuucucugc

SEQ ID NO: 4130895 - RNA, 98 nt, Human
gcaggguaacccagccacccgguuugcccuggaccauccugguuuuaacacucaaagucccauguccugggcagaaugggauggcuggccucccuagu

SEQ ID NO: 4130896 - RNA, 56 nt, Human
gcaggguacaugaccuugaaauuucauguuucaugaguauuucuucauguccuugc

SEQ ID NO: 4130897 - RNA, 92 nt, Human
gcaggguacucggagggucaaaaacuucuugcugcauuuucuguuuucgcgcuggacagacuugcccagaagucacccucugagaacacugu

SEQ ID NO: 4130898 - RNA, 84 nt, Human
gcaggguaggcuuccucugagggcugucaggaaaggcucuguuccaggccucucucccugccuugcagauagccacccccaugc

SEQ ID NO: 4130899 - RNA, 81 nt, Human
gcagggucugcuggagguuaguugcagaaggcagagccguguggcauuggcucugcuggugaugaccucauaacacccugc

SEQ ID NO: 4130900 - RNA, 77 nt, Human
gcagggugaggaccagcagccacagcucuuccaggcaagucccugagaugcuaaagggcugcucaagguuuaucugc

SEQ ID NO: 4130901 - RNA, 111 nt, Human
gcagggugugguggcgggagccuguaaucccagcuacuugggaggcugaggcaggagaauugcuugaacccgggaggcagagguugcagugagccgagauuacgccacugc

SEQ ID NO: 4130902 - RNA, 59 nt, Human
gcaggguucagugagguguacuccgcauccaccaggagccgcacgugcugggcccgggc

SEQ ID NO: 4130903 - RNA, 60 nt, Human
gcagguagugggcugccuugaggugauuuucagucuuuguaaggccaagucuauuucugu

SEQ ID NO: 4130904 - RNA, 88 nt, Human
gcagguauucggugcugccuguggcuucugggucaguucaucuaauucuggugcagcagcaggaagcccaggcuggcacucacucugc

SEQ ID NO: 4130905 - RNA, 61 nt, Human
gcagguccgagagggucggguauagggggaccccaaucuugccuguguauuuccggccugc

SEQ ID NO: 4130906 - RNA, 90 nt, Human
gcaggucuguuagguggugggauaugagcaucuggauuccauggucagguuggcauacuucauagggacucucgcaucuaggcauuuugu

SEQ ID NO: 4130907 - RNA, 74 nt, Human
gcaggugaaaucaguuaagaugaggccauacuagaguagggugggcccuaaaucuaaugacugauuguacuugu

SEQ ID NO: 4130908 - RNA, 70 nt, Human
gcaggugaguaagagcaggaauuagacuccuggucugccaggggucuggcucccacucuuacaaaugugc

SEQ ID NO: 4130909 - RNA, 100 nt, Human
gcaggugcauguaugugagcauguguguacaaguauauuguguguacaugugugugcacguguguaugaguguacauaugccacaaguacaugugcgugc

SEQ ID NO: 4130910 - RNA, 55 nt, Human
gcaggugggagccgcugccugauucuagcuacaacagacauagguuccuccuugu

SEQ ID NO: 4130911 - RNA, 79 nt, Human
gcaggugggcucccuggucggcguggugacggcgcgggaccccgacgccgccaaccggcccguccggugagacccccgc

SEQ ID NO: 4130912 - RNA, 94 nt, Human
gcagguggguaaaaguuuuaggcauguaaaggaccccccaaaucacacugcuuuccuuauuauucaaaaugucuucauagcuuauauccagugc

SEQ ID NO: 4130913 - RNA, 55 nt, Human
gcagguggucaguuccagcagucagcuauaguggcuggcuggaguggccaucugu

SEQ ID NO: 4130914 - RNA, 57 nt, Human
gcagguguggauuugcauccagguaaccaccucagguucacacaggucagcaccugc

SEQ ID NO: 4130915 - RNA, 83 nt, Human
gcagguguugugcuauccgcaguggcuguuucuggaaggcaggagccugccuucacuucugcaccacuuagcacagugccugc

SEQ ID NO: 4130916 - RNA, 58 nt, Human
gcagguuagauuuaauccauuccuaacaggagcuggaaucuauagucuacaagccugc

SEQ ID NO: 4130917 - RNA, 69 nt, Human
gcagguugaucagggcuguauguuuuuugaguaggggaaccuagcuuaaggcaggcccuugucuacugc

SEQ ID NO: 4130918 - RNA, 63 nt, Human
gcagguugccacacugaucacaucuggcugcgucuauaagaaagaucaaaguggcaggccugu

SEQ ID NO: 4130919 - RNA, 56 nt, Human
gcagguugguucccaggaccugggggggaccuccagccccgggaaccuggccgugc

SEQ ID NO: 4130920 - RNA, 84 nt, Human
gcagguuuuacuaaagugucagcuaaaacaguuggucccaggaccaguguuagagacugauacaggcaagaagggagagcaagc

SEQ ID NO: 4130921 - RNA, 55 nt, Human
gcaguaagauguuucccagagcacaaacgagugggugggaggauuucuuaauugu

SEQ ID NO: 4130922 - RNA, 57 nt, Human
gcaguacaaacuaaaucuccugcugguaaacacuaggauguuuggcguuugaauugc

SEQ ID NO: 4130923 - RNA, 64 nt, Human
gcaguacauuuauuaaugguaaaauuuggaaauaaauuuugcuguuuguacaaugaaauacugc

SEQ ID NO: 4130924 - RNA, 55 nt, Human
gcaguagcaguauccagaagcagucuucauguucucucugguucauuucugcugu

SEQ ID NO: 4130925 - RNA, 58 nt, Human
gcaguagccagacacucccauaacucuucuugagcuaucagugugaugaggcugcugc

SEQ ID NO: 4130926 - RNA, 58 nt, Human
gcaguagggccuggcccccaaaagcacaagccacuaagcugugucccaggcucaacgc

SEQ ID NO: 4130927 - RNA, 55 nt, Human
gcaguaguucugauuggaacuuuggguaugagagguuucuggccaggaugacugc

SEQ ID NO: 4130928 - RNA, 94 nt, Human
gcaguaucaacaagcacccccaggugcuucuaaugcacagccagguugaaaaaccagugccuuaggguaccuggugcuugucugauuuuucugu

SEQ ID NO: 4130929 - RNA, 69 nt, Human
gcaguaugcuccucuguggugauucacuucugucgugagucucuuacccaagcagaauguaugaagugc

SEQ ID NO: 4130930 - RNA, 74 nt, Human
gcagucagaccucccagcuucagaucucagcggggccaucugcuagcuuuauaaugcugggcgguuuacucugc

SEQ ID NO: 4130931 - RNA, 79 nt, Human
gcagucagccagccagaucagggcagggguugcuguuagcauguugcaucucuuggaaagacuggccaggcaugggggc

SEQ ID NO: 4130932 - RNA, 69 nt, Human
gcagucauuagaggugggcuagguacuauagaacauauugaaccugacaguccuuuucuaguguauugu

SEQ ID NO: 4130933 - RNA, 60 nt, Human
gcaccagcuacuccagggccgugguugugaagaucgagacacgugaugggaagcuggugu

SEQ ID NO: 4130934 - RNA, 58 nt, Human
gcaccaggagcaucuaggaggcggcuuucaagacaggcugugauggcucauugagugc

SEQ ID NO: 4130935 - RNA, 62 nt, Human
gcaccaguguggaaugggagcucugucuuacuuuauauaagcagaguccccuucccaugggc

SEQ ID NO: 4130936 - RNA, 106 nt, Human
gcaccaucaucuggaagcuuguuagagguguggaaucuugagccccauccaaggccuagggagucagaaucuacauuuuaacaagaucuccaggugacuugugugc

SEQ ID NO: 4130937 - RNA, 56 nt, Human
gcauuccuacaggcugcuaugagagccuuaccuaacuuaugguagucacagagugu

SEQ ID NO: 4130938 - RNA, 116 nt, Human
gcauuccugccagugccccuacugcucuugcacauggcaaugcugcucccaggacucaaguggcuuuggacuagcaggcauuggcauguugggcaggguugggggcagcuauaugc

SEQ ID NO: 4130939 - RNA, 60 nt, Human
gcauucucuguugauguuuaccuuugaaauuuugaacaaagcauuguaagcagaagaugc

SEQ ID NO: 4130940 - RNA, 129 nt, Human
gcauucugaaaaacuuuuaaguugacaaacacaguaacaguuuggguuccaauugcacuagaaaauucaguuuaauaacccauagcuuuuauagccaguugauauuuuaaaaaauaaacagauccaugu

SEQ ID NO: 4130941 - RNA, 76 nt, Human
gcauucugacauacauaguauuuuuaguguaaguggaguacaacuuaucuauacacacaaagaaugcuucagaggc

SEQ ID NO: 4130942 - RNA, 58 nt, Human
gcauucuugguggagugcuaaaagugcuacuacacagcauggccuguaaccaaagugc

SEQ ID NO: 4130943 - RNA, 66 nt, Human
gcauugaaauggcaaaaagagaauaaaguucaaucaucacuauuucuuuccuugcugauuucaugc

SEQ ID NO: 4130944 - RNA, 55 nt, Human
gcauugaacuaaauaagcagucauggacgaaguggccagaggauuuguucagugu

SEQ ID NO: 4130945 - RNA, 73 nt, Human
gcauugaacucugaagauugcugcuaacuccaguuuucuuggugucagacacauuucuuucagugauuaaugc

SEQ ID NO: 4130946 - RNA, 80 nt, Human
gcauugaggauggcagugugcucagccagucugauucucuggcugauuuugagaagcacagucugccuuuccuaacuugu

SEQ ID NO: 4130947 - RNA, 81 nt, Human
gcauugcuuauguuguaauugccauuauggauaucuugcaguggccauaaaguauuuggaauggcauuuuuaaaguaaugc

SEQ ID NO: 4130948 - RNA, 71 nt, Human
gcauugcuucucucuucugguccuaauccccccuguggggaaacugaggccagagaggggaccagccuugc

SEQ ID NO: 4130949 - RNA, 106 nt, Human
gcauuggcaucaccugggagauugcuagagaugcagaucccaggcccucgcagauccauggagucaucaccugcauuuuagcaagaguuccaggugauucgugugc

SEQ ID NO: 4130950 - RNA, 55 nt, Human
gcauuggccugaaacugguucagcaucucugcugccacauuuucaggacuaaagc

SEQ ID NO: 4130951 - RNA, 85 nt, Human
gcauuguacaauugaugggugacauuaggaagauagacccauuuuuagggucauaaucacaguuuuaugcacaguuuauaauugc

SEQ ID NO: 4130952 - RNA, 71 nt, Human
gcauuguccaugucaacaggcccagaaaauaagaaaucaaagguauuuuuugcauguugcauggugcaugc

SEQ ID NO: 4130953 - RNA, 58 nt, Human
gcauugugggccugucguggguggggccagcagcacaugcaugccaggcucacagagc

SEQ ID NO: 4130954 - RNA, 70 nt, Human
gcauuguucucccaguccucugugcuuacccucagcacagaggguaagcuaagugauuaggacuacaugc

SEQ ID NO: 4130955 - RNA, 81 nt, Human
gcauuguuguaaacuguguaauaugaugucuaacuuuuccuacuuagcauuauuuuauauaugguuuauaaaacuaugugc

SEQ ID NO: 4130956 - RNA, 81 nt, Human
gcauuguuuauuguuugcagcagacugaguuacguggcuauaauaccacuagagaagcuguuguagcuuguuagaccaugu

SEQ ID NO: 4130957 - RNA, 79 nt, Human
gcauuguuucaauauuugcaucauuagcuauucaguaauuuauaucugggugcaguugcucaaauauucaaagcaaugc

SEQ ID NO: 4130958 - RNA, 69 nt, Human
gcauuuauaaaagauuuuucucaggagacggcuaauaaauuagggcucacugagaugaauauuaaaugu

SEQ ID NO: 4130959 - RNA, 64 nt, Human
gcauuuauuuugugccaagcacuguuccacgcucuuuauaugugcuggcuuauuuaguaaaugu

SEQ ID NO: 4130960 - RNA, 65 nt, Human
gcauuucagacauaccaguuauugaaagcaaauccguuuuaagugacuucucaaugcugaaaagc

SEQ ID NO: 4130961 - RNA, 84 nt, Human
gcauuucagaguuuuguauguaaaauguguaucaguuuucuguugguacauaagaaauuacuacagauuaacuggauuuuaagc

SEQ ID NO: 4130962 - RNA, 78 nt, Human
gcauuucucagauaagaagacugaagcccacucguguuuaguaacauguguaaggucucucagucuaagaucugaugc

SEQ ID NO: 4130963 - RNA, 81 nt, Human
gcauuucugggauaaaucuuguuuagauaaaaauauauuuuauuaugcugaauuugguuugcuauuuuuuaucugaaaugc

SEQ ID NO: 4130964 - RNA, 130 nt, Human
gcauuucuuaaugaaguccugcaugaagcugcugcauuucaaggaccacccugggaacaggaaggcacuaugccagccauccucaguguggucccuggaucagcagcaucugcaucaccugggaacuugc

SEQ ID NO: 4130965 - RNA, 58 nt, Human
gcauuugaaaugcaagaaagugacugguauggcagcccucccugugcauuucaaaugu

SEQ ID NO: 4130966 - RNA, 56 nt, Human
gcauuugacacaggaaaguuguaacuucucagaaguuaaccuuucgacugucaugc

SEQ ID NO: 4130967 - RNA, 91 nt, Human
gcauuugagaaacagguauuuacugagagccacucuguuaaaaacacacuugagacuagagggcugccucagucagcuauccaucaauagc

SEQ ID NO: 4130968 - RNA, 63 nt, Human
gcauuugcagucuggccugcuuugggcuuguuggacacaccccagggcagccaacccagaugc

SEQ ID NO: 4130969 - RNA, 68 nt, Human
gcauuuggaccauugaccugaucuacaaaguugcaauagcucagugagcucaguggauccaauuaggc

SEQ ID NO: 4130970 - RNA, 81 nt, Human
gcauuugguuugauagauguaguuuggcaaaguuacggugaacagugaagggacaggcugccucuauuuaggaucaaaagc

SEQ ID NO: 4130971 - RNA, 69 nt, Human
gcauuuguaaaaguauauggugcaagaauguuauuguuauuaaggcaccauaauauauuuaauguaugc

SEQ ID NO: 4130972 - RNA, 56 nt, Human
gcauuugucugggauuguggauggaugcgcuuccuucccauauaaccagcaagugu

SEQ ID NO: 4130973 - RNA, 57 nt, Human
gcauuuguuggucagauuguagucaacacagaugacucaaguagcccaauuagaugc

SEQ ID NO: 4130974 - RNA, 63 nt, Human
gcauuuuaaugagguuuaugaggaugcagacaaacauaguccccagaaaacccuuugagaugc

SEQ ID NO: 4130975 - RNA, 69 nt, Human
gcauuuuacucuaaaaagaagcagaucuccucagagaaaggacugauucaaauuuagggcaagaaaugu

SEQ ID NO: 4130976 - RNA, 73 nt, Human
gcauuuuacuugguuguuuuaacuuggcaugauaugcacaauaccuugccaguagcaccaaugagaauuuugc

SEQ ID NO: 4130977 - RNA, 84 nt, Human
gcauuuuauauaagccugauucacuugucauuuucaacauguaggugacuguggugacaggauagucagcuuuguaaaaaaugc

SEQ ID NO: 4130978 - RNA, 81 nt, Human
gcauuuucacacauuaucucauuaaauacucaaaauuaccuagucaaguugaguauuaagugagauaaugugugaaguugc

SEQ ID NO: 4130979 - RNA, 84 nt, Human
gcauuuucccaaaugaggaauguuuggcaucucacuuaaaccguggcguccagcagucacaggaaaugcugccuuauuuggugc

SEQ ID NO: 4130980 - RNA, 56 nt, Human
gcauuuuccuagagaauggagcacucuuagcuuuagcaauaucauaaggaagaugc

SEQ ID NO: 4130981 - RNA, 91 nt, Human
gcauuuuuacacauugugggcauuacuguaugaauuauguuauuuagagcucugcaacauaguuacuucauauagcuuuguguagaaaagc

SEQ ID NO: 4130982 - RNA, 60 nt, Human
gcauuuuucugauuuucccuacacuugagaguuguguaggaaacaaaguggaugaaaugu

SEQ ID NO: 4130983 - RNA, 98 nt, Human
gccaaaauaagggaagguggagaugcuuuccaguggggaucugcuccaggauuguaggccccacucccaggguggcaucuaaccaacccccauuuggc

SEQ ID NO: 4130984 - RNA, 57 nt, Human
gccaaaaugcagauuccugggucccagugauucugacucaguacaucuggaguuggc

SEQ ID NO: 4130985 - RNA, 66 nt, Human
gccaaaccaggaacuuuugugagagccauaagaagauacuguuuuuacuaagguugcuaaguuggu

SEQ ID NO: 4130986 - RNA, 86 nt, Human
gccaaaccucagagauucacgucagucccaaagccuccagagaaagaaaauaagccaggccuggggcuggggaucuugagccuggc

SEQ ID NO: 4130987 - RNA, 71 nt, Human
gccaaacucccuagaugacuuuuucuaacucugauuauuuucauuagcaauugugcaucuaguagcuuggc

SEQ ID NO: 4130988 - RNA, 77 nt, Human
gccaaacuuuugacuacugaugguguacgcgugcccuggcagggauggccauugugcugucaguaucaagggauggc

SEQ ID NO: 4130989 - RNA, 67 nt, Human
gccaaauacuggaaucauagaaaacugaguauucuuaucgguaucccugugacucagugauuuuggu

SEQ ID NO: 4130990 - RNA, 58 nt, Human
gccaaauaugguggacaguuugagcaaaaaaaggcugaaauuguacauugaguuuggc

SEQ ID NO: 4130991 - RNA, 71 nt, Human
gccaaaugugaagcagggaaggaaaggaucugaucagaagggacagaacuggcccugaucuucaccauggu

SEQ ID NO: 4130992 - RNA, 77 nt, Human
gccaaauuaaggaaagugccaugauuucuuuggaacuaaucauuaacaagagacauuguuggccuauccucuaaugc

SEQ ID NO: 4130993 - RNA, 63 nt, Human
gccaaauucuagaaggcaaagcaagggaaggaagacuuugcuugcuguaccauucugaauggc

SEQ ID NO: 4130994 - RNA, 89 nt, Human
gccaacuauauucuccuaaacaagacugugaauguugaauaaauccugcauagaggcaggguuaauuuggaauucauucuggagauggc

SEQ ID NO: 4130995 - RNA, 130 nt, Human
gccaacugaauugggaaagagggaggggcacugguggggugcugauggcaucugcuacugaccuaauguugguaagccaucugcugcucuccaguguaacaaccucuucaccucuccccaucucaguuuc

SEQ ID NO: 4130996 - RNA, 76 nt, Human
gccaacugcagaucaugggacugucucagccccauauguaucugaaggcugagaagucccaugauccgcacuuggc

SEQ ID NO: 4130997 - RNA, 92 nt, Human
gccaacuuauaacugauuauguuuguagacuuucuuuguguuaguguuucuuacggguuauacuuauaaagcaagaucuauguuguuauggc

SEQ ID NO: 4130998 - RNA, 58 nt, Human
gccaagacguggcaggacuggacgcacacagaucuguugauccuuucccccauguugc

SEQ ID NO: 4130999 - RNA, 62 nt, Human
gccaagccaagaaucaugagcuaauaaacauggauguuuaagacucuaaauuuugggguggu

SEQ ID NO: 4131000 - RNA, 69 nt, Human
gccaagccaccagcucuguccugacuuuggggcaaaaccccacaaggaggacagcaguuggggcugagu

SEQ ID NO: 4131001 - RNA, 56 nt, Human
gccaagcugccugaggcaaauuugcauguguuagguuuaacucaggcaacuuaggu

SEQ ID NO: 4131002 - RNA, 65 nt, Human
gccaaggauauuuucauucggaugcucacauaugacugaguugccacaugaggaugauccguggc

SEQ ID NO: 4131003 - RNA, 76 nt, Human
gccaaggauggaauggcuuuuccugacugggaguguccucaucacagacuuuugcucaggcaucauucuuccuggc

SEQ ID NO: 4131004 - RNA, 63 nt, Human
gccaaggccaccaccagcgagggggcgcggggagagccauccucccugguggugccuacacgc

SEQ ID NO: 4131005 - RNA, 94 nt, Human
gccaaggccggcuccacaggcagccucagggcacccgaccccggccugaagcccaaguccccuccugaggcccuguuagggucuugccuccggc

SEQ ID NO: 4131006 - RNA, 69 nt, Human
gccaaggcuccagguuuaaggguauguucaagguugucaugaucacauucccuuggcuugaagcagggc

SEQ ID NO: 4131007 - RNA, 59 nt, Human
gcccaggaucugcucagaucauaggcaaccuugaagcacucagcaguuccgcuuugggc

SEQ ID NO: 4131008 - RNA, 101 nt, Human
gcaguggagguuacccagagggacuucugaggcgcgaucauaagaggccuaggagcaucuguucuggccucuugggaugcucccucugggaacccagcugu

SEQ ID NO: 4131009 - RNA, 60 nt, Human
gcaguggcaaaggcucuaggcccagacuaucuggaaucaaauccuggcuuuucuacuugc

SEQ ID NO: 4131010 - RNA, 69 nt, Human
gcaguggcaggagacuggaagauggggagaaagagugaagcccuuccuagccuuucugucugccgcagc

SEQ ID NO: 4131011 - RNA, 61 nt, Human
gcaguggccgcggggcuguggguccugugcacggugaucgcagaaggccccccggcgcugc

SEQ ID NO: 4131012 - RNA, 61 nt, Human
gcagugggaggaagagaugccucuagauauagggugauuagaacaucucucuucugccagc

SEQ ID NO: 4131013 - RNA, 65 nt, Human
gcagugggaggauaaacucccucagccucuuacaguaggagcuggagaauucuuccuuccacugu

SEQ ID NO: 4131014 - RNA, 77 nt, Human
gcaguggguccuggaaggcgacagguuuuaaaugaguguuuucauuccucgccugcgguuuggcgggacagcgcugc

SEQ ID NO: 4131015 - RNA, 82 nt, Human
gcaguggguggaaugggagguaguaugggagguggcauguucuaacuccuagaauagugcuuuaccuuuauucaugaacugu

SEQ ID NO: 4131016 - RNA, 110 nt, Human
gcagugguaaugagaucuucaggcaguggccauguugggaguugagcaauggaugcucucuucagggugacgcaggcugcagcugccuuguaguucauguuaccuacagc

SEQ ID NO: 4131017 - RNA, 77 nt, Human
gcaguggucacuaauuuucaggaccaaggccacacaaaaugucaggccuagggagaaaauucaucugugcccacugc

SEQ ID NO: 4131018 - RNA, 88 nt, Human
gcaguggugauguauggggcgugagagcagcguuuguggaacacuuuuuuggagaguagggcuguguuuuugcugucguuaccacugc

SEQ ID NO: 4131019 - RNA, 101 nt, Human
gcaguguacagguccaauuccauuauuugcucaauaauaguuuuaugcuuaggcucagcguaugaggcugauaauuguggcaugauaagacugcacagugc

SEQ ID NO: 4131020 - RNA, 103 nt, Human
gcagugucaugcucuguccugucuucaggaccuggaauuuuggggucugagugacaccagcauucacuggaccugcagagaaggagaacaaagcugaugcugc

SEQ ID NO: 4131021 - RNA, 58 nt, Human
gcaguguguuuauccggccacacccugaggucagggcugcuugcuggagacagacugc

SEQ ID NO: 4131022 - RNA, 56 nt, Human
gcaguguugacuaugguaugagugccuucuguggccaacuagauuuucaaugcugu

SEQ ID NO: 4131023 - RNA, 64 nt, Human
gcaguuaagugcacagcaguagagcuuggaaaaggucuaggcuuaaguccugaauuuaugcugc

SEQ ID NO: 4131024 - RNA, 61 nt, Human
gcaguuaaugugggccaaguucuucaaguucuucacccagugccuggcacauauuaacuuc

SEQ ID NO: 4131025 - RNA, 67 nt, Human
gcaguuacagagaauaaggagcacuuaaugcagaaccuugcagaguucugaauuuuauucucucugc

SEQ ID NO: 4131026 - RNA, 66 nt, Human
gcaguuacaugacugccggcggugcugcaauuaugauugaugcaugcgucuggagucugaggcugc

SEQ ID NO: 4131027 - RNA, 79 nt, Human
gcaguuacucagaauguucaucuacaaggcauuguuaggccuuuaugauaauuacuguggauagaauuauagugauggu

SEQ ID NO: 4131028 - RNA, 96 nt, Human
gcaguuauucuguucguuucucucuguugucccagaccugcacaucaucuggcacuggauaaucacagaggagcaucccaucagaaugauuccugc

SEQ ID NO: 4131029 - RNA, 77 nt, Human
gcaguuccacuacacagcucugagauauuacuauugguacuauuaauagcaacuuuuauugagggcuuaguguaugc

SEQ ID NO: 4131030 - RNA, 70 nt, Human
gcaguuccauuuucaucucauguauaaauuggaguuucaccauuuagaaaaaauguuugaaaagggcugu

SEQ ID NO: 4131031 - RNA, 64 nt, Human
gcaguucccaaggcuagaaguccaacaucaagauguugaugggacguucucccucugaagcugc

SEQ ID NO: 4131032 - RNA, 70 nt, Human
gcaguuccucugcuaguuuugccugggcuuauucaugcaucagcaaggcagucagcuggcugggaggugc

SEQ ID NO: 4131033 - RNA, 81 nt, Human
gcaguucugagacuucauucaguaaaagcugcagacauauuugaaccagcuggucaacugaaugaacaugagcucaacugu

SEQ ID NO: 4131034 - RNA, 69 nt, Human
gcaguucuggagauggauaauggugauaguugcacaauaaugugaacguaguuaaugccacugaacugu

SEQ ID NO: 4131035 - RNA, 64 nt, Human
gcaguugaagauccgugaggugcccagaagauuaugcagucaucagucccacggagcagcccgc

SEQ ID NO: 4131036 - RNA, 60 nt, Human
gcaguuggagcuggggagcaaacuuucuauacccugaacacugaccccacgcuccagagc

SEQ ID NO: 4131037 - RNA, 79 nt, Human
gcaguuguaugaaauaggauuuuuggaaauacugguaacuaaaccucuccuuugaaaagaucuaugggcauuuagcugu

SEQ ID NO: 4131038 - RNA, 66 nt, Human
gcaguuguccacgggcccuuccaaguuaaacauuacucauggcgacaagagcccgcagggcagugc

SEQ ID NO: 4131039 - RNA, 82 nt, Human
gcaguuguggcaaauuaucauuuucauagauuuuuguauauucaguauauugaaaugaaugacagugauuaugccuuacugu

SEQ ID NO: 4131040 - RNA, 56 nt, Human
gcaguugugguuucguuuccuuuuggaaucuucaaaggcagcgauuuucauauugc

SEQ ID NO: 4131041 - RNA, 88 nt, Human
gcaguuuacaaagcauucucuucuguugcuucauuugauucucccauccaccuuguguguaugaggggagaauguuuucauacuuugc

SEQ ID NO: 4131042 - RNA, 90 nt, Human
gcaguuuaugagacaccuugagggcugagaccauguuugucuugugggcaagacaugcauaggagaagucuuuauaagugagaugagugu

SEQ ID NO: 4131043 - RNA, 67 nt, Human
gcaguuucagaaaaauauggccauuuuauaauggucaaauuuagucucuggaagaugaauaaacugc

SEQ ID NO: 4131044 - RNA, 103 nt, Human
gcaguuuuagagaugaaauugcuaggagauuuuaauaauuauagaugaguuguccuacauuugaaaccuggaaucuaccagcaugauuuaucuaccaauuugc

SEQ ID NO: 4131045 - RNA, 59 nt, Human
gcauaagccucucucuccaucugcucauuuuccacaaaaguagacagacagguuugugc

SEQ ID NO: 4131046 - RNA, 98 nt, Human
gcauaauacaugaaaaauuggagcaggugcucaggguaauaauuuguauaaauagcuauugccuuacacuagcaucuaaauuauaaucauuaacuagc

SEQ ID NO: 4131047 - RNA, 73 nt, Human
gcauaauauuuucagagaugcucaacucauccugagccuaaagggauauggauauucucugaauauuuuaugu

SEQ ID NO: 4131048 - RNA, 82 nt, Human
gcauaaucauaagcuucaaagauucacaguuucauugugcucaaugcucuugugaaaugacagucuuaagcucugauucugu

SEQ ID NO: 4131049 - RNA, 58 nt, Human
gcauaauggauaagagcacagauguuggagcaaaccugcauuugaaucuccauucugc

SEQ ID NO: 4131050 - RNA, 74 nt, Human
gcauaauuauugcaaguggcauaaaauuuagaccagugaguaacugagcaaauguucuacuuugauaauuaugu

SEQ ID NO: 4131051 - RNA, 124 nt, Human
gcauacaguauauacuguguguagaguauauacugcauacaguauauacuguguguagaguauauacugcauacaguauauacuguguguagaguauauacugcauacaguauauacugugugu

SEQ ID NO: 4131052 - RNA, 61 nt, Human
gcauaccacaauuauuuugcuaagcucagccucugaagugcaaaaaaguguugugacaugc

SEQ ID NO: 4131053 - RNA, 107 nt, Human
gcauaccuugucccuacaaaaguaugcagcacacaauagguacccagcaaauauuugcugaacuuauugagugcuugcuaagugacugaaagggagagagugugugc

SEQ ID NO: 4131054 - RNA, 63 nt, Human
gcauacugagauguuaauagggugugcaauuuggugucaugcuuuauucgacaucugguaggc

SEQ ID NO: 4131055 - RNA, 59 nt, Human
gcauagaggugccaggcaaguuucaaugcccguuggagcccugcccuaggcagcucugc

SEQ ID NO: 4131056 - RNA, 81 nt, Human
gcauagaguaggcuucaggaaauauacauuuaaugaauaaauaagucaauagauaagugaccuuugauuccuacuaugugc

SEQ ID NO: 4131057 - RNA, 71 nt, Human
gcauaggagugcaaauaguccagagaaaagaucagacuguuuccucugguuauacuugcacccagccaugc

SEQ ID NO: 4131058 - RNA, 68 nt, Human
gcauaggaugcuagauuuaugaguuuggaaagaucugagauggagguauaagucuggcauauguaugc

SEQ ID NO: 4131059 - RNA, 61 nt, Human
gcauaggauguuucucugugguuccuagagauggaguucacugaagagaagcauuuucugc

SEQ ID NO: 4131060 - RNA, 79 nt, Human
gcauaguguuggagagccaugcucaaggccacacgcuguucuaaggcccaaagccagugugcucucccaguguuuuugc

SEQ ID NO: 4131061 - RNA, 88 nt, Human
gcauauacacagagagucccuuccugauaaugagauuuucccugcuuagacuggaggaaaauauucagggagguuucuguuauauagc

SEQ ID NO: 4131062 - RNA, 85 nt, Human
gcauauacuuugcgaugaauuguuugaaaaguggagauuuauuaaaugaggaaagauuccuuuugaagcuuuuugugcaguaugc

SEQ ID NO: 4131063 - RNA, 73 nt, Human
gcauaucaccuagcagagcacuacugcauuaauaauucaucacuuaauguguacaggccuugcuagacucugc

SEQ ID NO: 4131064 - RNA, 109 nt, Human
gcauaugagucuccuggacauuuuguuaaaaaugcagauuccuauucuacagcucuaggacaggccugagauuuugcauuuuucacaaguuccuaggugauggugaugc

SEQ ID NO: 4131065 - RNA, 61 nt, Human
gcauauggccuuaucacuaugcuguuggacaacagauacgaugaauagagagcacauaugc

SEQ ID NO: 4131066 - RNA, 61 nt, Human
gcauaugggguggaauacuuacuugacucagagccccugagagagcaggccacacaugugu

SEQ ID NO: 4131067 - RNA, 65 nt, Human
gcauauguuacauuguugccucccuuucugcccuuggccugcaggaggcccagugaauauauugc

SEQ ID NO: 4131068 - RNA, 61 nt, Human
gcauauuaguaaucuuucaacaagcauuagcuguuauugcuguugaugaugaugaugaugc

SEQ ID NO: 4131069 - RNA, 68 nt, Human
gcauauuuaagccauuagacaugcaggaauguuaacauuauuaugcguuauugugucuggcuaugugu

SEQ ID NO: 4131070 - RNA, 108 nt, Human
gcaucaacaucaccuucaagcuuguuacaaaugcggaguuugugguaucauuccaaacuacugacccaaagucugcauuuuaacaugauucgaaggugacguauaugc

SEQ ID NO: 4131071 - RNA, 69 nt, Human
gcaccaugacauuuuaauuuucacuuagugagaacuagugauuuugcuuugaagugacagcaugugugu

SEQ ID NO: 4131072 - RNA, 68 nt, Human
gcaccaugcagguguaaauuuucaagagcucagaaggaacucuuugaucccuuacacacucaugaugc

SEQ ID NO: 4131073 - RNA, 95 nt, Human
gcaccaugucuggggcaguucaggaaaucaagaagcagaugagugaauauuauuuuucugucugaucaugauuguuucuacugcuagcuuguugc

SEQ ID NO: 4131074 - RNA, 62 nt, Human
gcacccagagggcagggucuccaugguagaccaaaguccccuuaaacaugcucucuuggggc

SEQ ID NO: 4131075 - RNA, 55 nt, Human
gcacccagaggucagcagugcuuucauaaaaaggagggcugcucguagugggugu

SEQ ID NO: 4131076 - RNA, 66 nt, Human
gcacccaguaagcaugaggcccugggcgcagcacgccuucaggagcugguagucucauugggaugu

SEQ ID NO: 4131077 - RNA, 60 nt, Human
gcacccaugaguagggaacuguagacuuuucguugucuucuuuauaaaucaaugggaugu

SEQ ID NO: 4131078 - RNA, 118 nt, Human
gcacccccucuacuguuacagcagugguuuucaacuagaggugauuuugccccccaggugaccuuuggcaaggccugcagacauuuuugguugucacaacugauggggagggggaugu

SEQ ID NO: 4131079 - RNA, 85 nt, Human
gcaccccucaagaggguugggaaggcaagaaguagaagcagcugcuuccuuuuuuguccuucccagauacccaugaugagggggc

SEQ ID NO: 4131080 - RNA, 58 nt, Human
gcacccugcccugucacuggcuagggcugggaggcucuguagaaacagggcagaaggc

SEQ ID NO: 4131081 - RNA, 61 nt, Human
gcacccugcucuauccuugcuauaugggauggguaagaauguaacaggauaaguaggaugc

SEQ ID NO: 4131082 - RNA, 71 nt, Human
gcauccccuucagcuguucucuugggcaugcuggcaacggcagugggacaugggcacugggcgugggaugc

SEQ ID NO: 4131083 - RNA, 60 nt, Human
gcaucccgaggagcugggauuacaggcaccuuacaggccucccagagugcuugggacugc

SEQ ID NO: 4131084 - RNA, 108 nt, Human
gcauccgugguccagcuuagcugaggggaggagaaggaaguugagccagcaucccacagaggacccuggcagccuucuguccugagagcuaagcugggccauggaggc

SEQ ID NO: 4131085 - RNA, 78 nt, Human
gcauccucugagccuguguuucucuggcagguggaucaauuacuuccacaugucuuggaaggcaggcuuuccacaugu

SEQ ID NO: 4131086 - RNA, 67 nt, Human
gcauccugagugaaaugaaugauuacauggcuuuaauuugaaauacauucagcagugcucaugaugc

SEQ ID NO: 4131087 - RNA, 69 nt, Human
gcauccugucugggcuugaguauuuacuauguaguaggugagugaaaaaagccugagauacuuggaagu

SEQ ID NO: 4131088 - RNA, 129 nt, Human
gcauccuguggcucggccggguccacgggggucagcgccggcuugaggcaggcggcaggcagcucgccuucgcccagcuccaggcuggccugcuugcugcugaaggagucccgcaggcugagcagcugc

SEQ ID NO: 4131089 - RNA, 82 nt, Human
gcaucgaauacaagcauacucauuccagacucucccggaucgugcguggcagguggggauggggugaggcuguggcuggugc

SEQ ID NO: 4131090 - RNA, 103 nt, Human
gcaucgucacagcaagaucccugaauuauaaacuagugacuucagaguuaauuuuccuucuuucggucuaauuuguaaccagggagcauuguauggcacaugc

SEQ ID NO: 4131091 - RNA, 88 nt, Human
gcaucuagagaggcacacacgcagcggcgcucugcgaaacgucuguguuucacaugguacugccuguuugccugucggcucucaaugc

SEQ ID NO: 4131092 - RNA, 55 nt, Human
gcaucuccagcuggcugugauaaaucugcauuuuguaccagcaaguagggagagu

SEQ ID NO: 4131093 - RNA, 57 nt, Human
gcaucucuacaacgaagacagucuuugaaggcuguuuucaaagagagagaaugaugc

SEQ ID NO: 4131094 - RNA, 58 nt, Human
gcaucucugauggugguggcuggaggugacaguggcccaguggccacugcagagaugc

SEQ ID NO: 4131095 - RNA, 78 nt, Human
gcaucugaauauagaaucaucugugcacuaguaaauuaagcuguauacuagucauuuaggugauauuauaacagaugu

SEQ ID NO: 4131096 - RNA, 59 nt, Human
gcaucugccuuugucauuggcuacaaaaagaaugggccaccuggacucugggcaggugc

SEQ ID NO: 4131097 - RNA, 126 nt, Human
gcaucugguggcugcuuaaguaguaacccugcugcaggcuucaggaggagcaaaucacaacaucuguguuucuccagcaaaacagcagggcuauuaaaauagcucuuaggcacaaucuaucacugc

SEQ ID NO: 4131098 - RNA, 83 nt, Human
gcaucuuaaccugacugcucuuuagaauuagggagcaucuuuaaaaaauuccauucugauucauuaggucuagggaagggugc

SEQ ID NO: 4131099 - RNA, 90 nt, Human
gcaucuucaugugacuuauggucccagugucgccucuagggucaccagcaucuagaggugacacugagaccauaacucaccuguaggugc

SEQ ID NO: 4131100 - RNA, 68 nt, Human
gcaucuuggcccccuguuuguggccugaccacccugagaggucccacaccuugaggggucuugggugc

SEQ ID NO: 4131101 - RNA, 66 nt, Human
gcaucuuuggcuugcacuauuacacuguuagucuucuuuguaagugugucuguguaaccgaaaugu

SEQ ID NO: 4131102 - RNA, 119 nt, Human
gcaugaaaaucuuuuaucuacuuaaugaaaucgaauucuggugcacuuuguuccugguugucagcacuaacauuaacaccgugaguuugguuuuggugcaguuaaggauuuuaucaugc

SEQ ID NO: 4131103 - RNA, 65 nt, Human
gcaugaaucaugacucaaaauuauuguuuugcuuucugauugggccagugugagucacaucaugc

SEQ ID NO: 4131104 - RNA, 82 nt, Human
gcaugaaugaauacaaaaaguggugaguguauacucuaaagugguuauauacuaagcucauuacauuuuggcuuaugacugc

SEQ ID NO: 4131105 - RNA, 69 nt, Human
gcaugacagcauucaagacauagaguuagcaacugaagcuuaaaccucugugugugugugugugugugu

SEQ ID NO: 4131106 - RNA, 68 nt, Human
gcaugacagguguuuguaguggcaagaugauaguaacuguagcuaccauuauugagcaccuacugugu

SEQ ID NO: 4131107 - RNA, 65 nt, Human
gcaugaccuggggucaccaaaacugccugcuacccagcagcagcagaagggagacccagguuggc

SEQ ID NO: 4131108 - RNA, 128 nt, Human
gcaugagaaggaccuggagugcuugcugaaauucagauuccuaggcaucacccagaccaacagaaucaaucauccuggcagggcccaggaguuugcauuuuaacaaguuccccaggugauuuuuaugc

SEQ ID NO: 4131109 - RNA, 102 nt, Human
gcaugagaggucuggggcugcagacuggggccugagaguucucugcuucucauagcugcugucacacauggccccagcuuucacuucccaggcuccucaugc

SEQ ID NO: 4131110 - RNA, 71 nt, Human
gcaugagagugccuuguaaaccugcccugcugcagcaaugagggcauggcuucugccaggcaccuguaagc

SEQ ID NO: 4131111 - RNA, 55 nt, Human
gcaugagccauuucuccaaggaucccuguucuuuccaauuugaaaugguauaugu

SEQ ID NO: 4131112 - RNA, 84 nt, Human
gcaugaggccagggauauaccauaaugucugacacaguaagauaucaguaucugcuuguuaaauguugauuccugcuuuauugc

SEQ ID NO: 4131113 - RNA, 58 nt, Human
gcaugauauuccaaggugugaaguuuugguuugagaacuuuacuauuuugaauaaugc

SEQ ID NO: 4131114 - RNA, 59 nt, Human
gcaugaugaaggaggaggagucagacagcccuagacuuuaauuuccacuucuaucaugc

SEQ ID NO: 4131115 - RNA, 95 nt, Human
gcaugaugaggacacuauacugcucuguuuucguauguuuucaauguuccacgacaaacauguuuagaaagcagcugaagcaucuucuuuuaugc

SEQ ID NO: 4131116 - RNA, 100 nt, Human
gcaugauggugguugccuguaaucucagcuacucgggaggcugaagcaggagaauugcuugaaccugggagguggagguugcagugagccaagaucaugc

SEQ ID NO: 4131117 - RNA, 71 nt, Human
gcaugauguuugggcugguuugccaugcccccaggucucagagggguaugcaggugggccuagaugcaugu

SEQ ID NO: 4131118 - RNA, 64 nt, Human
gcaugcacaggcugugggcugguuucagcucuucuccugcgaacuagcuaggcagccugucagc

SEQ ID NO: 4131119 - RNA, 72 nt, Human
gcaugccaaaaaauaaugugugcugcagucuuaaaggaauuuagaggcuuguagcaucauugaguugacagc

SEQ ID NO: 4131120 - RNA, 57 nt, Human
gcaugcggaucucaucacugugauuacaccguguuagccacagugauuguucuaugc

SEQ ID NO: 4131121 - RNA, 116 nt, Human
gcaugcggccaauccuagaggcugguggagcuguggccacgaccacaccucuccccccaucuauggugagggucagccccaaauaguuuccuccgucuuaagaauaggcaacaagc

SEQ ID NO: 4131122 - RNA, 59 nt, Human
gcaugcucaguagccuaguuguuuacuaccuguaauaauuggcuaacccugggaagggc

SEQ ID NO: 4131123 - RNA, 62 nt, Human
gcaugcuccacgcuugugagcgaugucugucugccugccaaaagaagcugcuggaugcaugc

SEQ ID NO: 4131124 - RNA, 58 nt, Human
gcaugcuccagugugaugcuucauugagugcacagucaaaagagcccuuggagcaggc

SEQ ID NO: 4131125 - RNA, 68 nt, Human
gcaugcugauaggaguuaauggugaugcagaauauuuguuuacauuuaguacaacuuuuacagugugu

SEQ ID NO: 4131126 - RNA, 70 nt, Human
gcaugcugcaucaggccaauuaagaaugaaguauacuuacaaauuuugcauugccucugauaagguuugc

SEQ ID NO: 4131127 - RNA, 59 nt, Human
gcaugcuggaauauuuuauuugguggcuggaugugcuaugaugaaauuuucuaucaugu

SEQ ID NO: 4131128 - RNA, 90 nt, Human
gcaugcuguuucuuuccugccagaagguuccugcugcagcucuccugcuaguuuagcuuagccuucugguuugagggaugagucacaugu

SEQ ID NO: 4131129 - RNA, 124 nt, Human
gcaugcuuccaaaacgcaucaauggcagcucuuuuguguauauacuuucuuccuggguagauagaauuuaacugccucaagguaugugguagaauaguagccauucaguuuuugguuaauaugc

SEQ ID NO: 4131130 - RNA, 84 nt, Human
gcauggaaggcaauguaaauuacagcuuaaugcacguacaguguagucagacaggcugagcuugcaucccagccuuacuacugu

SEQ ID NO: 4131131 - RNA, 62 nt, Human
gcauggaucugaggcaagacacugucagguuacaccugcaggaagcuggucagauccugugu

SEQ ID NO: 4131132 - RNA, 88 nt, Human
gcauggaugagcacauggcaggggcagcagguaaagaaagaccaccuggaacccugugccugcugccacugcuguuacugauccaagu

SEQ ID NO: 4131133 - RNA, 75 nt, Human
gccaagggcgggugggugggcgaagaugggggucacagccucucucccucccaucccuccuccaccagcuagggc

SEQ ID NO: 4131134 - RNA, 57 nt, Human
gccaagggggcagugcaugggugaccucaugggaacauccaguccuaucuguuuggc

SEQ ID NO: 4131135 - RNA, 61 nt, Human
gccaaggugcuccaggucgcucagagagucuucaggauuccugagucgccgagucuauggc

SEQ ID NO: 4131136 - RNA, 66 nt, Human
gccaagucacagcugcuuucuugcaagaggcuucauggugucugagaaaucaguggugaauauggu

SEQ ID NO: 4131137 - RNA, 60 nt, Human
gccaaucaggaggcuguacaucagggcgggggcgggaggagcugcagcuuugugauuggc

SEQ ID NO: 4131138 - RNA, 76 nt, Human
gccaaugaaggguuuggagcagcacaguggucaggcagaccaagcugacucccagcuguuuccccuucacaguggc

SEQ ID NO: 4131139 - RNA, 67 nt, Human
gccaauguguuuucucgcuauuuaucaaaucuuuuauacucugaugacuaauggaaaauacaauggc

SEQ ID NO: 4131140 - RNA, 98 nt, Human
gccaauuccaaauaagagacucuaaguggucaggguuguuacugugugaggcagccuggcaguaauaccccuggcucagguuggggccucaugguggc

SEQ ID NO: 4131141 - RNA, 72 nt, Human
gccaauuucuagauauugccuucagaugaggaaaugagaaaauuuucaauaaggcaacauuaaguuaauggc

SEQ ID NO: 4131142 - RNA, 106 nt, Human
gccacaaaaauuagagacuacgguuugacacggugcgucuucagaaacagggacauuuucugccauccugagaugcuacuugucacauaaagcuucaauuuguagc

SEQ ID NO: 4131143 - RNA, 81 nt, Human
gccacaauaagguauuauugucuauguacuagaacagauaagguaauaauuuaaaauauggcgaugauacccaaugcuggc

SEQ ID NO: 4131144 - RNA, 71 nt, Human
gccacacaaaaguaggaggcaggcggauuuggcccacuggccauaguugauugauuccuccugcuuuaggc

SEQ ID NO: 4131145 - RNA, 67 nt, Human
gccacacuggcucugugcuucuaguaucugcauuuaaugcuuagauucuaccagagcuaguuugggc

SEQ ID NO: 4131146 - RNA, 69 nt, Human
gccacagagcaggcacucagcacacagagcagcagacaugcuauguguuugacacccugcaagacuggc

SEQ ID NO: 4131147 - RNA, 71 nt, Human
gccacagcagucuuucacuaaauaaaggagaaaagugucuuucccauguaagugacagaggcugugguggc

SEQ ID NO: 4131148 - RNA, 74 nt, Human
gccacagccaugugggcagugaugggugaguguguccugcaacuggacguuuaaccagcacgcuuggccguggc

SEQ ID NO: 4131149 - RNA, 82 nt, Human
gccacagcuuugggauucuguaaagauaaaagaugcaccagagggauuccuaaaugcuuugucuucauccuucgagcugggc

SEQ ID NO: 4131150 - RNA, 71 nt, Human
gccacagggcagaugcgcagaguaacuauuauucauuuugcaaccugcacucugucuuuaauaacuguggu

SEQ ID NO: 4131151 - RNA, 56 nt, Human
gccacagguaagaguguaaagcaaaguuugacuuagcuugccuuccuaucuuuggc

SEQ ID NO: 4131152 - RNA, 55 nt, Human
gccacagguaggaaccuaccuccugaaaggcuggugcuaugcuuuaccugugugc

SEQ ID NO: 4131153 - RNA, 81 nt, Human
gccacaugacuugggggccugagaagcagagccugcaggagccaggccugcugucuugaggccaagaggggaagggugugc

SEQ ID NO: 4131154 - RNA, 105 nt, Human
gccacaugccaggcagucuuacaugcuagggccucaggccuugcucugugagaguuuucucauaguuuaaugccugggcuagcaaauggauugauuggaaguggc

SEQ ID NO: 4131155 - RNA, 100 nt, Human
ggcugggggccaggcgggcagaacagggccagggccaccuccuaauguccugauguucugggcagugguggcccuucccuuccccuggggucccccugcc

SEQ ID NO: 4131156 - RNA, 62 nt, Human
ggcugggggugagcagcagcgacggugccaucggcugucgcaucggcguccucagccccgcc

SEQ ID NO: 4131157 - RNA, 74 nt, Human
ggcugggguugcagucauauugaggcugcacagagccuggaggcuccagcacccaauguggcuaagcucuggcu

SEQ ID NO: 4131158 - RNA, 130 nt, Human
ggcuggguaaaggagaaccugaugggaaagaagcaaugauuuagcugagccaucauugaugacaggagcuuuuaaugaugugugcugaucaagcuucugggacauuuaccucuuucuugcuggugauuuc

SEQ ID NO: 4131159 - RNA, 85 nt, Human
ggcugguaaaggccaacuuugacagguauagggccaggcagcccugggccuggaguuuguccagagugguggaaagcagccaguc

SEQ ID NO: 4131160 - RNA, 69 nt, Human
ggcugguaugaggaguauggcaguaaacaugacagauucugucccuacuguucaugccuucauaaagcu

SEQ ID NO: 4131161 - RNA, 122 nt, Human
ggcuggucugauuucuagguccuucucccagggcauguggacuuguauguuugacugaaguuccauaagccaaugcuagcccacaugcaagggugacagccaccacuuagccaucacuagcc

SEQ ID NO: 4131162 - RNA, 62 nt, Human
ggcuggugagguggcuggaucucagccuggcgggccagcugaggaaccagucccugcuagcc

SEQ ID NO: 4131163 - RNA, 57 nt, Human
ggcuggugcucaggaaguguuuuugaggugaucuugagaguucuugcugagcaagcc

SEQ ID NO: 4131164 - RNA, 106 nt, Human
ggcugguguguggccccugggugugcaugggggcagcuccaggaauuggggacccuuacaguccucugcaacaccccuucacaccccgggagcccacaccucugcc

SEQ ID NO: 4131165 - RNA, 73 nt, Human
ggcugguguuguccgggugagaguuaguuagaagggcaguaucaguucccacuccuggccuggacugcucccc

SEQ ID NO: 4131166 - RNA, 68 nt, Human
ggcugguuuagaccaaucauaauuuaucccuggcccugggaugaaucacgauugguuuaaacccaucc

SEQ ID NO: 4131167 - RNA, 61 nt, Human
ggcuguagagaggcuuugucagcuggacccaguaggacucagcugcuuccuccugccugcc

SEQ ID NO: 4131168 - RNA, 57 nt, Human
ggcuguagucagugacaugguaaaaagcacgaggcugcugugguaaugacuauaucu

SEQ ID NO: 4131169 - RNA, 94 nt, Human
ggcugucacgcugcccguuguccugugauuccagcucuucucccagggugacagaggacugaaacuuacaggaaaggagcucugaugacagacc

SEQ ID NO: 4131170 - RNA, 70 nt, Human
ggcugucucucuuuuguucuauguuguaucuucagcucccagcaacaugggacagagaaagaggccugcc

SEQ ID NO: 4131171 - RNA, 73 nt, Human
ggcugucugcccggcuucaggagauacaguccagccuccuuggugacugugugaggcugggugagucacugcc

SEQ ID NO: 4131172 - RNA, 86 nt, Human
ggcugucugcugccuggccaggccucuuggugcccacugugcuccugauuaguuggcgccggcaauggcaggagcagcagacggcc

SEQ ID NO: 4131173 - RNA, 96 nt, Human
ggcugucuuccuguggcugcuccuggguggucaggcccuguguucgaggcggcuuugacugugacugucccgggugcagccaucacuaacccagcc

SEQ ID NO: 4131174 - RNA, 59 nt, Human
ggcugugaaguacguugaagguggaucuugucacaugccccuucaguguucaccuggcc

SEQ ID NO: 4131175 - RNA, 67 nt, Human
ggcugugacccccacaggggugucccuaggcacacacucugcccugucacccauguggguuccagcc

SEQ ID NO: 4131176 - RNA, 75 nt, Human
ggcugugaggaggcagagcguucaguugguaaaugagggaggagccagcugacgaugccuggucucuccauuucc

SEQ ID NO: 4131177 - RNA, 57 nt, Human
ggcugugauugguggaugugaauuccuucugcugaaucaugccaccacucugcagcc

SEQ ID NO: 4131178 - RNA, 63 nt, Human
ggcugugcagggcagagucucaacacaggaauuggaacauaacaaaucugccgacugccagcu

SEQ ID NO: 4131179 - RNA, 70 nt, Human
ggcugugcuaaggacugggaggcaggggaaugagcccaccugcugcuccuggccuuuggaggcugcagcc

SEQ ID NO: 4131180 - RNA, 67 nt, Human
ggcuguggcaggcgugcauugaggacugugagggugacaacagagacugggaugccugccuuuggcu

SEQ ID NO: 4131181 - RNA, 60 nt, Human
ggcuguggccaaacaccaguuuaggauuuuuccuuccuuucuaguuuugcugccacuucc

SEQ ID NO: 4131182 - RNA, 97 nt, Human
ggcuguguuguucccauguggggcugucaggcaacugguaagcacgccuuguguccccagccagaugauaagcucuaugugggcugaacucacggcu

SEQ ID NO: 4131183 - RNA, 97 nt, Human
ggcuguucaaugguaucagaaaauccaaagagguuaagaacgagaacucaaaauauguugcuggauuuugauccuuugcaauugauggaugauagcc

SEQ ID NO: 4131184 - RNA, 100 nt, Human
ggcuguucugaucuuuaaaagauuuugguuuuuaauacaaaguacaugaugauuugcauguacugaauaagauugugauccaaugucuuugaugguggcc

SEQ ID NO: 4131185 - RNA, 85 nt, Human
ggcuguugacagaguguugaccauaagcccauuaaacagaagguggaaccgcaauuguggucaaaggcucccucccaagauggcc

SEQ ID NO: 4131186 - RNA, 87 nt, Human
ggcuguuuucaucuccuuuauuggcauuuuuccucagcuggaguagcccuuuacuccacauaaagucagcagaggggaagaacagcu

SEQ ID NO: 4131187 - RNA, 72 nt, Human
ggcuuaagaugguagcuuugagcagguuugauauaaaauuuuagagaaaagcauaggcaucaucuuaaggcc

SEQ ID NO: 4131188 - RNA, 63 nt, Human
ggcuuacaccugugaucccagcacuuugagaggccgagguggguguaucacaggucaggaguu

SEQ ID NO: 4131189 - RNA, 62 nt, Human
ggcuuacugacaggcagugauuuccucugguaaacaccuggaagcaauugccuucagcugcu

SEQ ID NO: 4131190 - RNA, 58 nt, Human
ggcuuagaaggcaaaugacuuguccacgaucgcgaggcaagucagacccuucagagcc

SEQ ID NO: 4131191 - RNA, 66 nt, Human
ggcuuagcaguguuugcacagcuacagaaguagggccugugggcuggcacgaagcccugcugggcc

SEQ ID NO: 4131192 - RNA, 63 nt, Human
ggcuuaggugucucucugcaccagucucagacuccaaguugcugcagguaaggaaccuaaguc

SEQ ID NO: 4131193 - RNA, 73 nt, Human
ggcuuagugguuuaggggaaagaacugugaauaggaugaucuugguacagucuagcuucuccacuaaucagcu

SEQ ID NO: 4131194 - RNA, 59 nt, Human
ggcuuauguguucaacacuaaggaacaugccauguuucuucagugacaaaggcaaaacc

SEQ ID NO: 4131195 - RNA, 76 nt, Human
ggcuuauuagaggacaagaggccuggcugauaaauuccugaccagagggauggaggcuaagccuuucccugcagcc

SEQ ID NO: 4131196 - RNA, 86 nt, Human
ggcuucacccaggcggcuggcugaggucuagacaccccaggggcagcuguggccccugguauggacuucgguugccuggggaggcc

SEQ ID NO: 4131197 - RNA, 68 nt, Human
ggcuucacuguaauguuuuagcaggucuguggagagcagauauaucaccuucuccauuacaguaagcu

SEQ ID NO: 4131198 - RNA, 61 nt, Human
ggcuucagaagacuggacagguggcuugguaauuaaaaccuuucccuucuaacugcaggcc

SEQ ID NO: 4131199 - RNA, 55 nt, Human
ggcuucagcugguuauuuccuucucucguguggaaggccagagcagacuggaguu

SEQ ID NO: 4131200 - RNA, 86 nt, Human
ggcuucaggagcguguccuggugcuccagguggcugcggaagaucuccugggccagcugggccaccaggugcuugcuguagagguc

SEQ ID NO: 4131201 - RNA, 65 nt, Human
ggcuucaggcccagcacagcgcgugucauucugggaaaacaucuugucuuuuugggccugaagcc

SEQ ID NO: 4131202 - RNA, 70 nt, Human
ggcuuccagcugggccuuggaggacaggguccaccccuaccuccuggucuccuuccucagcuuggaagcc

SEQ ID NO: 4131203 - RNA, 68 nt, Human
ggcuuccauguacugcaguaauuuugaauuggauauguuauguccaaauugacaguagugauuaagcc

SEQ ID NO: 4131204 - RNA, 85 nt, Human
ggcuuccucccugcugcucacuaccauucucgccagcagaauggugacaaaccaguagcaauaaagaggugggaggacuugagcc

SEQ ID NO: 4131205 - RNA, 58 nt, Human
ggcuuccugaaucagaaacucugggggugagacccagcaaucuguguuucagcaagcc

SEQ ID NO: 4131206 - RNA, 57 nt, Human
ggcuuccuggagaaggucugaguuuuauuaaaggaugagacagucaccaggcaggcc

SEQ ID NO: 4131207 - RNA, 64 nt, Human
ggcuuccuguuguauuugugagccaugcugugcugagggcucaggacugcagcguagagaggcc

SEQ ID NO: 4131208 - RNA, 86 nt, Human
ggcuucgucgggcucgcucuccuagcggagggggcggcggcggcccccaggucccgggcaggucgagcgagccacggcccccggcc

SEQ ID NO: 4131209 - RNA, 55 nt, Human
ggcuucuaaggaguauccuuugcuuggggaggaaggucacagaacuuagcaagcc

SEQ ID NO: 4131210 - RNA, 114 nt, Human
ggcuucuaauguagucucaggaucaccccagcuggcccguggcaguacugaggcuuucagauugcuuucagugucugugggcaggauggggaauccuagucuucuucagagguc

SEQ ID NO: 4131211 - RNA, 107 nt, Human
ggcuucuaccacgagaaaggcaaaaugugaaaaugcuggcaagagaguagcucgggagcuacagcugccguguuuuucauguuaaaaagccacuuaauguggagguc

SEQ ID NO: 4131212 - RNA, 62 nt, Human
gggugacucaggaggaaagacuccaccuaaaauagucgugguaugcagucucugagucacuu

SEQ ID NO: 4131213 - RNA, 62 nt, Human
gggugagcuggcugccuucuccuuaggccauuguggccccuaaagcccagccagcuucaucc

SEQ ID NO: 4131214 - RNA, 56 nt, Human
gggugaggagcugccagucauguccagauggaaugacucccauccucuccucaucu

SEQ ID NO: 4131215 - RNA, 66 nt, Human
gggugaggaggacggugcgacacuuggggaaacaaacugcacagguccagccugcccucucucccc

SEQ ID NO: 4131216 - RNA, 130 nt, Human
gggugaggcagaggcagccccagagggagcaugagggcuggaagagugggcagcagagucucuggucuggaagcugucacucuccggccuucccagggccuggcucugagcacucacaaccaugaagacc

SEQ ID NO: 4131217 - RNA, 78 nt, Human
gggugagguggaccagcaugugaucugucaggcagggcugcugcacuguggucaccaggcuggggccaacagacacuc

SEQ ID NO: 4131218 - RNA, 94 nt, Human
gggugaguccaugacauaaaauucaauaauuuguggcgaaauaauuaaguugccuugacaagccuaauguugauuuuacugucuucucuuuccc

SEQ ID NO: 4131219 - RNA, 75 nt, Human
gggugaugcugacaggaguagggagcaagcaggaaggaccacgugccuucucuggcuucuaccuugcaguuuccc

SEQ ID NO: 4131220 - RNA, 104 nt, Human
gggugcaugugugcguacaugcuuguggccgcacaacucccagacucacccuggggucuccgggugcaugugugugccaugugccaggaugucugcaugugucc

SEQ ID NO: 4131221 - RNA, 69 nt, Human
gggugcggggauggauuccgggucccugugucuuggaacuaggagcucauucauccucuuuucugcccc

SEQ ID NO: 4131222 - RNA, 79 nt, Human
gggugcguggccucgcuggggugucucgucugccauuguuccucaguuccaccgagugacaccucguuagucuccaccc

SEQ ID NO: 4131223 - RNA, 61 nt, Human
gggugcucuguguccacagcuggaaaaggaucaaagacuuuugcgguagcacaggggaccu

SEQ ID NO: 4131224 - RNA, 71 nt, Human
ggguggaaucuuaccuuucagaguguuuugguucuaaagcagucucagacuuaagcacaguuaauuccccu

SEQ ID NO: 4131225 - RNA, 60 nt, Human
ggguggauggggagauguggagagaacagauguggagcuccccaguguccucaugcaucu

SEQ ID NO: 4131226 - RNA, 65 nt, Human
ggguggauggugagguagcucucagcccccaccacugguugcauuugcuguucugaccaucaccc

SEQ ID NO: 4131227 - RNA, 65 nt, Human
ggguggcaaucguugacuauagggaauagagggagaaaauccuuaauguuuaauguuguccaccc

SEQ ID NO: 4131228 - RNA, 70 nt, Human
ggguggcagauggauugggcugugcaggggcugaaggacucacccgcaggcccagagucgcuggccuccc

SEQ ID NO: 4131229 - RNA, 59 nt, Human
ggcuuuuggguccaaaucucagguucuaauaaaugcuccuugaggucaaggacuaggcc

SEQ ID NO: 4131230 - RNA, 65 nt, Human
ggcuuuuuauugaucugcacugauguccucguuugcugaggugcuuacagaauccaugggaaguc

SEQ ID NO: 4131231 - RNA, 55 nt, Human
ggcuuuuuggcuuugguuccuggagcagcuucagagccauaaaggugaaagaguc

SEQ ID NO: 4131232 - RNA, 57 nt, Human
ggcuuuuuugucagggccacagggacaucugguccaggcuggcucuucaaaauuguc

SEQ ID NO: 4131233 - RNA, 68 nt, Human
gggaaaaagcagguacucagcuugggggaugucugaauccuaccucaguguucacuuaguuuuucucc

SEQ ID NO: 4131234 - RNA, 109 nt, Human
gggaaaaaguugcagccgagcuucuuguuucuucaucugacuucaaagcaugacucacacaugcucuccccagaauggagugcagcgagaggcaggcagcagagacccc

SEQ ID NO: 4131235 - RNA, 59 nt, Human
gggaaaaaucauugccugucaggagcuuggagauuuaguccccaggcagagauuuaccc

SEQ ID NO: 4131236 - RNA, 69 nt, Human
gggaaaacuacugauuugugaauugaucccuaauuagucuucuuaggucaguaguuucauuuuuuuccc

SEQ ID NO: 4131237 - RNA, 84 nt, Human
gggaaaauggaacucucuuuagagagggacaaaguaucagauuugauuaauuguucuuacuuaagagugaauucauuuacaccc

SEQ ID NO: 4131238 - RNA, 58 nt, Human
gggaaacaggaaaacagcacaauagcaaaauccuuuuggcuauaagauuuccuguccc

SEQ ID NO: 4131239 - RNA, 75 nt, Human
gggaaacuaagcagaacacacgucagaguuuccugccuaggaggugaggaagcugggguguucuucauaauuccu

SEQ ID NO: 4131240 - RNA, 101 nt, Human
gggaaacuugucaagcaugcaaauuucugggcuccauccccagaagcucugauacagcaagucuggagaagcccagggagcugcguguuuaacaagcuccc

SEQ ID NO: 4131241 - RNA, 65 nt, Human
gggaaagaaauguauguuucuuuauauuuaaugcaacugcacuaagaaauguaucauucuuuucc

SEQ ID NO: 4131242 - RNA, 60 nt, Human
gggaaagaagaucuagauacuguuuuguuguuuuaaugaugaucuagaaacuucucuccu

SEQ ID NO: 4131243 - RNA, 78 nt, Human
gggaaagacauggcucuagugaugcacugggaacuuucuccgucucucagcucagcuuccacagagcagcucuuuucu

SEQ ID NO: 4131244 - RNA, 68 nt, Human
gggaaagacuuucuugcagaaauauucccuguggaacuuuggggaaagacauucugagaaguaaucuc

SEQ ID NO: 4131245 - RNA, 106 nt, Human
gggaaagagcauccuuguaauaaaauuacuucuugauguggaauuucuucccauuauugaauuucaacguuagauguaauagugcaaguagagagcuucuuguccc

SEQ ID NO: 4131246 - RNA, 60 nt, Human
gggaaagagugcuuguccagagagcagauggcagcucuacuuagcagccaccucuguccc

SEQ ID NO: 4131247 - RNA, 64 nt, Human
gggaaagcauaacuaauauuuauugagcaccaaccaugucagugucuauuuauaugcuguucuc

SEQ ID NO: 4131248 - RNA, 72 nt, Human
gggaaaggagugaauauuugugaccaaaagggcaaacaguggccauugucuguagauauucacuccuucccc

SEQ ID NO: 4131249 - RNA, 108 nt, Human
gggaaagggaaggcccacggggcccuggagcugucuucacaggccuucaacugucagagggauguauuuaggacacagaucuggccacgccguggcccacccucaccc

SEQ ID NO: 4131250 - RNA, 77 nt, Human
gggaaaggggauggugucgggaggaaagagaguauguggggccuccacaucccuccucuggaaccucacccuugccc

SEQ ID NO: 4131251 - RNA, 95 nt, Human
gggaaaggggugccuggcaggcauugcagucugcaugugucucugggacaaguguguuuccgugauugagggugucugcaggccaguguguuccc

SEQ ID NO: 4131252 - RNA, 62 nt, Human
gggaaagugccggccugcuacagagaaaaaggcaacaucuguaacaauucccagccuuugcc

SEQ ID NO: 4131253 - RNA, 77 nt, Human
gggaaaucauccuggccggaucacauggcgcgagaaccagcucuucagugcuuauauucugagccucauguuuucuc

SEQ ID NO: 4131254 - RNA, 60 nt, Human
gggaaaucuggggcagucugauuauuuccuauuggcaaauccugcugcuguggacuucuc

SEQ ID NO: 4131255 - RNA, 65 nt, Human
gggaaaugaaggagaaagagcagaauggccaaaugaaggguuugcuugucuucccuuuaccuccc

SEQ ID NO: 4131256 - RNA, 59 nt, Human
gggaaauugugugagaucuuuguaaucuccaauucagauucucucuuaacacaguuccc

SEQ ID NO: 4131257 - RNA, 59 nt, Human
gggaacagccagggcauugucgccgagccgggaggcucuguguguuccguggcuuuccc

SEQ ID NO: 4131258 - RNA, 82 nt, Human
gggaacauaagaaugaggcagagggcugugccagcucaggagaaagagccaggugagcccugcugcuucuuguauuuuaccc

SEQ ID NO: 4131259 - RNA, 74 nt, Human
gggaacauccauuacauguccaaagacacccuagauucccacauaucugugaugucuuguacauaugauuuccc

SEQ ID NO: 4131260 - RNA, 128 nt, Human
gggaacccauggaggcaggaugcagcgggggacaggguggagccuggcauuggagccggggcauauggguuccaguccaugcucuggaccaugacuaugugccuuccccuuucuaagccucaguuucc

SEQ ID NO: 4131261 - RNA, 79 nt, Human
gggaacccugaaugaggaaaagagugagguuuucugaauagggcaguuaucuuccuuuaguuuucccuucuucaguccc

SEQ ID NO: 4131262 - RNA, 89 nt, Human
gggaacccuuuuagaaauuugccuugaauuaaacgauuguuguucaugagaccaagaaguguuuauuucagcaacagaaagaccuuccu

SEQ ID NO: 4131263 - RNA, 63 nt, Human
gggaacgauucggauggugguguugacagucauguuuacauugcuguuugugucuuuuuuccc

SEQ ID NO: 4131264 - RNA, 62 nt, Human
gggaacucuuauuuagaguuuaaggcccaagccaaguaucuccuucucucugaagaguuccc

SEQ ID NO: 4131265 - RNA, 77 nt, Human
gggaagaaaaccugacaguggaauggugggccugcaugcgagggcuuggaggcuuuccuuccacuucugaccuuccc

SEQ ID NO: 4131266 - RNA, 126 nt, Human
gggaagaaccaagcaccuaacuaaugagugucacugguugugagggcaaguaaaugaguugguuguuccccaaauucuggcuacccuccuaauguuagagauucucaugauuugcauugaauuccc

SEQ ID NO: 4131267 - RNA, 104 nt, Human
gggaagaaggggggaacauggauauuggggagcaucagcccugucugcugaaaaucaacacucagagugcaucuccuauuuguagucucuacuccuugcuuucu

SEQ ID NO: 4131268 - RNA, 56 nt, Human
gggaagacuuccugggcuuaaggauuuccuuaagugcuucaagggaagcucauccu

SEQ ID NO: 4131269 - RNA, 84 nt, Human
gggaagaggaaggaaugcaguguaugccccuuuccuuuuauaggaacacccuagaaauugcacacacuguuuuccucacauccc

SEQ ID NO: 4131270 - RNA, 129 nt, Human
gggaagagggagugggagggaggaggagggagaaaggagagagaauacauuaaggaaauuacagaguaccucuuuccuugaaugaauguucucucccaauuuccuucucucccaguuggcugccacccc

SEQ ID NO: 4131271 - RNA, 72 nt, Human
gggaagagucuuuguauauagcagcagauuaaaccaaaagaaugcacugacaugcacaaaaagacucuuucu

SEQ ID NO: 4131272 - RNA, 59 nt, Human
gggaagaucaggauggagauucauacaaauauagaugaaaacagaauccuuguuuuccc

SEQ ID NO: 4131273 - RNA, 55 nt, Human
gggaagcagcauugugcuggcucagcauugaagcaggugcacagugcugcugcuc

SEQ ID NO: 4131274 - RNA, 76 nt, Human
gggaagcagggccaguaccagguggguggggagccaggccugcccuggccagccuggugcuugcuccugagcacuc

SEQ ID NO: 4131275 - RNA, 82 nt, Human
gggaagccaguauucugucuuucuaccacuugauuguuauuuuucuauuaguccucagaaagacaaaaugcaguggcuuuuc

SEQ ID NO: 4131276 - RNA, 57 nt, Human
gggaagccucagagcucaggcuuagcugcggcugugcccaccuggcucugagguccc

SEQ ID NO: 4131277 - RNA, 57 nt, Human
gggaagcuggucacccacaggccuaccguuuuccaggaacgagggugcccauuuccc

SEQ ID NO: 4131278 - RNA, 68 nt, Human
gggaagcuuugaaaaugguaagcaugauauuauaauaauagccaagcuccuucauguucuggcuuccu

SEQ ID NO: 4131279 - RNA, 55 nt, Human
gggaaggaaagacccauuuuguaucugaucccgaguuugcaguugaguccuuccc

SEQ ID NO: 4131280 - RNA, 72 nt, Human
gggaaggacuuagacccugucuuuauucagaggacugccugguuaagacaguauuuuaagauuaucugcucc

SEQ ID NO: 4131281 - RNA, 63 nt, Human
gggaaggagggagggaggaaagugaggugucucacacucuggcaagcuuccacuuccuaucuc

SEQ ID NO: 4131282 - RNA, 80 nt, Human
gggaaggauaaagagugggugacagaaggagguaauuucuuugccugcuuguuuaccuacuccccucuuuucuuccuccc

SEQ ID NO: 4131283 - RNA, 66 nt, Human
gggaaggcaggccucuguuggauucagcucugacuucaagaggcaaaacagagcuugcuguuuccc

SEQ ID NO: 4131284 - RNA, 55 nt, Human
gggaaggcauaauagucaggugaccuggugucacuuuaagaguauaugacuuccc

SEQ ID NO: 4131285 - RNA, 69 nt, Human
gggaagggacuuguuuaaggucauauggaaaauuuccuggcuaggccuggagcaggucuucagauuccc

SEQ ID NO: 4131286 - RNA, 89 nt, Human
gggaagggaguagcagggaaggugugcugagccaucaggguaccagcucagcucagggaccgucacacuuuuccugguuucccauuccc

SEQ ID NO: 4131287 - RNA, 84 nt, Human
gggaagguaggguagcauucugaguucgcagagcuaccugugggcuuugcugaagcucggaagcuccccugaugaccugaucuc

SEQ ID NO: 4131288 - RNA, 72 nt, Human
gggaagucagccguccgggccugguguggcugcucagcagcacaaaguccccagggacccaguuuccuuccc

SEQ ID NO: 4131289 - RNA, 64 nt, Human
gggaaguucugauauuugcagguaccauguuaucaagguuuuuguacauguaagauugcauccu

SEQ ID NO: 4131290 - RNA, 76 nt, Human
gggaauaaguugcucuuggcucucauuuuauuauagcagaugcagcaaugaaauguaaguagagaguuuuauugcu

SEQ ID NO: 4131291 - RNA, 78 nt, Human
gggaauaauggccagcacuuagcccuuaccaaguagaggcacuguuccacagguuugggguauguguugguuguuccc

SEQ ID NO: 4131292 - RNA, 59 nt, Human
gggaauaucuacagcugaaagcccacccugcaaggcagcuguuagucaguggaugcccc

SEQ ID NO: 4131293 - RNA, 58 nt, Human
gggaauaugggacucuccaguggaguuuguuaaaacacagcuucgaggaucucauccc

SEQ ID NO: 4131294 - RNA, 63 nt, Human
gggaaucagcauggggcuuggagucagcccaaucuggguugaaaccugucucugcugcuuuuc

SEQ ID NO: 4131295 - RNA, 90 nt, Human
gggaaucagccaggcugguguguccugaagccucccagaccccagugggagccuaggauuccucagggucugccagaucccggcuaaccc

SEQ ID NO: 4131296 - RNA, 63 nt, Human
gggaaucucgcauuuaguucucaacucccugccaggggaggaaacuguccucccgagguuucc

SEQ ID NO: 4131297 - RNA, 70 nt, Human
gggaaucuguucuccccauuuccaaaccaugacaugaaugggugcugacauguggagagaacagauaucu

SEQ ID NO: 4131298 - RNA, 79 nt, Human
gggaaucuuguuaaaaugcagauucugguuaagucaaucuggaauugugccugagagucugcguuucugauuagcuccc

SEQ ID NO: 4131299 - RNA, 84 nt, Human
gggaaugaagaagccugugguuuuuguccuaauuuguuugguuuggggcuggacccuaagcuugggaaccacgguaaucagccc

SEQ ID NO: 4131300 - RNA, 61 nt, Human
gggaaugagguuggcauaauuaaaugaaugcaguuuauucuuuggggcugaucuuauugcc

SEQ ID NO: 4131301 - RNA, 78 nt, Human
gggaauggaagggggaaaaugacaacagaaaacuagcaguguuuuguuauuucguuuaccuuccuuaggauaauuuuc

SEQ ID NO: 4131302 - RNA, 55 nt, Human
gggaauggaauucuaaguuagauuucagucuauuuggagccuauccauagauccc

SEQ ID NO: 4131303 - RNA, 69 nt, Human
gggaauggagacgcaagggaccuaggagucucagcuccuacguucagcccuagcgagauacucaguccc

SEQ ID NO: 4131304 - RNA, 63 nt, Human
gggggugcaggagccacuucagggaugcagcaggagcugcccggugacugucuccugccugcc

SEQ ID NO: 4131305 - RNA, 66 nt, Human
ggggguggaucaccugaggucaggaguuugagacaagccuggccaacguggugaaaccccaucucu

SEQ ID NO: 4131306 - RNA, 62 nt, Human
ggggguggguauugugucaaucucugggaauguaucugagagauugugcuacucacccaacc

SEQ ID NO: 4131307 - RNA, 80 nt, Human
gggggugguggucaggauucucagcccuucuuugauuuauugggaaguaaugaacuggauccaauggcaagcccuccucc

SEQ ID NO: 4131308 - RNA, 119 nt, Human
ggggguguuuuuggagacagauccucacuuugucacccaggcuagagugcaguggugugaucucggcucacugcaaccucugccucccagguucaagugauucuccuaccucagccucc

SEQ ID NO: 4131309 - RNA, 70 nt, Human
ggggguuucaaguaacagggagaaccauuuaaccccuuugugguuuauucuuauuuacuuuggaaucucc

SEQ ID NO: 4131310 - RNA, 74 nt, Human
ggggguuuggauuucagcauauggauuuuggggggacacaaaucuuucaguccguaauaguuggccuccucccu

SEQ ID NO: 4131311 - RNA, 79 nt, Human
gggguaaucuuaaucaccaagcaauuacuaaaugccgaccauguucucaggcuuggcagaggugggugcuuguuacccc

SEQ ID NO: 4131312 - RNA, 67 nt, Human
gggguacccaacagaguaauuuagugaaguauuucaaagagcuauucaguugugguauuguaaccuc

SEQ ID NO: 4131313 - RNA, 71 nt, Human
gggguagaaugcuccugggaacucggaaagcucugggaugccagcuuuucccacauguucucacucacccc

SEQ ID NO: 4131314 - RNA, 67 nt, Human
gggguauaagcaggaggucuaggaggagcuguucucugcccuccagagcuugaccugcugaggcccc

SEQ ID NO: 4131315 - RNA, 79 nt, Human
gggguauuuaagacaaauuuguuuuccugucugcuagcuccugaaaagacaauuaaaaaauuaugcuuaaguaaacccc

SEQ ID NO: 4131316 - RNA, 81 nt, Human
ggggucacuaugucauauuuugguuugguugcagugcugaaccuuaugcaacccuggcccuggaauaggcauggucuccuc

SEQ ID NO: 4131317 - RNA, 61 nt, Human
ggggucaguagcaaagucagaaauggagacacucaauccauuucuccaagugacugauucc

SEQ ID NO: 4131318 - RNA, 88 nt, Human
ggggucauuggaguguucccgucucuuggauuucacagugcucaccaggauggccacgaugaugaaagagaacauuccaaucaucacc

SEQ ID NO: 4131319 - RNA, 80 nt, Human
gggguccaagccucaaggcuggggaaggucagauuugagccugugucccuguuccuccagugucuggggccuuggguccu

SEQ ID NO: 4131320 - RNA, 55 nt, Human
ggggucccugcaccagcaugucagcaucagcuugugcacgcugggcgggcacucc

SEQ ID NO: 4131321 - RNA, 130 nt, Human
ggggucgggacggcagccccgcggcguccugcuuucuggcacagccgcgggaucccggcacugaacaacuggcugucccgcggcgguccgggcagggcgcggugcguggcaacggcucccgucccucccc

SEQ ID NO: 4131322 - RNA, 65 nt, Human
ggggucggggcauagccacuuacugacgacuccccacccagcaagugguuuugaacccggacccu

SEQ ID NO: 4131323 - RNA, 106 nt, Human
ggggucuaggagugaccaaggugugggcaggguugcuuucuccgaggccucucuccucggcuugcagauggccauccucacugcaccccgccuuagucuucccucc

SEQ ID NO: 4131324 - RNA, 77 nt, Human
ggggucucaaagaacaucaucugaaaugugacaggaagucucuggaggcuuuuagaugugugucuucuggagguuuc

SEQ ID NO: 4131325 - RNA, 79 nt, Human
ggggucucuuguuauggcaagcgggguugggggacucuuucaauggagaauagaacuauugcaauaacaagaaugcucc

SEQ ID NO: 4131326 - RNA, 88 nt, Human
ggggucuuggucugucacccaggcuggagugcaguggcacgaucucggcucacugcaagcucugccucccggguucacgccauucucc

SEQ ID NO: 4131327 - RNA, 112 nt, Human
ggggucuuguacaagcugcuuugccuccagcugccucagucucuucaugugaaauuggggauaucugucuuagauuggggguccccugaagcagaccuagagacaagaauuc

SEQ ID NO: 4131328 - RNA, 75 nt, Human
ggggugaaggggcaguaauucucagucaccaggaaagauccccgcccacuggguggcugccuccuucucaccacc

SEQ ID NO: 4131329 - RNA, 92 nt, Human
ggggugacugcucuaaguuguauauaccgcuuuaagcuauaaaaucauuauuuugagcucuuuaugcaauaaaacucagagcagugcauccc

SEQ ID NO: 4131330 - RNA, 55 nt, Human
ggggugagcggcuagggauguggggaauccccugccucugaagcugcucagaucc

SEQ ID NO: 4131331 - RNA, 119 nt, Human
ggggugaguggggagggaaguaagugccccaggcuguuaacauaagucucacuuaacaagagcucaggaagagacauaaagggcaggugccugggggcaucuuccuuccuccucucucc

SEQ ID NO: 4131332 - RNA, 67 nt, Human
ggggugaguugggguucacaggucauucaaugggaagagguugaccugggaaccuuaucucaauccc

SEQ ID NO: 4131333 - RNA, 61 nt, Human
ggggugauauugggccugugcugggcccccgagggccucccaccaggcccggugucuccuc

SEQ ID NO: 4131334 - RNA, 73 nt, Human
ggggugauuuccuugaggccacaguaucagaacaguaaaaucuguugugaaauguccaucaaccagacacccu

SEQ ID NO: 4131335 - RNA, 107 nt, Human
ggggugcagcuggggcugggggaaggugggcggugucuuggaucguggcagcuauuuuagggccugagcuggcugaccucccccagcgugaucuccgucugcucuuc

SEQ ID NO: 4131336 - RNA, 55 nt, Human
ggggugcgggccccaucuggcuagaugaugugggcuguguggggaccgaggcuuc

SEQ ID NO: 4131337 - RNA, 60 nt, Human
ggggugcugagaucuucccucacuggaauaagguucucagugcagggcaacucagacucc

SEQ ID NO: 4131338 - RNA, 62 nt, Human
ggggugcugcucuccuccauguugcacucauucaguuaguccaguuggccagagcaggcccc

SEQ ID NO: 4131339 - RNA, 82 nt, Human
ggggugcuggguugagauggcugggccccaggagcagcagcuguagcuugagggcucggcugggcuccacugcagcacaccc

SEQ ID NO: 4131340 - RNA, 57 nt, Human
gggguggauggguggaggcagugccaucucccccagugccagcugcccuuccacccu

SEQ ID NO: 4131341 - RNA, 64 nt, Human
gggguggccacugcaaggccuucgaagacaugagucaugaagcugugggcaguggagccacccc

SEQ ID NO: 4131342 - RNA, 75 nt, Human
gggguggccccccuucccgguuuacauauuguaucuauguaacguuuuguauauuccagaggguagggccgcccc

SEQ ID NO: 4131343 - RNA, 57 nt, Human
gggguggccuguaggcagcaugggugucccgugcuccuggacauggccagugauccc

SEQ ID NO: 4131344 - RNA, 81 nt, Human
gggguggcgcuuucucucuacuggggcacuaggagugcuuacucuccugcucccucugguccucgguggagagccacaccc

SEQ ID NO: 4131345 - RNA, 81 nt, Human
ggggugggaagagccuaggagacaagcgugaaagucccaccucugcaaccaucagguauguccuuggagucaccucaucuc

SEQ ID NO: 4131346 - RNA, 62 nt, Human
ggggugggcuggggcugagacccauggcaugaccccaauucucucuccucaagcucgacccc

SEQ ID NO: 4131347 - RNA, 87 nt, Human
gggguggggccagugguagaggggaggccgugggaaaagagagacuggcugcacgcccacagcccccugcugcucuggcacagcccc

SEQ ID NO: 4131348 - RNA, 81 nt, Human
ggggugggucaucuggaccuuggcccugcccuggugcugcagggcgcugugugaggcccgagguucgugugcacccacgcc

SEQ ID NO: 4131349 - RNA, 62 nt, Human
gggguggguggggcacuuuugaccgcaguuucuggcgcagguccucacgccucacccuuccc

SEQ ID NO: 4131350 - RNA, 73 nt, Human
gggauuuaguaggauaguauacguagcucauagaaucauugggagagcuggggaauucuccugcugaaguccc

SEQ ID NO: 4131351 - RNA, 96 nt, Human
gggauuuaugugacuguuaaaauuaggugacuacugggcacuugagauaaaugucuuucaggauauuaccuaauauuugacuuagcaauaaauucu

SEQ ID NO: 4131352 - RNA, 58 nt, Human
gggauuucuccuuccuuuaaacaugcaacaggcacuugaaggaaagagggaacauccc

SEQ ID NO: 4131353 - RNA, 86 nt, Human
gggauuuggggcaaugcauuucacuucacugggcuucaguuuucuuuucugugcagugaggcaguuggguuggcuucccaggugcu

SEQ ID NO: 4131354 - RNA, 79 nt, Human
gggauuuuacugcaguugguuuagaauuucuagggguaggagguuucaccuggagagagaggccaacugcaaagaucuu

SEQ ID NO: 4131355 - RNA, 74 nt, Human
gggauuuucucaguugacguuauagacuuauuucuuggucaaucguuuuggguuuaaacucaacucuaaauucc

SEQ ID NO: 4131356 - RNA, 86 nt, Human
gggauuuucucuucccucuggaccugucccccaccaaccagcaaauagcuccugggccuagguugagggagagagagaagugaccc

SEQ ID NO: 4131357 - RNA, 62 nt, Human
gggcaaacaccugucagcugauggcuauguauggcuaugcagguccucagugacaggggccc

SEQ ID NO: 4131358 - RNA, 123 nt, Human
gggcaaauauccccacuuccucuacacaggccuccacuccacgcagacucaaagagcaucccuugggcacuugugugccuggggcaguguagggggcaguuauccacaugggccaucuugucu

SEQ ID NO: 4131359 - RNA, 81 nt, Human
gggcaaaucaucggaucucucuuagccucagauguucagauauaaucugaauguuuggacuggaaggucccucaaauuccc

SEQ ID NO: 4131360 - RNA, 73 nt, Human
gggcaaaucuuugucaguaugguuuagagaagguaauacuuucucuaauacauuuugacaaauaugauugacc

SEQ ID NO: 4131361 - RNA, 64 nt, Human
gggcaagaaggccucugcccuggcuucuguguauuagagguucuguucuagcccuucucugccc

SEQ ID NO: 4131362 - RNA, 70 nt, Human
gggcaagagaccuugaccuugagcaccuguuagugacaguggcugcuaggaguggugggucaaggagccc

SEQ ID NO: 4131363 - RNA, 74 nt, Human
gggcaagagaugaguaggagacaggguccucacagaucccuuuguuccuggccuuauccccaaacugcuugccu

SEQ ID NO: 4131364 - RNA, 85 nt, Human
gggcaagauuccggagguggaacacagaacggugugcagcaggaacaagcuacgcuucugguucuggcuuuaggacuucaagccc

SEQ ID NO: 4131365 - RNA, 58 nt, Human
gggcaagcacuuggccucugagcucugcauccagugcucacucuccacagugcccccc

SEQ ID NO: 4131366 - RNA, 58 nt, Human
gggcaagccucuggugucuugugugugucuccugcaccauccauuuucuugcuugccu

SEQ ID NO: 4131367 - RNA, 68 nt, Human
gggcaaggaagagcagguggugcuagagucuggucucuauggggauggcccagcugugcuuccagccc

SEQ ID NO: 4131368 - RNA, 83 nt, Human
gggcaaggagcccagcuuccuucugucucuuguguaguacaagaguccuggaauagaaggcaagaggcuugggcucuguuacc

SEQ ID NO: 4131369 - RNA, 55 nt, Human
gggcaagugucaagcaugucauuuaaacaaucaaaauguggccucgcauuugccu

SEQ ID NO: 4131370 - RNA, 72 nt, Human
gggcaaucugcuucacuuccccaagcuucagauuugauguuuggaaacuggaagugaucauaguaccugccc

SEQ ID NO: 4131371 - RNA, 58 nt, Human
gggcacagccuaacuauggagacccagggcuccuuccugcugcacuaggccugugcuc

SEQ ID NO: 4131372 - RNA, 58 nt, Human
gggcacagcugcugcuucucacuggggccaugccucugaccucuagccagcucugccu

SEQ ID NO: 4131373 - RNA, 60 nt, Human
gggcacaggcugcacgaccccagccuggccucgggcuugcugggagucgcgucuguggcc

SEQ ID NO: 4131374 - RNA, 90 nt, Human
gggcacagggaugggggaaacacaggagauauguaauggcucagaguugagacuccagagccaguucucuuguguuuuauucccaggccc

SEQ ID NO: 4131375 - RNA, 58 nt, Human
gggcacaguacuccaaucaacuuuauagaaauguauuguuaugguccaaauugugucc

SEQ ID NO: 4131376 - RNA, 94 nt, Human
gggcacagugcucaguuugcuguggcugccugaguaguaauaaucacagcuacaacugcaggugcgcucaggugccaggccugcgcacugucuc

SEQ ID NO: 4131377 - RNA, 69 nt, Human
gggcacaguggcucaugccugucaucccaacacuuuggaaaggcugaggcaggcagaucacuugaaccc

SEQ ID NO: 4131378 - RNA, 81 nt, Human
ggguagcugaggggaugguagaccggugacgugcacuucauuuacgauguaggucacccguuugacuauccaccagcgccc

SEQ ID NO: 4131379 - RNA, 61 nt, Human
ggguagcuugcaguuucugcuguuuuaaaaucuuuuagaacgaaagagagcuacaagcccc

SEQ ID NO: 4131380 - RNA, 83 nt, Human
ggguaggacacguucaggcacggcuggaucuaggugcucaaacaaugccucugggagcuggcuuugccucagcugugccuccu

SEQ ID NO: 4131381 - RNA, 69 nt, Human
ggguaggagaggugucugugugugugugugugugugugugugugugugcaacagaugcuuuugcugccc

SEQ ID NO: 4131382 - RNA, 78 nt, Human
ggguaggcaaauuuuuauucugcauuugaaaaagauugauaauuuaauaaucauugcagaaauaaaggugaacuacuu

SEQ ID NO: 4131383 - RNA, 91 nt, Human
ggguaggggguggcugagaacaggaccccaaacacuucugcuuccacuacuuccccuguaaaugaggggguccuuucucuccuuccugccc

SEQ ID NO: 4131384 - RNA, 93 nt, Human
ggguaggugcugggcaagcggcaaccuuuaucgccaucauugugcaauaaaugcgccccgaugcgugguagagcgcccccacccguuccaccc

SEQ ID NO: 4131385 - RNA, 81 nt, Human
ggguaguggguucuaguugugacacugccacaaacucacugugagacaguggcagacacugucgaagccuacccaacaccc

SEQ ID NO: 4131386 - RNA, 86 nt, Human
ggguauaauguacauuauucgagugaugguuacacugaaaggccagacuucaucacuaccuaauauacccaugugcacuuguaccc

SEQ ID NO: 4131387 - RNA, 121 nt, Human
ggguaucaugcuugggcacccauggcucccaggaagggaugccaaggaagcagggcagagagaacaagcauccccuuccugaggccucccuuccuagaccucaggcacaggaaaagagccc

SEQ ID NO: 4131388 - RNA, 79 nt, Human
ggguauccugcuuaaacauacuauuuauauaaaaauccuuacagaugaagaaauauaguuaguaugagguauauugccu

SEQ ID NO: 4131389 - RNA, 82 nt, Human
ggguaugaaguaagauauuguucagcuccuggcuucauugcucaugccuuaagcucaugaauucaauuucuuccucuuaccc

SEQ ID NO: 4131390 - RNA, 121 nt, Human
ggguaugagggguauaagugguuaaauuucgccaaauauucugugauucuguaccauauacaaguauuugguacuuggaggcagaaaaauauaaaggugaagaaggcauuaauaccugccc

SEQ ID NO: 4131391 - RNA, 92 nt, Human
ggguauguaagucccgcaaagcuuuggccaaccucguguggagcucuggaacgagaacugcugaaguucgccagacucgggcacuccugccu

SEQ ID NO: 4131392 - RNA, 81 nt, Human
ggguauguuguuuuccaguguuucuaaguagaugugaaagaaaaccucauuuaaacucuacucagaaaucaacaaaagccu

SEQ ID NO: 4131393 - RNA, 107 nt, Human
ggguauuaagcugagaggcuagcuuuguguauuaggcuuaguuuuguugaaagguaggaccagaccgaacuagcuaauuuuagucugaacuauuccauuuagugccc

SEQ ID NO: 4131394 - RNA, 68 nt, Human
ggguauugcaauuacucuucuucuucagaugaggaaacugagucucagaaagauuaagcaacuugccc

SEQ ID NO: 4131395 - RNA, 110 nt, Human
ggguauuggaauagccuuuucucucaguuaaacuuugugaauguuaucuguguuuaacuccaaguuugagacugagaguggggcaaaugaagccuuuuuccacuaauucc

SEQ ID NO: 4131396 - RNA, 74 nt, Human
ggguauugggugagggcaaaggguugcaaaucagagaaauuugcauuagagccccagcucugccacaacuagcu

SEQ ID NO: 4131397 - RNA, 84 nt, Human
gggucaaagggugcauguauuuaaaguugcaaucaauauugcuguuauauugcacuccaaauaaguugcaccaccuuuuggccc

SEQ ID NO: 4131398 - RNA, 66 nt, Human
gggucaaaguguccuuggggugaauacauuguacuuuuaaaauuuacagacauucaauuuugaccc

SEQ ID NO: 4131399 - RNA, 80 nt, Human
gggucaaaugcuuuuaaacacgauugacgaaacuauuuuuaaaaauuaaagguuuccaagugguugaaaaguauaugccc

SEQ ID NO: 4131400 - RNA, 60 nt, Human
gggucaagccguugcccaaggccacagaguuggugaguggcacggccaggacuugaaccc

SEQ ID NO: 4131401 - RNA, 96 nt, Human
gggucaagggcuucccaggaaugcagcugccccuccagggcugggggcuggccagcgccuccuguguugggcagcagcucucugaagccagggccc

SEQ ID NO: 4131402 - RNA, 113 nt, Human
gggucacacuuuauuugcaaguuaucugggaagggcuggcaauuuaugaauaaauuucagaugauggccauguccucucccuguuucagacuuccaguauuaaucagugaucc

SEQ ID NO: 4131403 - RNA, 69 nt, Human
gggucacgcagaggcuguagggaagguugcuauucuuaggccccuacuaucucaggcgucugcugacuc

SEQ ID NO: 4131404 - RNA, 72 nt, Human
gggucacuaccagagggaaaauuuguagaaaaaaaguuaguuuauaucacagguucaccucagguagguccu

SEQ ID NO: 4131405 - RNA, 73 nt, Human
gggucacucacugcaagcugggacuuagcgcagauagcacuugauugcgccacucccugcucagagaaggccc

SEQ ID NO: 4131406 - RNA, 66 nt, Human
gggucacuuuugcuauguuggcucuauccugaggcagucucucuccucgugguaaccagguggcuc

SEQ ID NO: 4131407 - RNA, 56 nt, Human
ggucgacuaauguuucauuucaugugcaugcuaagugaagcugguuagugaugacc

SEQ ID NO: 4131408 - RNA, 65 nt, Human
ggucgagcacauuaagugaguucauguggcuaacuaaggacacagagcaugcucagugugugacu

SEQ ID NO: 4131409 - RNA, 78 nt, Human
ggucgcacccauccuugcagggaaacuggacccagccagacccuggcuccagcccugagcaagcucuugggagaggcc

SEQ ID NO: 4131410 - RNA, 57 nt, Human
ggucgcgguggucucguccaugcacccaagggauugcguacggcugccagugugacu

SEQ ID NO: 4131411 - RNA, 65 nt, Human
ggucggcaaagucaaauaaauuuacugucuggcccuuuacagaaaaaguguuuugacuucugacc

SEQ ID NO: 4131412 - RNA, 66 nt, Human
ggucguacuuccucagccagcacuuaggggccgugagguccauagccaugagcugagggagugacc

SEQ ID NO: 4131413 - RNA, 75 nt, Human
ggucgucacccugggcugggccuguuaaguauuuccucauuaaagcucuggcagcucaguucaggucugcaagcc

SEQ ID NO: 4131414 - RNA, 62 nt, Human
ggucuaaggaaugcauggguacucagggcuuuaccggcagggcuccaugcauuucuccaacc

SEQ ID NO: 4131415 - RNA, 79 nt, Human
ggucuaauagcugguaaguggagucuuugggacuagaacccaguccugacccaaaggcuguacuuguaaccacuaugcc

SEQ ID NO: 4131416 - RNA, 97 nt, Human
ggucuaauuugaaccugucagaguuacuguugccugcgcuggcccaaagugcagauuuuuagucagcuugugauaggccagguguuuugucuggacc

SEQ ID NO: 4131417 - RNA, 74 nt, Human
ggucuaucuuguucucugaguggauuuuguagcaucaugcauugcauuggucauuuagaaaauacugguucacu

SEQ ID NO: 4131418 - RNA, 92 nt, Human
ggucucacucugccacccaggcuggauugcaguggugcgugaucucggcucacugcaacuuccgccuucuggguucaagcaauucucuggcc

SEQ ID NO: 4131419 - RNA, 55 nt, Human
ggucucagaucuuuauuaaggcaaaagcauugcagccacauggaaguuugagacc

SEQ ID NO: 4131420 - RNA, 78 nt, Human
ggucucaggcacuccuccaccccuccccuugcaccagcgcacagcaagcagagaaucugggagcgagggccuuaggcc

SEQ ID NO: 4131421 - RNA, 74 nt, Human
ggucucaugaaggaggcauaauugugaagaagauauuucuuauaccucuucacaucauguuuuuuaaugccacc

SEQ ID NO: 4131422 - RNA, 76 nt, Human
ggucuccaaccguuucuccacacgcucugccuuucugacagcaaaucuauguuuggcaaggaaugggauggagacu

SEQ ID NO: 4131423 - RNA, 130 nt, Human
ggucuccaacuggucuggauuaguuaauaacgcaagcucugaccauggcuuuaggguuaccaaauccaauguguauggaaucuugcgggcacauggcagagguauugauucuuuucaggcccucagggac

SEQ ID NO: 4131424 - RNA, 62 nt, Human
ggucucccugcagacccagccuggaacucccuugcugccaaggcuggacaucccaggagacu

SEQ ID NO: 4131425 - RNA, 64 nt, Human
ggucucggcauagaaaaugugcccucugucuugaggcagagacauccauuuuauaugcucaauc

SEQ ID NO: 4131426 - RNA, 59 nt, Human
ggucucuggccuuggagauugaagcguuucacuugugcaucucacagcccagagaagcc

SEQ ID NO: 4131427 - RNA, 128 nt, Human
ggucucuugacugcauccuggcuccucuagugguuucucuguuaucuaggcucccagugggagcccaagcauaggagggaggcaacagaggacugggcuuauucuacauguccuuccaagagucaacc

SEQ ID NO: 4131428 - RNA, 57 nt, Human
ggucugagagccacugaauccccagcccuaggauucuccacagcaaguucucggauc

SEQ ID NO: 4131429 - RNA, 56 nt, Human
ggucugagguuugggauucacuaguaaacuagcucugauucccuaaucccagcacc

SEQ ID NO: 4131430 - RNA, 59 nt, Human
ggucugaguggggccugagauucuccguuucuaaugaccuuccaggcauccuucaggcu

SEQ ID NO: 4131431 - RNA, 63 nt, Human
ggucugauagagccaggagagacuuuaugaaauccagacucucacacuaaugcucuaucagcu

SEQ ID NO: 4131432 - RNA, 80 nt, Human
ggucugcacagugaugucagaauuggaaaucuucaccugaaaguccaauuuucugauuucacuugaaauauuggcagacu

SEQ ID NO: 4131433 - RNA, 64 nt, Human
ggucugcuguugagcacaagugaaggaaggaagaacaaccuccauguguggaagacggugaauc

SEQ ID NO: 4131434 - RNA, 56 nt, Human
ggucuggaagcgcaguaggcugguaacccuucuccaguacuguggcucuucaggcc

SEQ ID NO: 4131435 - RNA, 61 nt, Human
ggucuguuuaauguaaggguuggauaguuuccugacuuaacagcaaaucauugggcagacu

SEQ ID NO: 4131436 - RNA, 102 nt, Human
ggucuguuuuugcauguuauguucuuuaucaugguaaaccuguccauagacaguaaguacuuggcaaacaacguggauauagugaaaacuuugaaucaggcc

SEQ ID NO: 4131437 - RNA, 67 nt, Human
ggucuucaaaaaauauccaucaguuacgucauuucuuuuggcaaaauucuugauguuugugggggcc

SEQ ID NO: 4131438 - RNA, 56 nt, Human
ggucuuccuugggggacuugaacaucuugguaaaugacaggucuucuuggaggacu

SEQ ID NO: 4131439 - RNA, 94 nt, Human
ggucuucgggguguuaugagagacuauggguacaagugauuuauuccguguaauuuagaagugggccuauaguccucuuguguuuugggagacu

SEQ ID NO: 4131440 - RNA, 113 nt, Human
ggucuucucacucugucacacccugguuggagugcagcuugugcgaucagcagugagccaugauugcacaucugcacuacagccugggugugacagugugacacacaaagauc

SEQ ID NO: 4131441 - RNA, 91 nt, Human
ggucuucuucaugccaggaggcucauugcauugugcauucuucuaaggacagaacaggauguuccaaagagcacuuuucaugauccugacc

SEQ ID NO: 4131442 - RNA, 101 nt, Human
ggucuucuuuuucaaguugcauuaucuuguagagauauuuucgcaagugguuauucuaguggaauaauccuccagggcucugccgcuugagaaguaagucc

SEQ ID NO: 4131443 - RNA, 95 nt, Human
ggucuuguuuuauuuugcuuugcuauguuuugcuugauuuuuauugccaaugauguuucaggcgaacuaacaugcuuuuaagauacagacauacu

SEQ ID NO: 4131444 - RNA, 60 nt, Human
ggucuuuaacugaugaagcccacccacauuaugaaggguaauuggcuuuacuuaaagucc

SEQ ID NO: 4131445 - RNA, 108 nt, Human
ggucuuucaaaguuacaucuuuugggagagguagcaguaagaacaggacacacaagccugaaauuauuuuauuucuucuguauaggugugcuaaaacucuaauaggcc

SEQ ID NO: 4131446 - RNA, 75 nt, Human
ggucuuuuccagcuguguuuuuuccaucuaaacaguaaaguugagugcaggggaaagccaguuucuggaaguacc

SEQ ID NO: 4131447 - RNA, 62 nt, Human
ggugaaaacucccuguguaacucccauggaauaaacuuuguuauugacagaaaguguucacc

SEQ ID NO: 4131448 - RNA, 79 nt, Human
ggugaaaaugcacauuccugagcuucgaccugcaguguccuggagggguaggugugggcucaggaaugugccucuuacc

SEQ ID NO: 4131449 - RNA, 56 nt, Human
ggugaaauauuuuugauauguuggguuacauaaaauauauuaagauuaauuucacc

SEQ ID NO: 4131450 - RNA, 84 nt, Human
gguuaaaaagugaaggcauaugcauagaagacagacuaucuaaauuacaucuuaucuguuggugcaggugcuuuagcguagacc

SEQ ID NO: 4131451 - RNA, 90 nt, Human
gguuaaaaccauaccaaacaaauccccauucuuagucauuaguuaugaaaaugucaugcuugaauggguauuuuuggagguuaaaggacc

SEQ ID NO: 4131452 - RNA, 84 nt, Human
gguuaaaagugcuuuauaacuuaguuuaugguaauauuagcauauaauuuucuauuugaauuaugaagcacuguauguagaacc

SEQ ID NO: 4131453 - RNA, 77 nt, Human
gguuaaauacuggacucucacuauuuaagaauagaauaagaauaaucaaauagaggugagacuucagugacaugucc

SEQ ID NO: 4131454 - RNA, 94 nt, Human
gguuaacugacuugcccaaggccauauugccuguaugugauauagcugggauucaaauccagguaguuugguuugagaguccacacuguuaauc

SEQ ID NO: 4131455 - RNA, 106 nt, Human
gguuaacugcaaagcaggaaaaggcggcucggggcuggaacguuacucccucugcucaugauccagggagaaguuuugggcccccuucucucugcugcugauggcc

SEQ ID NO: 4131456 - RNA, 78 nt, Human
gguuaagacacauucauaucugucuuucugcagugcuagugaacugagugcuuaugggcaguuauguuguccuuggcu

SEQ ID NO: 4131457 - RNA, 102 nt, Human
gguuaagagaaaagugagauguuuucuugucuuauauuuauuuggcuuugccaccuauuagcugaaugaacauggacaaguuaauaauacuccuccuuuacu

SEQ ID NO: 4131458 - RNA, 67 nt, Human
gguuaagauuguuuuggaugcuaacuguuaaugucaaaaccaaguuagcgauguaaaauaacaagcc

SEQ ID NO: 4131459 - RNA, 83 nt, Human
gguuaauaauaguggccagugucuauugguuuccugccuuuuggcuaaggacaaaccaauagacacuggccacuacuguaacc

SEQ ID NO: 4131460 - RNA, 84 nt, Human
gguuaaugugucaaacuaaaauuaacuucuagguaauauacuuuuguaacacuggagaguugguuguggcaaacaucauuuacu

SEQ ID NO: 4131461 - RNA, 83 nt, Human
gguuaauguuagacuaugugauauuuugacuugaauugccugugacaauucuguauguacauauguguauuagaauauaaacc

SEQ ID NO: 4131462 - RNA, 70 nt, Human
gguuaccaggacauguugcaaguuuauaugcauguucucauaugaacaauaaucaugucuaugauuagcc

SEQ ID NO: 4131463 - RNA, 78 nt, Human
gguuacccggaaagcucugcuucagccugcagcucagccuugcuuggcuccaggcugugcaugaguuuaggucugacc

SEQ ID NO: 4131464 - RNA, 71 nt, Human
gguuacugagccuguuucuuccagaguggcucccaguuggauccacacugucuaacaaggcauacguagcc

SEQ ID NO: 4131465 - RNA, 58 nt, Human
gguuagaaguuaccacauacuucucugacucaauguaauagagauccagcuucuagcu

SEQ ID NO: 4131466 - RNA, 94 nt, Human
gguuagcaagugguagagcuggagcuggaauuugagcuggaaguuugacuccagaauccaugcucuugucuagccuccuugccucauugcaucc

SEQ ID NO: 4131467 - RNA, 81 nt, Human
gguuaggaauaaaggccaaaauuugcauuuaaauggauauauuuuaagaagaaaugccaauuugugaccuuuacccuugcc

SEQ ID NO: 4131468 - RNA, 98 nt, Human
gguuagguacauucuugaugguuugguucaugagaaaacuuuuugggggcaggauagaccccagaaucuuggaacucagaucacagaaaucccuaauu

SEQ ID NO: 4131469 - RNA, 67 nt, Human
gguuagugguggcaagcucucuucccuucaacgaucccugaccaauucugagagcugcuaccuagcu

SEQ ID NO: 4131470 - RNA, 69 nt, Human
gguuauacagaucuucaauauuuuuguguagaucuacggauuuagcaagucuuugaagucauuagaauc

SEQ ID NO: 4131471 - RNA, 69 nt, Human
gguuaucaacuuagcuuucagccuuucucaccuacuuggauguuggugguggggcugaaaguuuuaacc

SEQ ID NO: 4131472 - RNA, 82 nt, Human
gguuaucucagaacuucauauugacguuagcuauagauauuaagcuauaaagugcuaaccagucaauaugguuugaaugacu

SEQ ID NO: 4131473 - RNA, 84 nt, Human
gguuaucugcagaauagggcauaacuuugcucaaaaaugaaucugcuauggguaccgagaaaaggcucuauucauagaaugacc

SEQ ID NO: 4131474 - RNA, 80 nt, Human
gguuaugagaugcaaggcugguggaguggggauguccuuuugggacugggucauccaauaccaguuugcaggcuaagacc

SEQ ID NO: 4131475 - RNA, 71 nt, Human
gguuaugcagcugguuaagaacacagcuagaagugauucacguuucugugauucucagccaacuguccacu

SEQ ID NO: 4131476 - RNA, 116 nt, Human
gguuaugggggagcggggagguguaucuuuccacaucuucaguagugucaucuugagguagggaaggaagugguggugguaguuggggagauggauaucucugcaauccuaagacu

SEQ ID NO: 4131477 - RNA, 98 nt, Human
gguuauguagcaaauaaaugacagagccagaacuagaccuuguauuuuuuaaccuacagucuaaucuuguguucuguaugcuuguuuguuuuccugcu

SEQ ID NO: 4131478 - RNA, 86 nt, Human
gguuauuaagaugugucuucagaauuaagaguaugcuguaaggaugaagacagccaucuuaauucuaaagacaaagcacaaugacc

SEQ ID NO: 4131479 - RNA, 59 nt, Human
gguuauucaggucauggacugucaucugcuuagaaagaugauaucuuuuccugagaauc

SEQ ID NO: 4131480 - RNA, 89 nt, Human
gguucaaggaaaauggcucucaguucacaguuaaaguuaucaucagacuacugaaggacuugaggguuucguuuuccuggcuuugagcc

SEQ ID NO: 4131481 - RNA, 80 nt, Human
gguucaaggcccauuugcaguuccauccaggcagauggaggcaacucuacccucuuccuauggggcugcaggaagccacc

SEQ ID NO: 4131482 - RNA, 61 nt, Human
gguucaaguucaucccggcugggucauuccuuuugcucugagcucuauggaggacugaacc

SEQ ID NO: 4131483 - RNA, 64 nt, Human
gguucacaaaagaguuuuauagcaacuguuauucuggcagcgcuggugaucucuauuuugagcu

SEQ ID NO: 4131484 - RNA, 69 nt, Human
gguucaccucagcucacucuuuugugcuuguguaaaaagugcagguggagaaagugaguuguguuuacu

SEQ ID NO: 4131485 - RNA, 63 nt, Human
gguucacucucaagucugccuaucaccauauguuuugcuugggcaugaaaaaugagaagaacc

SEQ ID NO: 4131486 - RNA, 63 nt, Human
gguucagcaaaggaccagcacaggcuuuggucuuaggcuuggcuggcugaccuugcaaagacc

SEQ ID NO: 4131487 - RNA, 55 nt, Human
gguucagcaggcucugguugaccgugaugucagugauggucccauacugcuggcc

SEQ ID NO: 4131488 - RNA, 56 nt, Human
gguucagccccauuuccuggcagugcagcucgcgcauuccccaggaggcugacacc

SEQ ID NO: 4131489 - RNA, 76 nt, Human
gguucagggggaugauuucacaccuugcacuuuaguuuuacccaguguaggaaaaacaaugaucugccugacaacc

SEQ ID NO: 4131490 - RNA, 61 nt, Human
gguucaggucucuucagcuuggucuugucaggacuccagggcugaacgaggcccaagaauc

SEQ ID NO: 4131491 - RNA, 77 nt, Human
gguucagugaacauuggcacaaggcagcaggaaacaaauccuaagcugcacugaguggcaacaaaguuucuugcacc

SEQ ID NO: 4131492 - RNA, 64 nt, Human
gguucaguguuuuuauugacagguugacuuucaacaguaugugucaauauguaaagccugaagc

SEQ ID NO: 4131493 - RNA, 85 nt, Human
gguucauauccacugcuguuacuuacgcaaaaggcaaauauuugugcuuuguaacaaguugaucugguagccuggaaaauggacu

SEQ ID NO: 4131494 - RNA, 62 nt, Human
gggcuguuuuguuuacuuucacagcccccugauuauguaaugagagcuaacagugacagcuc

SEQ ID NO: 4131495 - RNA, 80 nt, Human
gggcuuaccuuagaggcaggaagaauugcauguuaagaaagcugcauacacucuggcuuuuugcucuuugaguuuagcuc

SEQ ID NO: 4131496 - RNA, 93 nt, Human
gggcuucaaguucacggcccugugaugggaugugggcagggccugucugggacaggccgaacccagcuccuuacagggccgaauccuuugccc

SEQ ID NO: 4131497 - RNA, 57 nt, Human
gggcuucgugucuucaacaggugucucaaacuugcagcucuugggcccaaagggccu

SEQ ID NO: 4131498 - RNA, 59 nt, Human
gggcuucuagaccagcagugaggcccuuaaaagccacagcccacugacacaaggagccc

SEQ ID NO: 4131499 - RNA, 69 nt, Human
gggcuucugaaguguuugaugauugaguaagugaauguccagcccucaaaccacuuccaggauuugccc

SEQ ID NO: 4131500 - RNA, 88 nt, Human
gggcuugacuauaaguggcacaguccagacuccuggaguugccccugggguaacagcagggaugggguggccagugcagugugggccc

SEQ ID NO: 4131501 - RNA, 64 nt, Human
gggcuugauaaauguugaaauagcugcuaucuauaguuauucaucagugcauuaauuucagccc

SEQ ID NO: 4131502 - RNA, 80 nt, Human
gggcuugccuucuucccuccuaccacgugaaaaguaugcugugacuagcuuauuggucccaggaggagaaugggcagccc

SEQ ID NO: 4131503 - RNA, 55 nt, Human
gggcuugcugucuugcauuucugccauugccacgagaaaaacacgauauaagccc

SEQ ID NO: 4131504 - RNA, 72 nt, Human
gggcuuggggaccuggguuucucuugcaggggaugggcaugcucugggcaggagcccuggacucugcagccu

SEQ ID NO: 4131505 - RNA, 57 nt, Human
gggcuugguggagagaaugcugugaucaugcgucaaaaaauucuaaucaucuggucu

SEQ ID NO: 4131506 - RNA, 71 nt, Human
gggcuuguauuaagcuuagagaggcagguugcucaccaaauuuagcagguuuacugaguuugaauagggcc

SEQ ID NO: 4131507 - RNA, 71 nt, Human
gggcuuguuccugccaagcugguaugagguugaugaccugcagcacaguuugcuuggcagagcaguugucc

SEQ ID NO: 4131508 - RNA, 59 nt, Human
gggcuuuaaucuuguuaacuagggaggagccacuguguccuaauaaucuuuuaaagccc

SEQ ID NO: 4131509 - RNA, 64 nt, Human
gggcuuuauguguacuuuccauuuuaucacacagaauguugaaaagauaaguacucaagggucc

SEQ ID NO: 4131510 - RNA, 82 nt, Human
gggcuuuggagauguaggcagguggaggagugaaggcccaaggauggcucuucagcccuucccuguuuucaucagccagccu

SEQ ID NO: 4131511 - RNA, 79 nt, Human
gggcuuugggcugcagcuggagcaucuucucaucuugcauuuggguguggugggguccuccagugugggauccaugucc

SEQ ID NO: 4131512 - RNA, 126 nt, Human
gggcuuuuuaguuguauggguuguccucagauaacaauggccuuguuucauuacacgugguccuggcugggaagaaaagacacuacagugugauaagaggggccuugggggaccugaccugggccc

SEQ ID NO: 4131513 - RNA, 75 nt, Human
ggggaaaagacuagcauuuauauguacauaauaaaaauaaucaacguggcauaauaaugacuaguuuagaaaccc

SEQ ID NO: 4131514 - RNA, 62 nt, Human
ggggaaacugaggcucagcgugaggaaaggccucugcuuggaucacucugaagccuuacccc

SEQ ID NO: 4131515 - RNA, 75 nt, Human
ggggaaagaagggaggaggagcaaggcugguuuucauccaagccugggcaacuccauucacuguguucaguuccc

SEQ ID NO: 4131516 - RNA, 71 nt, Human
ggggaaagaaucugaauugccuggggaccuuuuaaaaauguaggucuccaggcccacugauuuauaucuuc

SEQ ID NO: 4131517 - RNA, 58 nt, Human
ggggaaaggccauggcaagaaccacgagccucuguggggcuaucugcucaccuuccuc

SEQ ID NO: 4131518 - RNA, 56 nt, Human
ggggaaauaaaaagcuggaaugugaucuacaccuguaccuucagcaguguuucucc

SEQ ID NO: 4131519 - RNA, 103 nt, Human
ggggaaauuuuuaaaaauauguagggcccgaucccacuuaaaccauuuaaaacaaacugucuggggaugggaguugggcuucgguguuuuuugaaagcucccu

SEQ ID NO: 4131520 - RNA, 94 nt, Human
ggggaacugggcuaauaagugacucacuagcucucagugacugccuuuguccugggguguaagcuuugagucagggugguggugcagauucucu

SEQ ID NO: 4131521 - RNA, 69 nt, Human
ggggaagaacugugacagaagcaguuucacagccuauauguguacuucuuuugcuuaggguuuguuccc

SEQ ID NO: 4131522 - RNA, 65 nt, Human
ggggaagaaugcucucuagagaauucucuuuguccucugaaguaaauagagaucaugucuucccc

SEQ ID NO: 4131523 - RNA, 60 nt, Human
ggggaagaauggcagaaaacaucaccagagaagccagugaaaaacaugccauucuuucuc

SEQ ID NO: 4131524 - RNA, 62 nt, Human
gguugaccuacauggacuacaucagugggcagcauggccucuggcuuccaguggguucaacc

SEQ ID NO: 4131525 - RNA, 73 nt, Human
gguugacuuagcuaaacuguaacuagaauucucagaauucucuuccuuguacaguucuaaguuaggguuggcu

SEQ ID NO: 4131526 - RNA, 129 nt, Human
gguugagagggaaaugacuacagugguaaauaaggcggaaucaggaugacugucauuucaguaagaauuuauugaacgcauaacuuuguucucagcacuauuggcacuguacaaauuccagggaagacu

SEQ ID NO: 4131527 - RNA, 62 nt, Human
gguugagccaggguuuccggcugcugccuuagcaacagcagaggagcgauggcugcccagcc

SEQ ID NO: 4131528 - RNA, 97 nt, Human
gguugaggcaggaaggcaggaggaagcgugggucuggcuggagccucacaaucaaagccucuguucaguuguaccuuccccucuucccuccuccacc

SEQ ID NO: 4131529 - RNA, 72 nt, Human
gguugauggugggcagguagugaugucuuagauaccaaggaugacaucaccacuacaaacaucauugugacc

SEQ ID NO: 4131530 - RNA, 69 nt, Human
gguugauguggaaguucugguguuugcauguuuuggugcugauaauuugcugacuuucaguuauuaacc

SEQ ID NO: 4131531 - RNA, 102 nt, Human
gguugauucuaccacucucuuuagucaacaguaauggcauugccaugacuauuagucgugguuggauauacuuugcuagaaauggggguuauugaauuggcu

SEQ ID NO: 4131532 - RNA, 66 nt, Human
gguugcaagggauaggggaugaggguccuaaccuauccagaggccuccuguuccauucccucaacc

SEQ ID NO: 4131533 - RNA, 76 nt, Human
gguugcaauugacuguucacugucuaugcccaugcauuuuauacaaggcugggcaguaugaauauucaaagcaucc

SEQ ID NO: 4131534 - RNA, 59 nt, Human
gguugcaauuucuggaacuaauucugacaaacuauuguuggaagaauagagauugcacu

SEQ ID NO: 4131535 - RNA, 82 nt, Human
gguugcccagcuuccuuugguuggagcgccgucuccuggccagagaaugugaagcucagccaaaggagaucuuugggcuucc

SEQ ID NO: 4131536 - RNA, 70 nt, Human
gguugcccaugggagugguugacuugaaagcauauuuauguauugacuuucucuccucccaggugucacu

SEQ ID NO: 4131537 - RNA, 124 nt, Human
gguugccgcuggucuuccuuauuuuaguguuuucgugauacucaggcuguuuuuuccuuguuuaugaccugacugggaaagugcugccugcagcugaugauuaacucugggaggccuggcaucc

SEQ ID NO: 4131538 - RNA, 98 nt, Human
gguugcuaaugauauuuuuccaugugggacucuauaagucuugacuggaggguagagggcagagagaguccugaguggaaaaauggucaggagagauc

SEQ ID NO: 4131539 - RNA, 104 nt, Human
gguugcuguaggccuuuguuuucuagagugacaacaaaguugguucugacaguuuggcuuguuuauucaguguuucaguuuggaaaugagagcuuggagcuucc

SEQ ID NO: 4131540 - RNA, 69 nt, Human
gguugcugucaagguuacaugcuuucucuuccauaugcagaaagcuucaccugcuggcaggucucagcc

SEQ ID NO: 4131541 - RNA, 81 nt, Human
gguugcuuaacagagagaaguguugcuuaacuucccagaaaccauuugagcugauacuacuguucuauuauaaaugcaacu

SEQ ID NO: 4131542 - RNA, 61 nt, Human
gguuggaauuugaacggaagucuuuuuuucacaaauauaagacuucaugggucaaccaauu

SEQ ID NO: 4131543 - RNA, 65 nt, Human
gguuggauggucuuggcucggagucuccaugaaauuacaguuagauaucagcuggggcugcagcc

SEQ ID NO: 4131544 - RNA, 86 nt, Human
gguuggcggaucgcagggguugagagaacguaugcuguuuuguagacccgcggccagcagcagggcucugcccgugcauccgcucc

SEQ ID NO: 4131545 - RNA, 97 nt, Human
gguuggcuggggugggguuggugggacuuguguggcaguauuugcacaauccugagagauccuccaccugcaagaauucccccaauacccagugacu

SEQ ID NO: 4131546 - RNA, 69 nt, Human
gguugggagucacuguuguugaggguggucaaagaauuuguuuccccacaaggcauguggcuuugggcc

SEQ ID NO: 4131547 - RNA, 56 nt, Human
gguugggauuuggauuccucuggagccacagagguguugggagccaggagcccacc

SEQ ID NO: 4131548 - RNA, 61 nt, Human
gguugggucucucugucucucccugggucgagagcugagaggaaagaauauagaugcaauc

SEQ ID NO: 4131549 - RNA, 63 nt, Human
gguuggugagugcaggguguuaaggaagagaacggcuccucucuggccaccugcgucccagcc

SEQ ID NO: 4131550 - RNA, 74 nt, Human
gguuggugcaaaaguaguugugguuuuugccauuacuuuuauggcaagaacugcaauuacuuuugcaccaaacc

SEQ ID NO: 4131551 - RNA, 80 nt, Human
gguugguuuuugguguuagcuucacucuccuaaacccugcaacacaauaggaagcuuagugaaaggaccacauauuaacc

SEQ ID NO: 4131552 - RNA, 86 nt, Human
gguuguacacuguacaacuccagggaacacuauucacaucaaagacuuuaugaaugacuuuuccuguaguugugcaauguacaacc

SEQ ID NO: 4131553 - RNA, 97 nt, Human
gguuaaaguucaacccaugccuuucccaacaggguggguccacagggauuaguggccucugcuggggacaggccacucaggucacugggcuuugauc

SEQ ID NO: 4131554 - RNA, 62 nt, Human
gguuaacaguuauucuggggauucagauggagguugaacuccagagcucacaugucuaaacc

SEQ ID NO: 4131555 - RNA, 125 nt, Human
gguuaacuagugcagaaauuucuagccaugagaucaaagccaugagagauuuguuaauaaaacguagagaauaauauaaucuuuggcucugguccauugguccucggcauacugccucucuaacu

SEQ ID NO: 4131556 - RNA, 87 nt, Human
gguuaaggagcuuaacucugauuagcucaaguuaagcuugcagucacauagcagguuguugagaaucuagaggcuauacucuuaacc

SEQ ID NO: 4131557 - RNA, 60 nt, Human
gguuaauacaugggugugcuuuaucuguccgcuaccuggauauuaacaucaguguuggcc

SEQ ID NO: 4131558 - RNA, 60 nt, Human
gguuaaucuauuaugcugagaaacugucucuggggucacagcuuccuggcauggagaacc

SEQ ID NO: 4131559 - RNA, 85 nt, Human
gguuacgaggagagcugaggggcugcuggguccgccccuagccgccuggggauggacucagcuggccgcucauguccccucuucc

SEQ ID NO: 4131560 - RNA, 82 nt, Human
gguuacucauugcugaggcacugguaaugggcaugagaauuuuggcuaguuuaugcacuauauaccauguuuuuggguagcc

SEQ ID NO: 4131561 - RNA, 78 nt, Human
gguuacucuaaagacuaggaucuugguuucucagucaguauuauuaggaauucuuugaucuuaaucuugcguguaacc

SEQ ID NO: 4131562 - RNA, 117 nt, Human
gguuacugcugaaggugucagggugagggcggccugggugggcugcagcuuccucuugcucacagccuggacaguugccuggacuaaggaagcugacaucuucaccaucccaaugcc

SEQ ID NO: 4131563 - RNA, 129 nt, Human
gguuagcuugcuuuuugguuuuccaccaagugaggacacggcauuccaucccuccagaggaugcaguaaugaagcaccauacuggaaguggagaguggcccucuucacacaaccaaaccugccagcacu

SEQ ID NO: 4131564 - RNA, 95 nt, Human
gguuagguuaaugagugucauacagaaugcauaaguuaaaacugaaucuucgguauccuauuccuguguaugucuugcugccuuauaauuuaacc

SEQ ID NO: 4131565 - RNA, 78 nt, Human
gguuaguuuaauuuuucagcugugaauugagaacaaacuauccuaauacauaguguuuugaagaauuaaacauggacu

SEQ ID NO: 4131566 - RNA, 61 nt, Human
gguuauaaggaacaggagucauucaagguacuaugaauucaacuugcugggcuuuguuacc

SEQ ID NO: 4131567 - RNA, 63 nt, Human
gguuaucaguacguuuguagaugcugccaaaaucuuuuggcuccaaaucaacugcuguuaacu

SEQ ID NO: 4131568 - RNA, 76 nt, Human
gguuaugacacuuuacuguuuacagcuaaugcauaguuacuugcaugccaugguuguacaguagcagacuaugacc

SEQ ID NO: 4131569 - RNA, 71 nt, Human
gguuauggggaugggauaugguagguagaauaaugcccucccaaaaugugcauguucgaauccccagaacc

SEQ ID NO: 4131570 - RNA, 82 nt, Human
gguuauguucuagacuuuugcugugaaacugaguguguaaaauuugcuauuccuucuccacugcaguaacucuaggacugcc

SEQ ID NO: 4131571 - RNA, 72 nt, Human
gguuauucauugugcuaaaguaauaagucagcucauccuuugauuuuaucuguuguuuuaguacaauugacc

SEQ ID NO: 4131572 - RNA, 70 nt, Human
gguuauuuucauuggcucagacugggcaaaguuuugccugcagguuuuuggugcucuuggagaauuaauc

SEQ ID NO: 4131573 - RNA, 69 nt, Human
gguucacaagaguuacagacagacacuuugcuguuuuuauuucagcaguuugugguuacugugugagcu

SEQ ID NO: 4131574 - RNA, 60 nt, Human
gguucacagguccgacugcuggucacaguuauccguggcugucggucauccuagugagcu

SEQ ID NO: 4131575 - RNA, 67 nt, Human
gguucagagguaaaaacucacuguauuugauucucacaucaaauuucugaggucuuaccauugugcc

SEQ ID NO: 4131576 - RNA, 78 nt, Human
gguucagguaugagauaaaucaaugaaccccuugaaguggaauuggguuguuugaacacuaauuuuaagccauggacc

SEQ ID NO: 4131577 - RNA, 97 nt, Human
gguucaggucuguuccaugcauggucaugcugggacuaauucggauaugcuuaucaugacagcaguucgccagugugcaugcaggagggcaugagcc

SEQ ID NO: 4131578 - RNA, 64 nt, Human
gguucagugcugcccuccccagcaggaaguggguuaguggacuugcugggaacaggauugaauc

SEQ ID NO: 4131579 - RNA, 75 nt, Human
gguucaguuacaugcucaugucaucauugucccauagcaauuugaacaugcugcaugauaauuauuucuugagcc

SEQ ID NO: 4131580 - RNA, 78 nt, Human
gguucauccauauuauagcauguaucaauccuucauuccuuuauuuggccgaauaauauucuguuguauggaugugcc

SEQ ID NO: 4131581 - RNA, 77 nt, Human
gguucaugaaguuuguuagaaucagaagagagguauuuuuucagucuagcuuuucugacucagacuaguucguagcc

SEQ ID NO: 4131582 - RNA, 77 nt, Human
gguucaugcagacccaggauccaaauguugccugguaucuugucuggaguaauauuucuacccugcugccuuggacc

SEQ ID NO: 4131583 - RNA, 82 nt, Human
gguuccaagucuuugcuacugugaauagugccgcaauaaacacaggugugcaugugucuuuacagcagcaugacuuauaauc

SEQ ID NO: 4131584 - RNA, 82 nt, Human
gguuccaagucuuugcuauugugaacagugccacaauaaacacgugugugcauguggcuuuauaguagaaugauuuauaauc

SEQ ID NO: 4131585 - RNA, 83 nt, Human
gguuccaccauauuggucaggcuggucucaaacuccugaccucaggugauccaccagccucggccuccuaaagugcugggauu

SEQ ID NO: 4131586 - RNA, 68 nt, Human
gguuccacugcuaacuugcugcagcuuacugggugaucuguaaauaaaaagggagguggcgguggucc

SEQ ID NO: 4131587 - RNA, 64 nt, Human
gguuccaggcauggcaggauguagaaguuaacauuuguuggagacuguuuugcuuccuggaauc

SEQ ID NO: 4131588 - RNA, 58 nt, Human
gguuccaggguuggaugagucacuuaguaaaucugagugaccuaacucccccucuucc

SEQ ID NO: 4131589 - RNA, 66 nt, Human
gguuccagucucucccagaggagcagcguuuuccugucuuuggcuucucugagacacucuggagcc

SEQ ID NO: 4131590 - RNA, 56 nt, Human
gguuccccgcagccuugguuuaugguuaaauauuacagaggccccgugggagagcc

SEQ ID NO: 4131591 - RNA, 89 nt, Human
gguuccgauaacuuugcugggaggaguuugaaaaccuugcuuguugaaacccaguuucacaauuuccuugcuucacuuugcaaagagcc

SEQ ID NO: 4131592 - RNA, 55 nt, Human
gguuccucagcccaugacagauggaaggcgcuauauucaaaggcaaggaggaacu

SEQ ID NO: 4131593 - RNA, 61 nt, Human
gguuccugggguuuagagggaagugagcagagcugcucccuggccuacaggcccagagacc

SEQ ID NO: 4131594 - RNA, 74 nt, Human
gguuccuugagcacagcggcuucaggaggggaucgggacagcucccuuugauaagcguaacugugcucugagcc

SEQ ID NO: 4131595 - RNA, 63 nt, Human
gguucuaagacagcaugauaggccucuaggccuggccuggacucuggcucaguguugcuuacc

SEQ ID NO: 4131596 - RNA, 113 nt, Human
gguucucgauccuugccucagaccuaguaaaucagaagcuguggggugcagcucagcccuuugucuucacagguuuccuaggccauuuugacacaggcuaaaguuuaagaacc

SEQ ID NO: 4131597 - RNA, 56 nt, Human
gguuucuauguaggauuuugguaacugaaucgguuuccucaucuagcacagaaauu

SEQ ID NO: 4131598 - RNA, 55 nt, Human
gguuucucaacagaguaugcccuugacaucagguaugaaucucuggugggaauuc

SEQ ID NO: 4131599 - RNA, 59 nt, Human
gguuucucaccuucagcacuacugucauuauggacuuugcuggggaaacgugagaagcc

SEQ ID NO: 4131600 - RNA, 71 nt, Human
gguuucugggauagggucugagaauuuaaauuuccaacaaauucucaagugauccuguugauucagagacc

SEQ ID NO: 4131601 - RNA, 62 nt, Human
gguuucugguucacagagcuuguucauggccucccugaggcuaucgacucugugcaggcucc

SEQ ID NO: 4131602 - RNA, 74 nt, Human
gguuucuguuccuuguauucagcaucuuaacuaaaauauuagaaugaaauguugaaugcaguuugauuagaacc

SEQ ID NO: 4131603 - RNA, 85 nt, Human
gguuucuuacuacagaugccuugggauauauggacacuggcauuaccugcugcaacagguccucucccaggguacugcugagacc

SEQ ID NO: 4131604 - RNA, 59 nt, Human
gguuucuuacucacuuaugcuuuauucauagagagggagagcauacaucauaagaaacc

SEQ ID NO: 4131605 - RNA, 73 nt, Human
gguuucuuuuauuaggccucuaccuuugggaucaaaacugcuaaauuccaacagaaacaugaucaaaggaacc

SEQ ID NO: 4131606 - RNA, 61 nt, Human
gguuugaagccuaggaccaauaggcuauacaauauagucuagauguguacuagguuauacc

SEQ ID NO: 4131607 - RNA, 72 nt, Human
gguuugcaugugauguugggcaacagguuuauuuggcuacauucaugcccacauccacuagacaugcacacu

SEQ ID NO: 4131608 - RNA, 69 nt, Human
gguuugccuuccugcccagcuucugugacccagggggcagcuggacggcugggcaggggucuggggacc

SEQ ID NO: 4131609 - RNA, 79 nt, Human
gguuugcucauugacaucacagauugugaauaacuaugagaaaagggcucauaguauucaccuguggcuuaaguagacu

SEQ ID NO: 4131610 - RNA, 59 nt, Human
gguuugcugcagugagacucacugauacaguuucauucaguagaagcacuaggcaaacu

SEQ ID NO: 4131611 - RNA, 97 nt, Human
gguuugggacuccuaccuguccgccugguccagguaaggaaagccauugcugagaagagggccgacccaccccaagguaugaguuauuucccaaacc

SEQ ID NO: 4131612 - RNA, 59 nt, Human
ggggagggacuuggucuggggcccacagaaaggcuggacaccagagucaugucuccccc

SEQ ID NO: 4131613 - RNA, 73 nt, Human
ggggagggaggcccaguggagggccauggcacaugaccugguucugcccugccagugggcucagccccucucc

SEQ ID NO: 4131614 - RNA, 61 nt, Human
ggggagggauuuucccaaaauaagaagcaggggauucagauucugggacuccuuccucccc

SEQ ID NO: 4131615 - RNA, 66 nt, Human
ggggagggcacgaaacaaccacuucuggaggcauucauccaaggaggguuacacugugcucucucc

SEQ ID NO: 4131616 - RNA, 76 nt, Human
ggggagggccaggcggagacaggcgaggccaacagagccccugccaccuugccugcucucucaccugccccgcccc

SEQ ID NO: 4131617 - RNA, 78 nt, Human
ggggaggggaacauggcaaagaaccugcugugaagucugucuuuaugccuccagaucuugcuuacauuuucucucucc

SEQ ID NO: 4131618 - RNA, 55 nt, Human
ggggaggggauaaggggcccgggggcaggugccucugagccagggucuccucccu

SEQ ID NO: 4131619 - RNA, 66 nt, Human
ggggagggguaaagagaaagugaaacuggagggagggagguuucugcuucucagacccugaacccc

SEQ ID NO: 4131620 - RNA, 94 nt, Human
ggggaggggugaggggggcguuuguucuucaggagccccuucuccacuggcagcccuggcuccugaggaccaggcacagucuucaccucucuuc

SEQ ID NO: 4131621 - RNA, 64 nt, Human
ggggaguaagucagugcuagcuaauggcuaagagcuuggccaaggcuauacacugguggccucc

SEQ ID NO: 4131622 - RNA, 130 nt, Human
ggggagucgcccaagcccgcuucugacccaggagggaggaguuccugagggcucccuugcuccccugcccucaggcagcuguucccuccuugugucuuuggcggaggcccugggcugagguguguucucc

SEQ ID NO: 4131623 - RNA, 74 nt, Human
ggggagugaaguaaggccuucuugagcaugaauuuuagcccaaauuuauuuucuggacagucuugcuuuucccc

SEQ ID NO: 4131624 - RNA, 59 nt, Human
ggggaguuuacagccuagcgcuuccuacuugcuuugcacacuggucugucaugcucccc

SEQ ID NO: 4131625 - RNA, 57 nt, Human
ggggauacuguaggccugaaucugccucguccuugaauuagguuggacaguaucccc

SEQ ID NO: 4131626 - RNA, 65 nt, Human
ggggauaguggauuggggagcaaauaagagaugaagaagucuuguguccuuaaugcaauguccuu

SEQ ID NO: 4131627 - RNA, 56 nt, Human
ggggauauuugagcagaugcaguugaauuugaaaacucugaacacaauauaucccc

SEQ ID NO: 4131628 - RNA, 57 nt, Human
ggggaugcacgaaggcgccucggagagaccccuuucuccgggugcccacgugccccu

SEQ ID NO: 4131629 - RNA, 62 nt, Human
ggggauggaauguaguagugaucuugauaccccauccaauucacucuccuauucauuucccu

SEQ ID NO: 4131630 - RNA, 130 nt, Human
ggggauuccagacgaggcuggaguuggaagacagagggcauggccgggaggacgaccucggcugcagcgguggcuguggagccuccugggcuccugucugcaccccugguccuggcuucacaaacagccc

SEQ ID NO: 4131631 - RNA, 77 nt, Human
ggggauucugacacagcuugagguggccuagggcacaagcuagagucaugagacccuuugggucugugcaggacccc

SEQ ID NO: 4131632 - RNA, 70 nt, Human
ggggauuuaagauacaccaagagccuaguagaaauuugcccaggauucuuggguauuaacagccuuccuc

SEQ ID NO: 4131633 - RNA, 105 nt, Human
ggggcaagaaaagacgaacuugagcauacacagcccacgagcuacacuuauccagaaauacagcacccucuugagugcgcuuggguguucuagugauuucucucc

SEQ ID NO: 4131634 - RNA, 64 nt, Human
ggggcaaggcuggguaaccuguccacugccugaugucagaguggcagagaccccagccagcccu

SEQ ID NO: 4131635 - RNA, 108 nt, Human
ggggcacacgagagcugagcagucacuuccuuccuugugugugagacugacuucugucuauaagcagggggauggaguugaaaugccugcucaucuuuuauguguuuc

SEQ ID NO: 4131636 - RNA, 73 nt, Human
ggggcacaggaagccgagggaggugauggagacggcgaagggugcucugguccucccucggcgccugcguccc

SEQ ID NO: 4131637 - RNA, 81 nt, Human
ggggcacugcagggagggcccuccucuuucuagcugaggucaccgaggugcagagagguggagggacuuucucaaagucuc

SEQ ID NO: 4131638 - RNA, 55 nt, Human
ggggcagaaagcccacagagugcccagccugccucugugugugccccccugcccc

SEQ ID NO: 4131639 - RNA, 56 nt, Human
ggggcagacgcgagcaccggggcagagagacccacugccuggagucgcgcugccuc

SEQ ID NO: 4131640 - RNA, 69 nt, Human
ggggcagagaggaagggguuaggggucccugagucagcucaggcagccccgccccuccccaccuccucc

SEQ ID NO: 4131641 - RNA, 62 nt, Human
ggggcagaggaaggcuucaccugcaaaguagacacuucugggccauggccuuccucagcccu

SEQ ID NO: 4131642 - RNA, 56 nt, Human
ggggcagagucuggacuguugucuuccagcuccaagcacagcacuccuuuuguucc

SEQ ID NO: 4131643 - RNA, 62 nt, Human
ggggcagauagcagaggccuuauuacguauuucucucuugugauaaaacucuaaucuggccu

SEQ ID NO: 4131644 - RNA, 59 nt, Human
ggggcagccagccaggcucagggcaggaagcugcugauucugggucacuuggcugcucu

SEQ ID NO: 4131645 - RNA, 64 nt, Human
ggggcagcccagaaggagcuguuggguggcgccagcaaccaggucuccuugugggucuugcccc

SEQ ID NO: 4131646 - RNA, 65 nt, Human
ggggcagcuccuguggaauccacuccuaaguggcgcucacucggugguuccacuggcagugcucc

SEQ ID NO: 4131647 - RNA, 76 nt, Human
ggggcaggaggcaggugcauuuugagcucuuccuaaaguggacuccuuugcuuugcacuucucgagcuuucucccc

SEQ ID NO: 4131648 - RNA, 73 nt, Human
ggggcaggcucuuuggggggauuuuccuaagcuggacugcaggcuggcuucccagcagagggcgcacugcccc

SEQ ID NO: 4131649 - RNA, 90 nt, Human
ggggcaggcugggcaggagaaggcugcacacggaaccucagugaguccccauggccugccuccuccuggugccacccaaccgccugcccc

SEQ ID NO: 4131650 - RNA, 86 nt, Human
ggggcagggaaugaaagcggcgcuugagacuggaaauuuagggagaugaguuccuugggaacaacgcugaaccaucucacugcccc

SEQ ID NO: 4131651 - RNA, 73 nt, Human
ggggcaguuauagcuucucccuuuccuauugguuagcaacucugaccagggcccgggagagcucuccaguccu

SEQ ID NO: 4131652 - RNA, 55 nt, Human
ggggcaguucucuauucugugcacugucugcccacugcaggguguugacuguccc

SEQ ID NO: 4131653 - RNA, 81 nt, Human
ggggcaucuccacugcucucagaaacacaacuuuguacacacgccaaauugcuuuugggggcaguuacagcagagauccuc

SEQ ID NO: 4131654 - RNA, 62 nt, Human
ggggcauuuggugagacagaaaucaaggguuuggcuugggaccugauauguuugaucacccu

SEQ ID NO: 4131655 - RNA, 68 nt, Human
ggggccaaaacauucucugcagcagggccugcccugugcauuggaggguguuucacaucccuggccuc

SEQ ID NO: 4131656 - RNA, 87 nt, Human
ggggccaagcagggcucccuggggacucggggcuggggaaggaaagccccaaaggcuggagucugcgguuuggaguccugugacucu

SEQ ID NO: 4131657 - RNA, 60 nt, Human
ggggccacacagggcagcucccucugagcuuucgagauuuggagggugacccugagcccc

SEQ ID NO: 4131658 - RNA, 62 nt, Human
ggggccacagcagggaugaauggaguggacacgucgcuucucugugauuuguugcaggcccu

SEQ ID NO: 4131659 - RNA, 78 nt, Human
ggggccagcagggugcuuccguggagcugucuuuguuuaugucuucagcaagcggccugugaaagccccuccaguccc

SEQ ID NO: 4131660 - RNA, 67 nt, Human
ggggccagucugggccacggucgggacccaguggagggccggacuggucaggguucaggcgggaucc

SEQ ID NO: 4131661 - RNA, 114 nt, Human
ggggcccauguguguggcaugggacugggauugcugggcucuucaacacacaguuucugggagccuguggcuguugaggaccccaagugccccagaauggccucgcuuggcucc

SEQ ID NO: 4131662 - RNA, 68 nt, Human
ggggcccauuuggucauugggcugggggggcagaguccucucaggcucaaagggccggaugagguccc

SEQ ID NO: 4131663 - RNA, 85 nt, Human
ggggccccuauucaguaagauugaauugcagccuuuggaaggccugucuguuucugauucaaccuuaguugcagggugcagcccu

SEQ ID NO: 4131664 - RNA, 85 nt, Human
ggggcccugggagaggcugcuccgcucucaaucccgcaaccgcggucccggagggcccugggcuucugccuuucccgcgggcccc

SEQ ID NO: 4131665 - RNA, 71 nt, Human
ggggccgcucaggaggugcuaggauuggccggugcagacguggagcugcaguguuggaccucagggguccc

SEQ ID NO: 4131666 - RNA, 68 nt, Human
ggggccggggaccccugccgcgcccccguacccggacggggauggggcgaggaggggugcugggcccc

SEQ ID NO: 4131667 - RNA, 59 nt, Human
ggggccgggggacugggcuucauguuauucuucaaaggaaagacaccagccucugcccc

SEQ ID NO: 4131668 - RNA, 80 nt, Human
ggggccugagauaauagcaggcagguuuugaaaccaguagacuugacuuuaaagguucugcugcuuccaaguuaggccuu

SEQ ID NO: 4131669 - RNA, 55 nt, Human
ggggccuggcagcucagguggcucugcaccuucuguccuugagcuaagggacccc

SEQ ID NO: 4131670 - RNA, 112 nt, Human
ggggccugggggagacgagggagucccccucuguccccagugcaggccugggacugcacuaauuccgcauuggguggcagcgcaggacccccguccccucccccaacgcccc

SEQ ID NO: 4131671 - RNA, 60 nt, Human
ggggccugggggcugggcucugccacacagucaccuaccagagcuggccugccaggcccu

SEQ ID NO: 4131672 - RNA, 82 nt, Human
ggggccuguaggauggcacacaggucugcaagggagacugagcuuucuaccuuugccuggagacuucugaugccuuugcccc

SEQ ID NO: 4131673 - RNA, 93 nt, Human
guagcuaucuguggcugguaauugcauguuugaaaaguaacucacaugaaauauuagacaggcaauacuaacuagucacucaaggauuuuuau

SEQ ID NO: 4131674 - RNA, 64 nt, Human
guagcuccacauggcugggaggccucagaaucauggccugaggcaaaaguuaugugguagcggc

SEQ ID NO: 4131675 - RNA, 59 nt, Human
guagcugccuuucuggcccaggaccacaccaugagugggcagacuaaggucaaagcugc

SEQ ID NO: 4131676 - RNA, 104 nt, Human
guagcuggggagagugggguucaagcagggcagggagcuuagaaugacccucaggguccucaguguaccauugcugaaguugacaacucccucuuuccaccugc

SEQ ID NO: 4131677 - RNA, 60 nt, Human
guagcugugcagagguuuggcuuaagauccaaauacuauagcucagccgggcacaguggc

SEQ ID NO: 4131678 - RNA, 56 nt, Human
guagcuugaagaagauuguagagcagagcugcaguacaauugauggcuuaaguugc

SEQ ID NO: 4131679 - RNA, 80 nt, Human
guagcuugcuccuauuuuuuucugauuggagucucuuuauuaaaagaauuguuuaauuugaaaugaguaacccaaguuac

SEQ ID NO: 4131680 - RNA, 74 nt, Human
guagcuuguuaaggaugcauauuauaauaucuaaagaaaacacuaaguuguaaaauauugcauaacaagcuaac

SEQ ID NO: 4131681 - RNA, 59 nt, Human
guaggaagcucugaggcuaguugauuuuucaucaucuuuagauagccuuuccuuucuac

SEQ ID NO: 4131682 - RNA, 73 nt, Human
guaggaauucacaguuacugcugaaccauuauauuuaauaaaacacaauguguucuuuuauugugaauuucac

SEQ ID NO: 4131683 - RNA, 63 nt, Human
guaggaauugugggggaaaaaaugcaaucaacaaaagccucuucuucccucaggauguccugc

SEQ ID NO: 4131684 - RNA, 76 nt, Human
guaggacacccagucagcugccggacacucagguaaggagguacuggagccaaacugucugagugacugggucugc

SEQ ID NO: 4131685 - RNA, 69 nt, Human
guaggagaacaggacacagucaucccuauucucaaggauacagaaaacuucuggguccuguucuuuuac

SEQ ID NO: 4131686 - RNA, 96 nt, Human
guaggagaauaagcacuuccuggggccagcacugugccuuugugggcauccuaaaccugggagggcugccguggccuugggagcugauacucuugc

SEQ ID NO: 4131687 - RNA, 78 nt, Human
guaggagaggugagagguacaaguucaauucaaaucaacaaguaacuuuugagcagguguaucggucaccuacaauau

SEQ ID NO: 4131688 - RNA, 81 nt, Human
guaggagauaggacccauguaggagaaugcauuucaaaagcacauucugaauaguucuacuacuugacacuuauuuuuugc

SEQ ID NO: 4131689 - RNA, 70 nt, Human
guaggauaaacuggguaucaagaggccuauauguauagacuuccugaauaagaccuaguuuuuaaucuac

SEQ ID NO: 4131690 - RNA, 80 nt, Human
guaggaugucaaggauuuaggauuuuauucuaaucccaggaggaaucuuaaaucggaaucuuaagucuauuuucauuuac

SEQ ID NO: 4131691 - RNA, 69 nt, Human
guaggcaagagugugacacccagagcccacugggagugaacuggcugguguuacagucggcagcgcugc

SEQ ID NO: 4131692 - RNA, 62 nt, Human
guaggcacugcagaaagaagguuugggcaaguuucaagucuguuucauugcauguuguuuau

SEQ ID NO: 4131693 - RNA, 55 nt, Human
guaggcagcuuagguuagaaguguuggggaccccacuuuuaagagggcagccugc

SEQ ID NO: 4131694 - RNA, 72 nt, Human
guaggccacuggacagacccuacuucguccuaaaguaaggugaaggccaaaagacgggcuuccagggccaac

SEQ ID NO: 4131695 - RNA, 62 nt, Human
ggguacaauuuauggcuguaaagaaugagguuuaucuuaacagacauuccauaauguacacc

SEQ ID NO: 4131696 - RNA, 80 nt, Human
ggguacagaggagguggaauuccaggaauugagggagcaaaaccauggcacaguucaaggaauguuggcuucucuggcuc

SEQ ID NO: 4131697 - RNA, 74 nt, Human
ggguacauucagaauugggaggcaaugaauugauaacugacacaaccuuuuugucauuccuuucuaauuguccc

SEQ ID NO: 4131698 - RNA, 90 nt, Human
ggguacauugucucucaccugcuguccaggagugcccugugggacucaccaggagguacaucuugugauggauguugaaacaagaaaccc

SEQ ID NO: 4131699 - RNA, 86 nt, Human
ggguaccaggcuggggggcggggggagcuggaaugaauuaacgccauuaaugucuggaaaccaccccguuucuccagaaacugccc

SEQ ID NO: 4131700 - RNA, 71 nt, Human
ggguaccuggccaggccccuugcagggcagaaccucaggugaaugggccucucagggucuggccggguccc

SEQ ID NO: 4131701 - RNA, 71 nt, Human
ggguaccuggccaggccccuugcagggcagaaccucagguggauaggccucucagggucuggccggguccc

SEQ ID NO: 4131702 - RNA, 75 nt, Human
ggguacugggccugggagggcagacgcugagggcagagcaagggcccuggagucagaacccaggcuucuaguccc

SEQ ID NO: 4131703 - RNA, 77 nt, Human
ggguagaaauggcaauguggcuuauuuggaggauuguauauuuuguuuucuagaauguuccaccuuguuuccuacuu

SEQ ID NO: 4131704 - RNA, 81 nt, Human
ggguagacaagagacagagaguaaauggugauguuagaguaauaggauguuaacacaggacucucugccuuaguuuugccu

SEQ ID NO: 4131705 - RNA, 58 nt, Human
ggguagcugcacuuugccaggaaaaugaggaguaagccuuccagaguucagucugccc

SEQ ID NO: 4131706 - RNA, 130 nt, Human
ggguaggaugacuggaauagcucugggaguauuuaguuguggacauaggucugucccuuagggccacuuggagggcccaagggagugccuggucaacuugugcaaucccuuugcuguggcuggcaugacc

SEQ ID NO: 4131707 - RNA, 57 nt, Human
ggguagggaaggcucugcggggaugcacuggccgcuucccccuugucugacccuccc

SEQ ID NO: 4131708 - RNA, 78 nt, Human
ggguaggggcagcucgcuuuccugagaaaggagaaggagguccccuucuucuccuaaggagaguccugcccagcgccc

SEQ ID NO: 4131709 - RNA, 55 nt, Human
ggguagggggcagcugggggugauuguccagccucagcugcguguccucccaccc

SEQ ID NO: 4131710 - RNA, 63 nt, Human
ggguauaauguuugggaaggugcuuuguaaacuauaaggggcaauacaaacauguaguacacc

SEQ ID NO: 4131711 - RNA, 61 nt, Human
ggguaucucagaggcucaucugccuugcagguucauugcaggcaaaugaguaucugugucc

SEQ ID NO: 4131712 - RNA, 100 nt, Human
ggguaugaaaaagacuggguaaaguagauacugugaaauucuuuucuggagugauuuuaucaauuuacucaccagcuuuguaggagaauucaaacugccc

SEQ ID NO: 4131713 - RNA, 74 nt, Human
ggguaugcauuucuggaucucccagcaguccugaggccaggagucuggcuggccauguagagaugauuguaccu

SEQ ID NO: 4131714 - RNA, 87 nt, Human
ggguaugcucucauuuacuguagaacaguuaggauuauuuuucaccuuucacuacucuaguuuuguaguaaauacccucguauaucc

SEQ ID NO: 4131715 - RNA, 57 nt, Human
ggguaugcugcaugcuggggagcuaggucagagacucagacaguuugcagugugccu

SEQ ID NO: 4131716 - RNA, 68 nt, Human
ggguauuuacugugacauucuugguguuggcaaaaaagcuggugacaaagagaaguaacaguaccccc

SEQ ID NO: 4131717 - RNA, 83 nt, Human
ggguauuucugcucuugcugcuucaccuguuguacaguuucccugaucuugugcuaugcaguugggguagcaaagaagugucc

SEQ ID NO: 4131718 - RNA, 79 nt, Human
gggucaauuacagcacaguacuccauuucucuagcuucagugauugguacaaguucuggcaugugauucuaaccgaccc

SEQ ID NO: 4131719 - RNA, 130 nt, Human
gggucaauuuaaauuggucagcacgcuguucuguucugagggguugaggcucucccaaauuaucaucccuaggacugcugcauucauaucagauagaagaggugaaggaccugaauuauauguugagccc

SEQ ID NO: 4131720 - RNA, 66 nt, Human
gggucacaaguuggggcuugggacuggucucucauaugggagugcuguaggacugagcccuugccc

SEQ ID NO: 4131721 - RNA, 55 nt, Human
gggucacugcucuaaacaaaaguagugaucuuaaucaugacugagcagcagacuc

SEQ ID NO: 4131722 - RNA, 70 nt, Human
gggucagagaacgcaaauccaaaccuagaaauaugaaacugccuucuaaagagaaugcguuucugcuccc

SEQ ID NO: 4131723 - RNA, 56 nt, Human
gggucagaucagcgggccaacugggaaagagccagggcccacuggcugucugaccc

SEQ ID NO: 4131724 - RNA, 56 nt, Human
gggucagcgauuucaggggcagucccuuucacugcuuaauccaaccuggcugacuu

SEQ ID NO: 4131725 - RNA, 83 nt, Human
gggucagcggccggccgggcucucgccgagcuaugugcguuggccaccagguuccgggcagagcugaagccaggcagggaccc

SEQ ID NO: 4131726 - RNA, 119 nt, Human
gggucaggggugcaggagcagacaugccuccuagggucccagauaggagccagaaauggccuggcucugagugguaucuugaaaugggggcugccuagggccacugcacccugggaccc

SEQ ID NO: 4131727 - RNA, 59 nt, Human
gggucaggguggggugggguggggcauucuaaucccauggucacccaggcugcuggcuc

SEQ ID NO: 4131728 - RNA, 55 nt, Human
gggucaguuuggagguuuucuggcuaaggcguuggaugagucuacacacuggcuu

SEQ ID NO: 4131729 - RNA, 70 nt, Human
gggucaucgguucgcucauuccacaggcaucugcugagucuucgccaggccugguugagcccugagaccc

SEQ ID NO: 4131730 - RNA, 63 nt, Human
ggguccaagcaagucagggcuucugagggaggcugcugccaagggcucugacuugccugcccc

SEQ ID NO: 4131731 - RNA, 59 nt, Human
ggguccagacacuccagaggaaggucauauuauccuccucuuaaaagaguguauggcuc

SEQ ID NO: 4131732 - RNA, 64 nt, Human
ggguccagcuacaucaggguggguacuuguguccucuucccauacucgccucaauccuggaccc

SEQ ID NO: 4131733 - RNA, 59 nt, Human
gggucccaggacucugacacccccaauggcccuuguagccuuggggaguccugugaucc

SEQ ID NO: 4131734 - RNA, 61 nt, Human
gggucccuggaagucccucuucugaugacccagaaccuucuuccaggccuuccagggaacc

SEQ ID NO: 4131735 - RNA, 72 nt, Human
gggucgguacggggaaguucgguuggccggcaggcugcggcuucggccacgggguuuccuccaauuagaucc

SEQ ID NO: 4131736 - RNA, 73 nt, Human
gggucguggcacccccugguggcugauccuagguagugucacugcccagccccaguaagggagggccuggccc

SEQ ID NO: 4131737 - RNA, 82 nt, Human
gggucuaaguuuauggaugaguuccugaggaguggagaucugcuuccccacucugucaccuacucacuguauccaaggaccu

SEQ ID NO: 4131738 - RNA, 61 nt, Human
gggucucaugcucuuuaaaguauguguuuugcagaaaagaacacauuaugagcauagacuc

SEQ ID NO: 4131739 - RNA, 63 nt, Human
gggucucaugugaccgcugucacugucuucuaugggacacuguucugcauguaccugaggccc

SEQ ID NO: 4131740 - RNA, 76 nt, Human
gggucuccugggagguccccagagggucuccugggaagucagccaagaggcccuggguuagggcccacugagaccc

SEQ ID NO: 4131741 - RNA, 88 nt, Human
gggucucgcucucuugcccaggguggagugcaguggcgugaucucggcucacugcaaccuccgccucccagguucaagagauucuccc

SEQ ID NO: 4131742 - RNA, 55 nt, Human
gggucucugagugaggaccugggcccgguaaccagcccuggccuguuucaugccc

SEQ ID NO: 4131743 - RNA, 78 nt, Human
gggucucuucuggcaaggcaagccuggcuuguacucucuguggaaacuuaacuagccauggcugcagcuagagggccc

SEQ ID NO: 4131744 - RNA, 85 nt, Human
gggucucuugaggaaggggagcuaaaucuacuguaaaucagaugugagccugguccaguaguucccuuugccucacugaaugcuc

SEQ ID NO: 4131745 - RNA, 83 nt, Human
gggucugaagggacaauugugcuuccuggguuguagguuacuugguuuuaacagcuuuauugagguauaauugauaucccccc

SEQ ID NO: 4131746 - RNA, 62 nt, Human
gggucugaaugucuaaaaagaauuggcuuaaauuuuagcaauuuaguuugagacauuagccu

SEQ ID NO: 4131747 - RNA, 55 nt, Human
gggucugaggaguaccauuguccuauagauguuagacagcuguggccuugcaccc

SEQ ID NO: 4131748 - RNA, 79 nt, Human
gggucugauuuauacuucauaaugucuauuuggcugcaaugggucaacagaauugaaggagguaugaguuaaugggccu

SEQ ID NO: 4131749 - RNA, 100 nt, Human
guauguuuaagcacacuuuuaacuuggcauugucuucuacuguucuguuaauaucuaggaggggagcugaacugcugaaguuggaguugguuuauacugc

SEQ ID NO: 4131750 - RNA, 78 nt, Human
guauguuuuucuugaauagggauugauaaauggaagugcuuaccagcccaacuuugccagccuuaauaagaagcaugc

SEQ ID NO: 4131751 - RNA, 58 nt, Human
guauuacucuuguuugacaauuaauccuaaggauuaaguguauugcugaggguaauau

SEQ ID NO: 4131752 - RNA, 74 nt, Human
guauuagcaagaguugugauuuuaucaccaauagaaaucauauuuuccuguaacauuacggcuguggcugauau

SEQ ID NO: 4131753 - RNA, 62 nt, Human
guauuauuaggugcucucugacaagacaaauguuuucauuggaaauggcuaccuuaugauau

SEQ ID NO: 4131754 - RNA, 72 nt, Human
guauuauuuugaacaaugcguaaaaggugaaggccagcugaagaggccuuuuuguugugaacagaauaauau

SEQ ID NO: 4131755 - RNA, 99 nt, Human
guagggacaggguuuugccauguugccaaggcugguaucgaacuccugagcucaaccaaugagaccagccuggccaacauggcaaaacccugucucuac

SEQ ID NO: 4131756 - RNA, 66 nt, Human
guagggccuuguuaugguagaagguaggguugugcagucuggcagcaagauaacaaugggcccuac

SEQ ID NO: 4131757 - RNA, 93 nt, Human
guagggcuggcagcugugugaagaacugaggugaccagcaucaucuuccuacacauuauuguauucacccaucuuucaguuugucagucuuau

SEQ ID NO: 4131758 - RNA, 70 nt, Human
guagguagaugcaguuucuuucucagaaggcucugugccuuucaaaacagaacacuagcauucuguuugc

SEQ ID NO: 4131759 - RNA, 98 nt, Human
guagguaguuugaagagaagacuuuauauguuuuuggaaagaacacagaauaacugugucuuaaguuccaagacauuaagcuugccaaacugacuuac

SEQ ID NO: 4131760 - RNA, 109 nt, Human
guagguauuugcuuguugaauaaggaauuguaugguugguuacucuuuacggucaaagacucuaacucaugccauugcugaugguauauaauaagccaggaauaaauac

SEQ ID NO: 4131761 - RNA, 73 nt, Human
guaggucacucugggcccuacugggcuugguuccagguugcaguuuggguccagauuuguucuaugugucuac

SEQ ID NO: 4131762 - RNA, 55 nt, Human
guaggugaaguucuggcgagcuguggcacucagcaguuucaggaaguucagcugc

SEQ ID NO: 4131763 - RNA, 68 nt, Human
guaggugagguccaacacaauggguguuacuuuuucagugagcagcaucuccauggaucugaugcuac

SEQ ID NO: 4131764 - RNA, 65 nt, Human
guaggugcaugguagacucucgggucaugggagauuauccucauggcagagucaccugucccugc

SEQ ID NO: 4131765 - RNA, 83 nt, Human
guagguggcuggcuggaggugaggaagaauuugcuauucaaccagcagacauuuauccugucuccuccaugccaggcacaggc

SEQ ID NO: 4131766 - RNA, 75 nt, Human
guagguguagacuucccacugcagugacugagccuaggggacuuugccagugacaaagucggaaguccugucuac

SEQ ID NO: 4131767 - RNA, 55 nt, Human
guagguguuccuaaacugguugccauuugugcuccagauuuguaggggcucuuac

SEQ ID NO: 4131768 - RNA, 87 nt, Human
guagguuugcucuguguccccagagccgguggugcucacagcgcugcuagaggggucuguguacugcucuggggaggccagcaccuc

SEQ ID NO: 4131769 - RNA, 70 nt, Human
guaguaauaagggagguugugguacagucaucaaucacccucuuggaacugcuccaaaaccuccaucugc

SEQ ID NO: 4131770 - RNA, 75 nt, Human
guaguaauuagcacuugggaguauuuauuuauuuauuaaauauuuauugauuaaauacugcaggcuaagcacuau

SEQ ID NO: 4131771 - RNA, 58 nt, Human
guaguaauuguuuuaagccaccagccuguaguccuguggugguuugcgcaauugguau

SEQ ID NO: 4131772 - RNA, 58 nt, Human
guaguacagugagacaauguuuuccuucuucucugaaaauaaugcaaucacugucuau

SEQ ID NO: 4131773 - RNA, 81 nt, Human
guaguaccuagcucauucugagacuucaguaaauauugguuaaaugagagacugcaggaauucaaagugagcugaugcugc

SEQ ID NO: 4131774 - RNA, 57 nt, Human
guaguacugcuauuggaauagagucaagagccuagccauuuccaguagcuguaucac

SEQ ID NO: 4131775 - RNA, 61 nt, Human
guaguauacagauaugggcggaaaugguuauucaguuucugugugugccuguuaauauuac

SEQ ID NO: 4131776 - RNA, 93 nt, Human
guaguauucaaggaagauccugagcugcagaagggguuuuccugaugcaaacuggcaggaaaaaaucuuuggcucaagguuagccuaugcuau

SEQ ID NO: 4131777 - RNA, 90 nt, Human
guaguauuccaugauauggaaguaacacaguuuguuuaaucauuuucccacugaaagauaucuguauuguuuccaauuuuuggcuacuau

SEQ ID NO: 4131778 - RNA, 84 nt, Human
guagucaauaauucugagcgaaaaauauuuccuucaaaggaggauuauuuccuuaggaugaguuuuugcguuuggaguaacuau

SEQ ID NO: 4131779 - RNA, 70 nt, Human
guagucauuggugucugggguaaccgagaaccucaggauguggagggagucuagcccagagccuggcuac

SEQ ID NO: 4131780 - RNA, 64 nt, Human
guagugauuguuccucagggguuaugcuuuacacagcucggauuuccuaaaagauaaucauuac

SEQ ID NO: 4131781 - RNA, 69 nt, Human
guagugcaggggcaggcggcggggacaggaccaagacaaacaaaguuuccccucuuccucugacacuau

SEQ ID NO: 4131782 - RNA, 56 nt, Human
guagugcggggguaacuucucaugcaaacggugucugagauaaauuuccuuacuac

SEQ ID NO: 4131783 - RNA, 93 nt, Human
guagugcucaauuaauauuuguggaauuaaugcauaugaauuacaacuguggucaggauaauuacguucuacaagcauugaucuaguagcuau

SEQ ID NO: 4131784 - RNA, 104 nt, Human
guaguggcacaugccuguggucccggcuacucgggaggcugacgugggaggaucucuugagccuggguggucgaggcugcagugagcuaugauugugccacugc

SEQ ID NO: 4131785 - RNA, 60 nt, Human
guagugucugaguuuggaaaguccagagagcucuggaauucugaacagcucaguuguuac

SEQ ID NO: 4131786 - RNA, 78 nt, Human
guagugucugguuucugcugucugaauauauugaguauaaucugauuauauugaguauaaccagagaaaugcaacugc

SEQ ID NO: 4131787 - RNA, 71 nt, Human
guagugugaaguuuuagccaugucuguggguguugauuuguuccaauguaguaucuaaaugcuuacauuac

SEQ ID NO: 4131788 - RNA, 70 nt, Human
guaguguggggaucguguaaguauaaguaccaaucacauguguacaugucuacaugcauuuuugcauuac

SEQ ID NO: 4131789 - RNA, 59 nt, Human
guaguuacuguuuguucaauuugcuuuguucaggaaguaucucaaaaacaguaaucugc

SEQ ID NO: 4131790 - RNA, 59 nt, Human
guaguuagaguugugcuggagaugacgggaaaccuggauuagcacagacuuuugcuuac

SEQ ID NO: 4131791 - RNA, 70 nt, Human
guaguuagcacugucagcaagccucuagcacagucuauguguauauuaguggaaugauaugaagaauugc

SEQ ID NO: 4131792 - RNA, 63 nt, Human
guaguuaucaucauacuccagaccaauacuucucaucugugucuggguuauuaugauggcuac

SEQ ID NO: 4131793 - RNA, 63 nt, Human
guaguuauuuuacauggaaguuugcuguaggaauguugcuaacuucuuugugggcauaaguac

SEQ ID NO: 4131794 - RNA, 99 nt, Human
guaguugguccagggucacacagcucguagaggacaugaguacaaucugaauccaggcagucuaucucuggagccucuguguguuccuaaccacucugc

SEQ ID NO: 4131795 - RNA, 106 nt, Human
guaguuucauaaauauuuuccaaagaugucacaagaugugaugacuauacuaugaauuuacuuaaaagcaacacguuuuugauauugaaaacuaugugaaaacuau

SEQ ID NO: 4131796 - RNA, 96 nt, Human
guaguuugcagcgucaggcagcggguccgcgcccagcgagcggcuccccagcuccugggaggaugcggacccgggacgcccccgugagcucacugc

SEQ ID NO: 4131797 - RNA, 67 nt, Human
guauaaaggauuugacuuuuccucuccagcugucuggagaacagcacaggaaguguaucuuucaugc

SEQ ID NO: 4131798 - RNA, 64 nt, Human
guauaaaguagaaaaaugggaaauuggacauuucaacuucacuucccauuucucugcuuuagac

SEQ ID NO: 4131799 - RNA, 71 nt, Human
guauaagcccauucucagagacacaccucacaucugauguuuggggaccaucaacucugagaguuuuauau

SEQ ID NO: 4131800 - RNA, 95 nt, Human
guauaauacggucagauucuaagugggcacauuuaucauuaugaaaaaagcauuucuagaauguguuauuucagaauccaguacuguaaacaugc

SEQ ID NO: 4131801 - RNA, 121 nt, Human
guauacacggucaugggguuugggcucuggguucagaugccugcauuuaaaucuuggcucccuuauggaugagcaaugcaaucuuaaccuugacugcucugugccucaguuccacaucugc

SEQ ID NO: 4131802 - RNA, 60 nt, Human
guauacaugugguaaaaugcacccauuuggaguguucagagaguuuuggcagauguuuac

SEQ ID NO: 4131803 - RNA, 75 nt, Human
guauaccaagguuuauuaaaaguugauggcagcuugaaaacuagugcugaccugacagugguagccuuggcagac

SEQ ID NO: 4131804 - RNA, 96 nt, Human
guauaccucaaaauccucaaacauuugacuucucucaggcucuucuuuuucagaucugucaucagucaaggguuugagggcuuuggggagguauac

SEQ ID NO: 4131805 - RNA, 74 nt, Human
guauacuuacuuaucacagccuuuuggugagggaacaauuucacuguucucuccuauugugugguaaggaauac

SEQ ID NO: 4131806 - RNA, 69 nt, Human
guauacuuuacaaauuagcucucgggacucuuccaaauggaguuuuaugagggauuugcuaagguaaac

SEQ ID NO: 4131807 - RNA, 55 nt, Human
guauagaagaaaaauggaaagacagaagaagcauucucugucauuucuucuguac

SEQ ID NO: 4131808 - RNA, 86 nt, Human
guauagaggaaacacaugcagcuccauagauaagagcuccuccauccaagguuguguuuucugugugauugugugugucuguguau

SEQ ID NO: 4131809 - RNA, 63 nt, Human
guauagauaagcuaacccaagcccuuuaauaagauuagagaagguaaguagcuugucauguac

SEQ ID NO: 4131810 - RNA, 72 nt, Human
guauagcaaagauuagacauauagucacauagguauauauucauaugaagauauaucugaucucugcuauac

SEQ ID NO: 4131811 - RNA, 76 nt, Human
guauagcacuuuuguagagcucagcauuggcuccauucccagccugcugcuagcuguauugcaagagccagcaugc

SEQ ID NO: 4131812 - RNA, 83 nt, Human
guauaguaguaguguugcucuguuuggggguugcagacauuuaguagucaucaaagccauagaguagauaagauugcccuugc

SEQ ID NO: 4131813 - RNA, 107 nt, Human
guauauaugguauaaagggugauuagacaguguguguauauaugguauaaagggugauuagacuguguguguauauaugguauaaagagugauuagacuguguguau

SEQ ID NO: 4131814 - RNA, 60 nt, Human
guauauauuggauaaaccagaggucuaacuuggagaccuuucugaguaaacaguaaauac

SEQ ID NO: 4131815 - RNA, 87 nt, Human
guauauauuuguuuggaacaagacaaaacauuagaucaucuucgaagauaaguaauggaaaauguccuguucucaggccuauaauau

SEQ ID NO: 4131816 - RNA, 91 nt, Human
guauaugcuccguccucccucagugugcagcagcaucugcuaugaauucauuuucgggcucuacugguauacugcaaaggagagcauaugc

SEQ ID NO: 4131817 - RNA, 119 nt, Human
guauauuaaagggaaugcauaagauucaaaugagggugcauuuagcauguagagggaaugaucgauuccacuauaugccugugcagucuuuguaauuuucaaaauuucauucaaugugc

SEQ ID NO: 4131818 - RNA, 101 nt, Human
guauauucugguuaggauguguucauagcugacgcaucuccaaaaauuuuuucaugaaggcggccagcuccugaacaucuucaauugugacagaauuauac

SEQ ID NO: 4131819 - RNA, 125 nt, Human
guauauuuggaccugauuauuuguucccuggaaaaaucucuucuaucccuuucuuauuuuuaccaaaugcccuaaagguagauucuggaucgaagguucagggaaucuaugaguuccaaaucuau

SEQ ID NO: 4131820 - RNA, 81 nt, Human
guaucacaagaccagugaccccuuuccuauaaccugaauucgaaaauccuccagaguaaaauggguuucuguuuuguggac

SEQ ID NO: 4131821 - RNA, 62 nt, Human
gcuuaguuuuaagccuagaacucaagagccuaggcaucuugaguucuaggcuuaaaacuagc

SEQ ID NO: 4131822 - RNA, 88 nt, Human
gcuuauaaccugggaaggggaaaguugagcaaauauuauggaagaaaaggaaauauagcacugcaauauuucccugacagcugugagc

SEQ ID NO: 4131823 - RNA, 57 nt, Human
gcuuauagauggcuauguucucccuguguuucuucacagggcauuuccucuaugugu

SEQ ID NO: 4131824 - RNA, 65 nt, Human
gcuuauauauaguauaugacuuugcuaaaagucaccuuaauguaaagucacauauuagagugagc

SEQ ID NO: 4131825 - RNA, 73 nt, Human
gcuuaucauuuuuguuggauaccugcuuugcaaauggcuugcuauaaguagacauucaacacugugagauagc

SEQ ID NO: 4131826 - RNA, 73 nt, Human
gcuuaucuuuggaaagugguucaggugacaagaugcccacauuucuuaccuuucuuaacuuauuaaggagagc

SEQ ID NO: 4131827 - RNA, 83 nt, Human
gcuuaugagacuuauucuauuaauauuucuaggaaauuuuagcaauuuucaagggccauuuaauaguguuuggucucauuugc

SEQ ID NO: 4131828 - RNA, 70 nt, Human
gcuuaugcugcucaugcuggggacagauguguguccacacgaguguaacuguaugggagagcaauuaggc

SEQ ID NO: 4131829 - RNA, 90 nt, Human
gcuuauggugugaugugggugaaauuaguauaggcaggguguuuggaauuauguaacuagauaaugcuauuuaccacacaucauuuaggc

SEQ ID NO: 4131830 - RNA, 93 nt, Human
gcuuauguagcucauaauuauagacaaugguuugccaagaaauuccuuuguauuuuuuucagccugucugugccaagagccguacaaaugagc

SEQ ID NO: 4131831 - RNA, 62 nt, Human
gcuuauuuauuuucucguugcucacagcucuggagcugucaucauuugagagaagaaagagc

SEQ ID NO: 4131832 - RNA, 78 nt, Human
gcuuauuucaaacugguugccuccccuguaaaaugccauuuauggcaacuggcugagagggagcuauuuauaguaagc

SEQ ID NO: 4131833 - RNA, 59 nt, Human
gcuucacaacgacaucugguuagagcucagcuuccucugaccaaaacuguugcugaggc

SEQ ID NO: 4131834 - RNA, 94 nt, Human
gcuucaccgcccccgaucccccacugggaguacaaagaauggggcucgugugcugaccguuugcuucuuccaguuggguggguggccuuggagc

SEQ ID NO: 4131835 - RNA, 76 nt, Human
gcuucacugccugacugugggcucuguuugucuugguccccguggcauuaccagagcuuagcagauaaggaggagc

SEQ ID NO: 4131836 - RNA, 59 nt, Human
gcuucagccccuuguugcaugcacagccgaggugcugugugcacgcugggagcuggagc

SEQ ID NO: 4131837 - RNA, 64 nt, Human
gcuucagccugggauggggccugagaauuuguaucucuggcagguucccauguuaugcugaugc

SEQ ID NO: 4131838 - RNA, 76 nt, Human
gcuucagcugacgucaaaacaccuggcucugggcuggaaugaauuacccaagaauuugguuggcuuuagcugaagu

SEQ ID NO: 4131839 - RNA, 70 nt, Human
gcuucaggucugaguagagaaaaggcaaagcccaaauuuggcuacauuucuuuggcagacauuaugaggu

SEQ ID NO: 4131840 - RNA, 77 nt, Human
gcuucaucaccacccugagagguugagugucugcacugggugcggguccuacagccuucucagacucacugggaagc

SEQ ID NO: 4131841 - RNA, 59 nt, Human
ggacgaagaggaugacaggagccggugaacucuuaucaggcaacugcauuacuccguuc

SEQ ID NO: 4131842 - RNA, 79 nt, Human
ggacgggaacagagagguggcagccgagacauaaggcaccuguuccucaggacuugucugccugcaccccugcccugcc

SEQ ID NO: 4131843 - RNA, 58 nt, Human
ggacggggcagccagcugguggccacuaacauagcgccaucugcugggugccccggcc

SEQ ID NO: 4131844 - RNA, 83 nt, Human
ggacggggcaggagaggggcagccagcauuuccugagcgccagcuaauggcggggaccuggcaccuuugcucugugacucucc

SEQ ID NO: 4131845 - RNA, 64 nt, Human
ggacggguggcugaggaggccucucauauaugugguuugguggggccuccucagccccgugucu

SEQ ID NO: 4131846 - RNA, 95 nt, Human
ggacgugaaggaaacacaggggcguggcucuuacucucuauuugugugugugcaugucccguggcgagucacguguccuguggggccuucacucc

SEQ ID NO: 4131847 - RNA, 88 nt, Human
ggacgugcacccuggccauggaccccgagcugaccucggccccucccugacucgguugcucucagguccaaggccacugcugcugucu

SEQ ID NO: 4131848 - RNA, 83 nt, Human
ggacuaaaauuuaagcaucuauagguucuaggagaugauucauuuucuugcguuuccuauccucuagaggcuguuuauauucc

SEQ ID NO: 4131849 - RNA, 125 nt, Human
ggacuaagucaugccuaaggucacuugguugauacauagcacaguuuagguuuggauucugggcaugucacuccugaguuaguugcugugucucaguggcagugauaagauagguucaggagucc

SEQ ID NO: 4131850 - RNA, 95 nt, Human
ggacuaauuauugugaguuuguuauuuugaguuauauggcucugaggcuaggugucagucagaguuucaggauacaaauaacauaaucccuagcc

SEQ ID NO: 4131851 - RNA, 63 nt, Human
ggacuacgauagcucaccuuugucacagacuuuggauuucuguacaaguugcuuuugaagucc

SEQ ID NO: 4131852 - RNA, 58 nt, Human
ggacuagaaguauguuucugacauauuccaaauggaauacauucaucacuuuuggucc

SEQ ID NO: 4131853 - RNA, 128 nt, Human
ggacuaggguaaggcaagccagggugcagaauuuaaggaggccuucacucucaggcuugugcaaauucagaagcagcauuaagagugagugccuccuuaauguuugugcccugagugcacccuagucu

SEQ ID NO: 4131854 - RNA, 74 nt, Human
ggacuagguugaaccugcauaagauuucaugugacggaguugugucaagaugaaagauguagccauucuggucc

SEQ ID NO: 4131855 - RNA, 66 nt, Human
ggacuauaaagcggcccagccgagggcaggggcccauccggccugaggcaggugcucgcuuggucu

SEQ ID NO: 4131856 - RNA, 83 nt, Human
ggacuaucuaauaagcaugauuaccgggagcaugucagaacauucuguguauccaugguggucaaugacuuaaaucuacaucc

SEQ ID NO: 4131857 - RNA, 80 nt, Human
ggacuauuaauaaugaaauauuacaguggaggggauguuucacuuaggaaguaucacuuaauaauauuaguuaauagucc

SEQ ID NO: 4131858 - RNA, 71 nt, Human
ggacuauuuuugcuccacaacuuugaagugaccacucaaaugucauuguuuaaaauguagcaagaaaagcc

SEQ ID NO: 4131859 - RNA, 57 nt, Human
ggacucaggcugguguucggaccccuucucccuuauccagacgcaggccuuuggucc

SEQ ID NO: 4131860 - RNA, 67 nt, Human
ggacucagucuugugcuaugugaggccacacaguggaaugguuuacaggguucaagaaugaaacucc

SEQ ID NO: 4131861 - RNA, 68 nt, Human
ggacuccuggggcucauacuccagcccaaucaugaggauuucagcccaguaugagcccccagagugcc

SEQ ID NO: 4131862 - RNA, 81 nt, Human
ggacucugauagagcaaaagucugggaaugccacgggcgagaguugcugaaaucuccaaucuuuucuuuagucccagaucc

SEQ ID NO: 4131863 - RNA, 58 nt, Human
ggacucuguagagguucucauucacaucucauagugcugaaacaaucagacagagucu

SEQ ID NO: 4131864 - RNA, 68 nt, Human
ggacucuucauacagucaucuaauacagcuaauaucaauaaugcucuauuaaacaguauguagaguuu

SEQ ID NO: 4131865 - RNA, 92 nt, Human
ggacugaaauuaugaagggaacaguaaauuuaugcagcacaaauagcauauccaauuguguuauuaaauugcuguucacuuccuuaaaguuu

SEQ ID NO: 4131866 - RNA, 76 nt, Human
ggacugaggcuggagagauaggcauggggucuugugaucaagauagugaagucagucugcuucuagagccaagucu

SEQ ID NO: 4131867 - RNA, 126 nt, Human
ggacugcuggguguuugcccucucccccucccuagucugcucacccuccuuccuggauguuaaugggagagggggugucagcacugcagugugggaggggagaggcgauuucaguccagacaggcc

SEQ ID NO: 4131868 - RNA, 73 nt, Human
ggacugcugucagucaaggcgagcaguccuucuaucuggaggcuccauaugaugcuuuuucuaauagcagucc

SEQ ID NO: 4131869 - RNA, 89 nt, Human
ggacuggauccaccauugcuggcuugaagauagaggagccaagagaggcuccuggguaacagccagcaaggaaaugggaauuuuagacc

SEQ ID NO: 4131870 - RNA, 77 nt, Human
ggacuggccgucccaagaccuggcauccaaguuggcucugcugcuaacucacuaggaaccuugggaaaauccacuuc

SEQ ID NO: 4131871 - RNA, 55 nt, Human
ggacuggucugagagggauucaugauggaagcauguucauucugugaccugguuc

SEQ ID NO: 4131872 - RNA, 87 nt, Human
ggacuguccccugggaggugcagcaaaaaucagaacggagacagaagcucacagucugguuuuagcugccaacuccuauggaagucc

SEQ ID NO: 4131873 - RNA, 63 nt, Human
ggacugugagaaaauaaacuguugcuuaagccaucagucuaugguguuuuguuaaagcagucc

SEQ ID NO: 4131874 - RNA, 70 nt, Human
ggacuguggaggagaaagccugucacuggaaauuacuaacuucucauggacaggaacucccuuggcaucc

SEQ ID NO: 4131875 - RNA, 60 nt, Human
ggacugugugggccgcucacugggaggcgagggccuugacaagagcauucccacaccucc

SEQ ID NO: 4131876 - RNA, 124 nt, Human
ggacuuaguucucauuuuccuccccuguuuucuccggauuguggcuauuguucccugguugcuagaucaaccuggagcacaguaaagcagugucacaaagcuggaaggggucugggaugagucc

SEQ ID NO: 4131877 - RNA, 60 nt, Human
ggacuucaguacuugaugcgagcuauaaaggcugugaagacaucagugccugacaggucc

SEQ ID NO: 4131878 - RNA, 56 nt, Human
ggacuucuauuaauaccucuacucuagcaaccagcuaaguggguaauagaggcucc

SEQ ID NO: 4131879 - RNA, 56 nt, Human
ggacuugagcguuuuuauaaugaacuugaaguucauuauaaacauaugcuaaagcc

SEQ ID NO: 4131880 - RNA, 64 nt, Human
ggacuugaguuugggaguucuguauguuugagggcauccagaagucagaguccuugaccagucc

SEQ ID NO: 4131881 - RNA, 94 nt, Human
ggacuugcauuagagacagaauagcauggcugguuagagccacucucuaaagugggcuggcugccugguuaugccuuuaagugucugugccucc

SEQ ID NO: 4131882 - RNA, 74 nt, Human
ggacuuggcacuggcccuugaaucuauuuaucuuucaaaaaaccggaagauaguuuaaggaacuaugcgauucc

SEQ ID NO: 4131883 - RNA, 59 nt, Human
ggacuuuagcuguaauguguguguguuccauuaucucacacaucacugcacugaauucc

SEQ ID NO: 4131884 - RNA, 74 nt, Human
ggacuuuccaugggcugcuuggcuuccacccagcauagugguuggguuccaaaaacaagcaucccaagaaaacc

SEQ ID NO: 4131885 - RNA, 73 nt, Human
ggacuuuugagcugccuguugaagggucugugggagaacauuccaggcauggggagagccagaucgaaggucc

SEQ ID NO: 4131886 - RNA, 69 nt, Human
ggacuuuuuugaaagcaauggagcacucuuaaucugggcuuagcucuauuacuuucaauaaaaaacucc

SEQ ID NO: 4131887 - RNA, 93 nt, Human
ggagaaaaagaagcuuuuguuuggauuuuacccaaagaaauguccuuugguaacaacccuacaaauccacauagcagguacauuuuuuuuucc

SEQ ID NO: 4131888 - RNA, 71 nt, Human
ggagaaaauggaagacagauaaggcagaaaauaugcuuuacaacuuucuguucuguauucuguuggaaucu

SEQ ID NO: 4131889 - RNA, 62 nt, Human
ggagaaaggcaaaggcugguauggcugcccuggcagugaucuaucaauuuuuucuucuuucc

SEQ ID NO: 4131890 - RNA, 82 nt, Human
ggagaaaggcagagagcaagaugcagggggaacgacgcccuggaaaccggggcccuauuuucacuccuguggccugccuucc

SEQ ID NO: 4131891 - RNA, 83 nt, Human
ggagaaaggcugauacaguuccagaaaaaaauguauaucuaaacuuuaggugaaguuuuuuucuggcuuugcaguaauuaccc

SEQ ID NO: 4131892 - RNA, 78 nt, Human
ggagaaauagggaacuuugggagagggauugagguggaauuuuccugcccuauccuuggauccuguguuccugguccc

SEQ ID NO: 4131893 - RNA, 88 nt, Human
ggagaaaucgcuugaacccuggagguggaggugcagugagcugaaaucgcgccauugcacuccagccugggugacagagcgagacucc

SEQ ID NO: 4131894 - RNA, 128 nt, Human
ggagaaaugggacgcaggagaucuggggucaggggaauguggaucacagggguguguccagaucccuggaccugccacguuugugaucucggaaacaugauuccaucucuccagguuuguauuucucc

SEQ ID NO: 4131895 - RNA, 72 nt, Human
gcuaggaagcacugugcugcuaaguugucaaugaaaaccuuuaauaacccuguauuuacgugcuauccuggc

SEQ ID NO: 4131896 - RNA, 114 nt, Human
gcuaggauucuugauuggucagagaauguuguuaaauacaagauuuuucugggaaaagaaugacuuuuaugauaaucaauguucuuuguucaauuccuggacaaaaaucuuagc

SEQ ID NO: 4131897 - RNA, 57 nt, Human
gcuaggcccagcugggccaggaacaggaacccuguagaaggauccagagggcccugc

SEQ ID NO: 4131898 - RNA, 91 nt, Human
gcuaggcuggucucgaacuccugaccuuguaaucuguccaccuuggccucccaaagugcugggauuacaggcuugagccaccaugccuggc

SEQ ID NO: 4131899 - RNA, 59 nt, Human
gcuaggcuuggcacagguacaggggagagguuacggagugggugugugcagggccuggu

SEQ ID NO: 4131900 - RNA, 94 nt, Human
gcuagggacauuguacugagacauuaugacaaguggaugcugauucaugcccagaucucaaguuuucucauaaucucuuccaauaacacuuagc

SEQ ID NO: 4131901 - RNA, 82 nt, Human
gcuagggagacuugugucaucauccacaaccuuguuucucacuuccugguugggcucaucucugaagaacaggucucccagc

SEQ ID NO: 4131902 - RNA, 87 nt, Human
gcuagggguucaccaaaaguauaggguuuggagucaaauggcccaggauugaauccuaauucuaucacuuacugugcaaccuccagc

SEQ ID NO: 4131903 - RNA, 58 nt, Human
gcuaggugaguuaguguccaggcgugcaaggcgaugggcugcuuccucagcugagagc

SEQ ID NO: 4131904 - RNA, 56 nt, Human
gcuagguugaggaaguucuccuggauaauauccugcagaguauuuuccaacuuggu

SEQ ID NO: 4131905 - RNA, 56 nt, Human
gcuagguuggagaaguucuccuggaugauauccugaagaguauuuuccaacuuggu

SEQ ID NO: 4131906 - RNA, 56 nt, Human
gcuagguuggggaaguucuccuggauaauauccugaagaguauuuuccaacuuggu

SEQ ID NO: 4131907 - RNA, 57 nt, Human
gcuagguuggggaaguucuccuggauuaauauccugcagaguauuuuccaacuuggu

SEQ ID NO: 4131908 - RNA, 80 nt, Human
gcuaguaaugggauaaucuguaaggcugcacugucuguacuggacaguaagugcagacuuacagauuaucccauuacugc

SEQ ID NO: 4131909 - RNA, 84 nt, Human
gcuagugucaugucauauaagagcuuuagagucaguugaguuuagaucuuggcuuucccacuuauuauauguaugacauucagc

SEQ ID NO: 4131910 - RNA, 81 nt, Human
gcuauaauuccauaguacagauccauuaauuaugccuccccugaaagcauaauuaauggaucuguccuaugggauuaaagu

SEQ ID NO: 4131911 - RNA, 78 nt, Human
gcuauagugucaugaaggcugccagcaggcauggagugugagugguuuucaugagugugagugguuuucaugaauagc

SEQ ID NO: 4131912 - RNA, 57 nt, Human
gcuauauaauucucagguuugacuaugucauuaugucacuugcugagauuuaugugc

SEQ ID NO: 4131913 - RNA, 77 nt, Human
gcuauaucuacauuugcuguuuggcuccucuuauaaauaucacucagacuaacagauuguaguguagauauaauugc

SEQ ID NO: 4131914 - RNA, 70 nt, Human
gcuauauuauuggaccacagacuuuaaggccuugggccaaccaccucaauguucuggguuuaauuuuagu

SEQ ID NO: 4131915 - RNA, 94 nt, Human
gcuaucaucaucuucaucaucaucauuaccaucauuaguaguaacaguaggaguauuuaggaugaauagugguaggaugaggaagauguugagc

SEQ ID NO: 4131916 - RNA, 82 nt, Human
gcuaucauggaacccaugcaauucccaguguuucuacuauggagggaaauguuucuggauauuguggguucugugcaucugc

SEQ ID NO: 4131917 - RNA, 64 nt, Human
gcuaucguccagcccuugcagcuucuuuggucaccagaaaaaugacagagggcugacuaauagu

SEQ ID NO: 4131918 - RNA, 57 nt, Human
gcuaucuaccacaucagccagguauuccuccucuagguugaggauguggucaauggc

SEQ ID NO: 4131919 - RNA, 83 nt, Human
gcuaucucuuaacuuauugguauuaucucaaucaaucaugggucauuccauggaauuaauaggggaauacuuaagacuuuagc

SEQ ID NO: 4131920 - RNA, 100 nt, Human
gcuaucucuuauccuagaagaggcuugacaauaugauuggcgguuuauucccccacuaaauagacuaauuagugugucaacagccuuggagugagaaagc

SEQ ID NO: 4131921 - RNA, 95 nt, Human
gcuaugaacugggauaucuucaugaggguaaucuacaaagguuuacaucuuucuuuguguuuuuccuuuagauuauguugacaguuacguuuagc

SEQ ID NO: 4131922 - RNA, 102 nt, Human
gcuaugaccaagugucagaaacagggaaggcauccgcgaauguccagcuauguggcaugaauguguugcuuucucuuuuccuaaucaggucccaaaaguggc

SEQ ID NO: 4131923 - RNA, 85 nt, Human
gcuaugacugcggacuuaaagaauguggcucagccaugaaggauugcuucuguaugaacccauauacuuauugcaggcacaaagc

SEQ ID NO: 4131924 - RNA, 55 nt, Human
gcuaugcaggagccuaaugacaaggacuuucucucaucauggugaccugccuagu

SEQ ID NO: 4131925 - RNA, 62 nt, Human
gcuaugcauugaauccuaucaggcaaauugaagaaaauuuagcaaagguaggguucagaagc

SEQ ID NO: 4131926 - RNA, 56 nt, Human
gcuaugccaugcuauuucaucaugugaccuucacccagcugaagaugcauggcagc

SEQ ID NO: 4131927 - RNA, 80 nt, Human
gcuauggauccgagagccccaccugugcgucugccgcagagguuggcugcagcccaggcgucaggugguuuggacauagu

SEQ ID NO: 4131928 - RNA, 80 nt, Human
gcuaugggaacacaggaguguccugagugaggccuggcccagggcuggguggcucucugucagugacagagccugugggc

SEQ ID NO: 4131929 - RNA, 68 nt, Human
gcuauguuggccaggcuggucuugaacuccugaccucaggugauccacccgccucggccucccaaagu

SEQ ID NO: 4131930 - RNA, 66 nt, Human
gcuauuaaggguguugaucagagaggaugaagaugguuaucugucuuuagcaccaccccaaacagc

SEQ ID NO: 4131931 - RNA, 100 nt, Human
gcuauuaccauaaaucuuccaugaacauuuguuuagaagucuuuauaugcacauaagcauugaaaguuuuucuuagauaaauacuuaugaguggaauggc

SEQ ID NO: 4131932 - RNA, 65 nt, Human
gcuauuauugccugauaaaggcucggagccugaggcuggccuuuucuuucacaggcaagauuagc

SEQ ID NO: 4131933 - RNA, 67 nt, Human
gcuauucaaagugcgaggucagggcuggaugcagaaucaccccuguaaucuuagcacuuugggaagc

SEQ ID NO: 4131934 - RNA, 72 nt, Human
gcuauucaggaaagaguguauccaucaauccauguaaugugacgugaugaguuuacucuuuucuaaaguggu

SEQ ID NO: 4131935 - RNA, 72 nt, Human
gcuauugccgaaugccaccacagagaauuuccccgcagagugaaggcugugcucuggcaucgcugcaauggu

SEQ ID NO: 4131936 - RNA, 82 nt, Human
gcuauuugagauuaugggguuugucuugugaugcagacauuccaaguuuaccuguuuacagaaggcagacuuccagaguagc

SEQ ID NO: 4131937 - RNA, 63 nt, Human
gcuauuuucaguuagcaugugaaagaugacacugucuggcuuucacauuuacuguuagauggc

SEQ ID NO: 4131938 - RNA, 74 nt, Human
gcuauuuuguuuguucagaaguuuaaagaauugcuuuucaguauuucaacugugcucugaauaaauuaaguugc

SEQ ID NO: 4131939 - RNA, 82 nt, Human
gcuauuuuuuaucccuuuuuucauuaaagcaagguuguuuaugugcauuuuuguucaccucaaggaugggagagagaagagc

SEQ ID NO: 4131940 - RNA, 74 nt, Human
gcucaaauacaaaugcucuugggaaaggcaguauguuaagcuuuuaucaaucauuaagacauuugugguagagu

SEQ ID NO: 4131941 - RNA, 55 nt, Human
gcucaaauguguguguugaaugaaugaaugaaucaugcugacagacaucaugagc

SEQ ID NO: 4131942 - RNA, 95 nt, Human
gcucaagaaauagacuuacacuugcugaaguuaaugcuugcaaggcuaaacuugaagcaauuuuagacacagaguacaaagagucugcaaugagu

SEQ ID NO: 4131943 - RNA, 55 nt, Human
gcucaagaucaucaauauaccaaaguagcauauguugguguagcauauuuugggc

SEQ ID NO: 4131944 - RNA, 67 nt, Human
gcucaaggaggccugggcuggaagggaggggagcugagaagcccccuggguccaggcuucucugggc

SEQ ID NO: 4131945 - RNA, 63 nt, Human
gcucaaguguguagggccaagagccacaaaauuacuaggcuguggccaacaaaccacuuuugc

SEQ ID NO: 4131946 - RNA, 60 nt, Human
gcucaauacugcugaaccuuugcuagauaaugucccauuauccaggcucagacagagggc

SEQ ID NO: 4131947 - RNA, 57 nt, Human
gcucaaugaggugauugcuguccucugugaagaugaaggcaguuaaacgucaucugu

SEQ ID NO: 4131948 - RNA, 57 nt, Human
gcucaauucaacacaugcacauugccacuuggguaaauacaugcagugaauugcagu

SEQ ID NO: 4131949 - RNA, 79 nt, Human
gcucacacauacaauagguguccaauuaacaauuguugcaugaauuguugcagaggucaccugugacccuugggugggc

SEQ ID NO: 4131950 - RNA, 63 nt, Human
gcucacagagguacaagcuaaguugggggaaagguuagcauccaaaaugugugcuuuuugagu

SEQ ID NO: 4131951 - RNA, 60 nt, Human
gcucacagccuacacaguagauucuuaggagacaggaagacaaucugugugcugugcugc

SEQ ID NO: 4131952 - RNA, 65 nt, Human
gcucacaugcacacugcaacaaggacuggcauccuucauccauguuuagaggguguauauggagc

SEQ ID NO: 4131953 - RNA, 84 nt, Human
gcucacaugucuggggagggccaaugugucccugagcucguacuaggcggccuguggguguuuggcucucucacacgugagagu

SEQ ID NO: 4131954 - RNA, 78 nt, Human
gcucacaugucugguggucgaugcuacaggucagcugagacuuuagcgagacugucaaccaccauaccgacauguggc

SEQ ID NO: 4131955 - RNA, 115 nt, Human
gcucacuaacgcaacuuguuuuaaauacagaaguuugaauuuaagcacugauguuaaguuugagaucaaacuuugugcuugacuucuagcuauauggcuuaagacguuaguaagu

SEQ ID NO: 4131956 - RNA, 71 nt, Human
gcucacuagcaguccugccugugguuagcacuuccgaaagcgagugccagcuuguggucagaggcuugagc

SEQ ID NO: 4131957 - RNA, 60 nt, Human
gcucacucugagugagaaguccugggcuagaguccccaggcaaggucuccuagagagagu

SEQ ID NO: 4131958 - RNA, 61 nt, Human
gcucacuucuacauuauugccuuucucaugcuacuagcaggcacugaaugugucagugagu

SEQ ID NO: 4131959 - RNA, 94 nt, Human
gcucacuuuguuuuguuucaugauguagugacuuggcagagauuguaaaacucuuuucaaaauuucacugcauaaacguaucaaggauuugagu

SEQ ID NO: 4131960 - RNA, 60 nt, Human
gcucagagagaggauauguuauggcucaaugacuagaguuuucauuccccaucucugagc

SEQ ID NO: 4131961 - RNA, 75 nt, Human
gcucagagaggcugguaaagucugaacugauuucggaagaguucucugguauccucuuuucuagccuuuaugggc

SEQ ID NO: 4131962 - RNA, 60 nt, Human
gcucagagauggggaaugaaaacucuagucauugagccauaacauauccucucucugagc

SEQ ID NO: 4131963 - RNA, 57 nt, Human
gcuuaccagcuuccuucaagauguguauuuauauaaauuggugguggguuggggagc

SEQ ID NO: 4131964 - RNA, 89 nt, Human
gcuuaccaugaugaccccuugagguagacugaacaccuuacagcagacucaagacacaggugugacucgcccucagggacacauggugc

SEQ ID NO: 4131965 - RNA, 78 nt, Human
gcuuaccucuguaucacuucaugcuuuugccauuggucaguauaaaccuaugucagaagcuggaugacagcucuuugc

SEQ ID NO: 4131966 - RNA, 78 nt, Human
gcuuacucugugcuaggcaaugugguagauauuugaaauacaaacgugaaccaggcacauuuccuacacauggcaagc

SEQ ID NO: 4131967 - RNA, 62 nt, Human
gcuuacuugaaugcugugaucucaucuaggcuuggauaccugggaucacagauucacugggc

SEQ ID NO: 4131968 - RNA, 127 nt, Human
gcuuagaaaaaagaagccuuaugcacuacauuuuuaguuuuaugaauugguauaaugagggauaugauugauugaucuucauauucacugagcauaaagccagaagaaaugggcuuaaaagucaggc

SEQ ID NO: 4131969 - RNA, 91 nt, Human
gcuuagaaacuccagaaaagugugaaugacuuauucugauucuacuuuagacagauaaagaaacaaucacagauggaggacuuuucugugc

SEQ ID NO: 4131970 - RNA, 59 nt, Human
ggaaguguggcuaagccaagaaggagaggugccuuauaaaucuuggcuuucauuuuucc

SEQ ID NO: 4131971 - RNA, 62 nt, Human
ggaaguguuuccuugggcagcagagccaggcuccuuaaugacugcuucagcugagcauuucu

SEQ ID NO: 4131972 - RNA, 70 nt, Human
ggaaguguuugugcagauggccaccugagucugucaccuccaggcauagccaaugacaaguaucacuucc

SEQ ID NO: 4131973 - RNA, 91 nt, Human
ggaaguuaaaaugaaacaguguguauagcaaaaaccuugccuuguaaauugacuuuugugccuauacaugcgacugguuuuauguaacucu

SEQ ID NO: 4131974 - RNA, 61 nt, Human
ggaaguuauugcagcaauccaaguaacagauaacaguugccaggguuguaguuguaaagcc

SEQ ID NO: 4131975 - RNA, 59 nt, Human
ggaaguucuagagguugauuuggucuuuccuucaagggcugucuaauaugguagcuucc

SEQ ID NO: 4131976 - RNA, 56 nt, Human
ggaaguugcaagggguggauuaaggaaaauagcccgucuuuuuaauugcgauuucc

SEQ ID NO: 4131977 - RNA, 80 nt, Human
ggaaaauggacgugugucucaugguagccgcaguuuaaguaaacauaaacucugaaccagagaucauacccgccauuucc

SEQ ID NO: 4131978 - RNA, 66 nt, Human
ggaaacacagggauauauauuccaggccacaaauuuucucccuggaaaauuuaugucuguggaucc

SEQ ID NO: 4131979 - RNA, 66 nt, Human
ggaaacagugagaacuuuuccugaaaggggcugcuccacugcagggaaauguuuucgguguauuuc

SEQ ID NO: 4131980 - RNA, 86 nt, Human
ggaaacauaagaaagcuccagggaugagacagaguagcucaguugcacagaguucaucucaugcugugggugaaucucuugauucc

SEQ ID NO: 4131981 - RNA, 80 nt, Human
ggaaacugagggacaguguggugauggcacuugcuccagggguggagcaaggauuggaauccacugcccccuugguuucc

SEQ ID NO: 4131982 - RNA, 114 nt, Human
ggaaacugcuauagaauaugugagcagcagcagaaacccagcaaagccaaggggaagagguagcccuggccuuggccuuuucugcuccucucccucccauagcaagagcauucc

SEQ ID NO: 4131983 - RNA, 71 nt, Human
ggaaacuguugagcugaggucaggaugggguaaaugaaccauuucccacuucaucccagcucagauauucc

SEQ ID NO: 4131984 - RNA, 68 nt, Human
ggaaacuuacuuacucacauuucuggagucuagaaguaaagaucagagugccaguauggugaguuucu

SEQ ID NO: 4131985 - RNA, 102 nt, Human
ggaaagaaaggagagaggaugagaagaagggaggaaggaaauaaaaacauuaucaggauauuucuuugcaacucccauuuccauccuucuuuuguucuagcu

SEQ ID NO: 4131986 - RNA, 87 nt, Human
ggaaagaagaaaggaaaggaagaagggaggggaguuaguugagucuaacuaugucccagacacuuuaucuuauuucauuuucauucu

SEQ ID NO: 4131987 - RNA, 64 nt, Human
ggaaagaagggucuuguuuauauaaggugguuuaaaaugaauccaccccuacaaggccuucucc

SEQ ID NO: 4131988 - RNA, 60 nt, Human
ggaaagaccugagauaggaauaaucuagguagcuuuaaauguuccuguucucuaggaucc

SEQ ID NO: 4131989 - RNA, 81 nt, Human
ggaaagacgccucugagagcggucuguggcuucacauuuauuauugaugcaggcuucagcagcccucucuugggcauuucc

SEQ ID NO: 4131990 - RNA, 82 nt, Human
ggaaagagaguauggaggauggaauuugcuuccuaaaaacuuucaccaggaaaacagcacacaucacuucugcucauauucc

SEQ ID NO: 4131991 - RNA, 65 nt, Human
ggaaagagcaaaugagaugugaauuacagggugacgaggcuuguaugaaucucauuuguuuaacc

SEQ ID NO: 4131992 - RNA, 57 nt, Human
ggaaagagcuaaaagggugagauugccacaacacucccgccacuggggacucugucc

SEQ ID NO: 4131993 - RNA, 77 nt, Human
ggaaagagggagcaaguagcaacucucaggacugcaggaauccaggcugacuuuaggcccugccugucccucuuuuu

SEQ ID NO: 4131994 - RNA, 100 nt, Human
ggaaagagucugugcuagggcagaagaguggggugcagucucccagagcugaaauagcaccuuaacucugcugcgugauccuuagacauuuaaucuuucu

SEQ ID NO: 4131995 - RNA, 83 nt, Human
ggaaagaguucucugcgaggcugacauauacaaccugcaucucuucuuacagaucauuugugcugucagcaugcaguuuuucc

SEQ ID NO: 4131996 - RNA, 56 nt, Human
ggaaagcaccuugcgcuguacuagucacagccuagacagcagcaaucugucuuucc

SEQ ID NO: 4131997 - RNA, 85 nt, Human
ggaaagcagcagaggucagaaagguacaagccgcuaaauuagaaagaccaguccugaaugccuaaauuugccucauuugcuuuuc

SEQ ID NO: 4131998 - RNA, 66 nt, Human
ggaaagcaggcauuccagagacaauugcuuaaaaugcaauacuuuuggccuggaauguuguacucc

SEQ ID NO: 4131999 - RNA, 70 nt, Human
ggaaagcuauagaguguaagaugauaaggguuucagggauacucauaucucucaccucugguagcuuacu

SEQ ID NO: 4132000 - RNA, 60 nt, Human
ggaaagcuuccauuuuguacauuuuuuacaaacggaaaauaagagaaagggaggcucacc

SEQ ID NO: 4132001 - RNA, 60 nt, Human
ggaaaggagaugaauaggauuaagcuauaaauacagccuggagauugucaucucuuuucc

SEQ ID NO: 4132002 - RNA, 77 nt, Human
ggaaaggcaaaagaggugucaucacagaaguccuauggggaugggugaugaggaaucuuauuaaguuuugcuuuuuc

SEQ ID NO: 4132003 - RNA, 64 nt, Human
ggaaaggcugagacagcacaggucccaaagcccagaggcugggcgugcauuacucagcaaaucc

SEQ ID NO: 4132004 - RNA, 71 nt, Human
ggaaaggcugagccagggccccuauauaaacaagcauacuuguuccaucgggacccuugguuggcuuuucc

SEQ ID NO: 4132005 - RNA, 76 nt, Human
ggaaaggcuuuugacgguugccucucccauauccacacucuccugggaccuagagagaggcaaccaaaguuuaucc

SEQ ID NO: 4132006 - RNA, 60 nt, Human
ggaaaggguuuuuaauuugcucucuaaaccaugugauguaggcagcaauucacccuaucc

SEQ ID NO: 4132007 - RNA, 85 nt, Human
ggaaagguagacauuuuuuaauauaagacaauauaaaaagagauuuucaguuguuucaugaguguaaagggaacucugccugucc

SEQ ID NO: 4132008 - RNA, 65 nt, Human
ggaaaguaacaugcucuugucuuggcuaauucguagcuguuaguugagcaacaccguuuauuucc

SEQ ID NO: 4132009 - RNA, 59 nt, Human
ggaaaguccagggaaagagcgucuuuuaauucagaaaggaggccuugcuggaauuuucc

SEQ ID NO: 4132010 - RNA, 91 nt, Human
ggaaagugugaacagugauuggcuguuugauguucuuaagaaauuauuguuaauuuuucaggugcaguaaucauauuguuauauauuuuuu

SEQ ID NO: 4132011 - RNA, 71 nt, Human
ggaaaguuuucaaagugauacaggauggugauaaaugcacacauguuuacaauucaguauuacagcucucc

SEQ ID NO: 4132012 - RNA, 84 nt, Human
ggaaauaaagaagcugcgugguaugugaacuaucucuauaaagauaaacuguacaccuuacucauaauaacagcaucuauuucc

SEQ ID NO: 4132013 - RNA, 94 nt, Human
ggaaauaaguaggcucugaaucuggggggaaaauaguugucaagaaccaaauauuuggcuuccuguuucccagaaaguguuugcugcuguuucc

SEQ ID NO: 4132014 - RNA, 124 nt, Human
ggaaauaauaauacauguugcuucuauucacaaagaaaggcauguggucaaggcucaaaucaauuggguauggauauauccuuaucuccccauagggauggaagcaaauauuuaaaauauuucc

SEQ ID NO: 4132015 - RNA, 58 nt, Human
ggaaauacggaaacacaugaucagacaucugugaagugacugaaauguguuuuccucc

SEQ ID NO: 4132016 - RNA, 73 nt, Human
ggaaauagccaccaaguucuaauuuugcauucaggggauugucuuccauggacgugaagagacugauguuucc

SEQ ID NO: 4132017 - RNA, 69 nt, Human
ggaaauauaaucuaaguguuuucccagaaggugaggaaacagauuuugaugaacacuuacuauauuucu

SEQ ID NO: 4132018 - RNA, 126 nt, Human
ggaaaucugagauuaaggugucagcagggcugguuccccugaggaccaggaaggagggaucgcuuccaagccccccuuccuggcuuguagauagccauuucucucuguaucuucacaucaucuucc

SEQ ID NO: 4132019 - RNA, 59 nt, Human
ggaaaucuuuugauguuuuuuuccuuucuccugaaaugaugaggcaugagaggguuucu

SEQ ID NO: 4132020 - RNA, 63 nt, Human
ggaaaugaggcagggaggaggcauuugggagggacauuuguuucaacuccugccauuauuucu

SEQ ID NO: 4132021 - RNA, 92 nt, Human
ggaaaugcuugucaaauuccaaguuuuaugcugcaaugguuuuauucagcaaugagcuuggauuuuaagucaagaaagcauguauaauuucc

SEQ ID NO: 4132022 - RNA, 64 nt, Human
ggaaauggccuaauugcauuugcgcaggaacaccaaaucccucgcagcugcacggggcugagcc

SEQ ID NO: 4132023 - RNA, 74 nt, Human
ggaaauguaguucuuauucugggcagccauaugggcagccaucugcccagcuaaaaaugggagguccuauuucc

SEQ ID NO: 4132024 - RNA, 77 nt, Human
ggaaaugugguaaacauuacugugcuguauagcuucuuugguuuuauagagcucaguuguguuuuguaaauauaacc

SEQ ID NO: 4132025 - RNA, 127 nt, Human
ggaaauuauaccuuaauaaagaaaacuaaagcauauguguggucacaaccaauccuugucauuaugccaugaaagccuugggauuugugaucaaagcaaugagcuuauccugaacugugguguaacc

SEQ ID NO: 4132026 - RNA, 79 nt, Human
ggaaauucacauugugcaggucaguuauugcaauuuuaugaacugauuuguaauuuuacgugacacaguuuguguuuuu

SEQ ID NO: 4132027 - RNA, 59 nt, Human
ggaaauucagguuauauuugcaacuaugcucuaguugugagaaugaacacugaauuuuc

SEQ ID NO: 4132028 - RNA, 64 nt, Human
ggaaauugagggagaaaguuggaguagggagccucuaaaccugccuauaaacugccucaaaucc

SEQ ID NO: 4132029 - RNA, 61 nt, Human
ggaaauuucaguggacacgagcucucccgaggaaaggucucacaguuguccacugaaaacc

SEQ ID NO: 4132030 - RNA, 73 nt, Human
ggaaauuugcuuuaguuuagaagauccuccucaauauggcagaaacaaauauuuugaacuagagguaaauucc

SEQ ID NO: 4132031 - RNA, 69 nt, Human
ggaaauuuuagacuccugggucuaaguucuuggcuucagaagcauugggccauaggagcucagauaucc

SEQ ID NO: 4132032 - RNA, 67 nt, Human
ggaaauuuugccauguaagucaauaguguuuaaacuuuacccuauuauuagacuuauaugguagucu

SEQ ID NO: 4132033 - RNA, 104 nt, Human
ggaacaaaggugacauuaguauuucaugugauggucuguuuacucuguauuaaaaugucauaugcuguauacauaugaaauuacugauuucacuucuggaaucc

SEQ ID NO: 4132034 - RNA, 84 nt, Human
ggaacaaauucugaaguugcaggagaagcuuuuggcccuacaggaagagaagcaccagcuuuuccugcagcucaaggaaguuuu

SEQ ID NO: 4132035 - RNA, 100 nt, Human
ggaacaaggugguuccaaggccuuugggggccugguccugcauggguggggugcuggggcuuggccccagaagagcuacuugggagaacuguuuuguucu

SEQ ID NO: 4132036 - RNA, 79 nt, Human
ggaacaaugugccaagaucaaacuuuucuuauuauaaaaggauauuggaaggauaaguuugauucuugccauagcuucc

SEQ ID NO: 4132037 - RNA, 87 nt, Human
ggaacacaaggugaauagacaaggcccccuugggcucuuuaugcaagcacaauguagggagugaguggccuugucacugcuuguucc

SEQ ID NO: 4132038 - RNA, 62 nt, Human
ggaacagacugacuucuugaauuaagcucaaaaacagcggucaggaauuuuguucuguaucc

SEQ ID NO: 4132039 - RNA, 93 nt, Human
ggaacaggauaugcauuuuuugggaguggguaagaauuucugguuagacaagcuccaaauucuuuggccuacuuugaaggcacugccuguucc

SEQ ID NO: 4132040 - RNA, 89 nt, Human
ggaacagguccuugguuucaggagcagggucuguuaccaccucagggugugaccuuggacaugccucccgucucuucugggccuguuuc

SEQ ID NO: 4132041 - RNA, 79 nt, Human
ggaacaguugcacagucuuuccuggacuuacaacguugauacuuuggaagaguccaggcaaguuguuguguagaaugcc

SEQ ID NO: 4132042 - RNA, 84 nt, Human
ggaacauauggaacugagcuugccaaacugggcuuaucaucaagauuacuaucucaguuugggaacacuucagcuagcaugacc

SEQ ID NO: 4132043 - RNA, 68 nt, Human
gcugccugcucacccggccuggcagacucugcaucugcuccacuucacaggccggggaggcuggcagc

SEQ ID NO: 4132044 - RNA, 58 nt, Human
gcugccugcuucaugugggagaagcacagacuuucucaagugugaauugagcagcagc

SEQ ID NO: 4132045 - RNA, 62 nt, Human
gcugccuggagcucagccugccgcccucaccguggaggcuacgcuagaugcccaggaccagu

SEQ ID NO: 4132046 - RNA, 61 nt, Human
gcugccugggcuggcauucccacuuggugugugaaguugggcauguugcuggccuggcagu

SEQ ID NO: 4132047 - RNA, 55 nt, Human
gcugccuucaguucugauucaugcucugacucagacgaaaacaugaacaugcagc

SEQ ID NO: 4132048 - RNA, 87 nt, Human
gcugccuucuccagggugugcaggggaucagguugcagcaccagcagagcaggaacugggcugccugcccccacacccucaggcagc

SEQ ID NO: 4132049 - RNA, 95 nt, Human
gcugccuuuuucagauuucuacuugcauuacuguuuggaaguuguucuucauauuccaugggagaugauggggaguggaaagauaagaagggagc

SEQ ID NO: 4132050 - RNA, 83 nt, Human
gcugcgcacaguguuggcucggcuggcugcccucuccaaccgguggucuggggcgggugagcccggcugaccugagugccugc

SEQ ID NO: 4132051 - RNA, 78 nt, Human
gcugcgcagagccaagggauggaagcucgucugcaaggucagccucagucgccccuugucuguccggcucugucuagc

SEQ ID NO: 4132052 - RNA, 55 nt, Human
gcugcgccggaucccacguuccacucaccgagguugggggucuucacgguguugu

SEQ ID NO: 4132053 - RNA, 55 nt, Human
gcugcggggccggccuaggugccuggacagggccagcugggccucagccugcagu

SEQ ID NO: 4132054 - RNA, 88 nt, Human
gcugcguuggcacacccugcucugcugugcggcccggcacaacucagccaggaaaggcggcaggcugaguccggggaagugccccagc

SEQ ID NO: 4132055 - RNA, 110 nt, Human
gcugcuaugcuggaggagaagggcuggggagguagaauacaccuuuaaggcccagccucugugcuuucccugccuucuuaguaaucccuuucuccuauccagucuacagu

SEQ ID NO: 4132056 - RNA, 68 nt, Human
gcugcucaaaaccagcccucaggucagauacuccagggaugaguguuuacauugaagcuuguagcagc

SEQ ID NO: 4132057 - RNA, 100 nt, Human
gcugcucaucaauuaaugcagaccauggcauugagcauaauaguauuuaacaaacuguaugcuuuccaaaaaugcugugugguuuuucaguuggagcagc

SEQ ID NO: 4132058 - RNA, 57 nt, Human
gcugcucauuuguauccuuuguaguauccuuuguaauaaacaguaaaugugagcagu

SEQ ID NO: 4132059 - RNA, 59 nt, Human
gcugcuccgcagagugugugugccuucuacacgcacgugcagacugugcgggguguggc

SEQ ID NO: 4132060 - RNA, 76 nt, Human
gcugcuccuugguauccgagcucuggaaugucugggcugcaacugacaggaguucagaggacaccccaggggcagu

SEQ ID NO: 4132061 - RNA, 62 nt, Human
gcugcucuggcugggaugagugcacagcagcagaaugucuaagcagccagccagagcucagc

SEQ ID NO: 4132062 - RNA, 83 nt, Human
gcugcucugucauaucuccuccagcacaggccugacucuccaaaucuuuaggcuuucuugaaggggauaugauucuaguuggc

SEQ ID NO: 4132063 - RNA, 66 nt, Human
gcugcucuugaggggcucacugugagaagggcccucagcaaucccauucccaggccucuuugcagc

SEQ ID NO: 4132064 - RNA, 85 nt, Human
gcugcugaccauggggcuggaggggggcagcccucgacucccacuccccgcggugcugcagcucgccuuccggccuggcagccgc

SEQ ID NO: 4132065 - RNA, 81 nt, Human
gcugcugagccccagccugggaacuggaggaagcagucccaguugcugaccucuuguggucccuggcuucgggugugcagu

SEQ ID NO: 4132066 - RNA, 61 nt, Human
gcugcugagccuggugcgggaugcugcgggcaaggaagacaucaucgaguggcucagccgc

SEQ ID NO: 4132067 - RNA, 91 nt, Human
gcugcugaugcuggcggugaucccgauggugugagcuggaaauggggugcuacgucaucguugucaucgucaucaucaucauccgagcagc

SEQ ID NO: 4132068 - RNA, 89 nt, Human
gcugcugcgggacgagucgagcagaaagccgucggggcacacacacguguacccgccgcgcguguuugcacacucgccgugcuggcagc

SEQ ID NO: 4132069 - RNA, 61 nt, Human
gcugcugcuggucuggggccacacucugagaacacagaaaagccugggggugagcagcagu

SEQ ID NO: 4132070 - RNA, 55 nt, Human
gcugcugcuugaaggcucggagccaaaguauaggguucaggaauaagauagcagc

SEQ ID NO: 4132071 - RNA, 107 nt, Human
gcugcuggaaaacugaguggaggccaucuuccuugcuccuugucacuugugggaaaaucuccaaaagcugccauagaacgagagguggaaccauuuaggauggcagc

SEQ ID NO: 4132072 - RNA, 63 nt, Human
gcugcuggacuacaggaagaguuugaucauccauuugcaaacaauuuccgcauagucuagugc

SEQ ID NO: 4132073 - RNA, 56 nt, Human
gcugcuggacucccaccggcagcagggcgcccugcuguccuccugggcccagcagc

SEQ ID NO: 4132074 - RNA, 82 nt, Human
gcugcuggccagggcagcugccagaggccauggccuggcgugggccuggagccccucuggccagccugccaggggccagggc

SEQ ID NO: 4132075 - RNA, 57 nt, Human
gcugcuggcuggacuugugcaugucaggaauccuugagugucauugccaggcacagc

SEQ ID NO: 4132076 - RNA, 92 nt, Human
gcugcugggugccggggcaggagugugaguuugguugagacuuaagaaacucacucuuaagucucaaccucccucaccucgguuuccucagc

SEQ ID NO: 4132077 - RNA, 79 nt, Human
gcugcuguacggagggcccagccggcgagucucgcgggggcuuugcaggacccgggcuguggucacccguacugcaugc

SEQ ID NO: 4132078 - RNA, 73 nt, Human
gcugcugugaguuuuagcuuguguugaauaucuugggaaaaugagcccagaacacaaagcugauuccaguggc

SEQ ID NO: 4132079 - RNA, 65 nt, Human
gcugcugugcaggugccuaugaucaguggauggaaucagggaccacaccuguguacucagcaugc

SEQ ID NO: 4132080 - RNA, 70 nt, Human
gcugcuuagaggacuguuacagaaucaaaaggauuagagaauccuguccugugugacaucacugggcagc

SEQ ID NO: 4132081 - RNA, 89 nt, Human
gcugcuuaggaagcgggaccugugcagcccugcauugucuccagauugcuguuaccaacagguucccacuuccgcuucccgccagcagc

SEQ ID NO: 4132082 - RNA, 73 nt, Human
gcugcuuccugugaagaauagcacucaauuaauaauaguugcauugcuuggucuucaagaucaguaaagcagu

SEQ ID NO: 4132083 - RNA, 77 nt, Human
gcugcuugcacauguugguucuugaaaccuuagcuagaagaauuucaggucauaccaacauguggauaggcuauagc

SEQ ID NO: 4132084 - RNA, 83 nt, Human
gcugcuuggaaggcugaggcagugaggcagaguuugcaaugagccgagaucgcaccauugcacuccagccaaacuacaagagc

SEQ ID NO: 4132085 - RNA, 92 nt, Human
gcugcuuuacuauauugucucucuggaaggcacacuuuggguauuguuugcuagcacaaagagucuuucagagucgccuuguaaaggauugc

SEQ ID NO: 4132086 - RNA, 70 nt, Human
gcugcuuugaaagccauggcaugccaggaucacccuuggugaccaccagcagggccagguugaaagcagu

SEQ ID NO: 4132087 - RNA, 58 nt, Human
gcugcuuugcaguagaguaauagccaaauuagcaauuuuuucucugcuacaaaggagc

SEQ ID NO: 4132088 - RNA, 63 nt, Human
gcugcuuugguaugaauucacuacuuccaaacaaacuaggguuuggaucaugucaaagucagu

SEQ ID NO: 4132089 - RNA, 84 nt, Human
gcugcuuuugggugcuucgucagcucugaggcacgucaaauacguguauuuugcuuucagcguugugugagggacccuggcggc

SEQ ID NO: 4132090 - RNA, 62 nt, Human
ggaagcucagcugugugggcucaucauggaaaugguggaagcuguggcauaacugagaguuu

SEQ ID NO: 4132091 - RNA, 63 nt, Human
ggaagcucugccuagauuucagaggauguauggaaaucccuggauguccagguagaaguuugc

SEQ ID NO: 4132092 - RNA, 82 nt, Human
ggaagcuggggaaaucaguuaggguguuaaugaggcuuucuuugguggcaacuuuaacugagcacucucauucuccaucucc

SEQ ID NO: 4132093 - RNA, 61 nt, Human
ggaagcuucugugcguaggcgaugcaguuugagaggcugaaaacgucacgacgcgaaaucu

SEQ ID NO: 4132094 - RNA, 64 nt, Human
ggaagcuuguuggagcagcccugcuuaaaggacauuuauugcacagcaauuucuauaagcuccc

SEQ ID NO: 4132095 - RNA, 82 nt, Human
ggaaggaaagagaaguaugaaggcgagagcccacuacuagcucaugguagaggaguaaauuucgccuccacuccugccuucc

SEQ ID NO: 4132096 - RNA, 67 nt, Human
ggaaggaaagaggcuucagauccuucagaugcauacaauuugacaugggcuguaggucuccacuucc

SEQ ID NO: 4132097 - RNA, 69 nt, Human
ggaaggaaagcaauuuaauggaccaugacagaguaagucacugucauucccuggcuuuguuucccuucc

SEQ ID NO: 4132098 - RNA, 112 nt, Human
ggaaggaaggaaggaaaaugcaggagaagaauacauuggaaaucagaauaaguuaaguuauuucaauucagcaaugucaugauuuuuuugaucaggguuguuucauuuuucu

SEQ ID NO: 4132099 - RNA, 60 nt, Human
ggaaggaagucauuagugcagacugagcuguggaguuggguucuugcaggauuuccuucc

SEQ ID NO: 4132100 - RNA, 82 nt, Human
ggaaggaaguuaguacacugaauacuaguuuuccuggcuuuuagccugaggcaaagcacauuagguggcacucauuccaacc

SEQ ID NO: 4132101 - RNA, 77 nt, Human
ggaaggaccuguccguggugcugcuugugagucccagcucugaacaaauuauccagcuucagggacagcuucuuuuc

SEQ ID NO: 4132102 - RNA, 55 nt, Human
ggaaggagcauuugccaguuuauuaucuuuaaaaguagucuaaaaugcuccuuuc

SEQ ID NO: 4132103 - RNA, 72 nt, Human
ggaaggagcuuucauuacagccuugugggucuugacucaccagucccugcaggagccaguggaguuccugcc

SEQ ID NO: 4132104 - RNA, 88 nt, Human
ggaaggaggaaggaaggacagggaugguugauuguaugugagaaauuucagacacugcaguguucccuucuuccugcuccuaccuucc

SEQ ID NO: 4132105 - RNA, 67 nt, Human
ggaaggaggagcggaggcuuguugcuuggacacugccaggcugcucuguguucuguuccucuugguc

SEQ ID NO: 4132106 - RNA, 84 nt, Human
ggaaggagggcccuuucccucagagcuugaaggcuucucuguauccuaugccaacaagucuggggagaaaaggcuaacacuuuc

SEQ ID NO: 4132107 - RNA, 65 nt, Human
ggaaggaugaguggucagaaucuucaggaguacuguuuuccuggugaaugacuuuuuauuucccc

SEQ ID NO: 4132108 - RNA, 64 nt, Human
ggaaggaugugucacucucaggagguuguaagucauugggacgccuccagggaugauuccuucc

SEQ ID NO: 4132109 - RNA, 81 nt, Human
ggaaggcagccucccuaaugcagaagaaaccauggcuucuuugggggccugauucuuuggugucacuuagggaguuguucc

SEQ ID NO: 4132110 - RNA, 56 nt, Human
ggaaggcaucugaccucagggugucugggggaagccagaggaacgcagagcuuucu

SEQ ID NO: 4132111 - RNA, 68 nt, Human
ggaaggccacacaugauuuuuaaagagauaauagcagcacuauugucacuuaaaagugcauguuuucc

SEQ ID NO: 4132112 - RNA, 76 nt, Human
ggaaggcgggucugaguagagggcuggcgacugaugaucauuggaggacuuggcaaccccucuccacuccccuucc

SEQ ID NO: 4132113 - RNA, 65 nt, Human
ggaaggcucgaggaugcuucugguuuuucaucuuccagucuccagcagccuuccuuuugcuuuuc

SEQ ID NO: 4132114 - RNA, 60 nt, Human
ggaagggaauccaucugguuagaguuuuuccccacucccaccaccugcacuuuucuuucc

SEQ ID NO: 4132115 - RNA, 126 nt, Human
ggaagggaugaaggugauagggucuccuuggcaaagagacaugcaucggggcuuugacaaacaugaguccuccuuguuuugucucugcugauuaaugaggagaugcugccaucuuucuuuacuuuc

SEQ ID NO: 4132116 - RNA, 77 nt, Human
ggaagggcuuccugccagcagcccagugggcaagggaagagaaguuggaagguuuauugggccuggaggaucuaucc

SEQ ID NO: 4132117 - RNA, 130 nt, Human
ggaaggggacugcgaauaccaacccuuaucccagucuaagauaauguucucuacccguggaaguaccuacuauggacuuccccgaagcuggaaauaguaucuagaggcucuuugguauagauuuccuuuu

SEQ ID NO: 4132118 - RNA, 130 nt, Human
ggaucgggggacccugggggcucaggauccagcaaggggcggcaggaguaaaggaggaaggaaugacaggugcaaauaccuucccaccaaagcccuuguugcccucuggcuccuccccagaguugucccc

SEQ ID NO: 4132119 - RNA, 72 nt, Human
ggaucuauauaguccaggaugugccaugugauucaagaaugcuaaaaugcacaucuggagcucuguggaacu

SEQ ID NO: 4132120 - RNA, 59 nt, Human
ggaucucagaucuacagaucuacaguggcaaggaacugagaucuacagaucucagaucu

SEQ ID NO: 4132121 - RNA, 62 nt, Human
ggaucugagagcaagcaggaccaggaauaacacauccugagaugucucuggauuucaggucc

SEQ ID NO: 4132122 - RNA, 76 nt, Human
ggaucugcauaccuccaugugccccuggaagagcagaacuguuugccaaauaucuaauacaggaggccugcaaucu

SEQ ID NO: 4132123 - RNA, 87 nt, Human
ggaucuggcagaggccuaaccaagauguccucauguugucaucauggaucaggauaugaugguucugggcaaacugaucacaugucc

SEQ ID NO: 4132124 - RNA, 71 nt, Human
ggaucuguggaccgucuuacuggcuaccugguguuguaagauuauuugagcucaaggcaguccacauuucc

SEQ ID NO: 4132125 - RNA, 77 nt, Human
ggaucuuguuaaaaugccgauucugauucuguagaucuagggugagauucaagauccugcauuuguagcaaguuucc

SEQ ID NO: 4132126 - RNA, 115 nt, Human
ggaugaagacauaguaaaaccaaaugcaacauaaauuugaaguggcaaacuugguaguuucucaguuucucacccaagaguuauuuuguuuuguuuuguuuuguuuuaaccaucc

SEQ ID NO: 4132127 - RNA, 121 nt, Human
ggaugaaucagcucugaaagaaagaagcucaguucagucacuaucagugagccucaagcuuuggcuuauguaaaaagcuccuggagagauugagaaagcuucagauucccaggccucaucc

SEQ ID NO: 4132128 - RNA, 79 nt, Human
ggaugacagcaguucucugugccucgcugggacagaguguauucugagguccagcgucugcauggagaucugccuaucc

SEQ ID NO: 4132129 - RNA, 63 nt, Human
ggaugacauugacagaccugcugcucugcguugcaauugugcaguugucucucaauaucauuu

SEQ ID NO: 4132130 - RNA, 66 nt, Human
ggaugacucauuuucugguuguuggagacucuuaagggaucugcuuucauucacaaaauagcaucc

SEQ ID NO: 4132131 - RNA, 83 nt, Human
ggaugagcugggauucaaacucagaucuccaacuccaggguucuuucccugguaucugaaaguuuagaauucuuguccuaucc

SEQ ID NO: 4132132 - RNA, 64 nt, Human
ggaugaggcagaaaaaagucggagggcugguuaacuuuuucuuccucuugcuucaguuucaucu

SEQ ID NO: 4132133 - RNA, 68 nt, Human
ggaugagguaguguuuaguccaguccuauauuccaacaacuggaaaaaucuguagucacuaccuaucc

SEQ ID NO: 4132134 - RNA, 74 nt, Human
ggaugauaaguuaugggggcuucuguagagauuucuaugagaacaucucuaaggaacucccccaaacugaauuc

SEQ ID NO: 4132135 - RNA, 89 nt, Human
ggaugaucagaaaggagaucaguaguaagauggaggaacaccagggaaagaucaucuugccacuucauccccuuuccagcuccccaucc

SEQ ID NO: 4132136 - RNA, 76 nt, Human
ggaugaucugcccaucuguccugcuucacgggcaccaagaacccguggcucagauccaggacucgugugcagcucc

SEQ ID NO: 4132137 - RNA, 59 nt, Human
ggaugauguuccuuugagcccugcagcugucaugccacaguuucacagaggggccgucc

SEQ ID NO: 4132138 - RNA, 58 nt, Human
ggaugcucagucuugucuccugaagucaagguaucuucuaggcucugauugggcuucc

SEQ ID NO: 4132139 - RNA, 56 nt, Human
ggaugcuccuuggugauagaauauuuccuuguagaugucugucuccuggagggucc

SEQ ID NO: 4132140 - RNA, 121 nt, Human
ggaugcugaacuugauaaaucuguaaggucugugaaucuagaagucauucaauuaaauacaaacaugggucuggauaauuccaguaccuuagaguugaaaugauccugaguuccugccucu

SEQ ID NO: 4132141 - RNA, 69 nt, Human
ggaugcuguuuaacuucauuuuucuuccuucucagaaaaaccucagaaaauggaaguuuaaagguaucc

SEQ ID NO: 4132142 - RNA, 79 nt, Human
ggaugcuuagaaaaaagaacuguaucaagauguaguauaaagacugaucaaaauacaauucuuuguucaaacaagaucc

SEQ ID NO: 4132143 - RNA, 99 nt, Human
ggauggaaacuucaggauaaggcaaugguuucugugccuucuaauuuccuggaaggaaucacuuugaaguugucguuucugaaagugucaguuacaucc

SEQ ID NO: 4132144 - RNA, 63 nt, Human
ggauggaagcauuuccugugugugccacugcugugcuagcggcucacacggagugccuccacc

SEQ ID NO: 4132145 - RNA, 55 nt, Human
ggauggaaggcauuucacacaggaugagcaauuauuuguguuguguuuuaccacc

SEQ ID NO: 4132146 - RNA, 106 nt, Human
ggauggaauuaggaauucaguuuauuguguguguuuuuuuagacguuuguaaccaccagauuaggaaguuuuaacaaguacuuacuauagggugaaucuuccgucc

SEQ ID NO: 4132147 - RNA, 64 nt, Human
ggauggacagcuggccucaagggaacacugcaaaguggcucuaggaagaagccacugucccucc

SEQ ID NO: 4132148 - RNA, 128 nt, Human
ggauggagaguggauguggaggggcaauuggcagagacaccgaaugacucuguggaaagacaucucagugucugugcaagagugcucaucagucucucuacuuauugucuaccauuacuguccauucc

SEQ ID NO: 4132149 - RNA, 71 nt, Human
ggauggaggccucugcuguggcugcccacuggcugugcccaggccuugaagccacagcgaaccucucuucc

SEQ ID NO: 4132150 - RNA, 59 nt, Human
ggauggaggggugguggaagucagcccgugaacucucccccauugcccucauaguaucu

SEQ ID NO: 4132151 - RNA, 75 nt, Human
ggauggauggauggauagguggauagcuaagauaacagcuucucucucuaaagcuaacacauuccagcuauuucc

SEQ ID NO: 4132152 - RNA, 55 nt, Human
ggauggauugagggggagaguuggaaaacugcuuaaaaagcuccaucaauaaucc

SEQ ID NO: 4132153 - RNA, 68 nt, Human
ggauggccagaguugaggggguuucacauggugaugagcuccuugaagacucugagcucuaggcagcc

SEQ ID NO: 4132154 - RNA, 79 nt, Human
ggauggcugggaaagagcuggagaugcagguuucgggccacagugagccccaaaugccucagcuccaaaugaagccucc

SEQ ID NO: 4132155 - RNA, 68 nt, Human
ggaugggauagggcucuugcuggccaggugagccccugcacuuccuggcugagcccacuaucuuggcc

SEQ ID NO: 4132156 - RNA, 64 nt, Human
ggaugggauguuugagauuuuuggcuuucauuucuuccggaaguuauuuuucaagauccuuucu

SEQ ID NO: 4132157 - RNA, 63 nt, Human
ggauggggauuccucaagaaaacaaguugcucauggguccugacauugaggaguucacugucu

SEQ ID NO: 4132158 - RNA, 68 nt, Human
ggauggggcugaaacauggaagagagguacaagauccagcccuucuggcuccacucagccccacagcc

SEQ ID NO: 4132159 - RNA, 56 nt, Human
ggaugggugacuuugggcaauggacuucacaucuccaagccucaguuuucucaucc

SEQ ID NO: 4132160 - RNA, 79 nt, Human
ggaugggugcaggucugagugccagggagagaagccaggcacccgaacuccuagccagcucacuuagccugcaccgucc

SEQ ID NO: 4132161 - RNA, 61 nt, Human
ggauggucacuucacccaugagcucaaagccuucguagcacaugaaggugagggacucucc

SEQ ID NO: 4132162 - RNA, 64 nt, Human
ggauggugacccaggguuucugcacagggucugccucccugcuugucaccccuggguccucucu

SEQ ID NO: 4132163 - RNA, 79 nt, Human
ggauguaaguggccccggaguuuguuggcugacuugguuaucuuuccaggcuuucccagccucuccauugccaugcucc

SEQ ID NO: 4132164 - RNA, 100 nt, Human
ggauguacaguaagugggucuuucggggggacagccuggagugggaggagcucucgguccccucuucuaggacguccuuguggguccccuugcggagucc

SEQ ID NO: 4132165 - RNA, 65 nt, Human
gcuugcacgggauguucggccgggucagaagucccuucugccugccgagaacaccuaccgagagc

SEQ ID NO: 4132166 - RNA, 68 nt, Human
gcuugcauagaacaggcccugccauuuauccagacagacuggaaagacuucaguccugauuuccaggc

SEQ ID NO: 4132167 - RNA, 71 nt, Human
gcuugccugaggaacagaggguacuggucugucaccuuguaugccugauaacugugucucucagggcaagu

SEQ ID NO: 4132168 - RNA, 76 nt, Human
gcuugcucacaguaccuggcuuggcugcuuacaacuauuaaauuagcuagauaauccugugcuguguaaguacagc

SEQ ID NO: 4132169 - RNA, 71 nt, Human
gcuugcucagggccuggcagccuccaaccuucaccuauuugaagccugggguccguggguaggggguaggc

SEQ ID NO: 4132170 - RNA, 75 nt, Human
gcuugcucccuugcgaaaucgcucuuuuccucuuguagcuggaggaacagagacgggaucgcuuuggggccgggc

SEQ ID NO: 4132171 - RNA, 59 nt, Human
gcuugcugugagauugcugcauuucugcugaaaugcucugcaucugauagacacaaagc

SEQ ID NO: 4132172 - RNA, 59 nt, Human
gcuugcuguugcucuuuucuugguuggcuuuugugcagauuacuuuguagcagucaggc

SEQ ID NO: 4132173 - RNA, 56 nt, Human
gcuuggacauuuuaggcuugagauguuuauuagacacucaaguggagaugccaggu

SEQ ID NO: 4132174 - RNA, 107 nt, Human
gcuuggacugucugaggcuuuuagaauuugagcuuucuccccaguaugcauccuuugaugcugggcuaggguggagcucuggcugaaggccuucccacacuccuugc

SEQ ID NO: 4132175 - RNA, 57 nt, Human
gcuuggagaugggggaugagccugaagggguaugguucaacccuugcgucaccaagc

SEQ ID NO: 4132176 - RNA, 55 nt, Human
gcuuggagcauucauuucagcgagcaguagcucacuagcugaaugucugcuuugc

SEQ ID NO: 4132177 - RNA, 82 nt, Human
gcuuggagugcuggucugugcucuggagccucugaggaacugggacagcagagagccaugcagagcagaugggugcccaggu

SEQ ID NO: 4132178 - RNA, 109 nt, Human
gcuuggcaccccagcaggaccccaggcuaaggagugugaugcucaccuugcaucugaggguggcaaccaaguuccuggccugugggaucaaugcuaggacuccccaggc

SEQ ID NO: 4132179 - RNA, 75 nt, Human
gcuuggcauguauguuagacaagccuacagggcuuaccuaauuugugggacugacuggcucuuuacaugccaggu

SEQ ID NO: 4132180 - RNA, 56 nt, Human
gcuuggcccauugaucagcuggaaaaaaaugcucauuaaugaaacuuugguuaagc

SEQ ID NO: 4132181 - RNA, 62 nt, Human
gcuuggccuugguccucuuugcaaucagaucaguuggaugaaacagaacaucgaggcugagu

SEQ ID NO: 4132182 - RNA, 59 nt, Human
gcuuggcuuacgcaggcuucgugauuguaaguaagugacagaggcugaguuagucuggc

SEQ ID NO: 4132183 - RNA, 62 nt, Human
gcuugggccacagcucacacauccaaucuaccugcucagccuggacggcauguggcuuaggc

SEQ ID NO: 4132184 - RNA, 61 nt, Human
gcuugggcugugggccaagugcauggagucccaggacacuuccaggggccagcacccaagc

SEQ ID NO: 4132185 - RNA, 71 nt, Human
gcuugggcuuaaggguuggggauguagauuuaauuucaccuacaucucuuauaaacucucugaucuugggc

SEQ ID NO: 4132186 - RNA, 125 nt, Human
gcuugggugccgccccccuagccaccccagcuccuaggaaugauuggaauuccaggaguaugauccuuaggugcccugggcggcucaucccugggaggugggcaggguguggggguggccucugc

SEQ ID NO: 4132187 - RNA, 57 nt, Human
gcuugguagaaugaacauucauugaccaucuguuaugugauaggcauuuuacugagc

SEQ ID NO: 4132188 - RNA, 73 nt, Human
gcuuggugggcagguaggcaccagcuacgucuucuauaccuccuguggugggugccucacugucacccagagc

SEQ ID NO: 4132189 - RNA, 94 nt, Human
gcuuggugucauagccgcagaaguuagugucugccaguaucugaugaauauggugacuugcagccuaauuuuugugaaauuaugaggccaaagu

SEQ ID NO: 4132190 - RNA, 65 nt, Human
gcuuggugucccagucacuguccaugcagcacacagcugcuguaugguccacgugggugcccagc

SEQ ID NO: 4132191 - RNA, 55 nt, Human
gcuugguguucucaagagucugcccuuuccgaggaagaagaggauacaaccaggc

SEQ ID NO: 4132192 - RNA, 65 nt, Human
gcuugguuacugauggaaaggaugcugccucuagugaggagagaguucugacaguaauaccacgu

SEQ ID NO: 4132193 - RNA, 66 nt, Human
ggaagauuugcccaugcacuuuugagauccacaguccucagggguaaaucugggugcaauucuucc

SEQ ID NO: 4132194 - RNA, 66 nt, Human
ggaagcaaagacuuucucccaaauccucagcaggcaucugcuggagcaugagagucuuuagcuucc

SEQ ID NO: 4132195 - RNA, 82 nt, Human
ggaagcaaggaaugaauucuacaugcauccuaguuuuuccuguuguaaaugaggaguaugguggggucauucuuuggcuucu

SEQ ID NO: 4132196 - RNA, 96 nt, Human
ggaagcacucaaauauuaaugggauuuagucaggagagcguggaagcuagcuugaaggggcucccauugaccaaauuuggggccauuuaagaaucc

SEQ ID NO: 4132197 - RNA, 130 nt, Human
ggaagcauggaaaagauauugacaaucuggaauugggaguuacaaaguucugaguucaaacagugcaaagcacuguucacuggcugugugacucugagugaguuaauucacuuuucugacucuuauuuuc

SEQ ID NO: 4132198 - RNA, 61 nt, Human
ggaagccagagugcugggcaggcagggccauacaaggggagggccuucggacuuugcuuuc

SEQ ID NO: 4132199 - RNA, 66 nt, Human
ggaagccagcaguggagaaaggagcuuuuuggaaaggaacauucuggaacuauacuguuggugacu

SEQ ID NO: 4132200 - RNA, 74 nt, Human
ggaagcccaucuuaugagacccauaaagaucagccucucagagcugacuguuggcucauuggcaugaggaaccc

SEQ ID NO: 4132201 - RNA, 71 nt, Human
ggaagccccaaacccucgccaucgagagacccccauggcccggggugauggcuguggggcuuggugcuccc

SEQ ID NO: 4132202 - RNA, 55 nt, Human
ggaagccuaaagcccaggucuccucucugagggaagcugguggcucuagccuucu

SEQ ID NO: 4132203 - RNA, 63 nt, Human
ggaagccucugaccagaguguacagagcuuuuccaggaaggacaggcacagugguggaggccc

SEQ ID NO: 4132204 - RNA, 65 nt, Human
ggaagccuucacaguccugauguaauagccgagguggacagcagggggagcuguuggacgcuucu

SEQ ID NO: 4132205 - RNA, 68 nt, Human
ggaagcggcgcgggugcuguccagcuucccggugcugaaaaccggagggcucgucauccaccacuacc

SEQ ID NO: 4132206 - RNA, 55 nt, Human
ggaagcuauugagucuuggacaaguuacuucguucuucuaagccucaauguuuuc

SEQ ID NO: 4132207 - RNA, 67 nt, Human
ggaagcucaggaaagagucugguuaaaguuacauugagcuggaaaccaauuuccuccuaaugcuucu

SEQ ID NO: 4132208 - RNA, 81 nt, Human
ggaagcucucucucagugccgcucugcugucauuuggcugcagauugggccagcagcagagcucuggucugcauggcugcc

SEQ ID NO: 4132209 - RNA, 56 nt, Human
ggaagcugcagucccccccaagaggccugauggugcugggcggguuugcagcaucc

SEQ ID NO: 4132210 - RNA, 65 nt, Human
ggaagcuggagauguccgggugcuguugagcauuuuggacgaaaacuuggauaucuccuguggcc

SEQ ID NO: 4132211 - RNA, 128 nt, Human
ggaagcuugagucuugguaauggaucaaaagucuuacucaauagcucacugauuucucuuuuggcuguaagagaagaaaggaaguagcuuuuaguguuucucuugggaauucugaaacucaagcuucc

SEQ ID NO: 4132212 - RNA, 79 nt, Human
ggaaggaaaaugcauauuggauuagcagccagcaguuucugugauuuucuaggcaucuaugcaauuugcagaucuuuuc

SEQ ID NO: 4132213 - RNA, 61 nt, Human
ggaaggaaguaaaugaugcuauuuuaggauggcucaacaucccucaucacuugguccuuuc

SEQ ID NO: 4132214 - RNA, 67 nt, Human
ggaaggaauaugggccaauucugagggcuaauugucuuugcucucaacaagagcccaugcuuuuucc

SEQ ID NO: 4132215 - RNA, 83 nt, Human
ggaaggaauggagcagggguucacauucaagucuguuauaugacaaacuuccuguauuuauccauagccucacacuuccuucu

SEQ ID NO: 4132216 - RNA, 97 nt, Human
ggaaggaggcaggcaguuguagagagggcucuguuauuguagucucccucgucucugcuucccaucucucucacgcacugucugguggucucuuucu

SEQ ID NO: 4132217 - RNA, 57 nt, Human
ggaaggagggcggcaaugaugaucauaguugauaaauacugacacugucuucauucc

SEQ ID NO: 4132218 - RNA, 127 nt, Human
ggaaggauaucuugaaggugucauuucccagggaaugggcaggcagccuccauccacaggguguccucugagguccuugacugcuugccuauuuuaaggagagcauccagaucuuagguuucccucu

SEQ ID NO: 4132219 - RNA, 56 nt, Human
ggaaggcagaggugucgugggggcugcagaccugcguccacagccugcugucuucc

SEQ ID NO: 4132220 - RNA, 88 nt, Human
ggaaggcucucucacucugcucuuuggacaaugccuugccccucuugguggcagcuuccuaggagagggcagagucgggggcucuucu

SEQ ID NO: 4132221 - RNA, 110 nt, Human
ggaaggcugaggacucaagggcucguuaggaugcugguaucaugggcugaagacucagagcagucccuccagccagugccagucaugccugcagcuugucccagcuucuc

SEQ ID NO: 4132222 - RNA, 55 nt, Human
ggaaggcuuugaggggugcugguaauauuuuacuggugcuugcuuuaagucuuuu

SEQ ID NO: 4132223 - RNA, 56 nt, Human
ggaagggaacugggauggguguagauauagaauagcagccaccucauuucccuacc

SEQ ID NO: 4132224 - RNA, 61 nt, Human
ggaagggaacugggucuccuuguucaccaugaugggcggggacagaaggcgguucucuucc

SEQ ID NO: 4132225 - RNA, 86 nt, Human
ggaagggacaggaaggaggcaggcagguggcaucuugugaacaccuucugggugcccuuugcucuguugaguacuuccaacuuucu

SEQ ID NO: 4132226 - RNA, 58 nt, Human
ggaagggaggccagagguuuugcagggaaaucccuuaaauaugccucuuuucuuuucu

SEQ ID NO: 4132227 - RNA, 72 nt, Human
ggaagggcagggacaggauaggguuuuggggggaagcuauccccaaagcccuggcacuuguucugcagcucc

SEQ ID NO: 4132228 - RNA, 79 nt, Human
ggaaggggagcuggaaaggguaugguacgggaaggugaucuuucccugaagccuggcccucuacagcuggacuccuuuc

SEQ ID NO: 4132229 - RNA, 60 nt, Human
ggaagggggguugggcuugcaggaagcugcuuuaacgcugagggucucauguccccuucc

SEQ ID NO: 4132230 - RNA, 84 nt, Human
ggaaggggucauuugcaaagacuggcuuaacaguaguaugcaaaauauaacugugagagagguucuugguauuaaccaacuuuc

SEQ ID NO: 4132231 - RNA, 58 nt, Human
ggaaggggugucgcccauggauggagagcauccauucuucccuccugacacugcuuuu

SEQ ID NO: 4132232 - RNA, 69 nt, Human
ggaaggguaucuuaaaaguuaugggaugcucugggucuagagucuucuugaucuuuucagugcacaucc

SEQ ID NO: 4132233 - RNA, 123 nt, Human
ggaagggugugguggauggaggagaagaagggggaggaauaugaggguuggguauuuaauucugugcugcuuuaaaucaaugcuuuauuuccuccccuuuuuuucuuucuuucuuucuuuuuc

SEQ ID NO: 4132234 - RNA, 78 nt, Human
ggaaggucgagcugcaucuggcccccacgaccuuuuccacaucugaguauuucugauuccgcgacagcccgaccuucc

SEQ ID NO: 4132235 - RNA, 129 nt, Human
ggaaggucuauugucccuuccuuacuggugugugcacauguguaugcaugcaugcauguguaauagcacaugcauuuauguguguacauugcauguguggugugguggagggcaccaaauaggccuuuc

SEQ ID NO: 4132236 - RNA, 68 nt, Human
ggaagguggauggcucugaccuaggcucaccgcaacugcugugugaagccacagagccacgccgugcc

SEQ ID NO: 4132237 - RNA, 126 nt, Human
ggaagguucuccugagccagccaaggggcuucccgggugacgugcuccuguuccugggcgggcgccccucccacaggcugcugcaggucccgggcugagcccauggcugcaugcucuuggccuucc

SEQ ID NO: 4132238 - RNA, 68 nt, Human
ggaaguacagggguucuuagguaauguagaaguuuguccuuuaaaauacccuagauuccuguuauucu

SEQ ID NO: 4132239 - RNA, 114 nt, Human
ggaaguaccaaguugcucugcuuuuugaucaguggaugaacgaaauuaaauuguugguuaaagaccaggcuaauaguuaugguugguucucauggcaaguagcuuuucacuuuu

SEQ ID NO: 4132240 - RNA, 129 nt, Human
ggaaguagcagaaguaguggcuguggcagagaggagcagcacugggguuccacggaggggcagccccaggagagucuguccccagagccuguuccugcagcaucugcauaaauauuaacucuccagucu

SEQ ID NO: 4132241 - RNA, 95 nt, Human
ggaaguaucuucaagugagcccagcagcagacaucuuuuaucuucaggauggaguuccauuucugcaaagaguaagaugaggcccuugaacuucu

SEQ ID NO: 4132242 - RNA, 73 nt, Human
ggaagucagagaggcuguaaguguggagccuaggccugaaugagaauccugggccucuugcucucucugcucc

SEQ ID NO: 4132243 - RNA, 64 nt, Human
ggaagucaggacaacaagacuuguuuaaagcuaccuuuagguaggaaguguuguuuuuacuuuc

SEQ ID NO: 4132244 - RNA, 58 nt, Human
ggaagucagggaguguuggcaggaucagugucugcugauuaggucuacucuuggcucc

SEQ ID NO: 4132245 - RNA, 90 nt, Human
ggaaguccauucugagucaguuuucuaggcccugggguuagugagcacuugggccaccagguucuggguuaagcugacuuuauuaggucc

SEQ ID NO: 4132246 - RNA, 67 nt, Human
ggcagggcauuuugauaaacuuuguacucauuacuccuuauaacaaguuuaugaaucuuguccugcu

SEQ ID NO: 4132247 - RNA, 88 nt, Human
ggcaggggagagggagcgggccagccuuacagagcacccccugcagcuugagggaucugagcuggagcccaucaccucuguuacugcc

SEQ ID NO: 4132248 - RNA, 64 nt, Human
ggcaggggagcaguaacaacuugguccugagccugagcugcugcaggauuuacuacuaccugcu

SEQ ID NO: 4132249 - RNA, 86 nt, Human
ggcaggggagccucucacccggccucuuuccaaucccacagcacagaccuuggcaguguggagggagagagccugguucuucugcc

SEQ ID NO: 4132250 - RNA, 92 nt, Human
ggcagguaaaaugucuaacugaaaccaaacacuuuagggagaaaagaaaauacuuuuuacgugaaggguuucauggacugcaucuaccugcu

SEQ ID NO: 4132251 - RNA, 93 nt, Human
ggcagguaggugcugguggcugggacagcugagacaggagagggcaguuacuauuuuccagucucugccuccaagggcaucuacuguacuguc

SEQ ID NO: 4132252 - RNA, 95 nt, Human
ggcaggucacucguggcaugagugguucuaauuagaucagcgagacauggagcaaggcucuuugcugagcugguuguucaacaugaguggucacc

SEQ ID NO: 4132253 - RNA, 77 nt, Human
ggcaggucauugggggccaucucagaggcugcccaacacaggcuacucuuuggcccccgaugauucauguuccuucc

SEQ ID NO: 4132254 - RNA, 85 nt, Human
ggcagguccuguguccaucuuuucagauucuguaucccagcacuuaggacauagacaaacacgaagaugacaaucaauauuugcc

SEQ ID NO: 4132255 - RNA, 72 nt, Human
ggcaggucgcaucuuuauuuauauagacaggggccaguucucuuugcuaaaagugaugaagacacaucugcc

SEQ ID NO: 4132256 - RNA, 76 nt, Human
ggcaggugacagggauggcgcuggcugcccgcgggccguccggcggccgcagcagugucggcccaaacacaaugcc

SEQ ID NO: 4132257 - RNA, 66 nt, Human
ggcaggugagagcucuuugaaaaugaaaacauucugcuauuugaaugcaaaguguucuucuuuguc

SEQ ID NO: 4132258 - RNA, 67 nt, Human
ggcagguggaucacuugaggucagcaguuugagaccagccugaccaucauggugaaaccccaucucu

SEQ ID NO: 4132259 - RNA, 67 nt, Human
ggcagguggauuuucuacucuaaaaaucuagucguuuuaucagaaaggagugcaggauuuacguguu

SEQ ID NO: 4132260 - RNA, 67 nt, Human
ggcagguggcagggugcucaucaugcaccuccucuuugugagugcaagacuaugacccucccuugcc

SEQ ID NO: 4132261 - RNA, 56 nt, Human
ggcagguggggcugcuaccagaauaauggguucaacauucaggcugccucccugcu

SEQ ID NO: 4132262 - RNA, 61 nt, Human
ggcagguuauccaacuacaaugugcuguuuucuuaacacguuuguugauggauuacuagcu

SEQ ID NO: 4132263 - RNA, 73 nt, Human
ggcagguuugaaauuaugauaaaucugcuacauauucauucuaugagcagguuuaaacucuaaugcaucugcc

SEQ ID NO: 4132264 - RNA, 64 nt, Human
ggcaguaaacacuaccuacaaaugcagcaguggaagagaccaguguguaagguacuuugcugcu

SEQ ID NO: 4132265 - RNA, 90 nt, Human
ggccacacuucuggccuggacagcagagaggaaugaagccauccauggagaucaggaaggcuuucuguucugugacgccccaggaaggcc

SEQ ID NO: 4132266 - RNA, 81 nt, Human
ggccacagaaacauguauaaaguuguaaaaauucuuugaugcauuuccaaauugcacuuugagaaguguuucuguuuaguc

SEQ ID NO: 4132267 - RNA, 63 nt, Human
ggccacagagggcgggaugcuggauuucucagcaucucuaugucuccuucugcaaaaugagcc

SEQ ID NO: 4132268 - RNA, 102 nt, Human
ggccacagauguugucuauuuuugugagaugauuugaaagugugcaaaaagaaacaucuguaugguuaucucagaaguuuaaagaaaauaucuuauugugcc

SEQ ID NO: 4132269 - RNA, 129 nt, Human
ggccacagccagagguuuugggggauuagggcauggacgucucugaggccaugauucagcuggccguggucaucuggagugucuuuccuugccccauucugaucuccucuccuugcuguuguaauggcc

SEQ ID NO: 4132270 - RNA, 89 nt, Human
ggccacagcccuagaaacacuaguccuuggcuuuuucuccaucugugauuacagcuggacagaaacccgagugaucugucuguguugcc

SEQ ID NO: 4132271 - RNA, 60 nt, Human
ggccacagggaaccaaggcugggcccugagauucugcagggcaggugggucucuguugcu

SEQ ID NO: 4132272 - RNA, 85 nt, Human
ggccaccagggacugcacuugucuugggcucucaaggcuagaggcaagggcugcccacagagcccuggagggcagucccggggcc

SEQ ID NO: 4132273 - RNA, 69 nt, Human
ggccaccuccgugaaggaaugacauugcugaagacugaguuugcacuucaccucuaccagaguguggcc

SEQ ID NO: 4132274 - RNA, 64 nt, Human
ggccaccuuaaguuaaggauauuauuuauauccuuagaaaauuuacuugagaauugucaaggcc

SEQ ID NO: 4132275 - RNA, 91 nt, Human
ggccacgcaucuccuucuuaaucccuuauauauuugcuuccugcauguaaauauaaaggauugcagccggggagguaaaaauagcgcggcu

SEQ ID NO: 4132276 - RNA, 100 nt, Human
ggccacgccgauggccacccggguggagccugggcugugggcuucgccugcguccccgcggccuguccacgcguccggcacccggagcuagggcguggcc

SEQ ID NO: 4132277 - RNA, 64 nt, Human
ggccacgguguguguuuucucacucucgaaugcaagugggagagagaaaaugacuccggacgcc

SEQ ID NO: 4132278 - RNA, 92 nt, Human
ggccacuaaaauauuugaccugaaacuuugcuuuucuacaaaacuuaaaggaaaauaaguuuaguauuagggaaaaguucagggauaaugcu

SEQ ID NO: 4132279 - RNA, 64 nt, Human
ggccacugccagcugucuguaagcucaggauuagagagccuggccuuucgugagagcuggggcu

SEQ ID NO: 4132280 - RNA, 64 nt, Human
ggccacugucugagcacagagggacccuggagggaggcuucccaaggugcucggcaacagggcc

SEQ ID NO: 4132281 - RNA, 71 nt, Human
ggccagagaacuuagcuaguuuucccucggucauaucucugggauucaagcccagcuaagugauucaugcc

SEQ ID NO: 4132282 - RNA, 61 nt, Human
ggccagagaagucagacccuugguauuucauagcaaagcacggucuucugcaucguuggcc

SEQ ID NO: 4132283 - RNA, 57 nt, Human
ggccagagggagggcacaaaucuggaagcugagguuagagugcuuugccuuuuggcc

SEQ ID NO: 4132284 - RNA, 55 nt, Human
ggccagaguuucuguugcuggaggguggacugcacagcaguaggaccucugggcc

SEQ ID NO: 4132285 - RNA, 68 nt, Human
ggccagcaagacucagcaggauaccaggaagauguucacuggaagacuaucccgugauuuuguaagcc

SEQ ID NO: 4132286 - RNA, 63 nt, Human
ggccagcaggguauguuagagcuguagcagagaaggcuugcaaauuguauuauuuugcuggcu

SEQ ID NO: 4132287 - RNA, 93 nt, Human
ggccagcauggucucgaucucuugaccucaugauccaccugccuuguccucccaaagugcugggauuauaggcaugagccaccgugccgggcc

SEQ ID NO: 4132288 - RNA, 61 nt, Human
ggccagccccagacauccuaucgccacaaugccaugucgcaauaggaagcaggggccggcc

SEQ ID NO: 4132289 - RNA, 87 nt, Human
ggccagccgcagcuuggcugggaugguauggugguccauaaggccucgugggcuguccagcuccagccagccagccucggugaagcc

SEQ ID NO: 4132290 - RNA, 58 nt, Human
ggccagcggucagugcccacuggauucaaccacacagaagcuuuuggugaccuuggcc

SEQ ID NO: 4132291 - RNA, 80 nt, Human
ggccagcuccuguucagguccagagcugcuaacguggguucuacucagucccagugacuuggccagaauagagcuuugcc

SEQ ID NO: 4132292 - RNA, 57 nt, Human
ggccagcucugcacagcagcugccucucagcccgcugcugaugaagcguugucugcc

SEQ ID NO: 4132293 - RNA, 64 nt, Human
ggccagcuggaguuccgggugggcaugggcuuggcgggccugcacucggagcagccggccggcc

SEQ ID NO: 4132294 - RNA, 55 nt, Human
ggccagcuuucugucuucuagggaaccuguuaguuccauuuaggggcggcuggcu

SEQ ID NO: 4132295 - RNA, 57 nt, Human
ggccaggaacuuuugggauggggacaccaccucucagcccucccucucuuccuggcc

SEQ ID NO: 4132296 - RNA, 55 nt, Human
ggccaggaggcaauaucaaguccacacaugucuguggagcagaaccucuuuggcc

SEQ ID NO: 4132297 - RNA, 93 nt, Human
ggccaggauggucucaaucucuugaccucgugauccgcccgcuuuggccucccaaagugcugggauuacaggugugagccauugugccuggcc

SEQ ID NO: 4132298 - RNA, 93 nt, Human
ggccaggauggucucgaucccccgaccuugugauccauccaccuuggccucccaaaguguugggauuacaggugugagccaccgugccuggcc

SEQ ID NO: 4132299 - RNA, 63 nt, Human
ggccaggcagagccccgugcagccauggagucgcuccugcugccggugcugcugcugcuggcc

SEQ ID NO: 4132300 - RNA, 63 nt, Human
ggccaggccaccgcugugcgcuuuaaaagcaugguucuuuccauggcaccaggugguggcccc

SEQ ID NO: 4132301 - RNA, 75 nt, Human
ggagucaaagcuacaggcauuugaguagcccagggcugguuaauucauuguaugccugaggacuuugaaagaacc

SEQ ID NO: 4132302 - RNA, 57 nt, Human
ggagucaccaaguaggagucuuggucucgccuugacuucugccugcugagugccuuc

SEQ ID NO: 4132303 - RNA, 60 nt, Human
ggagucaggagucauuggaagagagauuucuuuuccaaaguaauuucacuucuguccucu

SEQ ID NO: 4132304 - RNA, 59 nt, Human
ggaguccaacgugcagccaggacauugcucacaguggccccuucuguacauuggacucu

SEQ ID NO: 4132305 - RNA, 99 nt, Human
ggagucccugccagcugcuucuccagaauuugcuucucugccuucuccuacugggguggagaugaagaguaucuaggauggccaguuggagcagauaac

SEQ ID NO: 4132306 - RNA, 86 nt, Human
ggaguccucauggguaaagcaggaagagagugggaaagagaaccaccccacucugucuucauauuugcauuucauguuuaaccucc

SEQ ID NO: 4132307 - RNA, 76 nt, Human
ggaguccugggcguccugggagggagggaaggaggagggcaccuucccuccaccaagcagggcgccagguaacuuc

SEQ ID NO: 4132308 - RNA, 85 nt, Human
ggagucuaaauugauaaacuuagaaagaauguugugguucuauagcuaaagcaagauuuuucagguuaguauagagcuagacuuu

SEQ ID NO: 4132309 - RNA, 57 nt, Human
ggagucucacaauguugccuaggcugaucuugaacaccugggcucaagugagccucc

SEQ ID NO: 4132310 - RNA, 87 nt, Human
ggagucucacucugucaccaggcuggagugcaguggugcaaucucagcucacugcaaccuccgccugcuggguucaagugauucucc

SEQ ID NO: 4132311 - RNA, 88 nt, Human
ggagucucacucugucgcccaggcuggagagcaguggcaugaucucagcucacugcaaccuucgccucucggguucaggugauucucc

SEQ ID NO: 4132312 - RNA, 88 nt, Human
ggagucucacucuguugcccaggguggagugcagugguacaaucuuggcucacugcaaccuccgccuuccggguucaagcgauucucu

SEQ ID NO: 4132313 - RNA, 87 nt, Human
ggagucucgccuguugcccaggcuggagugcaguggcgugaucucagcucaccacaaccuccgccucccagguucaagcgauucucc

SEQ ID NO: 4132314 - RNA, 87 nt, Human
ggagucucgcucugucaccaggcuggagugcaguggcaugaucucagcucacugcaaccuccaccucccggguucaagcaauucucc

SEQ ID NO: 4132315 - RNA, 88 nt, Human
ggagucucgcucugucacccaggcuggagagcagcagcgcaauuguggcucacugcaagcucagccucccggguucaagcgauucucc

SEQ ID NO: 4132316 - RNA, 87 nt, Human
ggagucucgcucugucacccaggcuggagugcaguggugcgaucucggccacugcaaccuccaccucccggguucaagcgauucucc

SEQ ID NO: 4132317 - RNA, 88 nt, Human
ggagucucgcuguguugcccaggcuggagugcaguggcaugaucuugguucacugcagccucugccucccgggcucaagcaauucucc

SEQ ID NO: 4132318 - RNA, 85 nt, Human
ggagucucgcuguugccagacuggagugcaguggcacgaucucggcucacugcaaccuccgucucccagguucaagcgauucucc

SEQ ID NO: 4132319 - RNA, 60 nt, Human
ggagucugaguugcccugcacugagaaccuuauuccagugagggaagaucucagcacccc

SEQ ID NO: 4132320 - RNA, 72 nt, Human
ggagucugccuucaggagcagacucugccuggcaucccagaggagucugugucuugaagcagucagugcucc

SEQ ID NO: 4132321 - RNA, 101 nt, Human
ggagucuggcucugucacugaggcuggagugcaguggcgccaucuaggcucacugcaaccuccaccucccgaguucaagugauucuccugccucagacucc

SEQ ID NO: 4132322 - RNA, 88 nt, Human
ggagucuggcucuguugcccaggcuggagugcaguggcgccaucuuggcucacugcaagcuccgccucccggguucacaccauucucc

SEQ ID NO: 4132323 - RNA, 78 nt, Human
ggagucuggucauuuucucucccuguaaccaacucuauguguuuuaaaucuggugggucaugaaauugaacaggcucc

SEQ ID NO: 4132324 - RNA, 73 nt, Human
ggagugaaucagcccauccaaggcuuggcaugcaguagugagccaaggguugccauggagaugggcgaggccc

SEQ ID NO: 4132325 - RNA, 65 nt, Human
ggagugacuuccuucaauauaauuuuuacuugaaaaguagaacuuuugauugauggaaagacuuc

SEQ ID NO: 4132326 - RNA, 75 nt, Human
ggagugcaggauaaaaaaaucugaagaauucugccuagaguucuuacaucaguuuauuuuguaaacuugcacacc

SEQ ID NO: 4132327 - RNA, 76 nt, Human
ggagugcaguggcaggaucucgguucacugcaaccuccgccuccuggguucaagugauucuccugccucagccucc

SEQ ID NO: 4132328 - RNA, 57 nt, Human
ggagugcaugggugcuagaacuagcuggccacuuuggugcuggcacggguggacucc

SEQ ID NO: 4132329 - RNA, 73 nt, Human
ggagugcugagcagauccagaggggaaagcaacacagacucuuuuuuccacccagagcauuuguuucccaccc

SEQ ID NO: 4132330 - RNA, 64 nt, Human
ggaguggaaggagcagagugagcggcacccacagccccuucucugagcgcauuccuccggcucc

SEQ ID NO: 4132331 - RNA, 64 nt, Human
ggaguggccaaggugcagagcagcugugaaaaccggaacagccuucguuccugcgggcucgccu

SEQ ID NO: 4132332 - RNA, 77 nt, Human
ggagugggaacuuauacugccagauucugaagccaauuauaaaguuaaaauaguuguaguagaacuguaguagcucc

SEQ ID NO: 4132333 - RNA, 70 nt, Human
ggagugguggaagggguuacgcagcaggauggacaccacuuccaugcgcgauggccuggcuucccgcucc

SEQ ID NO: 4132334 - RNA, 60 nt, Human
ggagugguguguaggggcacugccagagaucuucccuggcagaggccuaucacagacucc

SEQ ID NO: 4132335 - RNA, 118 nt, Human
ggaguguauauguauuuacugugggaauuuguuuuuaauaaaacuguuguaaggcauuuuuauuccuuugcuuuguuacauuaaaaacauucacugcauaaguaauguauuuuauucc

SEQ ID NO: 4132336 - RNA, 62 nt, Human
ggaguguauuuauuucauauacaacagaaaaaugacuguguauuaucaaguaaauacaugcu

SEQ ID NO: 4132337 - RNA, 107 nt, Human
ggaguguccuuuuagggcccgugacuggcuccagcucaaguauggcacgagugggucgccgugaagggguggagcaggugaugggaauagagcugacagggcacucc

SEQ ID NO: 4132338 - RNA, 88 nt, Human
ggaguguggcuaugucaccgaggcuggagugcaguggcauggucuuugcucacugcaaccuccacuucccagguucaagcaauucucc

SEQ ID NO: 4132339 - RNA, 68 nt, Human
ggcaguugggcaaugucuguguuuaagggaacuaugagccuuuauguucaguacaaugcuucacuguc

SEQ ID NO: 4132340 - RNA, 68 nt, Human
ggcaguuuacagaugacugagaaguucuuuccugaugcuuaguaaauaccuaagucauuugaaaugcc

SEQ ID NO: 4132341 - RNA, 102 nt, Human
ggcaguuuaccuaaaauuaugcgugaaaccauucucagguacacuaugaauaucaaagguguauuucuagauaugguauuccugcauuuguguaauacaccc

SEQ ID NO: 4132342 - RNA, 63 nt, Human
ggcaguuuggggcuagugggcaaggagauuuuucccacuucuugcuucucuagaucaacuacu

SEQ ID NO: 4132343 - RNA, 83 nt, Human
ggcauaaaaauauaucucuguaauuacaugauauuuagugauuagauaauuauggauaauugcaugggguaguucuaagugcu

SEQ ID NO: 4132344 - RNA, 63 nt, Human
ggcauaaacucuugagauucuuguugggucaauacccaaaacauuauccaggagaguuuaccc

SEQ ID NO: 4132345 - RNA, 81 nt, Human
ggcauaagcaagacaaggguuccugcaagauuuaagccuggccuagggcuacauuuuucaccgagccucugguugcuugcu

SEQ ID NO: 4132346 - RNA, 72 nt, Human
ggcauacagguaggggacauacauccugccuucaaagcaggcauucgaugucugauucccuacucugauguu

SEQ ID NO: 4132347 - RNA, 62 nt, Human
ggcauagaauguaauaaagaguagggauuuugcuuuauucaacuuuauauguucuguaggcc

SEQ ID NO: 4132348 - RNA, 84 nt, Human
ggcauaguagagauacaguuggcugcaggcuguacacaauaaucugaagccuggcuguaaaccuucucuucacauuaaucugcc

SEQ ID NO: 4132349 - RNA, 76 nt, Human
ggcauaguagugaggggagguccagauucuggccuucagggaacuggugucaggucugaugccucauccauuggcc

SEQ ID NO: 4132350 - RNA, 59 nt, Human
ggcauauccagccuacauuuauucccugccuugagagaaaagaugagaacuggauggcu

SEQ ID NO: 4132351 - RNA, 91 nt, Human
ggcauaugguugauuaaaacaacuuuccuuuuuuuccaccaaaacauuuaauuggcuuuagagucaaggaagguucauagucaaagaugcc

SEQ ID NO: 4132352 - RNA, 109 nt, Human
ggcaucaauauguucuaauguccuaggcaugauuuugugaaauguuuaguuuauuuuuauaaaguuacacagccauagagacauauuagcauaguuccauuuguuuguc

SEQ ID NO: 4132353 - RNA, 76 nt, Human
ggcaucacuguuuuaaggauugagccauuuuuacacuugguuuucaggaaguagaaaacucaguuucaagugagcc

SEQ ID NO: 4132354 - RNA, 65 nt, Human
ggcaucauuauguccaccuguuggaucacuugugagaaaaauaacaguugguguaauuucuugcc

SEQ ID NO: 4132355 - RNA, 58 nt, Human
ggcauccaaauaccaagauguaggucaacaggaccuuuguauguggauuuuuggugcc

SEQ ID NO: 4132356 - RNA, 105 nt, Human
ggcauccacaucuguuggaguuuguggagaguuaguugagcagucugagcuuuguuucugaggcgucucccugagcucacucuccugccagagcuguguccugcc

SEQ ID NO: 4132357 - RNA, 72 nt, Human
ggcauccugggaagcugacauugaagcugacauugacauauuuccuuacuucaauuucgagcuuucugugcc

SEQ ID NO: 4132358 - RNA, 76 nt, Human
ggcaucgaguucugaugucccuucuuucagcaguaacaggacagacuggcagaagagggccucgggcucggaugcc

SEQ ID NO: 4132359 - RNA, 65 nt, Human
ggcaucuaccuuauuaaguuguuaugauaauuaaacauaaucauucacauaaggugcuuggugcc

SEQ ID NO: 4132360 - RNA, 100 nt, Human
ggcaucuaugagccccucugugcacugggcuuccuggcacuacccucccuguggaaccuggccggcugccaggagaagcucagugggcaucaugggugcu

SEQ ID NO: 4132361 - RNA, 85 nt, Human
ggcaucucaaggaaagucuggagaagaagaaacuauuuguggcuuaaaacuuguucucuuuauagggcuucucuuugugguagcu

SEQ ID NO: 4132362 - RNA, 59 nt, Human
ggcaucucggaacacgccuccgacucugcuuagaggaugaggaguguguguaugaggcc

SEQ ID NO: 4132363 - RNA, 66 nt, Human
ggcaucucugugugugugaaucccccauggcuagggaggacuuucaaacacagacagcagcaugcc

SEQ ID NO: 4132364 - RNA, 65 nt, Human
ggcaucucuucaauugucacaaagcuuaucauguucacuugcuggcaauuuagagauuucuagcc

SEQ ID NO: 4132365 - RNA, 80 nt, Human
ggcaucuggaagcccucauccccaugggcgucugcccuucggccacaaugucccagcugagagacaacuucacaggugcc

SEQ ID NO: 4132366 - RNA, 73 nt, Human
ggcaucugguggagaugccuggccccuccugggagcuucacucagcagaggcugggcuuuucuaccuguggcc

SEQ ID NO: 4132367 - RNA, 60 nt, Human
ggcaucuuguugcucaaaucuaugaaggucaucuugauggauucgagagaauaaagugcc

SEQ ID NO: 4132368 - RNA, 56 nt, Human
ggcaucuuuaucuccagagcgguacccagaagaauacugaaaggagucgggauguc

SEQ ID NO: 4132369 - RNA, 72 nt, Human
ggcaugagaacuuacacaucauucaauggugauauuaauaauaauucaguaaucauuaaugauguacaugcu

SEQ ID NO: 4132370 - RNA, 55 nt, Human
ggcaugagggcagcccaggaagucagcccacacaguccugagccuccaccauguc

SEQ ID NO: 4132371 - RNA, 64 nt, Human
ggcaugagucagcgugcucagccuauuauuacuguaauaauauuugucaugcugaucuaugacc

SEQ ID NO: 4132372 - RNA, 85 nt, Human
ggcaugauucaacucaaccagccaugcuauucaggguucaaaaucuagaaaaagagccuuguuggucugaguuuggacauaugcc

SEQ ID NO: 4132373 - RNA, 64 nt, Human
ggcaugcagcagcagggaggaggcucugggcauaauuucagugcugauuccagguuggcugguc

SEQ ID NO: 4132374 - RNA, 57 nt, Human
ggcaugcugcguacagaugaacuugcaaaaacaugccauccuaugcaugagcaugcc

SEQ ID NO: 4132375 - RNA, 82 nt, Human
ggcauggaugcuggguagcauuuuagccaauuuucuucaaacccugguuggaaauuuauucaucauucauucaaaaagugcc

SEQ ID NO: 4132376 - RNA, 88 nt, Human
ggagaauugcuugaacccuggaggcggaaguugcagugagcugaaaucgugccauugaacuccagccugggugacagagcgagacucc

SEQ ID NO: 4132377 - RNA, 90 nt, Human
ggagaauuucuugaacccaggaggcagagguugcagugagccaagaccaugcaauaacacucuagccucugggugacaaagccagacucc

SEQ ID NO: 4132378 - RNA, 104 nt, Human
ggagaauuuguaacacuuucacaguucugcacuuugauuucagagaaggugcuaaucucucuggaauuuugagagugacaaaaugaguuguauacuguuuuucc

SEQ ID NO: 4132379 - RNA, 82 nt, Human
ggagaauuuuaguuugguuaauauuaggaaaagaaugaaacaaucuuuuauccuacauuuagcucuuauaagaauucagucc

SEQ ID NO: 4132380 - RNA, 67 nt, Human
ggagacaaaaguuugcacugugcugaggauuccgaguaaauuuucuaagccugucagacuugucucc

SEQ ID NO: 4132381 - RNA, 67 nt, Human
ggagacaaagguuuuucucuuugacagggauucugccuuuugccucagaguagcaauuuuucucucc

SEQ ID NO: 4132382 - RNA, 66 nt, Human
ggagacaaccauacuguuacaguuucccuaaugggggccagaaggagaaaacaguguuuugccucu

SEQ ID NO: 4132383 - RNA, 91 nt, Human
ggagacacaggcagguaauuuacauauugcuauagaagagucuagugcaauacuugugaauucaaagucugucauaccugucuuuguuuuc

SEQ ID NO: 4132384 - RNA, 55 nt, Human
ggagacagauggcgucucaguucccagcucugggucugaccagcagccugucucc

SEQ ID NO: 4132385 - RNA, 78 nt, Human
ggagacagccuaaccccuguacaagcucuuggugacaguuugugggugucuuugaaaagcuugacagaggcuuucucu

SEQ ID NO: 4132386 - RNA, 65 nt, Human
ggagacauuaacagugcuucagaggagcucuuggcuaagggagguuauugcacugggaugucuuc

SEQ ID NO: 4132387 - RNA, 66 nt, Human
ggagacauuagagcauauuugucuucaucuacuccuucaugagaacacauaagccuaaucaucucc

SEQ ID NO: 4132388 - RNA, 67 nt, Human
ggagaccccagucaacccaagauuugcauaaagcaugagcaagaaauaaggcuuugcugggguuucu

SEQ ID NO: 4132389 - RNA, 86 nt, Human
ggagacccccacccucaccugcccaccugcuuccacacuuuucugucccacagaggccuccgaaaggugggcugugugugggcucc

SEQ ID NO: 4132390 - RNA, 63 nt, Human
ggagacccccgacugugagaccaggaggagccuggcuuccacuuacaguugauggaguauucc

SEQ ID NO: 4132391 - RNA, 59 nt, Human
ggagaccugucucuuaugcaaaucccaggccacuaccugggggugugccagggaccucc

SEQ ID NO: 4132392 - RNA, 111 nt, Human
ggagacggggggcaggcagccacaggaguagggcugguggagaggggcuaugcuucugucuccacuugagacuggcucucugugguguugcucuucugcuccuccaucucu

SEQ ID NO: 4132393 - RNA, 59 nt, Human
ggagacuaccuagcaggcuguucuggaaauucaaccuguaugagccagcacuggucucc

SEQ ID NO: 4132394 - RNA, 58 nt, Human
ggagacuagaguuuagacaagggcuugcuuaaauccugugugugaguccuggcuuucc

SEQ ID NO: 4132395 - RNA, 78 nt, Human
ggagacuagcaggaaauuuaagaguguacaauaaaaguuaacuuauuucaugguuuaaaauuucuuccagcugucucc

SEQ ID NO: 4132396 - RNA, 66 nt, Human
ggagacugcauuguccaaggguucacagcaagcauugguagaaccagaagcagaaugcaaguuucc

SEQ ID NO: 4132397 - RNA, 100 nt, Human
ggagacuggacacagcaaagcaggaagcuccugacagagcacuggugcccugccuggcaucccugucacugaugcuccugccacuuugugccaaaucucc

SEQ ID NO: 4132398 - RNA, 60 nt, Human
ggagacuuaggugagauguuuguauuuaucacaacugcugcaucaauugccuaggacuuc

SEQ ID NO: 4132399 - RNA, 66 nt, Human
ggagagaaacagaacucuuaaaggaccuucauacagccuggaaaugucaagauucugcuucucucu

SEQ ID NO: 4132400 - RNA, 76 nt, Human
ggagagaaacagagggagaaaugaaaaggaaacaaacaaagaauaguuuauuuuagacuccaucugauucagcucu

SEQ ID NO: 4132401 - RNA, 67 nt, Human
ggagagaaacccuuugaaugcaaugaauguggaaagaccuucagccacaguucaucguucacucacc

SEQ ID NO: 4132402 - RNA, 100 nt, Human
ggagagaaaggacagccaagauugucacaaagaaggaauuggucuuuagggccucauucugaguguuuugcuuucucuguaauguuggcgcuuucucuuc

SEQ ID NO: 4132403 - RNA, 58 nt, Human
ggagagacccuggagaagguccuguuuacaaaaggguuaaucuuccccagggcucucc

SEQ ID NO: 4132404 - RNA, 57 nt, Human
ggagagagaggugcugccaggcacgagguggggcagcugccugagcaccucuguccc

SEQ ID NO: 4132405 - RNA, 77 nt, Human
ggagagagggguggacaugagagauggaaagagacuccugucuacauguuccuauggcucaguugcauuucucuucc

SEQ ID NO: 4132406 - RNA, 70 nt, Human
ggagagauaggaguccuggacuaauguggcuauuuacucacccccucaguaauucaggcucuuucuuucu

SEQ ID NO: 4132407 - RNA, 66 nt, Human
ggagagaugcuaagcucaggccacaguucaacuucacaggaaguugaagagcuacuuagccuuucc

SEQ ID NO: 4132408 - RNA, 56 nt, Human
ggagagauggaaaaccucccagccaugggagcuggaaggggucggauccauccucc

SEQ ID NO: 4132409 - RNA, 83 nt, Human
ggagagcaaggcuggugguggugaagucacucagccagagaagccagaguguaaccuauuuccugguaccaggcuuucucucc

SEQ ID NO: 4132410 - RNA, 83 nt, Human
ggagagcagaaagagcucgggauuaacagucaagacaguuaacuugucuguugcaucauggcucuuaauuuacaggugucucc

SEQ ID NO: 4132411 - RNA, 60 nt, Human
ggagagcagaagucacaguuggaauauugcaauauccuccuaacugauucugcagucucu

SEQ ID NO: 4132412 - RNA, 70 nt, Human
ggagagcaggacagggaauucugaggccucuauuuuuuauguaaccuugaacaaaucccuuccugucucc

SEQ ID NO: 4132413 - RNA, 65 nt, Human
ggagaggaacucccagugccugggcaugacugugugcuaggcauuguacuggguguuuuucaucc

SEQ ID NO: 4132414 - RNA, 70 nt, Human
ggagaggacugaggccuuuauugagacagcuucacagucuagcuucucucugccuaggucugcuuucucc

SEQ ID NO: 4132415 - RNA, 64 nt, Human
ggagaggauguuuuaguaacuuggacacuuuggugcauugucugggaccuggaauuucucaucc

SEQ ID NO: 4132416 - RNA, 62 nt, Human
ggagaggcuccugaagccagccuugcagauacauaguuacaggcugagcaaagggccuuacc

SEQ ID NO: 4132417 - RNA, 73 nt, Human
ggagagggaagcccgaggaggauuggcugggcugggcauguuccagccucauuucuccugcuuugcccucucu

SEQ ID NO: 4132418 - RNA, 74 nt, Human
ggagagggaaugacacugaauauuccuugacagucugucugguaaaugugaaugucauuuagcagucucuuucc

SEQ ID NO: 4132419 - RNA, 76 nt, Human
ggagagggauggagaagucaaagugaacaggagcuuuaauuugugcuccuauuccuagccuacuccaacccucuuc

SEQ ID NO: 4132420 - RNA, 78 nt, Human
ggagagggcaguggggaagagcaugggcccuggaccuuagauggcucaggguucgaaucuccucuucaccccuucucu

SEQ ID NO: 4132421 - RNA, 78 nt, Human
ggagaggguggcaggggcuggcuuaucugagagucucaggucucugggaaccucuggcagagccgcucugcccucucc

SEQ ID NO: 4132422 - RNA, 72 nt, Human
ggagaggugacauuaaauuucauagugauuaaaauuagauuuuuaguucauagcaauuuaguuuaccauucc

SEQ ID NO: 4132423 - RNA, 80 nt, Human
ggagagguggccugcagcugggucugugugggcugggacccaggcucugcugcuacagcugugugaggcccaaccucucu

SEQ ID NO: 4132424 - RNA, 62 nt, Human
ggagagguuaaucaggagcuggaggaacgcacugcccacucagcucugugguuugagucucc

SEQ ID NO: 4132425 - RNA, 95 nt, Human
ggagaguaaaggucuaaagugcuuguuuaugcaauguaugcagccaacaaaauaagcuguaagcuggcaaacaagcaucauuugucuuugccucu

SEQ ID NO: 4132426 - RNA, 60 nt, Human
ggagaguagagaaugggcugcuugcuugacuagaauggucuugccuguucccuacuaucc

SEQ ID NO: 4132427 - RNA, 89 nt, Human
ggagagugggccagggcaccaugccuacagaacucaccuugcuguugcaaugucuagucugagggcuuggcaacccugccuaauucucu

SEQ ID NO: 4132428 - RNA, 69 nt, Human
ggagagugggggcagcuaccggaaguagggggaugagaagcucccuccggaauguaugccccccucucc

SEQ ID NO: 4132429 - RNA, 74 nt, Human
ggagaguuguugaucuuucauuuuguuuaguuucuuauuugucaagauugagagaugacuucuaagugcuuucc

SEQ ID NO: 4132430 - RNA, 80 nt, Human
ggagaguuucucagucucugucaucucaugggaauucucccacugaguuuccauagguugcagagaaugacaagguugcc

SEQ ID NO: 4132431 - RNA, 80 nt, Human
ggagauaaaaggguugguuuacaagugaugggcagaguagccaagaacaucuuuaauuugugacaacuauuguuaucuuc

SEQ ID NO: 4132432 - RNA, 67 nt, Human
ggagauagacuuggugagccacuaaccaaucuucccagagugagcauccaucguaugguucuucucc

SEQ ID NO: 4132433 - RNA, 88 nt, Human
ggagaucaaagaugggcagagagaaaaaugguaugugggugaaggagagauuuuugcauaacauuugcugucuccuauguuuguuucu

SEQ ID NO: 4132434 - RNA, 60 nt, Human
ggagauccgucccuaggucagucugguugaaccagauauuccugaaggacaggguucucu

SEQ ID NO: 4132435 - RNA, 95 nt, Human
ggagaucucauaauuuucuagcaagaaagagguggaaagugcaaaucaaaccuguucaccuguuauuacuagguaagaaugaauuaaguaucuuu

SEQ ID NO: 4132436 - RNA, 90 nt, Human
ggagaugagguaucaggacuggguggcuagccagguuccaggccgggccucaggauagcugcgcagccuggcauuuucgccucacuuucc

SEQ ID NO: 4132437 - RNA, 71 nt, Human
ggagaugcauggccugggcccgcuucagauggucucccuucuacucccuugcgacgcucgggcugcccucc

SEQ ID NO: 4132438 - RNA, 65 nt, Human
ggagaugcucgaagaccucagaauauacacacccuuaagguucaagggcugggguugagcucucc

SEQ ID NO: 4132439 - RNA, 93 nt, Human
ggagaugggaugucuucuaugggcuguccuaguccagcccugugcuccccauggggaccgcugccacagccuccugacugauacccagccucc

SEQ ID NO: 4132440 - RNA, 130 nt, Human
ggagauggugaaaacggauugguuuguaaccuacuggggacuugcagacacaauuggguuauuuuucaugugggcuggaguuccuagaugagcagaugggacaagaaccagugaaauuuaagcuaauucu

SEQ ID NO: 4132441 - RNA, 72 nt, Human
ggagaugguuuaaccucuguaguagguuuuguaguuaugguaagcuccagguccagagguugaacgguggcu

SEQ ID NO: 4132442 - RNA, 62 nt, Human
ggagaugucugucagggcaaggccaggccacugaccggucuggcagucuuguaggcaucucc

SEQ ID NO: 4132443 - RNA, 83 nt, Human
ggagaugugauugcauuaaggaucuugagaugggggauuaucccggauuauucaggugguccuaagugccaucacagguaucc

SEQ ID NO: 4132444 - RNA, 89 nt, Human
ggagaugugggaugcauugggagagauuagggcaaugucucuaggaauggcugcuccauucucuagccagugcucccuccacgucgucu

SEQ ID NO: 4132445 - RNA, 111 nt, Human
ggcggucacggcacuacgacugcucuggcugucuuggaggaaggaggcccugaggugguccuccugaauaagagcagccccagcgucgacacugguggugacgugggugcc

SEQ ID NO: 4132446 - RNA, 69 nt, Human
ggcggucagggacaaagggcuagccacaacuacuucucccuaguucugcuccuccuauguuauggcccc

SEQ ID NO: 4132447 - RNA, 96 nt, Human
ggcggugaguuggugaggaagucaccagcuggaauguuggagucugaacagauaaacucuuagcccagcuuggccuauuucuuuauacuuauuacc

SEQ ID NO: 4132448 - RNA, 68 nt, Human
ggcggugguugagaggacggcggccgagagacaacaagggggcacguuagaaacucucgaccauugcc

SEQ ID NO: 4132449 - RNA, 67 nt, Human
ggcguagagcagaugagagggagugacgacuuggacaagcaggucacugcucagucuguacuacacc

SEQ ID NO: 4132450 - RNA, 91 nt, Human
ggcguccaaucucauugguuugccuuucuguucgucaggcuugggcgccuggugaaaggcagagagcgcgucacuauuggggcuggaggcc

SEQ ID NO: 4132451 - RNA, 65 nt, Human
ggcgucguggcucacgucugucaucucagcacuuugggaggcugaggcaggcggaucacgagguc

SEQ ID NO: 4132452 - RNA, 75 nt, Human
ggcgucuccaaagcaggguuuuuccaccgcagcaugguugauauuuugggguggauaauucuguguggaggggcc

SEQ ID NO: 4132453 - RNA, 81 nt, Human
ggcgucucgcucugucacccaggcuggagugcaguggcgugaucucggcucacugcaaacuccgccucccggguugacgcc

SEQ ID NO: 4132454 - RNA, 57 nt, Human
ggcgucugacgugcuauagcagccaaucugcuugucaucagcagcugucagaaugcc

SEQ ID NO: 4132455 - RNA, 73 nt, Human
ggcgugcucuagccuuauagauuuugcugccuuuucaaagcagcucaaaucccagcgggcuccugagaauguc

SEQ ID NO: 4132456 - RNA, 89 nt, Human
ggcguguaggacgcuccgggaguccccgggucugggggccgccauggcaggcagcccaggcagcggggucuccuuggaggguauauccc

SEQ ID NO: 4132457 - RNA, 82 nt, Human
ggcguuuguacaguuuguauggucaggaauguuugugaggcauuaauugaauauuucuuaugaauauugacugugcaagguc

SEQ ID NO: 4132458 - RNA, 78 nt, Human
ggcuaaaugguauuugucaagcauagucuuuuagcaguaguuaagaauguaaaacugugugacacuauaccaauuucc

SEQ ID NO: 4132459 - RNA, 82 nt, Human
ggcuaaccuguaccuggucuccauuugauuaaacuucauuuguuuggccaaaggaaagacuacuguugguaagguagaagcc

SEQ ID NO: 4132460 - RNA, 56 nt, Human
ggcuaagucaauggagcuguuuuuaaagccuuaacuacaguuuauuuuacuugguu

SEQ ID NO: 4132461 - RNA, 57 nt, Human
ggcuaaguucuccaggguucccugugaaauucaucacacaaagccuuaggaacagcc

SEQ ID NO: 4132462 - RNA, 59 nt, Human
ggcuaauggaggugucuggccugguagauagagugcagggugcugcgccuccacuggcc

SEQ ID NO: 4132463 - RNA, 87 nt, Human
ggcuaauuaaaacuucagcucagggaggcccccuuggggcauggauugccucagucagcuucccugggggaguccccuaauuggacc

SEQ ID NO: 4132464 - RNA, 78 nt, Human
ggcuaauuguacauucagcuuagcacuucuagaugcaauugccucuacggacucagucaguugaaggugaaguuagcu

SEQ ID NO: 4132465 - RNA, 65 nt, Human
ggcuaauugugaugcuggagugcgaauaucugugcagauuuccccacaccaguauuuuauuaguc

SEQ ID NO: 4132466 - RNA, 76 nt, Human
ggcuacaguacuggaugcucagcccuccaccauuauggggguguuuccuggccauucagcugaucacuguuaagcu

SEQ ID NO: 4132467 - RNA, 83 nt, Human
ggcuacggguaucuuccaggaacagaugaagguugcgaaauaacugccaacugucuucugcucuggcaguuaucccguuagcc

SEQ ID NO: 4132468 - RNA, 55 nt, Human
ggcuacuccuggagcucagcugugggaucaggguuugggcugaggaucaggugcc

SEQ ID NO: 4132469 - RNA, 78 nt, Human
ggcuacugagugcuagcauuaguauauaagaguaccuuauacucuuauauacugugguaguacuguauuacaguaguc

SEQ ID NO: 4132470 - RNA, 63 nt, Human
ggcuacugcugucccagagcaugucagaucuccuagcuguucagcugugagcagccaguugcc

SEQ ID NO: 4132471 - RNA, 58 nt, Human
ggcuacugugauggucugcaagcgauuuccaacugagcuuuauuucagcuaaguagcc

SEQ ID NO: 4132472 - RNA, 76 nt, Human
ggcuagaagaacuuauaggaaugucauaaugugcuguaggggacagugauacuuuuaaagguucugacauucagcc

SEQ ID NO: 4132473 - RNA, 57 nt, Human
ggcuagaguggaacuggagcgggguuacugaccuccucacagucaacacuuugagcu

SEQ ID NO: 4132474 - RNA, 82 nt, Human
ggcuagauuuuauucauaugcuuuaacauuaaacaacaguuuauaacugauugaaugcagaagcaaguaugagaauccagcu

SEQ ID NO: 4132475 - RNA, 67 nt, Human
ggcuaggcucucagggucccugcggaggagcccacagccuuucucccccaagcccugggagugagcc

SEQ ID NO: 4132476 - RNA, 97 nt, Human
ggcuagggaccucagggagaggccucuguugcccuuuucagcaaggcuggaaaugggauaugggcaggggacgucuucucugacuucacccuagacc

SEQ ID NO: 4132477 - RNA, 77 nt, Human
ggcuagggcaugccugcuuacuccaggugcugugaggcuccaggaccuucuugagugagcaggaacagcuuguaguc

SEQ ID NO: 4132478 - RNA, 73 nt, Human
ggcuauaugcaaauauucugucauuuuauauaaagauaaugagcaucuacagauuuugguauuugcaaugguc

SEQ ID NO: 4132479 - RNA, 72 nt, Human
ggcuaucagcugcccaggaagccugggguuuccaggggaaccaaagggguuucugcgcacccaggaugagcc

SEQ ID NO: 4132480 - RNA, 74 nt, Human
ggcuaucagucauuguccuuaaaacacuggaggaguagcucagugcacacaggagcagucugauaaaagcagcc

SEQ ID NO: 4132481 - RNA, 84 nt, Human
ggcuaugaaguccacugggcuaccccaccauuacccucgguucccaugacgggggugccagaguggcccaggggcagcagggcu

SEQ ID NO: 4132482 - RNA, 79 nt, Human
ggcuaugagcuggguggucugcgcagcccagggucagaucacauugcauccaggccccaagaccccgacagcccaagcc

SEQ ID NO: 4132483 - RNA, 77 nt, Human
ggcuauguguccagcaucuuugaucuuacugguuuucagucugguuauuguaacagggacucgcuggacauaccguc

SEQ ID NO: 4132484 - RNA, 59 nt, Human
ggcuauugcuaucauucugguggugacaguuauuaccaucgacgguagauagaauggcc

SEQ ID NO: 4132485 - RNA, 71 nt, Human
ggcuauugugaauagugccgcuauaaacauacguguauauaugucuuuauagcagcaugauuuauaaugcu

SEQ ID NO: 4132486 - RNA, 123 nt, Human
ggcuauuuaauacacauuuucugagucucuacuaugugccuguuggacacugcugggguaauaguuuccacaucuguccucugcagagcucagaguguggaagagcagugagacuugaguacc

SEQ ID NO: 4132487 - RNA, 71 nt, Human
ggcuauuuugaugcacuauguaacuuacaccauauagauggucaguugccuccauagucauccgaugagcc

SEQ ID NO: 4132488 - RNA, 83 nt, Human
ggcucacaccacaccuguucuggcucccgcucagagguggaggccgccaggugcuccagcuggagaugggggcugguggagcu

SEQ ID NO: 4132489 - RNA, 68 nt, Human
ggcucacagagagugacuuguugcuguguccuuacauggugaaaggcauaaaagggcucucugggguc

SEQ ID NO: 4132490 - RNA, 99 nt, Human
ggcucacagcagugaagaugggcauaguaaccguuugcuuuggagauggggccuaagcucuucaguuggucacuauucucgccuuuacuauugucuacc

SEQ ID NO: 4132491 - RNA, 111 nt, Human
ggcucaccuaagcagggaagccgauuuggaacuuaaacaagcucccaaguugugaucagucgagcuuggcaagcacuguuugagagaguaggcuucccgcaagcaggagcc

SEQ ID NO: 4132492 - RNA, 59 nt, Human
ggcucacgcaauuaucccggccucagccucccaaguggcugggauuacagguguaagcc

SEQ ID NO: 4132493 - RNA, 56 nt, Human
ggcucacuggaauucaagauacugaggcugucccuccccucugcauuccagcagcc

SEQ ID NO: 4132494 - RNA, 83 nt, Human
ggcucacuugugcuuauccaaacuggugaaucauuagcugucacccuggagagcagugcaguuugggaaggcgugggugcgcc

SEQ ID NO: 4132495 - RNA, 111 nt, Human
ggcucagacacgguuugcauucacuuggaagagauaacauuauaaguucacugucuggcccagacugauguuaacccucucuucucugucacaauguaggccuaaugggcc

SEQ ID NO: 4132496 - RNA, 55 nt, Human
ggcucagagcccugcaugcuccaucucccccagagaaaaggccaagggccuagcu

SEQ ID NO: 4132497 - RNA, 78 nt, Human
ggcucagcccugugaggcccugggugcuggacagaaagacucuugcuccuccagccaccucagugcucucagcuggcc

SEQ ID NO: 4132498 - RNA, 62 nt, Human
ggcucagcuuggugcgcagaaacccgacgucaaucagagcauuuugcgcagcugggcgagcu

SEQ ID NO: 4132499 - RNA, 59 nt, Human
ggcucaggagcacuuccuuguccaggaagccccucccuuuccaagagcugcuccuggcc

SEQ ID NO: 4132500 - RNA, 55 nt, Human
ggcucaggcauagagauggaggauuuugcaccaaaggucugaguuuugccaggcc

SEQ ID NO: 4132501 - RNA, 77 nt, Human
ggcucaggcugcuggcuuccucaggagcagugggugacuacagcuguaaaaggaaugucuuccugcacuucugagcc

SEQ ID NO: 4132502 - RNA, 73 nt, Human
ggcucagggccagggcugugcucuguggagaccauucugagacaaggaaacauggagagcccuugccugaguc

SEQ ID NO: 4132503 - RNA, 68 nt, Human
ggcucaggggaaugggcugccguagcuaagauggugaagccagcggcgccuccugguuccccugugcc

SEQ ID NO: 4132504 - RNA, 89 nt, Human
ggcucaggggcugugguuuuguagggggcucagagcgagggucaggccaggccccagccucaguccccugaccgccucccucuugggcc

SEQ ID NO: 4132505 - RNA, 59 nt, Human
ggcucagguugggucacaugaccaucucugccccaaucacugugacuccaaccugaguc

SEQ ID NO: 4132506 - RNA, 68 nt, Human
ggcucaguaagucagguucauuuuccauuauuuauggcguauuaauaaaucuggcauuugucugagcc

SEQ ID NO: 4132507 - RNA, 119 nt, Human
ggcucauggacuggguggaagaugggcagcucuuuguggaacggcaguguccaggaauuuaacgauccuggccgggcuggccacagccagaguugcucugccacccaaaccgcugagcc

SEQ ID NO: 4132508 - RNA, 83 nt, Human
ggcucaugguugucaucccaagacuuuggaaggcugaggcaggaggauugcuucagcacagaaguuugagaacagccugggcu

SEQ ID NO: 4132509 - RNA, 68 nt, Human
ggcucauuuggaaugaaauaugcuuacaguauuuuucuuaguacuguauaguauuuauucuuagaguc

SEQ ID NO: 4132510 - RNA, 73 nt, Human
ggcuccaaagggcagugugaggaaccucggaagccucccuugaccccuuuuugccuccacuuccuuuggcguc

SEQ ID NO: 4132511 - RNA, 68 nt, Human
ggcuccacaguggaggcacuaauuggauuucauuaaagugaaauagauuuccuagcauuggaagagcu

SEQ ID NO: 4132512 - RNA, 68 nt, Human
ggcuccacugggcugggcuucccuuuggaaugagcucugcuaagaggccucagcucagugugacagcc

SEQ ID NO: 4132513 - RNA, 63 nt, Human
ggcuccagaaaucauagagcagagaucgccucucccuacucugcuuuguccaaguucugggcu

SEQ ID NO: 4132514 - RNA, 69 nt, Human
ggcagcagagccagaccauugccgugcacuccaggaggugcaggcaccauucugccucucagcccugcc

SEQ ID NO: 4132515 - RNA, 129 nt, Human
ggcagcagagcuaggauucaaacucaggucugccugacuuaaaggcuuaacuuuacuguuaugcaaaaucaagugcaagguaauuaagcugucacugcaaacgagaacgauuagcuccaccugacugcc

SEQ ID NO: 4132516 - RNA, 59 nt, Human
ggcagcagaggcccuacucuuuggcaggcuugcuucacuguuucuagguucucucugcc

SEQ ID NO: 4132517 - RNA, 88 nt, Human
ggcagcagagugauucauauuagagcagaagaggggaucagggcugcagaaagacaagauccccucccugugugccucauuugcugcc

SEQ ID NO: 4132518 - RNA, 76 nt, Human
ggcagcaggacugccguuaaagugaugucagaguuuccauuucaguuccuuauuuucaaugcuuuagcccucugcc

SEQ ID NO: 4132519 - RNA, 93 nt, Human
ggcagcaguucccuccaccaacacuucuuugucaccugcuucaaggccgauaacucugaagaagguggcccagggguagguggaggggcugcc

SEQ ID NO: 4132520 - RNA, 63 nt, Human
ggcagcaucucuggcagcagcugcaucuccuccucaacuccagcucuuggcagauuaccuguc

SEQ ID NO: 4132521 - RNA, 60 nt, Human
ggcagccaugugggcagcgagucccagcaguccaccuuccuguucuguccagcaucugcc

SEQ ID NO: 4132522 - RNA, 62 nt, Human
ggcagccccaucagagacgcugggcugacacacucaccgucuuggagauauucugggcugcu

SEQ ID NO: 4132523 - RNA, 56 nt, Human
ggcagcccuuuuaggcagcagauguggccaccacccugugcccagcagaggcugcc

SEQ ID NO: 4132524 - RNA, 62 nt, Human
ggcagccuaggaaucaaaauucuagcuuugcagucaaaagccugaggguguugcuagauguc

SEQ ID NO: 4132525 - RNA, 56 nt, Human
ggcagccuugagggaggccuggcagguucagaugccaggguaauccaugggcugcu

SEQ ID NO: 4132526 - RNA, 59 nt, Human
ggcagcgagucgccaagucucguaugcgccccgcaacgcgggaacuaggcgaucgcucc

SEQ ID NO: 4132527 - RNA, 71 nt, Human
ggcagcuacaaggcagcagagcuuauuaacuaaaagcacagcuuuuagaaccaaucugcccaugugcuguc

SEQ ID NO: 4132528 - RNA, 64 nt, Human
ggcagcuaucaaagugcuuuacgcacauuaaaacauucauagcccaggcaccuugauggcuucc

SEQ ID NO: 4132529 - RNA, 56 nt, Human
ggcagcuauuccaagcagcacuggaacuguuacugugguguuuggacaggcauguc

SEQ ID NO: 4132530 - RNA, 55 nt, Human
ggcagcuccucucagcaaaagauaaagucuauuucacccugaauaggggcuggcc

SEQ ID NO: 4132531 - RNA, 77 nt, Human
ggcagcugccagcccaggucucucuuccaguccaggggaacuccaaaggcugagggggccugggugggaaucaggcc

SEQ ID NO: 4132532 - RNA, 78 nt, Human
ggcagcuggaagugggcuggagcacccugagagugcaaguaauguggucagggcucaccagccucugccagagaggcc

SEQ ID NO: 4132533 - RNA, 79 nt, Human
ggcagcuguagcuucugcgggaccuccacugcucgggcgucaggcucagguagcugcuggccauguacuugcuguugcu

SEQ ID NO: 4132534 - RNA, 73 nt, Human
ggcagcugucaaacaccaacauuucucccugagaauagguuuaguguaguguguuuuucaaggacaaguugcu

SEQ ID NO: 4132535 - RNA, 70 nt, Human
ggcaggaacacagguggcccggcagggaaggcugcucuggcccugccuugccuccccacccaguauugcc

SEQ ID NO: 4132536 - RNA, 95 nt, Human
ggcaggaagcagaggagaggucuuuuccuggguuucaaagguuauacccugaggcaacagaaagggccaauguccccuacucagcuucuccugcc

SEQ ID NO: 4132537 - RNA, 75 nt, Human
ggcaggaaggccaagaucaaggugccagcagaguugguuucugcugaggccccucucuugagcuugcggacugcc

SEQ ID NO: 4132538 - RNA, 77 nt, Human
ggcaggaccucaccaggaacagcugcggaggggugaccuugggcaguagccucuugguguuggcaaauaauccuguc

SEQ ID NO: 4132539 - RNA, 67 nt, Human
ggcaggagaguccuuucuguagauggaaccccucuucuggucacaucugaaaaggcauuuucuuccc

SEQ ID NO: 4132540 - RNA, 58 nt, Human
ggcaggagguggccugagcgugcccggcccuggcugaggucagugggggccuccugcc

SEQ ID NO: 4132541 - RNA, 57 nt, Human
ggcaggaugaagggcaaaggcaagacucaaggaaacucucugcccccuucugucccc

SEQ ID NO: 4132542 - RNA, 60 nt, Human
ggcaggcacugugcuaggcgcugagcaaacaaugcuaaugagauccacacagugccugcu

SEQ ID NO: 4132543 - RNA, 80 nt, Human
ggcaggcagccagaggggccuggcacugagcuggcacggaggagaacggcccugcuggcccaggccccuugcugucuguc

SEQ ID NO: 4132544 - RNA, 57 nt, Human
ggcaggcaggaaggacuaaguaacugcgccauuauuuuuaugccuuccuguguugcu

SEQ ID NO: 4132545 - RNA, 60 nt, Human
ggcaggcaucauguggucauuaaaguuucccaagacgauguagccgggauggugccuguc

SEQ ID NO: 4132546 - RNA, 63 nt, Human
ggcaggcaugggccaugggaagugggcaguucuuagugccccugcucaggcgugugcccugcu

SEQ ID NO: 4132547 - RNA, 90 nt, Human
ggcaggcuucuacaaugagcaugcaggcuugaauucucuuuuguauaacccaagacuaaaguccugugugcuuacacuugugaauucucc

SEQ ID NO: 4132548 - RNA, 72 nt, Human
ggcaggcuucuggaacacugcaaugcuuuguuccucaaccugugugccagucauccagauguguagcuuguc

SEQ ID NO: 4132549 - RNA, 81 nt, Human
ggcagggacagagcucagacucgggccuggggcucuuuguggagccugccagauccccugagcugacugccucucucugcc

SEQ ID NO: 4132550 - RNA, 76 nt, Human
ggcagggagagcaugcugauaacgcagcccccugaaaauauaaauauugcaugaauguauuagccucaucccagcc

SEQ ID NO: 4132551 - RNA, 89 nt, Human
ggcagggaggcaucuagaccaggcccacacacggggcaaaagaugggcccuggagucagguuggccugggcuuggauugaggcucugcc

SEQ ID NO: 4132552 - RNA, 80 nt, Human
ggcagggccuuuuaaagugucugccucagcucagagaggcuguggaaccugucagagcucacacagcacugggcuccgcc

SEQ ID NO: 4132553 - RNA, 124 nt, Human
ggcagggcuugcuagucugacauaauauaaagagucuuggaacaugccgggguccagggccuaaaaccccuuguggucuuuggaacacccagcucugugccaaaggguggaaggcugcccugcc

SEQ ID NO: 4132554 - RNA, 85 nt, Human
ggcaggggguauucagcauuagagacaucagagcagagaauagcucuguauccugacucugguguccucuacccauccccucgcc

SEQ ID NO: 4132555 - RNA, 63 nt, Human
ggcaggggugaggccacucugaaaaacaaggccccccuuguugcaggcacacucauuccugcu

SEQ ID NO: 4132556 - RNA, 58 nt, Human
ggcaggguaugaauuuggugcucuggaauacagagugauaaccacaugauaucuugcc

SEQ ID NO: 4132557 - RNA, 75 nt, Human
ggcaggguggaucucugcagguaagcguucuuggaccggucaugguccugccguccuccggggccuccacccucu

SEQ ID NO: 4132558 - RNA, 88 nt, Human
ggcagguaggcagggcucauugccaggcauuggaaacauguggcggagcuggaccacugccuggcagagguuugcaaggccccgagcc

SEQ ID NO: 4132559 - RNA, 67 nt, Human
ggcagguaucucagcuggaucaguggaaaggcaaagcacuuucauuucccagccugagggcucagcu

SEQ ID NO: 4132560 - RNA, 95 nt, Human
ggcagguaugauaaauauaguuggaucauggaaugucugcuuuuauuucuauguucauugaaaacaguguuuuuaugauuuauguuguaucuguu

SEQ ID NO: 4132561 - RNA, 75 nt, Human
ggcaggucagggugucccagaggacagggucacaugggccaaaucaugugaaccuggguccugggcccuuuugcc

SEQ ID NO: 4132562 - RNA, 57 nt, Human
ggcaggucaucgauucauaaacacugagaguguuuucaugugauaguugaaccugcc

SEQ ID NO: 4132563 - RNA, 68 nt, Human
ggcaggugaguucauuaucugcacauugguauuucugcauauguaaaaaugaauuuauaauaccugcc

SEQ ID NO: 4132564 - RNA, 71 nt, Human
ggccaauuugucccagugaugacuaauucucugauguuccagauauccagagaucacacugggcagggguc

SEQ ID NO: 4132565 - RNA, 67 nt, Human
ggccacaauuuuacuagaccguauucucaacugaaucauuagaucaugagguggucuucaguagguc

SEQ ID NO: 4132566 - RNA, 67 nt, Human
ggccacagagguggggauuccugaucacuguguaguacaagagaugacaggucgccacaaauggguc

SEQ ID NO: 4132567 - RNA, 60 nt, Human
ggccacagauuaggaaaugaggggagagaaaugcuccugucuuaaugaucucgugcagcc

SEQ ID NO: 4132568 - RNA, 57 nt, Human
ggccacagcugcagacuucccagcaggagggcuuugccugggagaugcguuguggcc

SEQ ID NO: 4132569 - RNA, 71 nt, Human
ggccacaggcaagagcccugccaauggaugaggccugccauagguucuagugcugggcucugcugugugcc

SEQ ID NO: 4132570 - RNA, 75 nt, Human
ggccacaugcccugcccauggcugaggcagaagcuuugucagaagugucugccuggccuggagggcacaggggcc

SEQ ID NO: 4132571 - RNA, 57 nt, Human
ggccacauuccuggugcucagcagccacgcguggcugugcagauguagggaguggcc

SEQ ID NO: 4132572 - RNA, 71 nt, Human
ggccaccacucagucacacuuaccgcauggcaggcuggggagugucaucuuguggcugggugccaauggcc

SEQ ID NO: 4132573 - RNA, 61 nt, Human
ggccaccagagugaaaagcugggagggcaucuccugcuccuccagcuucucuuuugggguc

SEQ ID NO: 4132574 - RNA, 86 nt, Human
ggccaccaggagcaguggugguguguuagagugcagaggaugcuugcacucgcccuggaacaucuccgccagcuccugccguggcc

SEQ ID NO: 4132575 - RNA, 64 nt, Human
ggccaccuuccuguggucucugcuguggugcaggcaggggccaccaccaaggaaggugggaucc

SEQ ID NO: 4132576 - RNA, 57 nt, Human
ggccacgguggggcaggaggauagcuugaggccaggaauucuaccuuacuguaggcu

SEQ ID NO: 4132577 - RNA, 84 nt, Human
ggccacgguggguagcuguuaucuguuauugccaguucuucaguaaggaggagcacgaaguagauacagaauuccacaguuguc

SEQ ID NO: 4132578 - RNA, 103 nt, Human
ggccagaaagaggaaccuaaauaacuugugagagcagcugggccugggacuggcaggcugaaacucggggucuaugaagugaguucccaugucuuuacuggcc

SEQ ID NO: 4132579 - RNA, 82 nt, Human
ggccagaagggcagagaggacaucugaaccuagaguugugcuccacucuaugugcuugacuacucucuauuccugucuuguc

SEQ ID NO: 4132580 - RNA, 65 nt, Human
ggcauggcuggguucuggugagggcccucuucuugguuugcagacagccagcacccagcuguguc

SEQ ID NO: 4132581 - RNA, 59 nt, Human
ggcaugguacagugcacugaauggagucaggaggccugggaucuggcacuggccgugcc

SEQ ID NO: 4132582 - RNA, 59 nt, Human
ggcaugugaggcggggcuuugggugaaaauguccaguuguuagcucucccccacaugcc

SEQ ID NO: 4132583 - RNA, 78 nt, Human
ggcauguugugaugagguagauaacaacagcaacaauaauaauaauagcuaccauuuacuaaugucauaucgcgugcc

SEQ ID NO: 4132584 - RNA, 74 nt, Human
ggcauuaaaggaucaaguggauuuucuuagcauaaaaauaugcugagcgugccuguugguuuaccuauaauguc

SEQ ID NO: 4132585 - RNA, 65 nt, Human
ggcauuaucuguauccccaucuagcuaggucaucaccaucuuguuaguguggaugagacaguguu

SEQ ID NO: 4132586 - RNA, 70 nt, Human
ggcauucugauucuagagacuauauacucuuaacagcuacagucucucacagaggauucuccagaaugcc

SEQ ID NO: 4132587 - RNA, 81 nt, Human
ggcauucugcuuuuaaguuaguuguggguucauucuuuuauaaaacucgaaucacaagauacaguuagaagcagggcugcc

SEQ ID NO: 4132588 - RNA, 80 nt, Human
ggcauucugggugagcugccucgggucagcccaggggugcaggcuccucugacugggaccacaggcagccacccgaggcc

SEQ ID NO: 4132589 - RNA, 63 nt, Human
ggcauugccauuccaggguauuaggguauuggggccugaggccccugaggauagcaugaagcc

SEQ ID NO: 4132590 - RNA, 117 nt, Human
ggcauuggcaauggggcaugcgcccuuuguggucagaggccugguucugcaaacacugccugcagcuauggaugccagcugccauaagagcagccuuucugccccguugcuauugcu

SEQ ID NO: 4132591 - RNA, 129 nt, Human
ggcauugguggugaugcaagagcuacccuugaaggagaagagcagaaguccuuggauccaaguugaccuauuuuuggccgagucuccuuuuauccugucgcugguggaucuguagcuugauuugucacc

SEQ ID NO: 4132592 - RNA, 82 nt, Human
ggcauuguucacuugcauuuuuagaugcuucugucuugucacuauaacuagauaugagcuugaaaugaacugaaaucuugcc

SEQ ID NO: 4132593 - RNA, 58 nt, Human
ggcauuuagauugaauuucuguagggcagaagccuuguuuuauucuucuuugaaugcc

SEQ ID NO: 4132594 - RNA, 81 nt, Human
ggcauuuauuagcaugaaagcauaggacagucauacaucccagugccaggcuuccauccuuuuaagugcuccaagagugcc

SEQ ID NO: 4132595 - RNA, 92 nt, Human
ggcauuucacuucauuuuugucagcagcugguuugcuguuaugauauauauuuagcaguagugauggccccugagacuguugguuugaugcc

SEQ ID NO: 4132596 - RNA, 66 nt, Human
ggcauuugacuguuucuacucaaauaaaaugaacuggcaaaauauuugagcagaaauguguaugcc

SEQ ID NO: 4132597 - RNA, 101 nt, Human
ggcauuuuaaaauguguuuauuauaucuuguuuugaacucaucaggaaauuuuaaacauuuacugaugucaaaggaggaauaaauauugucuucaggugcu

SEQ ID NO: 4132598 - RNA, 117 nt, Human
ggcauuuuuuuuucuuuuugggaacuugacaguacuucuggaaguggaauuuuuguagaaaauauauuaaaguugucauucucagguucuucagguugaaaaguaaaaauugaggcu

SEQ ID NO: 4132599 - RNA, 62 nt, Human
ggccaaagcuggacugcucaguucauuuuccaguucaguagcuguaguaauccagcuucgcc

SEQ ID NO: 4132600 - RNA, 126 nt, Human
ggccaaccccaacauuuacuucuucgugggcuccuuuaggcagugucaaaauaggcagaaccugaagcugguucuccagagggcucugcaggacacgacugaggugaaugaagguggacgauggcu

SEQ ID NO: 4132601 - RNA, 74 nt, Human
ggccaagacagugugcaagugacuuuguuucccauccaugaacuaaauggaaagacauguccuucauuauggcc

SEQ ID NO: 4132602 - RNA, 70 nt, Human
ggccaagauguaagugacaaaaagaaauguaagguauacuacuuuacuguucauguuguacacuugggcu

SEQ ID NO: 4132603 - RNA, 102 nt, Human
ggccaagcauauugccuuauauuuagcaagcaugcgguaaauaugcauugcauugaauggaaugaaauugcauugcagcuagauuuugagaugcuuauggcc

SEQ ID NO: 4132604 - RNA, 58 nt, Human
ggccaaggagaaaugcugugcuuuccuucacaggacaagccaggguuucucuuucucc

SEQ ID NO: 4132605 - RNA, 86 nt, Human
ggccaaggcaucuucccucccuggcugccauuuccucaucuguaaaugaagggguuggauuacuuagggagaaguaaacuauggcu

SEQ ID NO: 4132606 - RNA, 62 nt, Human
ggccaagguuagugcaucuuuuguuuguuuauaaaggcaaccuuggcauaaugaccaugguc

SEQ ID NO: 4132607 - RNA, 74 nt, Human
ggccaaugcccuuuuaacauugcacugcuagugacaggugcagacaguagcacaaugugaaaagagcucuggcc

SEQ ID NO: 4132608 - RNA, 58 nt, Human
ggccaaugucauuucacugggcuuacuccuaagguaagccaucaucauggcuuuggcc

SEQ ID NO: 4132609 - RNA, 128 nt, Human
ggccaauugggguacuguuuggagaauuaacaggcaacaguugacucugaguuugccuuucaugaguuucuaucaaauucagggcauccauugccuguugaauuguuucaguauuagccaugauugcc

SEQ ID NO: 4132610 - RNA, 67 nt, Human
ggccaauuuucuuagagaagcauguuuggaagaacauucuagauggaguggagaugaguaaauggcc

SEQ ID NO: 4132611 - RNA, 92 nt, Human
ggccacaaacuguucauuuuaaguuuggugugcucaagaccugaucauauuuuccucucuauucuuauaucagaguuaaaagaauguuggcu

SEQ ID NO: 4132612 - RNA, 78 nt, Human
ggccacaaggagcagagcugggauccugggucuggcaccgcugagggcccaugacccuagccaacugcccuccaugcc

SEQ ID NO: 4132613 - RNA, 69 nt, Human
ggccacacucugguagaggugaagugcaaacucagucuucagcaaugucauuccuucacggagguggcc

SEQ ID NO: 4132614 - RNA, 62 nt, Human
ggccacagaacugguuaauagcagagucccuaccagauucuuauauuagaggguuuuggguu

SEQ ID NO: 4132615 - RNA, 95 nt, Human
ggccacauagggaguagcaagguggggaggagugucucuuuguuuucuugccacagagagucauucuuuuuuaagcuugggaguucuugguggcc

SEQ ID NO: 4132616 - RNA, 95 nt, Human
ggccacaucauuuuccuuccccugcccucuucaugaccacccugggggguuuagcugauguaagagcuuugcagggaaaggcugugagugcugcc

SEQ ID NO: 4132617 - RNA, 73 nt, Human
ggccacaugcaaagccacaggacccgggcuuuggccucaggcagaaugggugagaaucugugcuuugcaugcc

SEQ ID NO: 4132618 - RNA, 75 nt, Human
ggccaccaacacauggcccagccagugcugcugggcucugguuucuguguucuggugaggccaugggguggggcc

SEQ ID NO: 4132619 - RNA, 66 nt, Human
ggccacccuagcugucauuucaguuccuugauacucagggaaacuugggcaugguuaugggaggcc

SEQ ID NO: 4132620 - RNA, 74 nt, Human
ggccacccucugcaggacugaggccuguuuguucucaucaguaaccaaacauugaccucauccuggcacuggcu

SEQ ID NO: 4132621 - RNA, 55 nt, Human
ggccacuccgcugcuacuggaagguagauccgagccgaguacgcgcgcgugcgcc

SEQ ID NO: 4132622 - RNA, 63 nt, Human
ggccacugagaggucucauuuccaauccugcuaguccaguuugaagacugaucuuuuaggguc

SEQ ID NO: 4132623 - RNA, 67 nt, Human
ggccacugaggcaggagguugagaacuguggggagugcugggcaguggccaacuuccugccucugcc

SEQ ID NO: 4132624 - RNA, 63 nt, Human
ggccacuuuaacucacauuucagcuugcuuucucaaguggagguuauugaguuaagguuggcc

SEQ ID NO: 4132625 - RNA, 59 nt, Human
ggccagacugagugaggucaaggucuuuugccucugaaguuccaugcucagucccggcu

SEQ ID NO: 4132626 - RNA, 63 nt, Human
ggccagagaauaugccuuacguaauuuugguucuuuauguuuucucagguuuguuuuauggcc

SEQ ID NO: 4132627 - RNA, 78 nt, Human
ggccagaguuucaucccacuagcuuagagcagcaccaggucagguggcacugggagaggugagacggaaacuaaggcc

SEQ ID NO: 4132628 - RNA, 61 nt, Human
ggccagauuuuagucaaauggccacaaaacuucaagagaggcuaggaacuauggucuggcu

SEQ ID NO: 4132629 - RNA, 79 nt, Human
ggccagcccuugccccaggagggccaaugggaaguuccagauggaaagucacuuacagcucuuuugucugaggguggcc

SEQ ID NO: 4132630 - RNA, 107 nt, Human
ggccagccuuccauagggagcuguggucagcucagucgcucacugcagagcucaguacucucugaccauugcucccuacaaaaacaaacucccggccaaguuuggcc

SEQ ID NO: 4132631 - RNA, 61 nt, Human
ggccagcgccgcgccuugggaguucccuccgcgaagggggugaucaaggugcggcggcgcc

SEQ ID NO: 4132632 - RNA, 62 nt, Human
ggccagcuucuggacaaagucccuucagggaaggggaggaaggauuuguccugagcugagcc

SEQ ID NO: 4132633 - RNA, 68 nt, Human
ggccaggcaggcgggugugcggcggacggaaggcagagacgcacacgcacagggaggcuggccuggcc

SEQ ID NO: 4132634 - RNA, 63 nt, Human
ggccaggccaagaggguuggaagccaaggaacggguuaaggauccagucaacuuggcuuggcu

SEQ ID NO: 4132635 - RNA, 82 nt, Human
ggccagggaaucagggcccgggcuuccuggggguguggggccuuguagccucuuggacugggccagacacugauucccugcc

SEQ ID NO: 4132636 - RNA, 75 nt, Human
ggccagggugagcaugugguccagggucaggggcugucaaaagaaaacgacccugugucacaguggccuguggcc

SEQ ID NO: 4132637 - RNA, 64 nt, Human
ggccaguauucaucuaaggagcuugcuaaguuucccuucuuauauugagcuccugaaucucgcc

SEQ ID NO: 4132638 - RNA, 56 nt, Human
ggccaguuggauuuuuaguggucacuuaaguggaguagccacuuugcagccuggcc

SEQ ID NO: 4132639 - RNA, 58 nt, Human
ggccaguugugcuuuaaacccucuacuccuaagaaagaggcacagcacuuggcuggcc

SEQ ID NO: 4132640 - RNA, 88 nt, Human
ggccauacgguuccugucacgaugacugcacucugccauuguagagugaaggcagccauggacaguauauaaaugaaugaguguggcu

SEQ ID NO: 4132641 - RNA, 77 nt, Human
ggccauacuuuauguaguaaacuaaaauaagccucaaauagagugaauuauugaaggaacugaaauaaaauaugguc

SEQ ID NO: 4132642 - RNA, 67 nt, Human
ggccauauaugauugugaagauuuuaaacauacuaagaaacauuaguuucacauuuuacauguggcu

SEQ ID NO: 4132643 - RNA, 60 nt, Human
ggccauggcagcaugggauugguagauuucuuaucccuccauuugcaugcugucuuaguc

SEQ ID NO: 4132644 - RNA, 61 nt, Human
ggccauggcgggagccggcgucaucucaggcuucgacaugacaucggaggccgcccuggcc

SEQ ID NO: 4132645 - RNA, 57 nt, Human
ggccauggugaggucuucucaguggaaguuuaaaucauagaggggacaaucauugcc

SEQ ID NO: 4132646 - RNA, 59 nt, Human
ggccauggugguuugagcaccuccagcaccaggggagaugcuguccuagaaccagggcc

SEQ ID NO: 4132647 - RNA, 75 nt, Human
ggccauuacugcaguaguuuuugacucuagauaugcuucagugucaccuagagagcuuuuaaaaauacugaugcc

SEQ ID NO: 4132648 - RNA, 72 nt, Human
ggccauuagcgguauauauauuauuugcucuuauuucaacaauaaacaugaugucauauaugccauuaggcu

SEQ ID NO: 4132649 - RNA, 62 nt, Human
ggcuccaggaagggaaaucuccaugucuugcaugcaaagcugggcucucucaccuggaggcu

SEQ ID NO: 4132650 - RNA, 77 nt, Human
ggcuccagguaaacaugaggcccagggugaacauuaggcuucugguaaacaccaggcccauguggauuacuaggacc

SEQ ID NO: 4132651 - RNA, 57 nt, Human
ggcucccaaauaauugcaccaaguagauacaaauuugguuacuggauuugaggggcc

SEQ ID NO: 4132652 - RNA, 63 nt, Human
ggcucccagggucuaggcugcuggcaccuggcccaagauggucccuacagcucuccuggugcu

SEQ ID NO: 4132653 - RNA, 56 nt, Human
ggcucccuagggagagugggagaugaggagccugccuggugggucccuggggggcc

SEQ ID NO: 4132654 - RNA, 65 nt, Human
ggcuccgauguaccaguguuguuggcaagcacagguuuuuguccaggacugguucacacggugcu

SEQ ID NO: 4132655 - RNA, 130 nt, Human
ggcuccggcagcuggcauucuucgggggcagccucagcuggcaccucggggggcaccaggcaguggccagagcagggggucuccaggugccggggacugaggcuaccccugcugugggcugcagcuugcu

SEQ ID NO: 4132656 - RNA, 95 nt, Human
ggcuccuagcauauguccuuuagcccuuucuucuuuguuccuuccuccuuucacaugccuggaaugcagauguaauggcuggaggucaagcagcc

SEQ ID NO: 4132657 - RNA, 129 nt, Human
ggcuccucgguagcugccugaaagucuggacucugggggcugggcugggcuggguggggagauugcuguuggucccacugugccuguuguaauccccagguucaugaaagaggugccugccuuagagcc

SEQ ID NO: 4132658 - RNA, 65 nt, Human
ggcuccucuggcaggcuugggccucuuucccucucucucugcccugagcugugcucucaggagcc

SEQ ID NO: 4132659 - RNA, 71 nt, Human
ggcuccugacugggcccaagugcaaugcagugaucuauuuucuguaaauuauuggugcccaggucauagcc

SEQ ID NO: 4132660 - RNA, 62 nt, Human
ggcuccugagaaugggccaucaguggugugauccucagcuuccaaucccuauucucugagcc

SEQ ID NO: 4132661 - RNA, 93 nt, Human
ggcuccugcuuauucuaaaauucucuugaucuugacagcucucuauuauagcuaaguuaaguuagagugaauuaaauggaagaguuaacagcc

SEQ ID NO: 4132662 - RNA, 56 nt, Human
ggcuccuggcagcaacauuuauauagaauauacuguguuugguggcuccuaggguu

SEQ ID NO: 4132663 - RNA, 95 nt, Human
ggcuccugguuccagccucucccgcuuccugcuggcugccccauucaugugugcacccagggcaggaagugaggaccuggcaggucccuaggauc

SEQ ID NO: 4132664 - RNA, 72 nt, Human
ggcuccuguggggaggcauucuucucccugcugaggcagauggugguaauugccuccuuugucccgggagcc

SEQ ID NO: 4132665 - RNA, 117 nt, Human
ggcucggaggcauucagucuuuauucacaggcuggagugauguugcgguggacuuaaugcccccugagaggucugacuucaagccugugggugacacggagcuacuguuuuugaguu

SEQ ID NO: 4132666 - RNA, 92 nt, Human
ggcucggggaggaagcggugguuucucuuugaagccuggcugcaacaaguccaggagcggccaaauugcagagagaagcugccuccccagcc

SEQ ID NO: 4132667 - RNA, 71 nt, Human
ggcucggugguguuggguuggaaagcccccgccucguccggcggccaugcaguccccagcaccucugaguc

SEQ ID NO: 4132668 - RNA, 63 nt, Human
ggcucguguuguggcaguaacauguuauauugcagacguguuucagccagggccaccucaguc

SEQ ID NO: 4132669 - RNA, 65 nt, Human
ggcucuaauaugacagagcacuugacuugccggacagcuggggcaagucaaugauuauaagaguc

SEQ ID NO: 4132670 - RNA, 60 nt, Human
ggcucuagagacucuagagaaaauguggaagauacagggcucagaggcaucuguugggcu

SEQ ID NO: 4132671 - RNA, 65 nt, Human
ggcucuauuuguguguucguaaacauccucugauggcuucuaggaacuggacacugaggugagcu

SEQ ID NO: 4132672 - RNA, 69 nt, Human
ggcucucugcacuggggucccagcgcacguccaaguggccugcuggcggggacccagugauucgaggcc

SEQ ID NO: 4132673 - RNA, 91 nt, Human
ggcucugagaaggucugcauugagagcuugugaggcauugcuuaaccugaugucucugggugauucaguccuggaccuuugcugcagaguu

SEQ ID NO: 4132674 - RNA, 129 nt, Human
ggcucugcucccgguuggugcagcgggugcagaggcuggcuggccggagcgaggcgggcgacacgccgcgccgggcuucgccugccuguccuccaccuccgcagcaaguuucccuaccuucgggcggac

SEQ ID NO: 4132675 - RNA, 57 nt, Human
ggcucugcugggggaugugucccaggauccccuggccaagcuucucuaagcagcgcc

SEQ ID NO: 4132676 - RNA, 81 nt, Human
ggcucuggaagagucaacacaagcaauauugaaauuguucauuuaaaaucgcacugcuguuguuaaaugcuguugugagcc

SEQ ID NO: 4132677 - RNA, 71 nt, Human
ggcucuggagacauguggagaggcugcuggaggcagaaauucagaaauucuagaaccaugacuucagggcc

SEQ ID NO: 4132678 - RNA, 62 nt, Human
ggcucuggaggaaagggugggccauggcuuugaagccaggcaggcacacuuccuccagggcc

SEQ ID NO: 4132679 - RNA, 80 nt, Human
ggcucuggguaaggcguuugacccuggcaccuucauugucuaucaaauggggacccuguuagacucagccucccagaguc

SEQ ID NO: 4132680 - RNA, 83 nt, Human
ggcucugguaacuuuagucaucuauuuggugggcagggggccuacucaggcccucccuauguagaugauguuuuacaaaagcc

SEQ ID NO: 4132681 - RNA, 130 nt, Human
ggcucuggugaaaagagaacuaagacuuauuaauggaaaguguaaacuucaggugaucaaggcaugacuggguuuuuguaacuuaaguuuugcauauucuagaguaaaguaaggauuuucacgaagucac

SEQ ID NO: 4132682 - RNA, 58 nt, Human
ggcucugguugaccaugauggcgaugaugccucccaugccacuggccccaccauagcc

SEQ ID NO: 4132683 - RNA, 73 nt, Human
ggcucuguggccuuucuccagagcucccagaacugcugagcucagcaaaguggaggcaggaugcuaaggaguc

SEQ ID NO: 4132684 - RNA, 56 nt, Human
ggcucugugguguagcuaaguacauuuugaauuagggugagcaagcuauggagacc

SEQ ID NO: 4132685 - RNA, 61 nt, Human
ggcucuuccaaacaaaaaucuguguuauaaauuaacagcagguuauuguuauggcagaguc

SEQ ID NO: 4132686 - RNA, 66 nt, Human
ggcucuugacacaauguauauuuucaagacccaaaaguuuccugaaaaauuacauguucagggguc

SEQ ID NO: 4132687 - RNA, 62 nt, Human
ggcucuugauguucauugacuuggccaagacuagcuuucuaaguaaaugcaauaugaggacc

SEQ ID NO: 4132688 - RNA, 65 nt, Human
ggcucuuucauuauugagucucccuuuggcucuugugccgcagggcagacuaggauggaagugcc

SEQ ID NO: 4132689 - RNA, 86 nt, Human
ggcucuuugggaaucuuaggggcuuucggggucuuggguuccuugggcucuuuuuucuccuuggguucuuucgguuccuucggguc

SEQ ID NO: 4132690 - RNA, 73 nt, Human
ggcugaaaauuucgggagucaccuggggugguuuaccagccugcaggggagagacuucuaggaaaacgcagcc

SEQ ID NO: 4132691 - RNA, 56 nt, Human
ggcugaaagcgcgacuugccccgaaacagaaaguuacagggcaagcggcugucacc

SEQ ID NO: 4132692 - RNA, 75 nt, Human
ggcugaaagcucagucagugguguaugcuuccuggcacacuaugguguucaugugccaccuggcuagcucuggcc

SEQ ID NO: 4132693 - RNA, 72 nt, Human
ggcugaaauagauauggagauuucgcacuuaauuaaaggagaagugugcucaauucaagucuuuucaaaacc

SEQ ID NO: 4132694 - RNA, 61 nt, Human
ggcugaaauuggauccuugggcuauuuacaucuaguuuagcauuacagagccaguuuugcc

SEQ ID NO: 4132695 - RNA, 57 nt, Human
ggcugaacaaggucggggggaaagaaaugcuucacauaccuuuggauuuguuuaguc

SEQ ID NO: 4132696 - RNA, 89 nt, Human
ggcugacaacucuuuggauguaauacaagauuuauaguuguuuguuucuucuaaugagguggcaagguaaaucugcaucuguuacagcu

SEQ ID NO: 4132697 - RNA, 56 nt, Human
ggcugaccccagcaaggacucuccaugaguggaguguggcagcgcugugguuagcu

SEQ ID NO: 4132698 - RNA, 88 nt, Human
ggcugacucuuagaaauggcagcucuccuguuuaccuguaaucauuucaguuggaauuacaaagcaggucagcugaaaagagucagcc

SEQ ID NO: 4132699 - RNA, 61 nt, Human
ggcugagaguuuccucuggggcacacuggaaaagcauguuguccagggcaaacucaucacc

SEQ ID NO: 4132700 - RNA, 119 nt, Human
ggcugagccuccaggguggccaucugcuccaucagaaaguggcaggauaccuggguucccaaggggaacaggggugggugcuacuggauggagagaggccagugggaggccugcuagcc

SEQ ID NO: 4132701 - RNA, 102 nt, Human
ggcugagcuccauggagaaggacugagguaugauuuuuaaaaugaggcuuauaacugcugacauuuuuauaagagucaaacugaccccaguggagcucaucc

SEQ ID NO: 4132702 - RNA, 65 nt, Human
ggcugagcuugaauuauucugcucuuacucuuuuuggagugagaaagaugacauuaaagccagcu

SEQ ID NO: 4132703 - RNA, 55 nt, Human
ggcugaggagaacaaugagaucaaaggucuuccuuggaucaggauuucccuagcc

SEQ ID NO: 4132704 - RNA, 75 nt, Human
ggcugaggcagaggccugcacucaaaugcggaccaggggcuguuagagaauuagagugggggcuggggcuuagcc

SEQ ID NO: 4132705 - RNA, 55 nt, Human
ggcugaggcagauauuuauuggguugucucccaaaacagugauuaucucuucucc

SEQ ID NO: 4132706 - RNA, 107 nt, Human
ggcugaggcaggagaaucgcuugaacccaggaggcggagguugcagugagcugagaucaugccacugcacuccagccuaggcgacugagugaaacucugucucagcc

SEQ ID NO: 4132707 - RNA, 75 nt, Human
ggcugaggcuggaacaagggcguggcggucgcaggcuccagggcacgacgguccuuccucuuccccuucucagcc

SEQ ID NO: 4132708 - RNA, 59 nt, Human
ggcugaguaaguguucuuuauggcucggugccuaucauggggcucaacacuuaguagcu

SEQ ID NO: 4132709 - RNA, 84 nt, Human
ggcugaguagcccauaacaggaacauuuacugagugcaaaggcagcuuucaaguaaaucacuuuuuguccaguggggcccagcc

SEQ ID NO: 4132710 - RNA, 56 nt, Human
ggcugaguggagguagcccugugcugagaauaggaacauuuuacugcucacuugcc

SEQ ID NO: 4132711 - RNA, 102 nt, Human
ggcugaguuugaucuuaauucuuuuuaguagauucucauugaucugguuaugaagcaauuacuugacaaggacauaggaaacuacaaaagagaagcucagcu

SEQ ID NO: 4132712 - RNA, 101 nt, Human
ggcugauaggugcaaggugcuucaaggagucagauuguuugaaugucacacaugugacauucaaaauauuucugauguugaaaugaucucuaccuucagcc

SEQ ID NO: 4132713 - RNA, 67 nt, Human
ggcugaucaggugcaaaugcauaccuggcuuuuuccaucaauggcuucugcuuugccuugauuagcu

SEQ ID NO: 4132714 - RNA, 61 nt, Human
ggcugaucucgugugaccuuguaaugccccagggcaggggaagguagcauggguugcagcc

SEQ ID NO: 4132715 - RNA, 77 nt, Human
ggcugaugaauaugagacugagagccugaccccuucauugucaaguaauguaaaaggcuucauccauauuuauugcc

SEQ ID NO: 4132716 - RNA, 57 nt, Human
ggcugaugacgccugagucugaaccauuaggaaggacgggcucugcauccaucagcc

SEQ ID NO: 4132717 - RNA, 57 nt, Human
ggcugaugagcuuagcuagagaaguuguacgauguccugucuguccucucaugagcc

SEQ ID NO: 4132718 - RNA, 57 nt, Human
ggagauguuaacuacauagcuacaacuaccuauaagguagguaguguuaguauuucc

SEQ ID NO: 4132719 - RNA, 89 nt, Human
ggagauucacuugaaccugggauggggagguugcagugagccgagaucaugccacugcacuccagcccgggcaacaaaagugaaacucc

SEQ ID NO: 4132720 - RNA, 104 nt, Human
ggagauuccgaaaguuagguguggauuucucauaaugcacagguuugcugggcagagaguugggaaaaucccugccugaugacuuauacucuuucccaauuucc

SEQ ID NO: 4132721 - RNA, 83 nt, Human
ggagauugaaaugaugguuaaacacuggaggagucucuuuaaaauuuuccugaugcugguuguuuaaucucagaauaguuccc

SEQ ID NO: 4132722 - RNA, 80 nt, Human
ggagauuuagccuucuuuuuauuggguuuugguguucauuuuuagcaaauacuugaauaaaaagaauaaucacaaucucc

SEQ ID NO: 4132723 - RNA, 70 nt, Human
ggagauuucacuuggcuuuucuagucuuggguggggacccauuauggaagugaagagcucuggaaucuuc

SEQ ID NO: 4132724 - RNA, 59 nt, Human
ggagcaacccugccugacaacagaggauugacugcaaucguuugaaaggacagagcucc

SEQ ID NO: 4132725 - RNA, 88 nt, Human
ggagcaagaguugccaugguuuccuauaacucaggcaccagcuaucucauccgcuggucugacuacaauaggaagaagcagcuccucc

SEQ ID NO: 4132726 - RNA, 60 nt, Human
ggagcaagauuguccuggugcccuggcucagccccccugggucaguggcuuucuugcacc

SEQ ID NO: 4132727 - RNA, 78 nt, Human
ggagcacaaggccuucucuugugucugugaagggaagaaaugucucagaacauggacauaugagaccuuuccagcucc

SEQ ID NO: 4132728 - RNA, 86 nt, Human
ggagcacaugguaccccacagcauacaaaggcaccuccauuaagggccuauuggguuaaugcugauggguaaacaugaaucugccc

SEQ ID NO: 4132729 - RNA, 71 nt, Human
ggagcacgugguggccguggagguaguccaggccuuguagcagcugcaccauguaaguggccacgucaucc

SEQ ID NO: 4132730 - RNA, 87 nt, Human
ggagcacucagcuuggccugccacugccacgccacucugccuuuuggucaagugagcccucacaauggcggucagugagccugcucu

SEQ ID NO: 4132731 - RNA, 61 nt, Human
ggagcagaugagccucaugacugggccgaggggcccgcaugcucuagcucacucuggaucc

SEQ ID NO: 4132732 - RNA, 58 nt, Human
ggagcagaugucuucauggccuccaugucuguuggagaggcgacaagcuaugugcucc

SEQ ID NO: 4132733 - RNA, 69 nt, Human
ggagcagcacugauuagcgguucccacaagcguauagccaucugcaggcuccccugguggguuuguucc

SEQ ID NO: 4132734 - RNA, 70 nt, Human
ggagcagcagagggaacagcagccaggccugggacaggacuuagagcugggcagugcucugagcugcucc

SEQ ID NO: 4132735 - RNA, 65 nt, Human
ggagcagcccugugcggagggcccugugcggagugccacagguaccccuuuaugcaggugccucc

SEQ ID NO: 4132736 - RNA, 55 nt, Human
ggagcagcucagaggacuaguguuccauggagaacacugugacaaaggcuguucu

SEQ ID NO: 4132737 - RNA, 67 nt, Human
ggagcagcugcagugcagacccucagccucccaggagcaggagggucccagcagcugggggggcucu

SEQ ID NO: 4132738 - RNA, 55 nt, Human
ggagcagcugugggguugaccauggcagcugucacagccccacgugggcugcucc

SEQ ID NO: 4132739 - RNA, 107 nt, Human
ggagcaggagagaacuuuugggggugacagguauacucaccauugugacuguggcggugguuucauggguguacacauaugucaaaacuuaacaaauucuaugcuuu

SEQ ID NO: 4132740 - RNA, 91 nt, Human
ggagcaggggggaggaaagaaagcagaccaagaauauagaggccuggaccucuuuaguuuagugccugguuuccuucuugccuucaguuuc

SEQ ID NO: 4132741 - RNA, 58 nt, Human
ggagcauguuugagaaaugcgcucuucuguuugagucugcuguuucugagcuugcuuu

SEQ ID NO: 4132742 - RNA, 71 nt, Human
ggagcauuuaauugccagugcaguucccuccagaguauguuucccuuuggcuugaugacuggcaguguuuc

SEQ ID NO: 4132743 - RNA, 71 nt, Human
ggagcauuugcaucuguggaaauuggcaagugcuacaaaucgcauuuccucccuccacagcugguuguucc

SEQ ID NO: 4132744 - RNA, 57 nt, Human
ggagccaaggcuugcaaucugcagaacacgcuuucuggcugaauuagccuuggguuc

SEQ ID NO: 4132745 - RNA, 70 nt, Human
ggagccaaugggagggugaggaggcagcuguuggaaagcccuugaguagucacuucacccaucccacucc

SEQ ID NO: 4132746 - RNA, 127 nt, Human
ggagccaccacagcucauucguggaggugucuaaucagcuaugcuaauugauugucgugucugcaauaucagaugcaugcuuaauuagcacaugaacucuccugucagauauuccuggaggggcucu

SEQ ID NO: 4132747 - RNA, 128 nt, Human
ggagccagaggcagagcccagcugggagccgggguuucacuggucagucggucagucucugcagcugcagccugagaucagccaagccccuccugaggcuccuaccuggcucacuuugcccuuucucc

SEQ ID NO: 4132748 - RNA, 64 nt, Human
ggagccagaggcugcugcuguggccagcauggacagcacuaaaccaaagccgccucuguucucc

SEQ ID NO: 4132749 - RNA, 64 nt, Human
ggagccagcacuauuagauaugccuuuguugaauccccaaagaauugucuuuggucugaguuuc

SEQ ID NO: 4132750 - RNA, 65 nt, Human
ggagccaggcuaagaaaggugugaugagucaguggacuucagagcaccaaggugguuuggacucc

SEQ ID NO: 4132751 - RNA, 116 nt, Human
ggagccaggcugccaagaggcaggaaagggaagagucugcagccacaggaguguauuguuuccugccagcuggggcugcuuccuccccccagcagucucccggcagccgagccucc

SEQ ID NO: 4132752 - RNA, 67 nt, Human
ggagccagguuugaaucucaguccucuuacuuccuggcugugugaucgagguuugucacuugguccc

SEQ ID NO: 4132753 - RNA, 93 nt, Human
ggagccaguuuggugugccauccucccacaagcagguggugaguaauuucauccaguuguggagagggaaucuugagacaccaaagucaagcc

SEQ ID NO: 4132754 - RNA, 61 nt, Human
ggagccauacaaaaacaguuauuggguuagauugggcuuguaggcuguaguuuguaggucc

SEQ ID NO: 4132755 - RNA, 77 nt, Human
ggagcccagccgcauguuucagaggguucagaggguucgggaaacuccccaaggccacguucugcaugcggagcucc

SEQ ID NO: 4132756 - RNA, 79 nt, Human
ggagcccagggagggagugcagggacagaccggggcacuccaggccccauccacuggccacugcaccucuuccuuuuuc

SEQ ID NO: 4132757 - RNA, 70 nt, Human
ggagcccuggagcggagcccacuucagauggaugaguccagcagaguuuaaggccuggauuuagggcucc

SEQ ID NO: 4132758 - RNA, 114 nt, Human
ggagcccuuccuuugugccaggcuggaagcugugugcagaugaucucaucucaucuuuaguacccucuugcgagguaagguuacugucacacagugguuaagcacaagggcucu

SEQ ID NO: 4132759 - RNA, 70 nt, Human
ggagcccuugcugaccuuccaaaggguuuacugcagagaaaaagccaaaucagagaucaguaaaggcucu

SEQ ID NO: 4132760 - RNA, 112 nt, Human
ggagccgccgagccccccauuuccagggccagggacacgcugucaggcuccaggucauccaccucacuggcugugucccuguccagaguaggggaggacggcacgguggccc

SEQ ID NO: 4132761 - RNA, 70 nt, Human
ggagccgggacgagccccaggcuggaggcgggaccagccgcugccgucuccgucucggugucccggcccc

SEQ ID NO: 4132762 - RNA, 98 nt, Human
ggagccggggcucgcaacaccuucagucccggcagucgcgggcgugggcuugagcgcgugccuucugcgcucgugucuccgccggugccccuggcucc

SEQ ID NO: 4132763 - RNA, 77 nt, Human
ggagccucuccacagcucaggcucagaguaggcccucagcuucagcucugaagggugagcuguucgagagaggaccc

SEQ ID NO: 4132764 - RNA, 60 nt, Human
ggagccugaggcaggugacagaacaaaggacacagccuauguuggaugcuaccagguacc

SEQ ID NO: 4132765 - RNA, 55 nt, Human
ggagccugcaguccagacucugagccaggguggccagugucugggccucaggccc

SEQ ID NO: 4132766 - RNA, 59 nt, Human
ggagccugcgggagcucccauuccccacccuugaagggccagcuucaccugaaggcuuc

SEQ ID NO: 4132767 - RNA, 101 nt, Human
ggagccuguccccuuuggaggcugccccuuccucagcuggcucuugcucuaugaaggauauaugcuaguagcaggggguaccucucagggcugugggcuuc

SEQ ID NO: 4132768 - RNA, 65 nt, Human
ggagccuguguuuccuguagccaaaggcuuuugcaaagauuuguggcuaugaaagauaaaccuuc

SEQ ID NO: 4132769 - RNA, 85 nt, Human
ggagccuugcucugucauccaggcugaagugcaguggugcaaucacggcucacuguagccucguccuggguucaagagauccucc

SEQ ID NO: 4132770 - RNA, 81 nt, Human
ggagccuuuuuggacuaaacucuuggucaacaugaggaagaaagcucagucuucucuuuguuaccguguccauaggguuuu

SEQ ID NO: 4132771 - RNA, 62 nt, Human
ggagcgagauccugcuguccuggagaagugcagaguuagaacagcuguggccacuugcaucc

SEQ ID NO: 4132772 - RNA, 76 nt, Human
ggagcgcaguggcaggaucacggcucacugcagccucaaucucccaggcucaggugauccucccaccucagccucc

SEQ ID NO: 4132773 - RNA, 69 nt, Human
ggagcguggggcgucggggcugugugugguguggaacacaggggaggauccugagugugcccaggcucu

SEQ ID NO: 4132774 - RNA, 78 nt, Human
ggagcguuuagauaggauuuauucuacaauauugcauagaggcugugcuucguauuauuaauccuguuaaaaaucucu

SEQ ID NO: 4132775 - RNA, 83 nt, Human
ggagcuagggcuuuuccgcuggaaagucgaucuugguugaagauggcuuagaguccuggugagaaagagucauugugagcucc

SEQ ID NO: 4132776 - RNA, 105 nt, Human
ggagcuaugggugucuuagggauugcuucgggcucuguguguaugaaagaaacggagagagaucagcuucaaaagccagaagccugcguccccagcccaugcucc

SEQ ID NO: 4132777 - RNA, 56 nt, Human
ggagcucaagauguggccucugaagcagagcucugccagcugcuccuugagguucc

SEQ ID NO: 4132778 - RNA, 55 nt, Human
ggagcucaccuuggagucucuggugccugagagggcauggcuuccagguggcucu

SEQ ID NO: 4132779 - RNA, 86 nt, Human
ggagcuccagccgcuggggugagcagaaacagggguaagcagcuccggucuucagcagcgcuucuguggccugggcauacagcucc

SEQ ID NO: 4132780 - RNA, 55 nt, Human
ggagcucgguccccuccuccaagccagaccuuugcagagguggcaucugggcucu

SEQ ID NO: 4132781 - RNA, 56 nt, Human
ggagcucuccugaugugaagauuggaccaaacagcuucucuagccucagcagcucc

SEQ ID NO: 4132782 - RNA, 60 nt, Human
ggagcucuuccagcuuguugcucugcuguguugccugcaguuccucagcuguagagcucc

SEQ ID NO: 4132783 - RNA, 58 nt, Human
ggagcugaggcugaggccucacugucaccuucugugagguccaugacauccucacucc

SEQ ID NO: 4132784 - RNA, 70 nt, Human
ggagcugccacagacaggacagaacaggacguugucaagcgcucuguggcugaucugucucuguugcacc

SEQ ID NO: 4132785 - RNA, 55 nt, Human
ggagcuggaauauauugaaaccuucuugggagguuucagaauauauucuagcuuc

SEQ ID NO: 4132786 - RNA, 75 nt, Human
ggagcuggagcugccugggcgucugucuuccguuccuguuacuacagggccucugacgcccccagccccagcucu

SEQ ID NO: 4132787 - RNA, 69 nt, Human
ggccauugucagcauuuaaggaguaaggagcccacucaugcuucccuguauucuuugaugcuauaggcu

SEQ ID NO: 4132788 - RNA, 71 nt, Human
ggcucucugaggaaacccuuccagaaagggucagaaggcaauucuuaaauguaaugggugcuuuagaaguc

SEQ ID NO: 4132789 - RNA, 85 nt, Human
ggcucugacaugugucuccuuccgucucauagucauccccaccccagcuggagggaggaggcggggaggcgcugcuguaggggcu

SEQ ID NO: 4132790 - RNA, 82 nt, Human
ggcucugacccuuuagaauacagacuuucuauacccuuuuguuuaggauuuuuuggauucuggauuggaaaauuucagagcu

SEQ ID NO: 4132791 - RNA, 60 nt, Human
ggcucugaccuuucuuccaacugccagaaacacucacuggcucugagagguucagaugcu

SEQ ID NO: 4132792 - RNA, 59 nt, Human
ggcucugagguuccuuugcccucgccuugcugaauggugagccgcugccucucggagcc

SEQ ID NO: 4132793 - RNA, 68 nt, Human
ggcucugagucugcuccugguagcagaucuuggaugggucaaaguugcacagggcggucuuuuucgcc

SEQ ID NO: 4132794 - RNA, 57 nt, Human
ggcucugcaugcagguugucaggaggggcaccucagauccacaaccagcugcaagcc

SEQ ID NO: 4132795 - RNA, 66 nt, Human
ggcucugccugccccagcugagauaucacuuaacagugcgggcucuucaggggcagggccagggcc

SEQ ID NO: 4132796 - RNA, 94 nt, Human
ggcucugccuuuuugaggcuucccuuccucugggggugcugaugcuguggcauauucuagaucgaggugaugcggccccacuucuaggugagcc

SEQ ID NO: 4132797 - RNA, 57 nt, Human
ggcucugcuuccuggaauuguguuguauaaagucagaaccuccuggaagcaggugcc

SEQ ID NO: 4132798 - RNA, 58 nt, Human
ggcucuggagacacucccagcgguuccuccccaaggcugugucccuugucccagagcc

SEQ ID NO: 4132799 - RNA, 59 nt, Human
ggcucuggagauguccgaccugcauuuggaugacagguauugaccaccuccuugaugcc

SEQ ID NO: 4132800 - RNA, 107 nt, Human
ggcucuggauuaauucccucuggcagaugcaugacuuuucccugccuuucuuuugcaucucggaagcagggcuccauuucacugccaggauggauuuugccauugcc

SEQ ID NO: 4132801 - RNA, 80 nt, Human
ggcucuggcaagugagacucucagcagugcuaggguucaccaccaaacuggcagcuguggacgucgucauuucagaagcu

SEQ ID NO: 4132802 - RNA, 81 nt, Human
ggcucuggccaucuggagaggugcugggccauauguaaagcacacaagguggcugagccacuuguucagaugagccuggcc

SEQ ID NO: 4132803 - RNA, 57 nt, Human
ggcucuggggggaagucuguugccccucuuggcauuuauaccugcucucucuaggcc

SEQ ID NO: 4132804 - RNA, 61 nt, Human
ggcucuggguuuaggcucaggaaguggaucucugcaccuccuugagugucccccaagaguc

SEQ ID NO: 4132805 - RNA, 82 nt, Human
ggcucugugaggccagguccaguggaaggcccagcaagaggcacagccuggguuuggaucugaucuggcugacuucagagcc

SEQ ID NO: 4132806 - RNA, 124 nt, Human
ggcucuguggggaggugugcccagggucaccagauggagagcggcagauuaggaacagaaugggguuagccuguguccucuuccagugcuccuucugggcccuacuccuuccugaucaggugcc

SEQ ID NO: 4132807 - RNA, 85 nt, Human
ggcucugugggugcacuuucugaugacuuuagaagucaggugaggcugauggcuuccuuacagguuacagaaagcaauucaagcu

SEQ ID NO: 4132808 - RNA, 72 nt, Human
ggcucuucugccagcccugggccaucauuugcauaggaagcagauuuggcucggcugcugauggugaucgcc

SEQ ID NO: 4132809 - RNA, 94 nt, Human
ggcucuugagggcagggacccuguaugcuauaucccuaauaccuguguuagcagauaaauauaugguuucugugucuucuuacacuugagggcc

SEQ ID NO: 4132810 - RNA, 55 nt, Human
ggagggggacugacacugauuuuucauuugaaaucagccacuuaaaucucuuucc

SEQ ID NO: 4132811 - RNA, 74 nt, Human
ggagggggcuggucagagagaaaggaggcccugcuaggcagaguccccagcuaaucucuuugcccacacccucc

SEQ ID NO: 4132812 - RNA, 87 nt, Human
ggagggguacagcugucuggauauaccuuggccaaauuucaguguauauagaaaagugggagguuaucgacuauguuaaaccuuuuc

SEQ ID NO: 4132813 - RNA, 81 nt, Human
ggaggggucuggcugcuugugacccauggcccuggaccccaaaacucaggcuccuugcucacaggcucagccguucccucc

SEQ ID NO: 4132814 - RNA, 78 nt, Human
ggaggggugcuacugggaacuaguggguuugaggacaaaaacggcauuaagcuuccuaaaugcacagggcagcccccc

SEQ ID NO: 4132815 - RNA, 87 nt, Human
ggaggguccuagcucucucccucaugaaacagugagagcaacuuguuucaaacugggagugaggggacuuagaucugggaucccuuc

SEQ ID NO: 4132816 - RNA, 70 nt, Human
ggagguaucagcaucuccucaaagauauggugccuguaagaccccaccugucugcaguguuuauacuucc

SEQ ID NO: 4132817 - RNA, 60 nt, Human
ggagguauuugucaaucuguuucaguguuucuuaaugcuacugagcacuaaaaugcuucc

SEQ ID NO: 4132818 - RNA, 71 nt, Human
ggaggucagguguuagggacacugcucaugaguucaagacuggauugcaucauuguucucaccugaacuuc

SEQ ID NO: 4132819 - RNA, 63 nt, Human
ggaggucagugaaaggggaaagccacuguuuuuuaaagugauuugacucuuuuauuguuuucc

SEQ ID NO: 4132820 - RNA, 65 nt, Human
ggaggucauggaaacugcaguucccggggaugacgggcaucccuugcuggagguuucuagacccu

SEQ ID NO: 4132821 - RNA, 62 nt, Human
ggagguccaugugaauguggccuggaguuuuccuugugcucugggucagcacacuggucucc

SEQ ID NO: 4132822 - RNA, 65 nt, Human
ggaggucuguuuugaugccaccucucuucauaugugcucgggagguggccugaaaauguggcccu

SEQ ID NO: 4132823 - RNA, 64 nt, Human
ggaggucuucacaaagcuguuguuaaacucugucaagaguuucuuacuuugccugugaaccuuc

SEQ ID NO: 4132824 - RNA, 75 nt, Human
ggaggugacaucccggcagcagaggcccucuucuuccaggggguucucgccacugcuguugaaggugacauagcc

SEQ ID NO: 4132825 - RNA, 72 nt, Human
ggaggugagggucucuggggcuggcauuuguccuuccucuguucuuggcauccagagccccaauucaccucu

SEQ ID NO: 4132826 - RNA, 60 nt, Human
ggagguggcagagggacauucuugcuugaguucaugcuuuaguuuccucucuuacucucc

SEQ ID NO: 4132827 - RNA, 97 nt, Human
ggagguggcaucagaugggcacagaaguggugggcaggacuaggccacagguuuguaaagcuuugaguguuuauccuaaaagugaugaggagccuuc

SEQ ID NO: 4132828 - RNA, 63 nt, Human
ggagguggguuuggaagagcaggcugugugaaccgggcacucucccccaggacccacucaucc

SEQ ID NO: 4132829 - RNA, 56 nt, Human
ggaggugguuugauuucuauauuuugaauuauaguucaugcaaccauacuaccucu

SEQ ID NO: 4132830 - RNA, 65 nt, Human
ggaggugucacuauuuugcuuaugguauggauuugaugaugcgcagaagcaagucugacacuccc

SEQ ID NO: 4132831 - RNA, 59 nt, Human
ggagguuccagcccaauauggccucggagguggccaagaugccccugguagggaucucc

SEQ ID NO: 4132832 - RNA, 57 nt, Human
ggagguugcagccagguuguuaucuggugcuugacuauggcugguggcucagccucc

SEQ ID NO: 4132833 - RNA, 95 nt, Human
ggaguagggaguugggggcuggguuggcuucagaggguucggccuccugagcaaggccaccuggacagcugugcccucccccuucauuccucucc

SEQ ID NO: 4132834 - RNA, 67 nt, Human
ggaguagggggagcggaaugggaugcgaggcaggucugcucguguguauucccucuccuucagcucu

SEQ ID NO: 4132835 - RNA, 70 nt, Human
ggaguaguggcugugaaauacaugggaaagaguuugaaaaguauguaucccacauuucacagcacuuucc

SEQ ID NO: 4132836 - RNA, 80 nt, Human
ggaguauaaugauuuagugugcuuuuuccccuguguuugcauguuugcaaagauuuaaagcaguauucgcaauguacucu

SEQ ID NO: 4132837 - RNA, 114 nt, Human
ggaguauagauuuaaucuggauaauucaucauuuuauagcuaguuggauuaaucagaccaguucuacacuagcaaaaugaaagugaugaaccaaguuaauuaucuagaccaucc

SEQ ID NO: 4132838 - RNA, 89 nt, Human
ggaguaucacucugucauccaggcuggagugcaguggcacgaucuuggcucacugcaaccucugcccccacggguucaagugauucucc

SEQ ID NO: 4132839 - RNA, 72 nt, Human
ggaguaucugucaucucccagugauggaugcuugcacaggaagcauccauccauguaggaagauggugcucc

SEQ ID NO: 4132840 - RNA, 113 nt, Human
ggaguaugcugguuugaaacuauuguuuugaaggucuucaaccuguuagaucaauucuccaccuagcagcaaaaugaccuucuaaauauauaaguaggaucacagcacauucc

SEQ ID NO: 4132841 - RNA, 66 nt, Human
ggagucaccagcccaaagucaccccgggaugacuggcgaugcugggggguuggggcugggggaccc

SEQ ID NO: 4132842 - RNA, 59 nt, Human
ggagucauguucugaaucuuuugucauaacaggagaauuaucuggaacaaacagauucc

SEQ ID NO: 4132843 - RNA, 103 nt, Human
ggaguccacaggucugaaauccaggugugggcagggccgugcucccuccgaaggcucuaggggaggauccuugcucaacuuauuuuugagacagucuugcucc

SEQ ID NO: 4132844 - RNA, 55 nt, Human
ggaguccaccaaguauuucagguucucuccugggccacuugaaaguggauguacc

SEQ ID NO: 4132845 - RNA, 86 nt, Human
ggagucgcacucuaucacccaggcuggagugcagugacacgaucucuguucacugcaaccuccgccucccggguucaagcgauucc

SEQ ID NO: 4132846 - RNA, 88 nt, Human
ggagucucacucugucacccaggcuggagugcaguggcacaauuucggcucacugcaaccuccgccuccuggguucaagcaauucucc

SEQ ID NO: 4132847 - RNA, 91 nt, Human
ggagucucacucugucucucaggcuggagugcaguggugcaaucucagcucacugcaacaaccucuaccucccagguucaaaugauuuucc

SEQ ID NO: 4132848 - RNA, 88 nt, Human
ggagucucacucuguugcccaggcugaagugcaguggugugaucuuggcucacugcaaccucugccuccuggguucaagcgauucucc

SEQ ID NO: 4132849 - RNA, 129 nt, Human
ggagucucacucuguugcccaggcuggagugcaauggcacgaucuuggcucacuacaaccuccaucucccagguucaagcaauucuccugccucagccucccgaguaguugggacuauaggugggcacc

SEQ ID NO: 4132850 - RNA, 88 nt, Human
ggagucucgcucugucacccaggcuggagugcaguggcacgaucucggcucacugcaagcucugccuccaggguucaugccauucucc

SEQ ID NO: 4132851 - RNA, 88 nt, Human
ggagucucgcucugucaccgaggcuggagugcagugacgcgaucuuggcccacugcaaccuccgccucccagguucaagcgauucucc

SEQ ID NO: 4132852 - RNA, 88 nt, Human
ggagucucgcucuguugcccaggcuggagcgcaguggcacgaucuuggcucacugcaagcucagccucccggguucacgccauucucc

SEQ ID NO: 4132853 - RNA, 88 nt, Human
ggagucucgcuuugucgcccaggcuggagugcaguggcaccaucucgguucacugcaaccuccgccucccgcguucaagccauucucc

SEQ ID NO: 4132854 - RNA, 66 nt, Human
ggagucugauguuuuccuggugacuucauaucacuguaugacacauaccgaaaauauuugggcucc

SEQ ID NO: 4132855 - RNA, 93 nt, Human
ggagucuggcucugucgcccaggcuggagugcaguggugcagcgcaaucugggcucacugcaagcucagccucccggguucaugccauucucc

SEQ ID NO: 4132856 - RNA, 87 nt, Human
ggagucuugcucuguugccaggcuggagugcaguggcgcaaucucugcucacugcaaccuccaccucccggguucaagcgauucucc

SEQ ID NO: 4132857 - RNA, 88 nt, Human
ggagucuugcucuguugcccaggcuggagugcaguggcgcaaucuuggcucacugcaagcuccgccucccgggcccaaguguuucucc

SEQ ID NO: 4132858 - RNA, 86 nt, Human
ggagucuuguucugucacccaggcuggauugcaguggugcuaucacagcucacuguaaccucgaccaccugggcucaagugauucc

SEQ ID NO: 4132859 - RNA, 67 nt, Human
ggagugaagagaagaaaauuaucuuugugaauggaguuagagaagguuuucuauuuuuaaggacucc

SEQ ID NO: 4132860 - RNA, 63 nt, Human
ggagugcaguggcgugagcucggcucacugcaagcucugccucccauguucaugccauucucc

SEQ ID NO: 4132861 - RNA, 73 nt, Human
ggcugggagcugggcuggcuuccucccuccucgaccacacgcagcagccaagccucagcccggcucaccagcc

SEQ ID NO: 4132862 - RNA, 56 nt, Human
ggaguucacuuucauucuggcuucugguuaagagccaggaucugauauugggcucc

SEQ ID NO: 4132863 - RNA, 89 nt, Human
ggaguuccuauuuucacuuauuucugcuacuaccauuagaaaauggaauauuuuagccaggcaauuaugggugaucaaauagcuauuuc

SEQ ID NO: 4132864 - RNA, 121 nt, Human
ggaguugaguggaggacaggggagcuugaggcauggccugaucccaggcuuauauuccauaguacagcauuuauccccaggucgggccucuggcauccucugcucucugaaaaucugcucc

SEQ ID NO: 4132865 - RNA, 90 nt, Human
ggaguugcaaagcacuuugcuguuauaaugauagcucccuugaugucuguucauuauuaacugcuuuucaaaagugcugcuuucaacucu

SEQ ID NO: 4132866 - RNA, 87 nt, Human
ggaguugcugcagggccugagguugugccuccuacucugaaagaguucugggccuggacaccugaggucuuaccugccugcaauucc

SEQ ID NO: 4132867 - RNA, 59 nt, Human
ggaguugguggcccggaaucucucugggauuucuggaguucccuggagccuccaacucc

SEQ ID NO: 4132868 - RNA, 87 nt, Human
ggaguugugugcucaggacuucauuaccucagguggucugagugcagaugacugauguaaaugaggucugccuggcacagccucucc

SEQ ID NO: 4132869 - RNA, 123 nt, Human
ggaguuguugagauggacuuuagaggaugccugcagccauguggagcuguauuccaacucagagaggcagcugaauguccauugcugcaggcaaacuucagaugucccagucuuacaaauucc

SEQ ID NO: 4132870 - RNA, 118 nt, Human
ggaguuuagaaacauguugcuuaacacuugugagaaaaugauugcacagucucuauuagaaucucauuagcauacgugcuccauuuuuuugaguguagacuuacaauuguaaaucucc

SEQ ID NO: 4132871 - RNA, 88 nt, Human
ggaguuucacucugucacccaggcuggagugcaguggcacgaucuuggcucacugcaaccuccaccuuccggguucaaaugauucucc

SEQ ID NO: 4132872 - RNA, 129 nt, Human
ggaguuucaguguuauuguaauuaaggugcaaguguaaaugugaccuucauuuuauagucccgggcuugugaaugcaggcauauuaaucaaacauugaucuuaaauuagcuuuaagcauguagacuaac

SEQ ID NO: 4132873 - RNA, 89 nt, Human
ggaguuuugcucuuguugcccaggcuggagugcaauggcacaaucuuggcucaccgcaaccucugccucccagguucaagcgauucucc

SEQ ID NO: 4132874 - RNA, 56 nt, Human
ggauaacauuuuuaagaccaagugcuauuuuagcaugagcuuaaggguguauguuu

SEQ ID NO: 4132875 - RNA, 65 nt, Human
ggauaacgcgcuucguagguaugaacucaguuaaccccacagucacacuaugaaguguguuaucc

SEQ ID NO: 4132876 - RNA, 79 nt, Human
ggauaacuuaaccaaauuccaguucuaggaucuagaucccaauucuagaaguuggggcuagggauauggucuucuuucu

SEQ ID NO: 4132877 - RNA, 66 nt, Human
ggauaacuugauguuauuuguccaccugaccacuagguggcaauaaagaccaacagguuacaaucc

SEQ ID NO: 4132878 - RNA, 75 nt, Human
ggauacagugaugaucauuguaacaucaucagucauagugacucagggauaaguucagugacaucauaaauaacc

SEQ ID NO: 4132879 - RNA, 69 nt, Human
ggauacauaaaguagcagagcaugacuccauguggguugguuccacuuuguguuuuggcuuuuguauuc

SEQ ID NO: 4132880 - RNA, 61 nt, Human
ggauaccucaggcucucagaccaacagcauguucacaucuugguuucagauccugaaaucc

SEQ ID NO: 4132881 - RNA, 89 nt, Human
ggauagaacauuugaaguugagauaucuugagauaacuguuauauuuaauugaccugaauugucauaucuuauucugaaaugucugucc

SEQ ID NO: 4132882 - RNA, 84 nt, Human
ggauagauggaagcaaagugggaugacagugcucauaugaagucaucauauugcugucauugucccuccaggcugcugucuucu

SEQ ID NO: 4132883 - RNA, 78 nt, Human
ggauagccaguaugguggcaggucccauuggagcagcagcaauagguugguuguggguccugcuacaucaggcuguuu

SEQ ID NO: 4132884 - RNA, 68 nt, Human
ggauagcccuuucccuguaccaggccuugcccauucagugcuaccaggccuagggagaugggacugcc

SEQ ID NO: 4132885 - RNA, 70 nt, Human
ggauaggaugggggcagacaggcacugucaauggcuagccugggccugaucuuugacccucauccuugcu

SEQ ID NO: 4132886 - RNA, 72 nt, Human
ggauagggaaaagaauaacugaagaaacuagcuuacaauagcuagguuucgucaggcuuauucuauccagcc

SEQ ID NO: 4132887 - RNA, 105 nt, Human
ggauagugcuccaccaaugcucaaaacuggcuuuuagugugaagacuuggacucucauuuugauauguggaagcccacugaguuugguaaacagguguaucaucc

SEQ ID NO: 4132888 - RNA, 104 nt, Human
ggauagugcucuccuugauguguuagcuggcccuucuuucagguccccuuugaaugguaauauuggcacagaaauuaacaucucacagagacccaauauugucc

SEQ ID NO: 4132889 - RNA, 82 nt, Human
ggauauaagcgcagagggacuccucaggaucuaggagugcuucagccucugaaguacuuuuacuugggccucugugguaucc

SEQ ID NO: 4132890 - RNA, 81 nt, Human
ggauauauuacacagugguuaagucugggcauuuaguguaaccuaauaguguacauuuuaccauuaaguaauuucucaucc

SEQ ID NO: 4132891 - RNA, 87 nt, Human
ggauaucgacaauuccuaaucccauuguggaauuaaggaauguuagauacauuucguuauccaggcaauguggauuuugaugcaucc

SEQ ID NO: 4132892 - RNA, 75 nt, Human
ggauaugaggagugggugguggcagcuguucuuaggugugguucuagaaaccuccauuuauucacucuccuaucc

SEQ ID NO: 4132893 - RNA, 101 nt, Human
ggauaugcagacauguaggaggucuaaccggcugcugaaaacuuggacccucagggccugacuacagaggcuggauggacuugccuacugugugcaggucc

SEQ ID NO: 4132894 - RNA, 109 nt, Human
ggaucaacaaaaugugauuauuuugcaaaggucuaagaaaucagaugaugagguuuuauaaucccaacuucuccauccucuucccuuuguggaauguuauguucauucc

SEQ ID NO: 4132895 - RNA, 56 nt, Human
ggaucaagaaagucagaugaagagggggggcauuucugcucacugacauuuuugcc

SEQ ID NO: 4132896 - RNA, 108 nt, Human
ggaucaaguagugcacguucucagggaggugcccaggaguggacuuuuaagcaaacaccuucucaggucugaucaugggcccacuuugggaaccacugcuuugcauuc

SEQ ID NO: 4132897 - RNA, 61 nt, Human
ggaucagauggucagggggcaagguaagucucagacucccagggccccuacaccacugucc

SEQ ID NO: 4132898 - RNA, 75 nt, Human
ggaucagcagacagacuugaaaauguucuuuuccuuccuggaaaggguucauuuagcaggaucugaucgcugccc

SEQ ID NO: 4132899 - RNA, 70 nt, Human
ggaucauugggcagggaaaggacaggcagagggcuuuuuuaugccaucuuuucccuucuccauccccucc

SEQ ID NO: 4132900 - RNA, 56 nt, Human
ggaucauuugcaggaaacauuaaacaaacuguuuaauaauuguggcaaauagaucc

SEQ ID NO: 4132901 - RNA, 90 nt, Human
ggauccaaaggggaauguuuuagcuugacuuuucuaaaauaaauuccagcaggaaaaaaguuaacaugaaauauuaagcccagaagauuc

SEQ ID NO: 4132902 - RNA, 68 nt, Human
ggauccaaguguuuuauaagggacagugagcuugccugcucuuugcuucagagggagacacuuuaucc

SEQ ID NO: 4132903 - RNA, 94 nt, Human
ggauccacugugucugccauggaagggggaucaucaguccuggcuugaacaguugggcuugaaaaugacucuugugaagacucacagugugucc

SEQ ID NO: 4132904 - RNA, 88 nt, Human
ggauccgagaugauucuuggcuuuagaacaugggagccagguaaauaauuaugcuaccguguucugugcuaaaauugagacuuggucc

SEQ ID NO: 4132905 - RNA, 87 nt, Human
ggauccuagcucuccugauuagguuuccauagcugguagagaagauucaguuacacaugggaaccugaucaggaaauuggcaggucc

SEQ ID NO: 4132906 - RNA, 59 nt, Human
ggauccuccaguuuuaggauccucgggcccugucuggagauccacugaccuggggaucc

SEQ ID NO: 4132907 - RNA, 55 nt, Human
ggauccuuaacuaucacagugaggaguacugauuauaacuggauguaaagggucc

SEQ ID NO: 4132908 - RNA, 83 nt, Human
ggaucgacccccacacaccaccgucccagccuccugccccacagaaaugcaggagcuacucagguuggguuggggccacgacc

SEQ ID NO: 4132909 - RNA, 73 nt, Human
ggaucgcauggcucauuuaucuugcagccauuaauuaauggugguuaauuguaguuaugagcuguugaauucc

SEQ ID NO: 4132910 - RNA, 86 nt, Human
ggaucuaaacaaaaauaguaacaguaacaucuuccuagagcauauuaacuucucuuuggggagaaauaguguuauugcauagaacc

SEQ ID NO: 4132911 - RNA, 129 nt, Human
ggaucuaggcuaagcaaagaguucuuaugcuauaugcacugugaucaaggcuaagcaaagaguucuuaugcuacaugcacugugaucuaggcuaagcaaagaguucuuaugcuacaugcacugugaucu

SEQ ID NO: 4132912 - RNA, 95 nt, Human
ggaucuaucugugucuauauauaggcauccuccguuugguuuguagaacugucaaaauaacuuaugaucgucuggcuuauggacacagguuaucc

SEQ ID NO: 4132913 - RNA, 55 nt, Human
ggaucucagaauuggacgguaguccaaugaugauaacuguauuuuucugagauuc

SEQ ID NO: 4132914 - RNA, 77 nt, Human
ggaucucucaugagguuucagucaagcuuuugacugggcugcauuuaucugaaggcuugacugaggcaggaggaucu

SEQ ID NO: 4132915 - RNA, 65 nt, Human
ggaucucuguuaauuacccacugacaggcauuaugaccuaacaggagguugguagcaguagaucc

SEQ ID NO: 4132916 - RNA, 80 nt, Human
ggaucugcccacugcagauguacaucuuuauaacaagcuuuaucauaauagaguaugauuacauuuguuaguugcagucc

SEQ ID NO: 4132917 - RNA, 82 nt, Human
ggaucuggaaagacuccauauuuaccugggcaaaagacuuucugugcugagguuucugacuauggagucucuaacagucucc

SEQ ID NO: 4132918 - RNA, 100 nt, Human
ggaucuggcaaacagccaggcgcagaagucuucauagaauucaaaugaggaagcacaaucccuuuugcgaauuuuggcugaaagaaagcaauacaggucu

SEQ ID NO: 4132919 - RNA, 61 nt, Human
ggaucuggccuaggaaugguuuuccggaugcgaaucugugagacuuucuuuggccucuucu

SEQ ID NO: 4132920 - RNA, 64 nt, Human
ggaucuggcugacagauguugcuuugugccuacaaauaacaaacacaucugcaagagccagacc

SEQ ID NO: 4132921 - RNA, 71 nt, Human
ggaucugguuuuggucuggaagcgucccaaaggugucgcaugccagggaaacugcagaccagcccacaucc

SEQ ID NO: 4132922 - RNA, 79 nt, Human
ggaucuuauauccacuauaccaccaaaaaguguguguuuaguaaauauuuauuggauggauggauggauggaugaauuc

SEQ ID NO: 4132923 - RNA, 79 nt, Human
ggaucuuuauagaauguuuccaaugccuucuucaugaagaauguccuacgucugcuggguuuggagacauauaaugucc

SEQ ID NO: 4132924 - RNA, 111 nt, Human
ggaucuuuuuugaaggggugaaggaaucaggaaacguugauaaaaggaaguuccuauaaccuuugggaauguuacaguuuuaauucugauucucacuuuagauuuugauuc

SEQ ID NO: 4132925 - RNA, 64 nt, Human
ggaugaaaagcccauguggaaguacaggccucccugguuacugccuuucccagguuucccuucc

SEQ ID NO: 4132926 - RNA, 64 nt, Human
ggaugaagagcucuacuccuuagagucuguuaaccaccagaccuggagugaagaguucccaucu

SEQ ID NO: 4132927 - RNA, 91 nt, Human
ggcgcaggccgcgaggcaggcccgggugugcagcaggacgggaagccaggccagcaggcacaccugccacuggcgggcauccggcugcgcc

SEQ ID NO: 4132928 - RNA, 59 nt, Human
ggcgcagggauuucaaggggccuuugcggaggcgguaaugaggucaccgucacugcgcc

SEQ ID NO: 4132929 - RNA, 86 nt, Human
ggcgcagggggugggagagugggagcaacuguugcucaagugaggcaggugcccucuucuccacgagucccagguacccucugccc

SEQ ID NO: 4132930 - RNA, 64 nt, Human
ggcgcauguggccggcggccgcgggccgugucaguugcggcagccaccgcguggcccgcgcgcc

SEQ ID NO: 4132931 - RNA, 109 nt, Human
ggcagaggggcugggggaguugggggaaacaugagacuggguuuguagggccccuaaggaggagcucaggacccgguccagguggguacgaguccuagguuccuuugcc

SEQ ID NO: 4132932 - RNA, 79 nt, Human
ggcagauaacuccagcagguccgagacaaguugguguaaacguuggcacggacuggcucaccuguugugugauuaaguc

SEQ ID NO: 4132933 - RNA, 67 nt, Human
ggcagauauguggauucuauuagccagagccugauucuagaagcugcucaugauccaaauuccugcu

SEQ ID NO: 4132934 - RNA, 60 nt, Human
ggcagaugacagaccaguaugugaaguuucucuuccaaauauccaucuuugucaucuucc

SEQ ID NO: 4132935 - RNA, 70 nt, Human
ggcagaugggagccccaggggagccgauuccaacagcagggagcugugacucuccuggggaccaucaacc

SEQ ID NO: 4132936 - RNA, 67 nt, Human
ggcagauucuguuacaaagcauuacaguaacaccccacuggaugcaaagcacacacagaauccugcc

SEQ ID NO: 4132937 - RNA, 63 nt, Human
ggcagcaacgaggcuugauaccaucuaguaugacacuaguuccaccaucaaccucuuccugcc

SEQ ID NO: 4132938 - RNA, 66 nt, Human
ggcagcaacuuaggcagaacaucuagaaccuagauguucuagacacuugagaaaugcauuuuugcc

SEQ ID NO: 4132939 - RNA, 58 nt, Human
ggcagcacaugcuucuugucgcuuggaagccagcuuccaugcaagaaguauggcuccc

SEQ ID NO: 4132940 - RNA, 80 nt, Human
ggcagcagaguaaggcaggcaacgucccuauggaggaaacaagcucagagaugcugccugauuuauucaagcucacaguc

SEQ ID NO: 4132941 - RNA, 56 nt, Human
ggcagcagcaagaagguuggacuagaaaggaguuuuacacauuucuuguagcagcc

SEQ ID NO: 4132942 - RNA, 58 nt, Human
ggcagcagcagggagcaggggugucacgagguucguguauccuccuuccucuguuucu

SEQ ID NO: 4132943 - RNA, 58 nt, Human
ggcagcaggagccaucugguagguacgcugccacuacucagacucaccucugccugcc

SEQ ID NO: 4132944 - RNA, 63 nt, Human
ggcagcaucuguauccuaggcugauugugaggaaucaaugagaaaagccugcaaaugcuugcc

SEQ ID NO: 4132945 - RNA, 65 nt, Human
ggcagcaugcaaguccagaugugggucugcucaugcacuuccauggccaauugcaccuugcugcu

SEQ ID NO: 4132946 - RNA, 61 nt, Human
ggcagccagcaaugagaaguuuguugaaaaccucuucauggagcuccuccuucuguaugcc

SEQ ID NO: 4132947 - RNA, 70 nt, Human
ggcagccagcagaaucuguccuuggaagaugugugaaacucuaaucucaacugguucuguuccggcugcc

SEQ ID NO: 4132948 - RNA, 63 nt, Human
ggcagccaguagggccagccugaccuccaggcacaagagaggcugcuuccuuacguggcugcc

SEQ ID NO: 4132949 - RNA, 124 nt, Human
ggcagcccccgccagcccaccagcaggcuaugucagggccgcucacugcuucuuucuggacacugcugagcagagcugccuguugcauagcaacugcccgggcauauuuguagggggcuggacc

SEQ ID NO: 4132950 - RNA, 58 nt, Human
gggacuuugucuccuaagaacucucagagcuguugugguugggaguggggaagguccu

SEQ ID NO: 4132951 - RNA, 72 nt, Human
gggagaaagucugcuuucuggauggcagagacgaccuucacgccaugcacaccagcaggcagacacuucccc

SEQ ID NO: 4132952 - RNA, 97 nt, Human
gggagaacuagaauaauuuauucuuauaagcaaacugcugagaagauagaaagaccugaaaaccuuucucaagcuguugcuguaagauuguucuccu

SEQ ID NO: 4132953 - RNA, 129 nt, Human
gggagaagauucuggaaggccccuuggaggagguggcaucugaguggggcagggaaaggaaagguggugguuagggcagcgcuuuggagucccugcuuuaccccucagccaaggccguccaacagucuc

SEQ ID NO: 4132954 - RNA, 58 nt, Human
gggagaaguggaaaucucauuauccaggcugccagcaugcugauuuccacugucuccc

SEQ ID NO: 4132955 - RNA, 56 nt, Human
gggagacaccacacacagaacagaggccgaguuuucuuauguguaccugugcuccc

SEQ ID NO: 4132956 - RNA, 77 nt, Human
gggagacauaugcccaccuagaauuucagaacuuauaguuguuauauugagaguuugggggcaauaugauaguuccc

SEQ ID NO: 4132957 - RNA, 65 nt, Human
gggagacugcugguaaagaugggagguggccuuugccgcuuuccaucuucucacugcaguuucuu

SEQ ID NO: 4132958 - RNA, 67 nt, Human
gggagacuggcucaugugaugagggcaacugugcuugcuaauuguccauuacugaaguugggcuccu

SEQ ID NO: 4132959 - RNA, 86 nt, Human
gggagagaagccgagcugggagagaagcgaagcugggcagcccaagggucugaguccuugcuucuauucccugcuacuucuuuucc

SEQ ID NO: 4132960 - RNA, 55 nt, Human
gggagagcgucauaugcccaggaggcaguucugccucuggcucuuugcuccuccc

SEQ ID NO: 4132961 - RNA, 87 nt, Human
gggagagcugaggagaggggcucccaagagccgacuggugcuuccccuugucugccuugacuugucucuccuccuguccccucuccc

SEQ ID NO: 4132962 - RNA, 68 nt, Human
gggagagcugcagccgagagggggagcugaagagaagugccccuucuguguccugucagccucauccu

SEQ ID NO: 4132963 - RNA, 72 nt, Human
gggagaggagaaaggcaauuuguugugaggauuuucauccugaaagccuuuaaugaauuguucuuugcuccc

SEQ ID NO: 4132964 - RNA, 107 nt, Human
gggagagggagcccccugccugagcagcagagaccccaggaaggaggccaagcccuccucacacaggaggucuccagcugcccucugaggugaggggugccucuccc

SEQ ID NO: 4132965 - RNA, 64 nt, Human
gggagaggguuaaagaggcaagacauccuagaaaguauuagucauagcucuuuugucuucuucc

SEQ ID NO: 4132966 - RNA, 94 nt, Human
gggagaggguuacagaaauggggguaagauggagcaccaaagaugaauuucauugucuuuaucauuuugccugccauuugaguucucaaguccc

SEQ ID NO: 4132967 - RNA, 90 nt, Human
gggagagguggcucuuuucacguccccucugacuuccuugucggccugcagaugguggugugagaagagggaaaagccgccucugcaucc

SEQ ID NO: 4132968 - RNA, 61 nt, Human
gggagaguagcuggaagguucugggagaccaagagcuugauuaaagccuaacaacucuccu

SEQ ID NO: 4132969 - RNA, 60 nt, Human
gggagauacaaugauugguucucacccagguggaucugaguggagacucauugauuuccu

SEQ ID NO: 4132970 - RNA, 71 nt, Human
gggagauaugucuauagagccugugggacgaauugcugucuuaaaggucauucuguugauaucuaauucuc

SEQ ID NO: 4132971 - RNA, 62 nt, Human
gggagaucgcagcuugcucaagaccacacagccagggaguggcaaagcugggauucaaaccc

SEQ ID NO: 4132972 - RNA, 60 nt, Human
gggagaugcacagaaaaauugcuuacugcugucacaguaauuuucuuaagugcauggcuc

SEQ ID NO: 4132973 - RNA, 72 nt, Human
gggagauggcucuggcaaggggaggcuacuuuuccauuggcugguauuuccucgcuugugggauucauuccc

SEQ ID NO: 4132974 - RNA, 96 nt, Human
gggagauguaggguccaggauaggccaguaggggugcugagaucuggaauguggcugccugaguuccauagucaccucuuccuggauuugucuccu

SEQ ID NO: 4132975 - RNA, 74 nt, Human
gggagauguuaccucuagacucauagcaaccacucuuggaaguggucagcucuuugggcugguggacauauccu

SEQ ID NO: 4132976 - RNA, 95 nt, Human
gggagauuaucaagggauuggcauuugagcuggaaggaugaguauuaauagcaauagcuaacauguauugagcucuuaugugaacagaccuuccc

SEQ ID NO: 4132977 - RNA, 106 nt, Human
gggagauucgugguuauugccggauucaggaaucuagacuuaagccuuaugcagggaaagguucagaguuguugauguuugucagauguaacuaggagauucucuc

SEQ ID NO: 4132978 - RNA, 60 nt, Human
gggagcacagggacaaugccagguguccuggggacagucggcagcaucccagugacuucc

SEQ ID NO: 4132979 - RNA, 85 nt, Human
gggagcacugaggacagugaggagggcuuuuaccuuguuaauccuuuccuuauuuagcuagcuuuccuuuuugucuagggcuucc

SEQ ID NO: 4132980 - RNA, 59 nt, Human
gggagcagaagaauggagaugcugcucuuaaucgccugcaccagcugccuucugugccc

SEQ ID NO: 4132981 - RNA, 94 nt, Human
gggagcagaagacagaguagaagaagaguuuacaaauauaaucaacugagaaaggauuugcacagccuuucuggcugcucuuguuucuucuccc

SEQ ID NO: 4132982 - RNA, 68 nt, Human
gggagcagaaggaguuguaaaauggggaaauguaccacauuucaacuagccccuaaguccucugcccu

SEQ ID NO: 4132983 - RNA, 55 nt, Human
gggagcagagaccugguuuuguugaguuguuucucagucugucagucucugcccc

SEQ ID NO: 4132984 - RNA, 64 nt, Human
gggagcagcuggagaugcccagcaccggguuuuaugacucuguuggaacuuuucagucuuucuc

SEQ ID NO: 4132985 - RNA, 78 nt, Human
gggagcaggagggaggaggaggauggugugcguucugauuguagggggcaggcaguuugcuuuucccuccugacgccu

SEQ ID NO: 4132986 - RNA, 60 nt, Human
gggagcaucuggcuagaggagugaaguccuaggguuuuauuucaauaacuacauguuuuc

SEQ ID NO: 4132987 - RNA, 74 nt, Human
gggagcauuuucuccuggagcccagaugcuggcuguccacgcaucccuccacagagaggcuacaaaaugguccc

SEQ ID NO: 4132988 - RNA, 77 nt, Human
gggagccaccauguccaugagccagcucuaagcaaauuacauccuccaaguuaauuagagcugauguucauauuccc

SEQ ID NO: 4132989 - RNA, 88 nt, Human
gggagccagagccuccuagccugucccuugagcuggguccccacuggggcugugugccaggggaaggcuggcccgaaaucuggguccc

SEQ ID NO: 4132990 - RNA, 91 nt, Human
gggagccagguuucaacuuauuagcagccaacuuagcuguacaacuggcugcugugaggcggguuggcuggugguugugaggccaguuucu

SEQ ID NO: 4132991 - RNA, 68 nt, Human
gggagccccaggagucaccugcccaaagucacccuggggugauuggcaagggcagggacugggcugcu

SEQ ID NO: 4132992 - RNA, 59 nt, Human
gggagccggacacagucacuccugggagccgaguucaggcucucucuggucuggauccc

SEQ ID NO: 4132993 - RNA, 78 nt, Human
gggagccuguugagagaagaacaaugucauucaggauuauuuuccuaaugagauaccucuugcugucagaaugcccuc

SEQ ID NO: 4132994 - RNA, 58 nt, Human
gggagcgcgccacaaggagcggcggggggcuggucugcugcccgcuuggcacgcuccc

SEQ ID NO: 4132995 - RNA, 91 nt, Human
gggagcuagggaaagagguggcuuccugucuuucugcugguggaggcaagacucugagacaugaaccaucaucaucagcccgcagccuucc

SEQ ID NO: 4132996 - RNA, 79 nt, Human
gggagcucaggccugaggaccuucuggaggccaggcgcuggaggugcccucuucacuguggaggccucagcaaguuccu

SEQ ID NO: 4132997 - RNA, 55 nt, Human
gggagcucucccugaggccugggcugggcuagaggcaggguggggaggggcucuu

SEQ ID NO: 4132998 - RNA, 73 nt, Human
gggagcugacccaggguauccagagcugcucagaaagagggugcauggaaaagccucuggggaugcugcuccc

SEQ ID NO: 4132999 - RNA, 66 nt, Human
gggagcugcugggaaugaacaguguugucuggucagcaggaagccuaacuggugcucacagcuccu

SEQ ID NO: 4133000 - RNA, 69 nt, Human
gggagcuggugcucggggagcuggcgugccgggcacccaugucugccuguucuccagcauccaggucuc

SEQ ID NO: 4133001 - RNA, 56 nt, Human
gggagcugugugccuggauggucucacuggggugaugacccaagcucauggcuccc

SEQ ID NO: 4133002 - RNA, 55 nt, Human
gggagcuucucgcuuggcagcugguuuaugguacacuuuugaaaaguaagcuccc

SEQ ID NO: 4133003 - RNA, 97 nt, Human
gggagcuugguuaaaauguagguuccugggucccugccagagauggauucaggaucucugggguagggcccaggacccugcauuuucacaagcuucc

SEQ ID NO: 4133004 - RNA, 101 nt, Human
gggagcuuguugaaacacagguugcugggccucacccccagaguuccugauucaguaguucucaggugagggccaagaauuuguguuucgaacaaguuccc

SEQ ID NO: 4133005 - RNA, 65 nt, Human
gggaggaacccaagcucaccgucagguuuaccaggcuugaaacacgggaggcuuguguuuccacc

SEQ ID NO: 4133006 - RNA, 59 nt, Human
gggcagugguuacacagcugaggcccugagccugcccagcucccugcacgacccugccc

SEQ ID NO: 4133007 - RNA, 61 nt, Human
gggcaguuaucugacugacaaguuuuaaaugugggaccuuucagcccaggugucuuugccc

SEQ ID NO: 4133008 - RNA, 59 nt, Human
gggcauagaggcacggaggcugcauggagaucccucacugcauuguccgcugucuuccc

SEQ ID NO: 4133009 - RNA, 59 nt, Human
gggcaucuuguagccuucacuucaaguccucaucuguaggaaagcggggauacaugccc

SEQ ID NO: 4133010 - RNA, 55 nt, Human
ggcuucaggggucugucugcacaggggcuagccccucccagaccucugugaagcc

SEQ ID NO: 4133011 - RNA, 57 nt, Human
ggcuucagugaacuuugaauuguucuaauuucaacacaguuuagaggccaacaagcc

SEQ ID NO: 4133012 - RNA, 57 nt, Human
ggcuuccccuccagugcucugugucccccucacaccagccuggcccagggggaggcu

SEQ ID NO: 4133013 - RNA, 93 nt, Human
ggcuucucagacucucagggguuggcuuguuguguuugcuuuugcaaauaacucaggcuuaaguccugcuacuuucagagccuaggggacgcu

SEQ ID NO: 4133014 - RNA, 63 nt, Human
ggcuucucagcgugaauguggagcuauuaauacccacagcccagccagucugccagagaagcc

SEQ ID NO: 4133015 - RNA, 77 nt, Human
ggcuucucucacccaggguguuuggugucugcugggaagcccuucacucaggcacauccacuggacugggaaaaguc

SEQ ID NO: 4133016 - RNA, 67 nt, Human
ggcuucucugcugugugaucauuugucuccuaagagcaggugaguccugggcacagguaaggaaucc

SEQ ID NO: 4133017 - RNA, 63 nt, Human
ggcuucucuggcagacuggcugggcuguggguauuaauagcuccacauucacgcugagaagcc

SEQ ID NO: 4133018 - RNA, 83 nt, Human
ggcuucugacaccauggcuggugcaccucugggaggcugugcccucucggggcugccccaugccacagugcccacagcaagcu

SEQ ID NO: 4133019 - RNA, 59 nt, Human
ggcuucugguaacuuccucccuggcccuauaaaggccacaggaggaacaauuagaugcc

SEQ ID NO: 4133020 - RNA, 78 nt, Human
ggcuucuggugaaauauacuagaugaugacccauuuuaggaccuauuugguuguguuauuuagguguuuucaaaagcc

SEQ ID NO: 4133021 - RNA, 93 nt, Human
ggcuucuguuggugcauaaaugugcacacacaugugugcauguguaugucuuugugugcauaugugugcacacacguauguguaagagaagcc

SEQ ID NO: 4133022 - RNA, 130 nt, Human
ggcuucuuagaacauggugacuggguucugagaaacaguguuucaagaagcaggaaguggaagcuacuagccuuuucaaagccuggguuuagaauuccuagaauaucacuucuaucacauucuauugguc

SEQ ID NO: 4133023 - RNA, 130 nt, Human
ggcuugaaauuuggagacugcuccaugugugaggccagucucauugggaccagcucuccagucugaaguaggaagcugaagaugccagugggagugcuuagguggaacgcucucucccaggauucacgcc

SEQ ID NO: 4133024 - RNA, 61 nt, Human
ggcuugaacucccaaucauuuagaagcauccugggugauuguuugguauucacauucugcc

SEQ ID NO: 4133025 - RNA, 89 nt, Human
ggcuugacagcaggcugguggcugcuugcaggggaucuucugggggucuccaguuacagcagccaggacccagugugcgacuucaggcc

SEQ ID NO: 4133026 - RNA, 92 nt, Human
ggcuugacgugcguaaugauuccuaaucacgaacauuauuuucgcuagcgcggagacauguuccaguuguugugacagaucgcauuucagcc

SEQ ID NO: 4133027 - RNA, 67 nt, Human
ggcuugacucuaagcugcagguugaauccaggugugcuccaccuguguucauuugcggcugcaagcc

SEQ ID NO: 4133028 - RNA, 110 nt, Human
ggcuuggaagauuggcuccucccauacuuauucauuccuuauccguaucuuuuguaauguccuauaaauugcacccgaggaggagguugugggaaccucgauuuagagcu

SEQ ID NO: 4133029 - RNA, 129 nt, Human
ggcuuggaccacgagaggcaccugagucaggcagucacauacuucccacuggggucuaccaugugaggcauggugugggauccugggaaggagaccaagccucauuucaguuugcuuauggccaaagac

SEQ ID NO: 4133030 - RNA, 59 nt, Human
ggcuuggagucauacugagaauccaguucugccauuuacgagcaguaugaccuuaagcc

SEQ ID NO: 4133031 - RNA, 63 nt, Human
ggcuugggcucccagcaauugaggcagccuuuuggcuucauuacuuuuggugggacuugagcc

SEQ ID NO: 4133032 - RNA, 64 nt, Human
ggcuugggggcuaccuuaacauugccuguaugaaaugcaggcuuugacuuggggcaaccaggcc

SEQ ID NO: 4133033 - RNA, 80 nt, Human
ggcuugguuauggaggagaucaccugggaagaucuuugaagcuuaugaagcgaucuucccagguaccaaaucaauaagcc

SEQ ID NO: 4133034 - RNA, 118 nt, Human
ggcuugucuuugugggagauggagaagauagagugauaaauuauaugccacuucuuaaagcuuaugccugaaagugacacauggcacuucuauaacauuucacuggccaaaacaaguc

SEQ ID NO: 4133035 - RNA, 71 nt, Human
ggcuugugucaccaugcgaggcuaauuuuuauauuuuaguagagaugggguuucaucauguuggccaggcu

SEQ ID NO: 4133036 - RNA, 125 nt, Human
ggcuuuaaggauauaguauuggcccagcugggguggcugcccaucccugaaccaacuggggugaguaggacacucuguuucguuggggugggcugccacugugucuggccagcucacuagaaguc

SEQ ID NO: 4133037 - RNA, 88 nt, Human
ggcuuuacagaugugauuagguuaaggaccuugagauagggauaguguccuggauuauacaagcaggcuuaaccugaucacaugaguc

SEQ ID NO: 4133038 - RNA, 103 nt, Human
ggcuuuacuccuguuuagucauuucauuuucucacaauccuauggggugggaaugaucacuggccccauuuuagagaagaggaaacugagaaacagggagguc

SEQ ID NO: 4133039 - RNA, 64 nt, Human
ggcuuuacuucagcaagcuuuccugggagacucuaauggcagagacuguugaaauagaaaugcc

SEQ ID NO: 4133040 - RNA, 61 nt, Human
ggcuuuaggaguccaaagguuuuacaauuuaauacauaauugcuaggcuccuccuaagguc

SEQ ID NO: 4133041 - RNA, 92 nt, Human
ggcuuuaguggaaaagaggguaguguuagggaugagguuaaagacugauauuaauuuaacacauauuuaucaauugcacauuuccauaggcc

SEQ ID NO: 4133042 - RNA, 66 nt, Human
ggcuuuaguuucugaggauugaaagaugagauaauuacauucucuuuccuuaaggaacucacaguc

SEQ ID NO: 4133043 - RNA, 75 nt, Human
ggcuuuauuccaggccuuguugggaccuuugugcucuggugagagcaauucccacauaugcaauccugaauaacc

SEQ ID NO: 4133044 - RNA, 86 nt, Human
ggcuuucccucccaccugagugucaguauucucagaggagccaaucuggaaacgagaucucaggaggucugaggggagcuguggcc

SEQ ID NO: 4133045 - RNA, 70 nt, Human
ggcuuuccuuagguguucuugcucacagccuggacagcagagauggagcugagcaccuccagggcaggcc

SEQ ID NO: 4133046 - RNA, 129 nt, Human
ggcuuucucucucuguuuucagaucaaugguagcuucuuuuucucagcuuuguuaggauagaaucuauaaucuucacagacacagggagaagcauauaaacauuaauuuaaaaagagagcaauacugcc

SEQ ID NO: 4133047 - RNA, 85 nt, Human
ggcuuucuugaagcagaaccaggugaggugcaggcgguaaaugaacuccgcugggcacucaguaccaggucacugcucauuggcu

SEQ ID NO: 4133048 - RNA, 76 nt, Human
ggcuuugacggccucuggcccuacagauggcucuuuggagaggaaaaaauuaagccaggccugaggccacagaucc

SEQ ID NO: 4133049 - RNA, 65 nt, Human
ggcuuugcaaacugucacacuuuccccaggaaacggggaaaggugauuugguuugaaauaaaucc

SEQ ID NO: 4133050 - RNA, 55 nt, Human
ggcuuugcauuuugauggagguggguuuuuccuucugaguaaccaugacgaagcc

SEQ ID NO: 4133051 - RNA, 121 nt, Human
ggcuuugcuggaacaaucuugagguuggaaaucucacucugguccauccgagagcuuuacuaaaucacuuuuugcucucaacuugcuagagugacuaacuacgacucuggacagaucugcc

SEQ ID NO: 4133052 - RNA, 55 nt, Human
ggcuuugcuuaacgugcuucuagcucccuucaaugcuauuauuuguagcaaggcc

SEQ ID NO: 4133053 - RNA, 82 nt, Human
ggcuuuggaguaacaacgaggugagguggccccugguucccaccagaggcaguuucggcugguuugaauaauuccauggguu

SEQ ID NO: 4133054 - RNA, 82 nt, Human
ggcuuuggguccacagucuucacaguucccaaggcauguucaccuugguuuagccuuacuguggccuuguggguucaggguu

SEQ ID NO: 4133055 - RNA, 66 nt, Human
ggcuuugguuuguucaucguccuugcucuguaggauuacagagauggagagaaucaaagcaaagcu

SEQ ID NO: 4133056 - RNA, 109 nt, Human
ggcuuuguagaugaugugaaggguuuaagacuugauccaaagaacuaugagaacuacugaaugguuuuaagauggauacaaguuauucuucucacaugcuuacuuugcu

SEQ ID NO: 4133057 - RNA, 87 nt, Human
ggcuuuuaugaugcaauccacuuugugccccucucuugcagcagcugcggccagggaaaaagcacuaagugggcuugcucacugguc

SEQ ID NO: 4133058 - RNA, 103 nt, Human
ggcuuuucucucuguguacagggucccacagcuaucugacuuugacucauuuuucuaacccagugauucucaaaguguggcuggcccauggacugaaauggcc

SEQ ID NO: 4133059 - RNA, 81 nt, Human
gggaaaaauggaauguuuauacacaguugcugggaauguaaauuaguucagccacuguggaaagcaguucagauguuuccc

SEQ ID NO: 4133060 - RNA, 63 nt, Human
gggaaaaggccuggggcaaaguguaaggccagcaggggcgacagucguagguauccuuuuccu

SEQ ID NO: 4133061 - RNA, 79 nt, Human
gggaaaaugagcucacaggcaggcgucuggaaagcugaggaacccucagaccccacagggccuguccuguugguuuccu

SEQ ID NO: 4133062 - RNA, 69 nt, Human
gggaaaauucaucugagucucaucugggauucccacuuuggcuuuauccccagacuuuagauuucuccc

SEQ ID NO: 4133063 - RNA, 97 nt, Human
gggaaacacagcugacguuaauuuuauucuguuauucugcagugagauugcuaacuggggcaguuuaguagaugacauuauuucagcucuguuuucu

SEQ ID NO: 4133064 - RNA, 90 nt, Human
gggaaacagagcaaagagcuagaccucagccagcaccagggcaggagcccggggcugcugggucccucugugccaacgucucugccuccc

SEQ ID NO: 4133065 - RNA, 68 nt, Human
gggaaacagaggcaggaaaagucacuuucucaaacuacaagugagggccaguucuaccucugaaucuu

SEQ ID NO: 4133066 - RNA, 71 nt, Human
gggaaacauuuggcuaccaugaggaugggcaggaacacugagagagcuccauucucaaggucuagacaccc

SEQ ID NO: 4133067 - RNA, 75 nt, Human
gggaaaccugucuccucuucauauaccuguuccuuucaaggaaggcuauaaaaauggggaugagagaggauaacc

SEQ ID NO: 4133068 - RNA, 115 nt, Human
gggaaacggcuggggaggcuccaccucuuuccuccccacaaccauuuacugggaaguuguguauacuuggcagugugggaggaagguacuuggaagacccugccagccaucuccc

SEQ ID NO: 4133069 - RNA, 95 nt, Human
gggaaacugaacacugucccacaagacaaauuauuccuuuaaaguauucgagauaaucuuugcuagugauuuguuuagggucagucauguguccc

SEQ ID NO: 4133070 - RNA, 59 nt, Human
gggaaacuucugcuaaaaccagagcugaccggcccgaagguuuugaucagagguauccc

SEQ ID NO: 4133071 - RNA, 90 nt, Human
gggaaacuuuauaugguuggggauaagaauugaaugcaaauuaaugaacuagauuugcauuuauggaguuaccucaucauggaguuaccu

SEQ ID NO: 4133072 - RNA, 68 nt, Human
gggaaagagcuuugcuuucuaggcgugugucuccagaugggcccaggaaagauagggccucaguucuc

SEQ ID NO: 4133073 - RNA, 91 nt, Human
gggaaaggcagaagccaguucaaaggcaggauagcagcugagucuaaaaauaaagauuaguuccguuuaugaguggcuuuuucugccaccc

SEQ ID NO: 4133074 - RNA, 85 nt, Human
gggaaagggacuaauauuuguaaggcagagguaccacuaggccagggcacugugcugggcaccucucccagauuguuccauuccc

SEQ ID NO: 4133075 - RNA, 66 nt, Human
gggcaugagcaggccagugugcuucccaggcaggucguagggaaaccagcgcuggccucagugccu

SEQ ID NO: 4133076 - RNA, 94 nt, Human
gggcaugguggcaccuggcucugacuccgcauauuucucgaguaugaagugaugugaaguggggucccuggguguccucugcauccaccugcuc

SEQ ID NO: 4133077 - RNA, 68 nt, Human
ggcaggaggcccugggcagaggagugggcugacucccggaccccagccccugcccagagcacucugcc

SEQ ID NO: 4133078 - RNA, 69 nt, Human
ggcaggagguugcaguugggcgcucagcagcuguggcagccgguugaggucuggcaguagcguugggcu

SEQ ID NO: 4133079 - RNA, 95 nt, Human
ggcaggauccucuggcccaggagagcaggcauugcccuggugggugcugagcagugucugggcucccuuggagcugcuggcaguuuuguccugcu

SEQ ID NO: 4133080 - RNA, 57 nt, Human
ggcaggaucucgguucacugcaaccuccgccuccuggguucaagugauucuccugcc

SEQ ID NO: 4133081 - RNA, 56 nt, Human
ggcaggcagaggcugagacaggagucugguguccugguagccagccugggccuguc

SEQ ID NO: 4133082 - RNA, 76 nt, Human
ggcaggccugugugagagaucccccacucaucuccccuagggaagaagugaggaaauccucuuuaaauugcccgcc

SEQ ID NO: 4133083 - RNA, 67 nt, Human
ggcaggccuuggagguuauuaacacuggccuacuuucaaaguccugagucaaagccccaggguaucc

SEQ ID NO: 4133084 - RNA, 69 nt, Human
ggcaggccuugggccauagucuccugcaucccuccagagccugcagcaggagcugggcccaaggaugcu

SEQ ID NO: 4133085 - RNA, 61 nt, Human
ggcaggcgguggggcagagcugggcaguuucugaaagcccugcugugccugacugccaucc

SEQ ID NO: 4133086 - RNA, 56 nt, Human
ggcaggcgugguggccucagaagcccucggcccuggaaugaggcaccgcacuugcu

SEQ ID NO: 4133087 - RNA, 59 nt, Human
ggcaggcuagcacugauguccuucuaauuuguuagguggaaagguugaacuagcauguc

SEQ ID NO: 4133088 - RNA, 55 nt, Human
ggcaggcuuugagaaagagcaucagaagccugacaguucuucuucagccucagcc

SEQ ID NO: 4133089 - RNA, 66 nt, Human
ggcagggaaacaggugcuaaggaaacaccgcuggucaguccgacguccucagucuccuucucugcc

SEQ ID NO: 4133090 - RNA, 75 nt, Human
ggcagggacacugaggcaugcagagccgggauacagaccaagcaaguccuggcuccucuucugggugucccagcc

SEQ ID NO: 4133091 - RNA, 60 nt, Human
ggcagggcuguaaaggcacuuagagauguuuuugguuggaagugccuugcuggcugugcc

SEQ ID NO: 4133092 - RNA, 69 nt, Human
ggcagggcuugcguuuaaauuaaaguaagccugauuccaaggcccugcucuucugacucaagcuuuguc

SEQ ID NO: 4133093 - RNA, 82 nt, Human
ggcaggggcagcuuucuuuuugcaugucucuagugugaauucuuuccuucaagaagaccaagaaccggaggacucccuugcc

SEQ ID NO: 4133094 - RNA, 130 nt, Human
ggcaggggguugggggcuagcacacagaaaaauguaugauggaggugcuaucacuuuuucuuguuugaaaauguaccauuucuacauaucuuguccuguggcacacuagcucugcaacuacaauuuuguu

SEQ ID NO: 4133095 - RNA, 58 nt, Human
ggcagggugccuggcuccuguucccagcucaggcuguggcuuugccaagcaccuugcc

SEQ ID NO: 4133096 - RNA, 59 nt, Human
ggcagggugguaccagcaucuagugaguagaggccagggaugccgcuacacauccugcu

SEQ ID NO: 4133097 - RNA, 106 nt, Human
ggcagguacccaaguuuaucuguguuuauggggaucugcaguguugaucuguggugcauggaagcgugcagguccguauacuccauagucaauuacguuuccugcu

SEQ ID NO: 4133098 - RNA, 105 nt, Human
ggcaggucccagucucagugacagcugugaauugucuuaucuacaccaucagugaaauuguagaagaguugcauuauagcaaaugagaaugaaaugaacuuggcc

SEQ ID NO: 4133099 - RNA, 88 nt, Human
ggcagguccugagaagcuggagagugaggggagcaaggccuuccuggagccugucccuucauuauucacuacuuacccucucuaugcc

SEQ ID NO: 4133100 - RNA, 57 nt, Human
ggcaggugagggugucugaauagacaaauggugaucuauuuucauucuuacauuguc

SEQ ID NO: 4133101 - RNA, 55 nt, Human
ggcaggugcucugugggccuggguagguuucugcacuguggcucaugcaucugcc

SEQ ID NO: 4133102 - RNA, 60 nt, Human
ggcaggugcugggagcaucucaaacaggacaggccugaccugggaucucuugcaccugcc

SEQ ID NO: 4133103 - RNA, 61 nt, Human
ggcaggugggcacagcuggggcugaggaauucacaggcagcucugcagugcccaccuugcc

SEQ ID NO: 4133104 - RNA, 80 nt, Human
ggcaggugggcaugaugucuggcuaccacucgcacuggacgccacacacacagccaggguggcagaaggccccaccugcc

SEQ ID NO: 4133105 - RNA, 77 nt, Human
ggcaggugguucagugguuagggccaaccaucuacuucaguuccugucuggcccagaucucugaccuugaccaugcc

SEQ ID NO: 4133106 - RNA, 94 nt, Human
ggcaggugugccgucccagccaugguccuguugccacagagcugcaacggccucagacugggcuuaggaccuggugcggagcaggacauuggcc

SEQ ID NO: 4133107 - RNA, 83 nt, Human
ggcagguuuguguguggggaggcagcagauguuggugaugagggaagcuggcagaccugcccccgcuccaccaccugacagcc

SEQ ID NO: 4133108 - RNA, 62 nt, Human
ggcaguaaucuucgaaugguagccaugauuaacauuuuuggguaucaguaggauauucugcc

SEQ ID NO: 4133109 - RNA, 77 nt, Human
ggcaguaggugcugggguacccaacaguuacagcaacaugaaccaguuguauguccuccagcaaaucagccacugcc

SEQ ID NO: 4133110 - RNA, 76 nt, Human
ggcaguauaaaugugggggccacgggcuuuaggucugagcgcugugagcugcuggcuccucagguuaucggcugcc

SEQ ID NO: 4133111 - RNA, 115 nt, Human
ggcagucacaagcgaggggacagaacuagccucaggcuuacgggcaauggacagccauuccucaggcuccauagccacagaccggaugcugggaucugauuggcgcuugggggcc

SEQ ID NO: 4133112 - RNA, 56 nt, Human
ggcagucccaggcugcauguugggucuagagaggcugaacugcagccugggaugcc

SEQ ID NO: 4133113 - RNA, 62 nt, Human
ggcagucccaggguauccuguaguaaaaauaauuuuuaugacuuucauauccuagguuuguc

SEQ ID NO: 4133114 - RNA, 87 nt, Human
ggcagucuagcuucccugcuggaucauaagaccaggacagcagagauuggguuuguauugaucaguaguagggaaguauugauuguc

SEQ ID NO: 4133115 - RNA, 77 nt, Human
ggcagucugggaggaaaagaaaguugggguggcagauccaaguggggcagcacacccaaauuucucucucagguguu

SEQ ID NO: 4133116 - RNA, 83 nt, Human
ggcagugagccaggcuggacauuagauacauagucgacuucaccuacucugugauuuagcuuccagcuuuaccguuugcuguc

SEQ ID NO: 4133117 - RNA, 60 nt, Human
ggcagugcaaggcagccuggauuugggugcaaagccagggccaggcccacgaugcacgcc

SEQ ID NO: 4133118 - RNA, 64 nt, Human
ggcagugcaaggcuggcacagugguuuuaugauauauucacugucccagauaacuucuacuguu

SEQ ID NO: 4133119 - RNA, 57 nt, Human
ggcagugcuucucuggcccaagcauucagccaggccaggcagcaggaagccagugcc

SEQ ID NO: 4133120 - RNA, 68 nt, Human
ggcaguggucagaauggagcccaggaggccagugcuggcucccgggcccucccucugacccugcugcc

SEQ ID NO: 4133121 - RNA, 63 nt, Human
ggcaguguccuugcagcucuacccagcucuuggcucugggaaaagggaacaauggacgcuguc

SEQ ID NO: 4133122 - RNA, 56 nt, Human
ggcagugucuuguaggcugugcugggaagucccggccucagcgcacagaaacugcu

SEQ ID NO: 4133123 - RNA, 62 nt, Human
ggcaguguggccugaguaaguccacagcuugucaugcuuccuacauguuaugccacacugcc

SEQ ID NO: 4133124 - RNA, 59 nt, Human
ggcaguguggcugagacagaggcuggaguggauccuggggcacugcugggccaucugcu

SEQ ID NO: 4133125 - RNA, 61 nt, Human
ggcaguguucuccugaaggucauagaauuugaaaaucuaaaccuuuuguagaacaauugcu

SEQ ID NO: 4133126 - RNA, 94 nt, Human
ggcaguucuuguaugaaguuacugagccucuuaauggccaaacugacuucagugcacagccaggggcucaguuacuuuggcaguugaucugacc

SEQ ID NO: 4133127 - RNA, 74 nt, Human
ggcaguuuauaagcucugaaaucuccuaacaaaugaauggaaaauuucuuuggagguuccaugauuugucugcc

SEQ ID NO: 4133128 - RNA, 66 nt, Human
ggcaguuuuaaccaugggcagaaucuuugcagaucaauguuucagagaaaugccuaucaaacugcc

SEQ ID NO: 4133129 - RNA, 98 nt, Human
ggcauaaaccuuguuuuuaccccuaacucagcugugaggcauuccuagaagccagcuaagccuggcagguguggaguggggugagcugaggaugugcc

SEQ ID NO: 4133130 - RNA, 62 nt, Human
ggcauaaugaacauuagcuacuguacugagcccauaagagcagagguuauguuuuuuaggcu

SEQ ID NO: 4133131 - RNA, 75 nt, Human
ggcauacugguuaaugcuuaacagcuggcuuuucagaaggagaaaagcucauauuuguagcauuugccaauuucc

SEQ ID NO: 4133132 - RNA, 56 nt, Human
ggcauagcuuccagaauuuaaugucaaaauauuuuggcuuccuggaagaaugugcu

SEQ ID NO: 4133133 - RNA, 89 nt, Human
ggcauagggagauuaaguaacuuguccaaaugagcaggucauagaacaagcugugcaacucugggcaagucacuuaagcucucuugguc

SEQ ID NO: 4133134 - RNA, 72 nt, Human
ggcauagucaucagugugucaaaagcacaaagauccccagguguuuggcucagcucacagaucccuuuuguu

SEQ ID NO: 4133135 - RNA, 74 nt, Human
ggcauauggacaaauguaaggcauaauaauaaaugacuccaaaauaucguguuuuuccauuugauccaaguguc

SEQ ID NO: 4133136 - RNA, 62 nt, Human
gggcgggaaggagaccucuaguugacugcauaacccaaucacaucuaauuccauuucugccc

SEQ ID NO: 4133137 - RNA, 57 nt, Human
gggcgggagaaagaaaagucaagagagagguuauuggccacaacuugcuccuagccc

SEQ ID NO: 4133138 - RNA, 57 nt, Human
gggcggugccugucuccgaagcgaggagcggauuggcuucacggaggccgcgccccc

SEQ ID NO: 4133139 - RNA, 84 nt, Human
gggcgugaaaaguuguaagaggcacaaggaagagggguaggaacuuccuucaaaugugauuuuaauaacuagucaagugugucc

SEQ ID NO: 4133140 - RNA, 69 nt, Human
gggcgugguggcuucucgccugucaucccggugcuuugggaggcuggggcgggaagacugcuuaagccc

SEQ ID NO: 4133141 - RNA, 56 nt, Human
gggcguguacacgcacacguguccucugucccguguggaggggcguguacaugcuc

SEQ ID NO: 4133142 - RNA, 57 nt, Human
gggcuaccuacagagcugaggacuaaaugauacagugccuggcaacuguggugggcu

SEQ ID NO: 4133143 - RNA, 58 nt, Human
gggcuagaacagucaaagugagcucugucauggaagggcugagguccugcucuagccc

SEQ ID NO: 4133144 - RNA, 102 nt, Human
gggcuagagugagagguucggaugcucugugggggcugagcugcagccaugggcacacagggcucagggcacgucauccagggacaucaugauaccaagccc

SEQ ID NO: 4133145 - RNA, 62 nt, Human
gggcuagcauuuugucugcuauuuccuaaauaaugguagguaagcaggaaaagugccagucu

SEQ ID NO: 4133146 - RNA, 66 nt, Human
gggcuauaguucucacucagaauuugaauuuugacuuuagacauuaaguguugaggagaauggccu

SEQ ID NO: 4133147 - RNA, 106 nt, Human
gggcuauauuucacauaaccuugacuaacuuggcauugaaguuucauugguggggaacuagagaaaaaugucaugccauagaaggaaaugggaagucugaagaccc

SEQ ID NO: 4133148 - RNA, 86 nt, Human
gggcucaaugacugucuuuucacugcuugauugacaugcacgcuugcagggugucgccuggggacaagcagugagcgaggcggccc

SEQ ID NO: 4133149 - RNA, 61 nt, Human
gggcucacugccaugcucgccaucugcggcuccuucuuggccugaguguggcacugggccc

SEQ ID NO: 4133150 - RNA, 115 nt, Human
gggcucagaacagugcuggcacauaguguguguucaauaaauuuaaguuaaaagacuaaaugaauaaugucuucuuaaaaaagcuguugaaugacugccuuagcugacagggucc

SEQ ID NO: 4133151 - RNA, 69 nt, Human
gggcucagacugaaacaaucugcaggcaaaucaaaagcuuugcuuagauauuuguuucagcucuguccc

SEQ ID NO: 4133152 - RNA, 59 nt, Human
gggcuccagaggcucacccuggccuccuucuccuggcccagggcagcagcacggagccu

SEQ ID NO: 4133153 - RNA, 72 nt, Human
gggcuccagggucucuccuugugcucgucaacaggcuggauggauagaauaaaguggaagauucuggagcuc

SEQ ID NO: 4133154 - RNA, 97 nt, Human
ggggcuccuugagugcaggagcaggagccaugucuggcucaccuuuaaauccugaagagcccugagcaccugccuccucauuugaccaaggagcgcc

SEQ ID NO: 4133155 - RNA, 55 nt, Human
ggggcucugcucugagccguguacaagucuuaacucguucagccccagcagcccc

SEQ ID NO: 4133156 - RNA, 64 nt, Human
ggggcucuuagaaguacauuuagaacauauuuuaaguuucaauguguucauaguucuaaacccc

SEQ ID NO: 4133157 - RNA, 77 nt, Human
gggagccuagaacacaagaugugaagcuagcauauucaugaaacuguagugcagcaagucuaguuuguaggcuacuu

SEQ ID NO: 4133158 - RNA, 70 nt, Human
gggagccuugggccauggacugcugcccaucauagcuggaggagcggucagcuggccacacggggcuccu

SEQ ID NO: 4133159 - RNA, 76 nt, Human
gggagcgggggcugcagggacccaagucuuugguuuucucagugacucaaagauccucucucacccaccugagccu

SEQ ID NO: 4133160 - RNA, 78 nt, Human
gggagcgucuaagaguguguuguaggcucaaaugguuuuuccaaaagccaagccuaaaaacaggcuucaggggugccu

SEQ ID NO: 4133161 - RNA, 112 nt, Human
gggagcugaaggcugacaugacagaggcugcagugacaggggacgaugguuggcauguggcaggcauguggcuaguccucugcggcagccagguagggucaccuccagcccc

SEQ ID NO: 4133162 - RNA, 56 nt, Human
gggagcugagcuggaagagaauuaagaauuugucucucuaauccccagcucuuccc

SEQ ID NO: 4133163 - RNA, 66 nt, Human
gggagcugucacagaauuucuauaguguugaaaugccuuuagaguaaaaacugugaccucguuccu

SEQ ID NO: 4133164 - RNA, 70 nt, Human
gggagcuugagcacaggugaacagcaucucgccacccugccagggcccuucaaaugugccucaggucccc

SEQ ID NO: 4133165 - RNA, 97 nt, Human
gggaggaaggaagacccaaagcaugaacuugagcccagaucccuugaggccagaucuggaguuucaguuuucuggaaaugggagcugccuuacuccu

SEQ ID NO: 4133166 - RNA, 63 nt, Human
gggaggagcuuggagauucacucagauucacaccucccuugggcuuccucuucacuuccuccc

SEQ ID NO: 4133167 - RNA, 78 nt, Human
gggaggaggggcuguaugaugggagcuggaaguacagaagagacgcagccacugcuagagaugcauccccuuccuccc

SEQ ID NO: 4133168 - RNA, 57 nt, Human
gggaggaucugaggcccaccagcagccacaggcacagggcugggagcagacccuccc

SEQ ID NO: 4133169 - RNA, 72 nt, Human
gggaggaugggacgcguggggacugaaggcggcaucugccugaauaaagcccucgcgcgcucugagccuccc

SEQ ID NO: 4133170 - RNA, 98 nt, Human
gggaggauggguggggguagaagcgccccuugcuaggcuuggaacaucuggccgaguccugggcggagggcugcuguccagucccugguccacuuccc

SEQ ID NO: 4133171 - RNA, 107 nt, Human
gggaggauucuuuuuagcuuuauaaucuuuuuuaaggaugccggcagcugaggcuucggaaauaggacaucuagaaaaaagaccuguugagcucaaggaaaccgccc

SEQ ID NO: 4133172 - RNA, 81 nt, Human
gggaggauuggaugggggguuguuuaaugugcauaacccauuguuaugcacauuaucuaauccauuguuauccagccuucu

SEQ ID NO: 4133173 - RNA, 96 nt, Human
gggaggcagcggaaaaaugggagaaaaagaaggccaugucuugguacuuuaaggauauuuccuagaaguuggacaugccauuucugcugaccuccc

SEQ ID NO: 4133174 - RNA, 67 nt, Human
gggaggcaucccaaguagcaauccugguagccuucaaggaaaugccaagugcuuacuuggcccuccc

SEQ ID NO: 4133175 - RNA, 104 nt, Human
gggaggcccagucaaggcuccaggcagccaggucuucccugugucaacaaggggaaggaaagcagcuuggcccugucuggggcauccugagaaagggguuuucc

SEQ ID NO: 4133176 - RNA, 88 nt, Human
gggaggcccagugauggauccugcugggguguaggugggaggccccuccuguccaugccccaccaggacgcugcagccagggccuccc

SEQ ID NO: 4133177 - RNA, 127 nt, Human
gggaggcgcaggggccgcagccagccgggugcugcagcagugcgggcagcuccagaagcucaucggcaucuccguuggcagccugcaugggcugcgcaccaagugugcuguguccaaggaccucacc

SEQ ID NO: 4133178 - RNA, 61 nt, Human
gggaggcucugccaucugucacaggugccuuucaaauuugucucagacugagggguuuccc

SEQ ID NO: 4133179 - RNA, 59 nt, Human
gggaggcugagguguggggaacuauagcucuugggcuguuccugaugccucguccuguc

SEQ ID NO: 4133180 - RNA, 73 nt, Human
gggaggcuggccuggugcccccaagccagcugcuccaaggagcagcuuucuccggggccugcucccucuuccc

SEQ ID NO: 4133181 - RNA, 84 nt, Human
gggaggcuuuaaaaauacugauucuagggcuccacucccagagauucugauuaaauuucugugggguggagcucaggaauuccc

SEQ ID NO: 4133182 - RNA, 97 nt, Human
gggaggcuuuaggggucuuggcuugcuuggggagcccacucaccuccccuuacccugggggauuguucugggugcccucggggccuugcugccuccc

SEQ ID NO: 4133183 - RNA, 73 nt, Human
gggagggcaaagacacgggaaacaacguuguauuaaagaggaaucagcguuuugugucuaguccuugaugccc

SEQ ID NO: 4133184 - RNA, 59 nt, Human
gggagggcagaguccccugcugagcaacaaaggccuccugcagccuucucugucuucuc

SEQ ID NO: 4133185 - RNA, 68 nt, Human
gggagggccaggcucacccagggcaucacacggucucagagccccugcagggagagccaggcucaccc

SEQ ID NO: 4133186 - RNA, 90 nt, Human
gggagggcccgcaagcucuagcuggcgcugaccuggggcugacccucuccagcagccugcaggaagcucagcggggccgggcugccuccc

SEQ ID NO: 4133187 - RNA, 56 nt, Human
gggaggggagaguuacggcuccagggccuuguccuugagauagaucucaucuuccc

SEQ ID NO: 4133188 - RNA, 94 nt, Human
gggaggggcagaggagugggggcagagccucucucggagaaguccaccuccgggagcccccagcccccagccccagcucacucugugcccuucc

SEQ ID NO: 4133189 - RNA, 73 nt, Human
gggaggggcagucaagagggagucugaauuucuggaaagucggcaccuucuccucccaucugucugcacucuc

SEQ ID NO: 4133190 - RNA, 58 nt, Human
gggagggggaugagccagggcugagccguggcaucaggcugggcuccucuccccaccc

SEQ ID NO: 4133191 - RNA, 96 nt, Human
gggagguaagaaggguagggaaggccagcagucacagggucagaugagaaauuucugcuggacaugccuggcugcuccagugucuucgauuauccc

SEQ ID NO: 4133192 - RNA, 62 nt, Human
gggaggucaaaggaguuucugcuucucaccacagauguagucagaaacuugcuuugccuucu

SEQ ID NO: 4133193 - RNA, 61 nt, Human
gggagguccuaaaggggaccaggucuuuagaggcccaaagccuacccuuaggaguccucuc

SEQ ID NO: 4133194 - RNA, 55 nt, Human
gggaggucuguuuguaguucagauucuucucauuccaggcucagcaggcucucuc

SEQ ID NO: 4133195 - RNA, 94 nt, Human
gggaggugacugccugguaccuuuuccuggggcuucuggacucuauuaccuacuauagauuugugaaacucagggaaaagucccuuuacuuccc

SEQ ID NO: 4133196 - RNA, 69 nt, Human
gggagguggagcuggaaguuccaagcuucuaauccuggcuugguccuucuguugaccagcccccauccc

SEQ ID NO: 4133197 - RNA, 72 nt, Human
gggagguggccaucuuuggcccugacucagcccugcagggagaagaggggcuggaggugcagguggccugcc

SEQ ID NO: 4133198 - RNA, 68 nt, Human
gggagguguggauauggcuggacuugcaggcucagggccagggcuugucucugucauuucaccuuccc

SEQ ID NO: 4133199 - RNA, 90 nt, Human
gggaguacaugugggguguaugugccuuacauuuuauuucuacaugugggggugcaugugugcguacaugcuuguggccgcacaacuccc

SEQ ID NO: 4133200 - RNA, 81 nt, Human
gggaguagauuaccuuacaccaguauagacugaguuguugaaaaacuggguuucaacuuuugugaggaauaaccuauuuuc

SEQ ID NO: 4133201 - RNA, 86 nt, Human
gggagucacacuuccuuuuagaaucaugaagacccucaggggguccugccuuucaugaaaaagguaguauuuaaacagugacuucu

SEQ ID NO: 4133202 - RNA, 63 nt, Human
gggagucacagcugaaucucccuucagagcuccugggccagaggagggucgugcuguguuccu

SEQ ID NO: 4133203 - RNA, 71 nt, Human
gggagucauggagguguggcauggugcucagaugugaucugcaccuacagccacauuuaccacaggcuucc

SEQ ID NO: 4133204 - RNA, 60 nt, Human
gggagucccuggaaaagagcuggugagugacagcagucaucucucgugucugggacaccc

SEQ ID NO: 4133205 - RNA, 103 nt, Human
gggagucgacaagagaggugcaggaggcggcuccggggcuguauccagagcaggaagcuggugcaguucccagggccggggucuguccucauaggaggcucuc

SEQ ID NO: 4133206 - RNA, 82 nt, Human
gggagugaauaaauguauaaccauaggaaauuuuaaguauaaucacccuuagaauuuguuagauuaucauuacuugauuucc

SEQ ID NO: 4133207 - RNA, 80 nt, Human
gggagugacacggaaaaggagacagagggggagugugccaaguucucucuauaaacuuucuucauuucuguggcugaacc

SEQ ID NO: 4133208 - RNA, 110 nt, Human
gggagugagagggaggcugagaaggauacugggaccgcuuugcuuuagugauuaucagcauggucucugggaucagguggcccagaucaaaucccaccccuaccacuucc

SEQ ID NO: 4133209 - RNA, 61 nt, Human
gggagugaggcuggaaucauggcuguguguuuccuccagacccucuccaugcccacugccc

SEQ ID NO: 4133210 - RNA, 128 nt, Human
gggagugcugacauguggaaaugcaacagucaugaagcugcagucguuaacguaacugacaaaaccuguacagcauuaacaggcuguuuaauuuuaugccaaguccauaauuuuugcagcauguaccc

SEQ ID NO: 4133211 - RNA, 68 nt, Human
gggaguggcuggcaggggaggguccacagggcuccucuucugggacucucaggcugucggcuucuccu

SEQ ID NO: 4133212 - RNA, 80 nt, Human
gggagugggcccacgggcuuuggugcuggauagcuggaguucagaucccagcccugucaccaacuggagguaagacuccc

SEQ ID NO: 4133213 - RNA, 90 nt, Human
gggaguguaugggacgugccucugcuaguuacucuuaacaacccaggggugugggaagauucuacaguagguacauuccuacccaguccc

SEQ ID NO: 4133214 - RNA, 89 nt, Human
gggaguguucauagguagcuccuguucugagagcaggaugucaccguuccacuccugccagucucgaugcagguaucucugagccuccc

SEQ ID NO: 4133215 - RNA, 87 nt, Human
gggaguucucacccugcuggccaugccuggucuggcaccaugaguucuuauccugccaggagugcuggcccugcugggugaccucuu

SEQ ID NO: 4133216 - RNA, 59 nt, Human
gggaguugcacacuggcuauaacaagauguuuuuguucauccaauguguguguguaccc

SEQ ID NO: 4133217 - RNA, 78 nt, Human
gggaguuggaguggcaguagaugagcugguuguugacugugggcagccggucaucgaugaccacguccacccauuccc

SEQ ID NO: 4133218 - RNA, 61 nt, Human
gggaguuggggcuuacuacuguuuuuuauaauugucucagaaaacagcuaaaccagcucuc

SEQ ID NO: 4133219 - RNA, 78 nt, Human
gggaguuuguuagaagagcagaaucuugagcccuaccucagaccuaccgaaucagaaucugcauuuuaacaagcuccc

SEQ ID NO: 4133220 - RNA, 125 nt, Human
gggauaaaguguggagaagguuuccagagguucuuaaacacugccuuggugggucaaggacagagcagaaacuugaaccccuaguuuuaagacacacucagucugguuuucucccaccuuuuccc

SEQ ID NO: 4133221 - RNA, 72 nt, Human
gggauaagccggcaccaggggauguaauguccuguccccugcuaugccaggacgcaccccugcugccauccu

SEQ ID NO: 4133222 - RNA, 60 nt, Human
gggauaaugagaugaguaaacuguuuggagaucugaaagcaggauaauuuuauuaugccc

SEQ ID NO: 4133223 - RNA, 91 nt, Human
gggauagacuguagcaucuugaaauauaaagucaaugucuuuuuauuaugaauauauuucaacaugcuguauuagcuugacagaucauucu

SEQ ID NO: 4133224 - RNA, 65 nt, Human
gggcugggagggugagcucuggcuguggguccagccaagccugcagcaaggcagccucucagccu

SEQ ID NO: 4133225 - RNA, 70 nt, Human
gggcugggauuuggaaguaaaugaguguuuuaaucauaauagagaaaguccacauuuuaaaccacagccu

SEQ ID NO: 4133226 - RNA, 83 nt, Human
ggggaggggacagugagccugggcagguggguaguggccagguagagccuuggaugccaggcucaggaugucccugggucccc

SEQ ID NO: 4133227 - RNA, 55 nt, Human
ggggaggugggauuaggaccuaaacaguuuagcucuagaguccacgcucuuaccc

SEQ ID NO: 4133228 - RNA, 56 nt, Human
ggggaggugugcaggacaccucaguuuguccugacucaggcugccucacccucccu

SEQ ID NO: 4133229 - RNA, 70 nt, Human
ggggagguucuagagggacagggcaagugagaagaugcaaugcaggucaguccuguuccugaaccuuccc

SEQ ID NO: 4133230 - RNA, 78 nt, Human
ggggaguauaaguguagcagaaccugccuggcagccaagccacgugggcuccugggcagcucugcuccuuggcuccuc

SEQ ID NO: 4133231 - RNA, 74 nt, Human
ggggagucuaagucuucauagucuaauguccaaguggguugcacuagauguagacacuuggaggcuuacuuuuc

SEQ ID NO: 4133232 - RNA, 71 nt, Human
ggggagugaaagaguuuuagacaaacugauugguucggcaacacagucuuccggcagaauucuuacuccuu

SEQ ID NO: 4133233 - RNA, 73 nt, Human
ggggagugcaacuuucuccagugccaacuauuaccagagcuggguaacuguuggaagagaaagggccaccccc

SEQ ID NO: 4133234 - RNA, 56 nt, Human
ggggagugccugagccagucaccucgcugugguuggucacuggccagaguagcccu

SEQ ID NO: 4133235 - RNA, 70 nt, Human
ggggagugguaggagggaucagaguccagaucuagacucugccugaaccuccugcaagccuuucaccccc

SEQ ID NO: 4133236 - RNA, 57 nt, Human
ggggaguguggaaggcaaauuauggagaaaaaggcuaggcagccagucaugcucccu

SEQ ID NO: 4133237 - RNA, 57 nt, Human
ggggaguguuucauagcauccuauuuuauaugacaggauauuuaugacucauuccuu

SEQ ID NO: 4133238 - RNA, 57 nt, Human
ggggaguuuuaacaacaguacugcaaaaauuaaguuaugcucugucuaaaacuuccc

SEQ ID NO: 4133239 - RNA, 70 nt, Human
ggggauaaaauucagugucuggcacugcuguuggugaggcugcggacugcuuuggcacugaaggguuuuc

SEQ ID NO: 4133240 - RNA, 59 nt, Human
ggggauaccagugugugccaaucaccugcugauugacuuccauagcuaccugguacccu

SEQ ID NO: 4133241 - RNA, 102 nt, Human
ggggauccugauggugcaauaaaguuguagaaccaccucacuaagugcucccaauuccuuuuacaauucucuauuauugcaauuuaauccuuucacuucccc

SEQ ID NO: 4133242 - RNA, 89 nt, Human
ggggaucucuuccagucgggacuucuggggacuguagauugacuggggucgcucuccuugcuagagguucuagauuggcuaugauuucc

SEQ ID NO: 4133243 - RNA, 75 nt, Human
ggggaucugaguccaagagucuggaagaaccugugccaguggaggacacugacuuguucuuccagcacugucccc

SEQ ID NO: 4133244 - RNA, 56 nt, Human
ggggaucugcacugugguugcugcaugaagacaguagcuggcagugccuggaccuc

SEQ ID NO: 4133245 - RNA, 63 nt, Human
ggggaucuuuagauuagaaacucuaauuagcgaguucagauuagaaagggucuggggauccuu

SEQ ID NO: 4133246 - RNA, 58 nt, Human
ggggaugaguuugagauaguagagugugggcacuuguucuggcuggaaacuuagccuu

SEQ ID NO: 4133247 - RNA, 73 nt, Human
ggggaugccggcaccugaguucgguugcugccucauccgugagccgggcuggcucccagguguugaaguccuc

SEQ ID NO: 4133248 - RNA, 63 nt, Human
ggggauggguuugguagucauucaauugcuaucuugcccugugaagacacauaaccucucucc

SEQ ID NO: 4133249 - RNA, 65 nt, Human
ggggauuacugcacacaucgcacugcccgugacaaagaguaaugauucagggcuguggcuucccc

SEQ ID NO: 4133250 - RNA, 74 nt, Human
ggggauuccauuguguguuuaugcccagauaucuuuaugcgucuagaagacauuuggaagauacacauaaaccc

SEQ ID NO: 4133251 - RNA, 60 nt, Human
ggggauugggaaauguggaaaacagucauuguggcugacaucauuguguugccaauuccc

SEQ ID NO: 4133252 - RNA, 77 nt, Human
ggggcaaacagucuagaugcuagaaaauauacaccauaauguuuuauguuuuauuuagcuucaguacauaaaucccc

SEQ ID NO: 4133253 - RNA, 76 nt, Human
ggggcaagcuaggaggcccugcacgcuuacccugagaguggggcuccccaguaagagugcaucuuccagcagcccc

SEQ ID NO: 4133254 - RNA, 85 nt, Human
ggggcaauguggucaucucuagggacccucccugcucuaacauucuuugaaugugguggguccugagguggaagcacucuguccc

SEQ ID NO: 4133255 - RNA, 110 nt, Human
ggggcacacaggauuucaauagaaauugcaugccuuuuuagaugugcaaauguuucauuaagcguaugaauauuugaagagauguaugacacuuugaaaacuguuuccuc

SEQ ID NO: 4133256 - RNA, 57 nt, Human
ggggcacccugaggcugaggauaggugggucugcucaccccguaagcccagggcccc

SEQ ID NO: 4133257 - RNA, 57 nt, Human
ggggcagagggcccuaggccaagcccacccugggcaccagggacaauccucuucccc

SEQ ID NO: 4133258 - RNA, 55 nt, Human
ggggcagcaaaggagcccuggaugacagaacaaggcaggguuacccgcugccacc

SEQ ID NO: 4133259 - RNA, 91 nt, Human
ggggcagcugguggcuccacugccccugggcaccggggcccugcgugccagucuggugcacgugggcagucggccauacaccgaguucccc

SEQ ID NO: 4133260 - RNA, 81 nt, Human
ggggcaggaauuagggagccaucauaaggucuguccaccuucagaauugugccugggguggcuccuccuaacguucuccuc

SEQ ID NO: 4133261 - RNA, 95 nt, Human
ggggcaggcugacaggcagggucagcagggcugugguguggcugugugaccuuggacaagugacuugagcucucugagccugccucgcuucaccc

SEQ ID NO: 4133262 - RNA, 73 nt, Human
ggggcagggaugcuaucucucugggcccugaccuggggccucccaccauuuagagagagcagcuccccacccc

SEQ ID NO: 4133263 - RNA, 64 nt, Human
ggggcagggcgcgcaggggucuggauccgacggacgucccaggcucacuguccgcuuccgcccc

SEQ ID NO: 4133264 - RNA, 129 nt, Human
ggggcagguucuucagagaaaguggggaucauggugcuaacagagcugccgggagaacugggacccacucagaccugugccugccugugaguucugauggucugauacuuucacauacauuauuucuuu

SEQ ID NO: 4133265 - RNA, 76 nt, Human
ggggcaguggggagguaaggaccaauguacccaagauccuuguuuuuugucuuuccccuccucauuguggggcccc

SEQ ID NO: 4133266 - RNA, 110 nt, Human
ggggcaugauggugggaucaaaugcaauaaauagggaauagaagaggaagugcaggcauuuguauuuauuucuugaguuuuuguuuguuuuguuuucucuuauuugcuuc

SEQ ID NO: 4133267 - RNA, 105 nt, Human
ggggcaugucuucucugccaugaacuugaaugucuagugcuccugagcccaaguguucagggacaggaugggcauuucacaaggacagcagucccacccaccccc

SEQ ID NO: 4133268 - RNA, 64 nt, Human
ggggcauugaauuugaaagagaauaaaagagccuauacaaucuuucaauccauucauauguccu

SEQ ID NO: 4133269 - RNA, 62 nt, Human
ggggcauugugacauaucucugggccuacacccagguuauaugacugucaugccugugcccc

SEQ ID NO: 4133270 - RNA, 68 nt, Human
ggggcauuuauuacacuuuacucuuacaccauugccuaccuuuggcaaaggaaguuuguaaguguccu

SEQ ID NO: 4133271 - RNA, 82 nt, Human
ggggccaaggccuaggagggggaacaaggcauaccugucaggcuugaucaguauuucuuucccucucuuuagccuuggccuc

SEQ ID NO: 4133272 - RNA, 59 nt, Human
ggggccaagggugcguggcaggacguacuaaucaagugucucuugggucccuuggcccu

SEQ ID NO: 4133273 - RNA, 65 nt, Human
ggggccacuggcaggaccuuggcacuccucccccuccaugugagccaagcuguccuguuggcccu

SEQ ID NO: 4133274 - RNA, 72 nt, Human
ggggccagagaggacccagguggcccuccuuaguugacucugguguugcuugucgguuccacucacggcccc

SEQ ID NO: 4133275 - RNA, 63 nt, Human
ggggccagauaucacuaagguuccagauuucugauucugugaccugggguguaucuggcaccc

SEQ ID NO: 4133276 - RNA, 103 nt, Human
ggggccaguagaauauaaagggaaggagcuugauaaagggcacuguuagcugcacguuaaagugcaagcuggcauucuccuuguuauuccuuuuucucucccc

SEQ ID NO: 4133277 - RNA, 71 nt, Human
ggggccaguggcaggcggagauguaggacucaggcucagcccccguguccugcccucuccuccuuggcccu

SEQ ID NO: 4133278 - RNA, 117 nt, Human
ggggccaucagccauggaaggcaggcugccucuggaagcuggagaaggcaaggaaacagauucuucucuagagccuccagaaggaaugcagccugcugauaccuggauuuuagcccc

SEQ ID NO: 4133279 - RNA, 77 nt, Human
ggggccauggagcagccuguguagacggggaccugcccugcaugggcacccccucacuggcugcuucccuuggucuc

SEQ ID NO: 4133280 - RNA, 61 nt, Human
ggggcccacagggacuugucuggaaccacauggcuggcagggcacagcccagugggguccc

SEQ ID NO: 4133281 - RNA, 62 nt, Human
ggggcccuuggaaagccaaggcagcugugcuuuccugcagcuuggcacccuccaagggcccc

SEQ ID NO: 4133282 - RNA, 61 nt, Human
ggggcccuuguggcugcaggccaggacagucguuaugucugauggggucaagagaggcuuc

SEQ ID NO: 4133283 - RNA, 75 nt, Human
ggggccgagucuaugucuccaccuucgcagaguucagggaacucuguuuuguauuuggagggauagaaaggcccc

SEQ ID NO: 4133284 - RNA, 57 nt, Human
ggggcugagaauucagucucggcagguagaaggcucagagggaagaaucucagcucc

SEQ ID NO: 4133285 - RNA, 80 nt, Human
ggggcugauaguauuacuggcaucaaguggguagaagccagggaugcuucugaacauccagcaaugcacaggacagcccc

SEQ ID NO: 4133286 - RNA, 74 nt, Human
ggggcugaugcugcugggaguggugcucauugucagaucaagugacggccucacuccaagucagcuuuagcuuc

SEQ ID NO: 4133287 - RNA, 89 nt, Human
ggggcugcgacgucugcuuugucuuucaugauacucaaccccaagcagagaaaaauaucuuaaaaaucgaagcagauuaacccaguccc

SEQ ID NO: 4133288 - RNA, 71 nt, Human
ggggcugcuaauuacgcuggggcaggcggggcaaaccaggacccugccaggcgagucuaggccauggcccc

SEQ ID NO: 4133289 - RNA, 75 nt, Human
ggggcugcuaggcugguuagauuuguggucuucuuccuccuguggaggacccuagagagagccagccugagcccu

SEQ ID NO: 4133290 - RNA, 58 nt, Human
ggggcugcugaggccuucccuguccucagcauacugaggaagauggcuucacaccucc

SEQ ID NO: 4133291 - RNA, 60 nt, Human
ggggcugcuggaguuaggugggcuugaaucucuccuucagcucugcuagcucugugcccc

SEQ ID NO: 4133292 - RNA, 126 nt, Human
ggggcugcuugaugauuuuguaaauuuagacuuucaaggauagugcuccaagagcuguauguuuccuucuugauaacacucuugcauuaccugaauaucucuuaggccuuaccagcaugcagcucc

SEQ ID NO: 4133293 - RNA, 78 nt, Human
ggggcuggaaaagcugugucuuggguuuuaucaaaucuaaaauguuugagaaguaauucaagacauuccacagacccc

SEQ ID NO: 4133294 - RNA, 58 nt, Human
ggggcuggagagacccugggcgggguggugggaauggcccaggaggagcuccggcucc

SEQ ID NO: 4133295 - RNA, 98 nt, Human
ggggcugguuuggggccccuccagccccuuccuggcaucuggagcagcaucuccagagggcgauggcugggggcggagggaacuugccaaccagccuc

SEQ ID NO: 4133296 - RNA, 59 nt, Human
ggggcuguggagcuuguggcaguggguaaggaggugcccaggucaaaauucacaggccu

SEQ ID NO: 4133297 - RNA, 58 nt, Human
ggggcuuguugcgcugaagauuuacaauguacuucuugcaggcggcucagcaaccccc

SEQ ID NO: 4133298 - RNA, 120 nt, Human
ggggcuuguugugagaaugcaguggaaaguggggcagccccagaaacaguucagcagcuguacuuugaccugagcuccggggcugcuuccuucuggcuguaucucaccuucucaugcccc

SEQ ID NO: 4133299 - RNA, 80 nt, Human
ggggcuuucugggaaggaagggcuggcugucuuggcccuggccuuggcccuaguucccuuccacugcccagaugugcucc

SEQ ID NO: 4133300 - RNA, 68 nt, Human
ggggcuuuuauugucuuuacgacgaccugaauuuaaaaccuccuccaggugacaauaacuauggcccu

SEQ ID NO: 4133301 - RNA, 61 nt, Human
gggauuggagaguggaacaugcugguucuccuggaguggcagagucucuccuuuccagccc

SEQ ID NO: 4133302 - RNA, 61 nt, Human
gggauuucaaguaucuugggcgagaagaaaagguuuuuacguucuagcugcuucgaauccc

SEQ ID NO: 4133303 - RNA, 61 nt, Human
gggauuucugccaaauaccuguuguauuuuagaauuaaccagcaggcaaaggugaagucuu

SEQ ID NO: 4133304 - RNA, 60 nt, Human
gggauuugugggauggccaguguaugcacuuccagugacugcuggcauuaccacaaaccc

SEQ ID NO: 4133305 - RNA, 75 nt, Human
gggcaaacauuucugucauuucaauaugguuaaacucuauuuaggcaauguggagguggcaacuauaauuugucu

SEQ ID NO: 4133306 - RNA, 58 nt, Human
gggcaaagguuugaggugggaagagguucagugacaucucuccaauuuaaauucaccc

SEQ ID NO: 4133307 - RNA, 70 nt, Human
gggcaaagugguggaggcaguuuuugguggguggagagacauugagcacuuccuuccaccugcucugccc

SEQ ID NO: 4133308 - RNA, 61 nt, Human
gggcaaaugacuucaccucugugaagcagcaguauccucuucugugaagugagguuagccc

SEQ ID NO: 4133309 - RNA, 108 nt, Human
gggcaaaugucuuacuauaauuuaugauuuugauagagguuuuagaguguuuauuuauaaaaaucuuuaaguuuaccacuuucagaauuaagagcaggauauuuaucu

SEQ ID NO: 4133310 - RNA, 100 nt, Human
gggcaacagcaguaucugacaucugagcugcuagguaugcauugucaccgaggcgaucauccacaguugcagcccacaugccagauacccacacaggccc

SEQ ID NO: 4133311 - RNA, 88 nt, Human
gggcaagugagucagagacaaacuuccucucugaaagguucauugagagagccaauuagccagggaggaggugcuguucugcaugccc

SEQ ID NO: 4133312 - RNA, 69 nt, Human
gggcaauuaaggucccguuuccuuggagaacuccaagagauagugccaaacggaccucagaauugaccc

SEQ ID NO: 4133313 - RNA, 95 nt, Human
gggcacacgucaauugccuuuccugccaggugagaccuacugcuugaaggugggagcagcucuguuuaccuggaggaggcagggcuggugugcuc

SEQ ID NO: 4133314 - RNA, 57 nt, Human
gggcacagagcuccagccuuggcuccagauucuggguccugguagggcucugugucu

SEQ ID NO: 4133315 - RNA, 84 nt, Human
gggcacagcgcagccauccagggguacccuggagcccgacagaagcagggccgggcuccagaugucuccuggcaaaugcgcccc

SEQ ID NO: 4133316 - RNA, 59 nt, Human
gggcacaggaauuugggaugugugauagacaaagaaugugucaugaaguccgugugucc

SEQ ID NO: 4133317 - RNA, 68 nt, Human
gggcaccagcuccagcaucaccggcagcagacacucccaggccugccaugguccaggaccuggugucc

SEQ ID NO: 4133318 - RNA, 127 nt, Human
gggcacccagccagccccaacccuucugcaguuucagccuuucuggcccaucuacaugucuucccucagaggggccagcuagagcauggggcaggcuggacaggggcucagggcuguggcacagccu

SEQ ID NO: 4133319 - RNA, 61 nt, Human
gggcacgggugguaaugagaaaaggaaaucauuaaaguuucuuuuccuaccaccugugauc

SEQ ID NO: 4133320 - RNA, 96 nt, Human
gggcacuaccaaagugagucucuagucugguccuggcuucucagggcaagaaaugauuuguuagggcaccuggagguguuuggcuuaggacugccu

SEQ ID NO: 4133321 - RNA, 99 nt, Human
gggcacucuauaaccccaaguacaacgcauacagagaaaacccugaaaguaguacucaguuucuuccauucgucuguugugcauuguuguuaugugccu

SEQ ID NO: 4133322 - RNA, 55 nt, Human
gggcacucucaccugaccacaugcccuugggggcuggucucagugcuggguuccc

SEQ ID NO: 4133323 - RNA, 89 nt, Human
gggcacugaggccucuggaauuaaggaagccuguaauucuuccaacuacuacagcccuuaucuccuaagagagcuuuuccucagugccu

SEQ ID NO: 4133324 - RNA, 57 nt, Human
gggcacuggaaggcucucaggcucuggaauacaccagcacccuacuuucacaugccc

SEQ ID NO: 4133325 - RNA, 61 nt, Human
gggcacugggaagacuggaauugcucagcacagcagaggagaaucuggcuucccagagucu

SEQ ID NO: 4133326 - RNA, 59 nt, Human
gggcacugggagccagagucaccuagagagaguccugucugaaacuugguccuaugccu

SEQ ID NO: 4133327 - RNA, 80 nt, Human
gggcacuuuuggcaauguuuacuggggacccagaccucacucuuggucucccacagugcuaagacaggggcaaaaggcuc

SEQ ID NO: 4133328 - RNA, 76 nt, Human
gggcagaauacccuauagacagaauacucugucuauagaauauccuagaguauucugucuauaggauauucuacuc

SEQ ID NO: 4133329 - RNA, 130 nt, Human
gggcagaauaugcaaccauuugugaagugauuuugccuccauucucuugcucugcccucucugagacaucaugaagcagacagagaauggguuugucauccccacuuuacagaugagaaugcugaggccc

SEQ ID NO: 4133330 - RNA, 64 nt, Human
gggcagagaggagcccuagcacuacccagaagcucaacaggugcugggagcccuggucugcucc

SEQ ID NO: 4133331 - RNA, 76 nt, Human
gggcagaggcuccaggguguguuuacuggggucucuggcgacaccccgugaguacucuccuccuccagccaugccc

SEQ ID NO: 4133332 - RNA, 72 nt, Human
gggcagaguucuaaauucuuuacauuggcuucuucccuucugggauucccacugugaagagaguaugugccc

SEQ ID NO: 4133333 - RNA, 77 nt, Human
gggcagauuuacucagcuccuggaaaaaaaccaaaggccuaugcucuuuucucaggacaaugggugaauacuugcuc

SEQ ID NO: 4133334 - RNA, 80 nt, Human
gggcagcacccuccaaggacccccugagguagggucccccauccacaccucagaacggcguucuugaacccaguuagcuc

SEQ ID NO: 4133335 - RNA, 57 nt, Human
gggcagcagagcccugccgagugagaggcuguggggcagcggcucuguccugugccu

SEQ ID NO: 4133336 - RNA, 57 nt, Human
gggcagccaaggggaccgaacguggcuccuucccaaucucacucucccugucugucc

SEQ ID NO: 4133337 - RNA, 58 nt, Human
gggcagccugugccuucuuauuccagggaccuggggcacagaguuggcagagcugcuc

SEQ ID NO: 4133338 - RNA, 83 nt, Human
gggcagcucuucugcucauccccaaccccuucccagcacucggguuuggugcugagccgggugggauggcaggagccgcuccc

SEQ ID NO: 4133339 - RNA, 65 nt, Human
gggcaggaagcauuaaaacgauucugcugcaauacgguuguuugauuucuuugugcuucaugucc

SEQ ID NO: 4133340 - RNA, 61 nt, Human
gggcaggaugcaguuucagagaagagcaauuacacagguucuuaauggaggcaucuggccc

SEQ ID NO: 4133341 - RNA, 89 nt, Human
gggcaggaugcuguggccacuggcugcgaucuuggcgcuucacaagcuggagccgucaggcccugagccacucggccgcgcagaugccu

SEQ ID NO: 4133342 - RNA, 68 nt, Human
gggcaggcacugaccugcuuccuugauagggagaagccaucauuuccuguagucauugccugaauccc

SEQ ID NO: 4133343 - RNA, 60 nt, Human
ggggccggcgcugacccggcuccagccgccuccaggggcggggucugagcgccgcgcccu

SEQ ID NO: 4133344 - RNA, 74 nt, Human
ggggccgggaggaggagagaaucacugaggccgguauaugaucaccucaugaguucuucugcccauccaccccc

SEQ ID NO: 4133345 - RNA, 68 nt, Human
ggggccuagggaguggccaugccugcccgggcaauggggaucacaggcaaccacuccccgcggacccc

SEQ ID NO: 4133346 - RNA, 62 nt, Human
ggggccucagagaccagcuagauuuuaaaauaaggaaaaagcugggaauuuucugaagcuuu

SEQ ID NO: 4133347 - RNA, 79 nt, Human
ggggccuccgcgccucagccugagggcuccaggagccccccgcucucugaggccccgaagcugagguuuguugggucuc

SEQ ID NO: 4133348 - RNA, 73 nt, Human
ggggccugguaggaggugacuggaucaugggcauggaguucucaugaaugguuuagcaccaucuccccucccc

SEQ ID NO: 4133349 - RNA, 56 nt, Human
ggggccuuggaucugugccccgcccauggaacagcgcccgggcucggagaggcccc

SEQ ID NO: 4133350 - RNA, 60 nt, Human
ggggcgagccuggcacugaucuggcuggcuuacaugacucagccaggcucaagcuccccc

SEQ ID NO: 4133351 - RNA, 122 nt, Human
ggggcgagugugucacuggacuguuuccacagcucgguuggugccacacugucccgaagguucugaaggagacugaggucaccaggcugucugggcagacagagcugccagacucucguccc

SEQ ID NO: 4133352 - RNA, 105 nt, Human
ggggcgcaugcuuguguuuggacuugugccugugcccacccugugugugagucuggguggauguccccaugucaggacaggcucuggacugagcugcuuugcccu

SEQ ID NO: 4133353 - RNA, 82 nt, Human
ggggcggggccugagguucggggcccggcgcugcguuggcggguucgccgcggcgccuaagccccgaccucccucccgcucc

SEQ ID NO: 4133354 - RNA, 83 nt, Human
ggggcgugggggcugccaagccugccugccucucgagagacccagggggaggcucuggagcccgagccucagaucacagcccc

SEQ ID NO: 4133355 - RNA, 80 nt, Human
ggggcguuuaccaauucccacagcugguauaaauacccucccuggugcuuagcaaaggcugcugggagugggguugcccc

SEQ ID NO: 4133356 - RNA, 69 nt, Human
ggggcuacagugaggugguuuccuuuacuacuaagugaagucaugcccugccucaaugauuugaguccc

SEQ ID NO: 4133357 - RNA, 74 nt, Human
ggggcuaccaagaauggcagaguggaccauacucaacucauuguaggaguuggcacccucuucaacuguacccc

SEQ ID NO: 4133358 - RNA, 57 nt, Human
ggggcucaggguacagacucuggagcuacaccgcaccuaacuuugaguccuggcccc

SEQ ID NO: 4133359 - RNA, 78 nt, Human
ggggcuccacuaaggcagcagcggcucggcaggccaugucuuuuggccucugcaccaaccugucaagaguuaagccuc

SEQ ID NO: 4133360 - RNA, 81 nt, Human
ggggcucccccaccguguuccugcucggcauccacaaagcagcgcgugugccggacgcccccuacuggucgggggagcccc

SEQ ID NO: 4133361 - RNA, 66 nt, Human
ggggcuccggcuuggugugcagggugaggcugucccuccagggcucguacaccagcguggaggucu

SEQ ID NO: 4133362 - RNA, 79 nt, Human
ggggcuccuaguugcacaguuccucaagcaggagguauuucaucuucgcaacaucuggaacugucaaagagguagcgcu

SEQ ID NO: 4133363 - RNA, 55 nt, Human
ggggcucgccgcugccccuccccuccacaccaaggccugagacagcaggagcccc

SEQ ID NO: 4133364 - RNA, 68 nt, Human
ggggcucugggcugugguuccacuccgucuccaggacacagugcaaucggccacaaauuuaggacccc

SEQ ID NO: 4133365 - RNA, 58 nt, Human
ggggcugacgggcauguggcuucccaauucauugugaagagcccgucuguucagcugu

SEQ ID NO: 4133366 - RNA, 73 nt, Human
ggggcugagacccaaguccugagccucccagugcaugccuccccagaccgcucucagggcaugggacagcccc

SEQ ID NO: 4133367 - RNA, 73 nt, Human
ggggcugcccugugcauuauaguacguuuagcaacaucccuagcuuccaccuacuaaaugccacuagcacucc

SEQ ID NO: 4133368 - RNA, 84 nt, Human
ggggcugcuuugaggccaauuauggugguaauauuuuuuaguuucucuaggaaaguuguuuccuaaggucuaaagagcuguccc

SEQ ID NO: 4133369 - RNA, 80 nt, Human
ggggcuggaacccagaccucuggcagcugucacuuucacaaugcccuugggcugacuaggcugcagagggguuucacccc

SEQ ID NO: 4133370 - RNA, 65 nt, Human
ggggcuggcuaagacuuuucugugugaggggcugaccucuguguuauagaaugucuagcagcucc

SEQ ID NO: 4133371 - RNA, 61 nt, Human
ggggcuggcuguggcccagcuggguguggaguuucacagccagaggagccaggcuggcccc

SEQ ID NO: 4133372 - RNA, 89 nt, Human
ggggcuggggggucuuggaagccauuccuucugcucccggcaggccugggagucccuggaauagcuccuuccugggccagaacagcccu

SEQ ID NO: 4133373 - RNA, 88 nt, Human
ggggcugugucucccucagaguggggcucccugaggcagggcugugucuccccucagacuggggcucccuguggacagaaccggcccc

SEQ ID NO: 4133374 - RNA, 57 nt, Human
ggggcuguuuuuggaauggcugaauguucaugcugcgugccuguccugaacugccuu

SEQ ID NO: 4133375 - RNA, 74 nt, Human
ggggcuuaaagaguagagacaggaagauuacuccagguggcagcuggagugguaacuaaguccugcuuaguccc

SEQ ID NO: 4133376 - RNA, 91 nt, Human
aaaaaaagagaacgugaauuacuuuagggauguuuugcuuuuuauucaaggcagauggcuacuuuccugggucuucaauuucucuaguuuu

SEQ ID NO: 4133377 - RNA, 67 nt, Human
aaaaaaagguuuauuuaaucagggagccucugaagacaccugguuucuguugaauauaucuuuuuuu

SEQ ID NO: 4133378 - RNA, 101 nt, Human
aaaaaagggacuaaggcuggcagagacaagaagacuaaacuuuguauuaauuuguuguauggucauuccuuguuuuuucagaauggacuccucucuuuuuu

SEQ ID NO: 4133379 - RNA, 72 nt, Human
aaaaaaucacagcuggaauaggucuugguucaugaaaacauguaaacaaagaucuuccugcacugaauuuuu

SEQ ID NO: 4133380 - RNA, 114 nt, Human
aaaaaauggucgugggcuauauuucauguccaguccaacauguugugugugcacagcuguucggggcuggcaugugguagcauaauaaaaggaagauuaccauuuccaauuuuu

SEQ ID NO: 4133381 - RNA, 95 nt, Human
aaaaaauucaagauggcgccagcagagcauuaaaaccagcucugggacuucuaggacaggaucaugaugcuggcucugcccaucuugggugcuuu

SEQ ID NO: 4133382 - RNA, 121 nt, Human
aaaaaauugggaaaauugaaaaauaaaucaaggagggauuauauuuauuuugguuagcuucaaaaacauuuuuuaccauuugaaauaagaaauucuucuuugcaguuaucucuaauuuuuu

SEQ ID NO: 4133383 - RNA, 112 nt, Human
aaaaaauuuaaaacaaguaaauuaaugcauucacaugaucacuucuugaaaaugguucaaagcauguuuuccugauggugggauuguuuaaaugacauguuuuaaaguuuuu

SEQ ID NO: 4133384 - RNA, 107 nt, Human
aaaaacaagaaagaaagaaagacaucauguucugcuaauagucccauuuaaagucaucuggggaguauuaggcacggcgggacugcacuuuauuuugcuuuguuuuu

SEQ ID NO: 4133385 - RNA, 58 nt, Human
aaaaacagaaugugucuaacucuagaaacugugaggggagacagcaucucuuguuuuu

SEQ ID NO: 4133386 - RNA, 95 nt, Human
aaaaacaugacggacaucauaauguuaaguuuagauuauaacuuggaagucaguaccagguuacauaauacuguagauugcccuguuauguuuuu

SEQ ID NO: 4133387 - RNA, 58 nt, Human
aaaaacuaguuguucccaagaauacaauuccuuucccuuuugggcacggcuagauuuu

SEQ ID NO: 4133388 - RNA, 109 nt, Human
aaaaagggaaugccgauaacucguggagcacugaauggaucugaugagcauaaauaugugugucagaaaucagugccucggcaguaauggcuauacacauuuccuuuuu

SEQ ID NO: 4133389 - RNA, 103 nt, Human
aaaaauaaugagcuaccaaugguucaauugcuuggcaguguaacaucucagagagaaugggagaauacauuguucaugcaugagaaaaggaguuuuuauuuuu

SEQ ID NO: 4133390 - RNA, 117 nt, Human
aaaaauauucaaagaguggauagcuuugcauaaaugcuuaaaauuuguauacaauaaacccaaauauauacuuuuuugauacuuuguggcuaguuacuuuaauugugaaauauuuuu

SEQ ID NO: 4133391 - RNA, 106 nt, Human
aaaaauuccacaugguucacaacacuuuuuauauauuguaucuuuggcuaauagguauauguuugugaguaguguaugucugugugcuuccauaucuggaauuuuu

SEQ ID NO: 4133392 - RNA, 78 nt, Human
aaaaauuuacuauuccugggccccauuccagacuagucaaauuagaauuucugagugaggcccaggcaugcgauuuuu

SEQ ID NO: 4133393 - RNA, 96 nt, Human
aaaaauuuagcccaccgugguuuagccuucauuaaccugguaugcauuugaagaauucaauagaguuaaugcaggccaagccugaacuaaauuuuu

SEQ ID NO: 4133394 - RNA, 82 nt, Human
aaaacaaucgcaaugucuaguuucccaaauccgugcguaaugguacaggaguuaggagugcucagaacaucugucuuguuuu

SEQ ID NO: 4133395 - RNA, 84 nt, Human
aaaacagagcuuugauaagccccguggaugcaccugacacgagagaaucaauggugcagguggauuugggcucaaggugguuuu

SEQ ID NO: 4133396 - RNA, 68 nt, Human
aaaacaugaaauucuagcugaacccgguuaugcugguauauagugggauuauugugauuucauguuuu

SEQ ID NO: 4133397 - RNA, 83 nt, Human
aaaacauuauauaacuuuaaagagucauuauguaugcccuuaugaucuauggcuuugcauacaauuuuuagaaaugguguuuu

SEQ ID NO: 4133398 - RNA, 86 nt, Human
aaaaccaaaaauacaugagccugggaccaaggaaugaaaguggcaccuugcucucaaaccugcugucuuguucauaauuuuguuuu

SEQ ID NO: 4133399 - RNA, 130 nt, Human
aaaacccccaaaucagugcuccuucccuucccagggcacucugcagggaccaccugagucagacacagagucucugaccagggugccaaggggauaucuuaaggguccagggacauggagggggcacuuu

SEQ ID NO: 4133400 - RNA, 75 nt, Human
aaaaccuggcaagguaagggcugcgacuauaaggcugcacagcucagggucacaucuugccuaagaccugguuuu

SEQ ID NO: 4133401 - RNA, 89 nt, Human
aaaacuacacauaagcauucugagaaauuucuuugugaugugugcauucaucucacauuguugaaacuuucuuaugauugugcaguuuu

SEQ ID NO: 4133402 - RNA, 67 nt, Human
aaaacugggaaauugacacugauaaaaugccaguaacuauagcauuuacuuggauuuccccaguuuu

SEQ ID NO: 4133403 - RNA, 79 nt, Human
aaaacuguagcauuuaauguugaagauaacugacaugcaugaagucauuguauuaaaauauugguuuaucuaugguuuu

SEQ ID NO: 4133404 - RNA, 130 nt, Human
aaaacuguauauauauauuguucuuggauaggaauagccaacauuuauugaaugcuuuguacuaugugcuaggcacugugcugaugucuuauugccuaauuuaagauaguauuuuaaauaauuguguuuu

SEQ ID NO: 4133405 - RNA, 70 nt, Human
aaaacuguuuaggaggcuuauaugcauauuuguuccuuagcuaaugacaucuagacuucugcccaguuuu

SEQ ID NO: 4133406 - RNA, 68 nt, Human
aaaagaacuugauauucugagaagcugaagaacaauuuguuuuccucagcuagguauuuaggacuuuu

SEQ ID NO: 4133407 - RNA, 56 nt, Human
aaaagaaugucugaacagcuggcugaauaaaucagccaaaguugaaacacucuuuu

SEQ ID NO: 4133408 - RNA, 70 nt, Human
aaaagagggauaggaaacuuagguacacugugcccaucagugaccuugggaaccuguuauaaaaucuuuu

SEQ ID NO: 4133409 - RNA, 129 nt, Human
aaaagagucauguaaauuagcauuuguuuuuggaagguuuugcauuguaaagucauagaucauguuuacagaagcuuuaggaaugaauaaaaaucuucucacugacugcacauuaucucauuuuccuuu

SEQ ID NO: 4133410 - RNA, 106 nt, Human
aaaagcacaagagauagacgucacccuggagagugcuguaguaaucccuaaaugccuuauaggauuacugaacccuacuuuuacagguucuuucuguuguucuuuu

SEQ ID NO: 4133411 - RNA, 114 nt, Human
aaaagcaggcuacugagaggcuuuaacagauaguuucuucuguauuccagaacauuccccaauauccaggagaaacauguaacugugucuguuaagugucaguagcuuuuuuuu

SEQ ID NO: 4133412 - RNA, 63 nt, Human
aaaagcccuuucaaggacuaaagaaauaaaggcuacaaaugucuggagcuugaaauggcuuuu

SEQ ID NO: 4133413 - RNA, 81 nt, Human
aaaagcgauggggaucagaauuuacuuauaauuguuguuguuggcaauauuauagucuuguuauguuucaccauugaguuu

SEQ ID NO: 4133414 - RNA, 72 nt, Human
aaaagcuaagguagcauuggagaccuccuaagaauuuuauuagguggaucucaugaugauuauuuuacuuuu

SEQ ID NO: 4133415 - RNA, 64 nt, Human
aaaagcuggcaauuaucaaaacugguacaauccucuaccucugaguucaugguagccagugguu

SEQ ID NO: 4133416 - RNA, 120 nt, Human
aaaaggacugagaggcagcuucaggaacugaguuguauggugauccccucaacacaaagaguucuccaccauugauauaacucagucucucauuuggucucugcuucucucauuccuuuu

SEQ ID NO: 4133417 - RNA, 68 nt, Human
aaaaggcauggagguugauaguacaaaggccuacaucugugggaacauuucuagccacuauucuuuuu

SEQ ID NO: 4133418 - RNA, 124 nt, Human
aaaagguaagugaauuugguggcauaacuagaagacauuuuagacauaaaagauuugaaggaaaaaugucuuacaucuuccuugacuuggaauguuugguuauguaagaaaugucuuaucuuuu

SEQ ID NO: 4133419 - RNA, 68 nt, Human
aaaagguugaauucaggauccacagaucugcuucaucaauuagacaaguguuuccugaauuuccuuuu

SEQ ID NO: 4133420 - RNA, 80 nt, Human
aaaaguagagcuucuugggcuuuacacaaagcaauucugauucaguaaauuuaugcugaggcccaggaauauguauuuuu

SEQ ID NO: 4133421 - RNA, 78 nt, Human
aaaagucauaaauuguacccauuccaacacaaaucccugauuguggugucagugaagguagaguuuucuuugucuuuu

SEQ ID NO: 4133422 - RNA, 70 nt, Human
aaaaguccaguccaaggugguuugcuaaucccaacucuagacagugguuggcaaagcuccaccgauuuuu

SEQ ID NO: 4133423 - RNA, 60 nt, Human
aaaagugguuuaugauauuccaagaaugaacuccuauucuugguaauuuuugacccuuuu

SEQ ID NO: 4133424 - RNA, 55 nt, Human
aaaaguguucaggaagaauaauguugcauuuccuuaugucuccugaaacacuuuu

SEQ ID NO: 4133425 - RNA, 60 nt, Human
aaaaguucaugacauccucuugauaaggaguucuuauucuggguucaugagugagcuuuu

SEQ ID NO: 4133426 - RNA, 61 nt, Human
aaaauguuguguuucaguucaagaaaugugucaaaugguucugaacauccuacaacauuuu

SEQ ID NO: 4133427 - RNA, 69 nt, Human
aaaauuguggauugcguuuuaucagaagucauuugagauuucauguaugaggccaaucuuugaaauuuu

SEQ ID NO: 4133428 - RNA, 67 nt, Human
aaacaaagcaucuugcuaugcauagaacaauuauuauaacugugaguaauugcaauguguuuuguuu

SEQ ID NO: 4133429 - RNA, 130 nt, Human
aaacaaaggaaauauuaauaauaggaagagaauucucacagcagaaauaugaaggcagaggagagauuucacuuauguuacacuguuuugcuguguuuuuuaaaucauuuuaaucccuuuuccuuccaau

SEQ ID NO: 4133430 - RNA, 74 nt, Human
agcccugucaucuggccugauugguguggaugugguaccccacuaagacauuccucagugccaguugaggagcu

SEQ ID NO: 4133431 - RNA, 58 nt, Human
agcccuucccagcuuagauuugcucauuuguaaaacggggcuaugaagugggagggcu

SEQ ID NO: 4133432 - RNA, 81 nt, Human
agcccuuucccauuaguacuuuagcauaaagcaguuuaucagauucagcugguugauucuaaggugauaauaugcagggcu

SEQ ID NO: 4133433 - RNA, 57 nt, Human
agccgagaguauuugccagagcggccauguggaggucauggccagguacugucugcu

SEQ ID NO: 4133434 - RNA, 84 nt, Human
agccgagggcacagugcucacaccucuauuauagcacauugugcugucuguucgagcguguguuguuuuugucuucacuaggcu

SEQ ID NO: 4133435 - RNA, 112 nt, Human
agccggaaaggggcaggguggaagaauagaugucauugucauccauccugggucacaugggguuugauggcagucggcgugcuggcauaugcccuguccuuucuuuaaggcu

SEQ ID NO: 4133436 - RNA, 69 nt, Human
agccggaauggacugagauagggcuauaggcacagccucucaagccacugcccuuagccauuugaagcu

SEQ ID NO: 4133437 - RNA, 66 nt, Human
agccuaagacaaguuguacucaagccugccuaauauccaaggcugugcucuuaacuuuuuugggcu

SEQ ID NO: 4133438 - RNA, 93 nt, Human
agccuaauaacuaugggcuuuugguauguuguuuagaggaaaugacaucaguuaaucuggcaggauaucgaagugaaaaguaguuaagggguu

SEQ ID NO: 4133439 - RNA, 69 nt, Human
agccuaggcuuguuuucaucagcuccaaauuugccuugacacaggaauguugacucuacaaccugggcu

SEQ ID NO: 4133440 - RNA, 67 nt, Human
agccuagucaagcaauccaauguccugagauggguauuuacucugacaagggauuguugaguagucu

SEQ ID NO: 4133441 - RNA, 68 nt, Human
agccucaaaucaagcagugaaaaaugcuagugaaugaucacauuuuaaugcugcuuaauuuuuaggcu

SEQ ID NO: 4133442 - RNA, 57 nt, Human
agccucacaauucagaaaccaaguagcucccaguugaccuugcuuggguugugagcu

SEQ ID NO: 4133443 - RNA, 57 nt, Human
agccucacacguuccaacuuggcugccuucagcggcauccaggagcaguggugagcu

SEQ ID NO: 4133444 - RNA, 89 nt, Human
agccucagccuaaagcccuccuggggccacgcugguucccuucccugauggcuggacccgggucgucucaggggcuucccagcugggcu

SEQ ID NO: 4133445 - RNA, 61 nt, Human
agccucaguggggcgacagggugcucggcggacuccaccucaggcccuccccacuguugcu

SEQ ID NO: 4133446 - RNA, 57 nt, Human
agccucaguuucaggccuccuccuuuuaaaguggagaagagcugcacacuggggacu

SEQ ID NO: 4133447 - RNA, 62 nt, Human
agccuccaucucccaucugugaggcaugauaacacuaguuucaacagguugugguggggguu

SEQ ID NO: 4133448 - RNA, 71 nt, Human
agccucggccuggccugaacuaggaggugaaaugcagauagcacccaccaccaggcaggacaccgaagguu

SEQ ID NO: 4133449 - RNA, 66 nt, Human
agccucugacugucagcaagguaagcauucugcauauacuuccacuugccuugcuuaacagaggcu

SEQ ID NO: 4133450 - RNA, 88 nt, Human
agccugaacaucaugguguuaaccagcuaaacuuugcuugaacccucaguccauugcagaggagcaagcuggacaccacuguggggcu

SEQ ID NO: 4133451 - RNA, 69 nt, Human
agccugacucacuucagaaccacucagcagccccugaucagcucugcagauuggccugauguucaggcu

SEQ ID NO: 4133452 - RNA, 71 nt, Human
agccugagcacauccaggacaugggacauuucuaccugcccguccuguugcuaccuggaguguguuaggcu

SEQ ID NO: 4133453 - RNA, 75 nt, Human
agccugcagcaguuucugucuguucuuauccaguacugccaccuauugggcaagcucuucagaagcucugagguu

SEQ ID NO: 4133454 - RNA, 77 nt, Human
agccugccaauugugucauuauauuuuuccguaaguaauucaaguuuguggaagaaacaagacacuuuugguauguu

SEQ ID NO: 4133455 - RNA, 73 nt, Human
agccugccuuggauugcagggaaccuucuaacccucaguuagcaggucccuacuuaucugaaggcaucaugcu

SEQ ID NO: 4133456 - RNA, 81 nt, Human
agccugcguuuugggugugccuagggccagggcucagaccauuaucucccugcagccuugcaugccuucccuugccuggcu

SEQ ID NO: 4133457 - RNA, 77 nt, Human
agccuggccaacauggugaaaccccgucucuacaaaaaauuaguggggcaugguggcacgcaccuguaauccaagcu

SEQ ID NO: 4133458 - RNA, 86 nt, Human
agccugggaaacauggcaaaaccccguuucuaguaaaaauacaaaauauuagccggguguugugucaugcaccuguagucccagcu

SEQ ID NO: 4133459 - RNA, 63 nt, Human
agccuguauugcuauauaguaggacuugggaagcaaguccaucagauaagcaagacagcagcu

SEQ ID NO: 4133460 - RNA, 65 nt, Human
agccugugcucuccuggcugcccugaccaccauggguuaggguccacagaaaagggcugaggacu

SEQ ID NO: 4133461 - RNA, 82 nt, Human
agccuguuguccuguuuguuuucacuguuauuaugauuuuuaccacaaggugucaguacaggaaccaggcaggucgauugcu

SEQ ID NO: 4133462 - RNA, 68 nt, Human
agccuuaaaaaugugcauaucgccaggcgugguggcucacgccuguaaucccagcacuuugugaggcu

SEQ ID NO: 4133463 - RNA, 80 nt, Human
agccuuccauaacauacuuguacuaugcauauuuaaucaucuuauaauacgcuuaguagaggaaugugccuuggaaaucu

SEQ ID NO: 4133464 - RNA, 59 nt, Human
agccuuccucuuagaccugagaagugaugaaauuuggagucaugcaggagaggaagguu

SEQ ID NO: 4133465 - RNA, 58 nt, Human
agccuucuuagggucauuccucucuggggaguggggagagugggacaugggagugguu

SEQ ID NO: 4133466 - RNA, 69 nt, Human
agccuucuugagaaucuggugaacuguccaaacauaaagacuacaucacuuaauucuuagaaugaugcu

SEQ ID NO: 4133467 - RNA, 65 nt, Human
agccuugagaagccuccuugcagugauaaggguuauccuggaggacagaggcaucucagcaggcu

SEQ ID NO: 4133468 - RNA, 70 nt, Human
agccuuggaaggcagccagauggcagccugcaguaggaccuggcaggcucuucuuucugcccagccggcu

SEQ ID NO: 4133469 - RNA, 66 nt, Human
agccuuugcaaaguguaccuagagcauuuacuaauauaggccaaaugcuagaacauuuuaaagguu

SEQ ID NO: 4133470 - RNA, 93 nt, Human
agccuuuucugaaguucucagcuuucucuucuaucgauauuucccaugucaguuaaaguguuuguagagacagcugaugcguuuauugagguu

SEQ ID NO: 4133471 - RNA, 63 nt, Human
agccuuuuuaaugugacaucuuuuagaggaauucugcuggaauaauuucauguuaacgaggcu

SEQ ID NO: 4133472 - RNA, 59 nt, Human
agcgacuccggaaggccuuggagcuccauguauguugccuggcucuucgggaguuuguu

SEQ ID NO: 4133473 - RNA, 63 nt, Human
agcgagggggcuagcgcagugcccagcucgcugggugaccucgggcacggcucguccccuccu

SEQ ID NO: 4133474 - RNA, 60 nt, Human
agcgagguguggcaguucuagaccugcgcacuuuggcaggaugcuggcugcacuucugcu

SEQ ID NO: 4133475 - RNA, 56 nt, Human
agcgauucacacacugggcugugauuucaugcccacugcucagucuccugauugcu

SEQ ID NO: 4133476 - RNA, 61 nt, Human
agcgcaggacuccugggccuaagaacugcaucugaagcagccaggccugggguuuugcacu

SEQ ID NO: 4133477 - RNA, 98 nt, Human
agcgcucugaguccuaucagugaggguggacuuaggugcguuuccaggcauucuucacuggaguccgcuccaaguucucuccaccggaaggaugugcu

SEQ ID NO: 4133478 - RNA, 62 nt, Human
agcgcuuuaacuccuucuaguucuguuuuuccuuugaugguauuagaagguauuuagggccu

SEQ ID NO: 4133479 - RNA, 68 nt, Human
agcggcacugacugcaagcuugcaguuucguaaggcuacuugcaagguugcaguuagaacuggcuguu

SEQ ID NO: 4133480 - RNA, 58 nt, Human
agcggcccugaauacugguuggaagcccaaggcuuuguuaccaggccucagaggcccu

SEQ ID NO: 4133481 - RNA, 70 nt, Human
agcgggaaggagaauggggcugcagccagaacagcugcaugcauguuccaacuccaucacucccuuagcu

SEQ ID NO: 4133482 - RNA, 61 nt, Human
agcgggcacuggagacuguuaugagagcuucaagguuccucaccauuccucugugccugcu

SEQ ID NO: 4133483 - RNA, 112 nt, Human
agcgguaucucauuaugauuuuaacaugcauuucccuaaugucuaacgcuauugaguaucuuuuuaugugcuuauuggccauuugcauguauuauuuugugaagugucuguu

SEQ ID NO: 4133484 - RNA, 80 nt, Human
agcgucagacgugaggacacggccuuuuggaaaaugugucuugcguuuuuagcauuagacuguuauccugauugaauguu

SEQ ID NO: 4133485 - RNA, 69 nt, Human
agcgucuaggccgugcccugaggucuggcugugacucaguuuccgcaccagaggccuggccuaggcccu

SEQ ID NO: 4133486 - RNA, 66 nt, Human
agcgugagccacugcgcccgacugaagauguucuaaagcacuuuguagguuucagugaaacauguu

SEQ ID NO: 4133487 - RNA, 68 nt, Human
agcguggccugcagcucccaggaucccugcagggacagggagaggagcuauugggggcucaggaaccu

SEQ ID NO: 4133488 - RNA, 66 nt, Human
agcguggcuggggcgacuccacggugcgccuucccgagggaccuguggcugucucuuucccaugcu

SEQ ID NO: 4133489 - RNA, 65 nt, Human
agcgugugcgcaccuugcgccgggcgcugcagggagucuccagcuccuggaggugcgcacucgcu

SEQ ID NO: 4133490 - RNA, 67 nt, Human
agcguuacuuguuaggcugagaauuuugaagauuauuuuucaaguucuuugccagacacguguggcu

SEQ ID NO: 4133491 - RNA, 66 nt, Human
agcuaagcucuuuucauucuuuucuuuuaagucaaauuaaugugaaaccugugaguagaguaagcu

SEQ ID NO: 4133492 - RNA, 73 nt, Human
agcuacaaagacaaauuuguguaguuauggcaaacagaaacuguaugcucuggaaauaaaugauuuaguagcu

SEQ ID NO: 4133493 - RNA, 93 nt, Human
agcuacagaauguaaucugcaaauauuagcauucgauaucagcacuguaauaugcuugauuugaguaaugguauaugcauacugcuuucagcu

SEQ ID NO: 4133494 - RNA, 67 nt, Human
agcuacagagauagucuuguaggugagaaguucagcuacuuuucacuugacuccaguuucuucugcu

SEQ ID NO: 4133495 - RNA, 78 nt, Human
agcuacauaguaauggaucuaauacuaacguuaagugcugacuuugguuacuuuacaguauuagauaauuacggagcu

SEQ ID NO: 4133496 - RNA, 61 nt, Human
agcuacauuguacuuacaaauagugguuauauaccauuacaccuuugaaaguaugugaguu

SEQ ID NO: 4133497 - RNA, 57 nt, Human
agcuacuucuagguuaaauuagauugucguggaccagucuagcuuaggagccuagcu

SEQ ID NO: 4133498 - RNA, 69 nt, Human
agcuagaaaggcauggaggcaaacuuggucuuaaauucagcacauucauuuugcuucaugucuuuugcu

SEQ ID NO: 4133499 - RNA, 70 nt, Human
agcuaguaaggaauaaauuaugauuuugaauaacaauaucaagaauguucauucuucuaaugugcuagcu

SEQ ID NO: 4133500 - RNA, 61 nt, Human
agcuagugugugaucuaauaugaccccuucuccuugaggucauuuacaugacagauugguu

SEQ ID NO: 4133501 - RNA, 58 nt, Human
agcuaucaguaggaccauguucucucuccaaccuucagaauagagucugccuggugcu

SEQ ID NO: 4133502 - RNA, 63 nt, Human
agcuaugcaaacaaggaacuaagaucuccaacauguuuucaaucuuggccuuguuucauaucu

SEQ ID NO: 4133503 - RNA, 55 nt, Human
agcuaugcaggauaucccuaggaggacagaaccuucuggaccaccuuguaaagcu

SEQ ID NO: 4133504 - RNA, 75 nt, Human
agcuauggucagggauuauagaugccuuguuauuccaccaauaagcaccagucucugaaauccuuuaucuuggcu

SEQ ID NO: 4133505 - RNA, 117 nt, Human
agcuaugucgggacuugcagaaaaugcacauuucccagccccaccaggucguucagguccaggcugggcucagggacacauguguguuucuuuuccacuccaggccggcagguggcu

SEQ ID NO: 4133506 - RNA, 75 nt, Human
agcuauucucauguuaccaaauucuaucugcgcauauguuuuuguauaacauuucggugacagugggagucgguu

SEQ ID NO: 4133507 - RNA, 60 nt, Human
agcacagaugcaugaucaccagacacuuguucaucggcuggugaaagcagcuuccuggcu

SEQ ID NO: 4133508 - RNA, 81 nt, Human
agcacagcugcauccaugacccucucaacaacccucuggagagcgggugcucuagggguuggagguacagggucagcgucu

SEQ ID NO: 4133509 - RNA, 65 nt, Human
agcacaguguucuugauauuacaguuaucaaacuguccauaauauuggugaacuuuugaacugcu

SEQ ID NO: 4133510 - RNA, 68 nt, Human
agcacaugcuccauacagaaugggucaugcagcuuucaaagagcagcccuuccucaaggagcuguguu

SEQ ID NO: 4133511 - RNA, 57 nt, Human
agcacauuuuauuuaagaaaaugugaugaguuaaugucacuuuuuuugaaaugugcu

SEQ ID NO: 4133512 - RNA, 69 nt, Human
agcacauuuucucaaagcucauucaugcggcuguuugccacgugccuacugcguguuggacaaugugcu

SEQ ID NO: 4133513 - RNA, 57 nt, Human
agcaccaaucuggaccccugcccaggggucuccaggggccuaggggcagauggugcu

SEQ ID NO: 4133514 - RNA, 70 nt, Human
agcaccaggcaccaaagggccuccgucaaagcuuacgacccagaggccugaccguggugacucugcugcu

SEQ ID NO: 4133515 - RNA, 55 nt, Human
agcacccucagccuuauccagauugucugacucuggagaaaggcuaaagggugcu

SEQ ID NO: 4133516 - RNA, 59 nt, Human
agcaccugccugcauuggcuauggguccacaccaagcaucagcugauaaggcuggggcu

SEQ ID NO: 4133517 - RNA, 66 nt, Human
agcacgaugcugguauacagugguguuaaccauaugggggcugcuguuauauggguguuaugugcu

SEQ ID NO: 4133518 - RNA, 64 nt, Human
agcacgcaccugcuucgcgucgcccccggccccuccggaaaucagagcuggggcgguguguguu

SEQ ID NO: 4133519 - RNA, 101 nt, Human
agcacggcuuggcauuggaaguuuuauuugaaucaggggagaauauuauuugagauauuuuccuaaaugacaaaugaaugauuuaccugcagcaauguguu

SEQ ID NO: 4133520 - RNA, 58 nt, Human
agcacuagacauguaagugagccucuaggugauccuagcccuuagauguuuaguugcu

SEQ ID NO: 4133521 - RNA, 85 nt, Human
agcacuagcucagaggacaugauauuucaggaagacugaaaacacagacuaaagaaaaauuauguugcauuucugaaagugugcu

SEQ ID NO: 4133522 - RNA, 56 nt, Human
agcacugccgucuuuuuucuucugaaggugccuccuucagaaguugagggcagguu

SEQ ID NO: 4133523 - RNA, 57 nt, Human
agcacuguucuccuuuggcuauauccaauaggaagccacagggaaggagaacaagcu

SEQ ID NO: 4133524 - RNA, 56 nt, Human
agcacuuaacugacaguacuauuuaucuugucacuuaguuaaauucaguaagugcu

SEQ ID NO: 4133525 - RNA, 83 nt, Human
agcacuuacaguguguuggaggagacugucauuaaaccagucauuuuguaaacagucuuucuacauucugugcaguaaguguu

SEQ ID NO: 4133526 - RNA, 78 nt, Human
agcacuuggccagcuggagcucgcagauaggccuucccuaauacccacuuugccuguccguuuuccaccuggauugcu

SEQ ID NO: 4133527 - RNA, 55 nt, Human
agcacuuuccuggcaaauguggucucggccaucaagcugccaaugguaagcugcu

SEQ ID NO: 4133528 - RNA, 80 nt, Human
agcagaaaagaugaaagugaagcuaggacagguagagaugggauuaccuuucuuuccuccuagcaucuuuuuuaaggguu

SEQ ID NO: 4133529 - RNA, 100 nt, Human
agcagaaaaguugacuuagaggcuauggcauugaguaaagucaguaaauauauggcauaauugcugucuuuucccaauccuggaucuaaagcagacugcu

SEQ ID NO: 4133530 - RNA, 66 nt, Human
agcagaaaauuggaaaugacaaggcugaaauccaaagaaaagugucuuucguuucuauacuuuguu

SEQ ID NO: 4133531 - RNA, 61 nt, Human
agcagacagggcuacagagguacuuuuucucccugaaaguacuguaauuucccucuuuguu

SEQ ID NO: 4133532 - RNA, 69 nt, Human
agcagacauugaagcaacucccuccucauuuuucccgucuguuccugggaaaagagugcuucaacugcu

SEQ ID NO: 4133533 - RNA, 88 nt, Human
agcagaccccuuuucuuagccaaagguaaacuccuguuauaaaggaucuuuacaacagcgauuuaccugucacugcagguggucuguu

SEQ ID NO: 4133534 - RNA, 55 nt, Human
agcagagacaugaaauaugcuuguguaguugagcuuggucucuugugucucugcu

SEQ ID NO: 4133535 - RNA, 73 nt, Human
agcagagcagggauuuugccauagcuaucugauuuuccuucuuacagaaucuguguauuccuugcucaugucu

SEQ ID NO: 4133536 - RNA, 62 nt, Human
agcagagccugggcuaggggugcaguaggguugucaacagacuugggaguuuaggcucugcu

SEQ ID NO: 4133537 - RNA, 67 nt, Human
agcagagucuucagcagccuucucaggaagcgggaucccugcccuccccgguagcugaggaccugcu

SEQ ID NO: 4133538 - RNA, 80 nt, Human
agcagaguguggaaaucauauguagucauuuuauaaagcacaaguauugacaaagggucauaugaguuucagauguugcu

SEQ ID NO: 4133539 - RNA, 66 nt, Human
agcagauaauggaagagacuccaaaucaugcaggccuaaacaugaguaucucuccaucuauuuguu

SEQ ID NO: 4133540 - RNA, 89 nt, Human
agcagauuaccuaagauuuccauguuaguacacaggguuucuaucagaaagaguugaaaacuaacaguggcacucucaggcaauuagcu

SEQ ID NO: 4133541 - RNA, 62 nt, Human
agcagcaauuuucacugucaauuuuugcuagucuaauggcuaugacaugauauauuguuguu

SEQ ID NO: 4133542 - RNA, 75 nt, Human
agcagcagaaaccuacuucauuccuuuguaaaaugccuacacguaauagguaccauaaaauggaguaugcuagcu

SEQ ID NO: 4133543 - RNA, 60 nt, Human
agcagcagaaaguugauggcaguagaaccauuuuagaaaugucacauugucccugcugcu

SEQ ID NO: 4133544 - RNA, 74 nt, Human
agcagcagauaaugggacugucucugcaugcuaugucauuacagcuuugcacugagacagcucaguccacuucu

SEQ ID NO: 4133545 - RNA, 57 nt, Human
agcagcaucucuuauugcagugguuuucaaacuauacacucaacuggagagccuguu

SEQ ID NO: 4133546 - RNA, 76 nt, Human
agcagcaucugguucugauguguuuaccgggcugguauggaaaugcccaggcugcauggcagaaaccugagcugcu

SEQ ID NO: 4133547 - RNA, 63 nt, Human
agcagccacaggaaacauugcccccgcacauguccucauuugcaugcuuucuugugugcugcu

SEQ ID NO: 4133548 - RNA, 77 nt, Human
agcugaggccaaagcccaggagacagccaugugugcgagcugcggaaacuggaggucuccugguauugaccccagcu

SEQ ID NO: 4133549 - RNA, 69 nt, Human
agcugagggggugucauuaauugugaugaaauaauuuaaaccaucaggaauaaaugaggcuguuaagcu

SEQ ID NO: 4133550 - RNA, 96 nt, Human
agcugaucuguagaaacuguauguaguuuuugggaaauauuccagauuuucccauaaguucuccacucauccagucaucaucuacagauuccagcu

SEQ ID NO: 4133551 - RNA, 63 nt, Human
agcugauguauauggaguguuuacucugucaggugcuauucagacacuucauuugcagcagcu

SEQ ID NO: 4133552 - RNA, 82 nt, Human
agcugauucugaugugcagccaggguugagaaccacugccuuaauaucaaaucucaacuccuuaaugcauuucagaggugcu

SEQ ID NO: 4133553 - RNA, 68 nt, Human
agcugcaggacucaaaucugaaggcaggauagucugccucugaagugauucugagucucucuggagcu

SEQ ID NO: 4133554 - RNA, 56 nt, Human
agcugcagguggacccguaccggcugaagaaugggcggggcaucauccugcuggcu

SEQ ID NO: 4133555 - RNA, 70 nt, Human
agcugcaugucuuuugggcaguuaugguuuuugaucccguagaguacacgcucaaagggcuugccaugcu

SEQ ID NO: 4133556 - RNA, 91 nt, Human
agcugccaaugccugauucgccccucagcgacccaccagccacuuaugggaaguuggcaggaaguuggagguggugggagggaguggcacu

SEQ ID NO: 4133557 - RNA, 69 nt, Human
agcugccacaugcccaagggcaccccuaaacaccacuccccggcguccacccagcacacugugguagcu

SEQ ID NO: 4133558 - RNA, 90 nt, Human
agcugccacuuccaggccaggguauucuggacagaugggagaagaaagccaaaacucugcacagagacccuugccagaaacuggguagcu

SEQ ID NO: 4133559 - RNA, 59 nt, Human
agcugcccaaggucacagagcuagcaaaguacagagcuagauucacacccaggccagcu

SEQ ID NO: 4133560 - RNA, 55 nt, Human
agcugccucagucacucauggccaaagugauauggcccaaugaaccugggcagcu

SEQ ID NO: 4133561 - RNA, 94 nt, Human
agcugccuggagauagcagaagcaggccucugggcagcacacgagccagcaccaggaggcccuucucaucccugcuccucuccacacaguagcu

SEQ ID NO: 4133562 - RNA, 80 nt, Human
agcugcuaauuaagaccaagccacuuguguuuuucaaaaaucugaaaaccacaaaaguggcuugguuuuaaguaguggcu

SEQ ID NO: 4133563 - RNA, 129 nt, Human
agcugcuauaaacauuuguguuuagguuuuuguguggauauaguuucaacucaauuggguaaauacuuaggagugcauaaaacuauauuuggcuuguaaaaaacugucaaauucucuuuuauuguggcu

SEQ ID NO: 4133564 - RNA, 93 nt, Human
agcugcucuguucauuucccuggcccuggcacgcucugcuuagggauacaguggcagggaggcuggggcuguggaauucacgagggcuuagcu

SEQ ID NO: 4133565 - RNA, 55 nt, Human
agcugcucuugggugacuucaaacuaugaaauuugcauguagcccaugaguaacu

SEQ ID NO: 4133566 - RNA, 65 nt, Human
agcugcugagagucugccgggcaaugcacaauugcuuugcuucaccaaagcagauauucauggcu

SEQ ID NO: 4133567 - RNA, 55 nt, Human
agcugcugccgguggccacccuggagccagguaucgccagaggccggcaggggcu

SEQ ID NO: 4133568 - RNA, 76 nt, Human
agcugcuuaggcauucacucagcgaugccaguaugucuuacuauacaaaacagugcugaguuaauuucacacagcu

SEQ ID NO: 4133569 - RNA, 60 nt, Human
agcugcuuccucuuugaugucauuacuuaacauucauaugaaucuugaggaccaguagcu

SEQ ID NO: 4133570 - RNA, 71 nt, Human
agcuggaaguccaaggucaagguaucagcaggcuugguuuccucugaggccucucuccuuggcuugcaguu

SEQ ID NO: 4133571 - RNA, 61 nt, Human
agcuggaauaaaggggugaagagaguagucccuucucugggagggagccccuuuccaaguu

SEQ ID NO: 4133572 - RNA, 91 nt, Human
agcuggauaccagauucugggggaauacagcuaugagaaauguaagaauucucaaaugcuugucacuuccccauguugguuuuguuuagcu

SEQ ID NO: 4133573 - RNA, 56 nt, Human
agcuggcuaugcccugugaacccaugguucagucccuucuccaggucagcacggcu

SEQ ID NO: 4133574 - RNA, 91 nt, Human
agcugggaggcagaagugacuuggaacagcugaaguccuaaaaaagagccuuaggucugauuuccauucagucguguuggccucccuugcu

SEQ ID NO: 4133575 - RNA, 71 nt, Human
agcugggcauuggauggacuggaacucagaaugcuggguuuucucaggaugguguguacaaugcacuggcu

SEQ ID NO: 4133576 - RNA, 62 nt, Human
agcugggucuagggagcaggaggacagggacgagcugguccuugagccucccagacucaguu

SEQ ID NO: 4133577 - RNA, 58 nt, Human
agcuggugaggguugagggguagcaagcgggggucucuaggccucauccucuccagcu

SEQ ID NO: 4133578 - RNA, 55 nt, Human
agcuggugcugaagcucuugagaccuuugaaccacuuaagggcagcacucuggcu

SEQ ID NO: 4133579 - RNA, 56 nt, Human
agcugguguccuccuggagcugggcucaaccggccaccuucugcugggacacagcu

SEQ ID NO: 4133580 - RNA, 59 nt, Human
agcugguuuauuucuauauccuugccaaaacuggcagugcauauaggcugaaccaugcu

SEQ ID NO: 4133581 - RNA, 67 nt, Human
agcugugacugaguagcgcuaaaaacuaugcugaccaccagcaugcuacagcaucucucaucaggcu

SEQ ID NO: 4133582 - RNA, 63 nt, Human
agcugugccauuccaagaucaggguuucuuuaagcauucccccggccuuggaauagcacagcu

SEQ ID NO: 4133583 - RNA, 62 nt, Human
agcugugguucugggcagcgacuccggggagaugcuuaaccgcccaggaacccccgauggcu

SEQ ID NO: 4133584 - RNA, 93 nt, Human
agcugugguugaggagucugaacugguccccuggcucccuccugccucaccccagacaggcuagccagacucaccacccucucagccacagcu

SEQ ID NO: 4133585 - RNA, 63 nt, Human
agauagcccuccaauaagcuuggagucuuguguucuaaacgagcuaaggacuggaggguuucu

SEQ ID NO: 4133586 - RNA, 81 nt, Human
agauagcuuucucagacuuuuaaagacugaaugagggaccgcuucuacauauuuccaugaaguuuggagacacaccugucu

SEQ ID NO: 4133587 - RNA, 73 nt, Human
agauaggaaagggcagagcugggagccaaguguuaaguauuuuaguccccagagucucugcucuugccucacu

SEQ ID NO: 4133588 - RNA, 90 nt, Human
agauaggaugggugcaccaaccagaccugggaggggguaaaaggggagccuuugagccaggugugguggcauacaccuguaguuccaucu

SEQ ID NO: 4133589 - RNA, 77 nt, Human
agauagggagucaggagaccugguaagccaagugugugacauuggcugagcuaacaggucucucaauuucuucaucu

SEQ ID NO: 4133590 - RNA, 68 nt, Human
agauauaaaugugcuugguaaacguauucuuucagguugaaacuagaugauuaugaagcauaguaucu

SEQ ID NO: 4133591 - RNA, 60 nt, Human
agauauaucaguugguggcaucugcaacgucaggcagcagagaagccaagugacauguuu

SEQ ID NO: 4133592 - RNA, 90 nt, Human
agauaucauuuuuugaacagggagcauuuuguugcauagguguuuuggcaauugugaaacacugcgauaaaauccuuuuucauugguacu

SEQ ID NO: 4133593 - RNA, 67 nt, Human
agauaugaagauuucccagagacaugcacagcuaaucugaagcacagcugggacaguuuucaccucu

SEQ ID NO: 4133594 - RNA, 129 nt, Human
agauauuuuuuuuguuucggaugucugcccuaugcaguguacgauguuuaguagcaucucuggccuccacucacuaaaugucaguagcacaugcaccacccagucacuugugacaagaaaaaaauaucu

SEQ ID NO: 4133595 - RNA, 88 nt, Human
agaucaauaaauacaggaaaaacauagaagaugguuaauuguaggauuuauguaugccucuuaaucugugguuuuguauuaaagauuu

SEQ ID NO: 4133596 - RNA, 62 nt, Human
agaucacagaaacauguguugggagcugccugucagcaaaugcugcuagaaauucugugacu

SEQ ID NO: 4133597 - RNA, 75 nt, Human
agaucagucccaagaucugccauuguaugagcaaagcuucuucugcuucugaguugcaggacuugggaauggucu

SEQ ID NO: 4133598 - RNA, 77 nt, Human
agaucaguuuaaggaguguugccaucuuaacaaugaaucuucugauucaugaacauggaauaucuuuuuauuuaucu

SEQ ID NO: 4133599 - RNA, 55 nt, Human
agaucauugcaaugggugaaauuaaguuaaauguauuucacuaauuguaagauuu

SEQ ID NO: 4133600 - RNA, 90 nt, Human
agauccaguuuucucagugauuauugauugcauucagaacagcuucuguuucccuaugaacagaucaauagaacugacaagccucaguuu

SEQ ID NO: 4133601 - RNA, 59 nt, Human
agauccuaggcagcagggcuauauuuuguaacagauuuccuggcuccugccugccuucu

SEQ ID NO: 4133602 - RNA, 76 nt, Human
agauccugggaaggguguugucuuaucuucuuuauuuguacuaaacaaagguuggaagacacuuuucuaaaaaucu

SEQ ID NO: 4133603 - RNA, 76 nt, Human
agaucggccgggggccgccagaagccaggaggaggcaaggaaggauguuccccagguccugucggcuccuugauuu

SEQ ID NO: 4133604 - RNA, 72 nt, Human
agaucucaauagguucuccacagguucuccauagguuguccauagaaccuccacaggaccuccauaggaucu

SEQ ID NO: 4133605 - RNA, 102 nt, Human
agaucugucugaauaugcagcccauuugcuuuccuguuaacccaagaaccaagagucucauguguacaguaaauguaaauggauuauauuuuggcaguggcu

SEQ ID NO: 4133606 - RNA, 101 nt, Human
agaucuucagguauagcuggauccaggggcaagaaugcugucagcaggcuucugcucugguguucucugccuuaacuccauuuucaagcagcuuggagucu

SEQ ID NO: 4133607 - RNA, 60 nt, Human
agaucuuguuaaaugcugccucugguugagcaaaauagguuggcauuucuaacaaggucu

SEQ ID NO: 4133608 - RNA, 120 nt, Human
agagagaugaggcaaguguggaagggaagccccagaaggggaaagccugguuaaggggcccuucaccccccucuccaaggcacauuccccuuucugucccuuugucguuucauucacucu

SEQ ID NO: 4133609 - RNA, 82 nt, Human
agagagcaagcaagagagauagcuuauugacuguaaguauccaauuacucaaauguuauucauucuuguuuaaauguuaacu

SEQ ID NO: 4133610 - RNA, 70 nt, Human
agagagcagucuuuauuuagaguuaggacugaaacuuuuuaggccuaccuaguuuaaggaagugcucccu

SEQ ID NO: 4133611 - RNA, 64 nt, Human
agagagcuguauccccuuaccaguucugugacguggcugggcugguuucauauacauucuuucu

SEQ ID NO: 4133612 - RNA, 85 nt, Human
agagagcuuaaagaguauuuaauauaaugcaggcaaauuuuuuaaaagcccuuauuauuuagaagaaaucuuuuuaaugcucuuu

SEQ ID NO: 4133613 - RNA, 60 nt, Human
agagagcuuccauucuagugauuggcccugagucacuaaccaaugauggugaguucaucu

SEQ ID NO: 4133614 - RNA, 105 nt, Human
agagagggacaugucuugcccgggguuacacagcaagucaagacucagcccaaaccagagucacagaaugauggcuccaggcuagaagacauuucuugacuuucu

SEQ ID NO: 4133615 - RNA, 62 nt, Human
agagaggucaucucccaucagcaaccuuuacaaagaugcugaucugguagaugaaacucuuu

SEQ ID NO: 4133616 - RNA, 64 nt, Human
agagagguuaaggagcucuugucuaagcuucccagauaggacaaauuugaauccugacuucuuu

SEQ ID NO: 4133617 - RNA, 71 nt, Human
agagagguuugcuggaagauucugagaauaaagcuuccuuuauuaugaaaaaucuuucagacaauuucucu

SEQ ID NO: 4133618 - RNA, 93 nt, Human
agagaguggccuggagaagcaggaaggugucuggcccagagucucaugcauugcaggaccagcuagcaccuuggcuuucacagguuucuuuuu

SEQ ID NO: 4133619 - RNA, 90 nt, Human
agagauaaccuuauguucaguagaagcagagguuguaucacauauguacuucaacuggcacaugcuucuguuucaagaacuaauuguccu

SEQ ID NO: 4133620 - RNA, 57 nt, Human
agagaucccaggaggccuuccagugaaacucuaucaucaugcaaucuugggauuucu

SEQ ID NO: 4133621 - RNA, 68 nt, Human
agagaucuagcaccugcugguccucuaugugggcgggaacugugagguccagccugguguaugucucu

SEQ ID NO: 4133622 - RNA, 55 nt, Human
agagaugccaccuuuuugcuguguccucacaugguggaaggggcaaggcagcucu

SEQ ID NO: 4133623 - RNA, 55 nt, Human
agagauggcgucucagagccugcucugcucuguaggggcuguggaaaccaacucu

SEQ ID NO: 4133624 - RNA, 104 nt, Human
agagaugugggaccacauucaaguauauuuaacaucguaucaagcaguuaaucuuuugaaaaucuaugguguuaaaugguauuuagcauaauccuacaaacucu

SEQ ID NO: 4133625 - RNA, 80 nt, Human
agagaugugucugagcuucuuuauuuggccagaaaauauuuuuucucuucuaggcuuuggaguugcagaaaaacaucccu

SEQ ID NO: 4133626 - RNA, 77 nt, Human
agagauguuccagccaaugggaaugggagguugagguguauaacaugggaacauuugcuauuaggcugagcaucucu

SEQ ID NO: 4133627 - RNA, 98 nt, Human
agagauguuucaagagggaacuagguacugaaaaaggggaaagguaucacuuucaaucauuuuuacauagucccaaaaccuugaaacuagguaucucu

SEQ ID NO: 4133628 - RNA, 77 nt, Human
agagauguuucuagagcuuugucccauguuaaaacacaaaauuauuugcucugggagaauauauuuaaaacuucucu

SEQ ID NO: 4133629 - RNA, 78 nt, Human
agagauuacauugggauaguuucuuuugaccaaagguccuggcuccuuucagaaguaagguucucccaagcucucucu

SEQ ID NO: 4133630 - RNA, 60 nt, Human
agagauucuguagucaggcaucuaagcauggcuuagcugaggcugcuggcucaggguccu

SEQ ID NO: 4133631 - RNA, 64 nt, Human
agagauuucuacugcacucuuugguuaccuguucugggacaaauauaguccauuagaagucuuu

SEQ ID NO: 4133632 - RNA, 75 nt, Human
agagcaacaucugucccagcagcuggguucucugcaugagugggcagagcgacacauugggacaaauucuguucu

SEQ ID NO: 4133633 - RNA, 85 nt, Human
agagcaauauuuuuggugcaggagcugacucaucagauuagcagccucucaagauugaugauguuucugccuugccuauuccucu

SEQ ID NO: 4133634 - RNA, 63 nt, Human
agagcaauggcauccagcugauuuuauuuauaauuaaugucuuuggagaggugccauuucuuu

SEQ ID NO: 4133635 - RNA, 87 nt, Human
agagcacugcuggguaguuacaaccaugacacaagcagguuaaaucaugugucucccugugggguggaugugucccaguacuucucu

SEQ ID NO: 4133636 - RNA, 96 nt, Human
agagcagacggcccagaaaagcugcuguuuguccgguugcacuuucugccaaauuaugcaaauggaucugacuggcuuuucuucugauuuuguuuu

SEQ ID NO: 4133637 - RNA, 55 nt, Human
agagcagaggaaggcaagauacuagccagcuagcaugguguuuuuucccuguucu

SEQ ID NO: 4133638 - RNA, 66 nt, Human
agagcaggcauaaagcuuugaagaccuacagaccuggcucuaauuccuagcucugcuauuugcucu

SEQ ID NO: 4133639 - RNA, 87 nt, Human
agagcaggccugggugccaggggaccuagggaugucuccucuuuugaaugggguauaacugcuaccaccugaugccuugccugcccu

SEQ ID NO: 4133640 - RNA, 110 nt, Human
agagcagggaaauaucugggaaaguaggcagaggccaaguuuugaagagccaugaguaucauggaaagaauuuaggcuugucugcuguguagaauaacuauucucaaucu

SEQ ID NO: 4133641 - RNA, 95 nt, Human
agagcauacacauccauguuguaauguuccucauugacacauaauuuuaauuauaaggaaggaacaauuaacgacaauggacuuugaacuguucu

SEQ ID NO: 4133642 - RNA, 70 nt, Human
agagcaugaauuguguaguugaaggauuugucuuaucaauuuaguacuaauuauacaauugucaaguucu

SEQ ID NO: 4133643 - RNA, 83 nt, Human
agagcaugcgguguccuggaagaagcuacaagcggugagugauagccucucuccagcugaggccuucuucccaucacaacucu

SEQ ID NO: 4133644 - RNA, 63 nt, Human
agagcauggucaggggccuugggugagaguccugcagcucuggcuggcucucugacgugcuuu

SEQ ID NO: 4133645 - RNA, 62 nt, Human
agagccaaccccgugaagaucugaaagaacuuccuaucagaggacgcacuaggguugucucu

SEQ ID NO: 4133646 - RNA, 105 nt, Human
agagccucuccugcaugcugcaccagagccucuccugcaugcugcaccagagccucuccugcaugcugcaccagagccucuccugcaugcugcaccagagccucu

SEQ ID NO: 4133647 - RNA, 59 nt, Human
agagccugagccugaaagcccucagaccuccugacacugaagcacagagcccaggcucu

SEQ ID NO: 4133648 - RNA, 67 nt, Human
agagccugucaauuguaaagaggagaaaagaaaagaaugggcucucucugggcacuguauggguucu

SEQ ID NO: 4133649 - RNA, 73 nt, Human
agagccugugccccguccccaucccagcuuggggggccccggccuccagcuggggacaugggcuucaggcucu

SEQ ID NO: 4133650 - RNA, 79 nt, Human
agagccuucucggcgcggagcauucccagggacccuuccaggccccgaccccugggacccgcugcagaggcagggcuuu

SEQ ID NO: 4133651 - RNA, 124 nt, Human
agagccuuuauuauacuuguuuguaucguacaaaaggauguuuucaugaaacauccuuucggauuaguguuucaugaaacauguuuagggauaugcugaauuaacauaaauaaaacaagguucu

SEQ ID NO: 4133652 - RNA, 69 nt, Human
agagcgaaacacuuugggaauggggcguuuucguaacgucauuuauuuagucuagaugaauuuugcucu

SEQ ID NO: 4133653 - RNA, 60 nt, Human
agagcggggauaguuaauauuccauuuuaugcuguguucuuuuagacuaaccccaacucu

SEQ ID NO: 4133654 - RNA, 56 nt, Human
agagcuaaucacaggagaugcuccagaaugccuaaaguaucauaaugaauaguucu

SEQ ID NO: 4133655 - RNA, 74 nt, Human
agagcuagaaguacagccauaugacguuacaacuaaguucucuguauuuucuguggugauuucuaauaugcuuu

SEQ ID NO: 4133656 - RNA, 61 nt, Human
agagcuaggaccagagugaacguuggucucuaaauuagcagcuuucuggucucuacacucu

SEQ ID NO: 4133657 - RNA, 62 nt, Human
agagcucagggcuccaggaccgcucagauccuccuuccagggccccaauagcccuuggcucu

SEQ ID NO: 4133658 - RNA, 60 nt, Human
aggcccuguuguagcauuuugguuucgcaguugcuuuggaaugcugccaggacagggccu

SEQ ID NO: 4133659 - RNA, 82 nt, Human
aggccuaaugagucauuuuaauccuguuacucugguaauuuucuauuauggguauaacacaguuauuuccuuaguggugccu

SEQ ID NO: 4133660 - RNA, 70 nt, Human
aggccucaccccucugcuucccgugucuguggcuucguguccagcagugagcacggccagaggggagccu

SEQ ID NO: 4133661 - RNA, 56 nt, Human
aggccucugcuggaaagaguugaaauacugccagcaacucaaaucacuagaggcuu

SEQ ID NO: 4133662 - RNA, 59 nt, Human
aggccugaaggaagaugagcugauggcauucccagcuuacuaccacuccuugggggccu

SEQ ID NO: 4133663 - RNA, 112 nt, Human
aggccugauguuauuggcaaaaguaaagcauggcauaguuugacuuugaggacuuuaaaagugcuucaaagggucacuauuuaucaacuuauuugcugacuuaucuuggcuu

SEQ ID NO: 4133664 - RNA, 56 nt, Human
aggccugccuugagcaaccagcuuggauaguccugcugugugcugggcauggcacu

SEQ ID NO: 4133665 - RNA, 89 nt, Human
aggccugugcaauccauauaggcagauggcacagaagagcccuacagugugccugguacugccuaagguguggcuuguaagccaggccu

SEQ ID NO: 4133666 - RNA, 73 nt, Human
aggccuuaaugacaucauaggugaagucauaguugacucuucucuuuccuuccugggaugucauuggcugccu

SEQ ID NO: 4133667 - RNA, 69 nt, Human
aggccuugagagaguuggaagggcuagcuacaaccaugguguucugcccaccacacuuuaucugacccu

SEQ ID NO: 4133668 - RNA, 64 nt, Human
aggccuuuguacaauaaucauaguauccuaaaacuuccccaauaguaugagcugacaaaggccu

SEQ ID NO: 4133669 - RNA, 66 nt, Human
aggccuuuuugcaguagacaucuuauuuuccacuuuuaagaccaagauuuuuguugcaauaggccu

SEQ ID NO: 4133670 - RNA, 90 nt, Human
aggcgggcggccccgcggugcauugcuguugcauugcacgugugugaggcgggugcagugccucggcagugcagcccggagccggccccu

SEQ ID NO: 4133671 - RNA, 108 nt, Human
aggcgggcggcgggugggcugcggcccuggggcuggggccgggccgcgugcaccuugcugaggcccaccuuggccccggcucccacugcagcucaggccgcuccuccu

SEQ ID NO: 4133672 - RNA, 74 nt, Human
aggcgggggacaggccugagacaucugagauaauaaagacaugauugucucagcccuggggcuugucuccccuu

SEQ ID NO: 4133673 - RNA, 59 nt, Human
aggcggguugugcuaauugcuugcuguuuuuccuacaagcagaaccugcagaccugucu

SEQ ID NO: 4133674 - RNA, 72 nt, Human
aggcgugguggcugagaaugggaugaugccagguucacaucugugcucuuccacgucgcagcuguacgaccu

SEQ ID NO: 4133675 - RNA, 64 nt, Human
aggcuaaugugcaggcucaaaccuuguaauuuaaaaaggacacggguauggcugcacauuguuu

SEQ ID NO: 4133676 - RNA, 79 nt, Human
aggcuagaaguucaagaucaagguguggcaggguugguuucuucugaggccucucuccuuggcuugcagucuucucccu

SEQ ID NO: 4133677 - RNA, 59 nt, Human
aggcuaggccuugagcuuaaaacucuucaccaacuguuuauacccuccauaccuggccu

SEQ ID NO: 4133678 - RNA, 57 nt, Human
aggcuagucaagucaagcagugggaguaaagaaacaccacugcacuugugccagccu

SEQ ID NO: 4133679 - RNA, 62 nt, Human
aggcuaucagauagaaugaagguagaguaaaacuuuuccuuaacuuuaauaucugagagucu

SEQ ID NO: 4133680 - RNA, 129 nt, Human
aggcuaugaucucucggaguaguggggaaagcaguccuucccuuaaggucaccucuuuuugaucuggucaccuuuuuccaaugagggaaguaaucagacugcauugcuaguguccuagagcaugaacuu

SEQ ID NO: 4133681 - RNA, 78 nt, Human
aggcuaugcuaagauaauguauggggaagcacuaugaaauuugacauuaaggugacauuaucauuauuuuaaaugccu

SEQ ID NO: 4133682 - RNA, 60 nt, Human
aggcuaugguggggccaguggcaugggaggcaucaucgccaucauggucaaccagagccu

SEQ ID NO: 4133683 - RNA, 91 nt, Human
aggcucagaaaauuuaaguagaaaguccagugaaauagaaugcaaguggugaaauugaauucguacacaggauugcagaucuucagagccu

SEQ ID NO: 4133684 - RNA, 81 nt, Human
aggcucagaaauggcagauggagagauguaccuucuugaacuuauuuuucuaacuuaccugcuguuauuuuguucuguccu

SEQ ID NO: 4133685 - RNA, 61 nt, Human
aggcucagaggccugaaagaauuuggcauuuuaggggaauggccagagguuugcugggccu

SEQ ID NO: 4133686 - RNA, 69 nt, Human
aggcucagucuguucaugcacugguguguauuaauucaguccauucauagucaugagcugacugugccu

SEQ ID NO: 4133687 - RNA, 58 nt, Human
aggcuccagcccaaggcugcaggacuggaagccacaguccagcaugggcgggaagccu

SEQ ID NO: 4133688 - RNA, 56 nt, Human
aggcuccugcaggugaggugcuccauguugagcagcccuagaauccugcacagucu

SEQ ID NO: 4133689 - RNA, 57 nt, Human
aggcucuuugagacuaccuggaguccuugucaccacagguacaggucuugugagucu

SEQ ID NO: 4133690 - RNA, 72 nt, Human
aggcugaacgguggcugagaggacgucgggcucagagacccuggcccaccagacccucggcauucccagccu

SEQ ID NO: 4133691 - RNA, 57 nt, Human
aggcugacuucuaguaaagaccuggaccuuccuauggucagcucuuagaggucgcuu

SEQ ID NO: 4133692 - RNA, 58 nt, Human
aggcugagaaagugggaagauggacaugucugagguuuucuugaacuuucuucagccu

SEQ ID NO: 4133693 - RNA, 75 nt, Human
aggcugaggauuuggcagugaagggaucacagauccaugaagguguggucuccccagugccagcucucugggccu

SEQ ID NO: 4133694 - RNA, 60 nt, Human
aggcugaggcuuuccuuggagaaagaagagauucuugcuuguggacaguagcuucagccu

SEQ ID NO: 4133695 - RNA, 68 nt, Human
aggcugccuuguggcagguggauggugccccucgagaugggcagggcaccaucuggccacacgugccu

SEQ ID NO: 4133696 - RNA, 64 nt, Human
aggcuggacccgacaccugcccacgagaagcagcauaccugggacuggagggacuuccuggccu

SEQ ID NO: 4133697 - RNA, 72 nt, Human
agauugagaaaucggaugguugccgugucuguguagaaagagguagacaugggagacuuuucauuuuguucu

SEQ ID NO: 4133698 - RNA, 72 nt, Human
agauugagaaaucggaugguugccgugucuguguggaaaguaguagacaugggagacuuuucauuuuguucu

SEQ ID NO: 4133699 - RNA, 76 nt, Human
agauugcaaaguugcuaauaaaguuuuuaugugguaacaaugccacuuguagaacuuguauuguaaccucaaaucu

SEQ ID NO: 4133700 - RNA, 63 nt, Human
agauugcuucauguccuuugccggcagucccuaagauucagcgaagucagaugugagguuucu

SEQ ID NO: 4133701 - RNA, 86 nt, Human
agauuguagagaguuuguguaacaugaugaugaugaugauguaaggauuuguaucucuuaugucacauaaaccauaaauacgguuu

SEQ ID NO: 4133702 - RNA, 130 nt, Human
agauugugccauuaauugagggagcauauauaaagaggaguacauuuaagagggaauauggugaauucagauuugaauauuccuuucggauaugcacaguuuuucccaaaauaaaaaaauggcccaaguu

SEQ ID NO: 4133703 - RNA, 83 nt, Human
agauuuauugcugcagagaugggugcccuuuuuguagcaugacuuuuauggaaagggcaguuuucuuugcauuaaguuugucu

SEQ ID NO: 4133704 - RNA, 59 nt, Human
agauuucccaaauacuuguuaucuacuuaaaguuuauagcaaaguuguuugggaaauuu

SEQ ID NO: 4133705 - RNA, 130 nt, Human
agauuucuugaagugcuaagggaauagcucaaaauguaagauggaagcucccaaucaggucuguguucccuggauuucuccagcucuccauuuaaauucuugauccuuaaaacaauacauuuuaaaaucu

SEQ ID NO: 4133706 - RNA, 68 nt, Human
agauuugagucucugcacaguaagaagcaguggugggagacuguuuucagaugcagggacacagaacu

SEQ ID NO: 4133707 - RNA, 62 nt, Human
agauuuguguuguuuuaagcuguuaaguuugcaguaacuuguuacagcagcaauagaaaacu

SEQ ID NO: 4133708 - RNA, 82 nt, Human
agauuuuaaauuacuucaguuacguuccuagggacacuauuaacucaggaugauguuaauugaaguuucagauuugauauuu

SEQ ID NO: 4133709 - RNA, 67 nt, Human
agauuuucauuuugcagggugagaucaugaguucugauucucaacuaauggugcaagaugagguucu

SEQ ID NO: 4133710 - RNA, 67 nt, Human
agauuuuggcuggcuggagagaaguauuccuguauuugguucucaacucagcucagcucaugagucu

SEQ ID NO: 4133711 - RNA, 76 nt, Human
agcaaacaagauuuggcauucugaggagucuaauuaucucuccaagaagacuuagcagaauuccaagcuugaaguu

SEQ ID NO: 4133712 - RNA, 77 nt, Human
agcaaaccuuugggaauagcagggacugagcuuuagaugauggcucugaacugcugguuuccaaccacuagggugcu

SEQ ID NO: 4133713 - RNA, 57 nt, Human
agcaaagacugggacugcagcaggcaaugccuuugcccucgcaaccuauucuuuccu

SEQ ID NO: 4133714 - RNA, 64 nt, Human
agcaaagggacauguucuggcaaugguacacacagccuacuucuagccaggacauccuccugcu

SEQ ID NO: 4133715 - RNA, 97 nt, Human
agcaaagguuggcgggcaccugugucagccccugccuccacuccaccccuaacaaguaucaggugcccacacgggccugcugcucgccuccugggcu

SEQ ID NO: 4133716 - RNA, 70 nt, Human
agcaaauguuuccguuaaacaaauguguauuuuauuugaaacagaugaaaucauaacaguuuggcuugcu

SEQ ID NO: 4133717 - RNA, 62 nt, Human
agcaaauucucacagaggcuugggcucaugaaacaaccaagaguaagaaccuugagauugcu

SEQ ID NO: 4133718 - RNA, 62 nt, Human
agcaaauuguugaucuacaguaagggcugagcagagcagauccuugagaacaucaauuugcu

SEQ ID NO: 4133719 - RNA, 82 nt, Human
agcaacacagcugcggggauccuaagguuuccugaguucuaaccucgggccaggcugcugggaccccgccgcugcugggguu

SEQ ID NO: 4133720 - RNA, 59 nt, Human
agcaacaggguggucuucagaauggugagaacacaucacacuggacacacucuauugcu

SEQ ID NO: 4133721 - RNA, 66 nt, Human
agcaagaagcuuugcugugauacauuuaauuugacauacaaguaauuacagcagaaauguuuugcu

SEQ ID NO: 4133722 - RNA, 58 nt, Human
agcaagacugugaauaguuugcauuuacaauuccuguguacacaaccuacagucugcu

SEQ ID NO: 4133723 - RNA, 63 nt, Human
agcaagccaaggggaaaguccucaggagggacaacccugcugacaacuugauuuugaacugcu

SEQ ID NO: 4133724 - RNA, 69 nt, Human
agcaaggaaaguaggcacggaagcucccagguaugugccaagagugccaccuggccuguguccugugcu

SEQ ID NO: 4133725 - RNA, 65 nt, Human
agcaaggauauuacagggcuaguuaugaguuuccaggcuuuaggacaguccuguaaacauuugcu

SEQ ID NO: 4133726 - RNA, 63 nt, Human
agcaaggcauuuuuguuaaucuuuggagugaucagaagguuugaaagaugucuuaauccugcu

SEQ ID NO: 4133727 - RNA, 69 nt, Human
agcaaggccgcccuuuuugugaagacaaacgugcacgaacacaaaagguccaaaaaggagcguccuucu

SEQ ID NO: 4133728 - RNA, 59 nt, Human
agcaagggcaucaccugggagcuuguuagaaaugcaggaucucaggcccccuccuugcu

SEQ ID NO: 4133729 - RNA, 72 nt, Human
agcaagggcugcuuuguggaaucacacuggagucuucaugaagcuguguguuuacuuauaaaguuccuagcu

SEQ ID NO: 4133730 - RNA, 71 nt, Human
agcaagguaaugucuccagaagccuagacagccaaugugagcauauuuaaggcuucugagucacauuuguu

SEQ ID NO: 4133731 - RNA, 75 nt, Human
agcaaggugucacugguugggagcacagacacugcaggaagacuguccuguucaagcccagcuugaccaccugcu

SEQ ID NO: 4133732 - RNA, 59 nt, Human
agcaagguuuuggucaucccucaggcgaucacaugauucugggagccagacccuuugcu

SEQ ID NO: 4133733 - RNA, 56 nt, Human
agcaaguaguaccaaguagcucaugaacuguugggcaggucucucagcugcuugcu

SEQ ID NO: 4133734 - RNA, 89 nt, Human
agcaagucaacacagauggaguuuagcauccccagcccuggaguuuccacucaguucuugggcugcuaggacccugcauugugcuuguu

SEQ ID NO: 4133735 - RNA, 67 nt, Human
agccugacaggauaguaggaagaucuuuauucaacuuuacagacucuguugaacuauuuugggggcu

SEQ ID NO: 4133736 - RNA, 62 nt, Human
agccugacaucaauauucugcagggauaccugauauuccuaggaauuagggauggaagggcu

SEQ ID NO: 4133737 - RNA, 73 nt, Human
agccugcacagccgcuuuguggagcugagcgaggcauaccgugugcucagccgugagcagagccgccgcagcu

SEQ ID NO: 4133738 - RNA, 85 nt, Human
agccuggccaacauggugaaaccccaucucuacuaaaaauacaaaaauuagcugggcaugguggcaggcaccuguaaucccagcu

SEQ ID NO: 4133739 - RNA, 57 nt, Human
agccuggcggucgucggucaggcaacaguacugcagcgugacuggguccgucuggcu

SEQ ID NO: 4133740 - RNA, 69 nt, Human
agccuggcucccugcaggaucggcuucaauucccugaugucuguccaacccugcagggcugccuagacu

SEQ ID NO: 4133741 - RNA, 67 nt, Human
agccuggggugaggccuugcugccaucaguucuccccaagcugcugccgggcuuuauccccaaagcu

SEQ ID NO: 4133742 - RNA, 63 nt, Human
agccuggguggggguucggagagccgggcacaccccgaguccuccugcacccucccuguggcu

SEQ ID NO: 4133743 - RNA, 67 nt, Human
agccuguucagggagacagacuaaacuaccaugguaacaguguggacuuuuccuaggagguuaggcu

SEQ ID NO: 4133744 - RNA, 90 nt, Human
agccuguuuuagcauguccucuuaaugaccuuaauucaagauaucacuuugaguuuugaaccuuauaauaggagauggcuccuacaggcu

SEQ ID NO: 4133745 - RNA, 73 nt, Human
agccuguuuuuugcccugaccccaaccacuccucuuuggagaggagagcuggugucuggaaucuggaugggcu

SEQ ID NO: 4133746 - RNA, 86 nt, Human
agccuucaagagucuucagugaugagaaugauuugccuaggagccaaagccuuagucauucuccuuacaaagccuaugugacagcu

SEQ ID NO: 4133747 - RNA, 61 nt, Human
agccuuugcuggccacugggcaggaccuagcugggagcaagugccagggccagcagaggcu

SEQ ID NO: 4133748 - RNA, 59 nt, Human
agccuuuucaucuucucugagcaugugccuauagccaguguugagcagaugcaaagguu

SEQ ID NO: 4133749 - RNA, 96 nt, Human
agccuuuugcugucguucauuaaggguuuagcagcuugguauugauuuucuugcagcugccucugaacuuuaauuccugcagcagaaaacaaggcu

SEQ ID NO: 4133750 - RNA, 64 nt, Human
agcgagugagggccaacauccagcuucagcagggaggagaggcuggccagggcccucgcuggcu

SEQ ID NO: 4133751 - RNA, 67 nt, Human
agcgcagcuuugucacggagugucggcugacaccguuucuguuuggcacucugcugugaucugugcu

SEQ ID NO: 4133752 - RNA, 110 nt, Human
agcgccuggcgggcaggaggaaggagggcgucggagcuggucaguuucagggccagauuacacguggauggcagagacaaggccgggccucgccccugcaccccggggcu

SEQ ID NO: 4133753 - RNA, 59 nt, Human
agcgccuggggcuggccagaguggucugaaacccaacccagcuggccuguccuaggccu

SEQ ID NO: 4133754 - RNA, 82 nt, Human
agcgcuggguuguggccugggcuagggggccaagagggccgagucuaaggugguuugccugcccacgacuacagcaggggcu

SEQ ID NO: 4133755 - RNA, 70 nt, Human
agcggaaugaaauccagucauuuccauuguucccaggcuuuuuucuugcuacagcugacugucauucccu

SEQ ID NO: 4133756 - RNA, 61 nt, Human
agcggccaacguccugcugucugagcacugcgaggugaagcugguggacuuuggcauggcu

SEQ ID NO: 4133757 - RNA, 80 nt, Human
agcggcgagggagcgccuuugccuaccaggccggagaacccuguucuucagucgccuuggcaggggcagccccuccuucu

SEQ ID NO: 4133758 - RNA, 78 nt, Human
agcagaagugggaucacacugccucccugucuucagcuccaccaggacccuugggccugcagugcuggugccucugcu

SEQ ID NO: 4133759 - RNA, 92 nt, Human
agcagacaaaguuaaaucuucuuugaaagugguaucuacuauuaucuuuaucaugccucagucuuaaggaaagauuagcauuuguaacugcu

SEQ ID NO: 4133760 - RNA, 64 nt, Human
agcagacaccaggaguaaagaauaugugaaaccauagugcuuucaguggucuuggcugauuguu

SEQ ID NO: 4133761 - RNA, 103 nt, Human
agcagaccaacuuuguuguaaauauuuagauaaaaaugggcuuuagagcagccacaucugaagacccacaaggcugaauguuacacaggguauguauucugcu

SEQ ID NO: 4133762 - RNA, 128 nt, Human
agcagagagacgagggaaagaaggaguguucagggguaguuauguauugggaaauccaagccuuuguguggguaucuccuaguucauauggaacccaagaauucucaacuauucucgaggacucugcu

SEQ ID NO: 4133763 - RNA, 76 nt, Human
agcagagcccuggcagcgugagcagcauccaccugcagaggcacuugggaguguaugcucgaccugcaccucuguu

SEQ ID NO: 4133764 - RNA, 114 nt, Human
agcagaggaaauucgagguaucggcuuucaguauaaaaucaaagugauguguuucagaacagauuuugacguugacaugacuuucuaguugacuuuuuuaguauuccucuugcu

SEQ ID NO: 4133765 - RNA, 67 nt, Human
agcagagguagaaggcaugcagugagacauggugaugguguacuauugucuccuucaacuucuuguu

SEQ ID NO: 4133766 - RNA, 57 nt, Human
agcagagguuuguuggaaaccugaauucuaucagucauuucaaacugcaccuuugcu

SEQ ID NO: 4133767 - RNA, 62 nt, Human
agcagagucugguaggugcuggugaagcucaugacagcccacucaucaugugcugagcugcu

SEQ ID NO: 4133768 - RNA, 78 nt, Human
agcagaucccagaaauauuucucagaggaggugaugaaguguuaaacgcagcagggcuuuccugagaagugauuugcu

SEQ ID NO: 4133769 - RNA, 68 nt, Human
agcagaucuggcaguauuaagagaagugacucauacaacaggagucacggcuaaacuucaggucuccu

SEQ ID NO: 4133770 - RNA, 61 nt, Human
agcagaugcauuaugauugaaaagcucuuggcacagaguccugcacucaugaagcacugcu

SEQ ID NO: 4133771 - RNA, 62 nt, Human
agcagcaaagccaggggauggggauggauggccggggccagcccucacuccuggguuucucu

SEQ ID NO: 4133772 - RNA, 61 nt, Human
agcagcaaggaacagaauggacaugccuauuaagccugccuucucugcucuuaugcaugcu

SEQ ID NO: 4133773 - RNA, 65 nt, Human
agcagcagagccuggcgaugucauggaauauuccuuccuuucuuccauuccccgagcucugugcu

SEQ ID NO: 4133774 - RNA, 55 nt, Human
agcagcagcucaguucucagcuggagcagagccagagaaccuugagcugugagcu

SEQ ID NO: 4133775 - RNA, 56 nt, Human
agcagcagcucauucuuccuguagucucucacccagguggaucuugguaggcugcu

SEQ ID NO: 4133776 - RNA, 79 nt, Human
agcagcagcuuucaacuugaguuuuugugauggaacaauaguuaacuauggcuuucaaaggaacucggaggcagcuccu

SEQ ID NO: 4133777 - RNA, 66 nt, Human
agcagccacacgccuccuucucccucccuguuaauccccaccgaaagcaggcuugguguggccgcu

SEQ ID NO: 4133778 - RNA, 69 nt, Human
agcagccaggguuaauuauauuuaacugguauguuagauaaauaaaaaguuuaacuccugguaacugcu

SEQ ID NO: 4133779 - RNA, 80 nt, Human
agcagccuagaaaagagacuucuagauuuguugaaugaaugaaugcuuggauaucaacacaucgaggugcucuggcugcu

SEQ ID NO: 4133780 - RNA, 59 nt, Human
agcagccuggacuuggauguggugugaaaguggucuugcauuacucaagcugugcugcu

SEQ ID NO: 4133781 - RNA, 65 nt, Human
agcagccuuccucacuccccuaguaauaaggcaacuuguucugggccuccuaggacaggcauguu

SEQ ID NO: 4133782 - RNA, 56 nt, Human
agcagcugccagagagaguuccuuucaaaaaguuccugacucugucuugugcugcu

SEQ ID NO: 4133783 - RNA, 61 nt, Human
agcagcuggugagcaagcucagugucacccccuagugugaacugugccguucaccucugcu

SEQ ID NO: 4133784 - RNA, 61 nt, Human
agcaggaacugacaccaagccaggccccaaggaggccugugaguguggccaguucccugcu

SEQ ID NO: 4133785 - RNA, 74 nt, Human
agcaggaaggggccuagccuggauuaaagcugcagcuugugugacucuuccuacagcugugccucucuccugcu

SEQ ID NO: 4133786 - RNA, 96 nt, Human
agcaggagguaagaaaaauggauggacaguuggaaaggugugaggggauagccuucacuagucaucaacuuccauucuauuguguuuucuuuuguu

SEQ ID NO: 4133787 - RNA, 60 nt, Human
agcaggaugguggaaggccugcucagaagccaucugcagcuuucuuuucccccaccugcu

SEQ ID NO: 4133788 - RNA, 61 nt, Human
agcaggcacuaugccaggaucuagugauagaaggguaaaugaaauuggcauugugucugcu

SEQ ID NO: 4133789 - RNA, 59 nt, Human
agcaggcguggacuggacugugacucucugcuuacuuaucaucuggucuggggccugcu

SEQ ID NO: 4133790 - RNA, 68 nt, Human
agcagggccagggcuauggugaagugugggaggugcccaguccccuucacugcagucauggcucuguu

SEQ ID NO: 4133791 - RNA, 59 nt, Human
agcagggcucacuacaacccugggacuccucagggacuccugggucugugagccauacu

SEQ ID NO: 4133792 - RNA, 69 nt, Human
agcagggggaguuagacuagaugauauuuuggguuccuuuuaucuuacgauuuaccugacuuucccucu

SEQ ID NO: 4133793 - RNA, 71 nt, Human
agcaggugacagggcuguggugaagggcaaaggagaaucauuccaauuaugucccauagcuuuuacuuguu

SEQ ID NO: 4133794 - RNA, 96 nt, Human
agcaggugucuauuugaaaacuuucuagaccaagaggaccaggcuaguacaaggccuuuagguuucucagagggucccuuggaguaggcauuugcu

SEQ ID NO: 4133795 - RNA, 57 nt, Human
agcagguguuagggauccaaugaggucuguuggacaaaugauucauaaauaucuguu

SEQ ID NO: 4133796 - RNA, 59 nt, Human
agcagguuuguuuucuucugaggccucucuccuuggcuugcagauggcugcugcuugcu

SEQ ID NO: 4133797 - RNA, 102 nt, Human
agcaguagaaucuagggacaaauggucacuggugagugucauugcuggaguuaaaugagacucauuaguggcuguuaugauuuccacucuuacuucauugcu

SEQ ID NO: 4133798 - RNA, 58 nt, Human
agcaguaggucaccugagacuuugcauaucuaaugugcucccaggugacgcugcuguu

SEQ ID NO: 4133799 - RNA, 63 nt, Human
agcaguaugaaaauuagcaaguuucauguuuuaaaagagacaauaugaacuuuuccugcugcu

SEQ ID NO: 4133800 - RNA, 67 nt, Human
agcagucauuggcuaaagcucccucuacaauauguaguaccaccuggggaugcugccagugguuguu

SEQ ID NO: 4133801 - RNA, 72 nt, Human
agcaguccgcuuaaggcagauguggaaucaauuugggcaaaugcaaguugccagcgucuguacuuuucugcu

SEQ ID NO: 4133802 - RNA, 59 nt, Human
agcaguccuccaguguguuuuagaauccuauucauugcugacacugggagaagacugcu

SEQ ID NO: 4133803 - RNA, 61 nt, Human
agcagugaguaacacagaccagccccugcuaucaugaagccuuuuccuuguugccgcugcu

SEQ ID NO: 4133804 - RNA, 69 nt, Human
agcagugcugccauagucauggguauccacaggguuaaaggucucaagacugaucgcaguggaacugcu

SEQ ID NO: 4133805 - RNA, 62 nt, Human
agcagugggugguuuuugagcaggggagugaccuaagauuugugcuuuagaacaaucacucu

SEQ ID NO: 4133806 - RNA, 89 nt, Human
agcagugucgugguagguuggcaagugccggcugcaaaacccuccuccuuugcugcagguggauauugcuacuugaucacagcacuguu

SEQ ID NO: 4133807 - RNA, 59 nt, Human
agcaguguucaaugauacacugcaauauaucacugcaagcaguguaucauugaacuguu

SEQ ID NO: 4133808 - RNA, 80 nt, Human
agcaguuggcaguagugguaguacauucucuuaacuuucagguucuguuaaaagaaguaaguuucucucuccaagauguu

SEQ ID NO: 4133809 - RNA, 81 nt, Human
agcaguugugaagcuuccugggucagccuggagguauuucagaucugcuacuaggaagauuccaggauuuuaacagcugcu

SEQ ID NO: 4133810 - RNA, 72 nt, Human
agcauaaguuuggaugguauccaccaggaggaaaaugcuuuauaauugguaaauacuauaaucaaauauguu

SEQ ID NO: 4133811 - RNA, 60 nt, Human
agcauaauauugaagagccuuggccacggagucaggcuaccuaaguucucaauauuggcu

SEQ ID NO: 4133812 - RNA, 84 nt, Human
aggaaggcaucagaggaccuaguugggcaggggccuggggaaguagaccugcuugaaugacuagcuccugcuggccuagcuccu

SEQ ID NO: 4133813 - RNA, 62 nt, Human
aggaaggcggacaguaaggaauaggcuagcagaaaaagucuucaggcucuggcugccuuuuu

SEQ ID NO: 4133814 - RNA, 69 nt, Human
aggaaggcuaagggaugacuggaguggcaguuucaggcccuaccaaagucuccauuagccaacuuuccu

SEQ ID NO: 4133815 - RNA, 73 nt, Human
aggaaggcuccagcucguggcucccagccagguccugagacuucaguugugaaagcugagcuggggccucccu

SEQ ID NO: 4133816 - RNA, 56 nt, Human
aggaaggcugaucacugcuuguucuucuuuucacauggcagcaaagaggccuucuu

SEQ ID NO: 4133817 - RNA, 126 nt, Human
aggaagggccuugggaaaggagauuuauguucugcaaaacagugccaaggacaccuauuacuggcaggugugaggacuucuagugguacugugaacaccaacaaaucacuuucugagggacuuccu

SEQ ID NO: 4133818 - RNA, 57 nt, Human
aggaaggugcaguagggugugccgggacuuaguuaaccuggcacucccccaccuccu

SEQ ID NO: 4133819 - RNA, 74 nt, Human
aggcuggaccgguuguuacaacaauuuuuuccgucuagaauucggcgguaaggucugagacaacaccucagcuu

SEQ ID NO: 4133820 - RNA, 79 nt, Human
aggcuggagugcaauggcgugaucucggcucacuacaaccuccacuucccggguucaagcaauucuccugccucagccu

SEQ ID NO: 4133821 - RNA, 71 nt, Human
aggcuggagugcaggcuuggcucacugcaaccuccaccucccggguucaagcaauucuccugccucagccu

SEQ ID NO: 4133822 - RNA, 73 nt, Human
aggcuggagugcaguggcgugaucucggcucacugcaagcucugcgucccggguucacgccauucuccugccu

SEQ ID NO: 4133823 - RNA, 55 nt, Human
aggcuggagugcaguugcaugaucauagcccacugcagccucaaacuccuggccu

SEQ ID NO: 4133824 - RNA, 63 nt, Human
aggcuggauuuccaaaccuccagcuucccaaucuaucagcugcagagggacugaagccagcuu

SEQ ID NO: 4133825 - RNA, 56 nt, Human
aggcuggcuggggaugcgucuucaugucgucucagggcacauccuaggguuagcuu

SEQ ID NO: 4133826 - RNA, 59 nt, Human
aggcuggcuuugguagcaugguacagcagucacaucucucuaaguuccaaagucaguuu

SEQ ID NO: 4133827 - RNA, 129 nt, Human
aggcugggcuccaagccugcuccuggaccugcccugcuuuuucuggccacacccagcucuuaggaccucagcuggcaggaagacguggggcaccaucugagggcaggacacuccuuugguccccucccu

SEQ ID NO: 4133828 - RNA, 63 nt, Human
aggcuggucuguuggcauuuuuacuggacacauuguucacucaaaauaucagcacaucagccu

SEQ ID NO: 4133829 - RNA, 70 nt, Human
aggcuguacauaccugaaagcaggaauuauacuucuaaauuuucuaugcuuaucguuuaguacauugccu

SEQ ID NO: 4133830 - RNA, 57 nt, Human
aggcuguccaagguggcgaagucaguggcaagacugggucaugaacucagggcaccu

SEQ ID NO: 4133831 - RNA, 71 nt, Human
aggcugugaccaaggaggaauuucagggugaauggacugcucuagcuccugaguucacugcuacucagccu

SEQ ID NO: 4133832 - RNA, 56 nt, Human
aggcugugagaaguccuucaguaaagaaacugauuuaacuuucucucaucuagcuu

SEQ ID NO: 4133833 - RNA, 57 nt, Human
aggcugugaggcggaaaggacucucccucgcucagggcagggucagccuuucagucu

SEQ ID NO: 4133834 - RNA, 79 nt, Human
aggcuuauaggaaauuuaucuccuggguuguaauagaacacuguguaaucccaggaaauauguuucuuaacuauagccu

SEQ ID NO: 4133835 - RNA, 56 nt, Human
aggcuucaccugcaccugagcuauggacaaaauauguuugagugcuacagaggcuu

SEQ ID NO: 4133836 - RNA, 63 nt, Human
aggcuuccgaguagcugggacuacaggugugcaccaccaugcccagcuaauuuuugaauguuu

SEQ ID NO: 4133837 - RNA, 75 nt, Human
aggcuucuaggaaacuuucuggcuguggugggugggaaguggaauaggacagcaacagaguuauccuaaaagucu

SEQ ID NO: 4133838 - RNA, 60 nt, Human
aggcuucugguacucucucuagggccuguucucauucucuucagugauugcagaaagccu

SEQ ID NO: 4133839 - RNA, 56 nt, Human
aggcuuggaaaauuuacaguguuuccuccagggacuagcuagugaaugccagggcu

SEQ ID NO: 4133840 - RNA, 71 nt, Human
aggcuuggcucagcugggacuguugagcaaagggccugcacauggccucuccagccuagcagaucaaggcu

SEQ ID NO: 4133841 - RNA, 101 nt, Human
aggcuuggggaaucuggaacuugccugcuaaauaaggucgugguggacucucagccauugggcaggucuaucaggcugcagguuccuacacacccacgccu

SEQ ID NO: 4133842 - RNA, 89 nt, Human
aggcuuuggcaggacucugugcagggucuuagacauuauacuugugcccucagcccugugcuaagcacccucaccccccaccaaggccu

SEQ ID NO: 4133843 - RNA, 76 nt, Human
agggaaaagagcuccuggaccuuggacaaauacauuucuaaaaaagguuuaggauauuaauguucagaguuucccu

SEQ ID NO: 4133844 - RNA, 62 nt, Human
agggaaagaaacaggaaguuaagguaggaaaguuaucuucaucugcuucuugauuuugcccu

SEQ ID NO: 4133845 - RNA, 74 nt, Human
agggaaagacugcaaaaacgcacagauaauuguugauaaucucagcuuucugcugacuuuuugcuucuuucuuu

SEQ ID NO: 4133846 - RNA, 68 nt, Human
agggaaaggaaguagaucuauucaugguugcccuuuagggcucaaugagguuuuacugccauuuuccu

SEQ ID NO: 4133847 - RNA, 57 nt, Human
agggaaagggaaaggauggguguugcaccucagcugucaucuuacaguccuuucuuu

SEQ ID NO: 4133848 - RNA, 70 nt, Human
agggaaaguuuacaugaaggguugacauuucacauuuagcauguuguuuaauuuuucaugagccaacccu

SEQ ID NO: 4133849 - RNA, 98 nt, Human
agggaacaagaugugaaggaacaguaugugagauuuacacaucaucacugcaugccauguuuaaauagaacauacugcauaacaucuuaacaugcccu

SEQ ID NO: 4133850 - RNA, 74 nt, Human
agggaacugcugauaguguuguaaauuauuauaauccuguagaaaggaauauggcaauauguaucaagaucucu

SEQ ID NO: 4133851 - RNA, 72 nt, Human
agggaagacauuuguaacacuugcacuuuuaaaaccauauuuauuaugcagcauugcaaagcagucuuuccu

SEQ ID NO: 4133852 - RNA, 65 nt, Human
agggaaggaaaagcugucgcuuugcuccauuaauucccacaauuaacgacagcaaaucugucccu

SEQ ID NO: 4133853 - RNA, 70 nt, Human
agggaagggaguuucaauuauauuauuauguauguuccaagcauuuuagaauauuggagcaaacuucucu

SEQ ID NO: 4133854 - RNA, 77 nt, Human
agggaagguggguaacuagcccagguuucugaugcugcuggugucugaaggcugaggcuguguuguuuucaaucccu

SEQ ID NO: 4133855 - RNA, 78 nt, Human
agggaagguuaaaugguuacuuuugguuguuuugaaguauuucuuugagaaaacugcagaguagccucagaccucccu

SEQ ID NO: 4133856 - RNA, 84 nt, Human
agggaaguucuuuauagcagugugaaaauggaccaauacacucccccaaauuucuucacacucuaugaucagaaauccuuuccu

SEQ ID NO: 4133857 - RNA, 68 nt, Human
agggaauaggaugagggguggccaaguaagaguuuaucuuucuuguagaauucuuauuugaauucuuu

SEQ ID NO: 4133858 - RNA, 62 nt, Human
agggaaugcuacauagauacaaaaaugaaaagcuucuuuuguaaugauauggagcaaucucu

SEQ ID NO: 4133859 - RNA, 62 nt, Human
agggaauggaugauggcagguuugucaauauuuuacacuuaugaaccugccuguucuucucu

SEQ ID NO: 4133860 - RNA, 69 nt, Human
agggaaugugaaacaguaagggaaguugaggguuuuuaccagccccauagucuccauugucacuucccu

SEQ ID NO: 4133861 - RNA, 92 nt, Human
agggaauuaauaaugugaaggcucuggaguaagagucugugaucuuggcucuaccacuuauuagcucuguggccuuggcaaguuaauugcuu

SEQ ID NO: 4133862 - RNA, 56 nt, Human
agggacacgagguccugcuggggcaccaguucagccaaggaccuacuugugugccu

SEQ ID NO: 4133863 - RNA, 59 nt, Human
agggacaggcccucuggucagcuuggcaucugccaucuggucagucaggcacugucucu

SEQ ID NO: 4133864 - RNA, 70 nt, Human
agggacauaaaucaggcagcguccugcuuccuguggccccagccaaggaggacaggaccugcccagcccu

SEQ ID NO: 4133865 - RNA, 71 nt, Human
agggacauaagugcacaauaaauauugagugaauuaauaaauacucauagcucaauugcauuuguuuccuu

SEQ ID NO: 4133866 - RNA, 66 nt, Human
agggacccagcccagaaucuggggccucuauacauugauuggguuccagagugggcugggaaaccu

SEQ ID NO: 4133867 - RNA, 71 nt, Human
agggacucucccacguucgacucuaagcggaaguacccgcucagggcuccggaaguggccucagagccccu

SEQ ID NO: 4133868 - RNA, 80 nt, Human
agggacugugucuugauguugacaauuucugauugccuuaccuauuaucuguuuucuccucaucaggacccucaguuuuu

SEQ ID NO: 4133869 - RNA, 80 nt, Human
agggagacugggaagugugcaauauugggcuggggacggaaucaaauucacacagcucagugaugccuucacagcuccuu

SEQ ID NO: 4133870 - RNA, 64 nt, Human
agggagagccucaggcccaggacagggcccagccaggccugacccagagguucugggccucccu

SEQ ID NO: 4133871 - RNA, 108 nt, Human
agggagagccuggugccagccuggaggaggcagguggaaagccuuagcgggcugccguuucuccucugcacucuccuggcucaccaggcuggaugccaggcccuccuu

SEQ ID NO: 4133872 - RNA, 71 nt, Human
agggagauucugguuaaacugaccuaaaaggauucuugcugaagguaggccaaguugaucagacauccucu

SEQ ID NO: 4133873 - RNA, 56 nt, Human
agggagcccacuuuaguuaggccagcagggcaggccugucugaggaggugcucuuu

SEQ ID NO: 4133874 - RNA, 55 nt, Human
agggagcuuuaccccagaucacauacagauuguguuugggaaaauauuguucucu

SEQ ID NO: 4133875 - RNA, 60 nt, Human
agggaggagcuguguguaagggccuuuccacagucccugcacacauauggcuucucuccu

SEQ ID NO: 4133876 - RNA, 57 nt, Human
agggagggaaguuuaggugagcagagccucuguccuucugucucagugucccuuccu

SEQ ID NO: 4133877 - RNA, 83 nt, Human
agggagggcuuuccagggcuagggagcccuccugggcuucucaagucugccugggcugcaguuccugguccugaaccuuccuu

SEQ ID NO: 4133878 - RNA, 65 nt, Human
agggaggggaggaggaacuauggagcuggguuggcaacucauuccuuuggacuccuccuugcucu

SEQ ID NO: 4133879 - RNA, 81 nt, Human
agggagguguuuugggcgaccgggggcaggacccuggcucucucagccccuggagccagcugcggucucccaaaguucccu

SEQ ID NO: 4133880 - RNA, 86 nt, Human
agggaguaacugggcuccacagcagugaguggaauggaaauaaaugacaguguucaacaaauggcuagucggagaggguuuuccuu

SEQ ID NO: 4133881 - RNA, 76 nt, Human
agggaguaauuggaggcuuuugaauaggagagugaugugaucagaacacuugaaugaaagagacuccuuugucccu

SEQ ID NO: 4133882 - RNA, 63 nt, Human
agggauauuuuuaggugaugcaggcccugcuaggcagaagccugaguuaaugagaauaguccu

SEQ ID NO: 4133883 - RNA, 88 nt, Human
agggaucuuuauuguaaaauuuuuagcccauuaaaguaaauuauaucuaacuggcuuaaauuuuaucaagggaauuuaugagaucucu

SEQ ID NO: 4133884 - RNA, 55 nt, Human
agggaugagaugaauauuuggggugaguuuacacuaaaguagucaucccauucuu

SEQ ID NO: 4133885 - RNA, 99 nt, Human
agggauguagauuuuaagaagaacaaagagaccaugagccaaacuugagugcccuuccuccagguguuuuuuugucaucuuaaucaaacuaagguuccu

SEQ ID NO: 4133886 - RNA, 76 nt, Human
agggauuaugaaguugagggacccugcacugggggcugggggcucucuuaggauccaucacacuuccauagucccu

SEQ ID NO: 4133887 - RNA, 64 nt, Human
agggauuauuacuagaaaaaucagacagcuccgcucacaauggggcuguccugguuuggucccu

SEQ ID NO: 4133888 - RNA, 87 nt, Human
agggcaaauccauaagaaauaaugaugaugacacuauaagacauuaaaaaguaaguuauccuccauuuucauuaagggauuugucuu

SEQ ID NO: 4133889 - RNA, 79 nt, Human
agcucuuguacauucucaauaguagaugaguaaauugggcuguuuacacacuaugauuugaagccuguauuauaaagcu

SEQ ID NO: 4133890 - RNA, 80 nt, Human
agcugaauaagcaggcaggaaugguggaacagauuaaacauuuaaaugccaccuguuuccugucgcucccauuacuagcu

SEQ ID NO: 4133891 - RNA, 65 nt, Human
agcugaauacacaguuacaugauucuugugagcuguagggcacauuaagaauaaugagacuagcu

SEQ ID NO: 4133892 - RNA, 66 nt, Human
agcugaaugccagcacuucugggccuccuagggccagagcuccucagcccagagggugcgucagcu

SEQ ID NO: 4133893 - RNA, 55 nt, Human
agcugacugagugacuugggaauguuuuaaaaauuucuuugagucucaguuugcu

SEQ ID NO: 4133894 - RNA, 82 nt, Human
agcugagaaaauuucaggaagugucagggucaagggguccuugggagggacuucaccuuuaccuucaccuuucuacucagcu

SEQ ID NO: 4133895 - RNA, 74 nt, Human
agcugagaaaccugaauaugcuucaaugacacaaaauuauuucuacugccaucuucagguguuuuccaucagcu

SEQ ID NO: 4133896 - RNA, 57 nt, Human
agcugagaauguuccuacugguaaguacaacacuuccaggacccucacauuuuugcu

SEQ ID NO: 4133897 - RNA, 91 nt, Human
agcugagcaacaucuauugaagguuugcuaggaucccuugcuuuaccucauguaaguuucauggcagcccuuuacuagagauacuuuaguu

SEQ ID NO: 4133898 - RNA, 57 nt, Human
agcugaggcauggacaggcugcucuccuaccaccugccaggccgcucuugcccagcu

SEQ ID NO: 4133899 - RNA, 94 nt, Human
agcugaguggucuggcucagagucucucaugcaguuacagucugaugaugguuggagcuggcauugcagggagcugcccagguaucucucagcu

SEQ ID NO: 4133900 - RNA, 57 nt, Human
agcugauacauuucuuguagccacauugaggcccuggcacaggaaagcuacucaguu

SEQ ID NO: 4133901 - RNA, 75 nt, Human
agcugauggaacagauuaaagugagggcuagaucuucccccucugcccuauccccucacuucucuuccuccaccu

SEQ ID NO: 4133902 - RNA, 63 nt, Human
agcugcaaguguugccuccuacauguuguuaauuuagagguaaucagguuugcauuugcagcu

SEQ ID NO: 4133903 - RNA, 69 nt, Human
agcugcaauuaaagacugugaaguagugcugcugaggacuacuguaaguuuauguguuuacuuguagcu

SEQ ID NO: 4133904 - RNA, 126 nt, Human
agcugcaggaugcuaagaccacccgguggacuccaggguuuugcaccuggaccaagaugccaaggggaggggcaggucuagcagaauucggcguuugcugucaucuggggcucuuuaguugcagcu

SEQ ID NO: 4133905 - RNA, 61 nt, Human
agcugcaugaauugccaauuauaaacaucugaguuuagauuugaaaguaaauucagcagcu

SEQ ID NO: 4133906 - RNA, 70 nt, Human
agcugccagaugacagugcuauugggcugcuccuaacuaugaucacuccuuagccuguccucggguagcu

SEQ ID NO: 4133907 - RNA, 55 nt, Human
agcugccaggguggggccgcguuuuggcgacggccacucggccaccccugccgcu

SEQ ID NO: 4133908 - RNA, 75 nt, Human
agcugccugaggaaguugaucucaucagucagaccuuccaggcgagacuccagcucuaacuuguucagguaagcu

SEQ ID NO: 4133909 - RNA, 56 nt, Human
agcugcgauugggcgggcgcggcgaucccuuugaaguguggcugccgaucgcggcu

SEQ ID NO: 4133910 - RNA, 59 nt, Human
agguuuuggagaccuagcacugaacaauauaggcuaggccacuugcucucauggaacuu

SEQ ID NO: 4133911 - RNA, 84 nt, Human
agguuuugguuuccaaugacaaacacuguuccuaaaaagugaaaauaaggaagaagucagauuuuaaugggaugaccaggaccu

SEQ ID NO: 4133912 - RNA, 85 nt, Human
aguaaauacugguaagaaugauccugcaccuucaagaaaauaaucagauuauuuuaaagaaggcagagaauauaacaguguuucu

SEQ ID NO: 4133913 - RNA, 75 nt, Human
aguaaaucuucacaaagccgugcuguuauuucuuugcuuucaccuugacagcacuggaguuuagugggauuuauu

SEQ ID NO: 4133914 - RNA, 81 nt, Human
aguaaauguuuguuaaauggaugcagaauaagaugguguuuuaauauugcaguacauuucuagaauaauaaacaugugacu

SEQ ID NO: 4133915 - RNA, 129 nt, Human
aguaaauuaucuuguuugggauaauacguuagucaaaucuuaucugguuacaagggauaaaaucauaugauuuuauccguuguuaccagauaagauuugacuaacguauuauccucaagaaguuuauau

SEQ ID NO: 4133916 - RNA, 63 nt, Human
aguaacacucacucucuugggcuucauucuguccauguguucaauaagggaguugauguggcu

SEQ ID NO: 4133917 - RNA, 79 nt, Human
aguaacagguguuuuaaaucuuucugagucauugguacaccuaagagccagacugguaagguauuggaauucugugacu

SEQ ID NO: 4133918 - RNA, 63 nt, Human
aguaacaugcuaauuugauuauuauugcuuuguaguauguuuaaaaucagguaguaugaugcu

SEQ ID NO: 4133919 - RNA, 84 nt, Human
aguaaccacuaaucuauuuucugucucuauagaguugccuauucugagcaauucauauaaacggaaugauauaauguggucucu

SEQ ID NO: 4133920 - RNA, 65 nt, Human
aguaaccaguagucauucauucaccaguauuaaugccugguacaugcaaaagacuauuuguugcu

SEQ ID NO: 4133921 - RNA, 77 nt, Human
aguaacugcucagugaguauuuuuaagcuauuagcaugaucaaauuuagagaggagaaauauaauggagcaguuucu

SEQ ID NO: 4133922 - RNA, 59 nt, Human
aguaacuuaguuuaggguauugauugauuugguauucacaauacuauaagcuggguucu

SEQ ID NO: 4133923 - RNA, 95 nt, Human
aguaagaaaugugguugcagaggcaguaauuugagguaucugugugacauccaaacagagaugucagauuggcagcugugugggugcaucuugcu

SEQ ID NO: 4133924 - RNA, 95 nt, Human
aguaagaagcuugugggcaagcuuaaucagucugguugcaugucccauauuacccuuguuccuugcuggcuuaggcuaauauauugcuucuuauu

SEQ ID NO: 4133925 - RNA, 66 nt, Human
aguaagacuuccaggaaaaggugguggagcaauggcuccuuuccauuuugucuccugaaaucuacu

SEQ ID NO: 4133926 - RNA, 59 nt, Human
aguaagaggagugggaagccucaucugaaauucggugggcuuuuuaguauuccucuucu

SEQ ID NO: 4133927 - RNA, 77 nt, Human
aguaaggcauuguaaagucacaccuuaggcucugcagucagacagagcuggcugugggugacuuuccgauauuuacu

SEQ ID NO: 4133928 - RNA, 59 nt, Human
aguaagggagauguauagauguagccagucaggugguuucuguacuuugcuuccaugcu

SEQ ID NO: 4133929 - RNA, 55 nt, Human
aguaaguuccaguuucauuaugccauuuuucagguuugauggcuggaacuauacu

SEQ ID NO: 4133930 - RNA, 67 nt, Human
aguaaguuucuauuuucaugucuguuucuuccacuaggaagagcaccuugaggacaggaauugagcu

SEQ ID NO: 4133931 - RNA, 85 nt, Human
aguaauaagcagaaaagucugggccacagagugagaaauguccuaaaaaguggacaguuuuaaugugguucaaucuuuuuuuacu

SEQ ID NO: 4133932 - RNA, 59 nt, Human
aguaauacuagcuagcagggauaauuuagaaaaaugcuuugugcuaaugcuagauuacu

SEQ ID NO: 4133933 - RNA, 86 nt, Human
aguaauaggaccaaaugaucacauuuauaguggcacgcauaguaguuuaugaguggcaguauaugugugaguguuuccuuugugcu

SEQ ID NO: 4133934 - RNA, 129 nt, Human
aguaaucacggugaauaacagucguaggggugaagugacagcucaagguuuuacuguugucauaaaaguggugcaguuuuagagcuuuaagaugagcaaaucucuggggucuauguccaccgugguucu

SEQ ID NO: 4133935 - RNA, 61 nt, Human
aguaaugaggauguuugcaaaagucucaauuaaggacaaaguuguuggcacccuuauuacu

SEQ ID NO: 4133936 - RNA, 58 nt, Human
aguaaugucccuuaaaugugguuuuauucuuucuuacugugaguuaagggacaucauu

SEQ ID NO: 4133937 - RNA, 60 nt, Human
aguaauguguaaaugaggagucuuggcuguguuuccaguaagacuuuauuuauagauacu

SEQ ID NO: 4133938 - RNA, 70 nt, Human
aguacaccagugggagagaagcaaguaguaagugcauuuccuccuuguuuuccuguuuacacaguguacu

SEQ ID NO: 4133939 - RNA, 58 nt, Human
aguacagauuucugggcccuaccauagucuuucgagguggggaccaguauuuuauacu

SEQ ID NO: 4133940 - RNA, 82 nt, Human
aguacauccuaggaguuugaaaacuuaacuaagguuuaaaauuuaccuuguuuaaagaacuucugacuuuugaggaaaaucu

SEQ ID NO: 4133941 - RNA, 65 nt, Human
aguacaugguuauaaaaguccucucauuacagaguuaaguaauggugggaaaugugaccucuacu

SEQ ID NO: 4133942 - RNA, 68 nt, Human
aguacccauugcugggcauuuaugcagaugguccccucaugguaaagagcugcccaaguucugggucu

SEQ ID NO: 4133943 - RNA, 76 nt, Human
aguacggacuacagcagcucuucacuuacuccuuuccaggguaagggaaaggagaggcagagagcuuagagaaacu

SEQ ID NO: 4133944 - RNA, 83 nt, Human
aguacugauccaaauucaacucccuauucacuuguuucagagucaucucuaugaacacagggaauggggguuuccacaguacu

SEQ ID NO: 4133945 - RNA, 73 nt, Human
aguacuggguacaagcuggagggauagaaguauauuuugguuuauucuguucauguugggcuuuucccugucu

SEQ ID NO: 4133946 - RNA, 66 nt, Human
aguacuguagauuggcuucugcccuggccccggucaggcugaaggaggccuaucucuggcugugcu

SEQ ID NO: 4133947 - RNA, 85 nt, Human
aguagaccgaaguuagguuggaauggagaggacguuguuuaaccauuaacaaugucuuugucuccuucagucuauauaguguauu

SEQ ID NO: 4133948 - RNA, 73 nt, Human
aguagagugaccaacuuacccugauuuuaaaacugaaagucccaggcaaaucagagugguuggucauccuacu

SEQ ID NO: 4133949 - RNA, 74 nt, Human
aguagccuugucaccguguccucuugccuuuuccauguacacagccggcucuggagcaggugacggggccugcu

SEQ ID NO: 4133950 - RNA, 80 nt, Human
aguagcuggauugggguagcuguuucacaccacuaaugcuagcagauuggcuggcgaggcucugugacaaucaagcugcu

SEQ ID NO: 4133951 - RNA, 83 nt, Human
aguaggccuuggguuuugacuuguuuuuacuguugugaggucauguccugagacaacauugggcaagucccaaagggccuucu

SEQ ID NO: 4133952 - RNA, 60 nt, Human
aguagggugcuuaauacuagauuucacagggcauguaagguucuaauaagcgcugcuacu

SEQ ID NO: 4133953 - RNA, 89 nt, Human
aguagguauuugaaaaauugauuaauguuagggucugaguuuaucauauugagaauucuacaauagaucaaguaacaaauagugcuacu

SEQ ID NO: 4133954 - RNA, 75 nt, Human
aguaggucccuggcugcuauagcagcaugugcuccaugccagggcagguguguggggagcagcagggggucuacu

SEQ ID NO: 4133955 - RNA, 67 nt, Human
aguaggucuuaggagucauccggcaucuuguuucuguagcugagcugggcaacucuuagaucuuauu

SEQ ID NO: 4133956 - RNA, 60 nt, Human
aguagguuggggauucauuuagcacaaacacuaaaugugaacuuacuguccccacagacu

SEQ ID NO: 4133957 - RNA, 70 nt, Human
aguagugaaauuuguuuagauaggucacucaagaaaaauggcaagauuauguucuaaacaagucagugcu

SEQ ID NO: 4133958 - RNA, 66 nt, Human
aguaguugagagagagcuuuggauuguaacuuagaaggaauaaauuccaaaccugucucuggcucu

SEQ ID NO: 4133959 - RNA, 67 nt, Human
aguaguuuacaacaugccaacugggcuuuauuuguagccuauaucacagcauugugugugaaaagcu

SEQ ID NO: 4133960 - RNA, 59 nt, Human
aguauaaugaaaugugucaguagaacuguuucuaaguuauuugacaguuucuuuauauu

SEQ ID NO: 4133961 - RNA, 68 nt, Human
aguauacugaguuuuaccuuuuaugcccagaacagugcuugguauacagguggacuucaguuaguauu

SEQ ID NO: 4133962 - RNA, 62 nt, Human
aguauaucacauguaguaauggcaaauacuguuuuguaaaaacuuugcuauauguauguucu

SEQ ID NO: 4133963 - RNA, 116 nt, Human
aguaucacacagucaaguucaaagagaaucauuagagagaaaacuuugaggacggcaaaaaaaaucaaaagugacacauuugugaugaauuaauuuugaaugaggauagagauacu

SEQ ID NO: 4133964 - RNA, 119 nt, Human
aguauccccucacucuacagacccuaugccucuuccagcugcuagcuagaugcaacaugacaucguuuuguuucuggaaaaggcgagaauugcugggaagcauugucuggggccguacu

SEQ ID NO: 4133965 - RNA, 85 nt, Human
aggcagucauggccauggcacauagaaaaggaucaauaaauauuaguuuagugguuaugagugugucucuggggacagacugcuu

SEQ ID NO: 4133966 - RNA, 72 nt, Human
aggcagugcauauaugugcagcaucaaauaggcugggccuccgcagagauugagcugacuguggcacugucu

SEQ ID NO: 4133967 - RNA, 57 nt, Human
aggcaguuucugggacagcauauuaaaagacaugagcuucagacaaagaaacugcuu

SEQ ID NO: 4133968 - RNA, 69 nt, Human
aggcauaaguguguaaggcauucugucaacuaucauuccuucucuuugacaggcaccaugccugugccu

SEQ ID NO: 4133969 - RNA, 61 nt, Human
aggcauauuucuaaaaugccugucuccuaucauuaugagucaggcaugaagguaauuaccu

SEQ ID NO: 4133970 - RNA, 70 nt, Human
aggcaucagaggcagacauggauuugaguucuagcuaccuauaacuacaguaguuugcccuucuaugcuu

SEQ ID NO: 4133971 - RNA, 65 nt, Human
aggcauggcacugagcagcuucuuuuaagaacauaauuuguagccaggcgcaguggcuuaugccu

SEQ ID NO: 4133972 - RNA, 72 nt, Human
aggcauguauguaugaucauacauauuuaugguacccuagaaaugucuguuagucauaucaugucagcgccu

SEQ ID NO: 4133973 - RNA, 55 nt, Human
aggccaaagcucaccugcagcucauuuauccuuagagaagggagggcaauggccu

SEQ ID NO: 4133974 - RNA, 68 nt, Human
aggcagaagcugagaaugaauuaagacuccuuguacaagucuuuuuuagcugguucuuagcuuugccu

SEQ ID NO: 4133975 - RNA, 83 nt, Human
aggcagagaaaauuauuuuuaaaacucugggaauuucucauaagaaaauaagaauaguguuuucuagaaugguuuuaucuccu

SEQ ID NO: 4133976 - RNA, 85 nt, Human
aggcagaggugggaagugugaaugcauaauauacuguuauguaaaugacauucaaguuugcaguuaggauuucugauuucugccu

SEQ ID NO: 4133977 - RNA, 83 nt, Human
aggcagauggguggcuuauuuucugugaaauuaaacaguuuuaaacacuggcuagaaaauguuccacugccauuucaacgcuu

SEQ ID NO: 4133978 - RNA, 66 nt, Human
aggcagaugguaacugugauaucugugugauauacaguuacuccucaucaaccauaagcauugccu

SEQ ID NO: 4133979 - RNA, 60 nt, Human
aggcagcagcguuggguuuuuagggguucagucuuuccucagagcauagcgcugucuccu

SEQ ID NO: 4133980 - RNA, 57 nt, Human
aggcagcaugcucugcuucuaccaauaaagcacugcuaagggcaggggcugcuguuu

SEQ ID NO: 4133981 - RNA, 130 nt, Human
aggcagccauggccaggcugggcuggaaggguaagggcgugcucuggacucguggcacagcugcugggaugugcgugauggaccgggccugcccgcuugcccacccccugcccacacuaugcugcugccu

SEQ ID NO: 4133982 - RNA, 58 nt, Human
aggcagccuuuuuggaaacauagcugaucauuucagcucuguagaucugagucugucu

SEQ ID NO: 4133983 - RNA, 106 nt, Human
aggcagcggguaggaaagaggucaugagacaaggaaaggaagcugaaaaaccgaaguuucagaugcccuuuguuuuagacaccccucauuuccagaacugucaccu

SEQ ID NO: 4133984 - RNA, 73 nt, Human
aggcagcuguguaggaugguuuuggacagaggcugaauaacagcaaaaugaccagcuacuuguacaguucacu

SEQ ID NO: 4133985 - RNA, 74 nt, Human
aggcaggaaauaguuuucaguuacugcuauaucauuguccucaauuaggagcugacugaugacacuguccuucu

SEQ ID NO: 4133986 - RNA, 100 nt, Human
aggcaggagacucacuugaacccuggaggcagagguuguugcagugagcugagauagugucacugcacuccagccugggugacagagugagacuccgucu

SEQ ID NO: 4133987 - RNA, 59 nt, Human
aggcaggauugcugacaacaaucacgaacaaauaugugacuccugucaauagcuugccu

SEQ ID NO: 4133988 - RNA, 58 nt, Human
aggcaggcacaguaauacauguucauucuuuuggccugagcuauuacaguagccuccu

SEQ ID NO: 4133989 - RNA, 65 nt, Human
aggcaggcuacccuaggucuuggugguugcugcugccucgcugugugaccuugggugaguugcuu

SEQ ID NO: 4133990 - RNA, 120 nt, Human
aggcagggaaggaggguuuuguggcuucuacgcccacaggcuacugcugccugaacuggcaaaaguaucucaaagguggcuguuugaacccagaggucccagagugcccccucccucccu

SEQ ID NO: 4133991 - RNA, 58 nt, Human
aggcagggcugcugaggaagccuugcggagcccugcaagugaccucagcauguucccu

SEQ ID NO: 4133992 - RNA, 93 nt, Human
aggcaggugugcaccucauccuuagggcauugcaguucugguccauguugucaccaggcugagggcuccugagggcagcagcaguaucugccu

SEQ ID NO: 4133993 - RNA, 111 nt, Human
aggcagucagacuaaggcugugcaggugggggagaaguugugacacgccacauguccugccccucauaucgcuccuccccugaccucacuggccuaccaggauggcugccu

SEQ ID NO: 4133994 - RNA, 58 nt, Human
aggcagucugauucaagagcccauguuuccugaaagaggaauuuuggguggaaagucu

SEQ ID NO: 4133995 - RNA, 65 nt, Human
aggcagugcugugcccugaacccucugauaaguacuacagugaggcuucagggcauuugcuguuu

SEQ ID NO: 4133996 - RNA, 67 nt, Human
aggcaguugaguggcuuuuucacacuguaaagacagccuguugauuuaagaagcauacuuacugcuu

SEQ ID NO: 4133997 - RNA, 55 nt, Human
aggcaguuggucauugcucuuuuacaacugaggaaacagcaugaguaauuugccu

SEQ ID NO: 4133998 - RNA, 62 nt, Human
aggcaguuuggucacuggauuuggcugucucugaaagacagcauucccuuuggcugcuuccu

SEQ ID NO: 4133999 - RNA, 130 nt, Human
aggcauaaugauaaguaagaccaugaaguuucuguuugaauaauguguauguuguuauuuuuaucugucugaauaauuuguaugucguuuuuaucagaaauuauuugggguuuuuuugaugauuauguuu

SEQ ID NO: 4134000 - RNA, 125 nt, Human
aggcaucacuuccaguacuucuccagggaccacugggcugggcagggucuugggaauuggggaccuggucccaguccugugugacccugcacaggccacuccuugucucugggcugugugcgccu

SEQ ID NO: 4134001 - RNA, 61 nt, Human
aggcaucagggcuuugcacucucagggguccuuccgccuggauguccuuccccugaagcuu

SEQ ID NO: 4134002 - RNA, 76 nt, Human
aggcaucuucuggcucaguguucaucuguaugcacaguuauguguaagcacuaggagcugagccugaaaaguaccu

SEQ ID NO: 4134003 - RNA, 64 nt, Human
aggcaugcaucacuauucuuaggcauuaaaugaagaaacuaaggcacacaguugcugcaugccu

SEQ ID NO: 4134004 - RNA, 71 nt, Human
aggcauucaccauacauaaauuacauuguuaggauaaagucaucaaacugguuucaugugggcugaagccu

SEQ ID NO: 4134005 - RNA, 98 nt, Human
aggcauuccaugccccucacaauugggcuccaauuuguccuuucaugcucaccccuugcugaaagucccuuggacccaggcugagugguauguggccu

SEQ ID NO: 4134006 - RNA, 56 nt, Human
aggcauugauuuaaacaucucucuuccuuuaaggaagacucauggaauggaugcuu

SEQ ID NO: 4134007 - RNA, 81 nt, Human
aggcauuugcaucuagggcaacccagagcuucccuagccuuaagcuuuccuuuagcugguuguucuggaugggcaggguuu

SEQ ID NO: 4134008 - RNA, 56 nt, Human
aggccaaagcaagacccuguaaagcacaaagcccagagcagguaaugcuguggucu

SEQ ID NO: 4134009 - RNA, 56 nt, Human
aggccaaauagcagguuugcuaaauguuuuaauguuguaaacugcuuccuuggccu

SEQ ID NO: 4134010 - RNA, 79 nt, Human
aggccaagagcccugcucaucuggaucccgcacugaggcuggcuagaacucccgggcagugggccgggcuguugggccu

SEQ ID NO: 4134011 - RNA, 55 nt, Human
aggccaagugguggcuauuuauaggaggcuguagaaaagcuuggacacauggccu

SEQ ID NO: 4134012 - RNA, 63 nt, Human
aggccacagaggaagcagacacaucuugcuggucgauuccuugcaagcuucuuauaguggccu

SEQ ID NO: 4134013 - RNA, 59 nt, Human
aggccacucagggggccaagauccugucacuccuuuucucuaggcccugcgaauggcuu

SEQ ID NO: 4134014 - RNA, 63 nt, Human
aggccagcaagaaagagagucuuugaugguuucaaccaugcugacugcuucuuucucugaccu

SEQ ID NO: 4134015 - RNA, 57 nt, Human
aggccaggaauccuugucccagcagacaugcacuggagcaacggucuccugucgccu

SEQ ID NO: 4134016 - RNA, 80 nt, Human
aggccaggauccgcaaaccacacucagcguaucgggcgugcaggucgacgagcugaguguaguuuacuucggucuugccu

SEQ ID NO: 4134017 - RNA, 78 nt, Human
aggccaugagcaggguugcugcagacuuucauguuuacauguguguaugugaaugcaguuaucuauaacucugugccu

SEQ ID NO: 4134018 - RNA, 94 nt, Human
aggcccagagggaguuacugccucaggcagcaaggggaagaauugggauucagacuuagguuggcugaugcaagagcuuccugcccuggugcuu

SEQ ID NO: 4134019 - RNA, 66 nt, Human
aggcccagcccuucccaacuggccaggaccugacccaggagcuggucugcgggaaggcgugggcuu

SEQ ID NO: 4134020 - RNA, 73 nt, Human
aggccccaguuguagacaggagucaggcuagaaucaggggcuacugcugaagcuacucuagcugucugggccu

SEQ ID NO: 4134021 - RNA, 56 nt, Human
aggcccuuccauguugucauggagaccuggacacaccaugauacuuggaagggcuu

SEQ ID NO: 4134022 - RNA, 63 nt, Human
aggcccuugcuaucauggagcuuacauucuaguggagaagccaggugauaagcaaauaagccu

SEQ ID NO: 4134023 - RNA, 78 nt, Human
aggccgagucagcguugcucgagguccccaccggcucaggccucugcgccuccucugccucgggaaugggcuucgccu

SEQ ID NO: 4134024 - RNA, 63 nt, Human
aggccggcucuaaauuuggauggcuucgguugauccuggauuuagaagagccucccauggcuu

SEQ ID NO: 4134025 - RNA, 84 nt, Human
aggccgggccgugggcuccagaugaaaggccagaggcgccccugcuaucucugcugcuccucaccugguguuccuggccggcuu

SEQ ID NO: 4134026 - RNA, 75 nt, Human
aggccguuagucacuuggauuguuuuugcuuggucuccugaaggcaccuugcgguccagugaauauugauugcuu

SEQ ID NO: 4134027 - RNA, 65 nt, Human
aggccguuucuuugcaguucuguauuucaggguccugaaaguuuuauaugcugcagcgaauuccu

SEQ ID NO: 4134028 - RNA, 60 nt, Human
aggccuaugaguaauauucugggcucagugcuuuguccacugggcccauauacucagucu

SEQ ID NO: 4134029 - RNA, 88 nt, Human
aggccucacagaagcaacacugaagagcacuuucaaaguuuacucagaugaggucaccuuugcaagugcuuuguaguccuggaggccu

SEQ ID NO: 4134030 - RNA, 77 nt, Human
aggccugcccaggcuggggguggccaucaucacggggcagggcagggucaagggugaaggcuccuccaggaaggucu

SEQ ID NO: 4134031 - RNA, 71 nt, Human
aggccuguccagccugccuggcuaucaggagcuuaugucucagccucuagcugggccagguggucagaccu

SEQ ID NO: 4134032 - RNA, 56 nt, Human
aggccuguuccaggccccuuuugucccccaggcagcagaggccuagcgacaggccu

SEQ ID NO: 4134033 - RNA, 81 nt, Human
aggccuuuaacuaauuuagacuuaguaugcaguaacuuauuuuguaauuugugaaagucaaauuaauugaacgauuggccu

SEQ ID NO: 4134034 - RNA, 84 nt, Human
aggcgacagcucagacgcaggucgagcaccuggguccggacuccacccuccacaugcugccccgaccucguucugaaacucccu

SEQ ID NO: 4134035 - RNA, 68 nt, Human
aggcgaguacagacggggccugggagggggcagagauguuccccaggcccugccugugguuccugccu

SEQ ID NO: 4134036 - RNA, 102 nt, Human
aggcggccccaggcuggccccacacuggugggagcagcaggcagcuccuccuugggcagcuccuccucuuccccugugaggcagcucuggucauggccuccu

SEQ ID NO: 4134037 - RNA, 57 nt, Human
aggcggcuccgggagugugggccccccugggacgugugcguguuuccggggucuccu

SEQ ID NO: 4134038 - RNA, 60 nt, Human
aggcggggggcaggcaguacguugggggauccgaguaccuccgcuuggccccagguggcu

SEQ ID NO: 4134039 - RNA, 59 nt, Human
aggcuaagccugcaugaaccaugagaaucugucuucucugaaauauguaugcuuggucu

SEQ ID NO: 4134040 - RNA, 95 nt, Human
aggcuaccuguuuaagaagaauggaaauauuucauagguaauauguucuaauuucuaauaugucauauguaauauguucauuucuuagguaguuu

SEQ ID NO: 4134041 - RNA, 62 nt, Human
agcugcuccaauuuuuaccauuacagagaacuucguagaauugcugggaauuggagccagcu

SEQ ID NO: 4134042 - RNA, 64 nt, Human
agcugcuguuucuugcacguauucuuaaaaucaacaaaauaccuccacaagacaacuggcagcu

SEQ ID NO: 4134043 - RNA, 65 nt, Human
agcugcuguuuggugagucuugaagcuggcucaugugcugggaagaggcccaugggacaggggcu

SEQ ID NO: 4134044 - RNA, 78 nt, Human
agcugcuuccaggucccuggggagauuuucuugaugagagaauugcuaacucuccuccuggaugugggacccgcagcu

SEQ ID NO: 4134045 - RNA, 78 nt, Human
agcuggacuuugaacuccugguucccaguugagauguaucauacaauuucugcuaaccaaggagagauguguucagcu

SEQ ID NO: 4134046 - RNA, 81 nt, Human
agcuggagcauggcugugagcacccugccucgaugagccgggccaucuuucacaugguaggggcagggccaagcuguggcu

SEQ ID NO: 4134047 - RNA, 60 nt, Human
agcuggcagcauuagacccugggcccauuuggugccuuuuacuacacuaggcugccagcu

SEQ ID NO: 4134048 - RNA, 59 nt, Human
agcuggcagcucucagggguacgugaguccaggcugaucucauccuuggggcugcugcu

SEQ ID NO: 4134049 - RNA, 58 nt, Human
agcuggccaggaagagucucagacugugguguaggucugagaagguuucagccagacu

SEQ ID NO: 4134050 - RNA, 58 nt, Human
agcugggcaccccgcugcgucuaggcugaaaggaccgaggugcacgggugugccugcu

SEQ ID NO: 4134051 - RNA, 72 nt, Human
agcugggcuggcagccaagugaagagggcugggauugagcggacucuugucugugggcugcugccuccagcu

SEQ ID NO: 4134052 - RNA, 65 nt, Human
agcuggggaagauggcccuccauguguccaccauuacugugauaccuguuucugucauccccacu

SEQ ID NO: 4134053 - RNA, 59 nt, Human
agcugguagaugaacaguagccauccccacuuauugagcacuauuuauauaugccagcu

SEQ ID NO: 4134054 - RNA, 65 nt, Human
agcugguccacuuuuguaucuuccagagugcccagaacuggguuguacacacagguggaugggcu

SEQ ID NO: 4134055 - RNA, 61 nt, Human
agcuggucuggcuacccagcgaaucccacagcagggagucccucugggagcaggacugacu

SEQ ID NO: 4134056 - RNA, 56 nt, Human
agcuggugaaccugaggcacagagagauuaagcgacuugcucagggucacacagcu

SEQ ID NO: 4134057 - RNA, 127 nt, Human
agcuggugcugcacacagugaaaugaguaauuagccaggaugauuuugauuaaaauggaacauaccaauuaauaaaugaaagugcuggcauacuugcuaauuuaacaacuuguucauggugccagcu

SEQ ID NO: 4134058 - RNA, 65 nt, Human
agcuguacguguggccguguauccauggcucugugugaguuugugugugcggccgcgugggaguu

SEQ ID NO: 4134059 - RNA, 74 nt, Human
agcuguagugaauagagcaugcugauuaauugaaugacaugacauugaauuauaagugugucuacuuuccaguu

SEQ ID NO: 4134060 - RNA, 56 nt, Human
agcuguauucucuuuguauuaauauccuuaccguguuucacagggcagaaacagcu

SEQ ID NO: 4134061 - RNA, 71 nt, Human
agcugucugaguaagagaauccuuguuuuuucaugaacacauccaaaggacucuucuccucaaacaaggcu

SEQ ID NO: 4134062 - RNA, 61 nt, Human
agcugugcugcagcuugcucuggcaggugggaaggaugccaggaaugggugacagucagcu

SEQ ID NO: 4134063 - RNA, 60 nt, Human
agcuguggcaggcuaggcuuuuuggcuauagaucuugguuacauugccccuuccacaguu

SEQ ID NO: 4134064 - RNA, 59 nt, Human
agcuguggugugugucacagaacccaagucaggacucuuggggacccagaaucacagcu

SEQ ID NO: 4134065 - RNA, 66 nt, Human
agcuguucucuggcgguggcuguuccugauucuggugguuucuaagcagcaggcuagggaacugcu

SEQ ID NO: 4134066 - RNA, 77 nt, Human
agcuguucuuacuuuguccuucaaggugugucauucuuuggcagauggccaggccggggacagaacugaagacagcu

SEQ ID NO: 4134067 - RNA, 63 nt, Human
agcuguuuccauaaaugagacacagaggccugaaaacucuguuuaguacucaggggagaaguu

SEQ ID NO: 4134068 - RNA, 61 nt, Human
agcuguuuucuugccguccuagaaucuauuuuguaagagcuuaguuggggggaaaacugcu

SEQ ID NO: 4134069 - RNA, 85 nt, Human
agcuuaaaaauucagcaggcaugcaaaagggucucagauugaagggacaaagugauuucccuguagccucugaauaacuuaagcu

SEQ ID NO: 4134070 - RNA, 73 nt, Human
agcuuaaauuuuaagugcaucugaucuuucaugcugcccaagacagcuaugaaggguguacaaaauggaggcu

SEQ ID NO: 4134071 - RNA, 72 nt, Human
agcuuaacugaaggcagaugugauuaauuuccucaucauugauugacauuaacuauauuagccaguuuugcu

SEQ ID NO: 4134072 - RNA, 112 nt, Human
agcuuaguugggugccucuggcucaaggucucucagauggcuacagucuuagcugugggccagugcugcagucaucugaagauuuuguuagaggauaaucagcuuucaagcu

SEQ ID NO: 4134073 - RNA, 58 nt, Human
agcuucaucuuuauguacaggauuucaagguccaaacuccuuugcaugcugugaggcu

SEQ ID NO: 4134074 - RNA, 88 nt, Human
agcuuccuaagggcagaacucuuagucuguuuuauuugcuguugcaccccaaaguccuagaacagugcuugacccaugccagguaguu

SEQ ID NO: 4134075 - RNA, 78 nt, Human
agcuucucagagguauccaugugccccuuacagaacccugcuguguaggacacagauaucucugagauuauccgagcu

SEQ ID NO: 4134076 - RNA, 89 nt, Human
agcuucucaugguuuguccugagacauuguucuuucaaagcucucugccuggauacaacugcucucagauaaguagucauggaaaagcu

SEQ ID NO: 4134077 - RNA, 77 nt, Human
agcuucugauuauauucacagugacagcuauacagagaaaagcuuuuuccaauaaagugucauuguuggcagcagcu

SEQ ID NO: 4134078 - RNA, 82 nt, Human
agcuucuugcugaaggaacuucccagaaacuuccccaauccuaaaacagaacuuuggaaugguaccuucaguugggaaagcu

SEQ ID NO: 4134079 - RNA, 80 nt, Human
agcuugacagaaaucacuguacccauuuaaauaaauucaaagcagagaauaugcuaagugugcaguaacgacuacaagcu

SEQ ID NO: 4134080 - RNA, 65 nt, Human
agcuugagguccugggaguucuagugugggauucugggccugagcucaccaggggcauccaagcu

SEQ ID NO: 4134081 - RNA, 55 nt, Human
agcuugcagaaaauaugaugugucuaaucugaagaauaacaaggcucugcaagcu

SEQ ID NO: 4134082 - RNA, 73 nt, Human
agcuugcugcugucuccuuucuggucuuggaugggagaaugagagagaaggaccagagaaaacacagcaggcu

SEQ ID NO: 4134083 - RNA, 89 nt, Human
agcuuggaggaccauacauuaaaugacuuucaucacaauuuuucuacuccaacuugaccugaagaucagugaauguguuuccccauccu

SEQ ID NO: 4134084 - RNA, 71 nt, Human
agcuuggcgagggagcucaguuggaagcggugaaacaagcaucauucuauuguugagcugccucgccagcu

SEQ ID NO: 4134085 - RNA, 69 nt, Human
agcuuggcuacaaauggguuaaaauauagugugaaauauuauacuuucuccuauuugauuuugucugcu

SEQ ID NO: 4134086 - RNA, 69 nt, Human
agcuuggugcaaaagugauugcgguuuuugccauuauuuucaauggugcaaucacuuuugcaccaagcu

SEQ ID NO: 4134087 - RNA, 69 nt, Human
agcuugguugaccagagacucucagaagccaguagguccuucuuuucaucccugguugcaacuugggcu

SEQ ID NO: 4134088 - RNA, 56 nt, Human
agcuuguaugugugugugugugguguguguauguugcauacaugcauuuacaugcu

SEQ ID NO: 4134089 - RNA, 83 nt, Human
agcuuguauucagaucuaagagauucaaaagcucuaauucuagcuguugugcaauuuaaaaucuuccuaggcugaaaugagcu

SEQ ID NO: 4134090 - RNA, 82 nt, Human
agcuuuacacuaguuuuugaguuauugaaugcaugagucagacuccuaagccuucgagauuuaaacacugauuguuauggcu

SEQ ID NO: 4134091 - RNA, 62 nt, Human
agcuuuacaucgaaguucaguccucagguagagggcuaaaucaaaggcuuucaaguaaagcu

SEQ ID NO: 4134092 - RNA, 125 nt, Human
agcuuuagcccaugaauuacuuaguuuuuacagucuauguugaauuaagacagcuuuguuauauucuggaaauugauuacaaaguagauacauugaugaauugggaaauuaaucggaucaaaguu

SEQ ID NO: 4134093 - RNA, 60 nt, Human
agcuuuaucagaggagucucuacuuuucuaaggauuaggucaauuccucuguuagaugcu

SEQ ID NO: 4134094 - RNA, 58 nt, Human
agcuuucuuauauuuuuugaaagacaugcaguucuuuucagacaaauuugaggaagcu

SEQ ID NO: 4134095 - RNA, 69 nt, Human
agcuuugcccgcuuugcuauccagcuaacagaaaaacggaggucagugaggaaugggaaugggaaagcu

SEQ ID NO: 4134096 - RNA, 92 nt, Human
agcuuugcugcuucaguugcuagaagggggaaccaaguggagaacgugauggccuauuaacccuucugccaagaaaacuggguugcaagguu

SEQ ID NO: 4134097 - RNA, 68 nt, Human
agcuuuguggcuuugcaagacuuaccugaucuaucaugucuacugaaggacuuagaagccucaagguu

SEQ ID NO: 4134098 - RNA, 75 nt, Human
agcuuuucaggggccaguaggagugauguacggggcaccuacuugggguucacaugcuggccccuuuauugaguu

SEQ ID NO: 4134099 - RNA, 76 nt, Human
agcuuuuugaaguggauagaggcccugcuuugaagcugaaaauccaacuuaaggcucccuuugccacuuguuagcu

SEQ ID NO: 4134100 - RNA, 126 nt, Human
aggaaaaaaagugcauguuuucuuuucccuuuuucaguucaguuuauuauaucuugacauucugucuuguaauugaauaguaauucuggauuuagaguggagaagaaagaaauuuaagucaguccu

SEQ ID NO: 4134101 - RNA, 78 nt, Human
aggaaaauuugugucuguggaacagagcuguuuucuauaagaagucaauuuauguucucagacccauagauggagccu

SEQ ID NO: 4134102 - RNA, 63 nt, Human
aggaaacucugagcggaccagcaaggccagauaauggccaauggugaagucucagugucuccu

SEQ ID NO: 4134103 - RNA, 87 nt, Human
aggaaacuugaguucuauucucacuuuugccacaaaacagccauaaaguuguuacagggauaaaugagguaggagcaaaaguuuuuu

SEQ ID NO: 4134104 - RNA, 73 nt, Human
aggaaaggcucacuuuagaucaugcauuccacugcugugcauggauuaauauggcuuugaaagggcuuuucuu

SEQ ID NO: 4134105 - RNA, 70 nt, Human
aggaaauggcucugggaaucuguugcuuggcuccucguccgucacccagcaggaacccaggccagaucuu

SEQ ID NO: 4134106 - RNA, 74 nt, Human
aggaaauuuuccgggcuggccucaggguccucgcuguacagcagcuuucaaacacucuggccagccgauuucuu

SEQ ID NO: 4134107 - RNA, 70 nt, Human
aggaacaaacagucaggacagucuggacucuauuauuucauuucuuccacacaacuaauuguuuguuucu

SEQ ID NO: 4134108 - RNA, 61 nt, Human
aggaacacugccuuuuauuuucccccuuacuccaugggaaaggagagaaggaggugucccu

SEQ ID NO: 4134109 - RNA, 68 nt, Human
aggaacaucuuuuuucucuaauuguggucauuggccuacuguuuaaaugaaaagagagugugguuucu

SEQ ID NO: 4134110 - RNA, 62 nt, Human
aggccaaggccagcaggggagcugaaauccaaaauuagcacacugaccugaagccuuggccu

SEQ ID NO: 4134111 - RNA, 63 nt, Human
aggccaaguagcuagcauugaauugauugugguuucauuucaguggauucucuauuaaggccu

SEQ ID NO: 4134112 - RNA, 65 nt, Human
aggccaagugaacaaugcuaguagaauacauuaaguuaucuuccuucaguguuguucauugguuu

SEQ ID NO: 4134113 - RNA, 130 nt, Human
aggccaauuuggaggaaggagauucauaaauccacgggauuauucuaacuuugucaguucaccagaguuaaagaaagauaauucgccuuggggaaaagucuauguaauuaccuacuuuuaaaaaggaccu

SEQ ID NO: 4134114 - RNA, 72 nt, Human
aggccacaccauuagugauuaaaggcagaauguucauccccagagccccuuucuuuugaucauugugugccu

SEQ ID NO: 4134115 - RNA, 82 nt, Human
aggccacagguccuggcaggcaagaggaagggaggccugagaacggccuuuguucccgggaucuccggaccagaugugcccu

SEQ ID NO: 4134116 - RNA, 75 nt, Human
aggccacauuguauuguggaaaguuagcauaugcccuccaaagccugguuucuuucccaguagaugugaaagcuu

SEQ ID NO: 4134117 - RNA, 66 nt, Human
aggguuugggaguccuuggagaguaagacauccuuagcacgcucugcaagggguucuuuaggcccu

SEQ ID NO: 4134118 - RNA, 58 nt, Human
aggguuugugaagacuuggccagcucuccguugacaauggccaaggaauagaagcucu

SEQ ID NO: 4134119 - RNA, 62 nt, Human
agguaaacauggggacugcuaccaaccccaggagcuagggagguacacuucauguuucaccu

SEQ ID NO: 4134120 - RNA, 87 nt, Human
agguaaacuguguggauaguuuuuuaguaugagucucaugcaauauuugggacauauuuguacuagaaaauuauucuuuguucaccu

SEQ ID NO: 4134121 - RNA, 78 nt, Human
agguaaagcuggacaggucccaggucccagcacaucugucccccuuggcagcuggcauaccugggcccggcucuaccu

SEQ ID NO: 4134122 - RNA, 61 nt, Human
agguaacuagcauuagcuucuggacuucuuugugccagggcuguguuaggugcgguuaccu

SEQ ID NO: 4134123 - RNA, 65 nt, Human
agguaagaacauguuucuguccuacgagauaacuuuguugcuccuaguuacagaaacucuuaacu

SEQ ID NO: 4134124 - RNA, 106 nt, Human
agguaagaucgccacauggucccuggugcaaacuucugauaaagagcaugugcuuaaggaacaugccaacguuacgaaggcaccugggccugcagccuaauuaccu

SEQ ID NO: 4134125 - RNA, 70 nt, Human
agguaaggcuguaagcuaagccacaaaucaaacuuaccgccauugcagucuuggcuuuauaguuuugccu

SEQ ID NO: 4134126 - RNA, 71 nt, Human
agguaaguugcccugaagaacgucccagauuuugaaauuaucuguuugcuucuucaugguaucacuugucu

SEQ ID NO: 4134127 - RNA, 61 nt, Human
agguaauaggguucagaauuauaggauggaugcuagaaauuauucugucucucucuugccu

SEQ ID NO: 4134128 - RNA, 71 nt, Human
agguaaucauccugucucaaacuucauccaugccauugguaaaaauguugaaugagacagaagaugagccu

SEQ ID NO: 4134129 - RNA, 58 nt, Human
aguucuuuugugaacauaugcuuuccguucucuuggguauaugccuacaaguggaauu

SEQ ID NO: 4134130 - RNA, 86 nt, Human
aguugaaaggccagacuuuggccaaauccccaaagaccaagagucagccuuucuuccuggguuucuggcagagaucuggagcaacu

SEQ ID NO: 4134131 - RNA, 71 nt, Human
aguugaaggccacugccugcaugugacaaacuagagauucuaguuaacacagucaggaguaacccucaauu

SEQ ID NO: 4134132 - RNA, 90 nt, Human
aguugaaguguggagggggaagagaacaaugaacagacuuuaaaauauaaaaugaucucucauguucuuaucacuucgacacauuccucu

SEQ ID NO: 4134133 - RNA, 76 nt, Human
aguugagggugggagagaaaugaaucuuuauguucuccuguuagagaauagcuuuuuuccuuccagcuuucacacu

SEQ ID NO: 4134134 - RNA, 67 nt, Human
aguugaucaaaucagcuacugaggcuugugcauucaucacauaguucucgugccuugguuuucagcu

SEQ ID NO: 4134135 - RNA, 56 nt, Human
aguugaugguguuuugguuucccaugggaaauauugucacuggagcauuagcagcu

SEQ ID NO: 4134136 - RNA, 84 nt, Human
aguugcuaccgguaaguagaggaguugaaauuuguauccaggacaacugacccaaaagucuguccuuuaacuuccaugcacgcu

SEQ ID NO: 4134137 - RNA, 73 nt, Human
aguugcuauguuaugaaccuuaaccuuugcauauaccucuguuuuauucaugggaggucacaacuugguaauu

SEQ ID NO: 4134138 - RNA, 66 nt, Human
aguugcucuauguuuguaaacagacaaucucuaaugucugauuauuuguaucacagaucugcagcu

SEQ ID NO: 4134139 - RNA, 65 nt, Human
aguugcuguuucauuuuccucauccccagucucaaggggaagccaggccaaugagaacagccacu

SEQ ID NO: 4134140 - RNA, 125 nt, Human
aguugcuucacugaugaaucuauugaacaauuacuugauauuuuaaacauacagucauucuuuucuuuaggaggaaaguguguuaaaaauuuaggaauuguuuuguaaaaaauaacuaagcaacu

SEQ ID NO: 4134141 - RNA, 84 nt, Human
aguugcuuucuuucuuaauuuuuaaggacacugaaacaauaaucacauuuuaggguuccuguuguauuaagaguugaaacgauu

SEQ ID NO: 4134142 - RNA, 91 nt, Human
aguuggauuggcaaacggaaguauuauuguauacuuuucaauagaguuagggaaaauauacuauacuacuuucuggaagcucaacccuacu

SEQ ID NO: 4134143 - RNA, 55 nt, Human
aguuggggugagaucaaggaagcccucccugaggagguggcaucucauuccaccu

SEQ ID NO: 4134144 - RNA, 72 nt, Human
aguugguggcugugaacaaagagaauaauuuuuuacaagggaguauuucucagcauuuuacauccucuaauu

SEQ ID NO: 4134145 - RNA, 127 nt, Human
aguugguuuuuugagauggagucucacucugucacccaggcuggagugcaguggcacaauuucggcucacugcaaccuccgccuccuggguucaagcaauucuccugccucagccuaccaaguagcu

SEQ ID NO: 4134146 - RNA, 79 nt, Human
aguuguauaguuucugcuauauccauauuaugaaauaccauguggccauuaacaagaauauaguagaucuauauguacu

SEQ ID NO: 4134147 - RNA, 90 nt, Human
aguugucaggaggccugagccccagguuuguugucugcccauuccguaagccagguaaucucucugggguucaguccuuguuugucaauu

SEQ ID NO: 4134148 - RNA, 67 nt, Human
aguugucauggcauguuccauguuaagccuuuaaauacgguuugacaaaggaccuugcuauuuaauu

SEQ ID NO: 4134149 - RNA, 129 nt, Human
aguugugggaaugagauaguuuggaugcuguccaaaauagcaugaaaggccuuugauccaguuuucaguagauuugacauuauuauggcaguaacuuggaacuauuuuauuguguucagccaguuaacu

SEQ ID NO: 4134150 - RNA, 64 nt, Human
aguuguguaauuagcaaacaaaucuccuuucuuggaggggauauacugucuguauuacauaacu

SEQ ID NO: 4134151 - RNA, 92 nt, Human
aguuguucaucuauucauggaaguggccauacagauaguuauccuagagagaugauaacuagaauggcuauuuugaggaauaagaagcaucu

SEQ ID NO: 4134152 - RNA, 66 nt, Human
aguuguuucauagcauauacguguguauguauaaacacauacauauguauauuugucagauucacu

SEQ ID NO: 4134153 - RNA, 70 nt, Human
aguuguuuuccaaggcagacacauuuuuugucuuuucuaaaauaucguaagauaugugucuguuacaacu

SEQ ID NO: 4134154 - RNA, 71 nt, Human
aguuuaagcccuggauagagagaacugcaguaagauuucaacaugcuucuugaccuucaggguuuuugacu

SEQ ID NO: 4134155 - RNA, 67 nt, Human
aguuuacaguugagguucauuacuucugguucucuuaguccuagagcaacugauucaacuagaaacu

SEQ ID NO: 4134156 - RNA, 76 nt, Human
aguuuacuuuugauuaugaggaucuuauguaauaauuauggauauaugacaggcaugagauccuaaaaguauuacu

SEQ ID NO: 4134157 - RNA, 56 nt, Human
aguuuaugucuuuacuucagcuaaugcaguauguagaaaaaagugaagacaagacu

SEQ ID NO: 4134158 - RNA, 80 nt, Human
aguuuauuacaguaacgugagagcaucuaacugaaggcuaauuuuauuuggauuuagcuuaucaacguagcugucaaacu

SEQ ID NO: 4134159 - RNA, 62 nt, Human
aguuucacauagcucagugcucucggcaauaugaccuuguuaccacguuguugugugaaauu

SEQ ID NO: 4134160 - RNA, 127 nt, Human
aguuucacugguaguuugguguuucucuuaucaguacguuuauuccugcauuauuuuuaccuauucaccucaaaugaagcagcguuguagagugacugcuagaaccccauauguaaauaguaaaacu

SEQ ID NO: 4134161 - RNA, 77 nt, Human
aguuucagaaccgcuaaaauaaauagucacucauuauggauuccucggacucauuuuaaaggcaguucuguugaacu

SEQ ID NO: 4134162 - RNA, 55 nt, Human
aguuucaguuugaaggaaaggccaaaguuuuguuggguccuucaaagcugggucu

SEQ ID NO: 4134163 - RNA, 57 nt, Human
aguuucauaaccucaagcuacagucaguacuuucuagacucuguagguaaugagacu

SEQ ID NO: 4134164 - RNA, 58 nt, Human
aguuucauauuaccaugucaccagagaguucuuucgaggugcugagugaaaugagauu

SEQ ID NO: 4134165 - RNA, 89 nt, Human
aguuucauguauuuaaguauaagcuauucuucaugauguuugaguaaugucaguucacucuagccuuaugcacaaauauguggguaacu

SEQ ID NO: 4134166 - RNA, 77 nt, Human
aguuuccccagggagagaauggagaggugagggcuuucaaaagccagcaucccuucagucuccauuaugcggagacu

SEQ ID NO: 4134167 - RNA, 64 nt, Human
aguuuccuugggcauuuguuuagggaaaacaauaacauuugaacaaauauuuucaaggaaugcu

SEQ ID NO: 4134168 - RNA, 59 nt, Human
aguuucuaacuggugcagugcugcaacauuaauaguugcucugugaauaguuggugacu

SEQ ID NO: 4134169 - RNA, 66 nt, Human
aguuucucuuaaucuaguaucuauaguacauaaugcaggccugaaagugcuagauuuugaggagcu

SEQ ID NO: 4134170 - RNA, 95 nt, Human
aguuucuuuaugauguguagcaguaugacaagaaauacagagguaggugaacacaccuggccuuuacuuguuuauagugcaauaauaugggagcu

SEQ ID NO: 4134171 - RNA, 55 nt, Human
aguuugaaggaguugaaucaccuugcauugcugggaaguucaugaucuuucugcu

SEQ ID NO: 4134172 - RNA, 81 nt, Human
aguuugacuucugauuguuggaggaugcuugugauuauuucagaaaaaagcauaguauucuuuaaaauuauuugucaaauu

SEQ ID NO: 4134173 - RNA, 59 nt, Human
aguuuggggcaagaggacagauggacgccacaggccaucugucuaaauauuuccaaauu

SEQ ID NO: 4134174 - RNA, 79 nt, Human
aguuuggggccaugcauccuugccccuugucuuugggagaccuccacguaaaggcuggcaaggcagauguguggaaauu

SEQ ID NO: 4134175 - RNA, 130 nt, Human
aguuugggguggaaccaguaucauagauguaaauucuauguucuugaguaagaagaaccccucuuaccuucuuugccuuugaauaguagaaaaaauaaugauacuucucuccuagcuccaccuccagccu

SEQ ID NO: 4134176 - RNA, 70 nt, Human
aguuuguuguuguucaaaauaugcagugucagauaugaucugacacugcauauauugaaguuggcuaacu

SEQ ID NO: 4134177 - RNA, 60 nt, Human
aguuuuaccuaagcuaauugcucuagguuuugauuaccuaaaauaagcuuggguaaaacu

SEQ ID NO: 4134178 - RNA, 81 nt, Human
aguuuuacuauucuuccuaaugguggucauguaaauuauagcuggacauauggccacagucucuggaaggaugucugaacu

SEQ ID NO: 4134179 - RNA, 82 nt, Human
aguuuuaggguacauaugcacaacaugcagguuuguuacauauguauacaugugccauguuggugugcugcacccauuaacu

SEQ ID NO: 4134180 - RNA, 76 nt, Human
aguuuuauggauguugcuaagaccaagacugggcauggacuuguccagggucuucgaggcagcaaugacaaagacu

SEQ ID NO: 4134181 - RNA, 62 nt, Human
aguuuucaccauuuaggaucuugggggccuuugcaugucuggccuaggauguggagaaaauu

SEQ ID NO: 4134182 - RNA, 67 nt, Human
aguuuucuccucugcaggcucauguuucggauuaacgcaggcggugugcuuugcagagcagggggcu

SEQ ID NO: 4134183 - RNA, 58 nt, Human
aguuuugauacuuucucuucauguucuuaaauucuagacuagggaggguguuaauacu

SEQ ID NO: 4134184 - RNA, 123 nt, Human
aguuuuggguuauguuuuuauguggacuguuguuguuugguuuauuucaauugaaaggaaaagaucaauagauaaagcuacauaaacuacuguccaugcaccaaaagcaucauaugcaaaauu

SEQ ID NO: 4134185 - RNA, 68 nt, Human
aguuuuguuugaaagucucuacagcaacucuuacauaauaucuguugcugaagagaaagaacaauccu

SEQ ID NO: 4134186 - RNA, 97 nt, Human
aguuuuuaugggggccuuauuugugccauuucagugguacuuuuccuaagugccucuggcuucugcaucagugggggaaaaaaccgugacaugagcu

SEQ ID NO: 4134187 - RNA, 83 nt, Human
aguuuuugcaaaucacaaauucuacaaucauaugauacguauaugaccuaucauagauacugggaauuuagguuugcagagcu

SEQ ID NO: 4134188 - RNA, 55 nt, Human
auaaaaaugugcacaugaaagggccuuauauacugcucuuuagucacauuuuuau

SEQ ID NO: 4134189 - RNA, 61 nt, Human
auaaaaccaaagcagcaguguuaugguaggagaacuuucaagcauccaugcuuuguuuuau

SEQ ID NO: 4134190 - RNA, 87 nt, Human
auaaaagauugauauaauuagauggggcuugguaacaaauacuauuacauuaugucugaaucuuauuuaaauauauuggccuuuuau

SEQ ID NO: 4134191 - RNA, 69 nt, Human
agggucucaaagcagaccuuuacccuuuagugugaauuagggguggggcagucaugccuuggguacccu

SEQ ID NO: 4134192 - RNA, 89 nt, Human
agggugaaaugacacuggugaaaagguguggcgaugugaauguccuuuguccugccauuugcuuuuucuccaaugugauugugagcuuu

SEQ ID NO: 4134193 - RNA, 64 nt, Human
agggugaggaugggaagggcccaccuccuccaggugagaagcugggcugcccaaccucugaccu

SEQ ID NO: 4134194 - RNA, 101 nt, Human
agggugaguuuuagacuuaaauugcuuuuaacuaaucagggcaagaucauuugauguugcucuuaauuccauuagacuugaaaguuuggggucuuuaccuu

SEQ ID NO: 4134195 - RNA, 62 nt, Human
agggugauaugguuacagugguauguaaacagggguugauaucuaccauaaccauucgccuu

SEQ ID NO: 4134196 - RNA, 58 nt, Human
aggguguacauuuguuggugaaggauugauucaucucccaucaacaccuugucagccu

SEQ ID NO: 4134197 - RNA, 72 nt, Human
aggguuaagaagagaucaaccaguagaaauguguauuuuccaguuucuugcugaaaacaaaucucuuucccu

SEQ ID NO: 4134198 - RNA, 62 nt, Human
aggguucaguccagggccugggacaggaggguauuuguguacagggcuuggggcugaagccu

SEQ ID NO: 4134199 - RNA, 129 nt, Human
aggguuggauaagugaggcaccuaaggaggugcccacucucaggcacugacccugccuacauguccaugucccugagaguaggugucucuuuagauuuggugcuuuaggcucuugacuucccuugcccu

SEQ ID NO: 4134200 - RNA, 79 nt, Human
aggguuguagugaggaguaaguaauaugucacacggguuuucccagacaugucuaaguacucaacaaauggcagccacu

SEQ ID NO: 4134201 - RNA, 127 nt, Human
aggguuucaccauguuggcugggauggucuugaucucucgaccucgugaucugccggccuuggccucccaaagugcugggauuacaggugugagccaccaugcccgggccaacagccucuuaacuuu

SEQ ID NO: 4134202 - RNA, 77 nt, Human
aggguuuccucauuguuuuggaagaacuuacucugauaauccaagugauuauguccaggagaacgacuauaaacucu

SEQ ID NO: 4134203 - RNA, 77 nt, Human
aggguuuccuggaccccugcuggccacugcuccaccucacaugcagaggugaggcccaguagggccuggucugccuu

SEQ ID NO: 4134204 - RNA, 63 nt, Human
aggguuucucuccaguguggacccucugauggauaaggaggucggagcuguagaugaaacccu

SEQ ID NO: 4134205 - RNA, 110 nt, Human
aggguuugggccuggaggaugcuguccugauguccccuuagcugagccuuaaaucucccacaacgguccagaaugaggcacauccaggccagcuccuguggccaaacccu

SEQ ID NO: 4134206 - RNA, 75 nt, Human
agguaaacaagaguccagaacuucagcuaguuuuuuggacacauagaacuaucacuuuuugguuuuuguuugcuu

SEQ ID NO: 4134207 - RNA, 59 nt, Human
agguaaauuauguuccauguccuuuggggugacaagaaaguggguaauaugauuucccu

SEQ ID NO: 4134208 - RNA, 77 nt, Human
agguaaauuuccuacugaagcaccauuaaagacaaguguguaugugucugugugguuuucagaauugaaaacuaccu

SEQ ID NO: 4134209 - RNA, 80 nt, Human
agguaacaagaagaaugauccugggaaggaugacuuuucuauugguuaauucaugggcccagugauaucauuaauuaccu

SEQ ID NO: 4134210 - RNA, 61 nt, Human
agguaagaaugcuuccuugccucuuucaagcuucuggugguuuucauggcauuccuugccu

SEQ ID NO: 4134211 - RNA, 81 nt, Human
agguaagacugcugcaaaagucauugugguuuuugccauuacuuuuaauggcaaagacugcaaggacuuuugcaccaaccu

SEQ ID NO: 4134212 - RNA, 73 nt, Human
agguaaggaguacaaaugcagguuuguuacauagguaaacuugugucaugggguuguuuuguacagauuaucu

SEQ ID NO: 4134213 - RNA, 71 nt, Human
agguaauauauuugcauuuuaaacaggcaccuuauccuagaggacugccugaugcaggaguaucagagccu

SEQ ID NO: 4134214 - RNA, 81 nt, Human
agguaaugccuucgaucagagcccugaugacagacuguggagugcaaguuuuuucaggugcucuguuugcucaguaauccu

SEQ ID NO: 4134215 - RNA, 94 nt, Human
agguaaugcuaaacaaugccuguauuaagauacguaguuguaaauuuccugguuuaaaagcauaugucuuauauauuuaaauuguugcuuaucu

SEQ ID NO: 4134216 - RNA, 73 nt, Human
agguaauguuucacaagcaacggguaagggagucccuaauuucuggguuuggaaacugguagaaugauuaccu

SEQ ID NO: 4134217 - RNA, 60 nt, Human
agguaauguuuuagauuacugcuggguucuucugggccuggcaacauaaagaacaaaucu

SEQ ID NO: 4134218 - RNA, 74 nt, Human
agguacacguguguaccuuuguacaaacaugcauacacacacaugcacacauacacagguacacauauguaccu

SEQ ID NO: 4134219 - RNA, 70 nt, Human
agguaccagcagaaucagugucuggugagggcuuccugguucacagucggugacuucuugcugcgugcuu

SEQ ID NO: 4134220 - RNA, 105 nt, Human
agguacuaaucacuagaaagcccucugagaauaugagcucuuuguuucauaaauaagaccaguaugcauuuucacaggauuuauaaugcuuugguaauuagaccu

SEQ ID NO: 4134221 - RNA, 84 nt, Human
agguacugaggucccaucaaugacuaauaaaauagcccccacaugguggcuguuuuauuauucauuugagggacgucaguaccu

SEQ ID NO: 4134222 - RNA, 63 nt, Human
agguagcccuuggggccuaugcaagcugcuauuguacuuagaaugggacccaauggguagccu

SEQ ID NO: 4134223 - RNA, 57 nt, Human
agguagcuuaugaaaugugaggggccaccacacagugccccacacuauugagcacuu

SEQ ID NO: 4134224 - RNA, 85 nt, Human
agguaggaggaaaauggcagaccugggcuggagaagaaccuucuccguaucccaggugugccuggcaguaugguuuccucuuccu

SEQ ID NO: 4134225 - RNA, 92 nt, Human
agguagguggggcaagaguaccuacagauguaaaugaaacagaaaaagucugcuucauuucucucuguagaccaucuuuaucugaccuauuu

SEQ ID NO: 4134226 - RNA, 75 nt, Human
agguagguucgucugguuuggguugcuauggcugauagacuccaccaggcagcaccaaagccgguaaacuaaccu

SEQ ID NO: 4134227 - RNA, 76 nt, Human
agguaguauaauguagccauuaagcauuuggguuugagauacagugccagauacauuaguaguuacuuguugaccu

SEQ ID NO: 4134228 - RNA, 59 nt, Human
agguauacaggagcucauuauaguuuucuuucuagaaaacuguugcuucaauguauccu

SEQ ID NO: 4134229 - RNA, 71 nt, Human
agguauauugaaugcuuacuuaauauaucaaaaauuguaugauaugggcaaaaauaggcaucaaauuaccu

SEQ ID NO: 4134230 - RNA, 82 nt, Human
agguaucugagugucucuugagcucaguucugaugucucugacaucaagugguucuccagguugcacucacaacugaugcuu

SEQ ID NO: 4134231 - RNA, 65 nt, Human
agguaucuucuuugcgccagguuuuuccuagguucuuuggguagaauuguaaauagaauauaccu

SEQ ID NO: 4134232 - RNA, 59 nt, Human
agguaugauaguccaaguuuccuggccagugcgccuucgaggacacccuaucaauaccu

SEQ ID NO: 4134233 - RNA, 75 nt, Human
agguaugcuaauugccagggucaccacuggaacuucucaccaggcaccagggugaccagcuggccuaguuugccu

SEQ ID NO: 4134234 - RNA, 89 nt, Human
agguauuagguuggugcaaaggcaauugcaguuuuugccauugaaaguaaugccaagaccacaauugcuuuugcaccaaucuaauauuu

SEQ ID NO: 4134235 - RNA, 61 nt, Human
agguauuauuagcaucucuauuuugcaggugaagaaacaagcccagagagguuaaguaccu

SEQ ID NO: 4134236 - RNA, 75 nt, Human
agguauugagggcuuuacagaaagagaacucuggguuacaggacucagucucuuccugcagggaucucacgaucu

SEQ ID NO: 4134237 - RNA, 83 nt, Human
agguauugugcaucaauuucccaugugucagagaaaggaacaguuuagccuugacaccaagaggucugcacacacaaauaccu

SEQ ID NO: 4134238 - RNA, 81 nt, Human
agguauuuuaagauucacaucuuuuggccuauucugaggccaaaugguuuuaguaccaaccagaagaugcuuaaagcaccu

SEQ ID NO: 4134239 - RNA, 70 nt, Human
aggucaagucccuugucuaaguucacacagguggacccaggugacacuucaaagaccagggucuuaacuu

SEQ ID NO: 4134240 - RNA, 92 nt, Human
aggucacacagcuagucagaggcagggccaagguucaaacagauuggcuagacucaugagcccuggcuucuaacuacuaugcuaugcuaccu

SEQ ID NO: 4134241 - RNA, 58 nt, Human
aggucacauggauaaugaucagaggacaagaguuuccugacuccuaucacaguguucu

SEQ ID NO: 4134242 - RNA, 76 nt, Human
aggucacgcgccuaugguccuggcgagaacgucuccaaagugggcagcauguggccugggacugguagugugaccu

SEQ ID NO: 4134243 - RNA, 66 nt, Human
aggucagacaccgucuauuuugccuggucucugacccaucagguaacaggcauaggcuucugacuu

SEQ ID NO: 4134244 - RNA, 65 nt, Human
aggucagagcaauguauugcuucugguuuguuaagcaauguguagcagugcauugcuucugauuu

SEQ ID NO: 4134245 - RNA, 78 nt, Human
aggucaguggcaaggcuggaauggaaccuaggucuuuaguuucuggcacagcauuuguuccgcuuugucaucugucuu

SEQ ID NO: 4134246 - RNA, 79 nt, Human
aggucauagaaagacauaguugcaagaugggauuagaaaccauaugucucaucagcacccuauguccuuucucugcccu

SEQ ID NO: 4134247 - RNA, 76 nt, Human
aggucaucaguguuguugauuggauagaaagacaaaagucaauuaccugcuaaucaauaaaggucauuucugaucu

SEQ ID NO: 4134248 - RNA, 55 nt, Human
agguccagaucccagcuucagccuaucuuuaggagcugcauggauaccugguucu

SEQ ID NO: 4134249 - RNA, 57 nt, Human
agguccagcucuauugaaaagauauaauagacuaucuuuagaauauaguaggacucu

SEQ ID NO: 4134250 - RNA, 67 nt, Human
agguccgauuucagugcugucauuuguaugaagguuuuccuuguacauugaaagucauuuaaucccu

SEQ ID NO: 4134251 - RNA, 78 nt, Human
agguccuuauggccugcccacaguaguuugggccugagugucacauugaauugggcaggucauguaacuagaggaccu

SEQ ID NO: 4134252 - RNA, 73 nt, Human
aggucguggacaaccaggcugggacccagggccagcugaaggugcugggugccaaccucugguggccauaccu

SEQ ID NO: 4134253 - RNA, 74 nt, Human
aggucuaacaauaguugugaaucaggacuagacaauaccaguuuugaaguaccugguucugacuccaaagaccu

SEQ ID NO: 4134254 - RNA, 64 nt, Human
aggucuccccauuaaaacuuaaagaugguuacauauuuuauucugaguuaaaauggagagucuu

SEQ ID NO: 4134255 - RNA, 102 nt, Human
aggucuggagcaggaugaaacucugcaucuccaacgaguucccaggugaagcugauccugcuggucugggagcacucuuugggaagcaccuguucuagauuu

SEQ ID NO: 4134256 - RNA, 81 nt, Human
aggucuggccucuuuccccagcuguagaacaaaaggcugucugcaggcuucagccuagagcuggaggugaggaaggaaccu

SEQ ID NO: 4134257 - RNA, 74 nt, Human
auaaaguggaaggauccacuaaguucuuguucucgggcuagcuaugggacuuuugguggaucaagccauucugu

SEQ ID NO: 4134258 - RNA, 62 nt, Human
auaaaguuacucucacugagaaugguauauuauuugccauuaucuauguagaaugauuuuau

SEQ ID NO: 4134259 - RNA, 112 nt, Human
auaaauaauccaaacuaacccuaaaauuauaccaaaaaauuaaugugauuaggaugguaauucacagucacauaguguuuuggaaucuuuguggugaaaauaaauuguuugu

SEQ ID NO: 4134260 - RNA, 61 nt, Human
auaaaucagcauagcuguguuucaauaaaacuuuauugacaaaaacaggugguugaaguau

SEQ ID NO: 4134261 - RNA, 67 nt, Human
auaaauccucaguuuucuaguauggcauuucaccacugaugcugaaauuagaacauugagggcuugu

SEQ ID NO: 4134262 - RNA, 61 nt, Human
auaaaugaacauucacagagcuuuuaucacuugucacuguguucugugauuuuacauuugu

SEQ ID NO: 4134263 - RNA, 78 nt, Human
auaaauguuuguugaaugaauaaacgagccccauuugcagaaggguauccacuaugcauucauucaaucagcuuuuau

SEQ ID NO: 4134264 - RNA, 75 nt, Human
auaacaugauguuaacuugguagucuaaguguuuagcuaucaagccggauuccuuaguagaccaaaucuuguuau

SEQ ID NO: 4134265 - RNA, 78 nt, Human
aggcgcaggcaugucucugcugucauugccucccucucucuugcuccgggcccccucagcacaggccugucuuugucu

SEQ ID NO: 4134266 - RNA, 58 nt, Human
aggcgcagguggauaucaugugccuauggauagaggcgcagcuggauaucaugugccu

SEQ ID NO: 4134267 - RNA, 69 nt, Human
aggcggacuggacucucaggcucacaucucaaauauggcuugugggugugguuguccucucuagagccu

SEQ ID NO: 4134268 - RNA, 56 nt, Human
aggcggagcucaguguguccaauaaaacugucuugguagagcgccuguauccgcuu

SEQ ID NO: 4134269 - RNA, 95 nt, Human
aggcgggaggaaaaggcaggugcaggugggcguggcgagaaggcgcaccuuguagucuuccccggcgugcgcgccccgugacuccuuccccgccu

SEQ ID NO: 4134270 - RNA, 57 nt, Human
aggcgggagggauguuguagacuccucacuccaugagcauacaguauuuucucgccu

SEQ ID NO: 4134271 - RNA, 74 nt, Human
aggcggggaggggaaugcugaauaauaagauuacucagagcuacuaacgaucuugauucaguaauuuucugcuu

SEQ ID NO: 4134272 - RNA, 66 nt, Human
aggcggguggaucaccugaggccagaaguuggagaccagccuggccaacguggugaaaccccgucu

SEQ ID NO: 4134273 - RNA, 93 nt, Human
aggcgguuaagccaugggacagggccgcagauggagacugcucaaggucaaaggggucuccagcugggacccugcaccugguucguagccccu

SEQ ID NO: 4134274 - RNA, 84 nt, Human
aggcguggacaaaguuaaaggaaguuccagggaggggguuugauuuucuggucccugggacggccuuuuggagaguccugcacu

SEQ ID NO: 4134275 - RNA, 78 nt, Human
aggcuagagugcaguggcagauccuagcucacgacaaccuccaucuccugggcucaagcgauucuuccgccucagucu

SEQ ID NO: 4134276 - RNA, 85 nt, Human
aggcuaggauuacaaagguaguuuugucuauaaauuaucaagugguuguucauaugacauaaaaucauuuuuguucuccuguccu

SEQ ID NO: 4134277 - RNA, 74 nt, Human
aggcuagggccauggcuggugagcaauggauccagaugagaaccaaaggucgaugacaccaguugucugagccu

SEQ ID NO: 4134278 - RNA, 71 nt, Human
aggcuaugagcagagacuucaagggcagggccagggaacauuccugaacucugggucucugcucugggccu

SEQ ID NO: 4134279 - RNA, 78 nt, Human
aggcuaugguggggccagcggcauggaagucaucacugcuguaauggucaaccagagccugcugagccccauuaaccu

SEQ ID NO: 4134280 - RNA, 60 nt, Human
aggcuaugguggggccagcggcaugggaggcaucaccgccaucacguucaaccaaagccu

SEQ ID NO: 4134281 - RNA, 129 nt, Human
aggcucacaccucauguccuuuuacucaggucuugggacgacagagcccagcuugcacauggagccaggaggcagaauguccaagcugggccccccacgggaccaugaacaagggacccuugugugccu

SEQ ID NO: 4134282 - RNA, 129 nt, Human
aggcucagagcuagcccuucuggccccaccggucucaucuguccccacaucagucugaggcccugcuuggaaccucaggccagggggcggccagggacgcggggucccagccaggcgggcucccaugcu

SEQ ID NO: 4134283 - RNA, 56 nt, Human
aggcucagaggugagcaucugcuaacaaaugucagugcagucccauuucugagccu

SEQ ID NO: 4134284 - RNA, 77 nt, Human
aggcucagccugggccuagagcuggugaccucaaaucucggccuuuguuggcuccccuaggacuguaggcugcgcuu

SEQ ID NO: 4134285 - RNA, 59 nt, Human
aggcuccaagagguuaagucacuggcauuuaugcuuauagcuugugaguuuuggagcuu

SEQ ID NO: 4134286 - RNA, 65 nt, Human
aggcuccaggccucccugcaugcccucuacgccccauccaagggaccugacagaaccuggagccu

SEQ ID NO: 4134287 - RNA, 55 nt, Human
aggcucgcucaucucagccgccagaagugucaucccagggaaggugagcgaggcu

SEQ ID NO: 4134288 - RNA, 125 nt, Human
aggcucugcgucugugcccccaaguagucagagagcccagaucccacccuggagaaaugggaagugucccaucacauccacagggaugccugcggcuucuaguuucuggcccaagaccaggacuu

SEQ ID NO: 4134289 - RNA, 69 nt, Human
aggcugaaguguaguggcucacugcagccucaaccacccugggcucaagugauccuccuaccucagccu

SEQ ID NO: 4134290 - RNA, 77 nt, Human
aggcugaccucaagugauccacccgccucaaccucccaaagugcugggauuacaggcaugagucacugcaccggucu

SEQ ID NO: 4134291 - RNA, 82 nt, Human
aggcugaggcugagggaugggggcagcagguccucuuucagagggggcucugggucgugucuccauguccacaccaaagccu

SEQ ID NO: 4134292 - RNA, 58 nt, Human
aggcugccaggcauauggccucuuugugcccacacaauggaggcccugucugugcccu

SEQ ID NO: 4134293 - RNA, 62 nt, Human
aggcugccuagguucaacaccugguuccauuacuuaccaggugugugagcuugggcagaccu

SEQ ID NO: 4134294 - RNA, 78 nt, Human
aggcugcgcuccugccacucugggugggccuggcagccuaggcagccuaggcagccuggggugcgcuagaggcaggcu

SEQ ID NO: 4134295 - RNA, 100 nt, Human
aggcugcugggcggaggcugggugaccaaggaagaggggagccagggcugggccugagggcugucugaagcuugggagucacggucucagcucagcaccu

SEQ ID NO: 4134296 - RNA, 68 nt, Human
aggcuggaaagggaccagagugcguugugaauaagcguaucuuuuguauucuguuccuucuacugccu

SEQ ID NO: 4134297 - RNA, 78 nt, Human
aggcuggaaauaaaaguaggaaugaaacgcauggaaguacccaguguccaugcaccucaccucuacuuuauccagcuu

SEQ ID NO: 4134298 - RNA, 85 nt, Human
aggcuggagaaggaucagaggaucagggacaguuucaguagcaugcacuaaacugaauuccucuuucuuauccucucagcagcuu

SEQ ID NO: 4134299 - RNA, 66 nt, Human
aggcuggaguacaguggcuauucacaggugcaaucauaguacauuauaaccuugaacuccuggccu

SEQ ID NO: 4134300 - RNA, 73 nt, Human
aggcuggagugcaguggcgugaucucagcucacugcaaguuccgccuccuggguucacgccauucuccugccu

SEQ ID NO: 4134301 - RNA, 62 nt, Human
aggcuggagugcaguggcgugaucucagcucccggguucacaccauucuccugccucugccu

SEQ ID NO: 4134302 - RNA, 73 nt, Human
aggcuggagugcaguggcgugaucucagcucgcugcaagcuccgccuccuggguucacgccauucuccugccu

SEQ ID NO: 4134303 - RNA, 56 nt, Human
aggcugggcuccgcccaacuccacucacuggagcuuguccuuggagcccagagccu

SEQ ID NO: 4134304 - RNA, 99 nt, Human
aggcugucauaauuuggaauggaauagagauugcuaacucaaucuuagcuggcaauccucuuuuauaucagugacaugacaaaacaaaacuuucagcuu

SEQ ID NO: 4134305 - RNA, 82 nt, Human
aggcugugcuuccaggauggcagcuggguaaaagcauuccuacuuuuucagcagcauacacaucauguugauggcaaagccu

SEQ ID NO: 4134306 - RNA, 58 nt, Human
aggcuguguuuaagugguaauguuaauggaauuauccguugcugcuggagcacugucu

SEQ ID NO: 4134307 - RNA, 81 nt, Human
aggcuguugaggcaauuuacugcuucucaauaauuuagucucaugaaaaaguacaguggcaguaacauuccacaauagcuu

SEQ ID NO: 4134308 - RNA, 105 nt, Human
aggcuguuuugguuaugacagucuuauaguacaauuugaagucagguaauaugauaccuccagcuuuguucuuugugcuuaggauugucuuuggcuauucaguuu

SEQ ID NO: 4134309 - RNA, 55 nt, Human
aggcuuaacuacaauuuuugccaugaauuuaagcuggcauuuuuuaguugagcuu

SEQ ID NO: 4134310 - RNA, 119 nt, Human
aggcuuagcauuuuuauuucaucuucuguuucucuguccuugguuuuuuuaaaaaauguauagaacacuaaauauagacagaugacagggauacagaaaggaagaauuuaauguaguuu

SEQ ID NO: 4134311 - RNA, 68 nt, Human
aggcuucaggagacucagcauccaggaugggaaagaccaucaaagauaagauguggggucuccagucu

SEQ ID NO: 4134312 - RNA, 57 nt, Human
aggcuucuaggguuggcagcggcagguuuucauuagcacguccaggccugaagggcu

SEQ ID NO: 4134313 - RNA, 64 nt, Human
aggcuugcagaaugaaugcuucuucaggucggagugccuuaauaagcauucauucagcaagccu

SEQ ID NO: 4134314 - RNA, 75 nt, Human
aggcuugcugagccugcccagcccuguccacuucacacagcaaguuaguguucgcugggacaggcuucaaggucu

SEQ ID NO: 4134315 - RNA, 80 nt, Human
aggcuuggaaaacaggguuucacccacacacaccauguuguaaaaaggugccauguuuugcuucucuguuucccaacccu

SEQ ID NO: 4134316 - RNA, 64 nt, Human
agguggcagaccauccucccuauuggccgaucaauuuggucaacagagguaaugguaaccaccu

SEQ ID NO: 4134317 - RNA, 66 nt, Human
agguggcagagcagagugauuguucuggccucuguugccagaugggcuaacucugcucuguaacuu

SEQ ID NO: 4134318 - RNA, 57 nt, Human
agguggcucacaccgguaaucucagcacuuugggaggcugagguggguggaucaccu

SEQ ID NO: 4134319 - RNA, 57 nt, Human
agguggcucacgccuguaaucccagcacuuugggaggccaacgcaggcaggucaccu

SEQ ID NO: 4134320 - RNA, 76 nt, Human
agguggcugucuuauguauauuuggaacguacaucugucuugguguauuuuuauuaauccauguuuauugucaucu

SEQ ID NO: 4134321 - RNA, 59 nt, Human
aggugggaagugagcagcgggaugaaguugcaagggugucucugcugcgcaucccacuu

SEQ ID NO: 4134322 - RNA, 56 nt, Human
aggugggacgugggaggaugagacaaguaaggacucucugagcccagugucccccu

SEQ ID NO: 4134323 - RNA, 90 nt, Human
aggugggcgaggacugagccucgguguuuuuuugggugguggcuggaaacagccccucucccacguggcagaggcucagccuggcucccu

SEQ ID NO: 4134324 - RNA, 66 nt, Human
agguggguggaucguuugagcucaggaguucaagacaagacugggccacauggugaaacccuaucu

SEQ ID NO: 4134325 - RNA, 64 nt, Human
aggugguaucaucacaaugcaucuagcauccagccuucccagauguacaggauggugcucaucu

SEQ ID NO: 4134326 - RNA, 88 nt, Human
agguggugcuggaaguggacuggagcugagagcauggguaaagggaagucuuuccugcgcucucaguucacacaaccacuucucuccu

SEQ ID NO: 4134327 - RNA, 57 nt, Human
aggugguucaugccuguaaucccagcacuuugggaggcugagguggguggaucaccu

SEQ ID NO: 4134328 - RNA, 57 nt, Human
aggugguucaugccuguaauucuagcaguuugggagacugagguggguggaucaccu

SEQ ID NO: 4134329 - RNA, 61 nt, Human
aggugguuuuuguacuggguccaauugucuugauaaauaguggaacuggugaaaaccuccu

SEQ ID NO: 4134330 - RNA, 129 nt, Human
aggugucaguggcagguguuucguggugcuaccggacaggcagaaugaccgaccucgccgggcgaccgcucccagccgcgagaauccuguauucguuuaucugggagugaccauccucgcuacucagcu

SEQ ID NO: 4134331 - RNA, 85 nt, Human
aggugucgaagcaaaauuacagaauguaagguaguuaaucugguggacagugagcacuuugugcauuucugaagccacgauaccu

SEQ ID NO: 4134332 - RNA, 79 nt, Human
aggugucuaggcaauauuagacuuugucuuuuuaauuuucauauaaaaauuugaaguauaaguaauugcuuucaggccu

SEQ ID NO: 4134333 - RNA, 62 nt, Human
aggugucuggaacuuuuuaacaagcugcuggagaacccagagcaugaauaaaaguuacacuu

SEQ ID NO: 4134334 - RNA, 62 nt, Human
aggugugaagucacugaguaaauccaaaugccuuauuggauuauccagugcacuucacagcu

SEQ ID NO: 4134335 - RNA, 68 nt, Human
aggugugaauuuuccagauaagcccuguugcuccagaaaagccacaaauacuggaaauuucuccaccu

SEQ ID NO: 4134336 - RNA, 55 nt, Human
agguguggaagcugggauagaauagaguuaguacucucucacaguuuccuugccu

SEQ ID NO: 4134337 - RNA, 60 nt, Human
agguguggcuugaagucucuauggggacagccccuauaaauggagacucagcccaugccu

SEQ ID NO: 4134338 - RNA, 75 nt, Human
aggugugucugaaguucuuaaauuaguuucucaaucuggggaaguguuuuaguucuucagguuacaauuauaccu

SEQ ID NO: 4134339 - RNA, 66 nt, Human
aggugugugugugugugcauguguguguauguguguguguguaugcauacacacauagaagugccu

SEQ ID NO: 4134340 - RNA, 66 nt, Human
agucugucaugaggcaggagugcaguggcacgaucucaguucacugcaaccuccgccucccagauu

SEQ ID NO: 4134341 - RNA, 84 nt, Human
agucugugccacauggccuaauagagaagaauuuaauauaaaaauuccuaguaauuuaucuuuguuuccccauaaugguuugcu

SEQ ID NO: 4134342 - RNA, 62 nt, Human
agucuuaccgcaccucaugaacuggcugaaggcuuuguaguuggugagcgugugguaauccu

SEQ ID NO: 4134343 - RNA, 77 nt, Human
agucuuacucuguaccaguagugcccagggacauuuguuuuucagaauucuuggaaacauuacuggacagugagguu

SEQ ID NO: 4134344 - RNA, 55 nt, Human
agucuuccugggggaagaccacgggaguccacaagaggcugccuccugggagauu

SEQ ID NO: 4134345 - RNA, 84 nt, Human
agucuugcucugucaccgaggcuggagugcaguggcgugaucuuggcucacugcaaccuccgccucccagguucaagcaauucu

SEQ ID NO: 4134346 - RNA, 75 nt, Human
agucuugguaugguaaaaauauggacauguuuggaacauggaacuguuacuaaucuuuucugcuauuuuaaggcu

SEQ ID NO: 4134347 - RNA, 64 nt, Human
agucuuuacuaaacagaccaccauucuuuuuccuugcaaauguggcucuguugagguauggauu

SEQ ID NO: 4134348 - RNA, 56 nt, Human
agucuuuauugucgucacuagaagggccacagggccacagucaugacgauauggcu

SEQ ID NO: 4134349 - RNA, 56 nt, Human
auccacaggguguguuaagauguaauuuuaaugcuuuugucauucuuucuguggau

SEQ ID NO: 4134350 - RNA, 80 nt, Human
auccacgucccuuugcuggggcuggugaggcaggcuccagaggggccuugcccuacaaccaguagcccucggauuuggau

SEQ ID NO: 4134351 - RNA, 84 nt, Human
auccacucacuagagguagaucccugauucacugauaugaaaagaaguggauaacagguaaauaauucauagugagguuuggau

SEQ ID NO: 4134352 - RNA, 62 nt, Human
auccagaggcacagagcccuaggagcugguagccccagugccuaggcugugccucuagugau

SEQ ID NO: 4134353 - RNA, 57 nt, Human
auccagcagaaaccuccaucuagccucagagucagggaaagagggaaucaguuggau

SEQ ID NO: 4134354 - RNA, 64 nt, Human
auccagcauggcagccaugagccacauguuacuauugagagcuuuauauauggcuggucuggau

SEQ ID NO: 4134355 - RNA, 64 nt, Human
auccaggaguccugaaaucugaugacuuuuauccucacaagguuauguuaggauucaaugagau

SEQ ID NO: 4134356 - RNA, 124 nt, Human
auccagggaggauuugugaagggaagauggugaagcugaggauacaugaagccucccucaaccagguaggcuucauguguccugggugacccaggccuuugcuccccuccuuccucccucggau

SEQ ID NO: 4134357 - RNA, 128 nt, Human
auccaguggacacaauucagucauuaagucacacugcugggaacucuauaugccauuuuauuccauaucaaacaguuguuuccuguagguagacucaugcugcaagcuguccuaaauguuuuugguau

SEQ ID NO: 4134358 - RNA, 57 nt, Human
auccauuauugggccaauaaagaaauuagcacucaaauauuugcucaauaaguggau

SEQ ID NO: 4134359 - RNA, 61 nt, Human
auccauugguugacuugggcuuaugacuugguugggucaauagcauagcaauuaaugugau

SEQ ID NO: 4134360 - RNA, 86 nt, Human
aucccacagugaguagcagaguuggacuaugcaauagauuccugaaccucuuuguauaucacaagacugugcuaggugcuagggau

SEQ ID NO: 4134361 - RNA, 57 nt, Human
aucccacccacacuccugucccugcaguagggaggggcagcaggagauggguggggu

SEQ ID NO: 4134362 - RNA, 57 nt, Human
aucccaggaggcugcgcaguuaucagcaugaaaagcagcugcaggccucccagggau

SEQ ID NO: 4134363 - RNA, 91 nt, Human
aucccauccuaagggucugcuuucugggaacucuuuuggucucaacugacauucucugaaagcagagccuaaagaauaugauaucagggau

SEQ ID NO: 4134364 - RNA, 62 nt, Human
aucccuagagugauauuucucacaagauuguccuucagucuucugaauaagaaucacuggau

SEQ ID NO: 4134365 - RNA, 115 nt, Human
aucccucauggacaggcccaaacccaccucuuuuucagcaacuuccggaaguccaucagcuccuuccugaggucugaaaaaggagcaggaaugaggccucagucccaggugggau

SEQ ID NO: 4134366 - RNA, 92 nt, Human
aucccugaagaucuuguuagaaagcagauucugaugcaguaggucuaaggugagaccugagauucugucuuucugaugagcucccaggugau

SEQ ID NO: 4134367 - RNA, 55 nt, Human
aucccugaaugcuccugacuggucauacccaacacauaggucagcuucaugggau

SEQ ID NO: 4134368 - RNA, 63 nt, Human
aucccuguguguguguguguguguguguguguguguacuugcauaaaaaccacauacaaggau

SEQ ID NO: 4134369 - RNA, 87 nt, Human
auccgcacuggccaggcuggguggagggaggacuccagacagacccugcuaccugccgcccuccacacagccccuggccugcagggu

SEQ ID NO: 4134370 - RNA, 80 nt, Human
auccggaauucuuuuaauguucugaaguuucaugcuuuucccugcugagccuggaagcucucuacauaagaaugcuggau

SEQ ID NO: 4134371 - RNA, 112 nt, Human
auccuaaaagcaagcucgugugugauguuucauaauauccagagauuuuguagaaaaacaaauugucaguuaucugggauaaugaccaugaagcaugugcuuauuuaagggu

SEQ ID NO: 4134372 - RNA, 76 nt, Human
auccuagauggagaguucacuucuaaguuguguaauaacauuguuuucaaguuuaguggugguguuccauggggau

SEQ ID NO: 4134373 - RNA, 93 nt, Human
auccuauaaacuaguagugagugcaauaaacuguuuucuaguaauggcaguuccuagaggacguuguuagcucacaagauggaauuguaggau

SEQ ID NO: 4134374 - RNA, 73 nt, Human
auccuauguuauuauuuuucaguuaucuguaauauuuuggucagaugugcuuuauuaaguaaaaauauagggu

SEQ ID NO: 4134375 - RNA, 65 nt, Human
auccucuucucaaaucauggugaaauaaaauggauagacuucaucagaggagcaaaagaggggau

SEQ ID NO: 4134376 - RNA, 79 nt, Human
auccugacuuacuuuguuugcacuucaccuguagcgacagcaucagugagguggagaacagggauagaguccuagagau

SEQ ID NO: 4134377 - RNA, 88 nt, Human
auccugagcugcuucugaggcagagggcagaccagacuccucuggcaccucugcuucucugcuuuccucuugauuuagcagccaggau

SEQ ID NO: 4134378 - RNA, 113 nt, Human
auccugccauuugguccagaaagccagugcacaaguagaggaggggacauagcuuagccacaaagugauggagcuuccucugcuagcccuuugugagccaaugguaaaugggu

SEQ ID NO: 4134379 - RNA, 66 nt, Human
auccuggggaccuuccaggucucguggggacugagauaacacugaugcccuggaggucuucggggu

SEQ ID NO: 4134380 - RNA, 55 nt, Human
auccugucucuacccaucggcuccuacagcaggacagagaggcagaggcuggggu

SEQ ID NO: 4134381 - RNA, 72 nt, Human
auccugugaggauaagcccuugggaggcuccacuuuguccuccaguaacaaguggacuagucuuuacaggau

SEQ ID NO: 4134382 - RNA, 66 nt, Human
auccugugccacgucgcuucuucucuucugauuguagcagugaugagguuuugauuggcacaggau

SEQ ID NO: 4134383 - RNA, 69 nt, Human
auccuguguucugagagcgagagagcagcuuagccggcaaauccuuaaauccuucagagauuacaggau

SEQ ID NO: 4134384 - RNA, 56 nt, Human
auccuuaaaggaauucugauuucaaguuugaaauaagaaccauccuuuguguggau

SEQ ID NO: 4134385 - RNA, 74 nt, Human
auccuuagagcccuagagaaccagccugugccaaguaccuguguggcgcgggcugggucucuggccaacaggau

SEQ ID NO: 4134386 - RNA, 57 nt, Human
auccuugcucagagaaggucagucuuuuguucuauucuggccuucaacugauuggau

SEQ ID NO: 4134387 - RNA, 55 nt, Human
auccuuggaugugucuuuuugugauacauauuucuuuaggguacauaucaaggau

SEQ ID NO: 4134388 - RNA, 75 nt, Human
auccuugggcuaagcauuaccuuauauuaaaguuuugaauacauuaauccaauggcacaauguauggccaaggau

SEQ ID NO: 4134389 - RNA, 98 nt, Human
auccuuuuugcucuauuugaauaauuuugagagccuggaaaaucuggacauauuuucugaagguuaaggaauuaggaaagcaaaagagaaucugggau

SEQ ID NO: 4134390 - RNA, 74 nt, Human
aucgcauagagguccugcucaaaauguagauuucuggguccuaaauuaaucugcugagucagaccucuggggau

SEQ ID NO: 4134391 - RNA, 61 nt, Human
aucgcuggguggccgcggcggcgacagcguccugcgccucgccagccuguuuaccuguggu

SEQ ID NO: 4134392 - RNA, 61 nt, Human
aucgguuuaaguucuugcuuuuaaucauuuuggguauauaccuagaagcagaauugcugau

SEQ ID NO: 4134393 - RNA, 69 nt, Human
aucgucugaugauggggccauaacagccuggacacugaucacaggugugugccuuaucaaaugggugau

SEQ ID NO: 4134394 - RNA, 72 nt, Human
aucgugccuuagcaaacaucuucgugugagcuacuucgugagcccacauguauguguuuguugaggggcgau

SEQ ID NO: 4134395 - RNA, 82 nt, Human
aucuaagucuauuucauccuugaauaaaaugggaacaauaguaaucauaggauuguugcaaggguuaaaugagaaaauagau

SEQ ID NO: 4134396 - RNA, 84 nt, Human
aucuaauuucuccacuucauccagggucaccagggcccccauguuagcccugggacacagugugugaagugccagagcauagau

SEQ ID NO: 4134397 - RNA, 69 nt, Human
aucuacagaauucaacaaaugguuaaugacauuuucuacguaccagacacguuucugaauucugaagau

SEQ ID NO: 4134398 - RNA, 65 nt, Human
aucuaggcacuucaucaagccauggagucaggaaacaaggaagaauagaugaagcugcuggggau

SEQ ID NO: 4134399 - RNA, 85 nt, Human
aucuauguaauugucaaaaauugcaauugucauucaauacacauguuugagcacacaaugagcuaacuuuugggaauucaaagau

SEQ ID NO: 4134400 - RNA, 127 nt, Human
aucuauuuauauuuuuaucaucuuaaccauuuuuaaggguauaguucaguaguguuaaguauauucacauuguugugcaauuauaguuuuuuuaagaaaggaaucuaauuuaucaaugaauguagau

SEQ ID NO: 4134401 - RNA, 56 nt, Human
aucucaaaugauuacaccaagcagccggcaagacccgcuuugggucauuuagagau

SEQ ID NO: 4134402 - RNA, 69 nt, Human
aucucaccaaguuauuacgagaugcaaacuuuaaacuguaacuucuauguaaaugugaguuggugggau

SEQ ID NO: 4134403 - RNA, 78 nt, Human
aucucacuucuucucuccuggcuuccacagaggaugaaaccaggcauuccuuggccuaaggagaagagggagagggau

SEQ ID NO: 4134404 - RNA, 66 nt, Human
aucucagcacuuuggaaggcugaugcgggaggaaugcuuacucaguuacucuugagaggcugaggu

SEQ ID NO: 4134405 - RNA, 89 nt, Human
aucucaggccauuuguggcaagugcuuccccaaccacaguuguuauacaacacuacaacucugugugcacuuguuagaucucugagcau

SEQ ID NO: 4134406 - RNA, 58 nt, Human
aucucaggcccuagugaccucaccuauaaauuuggggugggcagugauaggccuggau

SEQ ID NO: 4134407 - RNA, 55 nt, Human
aucucagggcuggagcccuggaaucuguauuuuuucaaagccucgagaccuggau

SEQ ID NO: 4134408 - RNA, 104 nt, Human
aucucagggguuucaugaucucucugaaauuguuaguaaaaaugaauguguauauacguuuuuauaggaagaauuucccuagcuuucaacagaucccuuaagau

SEQ ID NO: 4134409 - RNA, 57 nt, Human
aucuccaggccuuucccaucuuacauaaaucugagauucauugugggucuuggagau

SEQ ID NO: 4134410 - RNA, 74 nt, Human
aucuccaggcuuuucucauggagucacuguaacagcuuucccauugaucuccugucuugagucuccuccgagau

SEQ ID NO: 4134411 - RNA, 79 nt, Human
aucuccaugcguguaggaacagugucuaucuuaucaguauauucccucugucuaguagaguguccaacacauaggagau

SEQ ID NO: 4134412 - RNA, 68 nt, Human
aucucccaaauuagccucuugauucugucacaaacuuucagaacucaaaggcuugugguucugggaau

SEQ ID NO: 4134413 - RNA, 64 nt, Human
aucucccaauucccugauaaauuauuuuccacacuucuucaaguugacaggaaagaggggagau

SEQ ID NO: 4134414 - RNA, 77 nt, Human
aucucccgugcccagcccacaagcccaucuggggucccgagugccaggaacaggcugaugggcaggaaguggggggu

SEQ ID NO: 4134415 - RNA, 75 nt, Human
aucuccucuggacgcuggggugggaggcacuccuucagggugaggccgcacgccccggagugcauguggggaggu

SEQ ID NO: 4134416 - RNA, 82 nt, Human
aucucuaaaauuagcaugauaauagcagguaaacugauacuaagauuaucuguuuauuguuacugucagaauuaaaugagau

SEQ ID NO: 4134417 - RNA, 112 nt, Human
aucucuagaaguguuaaaacugcagauuccugggcccugucucagagcuccuaaacgggaucucugggaacauggcuuggaauccacauguuugccaagcacuccaggugau

SEQ ID NO: 4134418 - RNA, 77 nt, Human
agucuuugagucuuguugcauuugcuuugauaaugaguaucuucucuauuaggguaaauuugacaugcauaaggauu

SEQ ID NO: 4134419 - RNA, 96 nt, Human
agucuuugcagucugggcuuguuuguaccuguuuuucuucagaaggccuuccaagaauuuaaaggagcgaauaagucuccuaagauggcaguuauu

SEQ ID NO: 4134420 - RNA, 57 nt, Human
agucuuugcugccuccucguauaauuucuaaaaauugaaauacaagcagcagagauu

SEQ ID NO: 4134421 - RNA, 99 nt, Human
agucuuuuguauccugcagcucaagcuggugagguggucugaaugugagggacuaucucacuaagagcaugaggcacucugauaaagauacggaagauu

SEQ ID NO: 4134422 - RNA, 58 nt, Human
agugaaagccauugcagagcaggauuucgcaaauuuucuucauguauuuggcuccacu

SEQ ID NO: 4134423 - RNA, 71 nt, Human
agugaaaggcuccuucucccaugaccuuugaaauaagaaggucacuaucugagaaaggagggucuguagcu

SEQ ID NO: 4134424 - RNA, 61 nt, Human
agugaaaggucagcugccaucguucugucgccagccugguagcagcucggccugguuaacu

SEQ ID NO: 4134425 - RNA, 96 nt, Human
agugaaaugauugccuugucucguccugggucugggaaggcauuacagaggaagagaugcuugagcugagucuaggcaagcaaauaacauuuuccu

SEQ ID NO: 4134426 - RNA, 61 nt, Human
agugaaaugugcagagaauuaggaauuggauauuucaucuuugaacucuguauaaaccacu

SEQ ID NO: 4134427 - RNA, 76 nt, Human
agugaacaucgggucccaugacugacacagcagggucaccuucucuccugaggucaccguggggcccggcugcacu

SEQ ID NO: 4134428 - RNA, 59 nt, Human
agugaacuugggaguucuggaagccugauaaaagcagguguuaaucacuuuuaagcacu

SEQ ID NO: 4134429 - RNA, 56 nt, Human
agugaagacuggguaucagggaaguaaaaacuacccaaaugaauucaaucugcacu

SEQ ID NO: 4134430 - RNA, 62 nt, Human
agugaaggaugaugccaagguuuuuggcccaaguaauuguuagaauaaugguaucauuugcu

SEQ ID NO: 4134431 - RNA, 72 nt, Human
agugaaggcuugccacuuguuagucuaugagaaggauuuaaguauagaggacacgguggucugcaaaacauu

SEQ ID NO: 4134432 - RNA, 77 nt, Human
agugaaguacuucuuaguucaacuaaaauuuaacauacauguuugaauugaguuugaguaagaacagaacuuacacu

SEQ ID NO: 4134433 - RNA, 80 nt, Human
agugaauuacugcaagaguugacagaauaguuaucucaaguaaacaagauuucugucaaagacuuuuucaggcaaucacu

SEQ ID NO: 4134434 - RNA, 87 nt, Human
agugaauuagaauaagaaugucaagcagaaggucuggaagcuaccuugaaccacccuugaaaucucuugcauuucauucaaaucacu

SEQ ID NO: 4134435 - RNA, 55 nt, Human
agugacaaagauucuccuuguugcaugauggacacaaggaugaaucuuuguuacu

SEQ ID NO: 4134436 - RNA, 130 nt, Human
agugacaagaaugaaguggcaagggugugaccccacugcaaaggggaaagaagcauuauuaaaauuacugcuaccuagugcuucucuuuauuuguagguuuucacauugaguguuauauucuuuguuauu

SEQ ID NO: 4134437 - RNA, 56 nt, Human
agugacagauuaccggcagagcacuaagcagcuuuuuacagcuggguucugugacu

SEQ ID NO: 4134438 - RNA, 56 nt, Human
agugacagucucagagaucaggcuacagacacccccagggucacugagaugcuacu

SEQ ID NO: 4134439 - RNA, 87 nt, Human
agugaccaauauacaaugcucucuuucacagagguaggauccauggauucagcaaagcugugugagaugggaguuauuccuuucacu

SEQ ID NO: 4134440 - RNA, 82 nt, Human
agugaccauucauuuagccugucugcugucuuaggaugggcucuucagcagucaggcaaaugggaggagccauuugaucacu

SEQ ID NO: 4134441 - RNA, 70 nt, Human
agugacuaugacugcaagaucacugugugcagaaaucucuagaaaugugugucuuguagcucaaguuauu

SEQ ID NO: 4134442 - RNA, 81 nt, Human
agugacuccagaugguguucuuauguggccuacuggugcccucugcauguggccaauaggagcagcuaucaauauuccacu

SEQ ID NO: 4134443 - RNA, 98 nt, Human
agugacuccuuaucucuuagaggcaugccaaauucuacuuucagcaguuuuauucucaucuuugaaaacuuaauuuggucguagcuacugguguuacu

SEQ ID NO: 4134444 - RNA, 84 nt, Human
agugacugagagucugguauucaauuauuauuuuauucauuuaacugcaccaguaaauagugauagaauucagaacucagagcu

SEQ ID NO: 4134445 - RNA, 61 nt, Human
agugagcauucguuuggaacccuguaagggcuuguggauggucuggacagaaugugacacu

SEQ ID NO: 4134446 - RNA, 82 nt, Human
agugagcucccaggguagggagagacuaagaguuaaauauucuuuaaggacacuagcuccuuccacuuuggguagcuccacu

SEQ ID NO: 4134447 - RNA, 57 nt, Human
agugaggaagggggcgaugcccgggagggcucugggagaguaaccaauuccuucacu

SEQ ID NO: 4134448 - RNA, 58 nt, Human
agugaggauggcaauggcaggaauuugauuuuauuuccucccaaauuucagccucauu

SEQ ID NO: 4134449 - RNA, 61 nt, Human
agugaggcuuccaacaugugagaacaaaaguaaacucauaauuuuggugggcacguucacu

SEQ ID NO: 4134450 - RNA, 56 nt, Human
agugaggguggccuuguguggacuguucuaacuuugcaguuggcuaaacucucacu

SEQ ID NO: 4134451 - RNA, 101 nt, Human
agugagucgauuaaagaaguaauuaaaguguaaaacagcaggaaaaggacuugcuuuuaaaagaugcuguaauacuuaagguuaagucaaaucagcuuacu

SEQ ID NO: 4134452 - RNA, 69 nt, Human
agugagugcaagagcgcucucuuucauuaccuuauuuccaggguuugguaacaguuuuuggcacuuacu

SEQ ID NO: 4134453 - RNA, 107 nt, Human
agugagugcagaauuaugugaacaugagacagcagaagugcauuugugauucucccaugggaucuuaguuccuuacuuuugcaguuuuaacaucucacugcacugcu

SEQ ID NO: 4134454 - RNA, 59 nt, Human
agugaguggguuacagaugggaaggaacagaucuccagcauuucaggauccacucuacu

SEQ ID NO: 4134455 - RNA, 66 nt, Human
agugaguucacaaaguacuguaugcaucuguuugaagaugggcagaaaucuugugaccaucucacu

SEQ ID NO: 4134456 - RNA, 61 nt, Human
agugauaauugcagagaaaggagaaagcagaaggcuuguucuacauacuguauuucucgcu

SEQ ID NO: 4134457 - RNA, 83 nt, Human
agugauagauuaaguguuuaguaagagauguuucaaaauagaaaaucuuuuuaaguuagacaccaacacucuuaaauauuacu

SEQ ID NO: 4134458 - RNA, 88 nt, Human
agugauauugaugaugaagaaggugaguaaaggaguuuuguuuggaagucccuuuaaucagugccuuuguagaauuaagcaaaucauu

SEQ ID NO: 4134459 - RNA, 71 nt, Human
agugaucccaccuuuugguguucacaucuuuaauuuccugugaguguggcauacacaugaggugguuugcu

SEQ ID NO: 4134460 - RNA, 58 nt, Human
agugauccgaugucagucgcagauuccuuuuggugucugccaaggguguggaguuauu

SEQ ID NO: 4134461 - RNA, 59 nt, Human
agugauggauguaaauugcacuguaggcuuucaggcucacaggcucacgauccauuucu

SEQ ID NO: 4134462 - RNA, 86 nt, Human
agugauuuccucagggucucacguagauuaagucuaugauucccgguaaucauaaacucacuaguuuaugugauguaggaagcacu

SEQ ID NO: 4134463 - RNA, 76 nt, Human
agugcaaaaugugaggcagcacggagauuauggagauaauaacacauaaucuaaguuaacuccccacuguugcucu

SEQ ID NO: 4134464 - RNA, 129 nt, Human
agugcaagcacucugcuugguguugguacaauguugaacaaaauugacauaaucucacaagcuccauaaaccagagauuauguuaguuuuguuuaacauuguaccaacaccucauagagucccuaugcu

SEQ ID NO: 4134465 - RNA, 62 nt, Human
agugcacagauuuaauuuuauucuuggagaagguugaagaugagaagcccugucugugcacu

SEQ ID NO: 4134466 - RNA, 84 nt, Human
agugcagagaacagguagggcuaugugggcaugugacuugugcagucacacaggguucuggucucauacuugcuuucaugugcu

SEQ ID NO: 4134467 - RNA, 92 nt, Human
agugcagaggcauaacagaagggugggcccuggcagccaucugggucucuuccuuccuaaccaugguggcaggugcauccuucuuugacacu

SEQ ID NO: 4134468 - RNA, 125 nt, Human
agugcagaugcagaagggcugucauccagcagagggguaggugacaacuggccuagcgagugacccuuaucauggcuacauuuguugaucacuuucuuuguaugaggcacugcugugauugcauu

SEQ ID NO: 4134469 - RNA, 55 nt, Human
agugcagcucugacaaugccuggaacaggcuuuccaacugcauuuagaguugccu

SEQ ID NO: 4134470 - RNA, 106 nt, Human
agugcagugguggaucacaacucacuguaaccucaaacucuugggcuuaaggaauccucccuccucagccuccgaaagugcugggauuacaugugccacccugccu

SEQ ID NO: 4134471 - RNA, 64 nt, Human
agugcaguuuuccuucaacauuguccugggcuuuauucugcuuugggaaggugagagcuguucu

SEQ ID NO: 4134472 - RNA, 80 nt, Human
agugcauacuuuuaaugacuguuuaaaaggagggaagcaaauaaacuuucaucaaugaagaaguuaccuaaaguuguacu

SEQ ID NO: 4134473 - RNA, 66 nt, Human
agugcaugccuuccuguggaugggcuggcugcaucaucucggaauacaggaaagcauguuauuacu

SEQ ID NO: 4134474 - RNA, 63 nt, Human
agugccacacuucugauuaacguagcuuuguaguaaguuuuaaaaucagaaagugugagcucu

SEQ ID NO: 4134475 - RNA, 91 nt, Human
agugccagugguacaaccuggcccuagcccugggauuagaaauuccauuccuuuuguggggucugggcgccuggauaggcucgcugcgccu

SEQ ID NO: 4134476 - RNA, 69 nt, Human
agugccauacuuagacucuaucuagagauguccacauuuuagauuagagaguuguaagcuuaugguauu

SEQ ID NO: 4134477 - RNA, 62 nt, Human
agugccauuuuugcugggaauuuaccuggauacagaugggccuccuggaagaauguggcauu

SEQ ID NO: 4134478 - RNA, 77 nt, Human
agugcccagcauuuaaguguuugauaaauguuaacucccauuuuuuaacaugccagcccauuuaaauggugaaaacu

SEQ ID NO: 4134479 - RNA, 61 nt, Human
agugcccauguaccugggguggcuggagccccugagccagccccucccagucaggagcacu

SEQ ID NO: 4134480 - RNA, 83 nt, Human
agugccuggcacaugguaagucucuauagcuggugcaauaacacaagcaaaugcuucuccaggacuucuaagugccagacacu

SEQ ID NO: 4134481 - RNA, 59 nt, Human
agugccugggacaugcuguggacucuugugaaugaguuugugagcauucccagagcccu

SEQ ID NO: 4134482 - RNA, 58 nt, Human
agugcuaggugugaacugugugaaugcuuuugaauaucacuaaguuacauuuaguauu

SEQ ID NO: 4134483 - RNA, 67 nt, Human
agugcuauaaagguagaccacagagcauuuguaagauaucuuuuggucguucuuaauacaaagcacu

SEQ ID NO: 4134484 - RNA, 68 nt, Human
agugcuaugcagcugacauuuucauguucugacuugauagaacuggauuauucaguugcugcuucacu

SEQ ID NO: 4134485 - RNA, 99 nt, Human
agugcuauuuaaaaugcagauucaugagccccauaccugaaacuccugauuuggaagauuugggcugaggcccagggaucuccacuuuuaacaggugcu

SEQ ID NO: 4134486 - RNA, 81 nt, Human
agugcucauaaaaaugugaaacccugcaauaacauuaaauccccauaugcagaggaaaacaauucacauuuuuguggcacu

SEQ ID NO: 4134487 - RNA, 83 nt, Human
aggguaggagaauuuaaguaauuugaagagacaggcuugugaaaauuagucuacaaagaaaaguuauugaauucucuuuuccu

SEQ ID NO: 4134488 - RNA, 80 nt, Human
aggguaguauacuaugugaaaauacuauagugccucauauaaaaaagcacagugauaaaauuucacauguaaaauagccu

SEQ ID NO: 4134489 - RNA, 61 nt, Human
aggguaugguuuacuaauuuguuggguaaaagaaaaucuccaacaaauaguuacauauccu

SEQ ID NO: 4134490 - RNA, 67 nt, Human
aggguauguuuuaggcugaguugaagagaaaaauagucuauuagaaauagucuaaugcauaagcccu

SEQ ID NO: 4134491 - RNA, 99 nt, Human
agggucaaguacugaaaucuguggugauaaaagcuuaauuccuauuacucugugaaaggcuacugucaucaauuacauuuuaaacuugcuguuaacccu

SEQ ID NO: 4134492 - RNA, 58 nt, Human
agggucagcuuuauuucacguguuuguugcuacgagggccucugguuaaggugauccu

SEQ ID NO: 4134493 - RNA, 61 nt, Human
agggucaguucugugagguguuggucaucacuuagguagaucuaauuuccagaguggcccu

SEQ ID NO: 4134494 - RNA, 71 nt, Human
agggucaguuuaggucauccuugcuuugcugcacaaagacaugguugggaacacacuacaaagcaggcccu

SEQ ID NO: 4134495 - RNA, 73 nt, Human
agggucauagaauguagggaucuauguagccauagaauguagcugggaaaggcaagauuccgcucuagagccu

SEQ ID NO: 4134496 - RNA, 62 nt, Human
agggucgggaaauguccugggccaccugcaagugucugcuggguccuggcaucuuccucccu

SEQ ID NO: 4134497 - RNA, 59 nt, Human
agggucucuggagagcugaggaggaaagucagaucucgucucuaucuccggaagacccu

SEQ ID NO: 4134498 - RNA, 74 nt, Human
agggucucuguggugagcaacugacugaaguuuccaguggaaaaguuccugacgauuguuuccgcagggaccuu

SEQ ID NO: 4134499 - RNA, 68 nt, Human
agggucuuguugagggugaugggacaucaagcuguaaagauggacuguagccagaagcagaaggcccu

SEQ ID NO: 4134500 - RNA, 65 nt, Human
agggucuuugagaggguagaugugaagacuuuauauguuuauauacauacagucuuacugacuuu

SEQ ID NO: 4134501 - RNA, 58 nt, Human
agggugaagcuugaucacuuuuaccacuucagagugaugccacacaaugcuuugcccu

SEQ ID NO: 4134502 - RNA, 83 nt, Human
agggugauacagugcaaauaggacugucuuuccuuuuguugagggaaaagucuccccguucuauuugagucuguucucaugcu

SEQ ID NO: 4134503 - RNA, 66 nt, Human
agggugcagaaggguugauacaacaggacuggucuugccuucuccucagcagcuuuugcagucccu

SEQ ID NO: 4134504 - RNA, 56 nt, Human
agggugccaggcuguagucagggucuugcugugcccacccacuagugccucaccuu

SEQ ID NO: 4134505 - RNA, 84 nt, Human
agggugcugggaguuaguucuagaccaguuaauaguguucacuugggcacuauuaacauuuugguuuggguaacucuuuacucu

SEQ ID NO: 4134506 - RNA, 56 nt, Human
aggguggagggccaugagaaguaucugaggaaacucagcaggucaggccccuuccu

SEQ ID NO: 4134507 - RNA, 60 nt, Human
aggguggccaugagggagagauugucauauaauuaauuuucucuucuauggcuuugcccu

SEQ ID NO: 4134508 - RNA, 71 nt, Human
aggguggucaugaaaagcacuuuaacaucaggacagauguuaaguucugagguucuguuuucaacugcucu

SEQ ID NO: 4134509 - RNA, 92 nt, Human
aggguguggaugaugaacauagggguggaguggauugcagccucugaguugaaggcacucagaguauuucauucuuaggugucuccugccuu

SEQ ID NO: 4134510 - RNA, 72 nt, Human
aggguuacugaauuauguaaaauauggugaaaaauaacuaguguuuauuaacauaauucuauuggaagcccu

SEQ ID NO: 4134511 - RNA, 89 nt, Human
aggguuagaagguggacaugaccucuauuccuccgcacaugucugguagaaugugaggaagaaagagguaagcuuucauuucauucccu

SEQ ID NO: 4134512 - RNA, 109 nt, Human
aggguugcgacuguucugauacagcugcucugugugugguuauuuccguaggugauuaccuaaggaaacacacccagagaagcagauccucagauuagccugcgaaacu

SEQ ID NO: 4134513 - RNA, 95 nt, Human
aggguuggagagugucaggauuuuaaaaucccaguuagaauaaacagauacuguaucuacuuggauuaauuuugagaugccaaauuuccagaacu

SEQ ID NO: 4134514 - RNA, 71 nt, Human
aggguuggugacuagguggcccacagggugaacacagugcaugccccucuggucaaccagucacacacccu

SEQ ID NO: 4134515 - RNA, 107 nt, Human
agguaaacguggacaugaaagaagccagggugaggcaggcagcuuccagaagcacacacugggcucagcuccuuccuuccuaaccucuauuuuagcuccacguaccu

SEQ ID NO: 4134516 - RNA, 79 nt, Human
agguaaaucaauuuggaggaugucggcauauuuaauccuucccaagggugaauuguggcuuuuuccaauuuguugaccu

SEQ ID NO: 4134517 - RNA, 78 nt, Human
agguaaauucgcacaggcucccucugugaaggucauugcuucuuucaaugucacagaaggaccuuguuucauuuaccu

SEQ ID NO: 4134518 - RNA, 95 nt, Human
agguaacacugugauauaguaggacacaucaugaaaaaacagucugcuuuucauauauuuucauggugauuuuugcugugcucacaguucucccu

SEQ ID NO: 4134519 - RNA, 89 nt, Human
agguaacauauuuauagguucuggagaggaggauguggacaucuuuggcggacguuauucugucuaccauucaccugaccagccugccu

SEQ ID NO: 4134520 - RNA, 69 nt, Human
agguaacguugguaaaagcauucagcuauguguaaagcacuguggaaugugcuuuuccuuaauguucuu

SEQ ID NO: 4134521 - RNA, 62 nt, Human
agguaacuguggcuagguaacugugcgugccccuugcacuuugcuauacucauuaguuauuu

SEQ ID NO: 4134522 - RNA, 72 nt, Human
agguaagagugagugagauaaaguagguucaaggugcacuuccaccccuggcuuucucauuuacaggcaccu

SEQ ID NO: 4134523 - RNA, 57 nt, Human
agguaagcaugguggcugcugugggugcccaccacuacacaucuuucacguuugccu

SEQ ID NO: 4134524 - RNA, 80 nt, Human
agguaauauggagguaugguuaauauauuauuuagucacaucuagaaguccuguuccucauacuuccucauugauugcuu

SEQ ID NO: 4134525 - RNA, 77 nt, Human
agguaauguuuagaggaaccuccugaaaaguauacccucuuugggugcuggagaaaguuuuucugaacucauuuccu

SEQ ID NO: 4134526 - RNA, 58 nt, Human
agguaauugcgucuucauggaggugucauuugaggggaggacugaagaugcaagaccu

SEQ ID NO: 4134527 - RNA, 60 nt, Human
agguacaaaagaguauaugagaaucuugaaggguuaauucauugucucuuuugccuaccu

SEQ ID NO: 4134528 - RNA, 86 nt, Human
agguacacaguaacuguuuuauauugcaaguguuugcaauccgcuaauguaauacagcaaugccugaaauaguaacucucaagccu

SEQ ID NO: 4134529 - RNA, 59 nt, Human
agguacagggugaaaguuuauggcugaaauaaagugauguaaacuucagcucucugccu

SEQ ID NO: 4134530 - RNA, 75 nt, Human
agguacaggugggcuuaagagucggcauuucucacaagcucccaggcaaugcugauucugcuggcccucugaccu

SEQ ID NO: 4134531 - RNA, 83 nt, Human
agguacccuuuugcccuuucaacauucugccuugugaguacacagcaacaagguaucaucuuggaagcacagagacuaggccu

SEQ ID NO: 4134532 - RNA, 61 nt, Human
agguaccgcagggguggagcaaugacccuagacuccugucaaugaagucauccuugugccu

SEQ ID NO: 4134533 - RNA, 57 nt, Human
agguaccgcggaccucgccccgggacagcgaggagcugagggacccugugaguaccu

SEQ ID NO: 4134534 - RNA, 60 nt, Human
agguacgcaugcccgccugcacuaacccccagaggucuguguauaggguugugcgcuccu

SEQ ID NO: 4134535 - RNA, 129 nt, Human
agguacucuuaccguacaagaugcucaaauauaaaacuucauguaauuuaaaacaguugcagaggagcugcuccuguuuuggugcaaggagccuguauuuaggaucugugcauuaggugaugguauuau

SEQ ID NO: 4134536 - RNA, 81 nt, Human
agguagaaucaggaggacuugauaacuuacugacuuugaagaaaagaagucaaagaugaccgaguuccuauccugaagccu

SEQ ID NO: 4134537 - RNA, 83 nt, Human
agguagacacuguuucccuaaagcucagggggcauguguucagguugaugcucugccaccaugcuuccugacuaguuauaccu

SEQ ID NO: 4134538 - RNA, 64 nt, Human
agguagauucuguaaauaaucaaggcauuuuauuuuaauuaauggccuuguuacaguucuguuu

SEQ ID NO: 4134539 - RNA, 82 nt, Human
agguagcguguuuucauggccaccgcaagugacuacucuagauaagagaucuguucuucagugagucaucaaauacacucuu

SEQ ID NO: 4134540 - RNA, 64 nt, Human
agguagcuauuacuguuuuuauuauuuauaauaauguaauugaacuuaacaguaaguggccccu

SEQ ID NO: 4134541 - RNA, 64 nt, Human
agguaggaaugagcuugucaagcagcagagcugggugaaccaagccugcuugagaguccuggcu

SEQ ID NO: 4134542 - RNA, 75 nt, Human
agguaggcugugacagggucauggagggugucggguucucggcucuggaguuuuucauuacccuuacggccacuu

SEQ ID NO: 4134543 - RNA, 55 nt, Human
agguaggggguuugggaacugcagucccauucugguuuuaggaacucccuugccu

SEQ ID NO: 4134544 - RNA, 98 nt, Human
agguauacuugacagugagcucugauuaguauaauuuaucacuguuuugcacagagaugauauuauucuagcccagagcaaacacauuuaaugugcuu

SEQ ID NO: 4134545 - RNA, 57 nt, Human
agguaucaacagcagagucugaggaaggacugaaccccagaauguuccuggaugccu

SEQ ID NO: 4134546 - RNA, 102 nt, Human
agguaugacauuuauuuugcaaucuccaggaaaauguaggucacuuuuugaauuaucaguuacaaauaugguacucggagaaauaaagcuaaauguagacuu

SEQ ID NO: 4134547 - RNA, 63 nt, Human
agguaugaggaaaaacuacugcacuuucuuugagacuugagaguuugugggcuuuuccucccu

SEQ ID NO: 4134548 - RNA, 67 nt, Human
agguauguuauguagucucuucucaacuagacuguagucccagaggcuaggaccauguaucauacuu

SEQ ID NO: 4134549 - RNA, 76 nt, Human
agguauguuuuauuccccacuguuaccccuguaccuagaauaguggguggcgcagaggaggaauuuauacauguuu

SEQ ID NO: 4134550 - RNA, 81 nt, Human
agguauuagagagcaaaguucugacaggagcacuacuaauuaacugauaauugucuuccuuuggcaagcucugcucuuccu

SEQ ID NO: 4134551 - RNA, 72 nt, Human
agguauuggucaggaaagaguaauguauacaaauuagaagcuguauuauggauuauuccugaauuuguaccu

SEQ ID NO: 4134552 - RNA, 76 nt, Human
aggucaaaucauaggaaauaaccaguauuuaacucuuucucaacuauacaaaugccaucuuccugugguuugaucu

SEQ ID NO: 4134553 - RNA, 98 nt, Human
aggucaacucugcuucccacaggaugagagcugagcgguuuacgugaauggccaucagacuuguuuucauuguuguguaggauaagguagaguugccu

SEQ ID NO: 4134554 - RNA, 120 nt, Human
aggucacacagccaguauguggcagaaccagaauucaaacccaggucucucaagccuguauuuggacucaaugguuugcugccuccauccacauugacaguuuuccuaguuguguucccu

SEQ ID NO: 4134555 - RNA, 100 nt, Human
aggucacacagcuaguaagugucagagcuggaauuugaaccaaggcagccugguuccagagucugguuccaugguuauucauugcugugauuugcugccu

SEQ ID NO: 4134556 - RNA, 119 nt, Human
aguaguggaugugaauuuggcuugugguguauaaagaugccauacuuacuguacuuacauuuauuagguaguauaaucuuuguuguuuugauaucauacccagguuuccguaggcuucu

SEQ ID NO: 4134557 - RNA, 108 nt, Human
aguaguuucucuucucuaagcccuuuucauggaauaucucauuucacagccucaauuacauuaugacauguaugcuuuaugaaguagguccagaaaagagaaauaacu

SEQ ID NO: 4134558 - RNA, 57 nt, Human
aguaguuugggcagugacagauggaagcccagaugaucccugauugccuugacuccu

SEQ ID NO: 4134559 - RNA, 55 nt, Human
aguaguuuuuaagagguauaaaggagucuugggcuucaaacccucagaaacugcu

SEQ ID NO: 4134560 - RNA, 72 nt, Human
aguaucacugauuaugaaaaugaaggcauguggaagucagauuuggccucauucauucaaaauagguguauu

SEQ ID NO: 4134561 - RNA, 75 nt, Human
aguaucaguauacaggggacauucaguuguugacugccugaugaauguuugccaguguaaguuuuuucugauauu

SEQ ID NO: 4134562 - RNA, 87 nt, Human
aguauccuaguuuuccccuggagagauccuccugaaaaagaggacuuuauuaguaggauaccuuuaaaaggaaaauucuaauguauu

SEQ ID NO: 4134563 - RNA, 106 nt, Human
aguaucuggaauucuauugugugugagucugugcaggaacacaaugagucucaaagugaaaaaaacuuuggauuccugguuccuacagcacuuuuguucagauacu

SEQ ID NO: 4134564 - RNA, 62 nt, Human
aguaugauauucaaccuuucauugaucaggcuggauguugugagguauauugaaaucaugcu

SEQ ID NO: 4134565 - RNA, 56 nt, Human
aguauggauuuucuguuacugggcuuuaaauauguuaaugagagaauguucaugcu

SEQ ID NO: 4134566 - RNA, 91 nt, Human
aguauggguggcauacugaggacauugaugaggcaauguuuuaaaaaacagcuaacauuuuugguguccucacuauaugccagcacauauu

SEQ ID NO: 4134567 - RNA, 129 nt, Human
aguaugguuauuucugaaugacagucuuauccacagagucaugguagucaaagguuauaaaggcaaagccccuuuucuugccacugacucggucagucaugauuucaaucacuucaauuuuuccauacu

SEQ ID NO: 4134568 - RNA, 129 nt, Human
aguaugguuugccaaagggaugcucugauucaggaggcugagguggggccugggaauguucauuucuaaccuuuucccaggugaugcugaggccacugguccaggggccaccuuuggcccuaagccgcu

SEQ ID NO: 4134569 - RNA, 77 nt, Human
aguaugguuuugucugauguucccucaugauuagacauauauaaucauuuagaguauacauuuuuggcaggaauacu

SEQ ID NO: 4134570 - RNA, 56 nt, Human
aguauguauuuuauacuuacagcacaucucaauuugaauguaaguggcuacauacu

SEQ ID NO: 4134571 - RNA, 86 nt, Human
aguauguuaagaaacaaagccagggaaguuaugggggccagguuauauggugccuugaugcuggcuucuguuuugagugagauauu

SEQ ID NO: 4134572 - RNA, 63 nt, Human
aguauuauuugaauguucccaggcuuuugaaagugaguuuagggcacagcuuagauaaaugcu

SEQ ID NO: 4134573 - RNA, 79 nt, Human
aguauuuaaacugcuccagagaauagagagggaagaaaaucauccaaacuauuuacaauggaaucaaaauuuagauacu

SEQ ID NO: 4134574 - RNA, 83 nt, Human
aguauuugagccauuuggaaacacggucaucuuccccacuggcucagggugaggcuggccgguuccagacauggaaugaugcu

SEQ ID NO: 4134575 - RNA, 114 nt, Human
agucaaaaaaaggauuagagggagggagaaaaaagaauuaagcaguaccaaagcugaacuagaugcuugugucugaacuaguugcucucucucuccuuucuccuuccagggauu

SEQ ID NO: 4134576 - RNA, 83 nt, Human
agucaacagaauggggaaauuguguacaggcuccuaaauauuucaccaaaagagacucaugacacuuccuaugaugauugacu

SEQ ID NO: 4134577 - RNA, 62 nt, Human
agucaacauaucauaucuaucgguuguuuuuauaagugauguuaauaaaugauguuuugacu

SEQ ID NO: 4134578 - RNA, 76 nt, Human
agucaagaucuauaucaugggguaagguaaaaauaugcaaauuuuuuacacucugacaauugauguaggucccacu

SEQ ID NO: 4134579 - RNA, 94 nt, Human
agucaagcacuuaaagcauuucaggcacuguucccaguuauccuuauuuuucagaugaggaaacagaggcuuggaaaggcuaagugacuugacu

SEQ ID NO: 4134580 - RNA, 96 nt, Human
agucaaucuccucagucuggugaauuucacaggaguccuuucuauaacacuuccuauaagaaacuuuccuaugaaugcuuauugaggaagguuacu

SEQ ID NO: 4134581 - RNA, 56 nt, Human
agucacaaauauucuccucuagcaccgauaagugcucuggagaacuccuugugucu

SEQ ID NO: 4134582 - RNA, 65 nt, Human
agucacacaagauaggcuuuugggcuuucagggaggugugggggcuucuugccugucuuggugcu

SEQ ID NO: 4134583 - RNA, 84 nt, Human
agucaccacuggguuaaugauguguuuggaagcuugcugacagugugaacagcuuugucuucucacauauccccuguguugauu

SEQ ID NO: 4134584 - RNA, 57 nt, Human
agucacugaauaccuuaauguucaagaaaacuuaagucauuaagaaguucaggaacu

SEQ ID NO: 4134585 - RNA, 71 nt, Human
agucacuuagucuaugauauuuuguuauagcagccccagcugaccaagauacagcaucauagauacuggcu

SEQ ID NO: 4134586 - RNA, 72 nt, Human
agucacuuuaugagagaaccauguaacacccaggguaguucacuauggaauggaucaucuuaagaagugauu

SEQ ID NO: 4134587 - RNA, 58 nt, Human
agucaggaagcuggagcuggggcgcaaggccaccaggaggaaagaccagcccaugacu

SEQ ID NO: 4134588 - RNA, 56 nt, Human
agucaggugguucugcuccacuuaguauuaaauauaaguggggucacuccuugacu

SEQ ID NO: 4134589 - RNA, 66 nt, Human
agucaggugucuugugggauuuuaauaaggucuacuguauaaaaucaccccgaggacacuaagacu

SEQ ID NO: 4134590 - RNA, 57 nt, Human
agucauagaaggugacccaggugcguguaacugcaccaguccauuccccucaugauu

SEQ ID NO: 4134591 - RNA, 97 nt, Human
agucauccuuacaucagcugguauuuguuagggaguugucaggugcaacuugcaaaaacaucuugucaaauguccacagcuuuccugugaggugacu

SEQ ID NO: 4134592 - RNA, 69 nt, Human
agucauuacaaauuauagaaaauugagcuauuugaaagcuuuuauuggcugucauuugacgcauugacu

SEQ ID NO: 4134593 - RNA, 59 nt, Human
agucauucaggaaugcaggcagaugcagauucagauucugucuuauuuaacacaugacu

SEQ ID NO: 4134594 - RNA, 63 nt, Human
aguccaauaaccucuuuccuucuuauuacucaucuguuuuugaggggaaguagaguuuugauu

SEQ ID NO: 4134595 - RNA, 78 nt, Human
aguccacagauuugucaggguaaauuauguaaaauguagcugcuguacagaauuaacauuugaugaauaugcuggucu

SEQ ID NO: 4134596 - RNA, 64 nt, Human
aguccauaacuucagagugucagcaacaggaaugcaagacaguugccaccuagaaguauggauu

SEQ ID NO: 4134597 - RNA, 57 nt, Human
aguccaugguuguaguucucuccauuaucauggcuggaaggaacucacccaugggcu

SEQ ID NO: 4134598 - RNA, 79 nt, Human
agucccaggacuguccuugguaugaccaagguuucugcaaggacggugaggccuuggaagccagggagcccuaggggcu

SEQ ID NO: 4134599 - RNA, 61 nt, Human
agucccaguucgguucuuccucuuggccccagauguggucccuggaaaccgggcagggccu

SEQ ID NO: 4134600 - RNA, 72 nt, Human
agucccucccaccucugauauucuuugagcugcuaagauuugaaauuucacucaaugguaucaggagguucu

SEQ ID NO: 4134601 - RNA, 56 nt, Human
agucccuccucccuacuucuccuucuuagagugagggacaugaggcaggagaggcu

SEQ ID NO: 4134602 - RNA, 72 nt, Human
aguccgcagcugagcagaagcccuccuggacucugaguuauggagucuccaagccucugugagcuggugacu

SEQ ID NO: 4134603 - RNA, 56 nt, Human
aguccggggucuggacaccuggucccucuggcuggccaggucuugguccuuggacu

SEQ ID NO: 4134604 - RNA, 89 nt, Human
aguccuagggaaaagcucgauugacuuuucuuggucacaugacucucauggguacuuuucagugaccagaggagugugguccuaugauu

SEQ ID NO: 4134605 - RNA, 75 nt, Human
aguccuagguuaagaaacuuuaaucuauggucaaguuaaccaaggaguuugguauuuuaggaagaggcuagggcu

SEQ ID NO: 4134606 - RNA, 57 nt, Human
aguccuaugagaguuuaaugcugccacugaucugacaggaggcagagcucagggacu

SEQ ID NO: 4134607 - RNA, 78 nt, Human
aguccugguccaaguaauuggcggggaguuuagacaauugugcaaccuggaugucuuugccaugcaugugucaggguu

SEQ ID NO: 4134608 - RNA, 55 nt, Human
aguccugucucucccagggccacugucuucagagccucuggguuggugacaggcu

SEQ ID NO: 4134609 - RNA, 60 nt, Human
aguccuuaugugguggagagagugaaagcaagucucuuucuccucuuuuuauaaggcacu

SEQ ID NO: 4134610 - RNA, 63 nt, Human
agucguggcguggagguuucugggaaacguagucuuaaauccgaauggcucgcgcgccacacu

SEQ ID NO: 4134611 - RNA, 79 nt, Human
agucuaaaacuucauuugugguuauuuacaaugggagccucauuucuaaacagauaaugcuauaaauggugguuagauu

SEQ ID NO: 4134612 - RNA, 66 nt, Human
agucuaacaggagguacauagauucagaugcaugcuugcagagggaauuuacugcucuccaggacu

SEQ ID NO: 4134613 - RNA, 71 nt, Human
agucuagcacaguugucugauuucuuccuuaggguaaauuaucaggauaaagccaggcacuguggugugcu

SEQ ID NO: 4134614 - RNA, 65 nt, Human
agucucaguuuccaugucuauaaaguggagaugccauuaaauuuccuauagauauggugaguauu

SEQ ID NO: 4134615 - RNA, 79 nt, Human
agucucauacuagaugcugcagggaugcuagagguaagacccacuucuucucucuuguucuuugccugguagggggauu

SEQ ID NO: 4134616 - RNA, 60 nt, Human
agucuccaacuccugggaucaagggauccucccacuucagcaucccaaggagcugggacu

SEQ ID NO: 4134617 - RNA, 55 nt, Human
agucuccucuuuccuuguuauuuagcaugagcaaaaaguagcuucuggggagacu

SEQ ID NO: 4134618 - RNA, 84 nt, Human
agucucgcucucucacccaggcuggagugcaguggggugaucucggcucacugcaaucuccaccugcuggguucaagcgauucu

SEQ ID NO: 4134619 - RNA, 130 nt, Human
agucucuagcuugauccaggaggcacuggggaggagguugcugauggcaagauuccaggcaggaggugacucagaaggcugggcugucaauggcccucugauccccaguauauuuuucaggccugaagcu

SEQ ID NO: 4134620 - RNA, 61 nt, Human
agucucugagguucagaugccuuguguauauaacaggcagauuagucuaaauccagagauu

SEQ ID NO: 4134621 - RNA, 76 nt, Human
agucucugggaacacuuugugagcuccuuagcccuggaacuguucuaagggggucuauaauguucucagcaggauu

SEQ ID NO: 4134622 - RNA, 61 nt, Human
agucucuuggcauucugaaacagacaaaaucacugauuuguaccaggaguuucagcagacu

SEQ ID NO: 4134623 - RNA, 64 nt, Human
agucucuuucuaaauaaggucauauuuuaaaguuccaagugacauaaauuuugggaagggcacu

SEQ ID NO: 4134624 - RNA, 76 nt, Human
agucugaauaggaucugggagucuguauuuucugaaguugcauagaaugcauucucuuagcaucuaguacagagcu

SEQ ID NO: 4134625 - RNA, 129 nt, Human
agucugcagagagaggagaauaggggcagagauguggagagaagcagagauaagauguagagacaaaauauucucuggagcauuucaccuacauucuagucacuuuuuguauuccuacuucugcauccu

SEQ ID NO: 4134626 - RNA, 76 nt, Human
aucucuccuccacuaggcaaaaugugguaagaucauuaauuaagaaaccaugugagccaugagguggagggaaggu

SEQ ID NO: 4134627 - RNA, 76 nt, Human
aucugaagaggauuauugaugagaucauuaugaagggcaugcugaaacuucuaauaugaauaguccagauuuagau

SEQ ID NO: 4134628 - RNA, 73 nt, Human
aucugaagcuuaagcauggugguaaaagagguuguuauaauuacuuccuaaaccucagcuuuagccuggagau

SEQ ID NO: 4134629 - RNA, 58 nt, Human
aucugaaguggagaaaaauauauuuuaacacuuaaugcauuuuucuguccacucagau

SEQ ID NO: 4134630 - RNA, 68 nt, Human
aucugaaucucuagggguaugaugaacaggaaauacaauuauuuuauaagcccucaugauauucagau

SEQ ID NO: 4134631 - RNA, 75 nt, Human
aucugaaugaacaauaggaaauguuuguaaguaaaaagauauggacaaaugugucuaauugugccuuuucaagau

SEQ ID NO: 4134632 - RNA, 70 nt, Human
aucugaggugguuuuucuuucuuucauuuguuuuucucuguugcagauggcuauagauagccuuucagau

SEQ ID NO: 4134633 - RNA, 66 nt, Human
aucugaguuauuugagggaagagauauuccuuugucagcuuuucauucccagcaccuagcacaggu

SEQ ID NO: 4134634 - RNA, 87 nt, Human
aucugauuccuuuucaaaucuucacucauucagaguuguuugaugaauaacucugugcaagggcgaggaaugcaaaaugaaaaagau

SEQ ID NO: 4134635 - RNA, 62 nt, Human
aucugcaguuuagugucaggugauuccuaaaucuugagaaccacugcauuaagucuguaggu

SEQ ID NO: 4134636 - RNA, 58 nt, Human
aucugcaucagacuuugcaugagcaagaaauacuuuuaucauguuagucugcugagau

SEQ ID NO: 4134637 - RNA, 74 nt, Human
aucugccuaaccuccagcuccuagaucggcgaaguggagucauccuacuuacuuccuaggacguagaagcaggu

SEQ ID NO: 4134638 - RNA, 68 nt, Human
aucugcuagcugugugugaauuuggccuaguuucaguuuuaacuggguuaguuugaccagcagcagau

SEQ ID NO: 4134639 - RNA, 68 nt, Human
aucugcugccuauggcuaauucuuuacugaccaaaccuuggugaugugguggugccaaugcagcagau

SEQ ID NO: 4134640 - RNA, 61 nt, Human
aucuggaucccugucucagauuggguuucccugaagcagagccugagacagggauuugggu

SEQ ID NO: 4134641 - RNA, 57 nt, Human
aucuggcuuaccuagggugccucugcuuucaaagaggcucuggugggaagguuagau

SEQ ID NO: 4134642 - RNA, 57 nt, Human
aucugguguccugaugaaauugagccuguaggcugggucagugcucaggcaccaggu

SEQ ID NO: 4134643 - RNA, 62 nt, Human
aucuguaacaucaguagcagaaacuucugauuuacaguauguucauaucugauguuauagau

SEQ ID NO: 4134644 - RNA, 60 nt, Human
aucugucaggagcaaggacuacuuuggcauuaaccaucacuguuugauuucuugacaggu

SEQ ID NO: 4134645 - RNA, 56 nt, Human
aucugucuaugauauagucuguguccucaggauacacacaguauaauagaagagau

SEQ ID NO: 4134646 - RNA, 73 nt, Human
aucugucugguuggagaaucacugcaagccaaggcauggcauuggccaauggugauucccggccuccucaggu

SEQ ID NO: 4134647 - RNA, 55 nt, Human
aucugugaauuguaacugguugaauuuuuuucaacuaauagagacaaacauagau

SEQ ID NO: 4134648 - RNA, 56 nt, Human
aucuguggccaaaagacuguugaaaaccugauucuaaggauccuuugguggcagau

SEQ ID NO: 4134649 - RNA, 93 nt, Human
aucuguguuaucucuucagcaacauuucaaggucuuuaggaucaaggacuuuuaugccuuccacaaagucuaugagaguugcaaggcacagau

SEQ ID NO: 4134650 - RNA, 76 nt, Human
aucuguuaucugucuauggauucugucagaguuuaaaauuuagcuuacaugaugauuucauaaacauaaaucagau

SEQ ID NO: 4134651 - RNA, 77 nt, Human
aucuguuguuaggaauuauaaaaagguauuauuacugaaguaaauuaagaaaauguuuuaugauuuuuaaccuaggu

SEQ ID NO: 4134652 - RNA, 102 nt, Human
aucuguuuuccuucccaucagucuagcucugcccauuggucauucgacuugauccagguaaugccaaugggcagaacuagacuaacgggaaggaaaacagau

SEQ ID NO: 4134653 - RNA, 73 nt, Human
aucuguuuuuuugguggagggaacuauuuccaggcugagaacaacuugaaaaugucucccccaccgugcagau

SEQ ID NO: 4134654 - RNA, 64 nt, Human
aucuuacauucccucaccauuucaccacguauuaauuugagucuuaggugcagggaugaaggau

SEQ ID NO: 4134655 - RNA, 55 nt, Human
aucuuagaaguuugauaaaauccuaguucucugggauuuuuuaagguucuaugau

SEQ ID NO: 4134656 - RNA, 99 nt, Human
aucuuaucucacaauaauucuacacugggggcuuugagcaugaagauucauccuggagauaauugcagugaacgagaguuauaccuuggaagauaagau

SEQ ID NO: 4134657 - RNA, 66 nt, Human
aucuuaucugaaagucuccagcuugucugcaacaucacagcugaauuuugggacucaagauggggu

SEQ ID NO: 4134658 - RNA, 61 nt, Human
aucuucaaagaauuucuuguccugugcauucuguccuauggggaaugagauucuuggagau

SEQ ID NO: 4134659 - RNA, 62 nt, Human
aucuucaaagcacaucguuuguacaagagauagacuaagaacaaaaauguguuuauggagau

SEQ ID NO: 4134660 - RNA, 81 nt, Human
aucuucagucauauacuacauuugaaaauugcaguauuauuugugguuugcaaaauucacaaugaguauaauggugaagau

SEQ ID NO: 4134661 - RNA, 102 nt, Human
aucuucauagugaagcuugcucucuuauauugucuuuagcccauauagacuucuagucuggaguauauuuugggagaagauggggagcacagauaugaagau

SEQ ID NO: 4134662 - RNA, 61 nt, Human
aucuucaucaaguucacagugggcuugcuuuguuugcuuucucuugaaugcuugauaagau

SEQ ID NO: 4134663 - RNA, 77 nt, Human
aucuucuaggcccuuuuucuccuguuguuucuuuguuucaacaaagagaaauauuuaggaaaggagucccuuaagau

SEQ ID NO: 4134664 - RNA, 70 nt, Human
aucuugaaaucaguaugucuuucucaauggcagagagcauuugaacugggaauuaguguugauucaggau

SEQ ID NO: 4134665 - RNA, 107 nt, Human
aucuugaaugcugcuuuuuggauuuggcacaauauuuauagaagacaaguggccuuuugugugucauuaauucagagaacagucaguacaguauuaauauucaagau

SEQ ID NO: 4134666 - RNA, 84 nt, Human
aucuugaauucgucacaaauauuuuaacaguaggagccugcccauaaaaauuccgauuuggggcuucuuuugaaauaucaggau

SEQ ID NO: 4134667 - RNA, 77 nt, Human
aucuugagguuuuaaguugaagggggagaaaaagacauuuccaaaggcccuaauaagcuugauaaagcccacaaggu

SEQ ID NO: 4134668 - RNA, 56 nt, Human
aucuuggggaauccucuguguaacacugguguauuacacaggcagugucccgaggu

SEQ ID NO: 4134669 - RNA, 125 nt, Human
aucuuggggguuggggaggguggacuuguucuuggaucuuggcagaagaaaucauuaucuggaccuuuauuggacuggauacccuuuucugcaucuugggccuuccuucucuaugcucccgaggu

SEQ ID NO: 4134670 - RNA, 85 nt, Human
aucuuguccucacuggagacucagaaggggaagcauugggaaaccauguauguuucauuucugguuuaaccaggcuuuucaggau

SEQ ID NO: 4134671 - RNA, 73 nt, Human
aucuuuauauaucuccucugaaacagagguguaaaaagucacugggaagucaucaggggauauauagauagau

SEQ ID NO: 4134672 - RNA, 126 nt, Human
aucuuuauggguccaaucuucugcuucuaggguaugcagugagcacuauuuauacuauaaucuugaugcuguuaaugcugguuacugacauuauuuagaaucaaucccugaucaaacuauagagau

SEQ ID NO: 4134673 - RNA, 99 nt, Human
aucuuuccguaauuacagcauuccagggcuagguaauggguaguugaugcucaggucauguauuuagcccugguuagggaauugguaaguugggaagau

SEQ ID NO: 4134674 - RNA, 56 nt, Human
aucuuucucagcuguaaucaaagagagaugacuugaugaaggcagguaagaaagau

SEQ ID NO: 4134675 - RNA, 87 nt, Human
aucuuucuuugguuguaugaaaugucuuuucuaauaaaagagccaaaaagugagagacagcauuucuagcaccaggcacagaagggu

SEQ ID NO: 4134676 - RNA, 60 nt, Human
aucuuugaugcagaaagcaacugucacugggaauugacuaagcuuuuuguugucaaaggu

SEQ ID NO: 4134677 - RNA, 78 nt, Human
aucuuugugucucaggccucagccugccaggccugggcuuucugcuuggcagugucuaggggucuggggcaaaaagau

SEQ ID NO: 4134678 - RNA, 120 nt, Human
aucuuuuaaauuuugggcagugguaucuugugcagauguauaugcauaaaaaguacauguauucaacaauuacuuauguaguaccucuuaugugcaaggcauuguuuuaaagaccaggau

SEQ ID NO: 4134679 - RNA, 69 nt, Human
aucuuuucauagaucagugagggaccacuaagccaaaaggcagggauuauuucacuggcuugauaaggu

SEQ ID NO: 4134680 - RNA, 61 nt, Human
aucuuuucaugccagcccaucacagagguugcaccuauggauuggcugcgcuuggguuggu

SEQ ID NO: 4134681 - RNA, 62 nt, Human
aucuuuucuucuucuccacacacaacaauccuucagcccugugugcuggaguuaggaaaggu

SEQ ID NO: 4134682 - RNA, 78 nt, Human
aucuuuucuugucacuuauacugcuuuggaggucaaaaguucuggcuuucucaaaagacagaagugaaaguaccaggu

SEQ ID NO: 4134683 - RNA, 72 nt, Human
aucuuuuggcaaauugaguuuucaguucuuugcuuucaauaaaauuggaaaaagacuuaauugccagccgau

SEQ ID NO: 4134684 - RNA, 92 nt, Human
aucuuuuuuugguucauagggagaagugucuaagagauuccuguuuuacuggcuuaacagcauuuuucuccacuucucuugccaacaaagau

SEQ ID NO: 4134685 - RNA, 95 nt, Human
augaaaaaguaaguuauaggccaguaaaauguuucaguaucuuguauaccuagaaggacugcugugacaauugugccuguauagaucucauuuau

SEQ ID NO: 4134686 - RNA, 77 nt, Human
augaaaaccuucuguguuauguucacugcccucucccuaacaccuagcacagugcugaacauagaauggacauucau

SEQ ID NO: 4134687 - RNA, 62 nt, Human
augaaacagaguacuuaauauauuguguauugugauuauguagcagaguaucucuguuuuau

SEQ ID NO: 4134688 - RNA, 73 nt, Human
augaaaccauucauucugaccucaagagaaccuucugaguguuuuuguggggggcggugugaaacagguucau

SEQ ID NO: 4134689 - RNA, 95 nt, Human
augaaagacuaagcugugcagagcuacauggagaagaaaauucuuagaaguaggaacuccacgaguguagguccugagacagaaaagucuguugu

SEQ ID NO: 4134690 - RNA, 76 nt, Human
augaaaguuucuucauuaagaugugaagucugaagugagaucaccuggguucauauccugguucugaaacuuucau

SEQ ID NO: 4134691 - RNA, 76 nt, Human
augaaauauuagccagaaaugaaugaugauagguacugauguucaaauuuauuuauucauucugucugucugucau

SEQ ID NO: 4134692 - RNA, 56 nt, Human
augaaaugagucaaugcgacuaggcugaaagauuguuuucugcuugacuauuucau

SEQ ID NO: 4134693 - RNA, 55 nt, Human
augaaaugucuggaucuuuuucuaauuguuugggaauaggguccauggauuucau

SEQ ID NO: 4134694 - RNA, 116 nt, Human
augaaauuuuagucuuuauaaccuuuccaaguaggcuggaguuuaacaucccaacaauucaggagacugauuuucuccauuguaaauucuguggaaguucuggagaauaauuucau

SEQ ID NO: 4134695 - RNA, 83 nt, Human
agugcucccacucaggugaugauauauuuaauccuagagccauugaaagcaguguucuuauaaauauauugaugggagacacu

SEQ ID NO: 4134696 - RNA, 78 nt, Human
agugcucuaggcacaggccaauacccucucucucgaaagcuccugaaagcagagaucauggcuuguaucugugagacu

SEQ ID NO: 4134697 - RNA, 101 nt, Human
agugcugagcaggcauggggcacuggugucuucagggacggcugcucccacgcaaggcugagacaaccugggacccagucacccacaucgccaucagcauu

SEQ ID NO: 4134698 - RNA, 67 nt, Human
agugcugggauuacaggagugagccaccgcgcccggccuuuuagcuuaucuugaaauccaccagccu

SEQ ID NO: 4134699 - RNA, 73 nt, Human
agugcugucucaagaaggauucuggaaucacaagagagaucagugaagaaagggcuccuuguugauuagcauu

SEQ ID NO: 4134700 - RNA, 62 nt, Human
agugcugugagggacuggauuacuuggucaguuuugguugcuggcuuccaguuuucagcacu

SEQ ID NO: 4134701 - RNA, 68 nt, Human
agugcuuuagcauccaacuguccuaacuaacauaccuaaauggcauugaagaugcagauuagggcacu

SEQ ID NO: 4134702 - RNA, 94 nt, Human
agugcuuuaggauguggauaaaaauuauguagucacuguggucuugauugcaucuguaauuuagauugauaacauuuuauacauucuaacuacu

SEQ ID NO: 4134703 - RNA, 62 nt, Human
agugcuuucuugcuccaucaguaagggcauacuuuaugauuguuggggucaggagcuagccu

SEQ ID NO: 4134704 - RNA, 102 nt, Human
agugcuuugucaagugccuggcacauaguaggugcacaguaaacuauaguuacuuuucugcguuauugaacaucugguauguguuaaauaacuugucugccu

SEQ ID NO: 4134705 - RNA, 71 nt, Human
agugcuuuuuaacaaacuuacuguguuuaaagaggaggaggaacccccagaugaaguaggugacgagcacu

SEQ ID NO: 4134706 - RNA, 75 nt, Human
aguggaagaagcugguguaaccuuagccuuugggaucucucagccaguuuguuuauuccggcucucacuucaacu

SEQ ID NO: 4134707 - RNA, 64 nt, Human
aguggaagauuuuucgguagcuaaaugagaauugcucaucaagucaucaaagaauucaucggcu

SEQ ID NO: 4134708 - RNA, 59 nt, Human
aguggaaggcugggaaaugcggcugguccagggcuuagcagucauccagccuuuccacu

SEQ ID NO: 4134709 - RNA, 69 nt, Human
aguggagguucuauguguaggaggucccaggauagugaguccucuuccuucucacuguggaaaagaacu

SEQ ID NO: 4134710 - RNA, 66 nt, Human
aguggaguuaauguccuugggguaaaucuaaucaaaacaagauggguccagcauauaaacuccucu

SEQ ID NO: 4134711 - RNA, 63 nt, Human
aguggauccugccuaguuauuugccaacaaaauacucggcaaauaccuuuccugccauucacu

SEQ ID NO: 4134712 - RNA, 62 nt, Human
aguggaugguauugggaccaggauaucagcauuuccuuauuccgguccuaacucucuccacu

SEQ ID NO: 4134713 - RNA, 70 nt, Human
aguggcagagccaaguagagcccagaccuucaaccuucuauuccuggggcucuuugcacagcucugcccu

SEQ ID NO: 4134714 - RNA, 72 nt, Human
aguggcagauguaggucuguaugugacauucuuguucaguuucauaaauguggcugccaccugccugaaauu

SEQ ID NO: 4134715 - RNA, 99 nt, Human
aguggcagguuuucugucagggagcucgaugccugagugucagacccaccaaagacguucauuccaucacgagcuagccccucaaaggaaucaaucacu

SEQ ID NO: 4134716 - RNA, 61 nt, Human
aguggcccucaggacaagguuacgcuagguacaccagugugcuguuuccagaagggcugcu

SEQ ID NO: 4134717 - RNA, 56 nt, Human
aguggcucauuccucuaaugccagcaguuuagggagguugagaugggugggucacu

SEQ ID NO: 4134718 - RNA, 71 nt, Human
aguggcuccuggcugggaaguagaguagguuucucuaaggaaaaugacaccugcucaccacccgccccacu

SEQ ID NO: 4134719 - RNA, 65 nt, Human
aguggcuguaggcuaugagagaaaaagaagucgagcaugauuucaugucuuuggccucagacacu

SEQ ID NO: 4134720 - RNA, 56 nt, Human
aguggcuuauguuuagaaucaugacucuggggccauguagaagaagcuaggucgcu

SEQ ID NO: 4134721 - RNA, 56 nt, Human
aguggcuucugcggugugcgcagggggccugcccccaugaagccccaugaagcucu

SEQ ID NO: 4134722 - RNA, 129 nt, Human
agugggagugccaauacuggguuagauguggacccucuuuuuuuauacgcucaauccuaucaucuuggcaauccaagaggaaaaggguagaagacagguuucauauuccuuaaggcaguuuccuuuacu

SEQ ID NO: 4134723 - RNA, 55 nt, Human
agugggauccucaccccagcaaugcuugaugauaguagggguagaguguccuauu

SEQ ID NO: 4134724 - RNA, 130 nt, Human
agugggcaaggccaugcucucaggaggcauucagugagaugguccuggcccagcccacgggaacggcugccuugguagugaccaucuugcccuguuccuguuccuuuucucauccccauccuugccuccu

SEQ ID NO: 4134725 - RNA, 61 nt, Human
agugggcaugaucuggugucuggaaagguggcuucggggacucauuguugugccuuucacu

SEQ ID NO: 4134726 - RNA, 94 nt, Human
aguggggacacgccuucuuuaaaguccuuugaauugaauugccggacucucacaaucagacagaaggacuauuugaauuucaggccuccccacu

SEQ ID NO: 4134727 - RNA, 76 nt, Human
aguggggguuuuccagcuuagagcaucauguuuaccugcucgcggggacauggaaugagauggaauguccucuccu

SEQ ID NO: 4134728 - RNA, 87 nt, Human
agugggguagcuuugcaaacuuuccucuggaccugaaauuccagcauccaguaaaguaggaacuuugcaucuccugcuaccugaacu

SEQ ID NO: 4134729 - RNA, 64 nt, Human
aguggguacaggguagggcaagggaaccugcguguuuaacacgugcccccucuacccacccacu

SEQ ID NO: 4134730 - RNA, 72 nt, Human
aguggguguggcuuaccuaaaaucauuccaaaauguaguguaggugggaugauagguaaguaauuaccuacu

SEQ ID NO: 4134731 - RNA, 57 nt, Human
agugguccauguucccagaagacaggaccuuuggccugcuuacuugcuuggaccacu

SEQ ID NO: 4134732 - RNA, 64 nt, Human
aguggugccauuaaaaucauugauuuuuagaacacauaaaugaauggauaguuuguggcccauu

SEQ ID NO: 4134733 - RNA, 58 nt, Human
aguggugucuuuuuugauuaggagaaacauuucuucuaguuauagaaaaagcauuauu

SEQ ID NO: 4134734 - RNA, 93 nt, Human
agugguuaggaacacacagaggcuccagagauagacugccuggauucagauuguacucauguccucuacgagcugugugacccuggaccaacu

SEQ ID NO: 4134735 - RNA, 55 nt, Human
agugguucacgccuguaaucccagcacuuugggaggccaaggcaggcggaucacu

SEQ ID NO: 4134736 - RNA, 55 nt, Human
agugguucagggugaagauacaaggucaggaagcugacugugcucgggaaccacu

SEQ ID NO: 4134737 - RNA, 68 nt, Human
agugguuuggggcuguguggguggagaaaaaugaauuucugagauguuccucagggccccagagcacu

SEQ ID NO: 4134738 - RNA, 55 nt, Human
aguguaaguagauacacuguccuucacaaaauuggcaguguguacugaaagcacu

SEQ ID NO: 4134739 - RNA, 68 nt, Human
aguguaauuacuuuuuagucaaagguuggcucuacaauguaggauuuugauuuuaaaauagugacacu

SEQ ID NO: 4134740 - RNA, 98 nt, Human
aguguagaaucaugucuuucaaaccacacaguaaaaucugaacuggaguuuugauauacaacucguauggcuugaaaugagaaccgugaaaauauauu

SEQ ID NO: 4134741 - RNA, 66 nt, Human
aguguaggguggucagagcagagcugcugggcauugcagccuuuaggucuucugcuucuuugcacu

SEQ ID NO: 4134742 - RNA, 65 nt, Human
aguguaggucgagagagguagccuuuguaugcauucagugcugggugaggugcccuccuuacacu

SEQ ID NO: 4134743 - RNA, 85 nt, Human
aguguauaugcaugcauacugugaacauacaugcaugcauucacaugcaugcauaaauguacacacacgcacagacauauacauu

SEQ ID NO: 4134744 - RNA, 63 nt, Human
aguguauuuuauuuucacaaaagaaaagugauuucacugaacuguguggaaaaaggagacauu

SEQ ID NO: 4134745 - RNA, 55 nt, Human
agugucaaaucagcaucugggucuugagaaaugccuagaaguggacauuugcauu

SEQ ID NO: 4134746 - RNA, 71 nt, Human
agugucagaugaagagcugcacauauuuauaucuggcuuuccagaaugcaguucauuucucuaugugcacu

SEQ ID NO: 4134747 - RNA, 75 nt, Human
agugucauguuuccaauuuuggggcugauguaagauauaagagucaaucuucaaacacuagaaacacaggauacu

SEQ ID NO: 4134748 - RNA, 103 nt, Human
agugucuaaaacaaacaaauacugauucaacuaacucuauuauuugaaaaaccuauucuuguuucagaugauuagaauaguauuuuaggaauuuguggauacu

SEQ ID NO: 4134749 - RNA, 57 nt, Human
agugucugcauguggugugcuaucucuuucaucuggucacaggaagcagcaggcacu

SEQ ID NO: 4134750 - RNA, 72 nt, Human
agugucugugaggggaauuccuguuccuggcccaaacccacaggccuugcucgugaaggccucucacacacu

SEQ ID NO: 4134751 - RNA, 76 nt, Human
agugucuuaaacacuuucacagguaagcaauacagggcugguauggcagcucuguucugugaguuguucgggaacu

SEQ ID NO: 4134752 - RNA, 64 nt, Human
agugucuuacaagaccaaagaaaggauacagcaagucaaugaagcugugugcuggucuguuacu

SEQ ID NO: 4134753 - RNA, 67 nt, Human
agugugaugucuugugaaaguuaaaggagauacaaaaucccugagaacuaaaccaugacauuauauu

SEQ ID NO: 4134754 - RNA, 127 nt, Human
aguguggauguauggauagaugggaaaggauuuagggcaaaagauucagucucaacagugcaagaaggaaucuacuacuuugguugaauauguaaugaauccccugucucuggagguaucaagcacu

SEQ ID NO: 4134755 - RNA, 55 nt, Human
aguguggucuucgagcagagguguucauauuuuauaucucuggaugacagacacu

SEQ ID NO: 4134756 - RNA, 58 nt, Human
agugugguucucaagguguggucacugaugcagcaucagcaucaccugggaacuuacu

SEQ ID NO: 4134757 - RNA, 57 nt, Human
aguguguauaugagucugaguguacaugccuggguauguaccagagcauauaugacu

SEQ ID NO: 4134758 - RNA, 71 nt, Human
agugugucauguagaaauugaugaagaagcgauaauuauagcagauucauugauaguuuuauguauguacu

SEQ ID NO: 4134759 - RNA, 61 nt, Human
aguguguguuugugguauuuaauuucauuaguacuggagaaaaaugcuuuugacacauauu

SEQ ID NO: 4134760 - RNA, 66 nt, Human
aguguucaucaauguguuuaauaaugccuggggaggcuuugguucuggcauugaauaaugaacauu

SEQ ID NO: 4134761 - RNA, 56 nt, Human
aguguucuaacaacugcuuucauggauucauaccaugucagagcuuguaggacauu

SEQ ID NO: 4134762 - RNA, 130 nt, Human
aguguugaugugugguuuucauuccuggugccucucgccuuuccaucuuccuuccuuaccuauuaagggcuuaagggcauucugcagcucugggguaagggguggggagcaggcgcccacacuucggccu

SEQ ID NO: 4134763 - RNA, 57 nt, Human
aguguugggcauuguagcagaccacccaggccuaguugcuaaaaagugccuaacauu

SEQ ID NO: 4134764 - RNA, 116 nt, Human
aguguuguaauugcaguuuuguugaaguucggguaucuguagaagagugugugugcucacucaguagccagacauuugacuguagauacuugcuauuaacucaguuaccucucgcu

SEQ ID NO: 4134765 - RNA, 130 nt, Human
aguguugucaauuauuuagcuaacaggcagaaaacuaggcuuuuauugacauccaaagggacucuccugaguguaauaaugaaggcaguuuauugaaugccugugagguugcuuucuaauuguacgcauu

SEQ ID NO: 4134766 - RNA, 57 nt, Human
agucugccuuuccaaucccgugagauaaagcucaugcuccauacuuggguggugacu

SEQ ID NO: 4134767 - RNA, 101 nt, Human
agucuggagcucacuucccacaggacgggcuaaagaguggugguccaacaggcaaagaucugaacucuaguccucguucugccuuagggagcugugugacu

SEQ ID NO: 4134768 - RNA, 59 nt, Human
agucuuacuuuggguugucuacucugagaucgauggaguacauuugacccaaauaagcu

SEQ ID NO: 4134769 - RNA, 81 nt, Human
agucuuauaccuuaugauaugcacuuuaucagaaucuaucuguuguuaguuuuggaagguuguguauuuuuuaauugggcu

SEQ ID NO: 4134770 - RNA, 61 nt, Human
agucuuauguuugugaagaacuuccaucauucaaaaggcaagccucuucauuguuaagacu

SEQ ID NO: 4134771 - RNA, 80 nt, Human
agucuucaacauuucugagaauaucaguuugaauaagauaggccugggagcuaaauaaucuuagaaaaugcuggaagauu

SEQ ID NO: 4134772 - RNA, 64 nt, Human
agucuucaauacuugacugugcucauuccuuguuagaggaguuauacacuaaguaugaagugcu

SEQ ID NO: 4134773 - RNA, 75 nt, Human
agucuucggagcagccaaacucggcguucacaacauagauguguuugacucuugcccaguuuggccauggagacu

SEQ ID NO: 4134774 - RNA, 55 nt, Human
agucuucuugggucagagaaucauuuacuuugagugaaugagauucaaggacacu

SEQ ID NO: 4134775 - RNA, 63 nt, Human
agucuugguuggguuauuacuagaggugugaccucugauaucgcacuaaacucugccaagccu

SEQ ID NO: 4134776 - RNA, 83 nt, Human
agucuuucaguuuucaauuucaucagaggugaugcuucauaauuugaacuuuugaugcugaaaauugaacugaaaaugagacu

SEQ ID NO: 4134777 - RNA, 70 nt, Human
agucuuuugcuccaggacaugacuuucuugcuauaggguaggguagaucagcucccugggacaaaaagcu

SEQ ID NO: 4134778 - RNA, 130 nt, Human
agugaaaagugugcuaagcacaggguuucagcagauaaucaugaugcaaugugcacaagggacagccucuuugcugccuugucucagggucuuuguaaugcaaacccuccauugagcccacauuuugacu

SEQ ID NO: 4134779 - RNA, 85 nt, Human
agugaaagaaaugagagaaaauuagauuuuacuguguuaaugaggcacacaggaaaugguuuaguuuugcuuuuacuuuuucauu

SEQ ID NO: 4134780 - RNA, 86 nt, Human
agugaagaauggaaugcaauggaauaggcugcucuuuaaagucagacaggucugaguuugaauccuuguucuaccauucucuaacu

SEQ ID NO: 4134781 - RNA, 58 nt, Human
agugaagagagaaaauggcaguucuuagggcccuagacugcccacaucucuuuccgcu

SEQ ID NO: 4134782 - RNA, 122 nt, Human
agugaagggaaaaaggcucuggaaccuuggaugucaguuccacgagagauaaauuuauaguuuuaacaaucugucuuuuauaacugacauauaaggucccagaggucuuuuuuccuaucacu

SEQ ID NO: 4134783 - RNA, 61 nt, Human
agugaaguagcucuguuugcaaguuagccaaaggcuuuugacagauagauguuauguuccu

SEQ ID NO: 4134784 - RNA, 63 nt, Human
agugaagucugcuggagccucuccuagucucuuagcagaggcacuguucuuagcgacuuuucu

SEQ ID NO: 4134785 - RNA, 82 nt, Human
agugaagugguagucacugcuauauuggauacugaggcuuuacaacugcaucaugucuguuaguaauggucaucucuuagcu

SEQ ID NO: 4134786 - RNA, 66 nt, Human
agugaaucguuaauacaggcuuccauugucuauaaacaaugaucacuugagaauuaacuguucauu

SEQ ID NO: 4134787 - RNA, 81 nt, Human
agugaaugugaggguggggaauagacugcuaugggagggauggaccugguggcagugagauuucucuucugggcagacacu

SEQ ID NO: 4134788 - RNA, 58 nt, Human
agugaauucuccacccaguaggaaagaagagacugucugucuuacuggagaauccauu

SEQ ID NO: 4134789 - RNA, 55 nt, Human
agugacaacaaguugacuagaauugcuggaaaguuuugguuggucuugaugcauu

SEQ ID NO: 4134790 - RNA, 55 nt, Human
agugacagaaacuuugcuuuuaaagacaaguaaggaggcaagguagaugucugcu

SEQ ID NO: 4134791 - RNA, 73 nt, Human
agugacagaauguaauauugcauuuuggguaaaaaucucauaucccagauuguaacuucuuaaauucuucacu

SEQ ID NO: 4134792 - RNA, 61 nt, Human
agugacaggaccaggucuggaaccuagguuuccauacuccuaguucaggucuccuuucacu

SEQ ID NO: 4134793 - RNA, 60 nt, Human
agugacaggggaggcagguguggcaagacagcgaugugagcauuuggugcccugucugcu

SEQ ID NO: 4134794 - RNA, 65 nt, Human
agugaccaucuaacgccugugauggugggaagcacgcuguaagguacaguaaguugggugguccu

SEQ ID NO: 4134795 - RNA, 66 nt, Human
agugaccauuuucagcuagaggaauugagcauuucagcuuagaagggucagcuuagaagggucauu

SEQ ID NO: 4134796 - RNA, 85 nt, Human
agugacuaaucgccaauggggaggaaagaagguccugugggagucaaagccagggucuuccucuaccccauucgugagaaacacu

SEQ ID NO: 4134797 - RNA, 71 nt, Human
agugacucugacagcucuggcuaguagaauaaugcugauuuuauauuuaucuuuggauguugucugucacu

SEQ ID NO: 4134798 - RNA, 55 nt, Human
agugacugacaccuguaaucccagcacuuugggaggccgaggcgggcagauuacu

SEQ ID NO: 4134799 - RNA, 62 nt, Human
agugagagggguucaucaggauauuugaauuuugaaaauaguuccugaauuuccuuucugcu

SEQ ID NO: 4134800 - RNA, 65 nt, Human
agugagaguucuguuacgugucaccaacaacauucuguauguuugccaugaacagaauucuaacu

SEQ ID NO: 4134801 - RNA, 61 nt, Human
agugagaucaugcaauauuugucuuucugucccugacugauuucaaauagcaugauguccu

SEQ ID NO: 4134802 - RNA, 61 nt, Human
agugagcugagcuuaacuccuugaauuccuguaugacuuuuucuguugugcucggcugacu

SEQ ID NO: 4134803 - RNA, 129 nt, Human
agugaggcaaguuauuuauauuuauuauuuauacccugcccacuuccagaaaugauuuaauuuggccuaggcaagugucuucugauggggugugugugugugugugugugugugugugaugauaauucu

SEQ ID NO: 4134804 - RNA, 78 nt, Human
agugaggcgaaggugcuggcgccccaggagacgcgcccccuccucucccucccugcggcgcggugacucagccucgcu

SEQ ID NO: 4134805 - RNA, 69 nt, Human
agugagggugagagaggccagagugccauguggugaccugaggccaggugcuuccccuguuaccucacu

SEQ ID NO: 4134806 - RNA, 70 nt, Human
agugagucagagccuuguuccuugccugucacgcggauauagcagcuuugaaacauggcucuagacuccu

SEQ ID NO: 4134807 - RNA, 64 nt, Human
agugaguggcagugaaggucauagcauucucacaaaggaaagugauagccacauuguagcaacu

SEQ ID NO: 4134808 - RNA, 57 nt, Human
agugauaccugcaaauccucauggaaccugaaaguccaugauaaugaagguguuauu

SEQ ID NO: 4134809 - RNA, 93 nt, Human
agugauaugaacuggucugccacaagauuuuugagauacuggaaauaagguuuuugaaaacauuuauggcaauuagaguaaguuuauguugcu

SEQ ID NO: 4134810 - RNA, 115 nt, Human
agugauaugcuuuaucguuguuguagugagugguaauuaggaauaaaaugggaaacaauucccauaaaagauugugauuagcauugauuaugcagacaacccgagguuuuccacu

SEQ ID NO: 4134811 - RNA, 61 nt, Human
agugaugaauaaaaauaaagcauguacugaauaccuagcccaugcuuaaguguucauuauu

SEQ ID NO: 4134812 - RNA, 69 nt, Human
agugaugcuagcucugggcacacaugagcucagcuuaauccucaugacaaccugugagcugguaugauu

SEQ ID NO: 4134813 - RNA, 96 nt, Human
agugauuaagggcuccaaaggugagugucuuaagagagccaggagaaaccuucauggccucuuacgacauagccuuggaaguuaccuggugucacu

SEQ ID NO: 4134814 - RNA, 79 nt, Human
agugauuaauaaaacagcgugguaguagucugaucaccuuuauggugaaucuggcuauugacauguuauagcaauugcu

SEQ ID NO: 4134815 - RNA, 107 nt, Human
agugauuauuuuugcuguacagcaguaugaggcaaggaucaucacugaucugggugguguuuccagagguauguucacuucccuuucuguaugguuaaaaaguuacu

SEQ ID NO: 4134816 - RNA, 81 nt, Human
agugauuuggugccuaccuuucaaaauauugugcaaagauaguucacacuagauaauuauaaaagguaggaacuccucauu

SEQ ID NO: 4134817 - RNA, 87 nt, Human
agugcaaauauucaacaugcaaacauguuuguguaucuguagacauaaaaauaaauagauauguauguauguguguguguguguacu

SEQ ID NO: 4134818 - RNA, 55 nt, Human
agugcacaaucuucauauggcguuuuaauuaaacugccuaugauuauuguguguu

SEQ ID NO: 4134819 - RNA, 61 nt, Human
agugcacaugcaggcacccagagcccacugcgugccggagggaaugaaagcugcguggccu

SEQ ID NO: 4134820 - RNA, 80 nt, Human
agugcacuacugugauacauagccagugcacuauggcaauacauagccagugcacuacugugauacacagccagugcacu

SEQ ID NO: 4134821 - RNA, 80 nt, Human
agugcagagaaugguuguaggugagaucuugaugcauaacacaaaaaaagcuauccaaauauauuuuauucacugucgcu

SEQ ID NO: 4134822 - RNA, 57 nt, Human
agugcagcuaaguggcucugugagguucucccaggucuccuucuuuagcugcucgcu

SEQ ID NO: 4134823 - RNA, 57 nt, Human
agugcaugcucuguagaaagcaggguuaaauaccaugggcuacagaagcaugcugcu

SEQ ID NO: 4134824 - RNA, 64 nt, Human
agugcauguaucuacagucacaaagcaacuucuugggcuuuaucuguugucuuuuacauguauu

SEQ ID NO: 4134825 - RNA, 80 nt, Human
agugcauuucucuuguggcuaaguagccuuuggauuuaucuuuucaaagguuucacaguagcccaucaaguggauauacu

SEQ ID NO: 4134826 - RNA, 79 nt, Human
agugccacuucaccugcuuuagacaacugcugggacaugcagugauccacagaccaguaucugcagcaggacagugccu

SEQ ID NO: 4134827 - RNA, 78 nt, Human
agugccaucuucaauugaaaacuagccuuugccuaacuuaucaacuagaaaacaagguuaauucagugaagaucaacu

SEQ ID NO: 4134828 - RNA, 103 nt, Human
agugcccacgccuagauuguaaguuccuggaaggcaaggauuugugucccacacuuguuuuguacccuccaggaucuugcacagcacuuggcgaauggguauu

SEQ ID NO: 4134829 - RNA, 76 nt, Human
agugcccacugcagggugcuuaggggguuuggcaggcaaugggaugcucuccuucuccucugcaaugacuggcacu

SEQ ID NO: 4134830 - RNA, 110 nt, Human
agugcccagagaaaggcuccauucaccgggcgggcugcucuccauggccgugagugucccgcgcucucugccgaccgcgggccccuaggaggagccuuugcuccaggccu

SEQ ID NO: 4134831 - RNA, 55 nt, Human
agugcccugucacuggaacugacaauacuugcuccagccauccaguggaggcacu

SEQ ID NO: 4134832 - RNA, 74 nt, Human
agugcccuucacaauucugaugguuucccaguuucuucuugaacuaaagcucacagaguugaacuuuaugcacu

SEQ ID NO: 4134833 - RNA, 91 nt, Human
agugccuccuucuacuuuguguuuauauguguguguguguuuguguguggugacaggugaccugcucauaugaaagucuucaggggguauu

SEQ ID NO: 4134834 - RNA, 56 nt, Human
agugccucuuuuuccgucuguuuguuucccaugugcccacggaaugaugaggcacu

SEQ ID NO: 4134835 - RNA, 80 nt, Human
agugccuguucucugcuccaggaacagagcugcugcucuacaagcagccuugugacuccggggucucugggagcaggacu

SEQ ID NO: 4134836 - RNA, 129 nt, Human
augaagacacaaaugauguucuuugaagccauugggucaaugugauauuucaagaguggggcagcuggcccagcugcugguauggagaucaugaugcagcuucguuacugucauuuguaaaacuuggcu

SEQ ID NO: 4134837 - RNA, 65 nt, Human
augaagcaggcaaggacaggcagcaaauacaagguguugagcugcuguguuggccacugcuucau

SEQ ID NO: 4134838 - RNA, 64 nt, Human
augaagcccuauccucuccugggauagaaauaccaucuccuauuaguaggacaaagggcaucau

SEQ ID NO: 4134839 - RNA, 112 nt, Human
augaagcuugcugacaaauacacuucacacaauuaugugugcacaaugggcuaaacaccuguuuauuaaugucuaccaguugugugccagagugggcuuguauaagcuugau

SEQ ID NO: 4134840 - RNA, 85 nt, Human
augaaguauauauuggauuaggcaccuauagguacauuacccauuuccuaaauuguaccuuuauguuugauuacaauuacuuugu

SEQ ID NO: 4134841 - RNA, 56 nt, Human
augaagucugccaaggaaaggcacuauaguguuuugacaccuaacagcagcuuuau

SEQ ID NO: 4134842 - RNA, 109 nt, Human
augaauaaagcaagcauaccauuaaguggaauuaaaucagacuuguuuucaguuaaaauagcgggauuucuggguaauuccauauuggaaacuagcugguuucuuucau

SEQ ID NO: 4134843 - RNA, 87 nt, Human
augaauaccugugcguaugggucugugauguguaugacaccuccguguguguguacacaugacaggcacccacgcguggguguguau

SEQ ID NO: 4134844 - RNA, 80 nt, Human
augaaucaugacccauuuucuagauguucuacuggggaaagcagaauuguuuuaagguggacaucuaagucaugaauuau

SEQ ID NO: 4134845 - RNA, 61 nt, Human
augaauccauuccugccacagacuucgauugcgggccuacugugugcucggauggacucgu

SEQ ID NO: 4134846 - RNA, 88 nt, Human
augaaugaguaaucacccagcaauuuagucaaagauauuuucuauccuuugucccugacaaguuuccuggugauuuuuccauauucau

SEQ ID NO: 4134847 - RNA, 71 nt, Human
augaaugcaugaagguugggugaauagaaugucguugauuaggauaaguagcuccuagccuccaagcucau

SEQ ID NO: 4134848 - RNA, 76 nt, Human
augaauguggugguaacggcaauagcucccuccuuggcacuccccgucggggcuggcucuuaccgacagcguuugu

SEQ ID NO: 4134849 - RNA, 81 nt, Human
augaauguuuuggaaccuugccucagaaaaauguauguacacacauauauacaacuuuacaugcaauuccaggguauccau

SEQ ID NO: 4134850 - RNA, 113 nt, Human
augacaaauaagcaggugaaaagagucuuagccucauuagucauuaaggaaaugcaaauuaaaaccacaauaauucagugcugguuaagaugugggucaccuggaacugucau

SEQ ID NO: 4134851 - RNA, 81 nt, Human
augacaaaugaugcagcugcucuuccucuauuggacacauguacaaaacaggaagagaggagcaguugcuacauaugccau

SEQ ID NO: 4134852 - RNA, 64 nt, Human
augacaaggcccuggcccccagagauucugguucaguggucuggggucaggccugagaauucau

SEQ ID NO: 4134853 - RNA, 64 nt, Human
augacacaagagcagaagccaucuuggugaccacacuccucaacacggcugucucuugagucau

SEQ ID NO: 4134854 - RNA, 77 nt, Human
augacagaaucucacaggacugaaacguaacauaaucuuuauguguauguuuucucguuguaguuguuauuugucau

SEQ ID NO: 4134855 - RNA, 71 nt, Human
augacagauuuagucucccuuaucaaggaauuuacuugaaacucuuugauacgagggacugaauauuuuau

SEQ ID NO: 4134856 - RNA, 56 nt, Human
augacaguuucacguccuccaggguuuaaaccucauggagacuuugagccuguugu

SEQ ID NO: 4134857 - RNA, 73 nt, Human
augacauauauguguguguguguauauauaaaauauaugcauguguauguacacauacacuuguaauuuucau

SEQ ID NO: 4134858 - RNA, 60 nt, Human
augacauccagugacagugugggagcaggcuacucuccagggacauguuucuggaggcau

SEQ ID NO: 4134859 - RNA, 70 nt, Human
augacccauuugcuuuuccuguaaaacuugauuuuauuuucauuaucucuuacaggugaagagagggcau

SEQ ID NO: 4134860 - RNA, 100 nt, Human
augaccggcaaccacugaagacaagaaaacacuggggaagcacugaaacccacagccuucucagcauuuauuuuucuucaaauuggaaucagcucaccau

SEQ ID NO: 4134861 - RNA, 95 nt, Human
augacuaaaacacuuuuccugcccucgaggagcucacagucuaguaugucucauccccuacuagacugaagcuccuugaggacagggauggucau

SEQ ID NO: 4134862 - RNA, 70 nt, Human
augacuauuguaauagaggcuaacauguauuaaacucucacaauaugacaggcucugucauaagugucau

SEQ ID NO: 4134863 - RNA, 57 nt, Human
augacugguuucauuaagguuauuuuaguaaaguagauuugauguaagcauagucau

SEQ ID NO: 4134864 - RNA, 76 nt, Human
augacuuagcuggguggugcuuguucaaggucucucaugaggcugcaggcaggguauccacuggggcuacagucau

SEQ ID NO: 4134865 - RNA, 81 nt, Human
augagaagauugagucaggccuccagguuaccauuuguuagcuguguggcuuuuaguggcuuugagcuucaguuuucucau

SEQ ID NO: 4134866 - RNA, 126 nt, Human
augagaaggaagagucgagguguaggguuagagguguaugaguacagguuugaggguuuccuuucaacauauaccauaaugcccccauccccaaacccaaaacacguucuccaugauccuuagcgu

SEQ ID NO: 4134867 - RNA, 126 nt, Human
augagacaagacaggagaggagaugcuggcgcgacacuguggccaggacugcagggggcgaggagccgggccgguccagucccgcgcagccugggcacugugcgucugggguccuucugacaacau

SEQ ID NO: 4134868 - RNA, 73 nt, Human
augagacucauggccagucuguuggacagcacuugucuggagugauuguccuuuagauggcuauauuacucau

SEQ ID NO: 4134869 - RNA, 92 nt, Human
augagauagauggcucgagaauggggccucuuagacucugccucuuacagugguccugggauuugcccuuuucucuuaacauaauuuuacau

SEQ ID NO: 4134870 - RNA, 76 nt, Human
augagauauguuaaaaguuaaaaauacagcuguugguaauguguuguaaugaaacuaacuuuugugccuaucuugu

SEQ ID NO: 4134871 - RNA, 61 nt, Human
augagauuuuauagugucuugaagccuggggacucuccucccccaaauacuguugucuuau

SEQ ID NO: 4134872 - RNA, 60 nt, Human
augagcaagagcuauguacagacuggcauagaaaaagaaaugcaaauagcucuugaucau

SEQ ID NO: 4134873 - RNA, 56 nt, Human
augagcaauuuuagcaucuccaagccagcacuaaaggaaauacugaaguuguucau

SEQ ID NO: 4134874 - RNA, 58 nt, Human
augagcaucugagccagugacugaggagguggcaccugaccuggcuucagauguacau

SEQ ID NO: 4134875 - RNA, 84 nt, Human
augagcggaggaggugacgaaaagaaauuguccugagaggaagccaagggcaaaacuuuacucuuguagccuuuacuccguagu

SEQ ID NO: 4134876 - RNA, 79 nt, Human
augagcugugaggguacagauauuugcugaacuauuuacaugauuaauguuccuauaauguuugcauucuuauuaucgu

SEQ ID NO: 4134877 - RNA, 67 nt, Human
augaggaauguugaauauaccugcauuuguguaacuaaucuacauaaauguuaaauauuuuccugau

SEQ ID NO: 4134878 - RNA, 127 nt, Human
augaggagucauugaguuggugcguuuugcaugauuugauacauguuaugugguuagagcagugcuuggcacauaguaagcuuuacauaaacauuuauuauucguauucacuaaguccacuuuccau

SEQ ID NO: 4134879 - RNA, 61 nt, Human
augaggagucugagaccgagggaugcucgaugaaucaccccaggucuccaggcucuggcau

SEQ ID NO: 4134880 - RNA, 73 nt, Human
augaggauuucucugagccugggacaugcuuuuguagucuacaaagguggaccauguggcuuuuuaucuucau

SEQ ID NO: 4134881 - RNA, 55 nt, Human
augaggcauuccacucaaacucauuuuuccuugacagugggugggucagucucau

SEQ ID NO: 4134882 - RNA, 56 nt, Human
augaggcugacucccauguacugugagucagacuuccaggcuuggaacagccuuau

SEQ ID NO: 4134883 - RNA, 107 nt, Human
augagggaaauuacagcaaaucugagacugaguuuggauuuuagugcuuaagaaauacccaaagggaaugaaauaaaugccuaguuacagauuuuguguuuuugcau

SEQ ID NO: 4134884 - RNA, 78 nt, Human
augaggggaggcacagaguaggugcacacaguaggugccgaaucugagugguuuuauucguuccucuguagaccucgu

SEQ ID NO: 4134885 - RNA, 62 nt, Human
augagguugcucugugccuuccaacauuugagaccuggaugugugcacagagcaaguuucau

SEQ ID NO: 4134886 - RNA, 56 nt, Human
augaguaagugaaucuccaaagguuucccagcccauaauggagauaaacuucucau

SEQ ID NO: 4134887 - RNA, 68 nt, Human
augagucauuugauuuugcauauaugagcccugcuuggagcuaaguaacugcauaauuaaauuuucau

SEQ ID NO: 4134888 - RNA, 77 nt, Human
augagugacugguuuugacaggaauuuaauccuucaauuggauuucccuuuguucuugugaguaaucaguaucucau

SEQ ID NO: 4134889 - RNA, 94 nt, Human
augaguguauguauauaucacuacacuaagauacagaucuagcccuauggguguguguguguguuugugugugugugugugugcaugcauuugu

SEQ ID NO: 4134890 - RNA, 129 nt, Human
augagugugcuuuaaaaccaaaaauuguuuuugucauugguuugguuuguuuuuaaaucaucgguuuggaauuacuuacucaagccuuguaacaucaagcaggacuaucuuuuuuauuguguaucucuu

SEQ ID NO: 4134891 - RNA, 63 nt, Human
augaguuauuuaaaaugauuguccuuggaggccuuugggaccaagucauuuaaauggacugau

SEQ ID NO: 4134892 - RNA, 63 nt, Human
augaguucaggccugccuugcuuacgagacuauuauguccucaaggcaggaagccugucuuau

SEQ ID NO: 4134893 - RNA, 114 nt, Human
augaguuucuguuccgugcagugaguugcauccuaacugauaguggguuucacugaaggucucagcaaggaugugagcgcagacugcauaacuuugggggaaugagaggcuggu

SEQ ID NO: 4134894 - RNA, 78 nt, Human
augaguuuuuuaauccucuugguaucuuaauuucuccaucuacccaguaaggcuguuaggaggauuaaaugugcucgu

SEQ ID NO: 4134895 - RNA, 73 nt, Human
augauaccagggcagcagaauuggggcacauuagagacacaggcucugcccacauucugaagcucccugucau

SEQ ID NO: 4134896 - RNA, 122 nt, Human
augauagggacaauagaaaccaaaaccaaaacauagaaggaagaguaguaggaucucuucacagauuuuuauucuuuugauucuguuccuaaaauuuggcuuuucaccuuuguaacuauggu

SEQ ID NO: 4134897 - RNA, 82 nt, Human
augauauggacauuuuugaagagucuagauugguuauuuagcaaaaugucccuugauuuagacuuuuugaguguuucuucau

SEQ ID NO: 4134898 - RNA, 66 nt, Human
augauauuuuaguaaagugauauuuuauuacuaauguagguauuacuaaagauuacugaagaucau

SEQ ID NO: 4134899 - RNA, 70 nt, Human
augaucuguggggccugugggcucugaccucacucugcagcagcaaagcccagaggccucacuuuuucau

SEQ ID NO: 4134900 - RNA, 75 nt, Human
augaugacaucgcccuggggaagagaagcugagaggaacuccucacucagcuagcuucaggagccaugacaucau

SEQ ID NO: 4134901 - RNA, 55 nt, Human
augaugccaaaucuagagaaagcacaaucaauggccucucagaauuggcaaucau

SEQ ID NO: 4134902 - RNA, 58 nt, Human
augauggugagguugagcacagagcuggugagaaguucacagucacuucgccugucgu

SEQ ID NO: 4134903 - RNA, 94 nt, Human
aggucacaggggaaggaaguugcagaguaagauuugaacugaagcaaucagccuucagugucccgucucuuaacucuuucucucuauuuaaccu

SEQ ID NO: 4134904 - RNA, 68 nt, Human
aggucaccuucuccucuuucggugaugguuuaaauuuucuugaaagcaugagauggacauaaugacuu

SEQ ID NO: 4134905 - RNA, 60 nt, Human
aggucacuuuggccucuacagccaugccauuccaugacugcuaacacgccaaaguuucuu

SEQ ID NO: 4134906 - RNA, 56 nt, Human
aggucagagaugaggucuaaagucuauccaagcacuuuauccuauaucuuuguucu

SEQ ID NO: 4134907 - RNA, 76 nt, Human
aggucagaguuggcuacucucugaggcuuucugucaugaaucugcuggcggccucucagggcagagacccugaccu

SEQ ID NO: 4134908 - RNA, 57 nt, Human
aggucagaugggagaugggauggggcuuugcccauaucuaagagucuauucuaaccu

SEQ ID NO: 4134909 - RNA, 65 nt, Human
aggucaggagguuaagagucuuuugccaacuggccuuagguaagucucuuuaccucuccaggcuu

SEQ ID NO: 4134910 - RNA, 73 nt, Human
aggucaggaguggugugagggacucccaugcccauauauuccauggccucucauuuccaucacuuucuuaucu

SEQ ID NO: 4134911 - RNA, 57 nt, Human
aggucauaaaauuaagauaauggcagaaaugaaaggagucuuuauguuuuaugaccu

SEQ ID NO: 4134912 - RNA, 71 nt, Human
aggucauagguagauuuaaagauuuucugauuagcaauugguugaaagaguuaagcuuugccuaaagacuu

SEQ ID NO: 4134913 - RNA, 70 nt, Human
aggucaucuuugcuugacacugugauugucagagcccugaugguguuuauaggcaaagaucaaugacacu

SEQ ID NO: 4134914 - RNA, 97 nt, Human
aggucaugacauuugagcaacaauggagguuuggagggaguggcucuuaggcuaggucuaccuggaguccguuguuaaguucaauuuuguuuguucu

SEQ ID NO: 4134915 - RNA, 75 nt, Human
aggucauggguaaauuucuuaagagggccaguuaauuugguucuggaacauagcaagaaguuguacuccugaccu

SEQ ID NO: 4134916 - RNA, 81 nt, Human
aggucccgaggggcgggaggccaggguggguggccugcuuggccaccccaaaugaagaccucuccucucccccuuuuuccu

SEQ ID NO: 4134917 - RNA, 127 nt, Human
agguccguggugcucucagugccccgaggagggugggggucggccugacccgcuuccgcccgugcuucucagguggcagggcagugucuggcccccaggcugcucuaggucuggguuccucgcuccu

SEQ ID NO: 4134918 - RNA, 67 nt, Human
agguccucagccaucugaauuagcuuuguuuuuguguggaacuguaaagguugagugguaagggcuu

SEQ ID NO: 4134919 - RNA, 127 nt, Human
agguccuugugaaguugagucgaccacugguuacagaaguggauauuagaguaauacacuaccagugaaaaucauucagugaccacuucccaucagagccgaucacaguucaucuugacauggaccu

SEQ ID NO: 4134920 - RNA, 79 nt, Human
aggucgguguccacucauugcccugcgggcuccuuaccucauugaaguccauuuaggagccaugagugacaucacaccu

SEQ ID NO: 4134921 - RNA, 57 nt, Human
aggucucucaaguuuccauagcugauucugaaucccagauaggaagcgagcuggccu

SEQ ID NO: 4134922 - RNA, 72 nt, Human
aggucucugaaaugcuuagaugaggcagcaggaguuugaauuacuggcugagucagcaggucacagagaccu

SEQ ID NO: 4134923 - RNA, 129 nt, Human
aggucugaaacauuuuucuugccccauucacuggcuacaguucagaaaugucuuugcaaaauccuaggacuuugugaaacacauuugaaagccacugagcuggaacaucucuugauaauaucagagccu

SEQ ID NO: 4134924 - RNA, 69 nt, Human
aggucugaucaugagauuauaugauuccaucaauuaaaagagaaucaguucuacaucuuauccagacuu

SEQ ID NO: 4134925 - RNA, 64 nt, Human
aggucugggaguucauucccuggagaggggaacagaaaucucuggaggaaaagcugccaggccu

SEQ ID NO: 4134926 - RNA, 64 nt, Human
aggucugggcuccuggcaggcagccuucuccacagggcgcucugucucagggguccagcagccu

SEQ ID NO: 4134927 - RNA, 58 nt, Human
aggucugguauuuuucuauacugagaagcucuuacagcuguaaaaauauaccagaucu

SEQ ID NO: 4134928 - RNA, 55 nt, Human
aggucuguuugcuguuuucuccaaugaaaugguucuggguaaacagcagacgccu

SEQ ID NO: 4134929 - RNA, 126 nt, Human
aggucuucaaguaucaggcuaagaaauguggacuucauccaguagguaaugugaugucacuggauaucugugcaguaucuaugugauggguugggaguggagaagccuggggauacuuaagggucu

SEQ ID NO: 4134930 - RNA, 69 nt, Human
aggucuuuuuugugcauucaaguaggagccacacaccauguuggcuaacugcccccugugugaagaccu

SEQ ID NO: 4134931 - RNA, 60 nt, Human
aggugaaccuauaaucccugggcaagaaaggagagcuaguccaggaaugucuguucaucu

SEQ ID NO: 4134932 - RNA, 79 nt, Human
aggugaauuugcaccuagaggucccggcaggacuucguuaaugagcgugcuccugccucaggacucugcauauucuccu

SEQ ID NO: 4134933 - RNA, 68 nt, Human
aggugacagcagggucacauucccucugguggcuccagaggagaauccguuuccuugccuuuucagcu

SEQ ID NO: 4134934 - RNA, 57 nt, Human
aguugaguucuuugucauucacagacaaaagcguccugacugaaauagaauuuagcu

SEQ ID NO: 4134935 - RNA, 80 nt, Human
aguugauuguaaaugaccuuuucuaauuagggaguaauuaugacugugugauuugaaaagguaauuuugaacuuguaacu

SEQ ID NO: 4134936 - RNA, 66 nt, Human
aguugcagcacuugccaaacuaacucaggucagaugcccaaaggagggguggagguggcugcagcu

SEQ ID NO: 4134937 - RNA, 121 nt, Human
aguugcauccuguccuuaaagcaggaacucuuauucuggaguuugaggacaagcuucugcaaaucugugaagcuccugaauuuugaauguagagcacauuuuggagagaggaugcauagcu

SEQ ID NO: 4134938 - RNA, 83 nt, Human
aguugcauggugugauggaaggagaauggucuuugaaagcagacagacauaauuucaaauaccagcuuuuccagaauguaacu

SEQ ID NO: 4134939 - RNA, 56 nt, Human
aguugcauguccaaggggguagauuuucaucacccuacuaaaugugguaugucacu

SEQ ID NO: 4134940 - RNA, 79 nt, Human
aguugcugaaauuauuguguaaaaugaggcuuuugcuuuaaagguuucauuugucagugaauaauucauuccagcaauu

SEQ ID NO: 4134941 - RNA, 60 nt, Human
aguuggacacguuuugcuauaaaagaaauauuuuaugugugaaaugcugucuucaagacu

SEQ ID NO: 4134942 - RNA, 58 nt, Human
aguuggauggaucaagcugaccucuccuggugagccaguucuucagauccauccagcu

SEQ ID NO: 4134943 - RNA, 56 nt, Human
aguuggcuucaguguauaguggggcuucuugaccuccaucaucacaugagccaauu

SEQ ID NO: 4134944 - RNA, 69 nt, Human
aguugggaagaauggaggugguuagaauuauuacuauauuuuuuuauaccaucccccuucaaccaaacu

SEQ ID NO: 4134945 - RNA, 62 nt, Human
aguugggacuguauguguauacacacaauuacacaaacaaauauacacauauucuugcaacu

SEQ ID NO: 4134946 - RNA, 74 nt, Human
aguugggauaugggucaguucaguggccaacagucucuguucccaccaugcugcacccaucucuuaccccagcu

SEQ ID NO: 4134947 - RNA, 79 nt, Human
aguuggggagguggcugucagcuucacuugaaccugaaggucugggaguggaaggcaugacagccgcccaccuccaauu

SEQ ID NO: 4134948 - RNA, 79 nt, Human
aguuggguaccucaaggguaauuagggcucauuauugcuuagaauacagugcuaaacacuucuugaaauuauucaaacu

SEQ ID NO: 4134949 - RNA, 106 nt, Human
aguugguaguucgcucccgggcugaucucagaguguggaacuugaggagcugcggugacauccugcagccacacgggagguggcuccucaggggcgauugcuggcu

SEQ ID NO: 4134950 - RNA, 69 nt, Human
aguuguaaaauaauguaggcauuagccucuaguaaaauauuaagaaggcucauuugacugcauucagcu

SEQ ID NO: 4134951 - RNA, 81 nt, Human
aguuguaaauaauuaaaagcuucccaagaguuaaaugaagguuaugaugacucuugauaacuuguuaaucuguugcugacu

SEQ ID NO: 4134952 - RNA, 78 nt, Human
aguugugaauauauuauucagcuuuucacucaugguuuauaaauauguugaauaugcauuuggguaauguauauaacu

SEQ ID NO: 4134953 - RNA, 72 nt, Human
aguugugagacugugccauguauuuggggucaucuggcuagauuuauuucauugcacauggcaguucacgcu

SEQ ID NO: 4134954 - RNA, 61 nt, Human
aguuguuaagaggauggacuuuggagacagacacuucaguuuccacuuacauuuaauggcu

SEQ ID NO: 4134955 - RNA, 71 nt, Human
aguuguuauaugugaaacuuuguuuauccugucuagggauaggauacacggggauuuauguagacauaauu

SEQ ID NO: 4134956 - RNA, 91 nt, Human
aguuguucaguguucauuccgucuguccuuuaucuugucugcuccuugggaaagcugggugaaggcagauggcuuuggcgcaggcucagcu

SEQ ID NO: 4134957 - RNA, 92 nt, Human
aguuguucugagaagggcuuggagauguggcccuaaagccccgauggaugaggagguucauauuugucaucugccuuaguucagagaagacu

SEQ ID NO: 4134958 - RNA, 67 nt, Human
aguuguuuaccuucugagcugcagacagaaguucacaucuguuauacagacacgaugguauccaacu

SEQ ID NO: 4134959 - RNA, 88 nt, Human
aguuuaauuaaauguuuaguuuuauuuuaguaauacuuuggccuuuguaguugccgagugguaaaguguacugaauaugaauaaagcu

SEQ ID NO: 4134960 - RNA, 74 nt, Human
aguuuagguacagcaauauaagaggucaggggucaagcaauauaaacugccuccgagaaggcuguaauuaaauu

SEQ ID NO: 4134961 - RNA, 79 nt, Human
aguuuaucagauaucuuguauauguagggaugaggcagcuguauaacaaguuguagaguauagaaggaucuggugaauu

SEQ ID NO: 4134962 - RNA, 88 nt, Human
aguuucagguagcaucucuccaggaagcccucccugacucauucaggcugagcuaggugauagcuuccugggagcuauccuagggauu

SEQ ID NO: 4134963 - RNA, 55 nt, Human
aguuucauaugagccugugguugccagagauguaaacauugguucaaauaaaacu

SEQ ID NO: 4134964 - RNA, 80 nt, Human
aguuucauguuuauguuccucagggaggcuagcaguaagcacucggaacguauauucuaguacccugaaaaccuggaacu

SEQ ID NO: 4134965 - RNA, 57 nt, Human
aguuuccaaagcauguucacacacuauuuccugugggcuccauuggcaauggagacu

SEQ ID NO: 4134966 - RNA, 87 nt, Human
aguuuccuuggcagcaguguagagaauggccuugaaguaguccuggggcuaaacaggaauccucucuccugcccauguuaggaaacu

SEQ ID NO: 4134967 - RNA, 76 nt, Human
aguuucugggaaaauggaggcagugauuugcugaaggccacacagcaaauauuucuguagcuauguucuuuccacu

SEQ ID NO: 4134968 - RNA, 55 nt, Human
aguuucuugcauggggcaaugugauuccugccacagggccuuugcacaagcagcu

SEQ ID NO: 4134969 - RNA, 78 nt, Human
aguuucuuucugucuuuguucaggcugcuauagcaaaguagcauacacuaaguggcuuacaaacaacagaaauuaauu

SEQ ID NO: 4134970 - RNA, 68 nt, Human
aguuugaaagcuuaacaguacaaauguucucuccaugguacuguuacauagcuuuucuuaaccagacu

SEQ ID NO: 4134971 - RNA, 64 nt, Human
aguuugaccauccugaauaccugauggggaaucacuucccauuauuauaggaggcucauuagcu

SEQ ID NO: 4134972 - RNA, 78 nt, Human
aguuugaggagaacugguguuaguccuucuugggaauuuugguagaauucagcagugcagacacccaguccucagauu

SEQ ID NO: 4134973 - RNA, 75 nt, Human
aguuugcaaaauaaggaagaagaagaugaggagaugcagucuucauuucauuucuuuucccaauauuuugcugcu

SEQ ID NO: 4134974 - RNA, 99 nt, Human
aguuuggguguuugaagcugugccuuguggagggccuugcacagaggaugacucaguuagugucugcccauucaugggcacaggccaagcuacccugcu

SEQ ID NO: 4134975 - RNA, 84 nt, Human
aguuugucugucuuaagcaaggcagccuuuguuugauugauuuuacccuuucugucuaacggggcuggccugaccugacucucu

SEQ ID NO: 4134976 - RNA, 64 nt, Human
aguuugucugucuucaaagccugcacucuuuccagaauauugugcuacuucuagaaggcaaacu

SEQ ID NO: 4134977 - RNA, 74 nt, Human
aguuuguguguauauacugauguaaaacucuccauggcuccauggcugggcuuuuagucagauuucaccaaauu

SEQ ID NO: 4134978 - RNA, 71 nt, Human
aguuuuacccuggagcaaguuuccucagucauguuaaauucauggggaaaauccuccuaggauuuagaacu

SEQ ID NO: 4134979 - RNA, 67 nt, Human
aguuuuagacauuguaacgguggcucuucuuucauaauuuuaugucacugugaagaugcuauaaacu

SEQ ID NO: 4134980 - RNA, 82 nt, Human
aguuuuaggguacaugcgcacaacaugcagguuaguuacauauguauacaugugccauguuggugugcugcacccgucaacu

SEQ ID NO: 4134981 - RNA, 82 nt, Human
aguuuuaggguacaugcgcacaaugugcaggucaguuacauauguauacaugugccauguuggugugcugcacccauuaacu

SEQ ID NO: 4134982 - RNA, 82 nt, Human
aguuuuaggguacguaugcacaacaugcagguuuguuacauauguauacaugugccauguuggugugcugcacccauuaacu

SEQ ID NO: 4134983 - RNA, 82 nt, Human
aguuuuaggguucaugugcacaacaugcagguuuguuacauauguauacgugugccauguuggugugcugcacccauuaacu

SEQ ID NO: 4134984 - RNA, 56 nt, Human
aguuuuaucuguaagcuguucagggcccugcuuggccuugccuuuuggauggaacu

SEQ ID NO: 4134985 - RNA, 83 nt, Human
aguuuucaggagagcacaacauugcccuuagacuagauucaaaauuuuguuaaggauguugugauuuauuauuccggaugacu

SEQ ID NO: 4134986 - RNA, 103 nt, Human
aguuuucccccuuauucuuuuguuaaauucuggcugccacauuuucuacuaugaaauaaaacuagucuguggagucagagaauaaagaaugcauaagaaaacu

SEQ ID NO: 4134987 - RNA, 68 nt, Human
aguuuuccuaugauauucuauguguccugcauuugaaaguggggcaccauuaaucauccauaggagcu

SEQ ID NO: 4134988 - RNA, 58 nt, Human
aguuuucuaccagggaagagagucccacuucaugggauuaagaucauuguagaagauu

SEQ ID NO: 4134989 - RNA, 61 nt, Human
aguuuucucacaucaaaaaugaggauaauaguucugaccucauuagguuguugagagaauu

SEQ ID NO: 4134990 - RNA, 59 nt, Human
aguuuucugccucuggaugcguaaagcuucaaccugcuggcuuuuagagggagaggacu

SEQ ID NO: 4134991 - RNA, 88 nt, Human
aguuuucuuggaggccugcaaacaaggacuucugagccaaaaccauggcuaaguccuggcugguuugaagcagccucuuagacaaacu

SEQ ID NO: 4134992 - RNA, 70 nt, Human
aguuuugccacggugccgagcgcaggacgaugacccggcccaaugcccuggaucgaugccgagggaaacu

SEQ ID NO: 4134993 - RNA, 61 nt, Human
aguuuuguauaagcaacugucaccauuggaaggggacaguuuaugguguuuuauauagacu

SEQ ID NO: 4134994 - RNA, 72 nt, Human
aguuuugucugcuccucccagccucauucagaguuccaagggaguaaggccugagagagagcagauauuucu

SEQ ID NO: 4134995 - RNA, 94 nt, Human
aguuuuguuauccacuugggcuuagaagguaagugagcuuuuuacccuuguagucauuuuuacuuauuuuuauaaguacaauaccuaacauacu

SEQ ID NO: 4134996 - RNA, 63 nt, Human
aguuuuuaaaauguuaggugauucagaucuuaauuuucugacugaaauugcauuuuaaaaauu

SEQ ID NO: 4134997 - RNA, 88 nt, Human
aguuuuugaugucugugauucuaaauuaaggccugaaagggcagguuuucuuacaggagagauuuaguaaucaucacaucagaaaacu

SEQ ID NO: 4134998 - RNA, 76 nt, Human
aguuuuugugugagccuagguuuccgauucucuuggguauauaucuaggaauagaauugcugggucacaugauacu

SEQ ID NO: 4134999 - RNA, 117 nt, Human
aguuuuuuaucacaucuccaaaaaaggaagaucaaugugucagaagagaugcuaguagucaacuuuuauccauuuguaaauguuagagucuucauuuuuucuucuguguaaaauacu

SEQ ID NO: 4135000 - RNA, 92 nt, Human
aguuuuuucuucauauuucaauuguucaaaaauaucuucugcaaagcugaugucuguuuuguaaagggcauuugcacagugaggaaggagcu

SEQ ID NO: 4135001 - RNA, 76 nt, Human
auagauguauggauaggugauaaugaagcagccagaauuaaagagcuuauauaucuguucauguuuauaugucuau

SEQ ID NO: 4135002 - RNA, 84 nt, Human
auagauguuaguggauugacuguuaaacgaauuaaucauucucuuucaauucguacugcuggcagaaguucacuaguagcuuau

SEQ ID NO: 4135003 - RNA, 62 nt, Human
auagauuaggcuuagaagucuguagugaaaguuacauuacauucuuucgaugucugauuugu

SEQ ID NO: 4135004 - RNA, 56 nt, Human
auagcaaccaccuaugugcacuuaagucuguaaguugcugacaucaggucugcuau

SEQ ID NO: 4135005 - RNA, 112 nt, Human
auagcagccagugggaggcucugauggaagagggagguagugggaagaagggagaaaccaggauauuucucccucuuugucugcuuuggguggagucuccaguagcugcuau

SEQ ID NO: 4135006 - RNA, 125 nt, Human
auagcagguuuaauuuucuuauucccaaucucagaaugaaagcuuuuaacaauuuaccuugaauuaugauuuugcuuaaggcuuagaagcuaucugcuauugcaguaagaaaguuucccuucuau

SEQ ID NO: 4135007 - RNA, 75 nt, Human
auagcaucaccuggcagaugggaccaagacugcauucuuggugcauuacucaaucugugguacaaggucugcuau

SEQ ID NO: 4135008 - RNA, 94 nt, Human
auagcccuccaauguagucgugucuuuguauucauccguaauaauuucuuuagaaaaaaauugcugagaacggaauugcugcauuggagguugu

SEQ ID NO: 4135009 - RNA, 68 nt, Human
auagcuaaaaaggaaguaaaguccuguugagaaaggaggaacacuuuaacauuccuuuucauugcuau

SEQ ID NO: 4135010 - RNA, 71 nt, Human
auagcuucuuuccccuagucuggacuucuuagugucagaaaaaucugacaucagaaaggggaagaagcugu

SEQ ID NO: 4135011 - RNA, 56 nt, Human
auagcuuucuauauaugaguugcuggggaccuucacauucucuuuuagaaagcugu

SEQ ID NO: 4135012 - RNA, 125 nt, Human
auaggaaaacugugguuagaaaaauaggaggaaagggaggaaauauuguguugagcaucaucucuccaugcuuauacacccucuucccaggccucuuguguauuucuuuuaaugguuuucacuau

SEQ ID NO: 4135013 - RNA, 64 nt, Human
auaggaaagauaaugaaggguuggcuguugacauuagucaauagacaacacuuauuauuccugu

SEQ ID NO: 4135014 - RNA, 63 nt, Human
auaggaaagggaguuuugcuuaugaaaugcaugugccucacaacagucacucccuaagccugu

SEQ ID NO: 4135015 - RNA, 65 nt, Human
auaggaacauuguucauuguucagcucagcuucuccuguugauucagugcacugaacaauccugu

SEQ ID NO: 4135016 - RNA, 64 nt, Human
auaggacuagggguucagaagaauucuuagugaagcugagaagucagucaucuccugucucuau

SEQ ID NO: 4135017 - RNA, 68 nt, Human
auaggacuuggugacucucaaugcucaagaaagucauuuucuaauugcaucauugucacagucacuau

SEQ ID NO: 4135018 - RNA, 64 nt, Human
auaggacuuuacaguagauacaaugaguaaaauaguuuauucgguggugcuacuguugucuuau

SEQ ID NO: 4135019 - RNA, 70 nt, Human
auaggaucuggggaccuguuguugcuaaguauauguaggaaugugccaaauuagaguucccaggcuuugu

SEQ ID NO: 4135020 - RNA, 59 nt, Human
auagggcagcaagcccaaguuaggggcuuuucuucacccacugggcauaccuguccugu

SEQ ID NO: 4135021 - RNA, 103 nt, Human
auaggggaugacagcuucaucuguguuauugucucugaagaccuucaagugggacaagauguggagcuggaagacagugauauugaugaacuugauucuuugu

SEQ ID NO: 4135022 - RNA, 62 nt, Human
auagggguugguccaaggcuagcuaaaacccuggaugggaugagucuggcaccuauuccugu

SEQ ID NO: 4135023 - RNA, 88 nt, Human
auaggguaugauugcaaaagacuuuucugaaagcuuagcuuuggauaaaucuucagcuagccuaggcagagugcauauucuauccugu

SEQ ID NO: 4135024 - RNA, 130 nt, Human
auagguaaagaaucgaauacauaaggaugcucuguaauuuggacaaacagaauagagcuaaaagccagagacaggauucuauugcaguuuuuuucugaguccgaauucauucuucuuaaauuuuacauau

SEQ ID NO: 4135025 - RNA, 67 nt, Human
auaggucaacucucauuggaaguccaugaguaaccccagcuccuuccacugauuuugguugaccuau

SEQ ID NO: 4135026 - RNA, 60 nt, Human
auagguccugugagauucaugcucaaagagguucuguuuugauguguuuccaggauuugu

SEQ ID NO: 4135027 - RNA, 79 nt, Human
auagguuggugcuaaaauaacugaguuuuugccauuacuuucaguggcacaaacugcaauuacuuuugcaaaauccuau

SEQ ID NO: 4135028 - RNA, 77 nt, Human
auaguacaguggaggucuguguucaaaucccagauucuccacuuaauucuugggugagcaagugaccaacugucugu

SEQ ID NO: 4135029 - RNA, 55 nt, Human
auaguagcgguacugauaauaauaaguagcuguaugacuuaucuacugcuacugu

SEQ ID NO: 4135030 - RNA, 62 nt, Human
auaguagguuggagaguccagaggugaaagugcugguucucacugugcuccuaacuagcugu

SEQ ID NO: 4135031 - RNA, 129 nt, Human
auaguauggcuuuucugugcaugauauuugacaagcugggcauguaccucuucuggccucaguuuucccuuuuauuaaauugagacacuuugggcaucacuucaccuuguccaggacaaguugcauuau

SEQ ID NO: 4135032 - RNA, 56 nt, Human
auagugcuggagcuaggauuugaauccauccaggucaucugccuccaaagcacuau

SEQ ID NO: 4135033 - RNA, 66 nt, Human
auaguguauggaagguccuacagagcgcauuauacugaugcguuccagugcccauccagucacuau

SEQ ID NO: 4135034 - RNA, 79 nt, Human
auagugugaaaaugucaaagccuggaauacacaauuuaaaguugcuuucuagaaaguuuguacugauuuucacuucuau

SEQ ID NO: 4135035 - RNA, 84 nt, Human
auagugugaaagacaaggcaggauauuaaccggaccagggccugggccaggugugagcauucugucuucugucugucacuuuau

SEQ ID NO: 4135036 - RNA, 62 nt, Human
auaguuaccuggaugaucuuucauauucuguagauucuguaggacacaccagguccagcugu

SEQ ID NO: 4135037 - RNA, 79 nt, Human
auaguuauuucaucucuggaacauaacuggucugcuggcauuacacccacguuacucgaagagaugaaaauaaaauuau

SEQ ID NO: 4135038 - RNA, 78 nt, Human
auaguucuacaaaggguuagacugugacaggugaaauuccagucaacugaaacggugaucuuuuaacucaggaacugu

SEQ ID NO: 4135039 - RNA, 88 nt, Human
auaguuguaagcccaauucuucucuguauagaaaggaaacauuguguacuuaaugaauuauuuauacagagcauuuguugccaacugu

SEQ ID NO: 4135040 - RNA, 82 nt, Human
auaguuguuguuuuuugucuacaacuaaguuuagggugauuuguacacaucuauagacaagcguaacaagaagcaauaguau

SEQ ID NO: 4135041 - RNA, 78 nt, Human
auaguuuauuuauccaucaucugcugaaggacaucuuugucacuuccaaguucuggcaauuaugaauagagcugcugu

SEQ ID NO: 4135042 - RNA, 59 nt, Human
auaguuuuagccuuucuuggcaaucuggugccccagccaauuuccugagguaaagcugu

SEQ ID NO: 4135043 - RNA, 71 nt, Human
auauaaauuagaaugcaggguucauugugccugguuuucuuuuaucaugaaucuuguguucuauguuauau

SEQ ID NO: 4135044 - RNA, 62 nt, Human
auauaacucuccauuaagggccccauuagcaacacaagggccucauugucaaggaguuaugu

SEQ ID NO: 4135045 - RNA, 95 nt, Human
auauacauuacacacacagucacauaucuauguguguagauguuuauguauguguguauauauauaccuguguguguguguguguguguguguau

SEQ ID NO: 4135046 - RNA, 72 nt, Human
auauacguuuuaugcauaagauuaagcugguuaacuuuauguugauauauuuuuuaugcauaggaaauauau

SEQ ID NO: 4135047 - RNA, 83 nt, Human
auauacuguagugguuuagagcaaaaacucuggugccuggaugccuggguucaaaaaccagcucugccacuuaauagcugugu

SEQ ID NO: 4135048 - RNA, 64 nt, Human
auauacugugcacaauucuaaguccuggcuauauagcagggagcuuaauccugugcacuuauau

SEQ ID NO: 4135049 - RNA, 72 nt, Human
auauagauuccaugguuccuuuacaggccuauagaaacagaauguguagggcuugaacccuggaaucuguau

SEQ ID NO: 4135050 - RNA, 110 nt, Human
auauaggagcaaucaggcauuggauggauguuuggacuauauacauuacaaaguaauucuacucuugaagucuuaugguuuaaauucugugugcauauguguaccugugu

SEQ ID NO: 4135051 - RNA, 87 nt, Human
auauaguacacuauggggauucaaaguuaucauuugaguuuuugacuacuuaugaacaacuugaagcuccaugacuuguguguguau

SEQ ID NO: 4135052 - RNA, 85 nt, Human
auauauagacauuauauauauggggauuauauauauuaagaaaauauauuuauauauagucaaacauauauguguguguguauau

SEQ ID NO: 4135053 - RNA, 118 nt, Human
auauauauacacauauauaugcauauacagguauguauauguguauauauguguguauauacacacacaugcauacacguacauaccuguauaugcauauauauauguguguauauau

SEQ ID NO: 4135054 - RNA, 74 nt, Human
auauauaucacuuugccaaaguauauaaagaucuguauggugaaaguuaagugcuuaggucaaaggacauauau

SEQ ID NO: 4135055 - RNA, 67 nt, Human
auauaugauugcauuauuugcaugugccuguauauauaugcaugcaucuagauaugcagacauguau

SEQ ID NO: 4135056 - RNA, 67 nt, Human
auauaugugucuguuucuagacucuguucuguucccugggucaacaagcauuaacaggcauuuauau

SEQ ID NO: 4135057 - RNA, 67 nt, Human
auauauucuggguauaagucccuuugcagaucuaugauuugcaaauauuguuuaccuuucuguaugu

SEQ ID NO: 4135058 - RNA, 83 nt, Human
auaucaaaggcgaaauagaucucugggaugcaaguggcucauggaccacuuguaaccuuugauccauuuuucaucuucugugu

SEQ ID NO: 4135059 - RNA, 59 nt, Human
auaucacagguguuuaccugaucuugccuacaucauuucauuguaauuaucugugguau

SEQ ID NO: 4135060 - RNA, 73 nt, Human
auauccagagaagauaugcauauauuuauacauuuauguacauaacaucacuguguauguauaugcagggugu

SEQ ID NO: 4135061 - RNA, 58 nt, Human
auauccagcagcaggugaguauacaaaaagcugaguaugaacugcauugcuggugugu

SEQ ID NO: 4135062 - RNA, 129 nt, Human
auaucguuuguugcauaucuucuuaaauccaucuuccuuguaagggcuuuagaacuaaaacuuacuuauauuguuuuuccuuaacagagggagaaaaauaguggauuauuauuucuaaaauaaaaggau

SEQ ID NO: 4135063 - RNA, 56 nt, Human
auaucuaauagauacaguaaugugugcauaagcacucacacuguagauauagcuau

SEQ ID NO: 4135064 - RNA, 70 nt, Human
auaucuugauuuuguuaaaauuagagugguaauauuucccucucuaaaaugaguagaaaaucaaagauau

SEQ ID NO: 4135065 - RNA, 55 nt, Human
auaucuuuguuuuugccaagaugccaaauuccaagcucuauaagagcaaagaugu

SEQ ID NO: 4135066 - RNA, 56 nt, Human
auaugaacaugacgaugaugguagcuuucauugcuaccaucuuccaugcauuauau

SEQ ID NO: 4135067 - RNA, 70 nt, Human
auaugagaguaaaugccgaucuaggccuauaacuagucuuccaguuucuuggccaguauuucuuuuauau

SEQ ID NO: 4135068 - RNA, 96 nt, Human
auaugagauaccccagaugugacuguaauuaccuuagcaaugcuuuuccacaguauuuuauaguuuuuaaaguaguuccacacuuggucuacauau

SEQ ID NO: 4135069 - RNA, 69 nt, Human
auggucuaauagcauuuuagagcauaauaagaaugauagaguuacugucucugguuugcauuggauuau

SEQ ID NO: 4135070 - RNA, 65 nt, Human
auggucugcagaucccuuuagugaggaaggcauuauccccucacagcaaggauuucagugaccgu

SEQ ID NO: 4135071 - RNA, 63 nt, Human
auggugauauuccuuuggcaugcgagacuauuaauaugacucgugcuggaaaaagucacucau

SEQ ID NO: 4135072 - RNA, 65 nt, Human
auggugccuguuggcauugaguggauggaggcagaaguggccaucuguguguggguagggaugau

SEQ ID NO: 4135073 - RNA, 58 nt, Human
auggugcugccuuugcacacagcuuggccugcuaagccuguggccuggcuagcaccgu

SEQ ID NO: 4135074 - RNA, 80 nt, Human
augguguauaucaagugacuaucacagaacuaggaauauaucagcuguuuugcucaaugguggucauuauuauuaaccau

SEQ ID NO: 4135075 - RNA, 111 nt, Human
augguucaauucauaguuaauauuuugaaacagcuaaguacauucaagggcuuauuccaguuuuagauucgagauuugguuguaagcaaguuguuaaugaaauuggagcau

SEQ ID NO: 4135076 - RNA, 62 nt, Human
augguucauauuaugcaucugaauuuuuugaaacacuucagaugauuccaaugugcagccau

SEQ ID NO: 4135077 - RNA, 70 nt, Human
augguucuguagauauuaauuauuccuuugaggcucccucagaguguaccaaauauccuacaggaaucau

SEQ ID NO: 4135078 - RNA, 76 nt, Human
augguugcgucccaguaucauguaaaugaccccauccuuaaggcuuuauauuaaaaugauacugaagcacaacuau

SEQ ID NO: 4135079 - RNA, 79 nt, Human
augguuuauacaugcaaauguggccuaguauagaaaugaauggaaauucgugguuugcagcaaggccacauucuaccau

SEQ ID NO: 4135080 - RNA, 77 nt, Human
auguaaagggaguuacaauguucuucaguucuguguagguauagaaggacccucgacuugugcugaacccuuuauau

SEQ ID NO: 4135081 - RNA, 78 nt, Human
auguaacagaaacauaguugagacacugcuucucacaaaucauuaaugaccagugaugucacaaacuaugguguucau

SEQ ID NO: 4135082 - RNA, 60 nt, Human
auguaacauaugugaucgcauuuuuguaaaagaaccauguguguuuauauguguuuauau

SEQ ID NO: 4135083 - RNA, 77 nt, Human
auguaacugcuauugaugucacacuuugugaaguagucuuuguugcuuaaaaagggugacaucuaguggcuaaacau

SEQ ID NO: 4135084 - RNA, 60 nt, Human
auguaaggcugccuaugacacuggcuuucccuugagcuucuucauguggaguccuugcau

SEQ ID NO: 4135085 - RNA, 82 nt, Human
auguaaguaguuuauauucaaugauuaguaucaguuggccaagccagucugugcuugauuauaugagugugugugugugcgu

SEQ ID NO: 4135086 - RNA, 62 nt, Human
auguaauuuacgaccugcuaaaucucugucagcucauaguucacagauggcaguuauuacau

SEQ ID NO: 4135087 - RNA, 85 nt, Human
auguacaaacuucuggauuuuagcauguaacuguguguaacugcauucaugucaauggcuacaaaucacugggaagcuucuacau

SEQ ID NO: 4135088 - RNA, 59 nt, Human
auguacacacaaguuugcacgcauacugggcaugcuugugugugaacauguguuuaugu

SEQ ID NO: 4135089 - RNA, 70 nt, Human
auguacacacacagaguauuuagaaggggugggaagaucuacuguccucgaaguaccugugcaggaacau

SEQ ID NO: 4135090 - RNA, 60 nt, Human
auguacauauauguauguacgcaugugcaaauauguuugugugcauauauaucugugugu

SEQ ID NO: 4135091 - RNA, 72 nt, Human
auguaccacuaagcucagggaaaucagaauuauuuuacauauucauuucccaauacgcuaaguggagaacau

SEQ ID NO: 4135092 - RNA, 55 nt, Human
auguagagcaguguuguccaauagaacucccugaaaugauaacacuguuuuauau

SEQ ID NO: 4135093 - RNA, 76 nt, Human
auguagagcuccuugauccucccuugacaaaggagacccuccugcacuuuagacaggguuaaggaggcaccugcau

SEQ ID NO: 4135094 - RNA, 81 nt, Human
auguagaguggcuuuaaaguguggucguucauuuuguauuaauagacguuuuagagaguuguaccacacucauaacugcau

SEQ ID NO: 4135095 - RNA, 94 nt, Human
auguagcauuuuuagaugagguaugaagugugggauauaaauguaaacugaauguucuuaggccccuucgacuuguagguauaaaggugaccau

SEQ ID NO: 4135096 - RNA, 80 nt, Human
auguaggaaggccuagaggaauggccagggagccuauaacugcuauucuaaccaugccucugaggucaacauuuccucau

SEQ ID NO: 4135097 - RNA, 58 nt, Human
auguaggcagaaguaauguguaccacugccaggcugggacacuacaaucugccugcau

SEQ ID NO: 4135098 - RNA, 93 nt, Human
auguaguucauaucucuugagaaauaagcaugucuagaauaaguaguuuuugcucagaccacauaaauuucuucaaaggugacugaacaacau

SEQ ID NO: 4135099 - RNA, 66 nt, Human
auguaguucugcagauauaaagaauuuaugugugccauuuuauucuucacuguuucagaaugacgu

SEQ ID NO: 4135100 - RNA, 129 nt, Human
auguauaaaaucaccggaaacgcuuguuaaagauuuuuaggcucuacccucagagcuuucucauucugcaggucuugggguagaccugagaauuugcaucuuaaacagguagugcugcugcuaauguau

SEQ ID NO: 4135101 - RNA, 99 nt, Human
auguauacaucaaccauggggauggcucugagaaccugagcuaguaugugugauugcaucugggcuccagucagaccguagauggugggucuugugcau

SEQ ID NO: 4135102 - RNA, 75 nt, Human
auguaucaacaguuuguuccuuuucauugcugaggacuauuccacaguacagauuaauaauauacugaugagcgu

SEQ ID NO: 4135103 - RNA, 62 nt, Human
auguaucaacugcaggcaaguucagguaaaguucuccauuugcuuuuucaguugacuuacau

SEQ ID NO: 4135104 - RNA, 66 nt, Human
auguaucuuugaaauggcagcagcugaccuuuaaaacagaggcaagccgugccugucucaaaacau

SEQ ID NO: 4135105 - RNA, 59 nt, Human
auguaugcuccuauuggaaugauaguauguuacuauugcuguuaggaaggaguacauau

SEQ ID NO: 4135106 - RNA, 87 nt, Human
auguauggaaguuuaguagggacagauggaagauugggcucaguugagcccuucuuuuucuccauucagucucuggaacccugacau

SEQ ID NO: 4135107 - RNA, 79 nt, Human
auguauuagguuugaauaguguuaugauucugucugaagugaaaaaauuagaaucagucauuagcucugaccucagcau

SEQ ID NO: 4135108 - RNA, 76 nt, Human
auguauuaucuaugccauggaaucaccuccagcuaguaagggcaggcuggaaaggauuccgugauacagauaacau

SEQ ID NO: 4135109 - RNA, 62 nt, Human
auguauuaugguuuuccuuaagucugggcuggguuuuuacaaaaaggaagaccaucagauau

SEQ ID NO: 4135110 - RNA, 75 nt, Human
auguauugggaaagccacaaauuggaguguauaaaaacugaaguguuauauuuuauuuuaguggccuuaauuuau

SEQ ID NO: 4135111 - RNA, 57 nt, Human
augucagcccaagcccugugcccaauucaaaaauggucacagggcuuggccugacau

SEQ ID NO: 4135112 - RNA, 76 nt, Human
augucaggauuuaccgucauuuagucuuuugcucugauuuuugcaggagaaaaguguuggaaguuuuuaaugacau

SEQ ID NO: 4135113 - RNA, 128 nt, Human
augucagguaaauccuuuucaccuuccuucaagggaggaauuaagucagggaaacuguuuugcuccuuggaguaguuguucuuuaaaaugaaguuauugauuaggcaaugucuauaaaauuaagaugu

SEQ ID NO: 4135114 - RNA, 57 nt, Human
augucauagaagccugugaacccagcuuuaguuaugcacuggaauuuucugugacau

SEQ ID NO: 4135115 - RNA, 75 nt, Human
augucauuacaguggacagcuaugcacacguuggagauuaugugaugugugcaugugcauccauguguacaacau

SEQ ID NO: 4135116 - RNA, 100 nt, Human
auguccaccuaaaucuguguaugugaccuuaucuggaauuaggguccuugaaaaaugcaaucucauuaagaugaggucugacuggauuaggguaggucau

SEQ ID NO: 4135117 - RNA, 72 nt, Human
augucuaaaagaaggcaucuaugugaccuggauuuauucaguaauccaagggaaacugcacuucuaagauau

SEQ ID NO: 4135118 - RNA, 82 nt, Human
augucuccaaaaauuuuggcuaaaacguggagaguacacaaauucuuacauaguuaaauaguacagcuauuauuggaaucau

SEQ ID NO: 4135119 - RNA, 60 nt, Human
augucuccaugcgguaauuuaucuaaaggcccgcuauaaauugucguaagguggagaugu

SEQ ID NO: 4135120 - RNA, 64 nt, Human
augucuggcauucacagaaaacaugauccuaauggauauaauuauuucuauggggccagcacau

SEQ ID NO: 4135121 - RNA, 61 nt, Human
augucuguuuauccuucaagauacagcucaaguauuaucucuguaaggaagaauuagaugu

SEQ ID NO: 4135122 - RNA, 71 nt, Human
augucuuaguauguugucacacuggguagaacuggaaugcaacacccauagucauuacagugcuaagaugu

SEQ ID NO: 4135123 - RNA, 61 nt, Human
augucuuucgcaucaguagcuagggcacaaauauuucugccuucugauuucgagaagauau

SEQ ID NO: 4135124 - RNA, 105 nt, Human
augucuuuuaguccuaucugaaaaaugucauuauggaacugaggucacaccccacccugcaguuucaucaugcauuuccuuuuaucuuagauaauucuaugacau

SEQ ID NO: 4135125 - RNA, 64 nt, Human
augugaaaaauuucuuauuacaauguguaaaaauauugugaggacauaggacauuuuuugacau

SEQ ID NO: 4135126 - RNA, 102 nt, Human
augugaaauaauuucuggggcuguccuuagucugagagcggcuucagcauuacugucucucuuaggcugcagacaguucugaaaacugaacuaacuucacau

SEQ ID NO: 4135127 - RNA, 123 nt, Human
augugaauguuaaaauugaacaagagaaagcaggaaaauaagugguauuugggaaauuaaaggaagauugaaccagagucuuuauauuccugaauuuaauuggauuaaugggaaauuuaucau

SEQ ID NO: 4135128 - RNA, 68 nt, Human
augugaccaucugugaauaauuggcuccugcuuacguguagcucucauuacuuuacagauguaugcau

SEQ ID NO: 4135129 - RNA, 91 nt, Human
augugaggacaugagauuugggaggguccaggggcgaaaugauaugguuuggcucugugucuucacccaaaucucaucuugcagcucacau

SEQ ID NO: 4135130 - RNA, 100 nt, Human
augugauauacuuagagagagagcuaaauuaagggugagaagaguuggaacuuaugucuaauuucaaguuuagggcucuauaauauuggguaaauuacau

SEQ ID NO: 4135131 - RNA, 88 nt, Human
augugcaaggucauucuuggguauaagcaagguuuguaaugagguaucucacaucagauuaugcuuugcuuaugaccguaagccacau

SEQ ID NO: 4135132 - RNA, 71 nt, Human
augugcagauauauuuuacauuuuuagcacauuaccuaauaugcaguagugcuggaaauauauuuguuuau

SEQ ID NO: 4135133 - RNA, 58 nt, Human
augugcagccuuucuucaucaugucugucaccuuauagucacaagauggcugcagcau

SEQ ID NO: 4135134 - RNA, 68 nt, Human
augugcaugcacuuacauguguggauauuugcauguguagugacuuguacauaugagugugugugcau

SEQ ID NO: 4135135 - RNA, 56 nt, Human
augugcaugugugugcuugcauauaugugcauguaugugugcauaugcauguacau

SEQ ID NO: 4135136 - RNA, 61 nt, Human
augugcauuuaggucacaugaugucauuccuaugaaugaugcagguaaucuaagggcagau

SEQ ID NO: 4135137 - RNA, 81 nt, Human
augugcccaaggucacacuagggccaaguggagaguggaauucuuccugacucaccuggcucugugucuccaggggcaggu

SEQ ID NO: 4135138 - RNA, 55 nt, Human
aguagagguaggucuucgagucucagggacaucccuggccugcccaaugucugcu

SEQ ID NO: 4135139 - RNA, 78 nt, Human
aguagaugagauucggaagucaucuguuucguacacacacuaguauuagcaacguaaccucugaacuugccauuuacu

SEQ ID NO: 4135140 - RNA, 85 nt, Human
aguagauuaaauaaaauauuauuagagguuguuuuguaaagagcuauucgcuuuuucuuggugcaaccucuggaugaaaucuauu

SEQ ID NO: 4135141 - RNA, 86 nt, Human
aguagcaaaaacuuuagagauguuggacccauagaguuaguggacaaacaagcacugugguggaagcaucaagaaguuuggccacu

SEQ ID NO: 4135142 - RNA, 87 nt, Human
aguagcagucacggagcagcccuagggcauaagcacuggagugggaguccuguuuugcuucguggccuugggcaacucucuucuacu

SEQ ID NO: 4135143 - RNA, 68 nt, Human
aguagcauugauaaauucuaguuuuaggcuuacuuuccauaggccagcaaagcaaguugucagcuacu

SEQ ID NO: 4135144 - RNA, 55 nt, Human
aguagcccgggcggcugcuguaguaacuggguguuaagaaagcugccugggugcu

SEQ ID NO: 4135145 - RNA, 66 nt, Human
aguagcuaaagcagcuguuugacuuuccauuugaugcaaguggagguguauaagguagcuucuacu

SEQ ID NO: 4135146 - RNA, 102 nt, Human
aguagcugggacuauaggugugcgccaccaugccgggauaauuuuuguauuuuuaauagagaugggguuucaucauguuggccaaacuggucucaagcugcu

SEQ ID NO: 4135147 - RNA, 85 nt, Human
aguaggagaauauugcaaaugaccauugccacaucugacccuauuugugucuauguggcauucuuggucauuucugucucuuauu

SEQ ID NO: 4135148 - RNA, 107 nt, Human
aguaggaggcagaaggaaucaaugguucugguauuuuccacuccuaauuuuauugagaaguggcaaagucuucagaaguuuauuggcuacucugcacauuuccugcu

SEQ ID NO: 4135149 - RNA, 63 nt, Human
aguaggcagaguguuauaaaucuuucauuauccaguaaugggaagguuagcaguuugucaacu

SEQ ID NO: 4135150 - RNA, 78 nt, Human
aguaggcuuugcacagauuagguuauuggaaaguauaguuauuugcuuguaaaguggcaguucugugucaaaauugcu

SEQ ID NO: 4135151 - RNA, 78 nt, Human
aguagggcccaccacuguagagauuugaaugccauacaaggaugguguauuuuauccuaucagagagacaguccuauu

SEQ ID NO: 4135152 - RNA, 89 nt, Human
aguaggguaaguacuagaacuucuaacuaaggucagagaaguaaaguaacucuccuaaggccacauagcaaguuuuaggcuuccuagcu

SEQ ID NO: 4135153 - RNA, 63 nt, Human
aguagguucucaaauaauugcuggauuaauuauuaaauaacaaguauuuauugagcaucuacu

SEQ ID NO: 4135154 - RNA, 85 nt, Human
aguaguacauggcagauguggcauagagcauacauagauaauuaaagcaaauguauacuucaugcuucaugucuguauuuuugcu

SEQ ID NO: 4135155 - RNA, 88 nt, Human
aguaguaccuuuggcuuauuauggcaaauaaguaaauaauuaauuuuguaaauguguuagucaugguuuuaagaaaaaugguaauacu

SEQ ID NO: 4135156 - RNA, 88 nt, Human
aguaguaucugugaaaacauuuuguccacagugggcugacaugaaauaauaucaaaucucauugccuaaaacuuuuguagauguuacu

SEQ ID NO: 4135157 - RNA, 79 nt, Human
aguagucagauaaucuuaagcugaauucucuccccugaguuaaaguuaguggaaguaaugucuuaagauucugaaaacu

SEQ ID NO: 4135158 - RNA, 91 nt, Human
aguagugccucuguuuuaccugcuuaguuaucagguguuuucauggaacauuguuccaggaacugaagccagguguuuucagaggcaugcu

SEQ ID NO: 4135159 - RNA, 119 nt, Human
aguaguuuucauuguucacuguuauucuccaucccuguauaucacaagggcuaucuuguaguacuuuuugauaauauuggguaggugauaacucaaagaugcacaagguucuaacuacu

SEQ ID NO: 4135160 - RNA, 80 nt, Human
aguauagaauaauggcuaagagcacaggugcuggagcccagaugccuggguucagaucccagcucuguccauuucuagcu

SEQ ID NO: 4135161 - RNA, 77 nt, Human
aguaucauuaucuaguaaaauuagggaagaaguuaaagaaagaauucucuaaacauauuggaucugagaugguaacu

SEQ ID NO: 4135162 - RNA, 68 nt, Human
aguauccacccaucucgcccaacguuuccaccacuggguguucaaauuuucuaggugggugguuugcu

SEQ ID NO: 4135163 - RNA, 89 nt, Human
aguauccuccucuguggaauucuguagcucuuccucugguaacugcuuucacuaaagguuugcauggaauuuaccuagacaagggcccu

SEQ ID NO: 4135164 - RNA, 79 nt, Human
aguauccugauuccuuagaguccucuggcccagccugcagucugcagggccucuggccuggagccucuggguggaugcu

SEQ ID NO: 4135165 - RNA, 85 nt, Human
aguaucucacaggaucaagacuuuuaugcugcccugcucuuauguuugaagcaucagagucauugcaaguagaagguuggguauu

SEQ ID NO: 4135166 - RNA, 84 nt, Human
aguauggaugcuuuaauuaauccggggugaauuuaauugcuuuaguuaaguggaaaucggguuaaaaaugaugcagagcaugcu

SEQ ID NO: 4135167 - RNA, 55 nt, Human
aguauggcugguuucauggguguauggcuugugugggcucagagggcccugugcu

SEQ ID NO: 4135168 - RNA, 76 nt, Human
aguauggugacuuugcacuaaguuacucauuuauucacauaauuaaugaguuucuauuaguguuaggcaccguucu

SEQ ID NO: 4135169 - RNA, 80 nt, Human
aguaugugaggugauggauauguuaaauagcuugacugaaccauuucacaaugcguacauauaucaaaacgucauguauu

SEQ ID NO: 4135170 - RNA, 65 nt, Human
aguauguguguagaccuuugcccauacauucucguuugucugagguuaauccugcugcaucugcu

SEQ ID NO: 4135171 - RNA, 58 nt, Human
aguauguuacucauggauuguuugggaaaacuaaauacacguacauguguaaaauacu

SEQ ID NO: 4135172 - RNA, 79 nt, Human
aguauguugaacaaaguacuuuucagugcuuaaaagcuaauugaguagguauggaucaguaguuuguaauuaacauauu

SEQ ID NO: 4135173 - RNA, 82 nt, Human
aguauuaacaugaacugacuuuucauuuccugcaaaucuuaaaaucacccaagggaagagacaguaaacaugugucuaugcu

SEQ ID NO: 4135174 - RNA, 77 nt, Human
aguauucuuugaagugcccuguucacuucaugguucuguagagaauuagaaaacuuccaggaguuuccaagaaugcu

SEQ ID NO: 4135175 - RNA, 57 nt, Human
aguauugcauuucccacguucacuccugaagguagugagacagguaaggugaauacu

SEQ ID NO: 4135176 - RNA, 75 nt, Human
aguauugugcaugugugaaucuugugaucaugaucuuaauuaggaucauauuuagauucagacucaaauugaacu

SEQ ID NO: 4135177 - RNA, 64 nt, Human
aguauuuggaguaaguaugccuuggugggguccucauuuggauguaauuacucugaucugugcu

SEQ ID NO: 4135178 - RNA, 63 nt, Human
aguauuuucgccaucacaagaaagccaacuagaagugcgugauuugugaaugugugaagugcu

SEQ ID NO: 4135179 - RNA, 79 nt, Human
agucaaauaaaagugcauuucuaaauggaacugauuagacuagguucuuuguagcaaaacguguauucaguguuuggcu

SEQ ID NO: 4135180 - RNA, 74 nt, Human
agucaacuaaaacaugacagugacuuuauaagagcuuuccuuuuaaaagguugcuguuauaaaaaaguaugacu

SEQ ID NO: 4135181 - RNA, 56 nt, Human
agucaauuuaguuuccacagggggacucuaaccugccuaggaggcuuaauuaggcu

SEQ ID NO: 4135182 - RNA, 79 nt, Human
agucacacaguguaagcaugcaauguaucagugauagcaacaaauuuguucuaauacacccuauugcuuguuugugacu

SEQ ID NO: 4135183 - RNA, 71 nt, Human
agucacacucuguguuaaauuggguuuuugugggcacaccacaaacucuaaucaaauauagcauuguuucu

SEQ ID NO: 4135184 - RNA, 64 nt, Human
agucacauuucagugagcuauugaagauuaagaagaguuauguagcuuaucugaaauggcaacu

SEQ ID NO: 4135185 - RNA, 62 nt, Human
agucacuguuuaaucuagcuaaacacagugacuaaaguuuagcuggauuaaucacagugacu

SEQ ID NO: 4135186 - RNA, 86 nt, Human
agucagagaggagcugagagaugacugauguugaggucaagucauccuucuguucucacagccauuucucccucucuuuccugacu

SEQ ID NO: 4135187 - RNA, 65 nt, Human
agucagagcaaacuggacagacuggauccacccuccuuucuguucuaguugugcuuuuguagauu

SEQ ID NO: 4135188 - RNA, 96 nt, Human
agucagaggaucacuugagcucgggaggucgaggcugcagugaaccaugguggcaccacugcacuccagcccgagcaacagagugagacccugucu

SEQ ID NO: 4135189 - RNA, 83 nt, Human
agucagaggcuuugugagccacaggguuucuuguguugugcccaacacaggacggcccuguggcuuccacagguagcagggcu

SEQ ID NO: 4135190 - RNA, 81 nt, Human
agucagccgggaggugaacaggcuucuucugggcuccuuaguagaggggcacuucucaggcuguggacacuucugcugacu

SEQ ID NO: 4135191 - RNA, 66 nt, Human
agucagcuccagggucagcucagaacugcccuggcugggcaguguugugugggcccggagcaggcu

SEQ ID NO: 4135192 - RNA, 62 nt, Human
agucagcugcugcacacagcagagauguguugcuucaucuaagagcugguuaacaguuggcu

SEQ ID NO: 4135193 - RNA, 68 nt, Human
agucaggaaccucagcaagucuacucacacuaagcucucuaggauugucaacuuguuggggccugucu

SEQ ID NO: 4135194 - RNA, 63 nt, Human
agucagggacaaggaauaagauuaguuuaaaacuaaauugacuuuaaagcuuugucucuuauu

SEQ ID NO: 4135195 - RNA, 77 nt, Human
agucagggagaggcaucauagggaaagcuaauauuuccaagagucucuauuaaccuuugguguuuuuuccuguaacu

SEQ ID NO: 4135196 - RNA, 77 nt, Human
agucagggcaaagagagcacaugcuuugaaggagaauauucaucaaauccuaauagcuguuaucuucuguccuuucu

SEQ ID NO: 4135197 - RNA, 71 nt, Human
agucagggcccuggcaggaaacagcugacgcacugaagcuguuuuuuugagaagggcuuaacaaagagacu

SEQ ID NO: 4135198 - RNA, 59 nt, Human
agucaguguagaaagcccaggcauugucccauagcuggcccuguguguuugcacugauu

SEQ ID NO: 4135199 - RNA, 117 nt, Human
agucaguuccauguagauugagagacucuugggauaugguuauuggccagaugccauauauguuguauaugaaacugggauaacuauagcagagguuguuuugaaaaugaauuggcu

SEQ ID NO: 4135200 - RNA, 71 nt, Human
agucaguugggugcugcggucgguggccgagcacccgcucagcagggcagaggcugcaggacucauuggcu

SEQ ID NO: 4135201 - RNA, 69 nt, Human
agucaguuuaagcugagccaguggcaagugcuaggaaacugcauuaucccaggcuggcuagcucugucu

SEQ ID NO: 4135202 - RNA, 55 nt, Human
agucauaucugaggaggaauccuugggucaucaacuucuuccuaacaaugugacu

SEQ ID NO: 4135203 - RNA, 92 nt, Human
agucaugagcaaucuagacaaaaauaacuugguuucaucagaggcuauuuccacugcuccuuuucaaguuguauugucauauuguuuugauu

SEQ ID NO: 4135204 - RNA, 70 nt, Human
agucauggagauuuuauguaaaauauuuaaaauaauuuuuugagguacaaacaugagguuuccaaugucu

SEQ ID NO: 4135205 - RNA, 70 nt, Human
agucauuaaauauucuuccaaaacaucauuugggaaggcugcagaguguuuuagaauaugguuugugacu

SEQ ID NO: 4135206 - RNA, 70 nt, Human
agucauucagagaugcagguagacauaaaccaaauaguccuuggcugacucuuccucaucugugaauacu

SEQ ID NO: 4135207 - RNA, 125 nt, Human
auaugcaaauaugcccuagugagguuuuucugaaaugcaucauuuuaaaauuauguagcauggcauuaguguucaaaauacugaauuguaagaugaugccugaauagcuuacuaacauaucauau

SEQ ID NO: 4135208 - RNA, 62 nt, Human
auaugcucacuuacagaacugccaugcugccccacaagcugagagccugccagugaguguau

SEQ ID NO: 4135209 - RNA, 93 nt, Human
auaugcuuuccauuuuuguaugaucaaaagaaauguacuuauauuuuaaaaguaacauuuuauuuuaauuaugugguauguggggggguguau

SEQ ID NO: 4135210 - RNA, 100 nt, Human
auauguacacauacauauguauguauauauguguguacaugugaauaggucuauauauacacauacauacguauguauacauguguguauguguaugugu

SEQ ID NO: 4135211 - RNA, 56 nt, Human
auauguaugugcaugcgugcauguauacauauuugugaauguauguacauauuuau

SEQ ID NO: 4135212 - RNA, 84 nt, Human
auaugugugauuuccugugcgcccuuaggcagggcagggaaggggagcauggcccaggcguaugggagaucauggacugcauau

SEQ ID NO: 4135213 - RNA, 90 nt, Human
auauguguuuugguauuuggcaauguguaccugugugugugucugugugagugcagaagccaugguaugcaacuacauccaugcauauau

SEQ ID NO: 4135214 - RNA, 83 nt, Human
auauuaagcuggugcaauaguaauugcaguuugccauuacuuuaauggcaaagaccgcaauuacuuuugcaccaaccuaauau

SEQ ID NO: 4135215 - RNA, 97 nt, Human
auauuaauaagugcaugcuuaaacaacuguuuuuuaagucugucccuagcauauagggcagcauuugaaaaacagauguuaagaaggcaauuaauau

SEQ ID NO: 4135216 - RNA, 85 nt, Human
auauuaauggucaaaauuuaauuauguuuuauugauuugauugaucuuaauuuauaucagacagaaagcauugacccgugaauau

SEQ ID NO: 4135217 - RNA, 128 nt, Human
auauuagaaucauucgggaaucaaauuuuaagugccagugcucccucaggccacaccauaaacuacaaugccugagcugggagccuggcaccaguauguuuuaaaguucucccaagugaugccaaugu

SEQ ID NO: 4135218 - RNA, 61 nt, Human
auauuaugauccaguaaugguaugacauucuuuuuuaugacuauagcucggguuauaaugu

SEQ ID NO: 4135219 - RNA, 88 nt, Human
auauugaugaucacuguguguauaugcacacacacgucauacuuucaguaugauauauauaauguauguauacacugaucaucaguau

SEQ ID NO: 4135220 - RNA, 80 nt, Human
auauuguaagcuauuuuugugccuuucuagccuuuaaauaccuacuuuacuggaagguaauccauaauaguuacuagugu

SEQ ID NO: 4135221 - RNA, 85 nt, Human
auauuguggguguguacauaauggacaauaaugcaucuguuacaguggauuaacuauguuacauugacauuauaccccaggauau

SEQ ID NO: 4135222 - RNA, 58 nt, Human
auauuuccuauacaguuguccauagcuagaauaaaagcuguaugcuauuaggaaguau

SEQ ID NO: 4135223 - RNA, 55 nt, Human
auauuuggccuguuuggaugcaaauuuuucuuuccuauuugaaauggccaagugu

SEQ ID NO: 4135224 - RNA, 78 nt, Human
auauuuguauguucacugacaugucugagagugagcaccacugugugugucugggcaugucugugaacacgucagugu

SEQ ID NO: 4135225 - RNA, 57 nt, Human
auauuuguuagcugcuuuggaggcauaaugauaguauguuucugcggugacagauau

SEQ ID NO: 4135226 - RNA, 92 nt, Human
auauuuuaaagauuuaugguaugaauaauuuaagagaaauaaagaaagcuucuaaacucucuuugaauuauguaaugggagcuuugaaauau

SEQ ID NO: 4135227 - RNA, 72 nt, Human
auauuuuaacauguguauaauuuuuguuuguuggcuaagacaaggccaaguaucaauacauuguuaaaguau

SEQ ID NO: 4135228 - RNA, 106 nt, Human
auauuuuauugugugauaaaaauagaaauugugcuauuguugaccacuuuguucccagagaugacagguagacagaggaagcauauagcacaaacgguaagagcau

SEQ ID NO: 4135229 - RNA, 57 nt, Human
auauuuugcaauuaauucauccugacaaguucaucaggaaggcaaauugcaugauau

SEQ ID NO: 4135230 - RNA, 76 nt, Human
auauuuuugcuuucauugccugcgguuuuggggucauaucaaaagaaaucauagcccagaccaaugucaagaauau

SEQ ID NO: 4135231 - RNA, 63 nt, Human
auauuuuuguguguuuagguuuguguauauauuuuacauguguguauaaauacacaaggguau

SEQ ID NO: 4135232 - RNA, 95 nt, Human
aucaaagagaaguagugagaaagagcaaggauaaguugauuaagauggcuuaugagaacugcaacuuguuugauucuuggacauuuauuuuugau

SEQ ID NO: 4135233 - RNA, 79 nt, Human
aucaaagguggggagcagccuuagccccuagcagaaugcuggacaggggcuuccccugcuuacucccacuguuuuuggu

SEQ ID NO: 4135234 - RNA, 63 nt, Human
aucaaaguaguagguuuuggacucauaaagaccuggguuccuucccaaaucuacuccuuugau

SEQ ID NO: 4135235 - RNA, 60 nt, Human
aucaaauauuuuccuuuucaucagcacucccaggguugcugaggaaagaggauaaaagau

SEQ ID NO: 4135236 - RNA, 61 nt, Human
aucaacagaaguaucuuuuuagcuccaucuaaaauagagagccaggaugucuucuggggau

SEQ ID NO: 4135237 - RNA, 126 nt, Human
aucaacauccaucaaagcagaaauaaguggaaggaggccuagaaaagugguucuggaaggcuggugaccaucccaggaugacucagagcuauccuuuuaacuucuuagccuuugauuccauguggu

SEQ ID NO: 4135238 - RNA, 58 nt, Human
aucaagcagcauuguggcuuuuuucuacaaucagaaacauagcagcuuugugcuugau

SEQ ID NO: 4135239 - RNA, 70 nt, Human
aucaaguacaggucuuaucuccuaggaauccucucaucucauuccuguaaguaugugaucugugguuggu

SEQ ID NO: 4135240 - RNA, 130 nt, Human
aucaauagcaggucccuacuguauugacugaucuuuaaauuuggccgccuuauuauucuaggagcucuauucuaaacucaaggaguucagaaaggcugugccagccaguaaguaaaguuggaccuuuggu

SEQ ID NO: 4135241 - RNA, 130 nt, Human
aucaaucagaacaaguacuuuaugaguuugaacauauggggagaauuuagcaaaugaacuuuuuaucuuaaaaguuaauagauucuccacauguagcaaugcauuagugaagcuauuaucucggaaagau

SEQ ID NO: 4135242 - RNA, 64 nt, Human
aucaaugcucuguacccagaauaaucccauuucggagggugcauggauggggcagaugcaugau

SEQ ID NO: 4135243 - RNA, 72 nt, Human
aucacacaugcccuccuucugcagauaucaagugugucuuggcaguccugcacauggagggcaaugccugau

SEQ ID NO: 4135244 - RNA, 73 nt, Human
aucacagauaaaugucacauaggcaaaauguuuuagagauacuguaaucacuggcuuaugggagauuugugau

SEQ ID NO: 4135245 - RNA, 61 nt, Human
aucacagauuugauacuuuugugccaauuagcuucaugcacacaaaauucugaucuguggu

SEQ ID NO: 4135246 - RNA, 63 nt, Human
aucacagggugaggauuagaccccuaguuucuugacacuuaauuuuauccucugcuuggugau

SEQ ID NO: 4135247 - RNA, 106 nt, Human
aucacauggccaagauguagcuaacaagaucaugguuuaucugggagacgaguugugucuucacagaauaaacucauuaucucaucauagaugguguuggccugau

SEQ ID NO: 4135248 - RNA, 70 nt, Human
aucacccaagcuggagugcaguggcaccaucauagcucacugcagccucaaacuccccagcucgggugau

SEQ ID NO: 4135249 - RNA, 70 nt, Human
aucacccaagcuggagugcaguggugcaaucucagcuaacugcaaccucugccuccuggguugaagugau

SEQ ID NO: 4135250 - RNA, 64 nt, Human
aucaccggaaacuucacaucucccuaaaacagcuuaggcugucuugagaaaugugaaaggugau

SEQ ID NO: 4135251 - RNA, 76 nt, Human
aucaccuagaggaaaugcuaaaacacagauuuuuggauucuacuccaagaguuccugauucaguagauccagggau

SEQ ID NO: 4135252 - RNA, 114 nt, Human
aucaccuggaggccuuguugaaacacagauugcugggcuucacccccacaguuucugauucaguacuuggaguggggccucagaauuucuauuucugaaaaguucccaggugau

SEQ ID NO: 4135253 - RNA, 64 nt, Human
aucaccuggccauuggguuaacagaccaauuuggagucuauuguaauaauccagggcaggugau

SEQ ID NO: 4135254 - RNA, 64 nt, Human
aucacucugcauuuuugacccuuaaaaacaacacugacuuggggucacaggggagaagagugau

SEQ ID NO: 4135255 - RNA, 78 nt, Human
aucacucugucucucaggcuggagugcaguggcuggaucuuggcucacugcaaccucugccucuuggguucaagugau

SEQ ID NO: 4135256 - RNA, 73 nt, Human
aucacuggcuaaugacugaguuuuuagcagaggcauccugucuuuguucaagcacaggucuuagucuugugau

SEQ ID NO: 4135257 - RNA, 83 nt, Human
aucacuggggaagcaggacuuacaguaucccagauuguuuucccuaguacauuaugauacacugaguccuuuucucauuugau

SEQ ID NO: 4135258 - RNA, 62 nt, Human
aucacuuacacugguucugcaucuuugaucaaacccugaaugauacagaauuauguagugau

SEQ ID NO: 4135259 - RNA, 71 nt, Human
aucacuucucugcuaccugcaaagauacuaauuagcaaguagugauucuaaguaaguguaguggagguggu

SEQ ID NO: 4135260 - RNA, 125 nt, Human
aucagaaucaccuggagggcuuguugaaguacagcuugcugggccucaagcucagauuucugauucaguagauuugguacaggcuaggaauuugcuuuucuaagaaguuuccaagugaggcugau

SEQ ID NO: 4135261 - RNA, 127 nt, Human
aucagaaucacuuggaggacuuguuaaaacacagauugcugggcgucacucccagaguuucugauucaguaggucugggaaggagccugagaauuugguuucuaacaaguucccaggugguguugau

SEQ ID NO: 4135262 - RNA, 116 nt, Human
aucagaaucugggccagagugagaccuuucuagccugccccagugucacccugauccaagggccuucaggugcugccaggcuaggcucuaggugucugauucucaugggaucuggu

SEQ ID NO: 4135263 - RNA, 66 nt, Human
aucagaauuugcucuguaauaaucuggggugauuuaaauacacucuauuguuucagaggcacuggu

SEQ ID NO: 4135264 - RNA, 67 nt, Human
aucagaguuuuuaguucugccucucacagucuacggaaucacaggcagguuacaaaaacuuuaugau

SEQ ID NO: 4135265 - RNA, 59 nt, Human
aucagcagaggucuagcaccaagaaucucuaaaauaggagaccugguuccucuuuugau

SEQ ID NO: 4135266 - RNA, 75 nt, Human
aucagcucacauuaaugggaugagguggaaaguuggacacacuaccucacagucugccuuucccuugugcuaggu

SEQ ID NO: 4135267 - RNA, 57 nt, Human
aucaggaugaagcuguagcgaagauuuuaacaagucacauuacugucauauccugau

SEQ ID NO: 4135268 - RNA, 62 nt, Human
aucaggcaguauauacucuuugaggggaguugacuucuuucaguuaguauaauuguuuugau

SEQ ID NO: 4135269 - RNA, 95 nt, Human
aucagguguugugcuuccuucuuugugguagaaaguacaagaggcaauaacuuauuuuuaacuuuagggaagggaugccccaacauguccuugau

SEQ ID NO: 4135270 - RNA, 74 nt, Human
aucaguauuaaaggaggacuuugucugggaugaacugcuaaauuccagcaauccaagcuuucuuuaaaguugau

SEQ ID NO: 4135271 - RNA, 85 nt, Human
aucagugagucccauuauaugacacugcuuccugagaaaucaacauuucuagauguuuucaauaaagcaguaugggaguucuggu

SEQ ID NO: 4135272 - RNA, 59 nt, Human
aucagugaugagguggcuuucaaaugugucuucuacauugauaccuaaacaucccugau

SEQ ID NO: 4135273 - RNA, 81 nt, Human
auaaaaauaaagcuaaggguguuuaagcaggcaaaauguuuggaauuuuguuucuuaaaugucuuuaagguuuguuuuugu

SEQ ID NO: 4135274 - RNA, 88 nt, Human
auaaaacacguggacagguaacugggaauacaucuguaucauauaggugacagguguccaacauuuaccuuuaaaacauguguuuugu

SEQ ID NO: 4135275 - RNA, 66 nt, Human
auaaaacuuggccuuuauaacacucugacacucucagagcaugcaggacauaaaggcaaguauuau

SEQ ID NO: 4135276 - RNA, 87 nt, Human
auaaaagcuagggaugaugauagguuauuuuguguugugugguauguuuauaugaugccaaauaaccuguuuaacuuacguuuuugu

SEQ ID NO: 4135277 - RNA, 58 nt, Human
auaaaaucagaguuggauuggaugaccucuaaggucuguucugauucuaugauuuuau

SEQ ID NO: 4135278 - RNA, 79 nt, Human
auaaaauugcuccagugcauucucuaauuacagguaacccauuauucaguacccaggaaugucgcgagaguagauuugu

SEQ ID NO: 4135279 - RNA, 66 nt, Human
auaaacaucaagaauugggagcuauugaacagaugguuuauuaguguccuaauucuugaucuuuau

SEQ ID NO: 4135280 - RNA, 95 nt, Human
auaaaccagggaacauaaguauuucccugaguucugugagcugcuguagcaaguucaugaaacccaaggaagggauugugggaacccugauuuau

SEQ ID NO: 4135281 - RNA, 55 nt, Human
auaaagauugaaagccuagguuaccaaguugguuuuagcuuucuagaaucuuugu

SEQ ID NO: 4135282 - RNA, 71 nt, Human
auaaaguaaugcauauaaugugcuuagaacaggaugguauguagguuacagugcauuguacaaugcuuuau

SEQ ID NO: 4135283 - RNA, 96 nt, Human
auaaauacugauuuuucuacugcauuuugugcucccuagggaaagacaucugaacaucuuucuaucucuagcgcacagaagaaauuacguauuugu

SEQ ID NO: 4135284 - RNA, 67 nt, Human
auaaauaucacuguugucccucagcguguacaaccuugggcuggaagggacacaugugauuauuuau

SEQ ID NO: 4135285 - RNA, 75 nt, Human
auaaauauugcuugauuugauuuggcacagccaucauucuuaugcucugcugguuccgaauuaggccauagauau

SEQ ID NO: 4135286 - RNA, 66 nt, Human
auaaauggcuucucaguuucauaaugaaaggaauauuucauuuugcagagcugaggaacuguuuau

SEQ ID NO: 4135287 - RNA, 68 nt, Human
auaacaauagugguagugcuggucauagugaugaagaagaaacaagagcagcagcuaccacuuguuau

SEQ ID NO: 4135288 - RNA, 127 nt, Human
auaacaguuuguuauaagauauuuuaagucuuuugaaaugguuucaaacacacuaaguaaagaguaacuuucauucugcuguuguuuuugugcugucgaggacuugggaugcaugacaaagauuugu

SEQ ID NO: 4135289 - RNA, 115 nt, Human
auaaccugcugaccaguacugaagacagcuuauucugguguuuguccccaaaucuucauuuugccccauuagaauuagguuguuuaccacguauacccucugugguuuugguugu

SEQ ID NO: 4135290 - RNA, 64 nt, Human
auaaccuuaucuugauuccucuuuuguuacuucugaugugaaaacugaggcagguaagaguuau

SEQ ID NO: 4135291 - RNA, 65 nt, Human
auaacugguuaaacuaucuguguuugaaguuuucuuucuggaaaauauauagaaguacccguugu

SEQ ID NO: 4135292 - RNA, 75 nt, Human
auaacuucagggcugugacagaagggcuggugccuagaaaggucccuucaggaucuguuaugggauggaaguugu

SEQ ID NO: 4135293 - RNA, 57 nt, Human
auaagaacaagauguuccuguuuugugguaaggaaaacaggauguucuuguuuuugu

SEQ ID NO: 4135294 - RNA, 65 nt, Human
auaagaagggagagaaaguugguuacugcuacagucugaauguuugugucucccaaaauucuuau

SEQ ID NO: 4135295 - RNA, 129 nt, Human
auaagaccaauauaaacagaaauauaaaacugcacuaaugagcagaauuucuguaugaauagagaaacauaccauguuuccguguagaaauuccugauauuguauuuugucauuucuuccuuaauuuau

SEQ ID NO: 4135296 - RNA, 56 nt, Human
auaagagcaggcuucuggccagagugagugcagcucugccuugaagcaacucuugu

SEQ ID NO: 4135297 - RNA, 59 nt, Human
auaagcaggagaugcaggaauguauuaauagauauauuccaguucaucucuugauuuau

SEQ ID NO: 4135298 - RNA, 78 nt, Human
auaaggauauuuuguugagugcuuaaaaacugaccaugugucaaguuuugucuaagaacuuugcaaauauuaacuuau

SEQ ID NO: 4135299 - RNA, 60 nt, Human
auaaggcuguguuugccuggaugagagauugcagauuccgucagcagauccagcacuugu

SEQ ID NO: 4135300 - RNA, 66 nt, Human
auaagggauggguguugggcuuuaucugaauuauuaucuuaaaugcccacaccauuuauucuuugu

SEQ ID NO: 4135301 - RNA, 85 nt, Human
auaagguagaggaagggaggauuugauggcuuucucccugaaggcuugagcugggacaucaauauucuuuugcccucaacucugu

SEQ ID NO: 4135302 - RNA, 104 nt, Human
auaaguauaauaccaucucuaucaugcagggauguugcaaagaauaugcaauuccacauauucuuugcaacaucccugcaugauagagaugguauuaggcuuau

SEQ ID NO: 4135303 - RNA, 71 nt, Human
auaaguucugaagaggcgagguaagugugcugaaagaugguugagaugcacuuguguuuucagaaucuuau

SEQ ID NO: 4135304 - RNA, 79 nt, Human
auaaguugguuggagagaaaauuaguagagagcaauuugucaaugccuuuacaaagcaauuuugucucuagguauuuau

SEQ ID NO: 4135305 - RNA, 63 nt, Human
auaauaaccucucggagccucaccauuuuuagaauaaaauucaggaaaauugaggguuguugu

SEQ ID NO: 4135306 - RNA, 73 nt, Human
auaauaacuucauaccaguaaaucaaucagaaauaaaaugaaacugaaugaguuauuagguguaagugauuau

SEQ ID NO: 4135307 - RNA, 92 nt, Human
auaauaagcuauaugucagugaauacuucaggaaaauaaaauaaccuccaaagaaaaggaucugagguauaugacuggcuauaguuugauau

SEQ ID NO: 4135308 - RNA, 60 nt, Human
auaauacaugcauuggauggcaauagggcugcuuguuacauggacaacuguauguauugu

SEQ ID NO: 4135309 - RNA, 68 nt, Human
auaauauguuaagucuuuagggauauagaauacaauagucucuguccuuaaggagcuuaaugucuuau

SEQ ID NO: 4135310 - RNA, 60 nt, Human
auaauauugagucaggaccugaaagaccuuccaccucuucagguccugacucaauauuau

SEQ ID NO: 4135311 - RNA, 114 nt, Human
auaaucaaacugaaggugaggucagugguggguuuuguguauaugcuuaugcauaguuuuaacaaaaaacuacagcaucuauacaaauaaugucggccucauuuuugugauuau

SEQ ID NO: 4135312 - RNA, 96 nt, Human
auaauccaaacuuguuaacuuuucugccaggcucugucccugcagggaacaguggagcagguggcagcagccuggugaaauguauauuuggauugu

SEQ ID NO: 4135313 - RNA, 91 nt, Human
auaaucuuggagucaauauauggagguaagaauauuuuuuugaaauuaaaauauuucaaagucaauaucauuaccauguguuguagauuau

SEQ ID NO: 4135314 - RNA, 102 nt, Human
auaaugaguauuucaauguuuugcagucaaauuugcuaaauuugugaaggaagaaauguaaauauauuugguagugauugaaauuauggaaauauacauuau

SEQ ID NO: 4135315 - RNA, 75 nt, Human
auaaugcucccuuacuccuggggaagccaagcagagaagacuccaaugcuuuaaaccauggaugugaggcauugu

SEQ ID NO: 4135316 - RNA, 56 nt, Human
auaaugcugggagaaauuguuaucuuuaugggauaauaaaucuccauagauauuau

SEQ ID NO: 4135317 - RNA, 92 nt, Human
auaauuaacuaaugcauacacaguguauaaaaucuuaaagauacuaaagaguaucugauauuaaaaacauuggacugagcauggugguuuau

SEQ ID NO: 4135318 - RNA, 84 nt, Human
auaauugaugaaugcaauauuuuaugacagauuaugcauuuccuuagacagguaacuguuacagaaauauugcuucuugauuau

SEQ ID NO: 4135319 - RNA, 65 nt, Human
auaauugcucaaaaauuauugaguguuuugaauugggaaugaagugauaggguuugggcaauuau

SEQ ID NO: 4135320 - RNA, 74 nt, Human
auacaaguagauuucugcugaagcuuuucugucaaaaucagcaagugaaaaagagugcagagauaugcuugugu

SEQ ID NO: 4135321 - RNA, 71 nt, Human
auacaauagaauauacaacaccaacaguguacccuacuguacacuaugggcuuuguguaauaaugaugugu

SEQ ID NO: 4135322 - RNA, 70 nt, Human
auacacagcucacaacgugugcauuugugugaccuugucucugugugugugugugugugugugugugugu

SEQ ID NO: 4135323 - RNA, 59 nt, Human
auacacaggcaugcuucugauucaucaauaaucugaaauuguagcauguguuugugugu

SEQ ID NO: 4135324 - RNA, 80 nt, Human
auacaccaucuuaucucguuuauuccuuuaagccacaucaaaucauuuauaggaauaaagugggguauaaauaagugaau

SEQ ID NO: 4135325 - RNA, 130 nt, Human
auacaccugugucuguguguguguaugcgugaguguucuaaaugccauucguuucauacaccugugucuguguguguguaugcgugaguguucuaaaugccauucguuucauacaccugugucugugugu

SEQ ID NO: 4135326 - RNA, 60 nt, Human
auacacguguguguacaugcacguguguguacguacacguguguguacguacacgugugu

SEQ ID NO: 4135327 - RNA, 70 nt, Human
auacacuacaguucuuaauuaaguaguaacauaguagauacuugauuauuugacuugagaacagguguau

SEQ ID NO: 4135328 - RNA, 76 nt, Human
auacacucagcucauccacuaaaucccuuuucagguagacaggguuauaugggaagaugagcuagaaugagucuau

SEQ ID NO: 4135329 - RNA, 65 nt, Human
auacacuguguguguaugugugugcaugcacaugcacacauucaugagugcaugcacaugugugu

SEQ ID NO: 4135330 - RNA, 75 nt, Human
auacagccagucggcgggcgccuuggaaaguuuccggcccuccaggaggcuuccuggcucuugauuggccagugu

SEQ ID NO: 4135331 - RNA, 59 nt, Human
auacaggcagagaacucauccgugacauugucuagcauuucacagucuacugccuuuau

SEQ ID NO: 4135332 - RNA, 76 nt, Human
auacauaccaucuccuggaaagcugaaagaagaagauauauucuuaaugagguuuuaagagagaaggucaucguau

SEQ ID NO: 4135333 - RNA, 63 nt, Human
auacaucaauuucuuaguuaucaugaaguauuuuauuugcuggauacaaagagauugauguau

SEQ ID NO: 4135334 - RNA, 72 nt, Human
auacaugacagcauagcauccuuucccccucgcugccaggaaagaaauaucacaauguuagcaaucaugugu

SEQ ID NO: 4135335 - RNA, 60 nt, Human
auacauguuugcuggauaaacagaugcaagcaaaacaucuagguuuuugugaacaugugu

SEQ ID NO: 4135336 - RNA, 86 nt, Human
auaccaaauaagacuccauaguacacauccuacaauguuugguuacuugugagugaacagguguguguguguguguaugugugugu

SEQ ID NO: 4135337 - RNA, 63 nt, Human
auaccaccaucuaugaaagguaauagccaccgcuauugacacaucuggccauuuggugaguau

SEQ ID NO: 4135338 - RNA, 68 nt, Human
auaccccagagcugacucuggccucugguccucucuccagaggaagaaggcgagagugagcugggugu

SEQ ID NO: 4135339 - RNA, 87 nt, Human
auaccugcuggucugccucagucuccucuauaucugaaaucaacuucagaggcagaauggagauuugguuagguaaauaguggguau

SEQ ID NO: 4135340 - RNA, 116 nt, Human
auacgugugugcuggugcucugagccugccuguauucaauuuugugugauguguggcccacaugcaccugcuguauauagggacucucaggcuccagggaggagacauacaugugu

SEQ ID NO: 4135341 - RNA, 126 nt, Human
augugccuuaaucguuauauucuuuacauuguacaucagucuuuugcauacauauucguauuccccgcaagaauauguguugcuagggaguuggugucuaugccugguuuagcuuuuuguccgcau

SEQ ID NO: 4135342 - RNA, 115 nt, Human
augugcgcauuuauucuggaguuauaaucgggaugggguguggcuuauggcuauuacgugaaggcaaauaagcaauuccauucuucaagcaugaccucagaucacacaugcacau

SEQ ID NO: 4135343 - RNA, 72 nt, Human
augugcuaaaagccauguuucagauacauaaauggggaaggaauuccguaacugaggcagcuuuuaagacau

SEQ ID NO: 4135344 - RNA, 61 nt, Human
augugcucuaggaccuuagaagugggagcaguugcuuucauuuguaaggauuagggugcgu

SEQ ID NO: 4135345 - RNA, 63 nt, Human
auguggaggggauggugaagccggcccugcccgcuggauuuuaucagcaugcuccucagacau

SEQ ID NO: 4135346 - RNA, 62 nt, Human
auguggcccagguucugaaaaacagccucuuauuuaaaaggcuuguacagcagccuucgcau

SEQ ID NO: 4135347 - RNA, 61 nt, Human
auguggcucacauagcuggaaauaauuauuuuguguucaaauccagggcuagggagcucau

SEQ ID NO: 4135348 - RNA, 76 nt, Human
auguggcuguggagcugcagaguuggccuuuuuggggccacccuccagacccagacugcuugcuucccagccccgu

SEQ ID NO: 4135349 - RNA, 67 nt, Human
augugguccaggauacaucacuuuuuuugggcccacccaagggagaguuugauguuuccucuuacgu

SEQ ID NO: 4135350 - RNA, 61 nt, Human
auguguaaugugguauuuuaauaaccauugcaauuggcuauuaaaaugcagcuuugcacau

SEQ ID NO: 4135351 - RNA, 66 nt, Human
auguguacauacauauucauacaggugguacaaucuaugucuccacuugcauguguauguauauau

SEQ ID NO: 4135352 - RNA, 83 nt, Human
auguguaugaaaaguauuuuaugacucuaugaaucuguauaauaacugcucugaucauggauaaaauauugguuaauacacau

SEQ ID NO: 4135353 - RNA, 91 nt, Human
augugucaggaaaguucgcucugggguggcagagaaguugucuuucuuguuuguaacugagugcucagagccugaaagacuucuggcacau

SEQ ID NO: 4135354 - RNA, 59 nt, Human
augugucauuauuguguaggcugcugagguuucaaaucucuauaacuauagugacagau

SEQ ID NO: 4135355 - RNA, 66 nt, Human
auguguccuuaugaaaauacugucuucugauagcuucagcauacaggguuuuuuaugagaacagau

SEQ ID NO: 4135356 - RNA, 67 nt, Human
augugucucuaaaauuuaguaauaagauguucuugugaauaaugcagugcugauuuaggagauauau

SEQ ID NO: 4135357 - RNA, 130 nt, Human
auguguguauauauacacauauguguguguauauguguauauauacacauauguguguguauauguguauauauacacauauguguguauauguguauauauacacauauguguguauauguguauauau

SEQ ID NO: 4135358 - RNA, 83 nt, Human
augugugugugugcaugugugugugcauguguauacauggugugcguguguauacauguguucaugcauguaugugcauguau

SEQ ID NO: 4135359 - RNA, 74 nt, Human
auguguuaauggggucaggaggagaacugaacuugcagcuugcagcacuucaaucucugccuccaucaucacau

SEQ ID NO: 4135360 - RNA, 69 nt, Human
auguguucauguuuuucccuuugaagacugccugggaaaggcuaacagucauggaaguaacaaacauau

SEQ ID NO: 4135361 - RNA, 64 nt, Human
auguguucauucuguauaugcuguaugcauaucaugcuacaugcaugucacagaaugaacacau

SEQ ID NO: 4135362 - RNA, 105 nt, Human
auguuaaggacccauuguuuggguccuuauugauaccaauggccauaauaaucucuaaauuuauuuauucauuaacagggaccaaagucaauagggccuuaauau

SEQ ID NO: 4135363 - RNA, 56 nt, Human
auguuacagggagagaaggccaagcccuagagggaaggccauccugcccuugacau

SEQ ID NO: 4135364 - RNA, 122 nt, Human
auguuacagguuaauuuauaauuuuauuucaugcacuacuuggcuuuacugauuaauaugccccauggcauucaauaaagucaggcaguggaggaaauaagagugguauuaauuucuaacau

SEQ ID NO: 4135365 - RNA, 57 nt, Human
auguuaguuauauuuacugcugucaguuuuuuagacaguuauagcugugaauaacau

SEQ ID NO: 4135366 - RNA, 93 nt, Human
auguuauugacagagcugaaaucugaacucuguauccuucagcguagaagaucaauguucauuaagaugcuucaguucuggaaauuucaacau

SEQ ID NO: 4135367 - RNA, 89 nt, Human
auguucacuugcuaauuaaccacccauucagaaacacugagaauucuuuauuguuaucaugggugagugaauauuagcaguguguucau

SEQ ID NO: 4135368 - RNA, 81 nt, Human
auguucagggucauauagucagugaucaguggaguugggauuccaacccagauguuuuugacuucaaaugacucugaucau

SEQ ID NO: 4135369 - RNA, 66 nt, Human
auguucauccaugucguagcaguuccuuuccuuuuauuacuguguaguauuccaugguauggaugu

SEQ ID NO: 4135370 - RNA, 94 nt, Human
auguuccacaguggggauuccugcaagaucuuuaaggaggcagcucuuccugcuucccagaauuguugggaacugcaugagugagugagagcau

SEQ ID NO: 4135371 - RNA, 73 nt, Human
auguuccacucacuuaagcucuuuaagggagaaaaucagccuuguguccuuggagccugguauaguguugcau

SEQ ID NO: 4135372 - RNA, 66 nt, Human
auguucccagcacugaguaacaccaaagaaauauacgacaggaguugucucagcuuuggagaagau

SEQ ID NO: 4135373 - RNA, 75 nt, Human
auguucccauggcaguauuucugaaaggcugguaccaucucuccaagcugacauuggauauugcuauuuaaacau

SEQ ID NO: 4135374 - RNA, 56 nt, Human
auguuccucauucuugcaaccccagcacuuuaggggaagccagaaagugagaauau

SEQ ID NO: 4135375 - RNA, 76 nt, Human
auguucugaauaaugugcauuacaaaugacugauaauaauucaugcaaagaggaucgcauauugaauucagaaugu

SEQ ID NO: 4135376 - RNA, 65 nt, Human
auguucugccuccauuuugaguggaacuccuuuuccacuuucaaacucugagguaauagaaacau

SEQ ID NO: 4135377 - RNA, 64 nt, Human
auguucuuugccuuauuuuaaacuuuauuguaauaaauucacuaaugaagcaggcagagaagau

SEQ ID NO: 4135378 - RNA, 74 nt, Human
auguugaguccuucgagggaauacuggaaugucuucuaaagugacuagacauuuugcauucccugaagcagcgu

SEQ ID NO: 4135379 - RNA, 91 nt, Human
auguugcaauacuuuuucagaguacacagagaucuucuauccccaguggaacaauugaacugugauauucugugccaaaguggguugauau

SEQ ID NO: 4135380 - RNA, 77 nt, Human
auguugcuucacuggcuccacauaggauacaggcacagcccccaguguguagaacccuaaaggaguguggggcacau

SEQ ID NO: 4135381 - RNA, 60 nt, Human
auguuggacuuaacaaagggugaugaugaucauuauuaaucuuugcuaagccaccuacau

SEQ ID NO: 4135382 - RNA, 119 nt, Human
auguuguagaaguaagugugcuuuagcauuuauggucauguguccacuuaugaucaugugaaugaacacaugauuauaaaugcuagggcacacauacuuuaaugagcacaauacaacgu

SEQ ID NO: 4135383 - RNA, 74 nt, Human
auguugugguguguauuuaaaggauaguuggggacccaaauaccacuauaugccuuugaaauacaaaauaaugu

SEQ ID NO: 4135384 - RNA, 85 nt, Human
auguuguuaaaggguacaaacuuucaguuauaacaugaaaguacaaacuuucaguuguaaguucugagggucuaccguacagcau

SEQ ID NO: 4135385 - RNA, 129 nt, Human
auguuuauuaauucacucauggacuccaucauucagcuagcauuugccaaugcuuacggguggccagaugcugugguaggcacuggggaggcagcauggaacaggacaaauggaguuuacaguagauuu

SEQ ID NO: 4135386 - RNA, 60 nt, Human
auguuucagggugauagaagguuaugccaaucaaacgagccuucauuacucugacaacau

SEQ ID NO: 4135387 - RNA, 58 nt, Human
auguuucccauaagauuuucugugcaguuggugaagccagauuugcucugggaaacau

SEQ ID NO: 4135388 - RNA, 62 nt, Human
auguuuccucuuaugcaaauugggagcuagaagaguuguacaguguaaauaaguggaugcau

SEQ ID NO: 4135389 - RNA, 78 nt, Human
auguuucuacuuucaguuuaaugaugcccugcuguauacaacaccagugcagucugggauguauaaacugaacaacau

SEQ ID NO: 4135390 - RNA, 74 nt, Human
auguuucugggaaaaaaauucauuguggaauaaccugacauucugauaacagugauauuuuuacucaaaugcau

SEQ ID NO: 4135391 - RNA, 60 nt, Human
auguuugucaggauuguaauuaaggugguguguauaccaggguugcaagaggacagagau

SEQ ID NO: 4135392 - RNA, 64 nt, Human
auguuuguugaacaucuacugcaaugggccaagcccugggcuugaaaggugcuuuugcaggcau

SEQ ID NO: 4135393 - RNA, 67 nt, Human
auguuuucuuacagauuuggugaaugacuguccacagaagggaggucucaccaucugaagaaggugu

SEQ ID NO: 4135394 - RNA, 93 nt, Human
auguuuuuuuacauguugauccccagaaaauaggugccuaaaaaaaguuacuuuaggauaaugauuucaggggaguagaaggugaaaaaucau

SEQ ID NO: 4135395 - RNA, 80 nt, Human
auuaaaauuguaaugcugcuuuucacagagacaagauuucaacccaaucuuccguaacuggaguagcaaacaauguugau

SEQ ID NO: 4135396 - RNA, 68 nt, Human
auuaaaguaugauuggggauuauuuacucccuuugaauucuguagaaauauccacaucauacuauagu

SEQ ID NO: 4135397 - RNA, 83 nt, Human
auuaaauagaaacaggcuggcuuucccuggacaacagcgauaacuugcugauguguuuggaggucagccuguggcugugaagu

SEQ ID NO: 4135398 - RNA, 71 nt, Human
auuaacaagggcucugggaugcucuuagagcaugaauugcagagcagaagagguccuagaugccagcuagu

SEQ ID NO: 4135399 - RNA, 130 nt, Human
auuaaguuucaacauaugaauuuuggaugacaaauucagaccauagcauauacaguugguggguuguggucugcuauggacugaauguuuguauccccuucccccuaauuuuauauauugaagugcuaau

SEQ ID NO: 4135400 - RNA, 58 nt, Human
auuaauagccucauuuugcaaguuucauggcaacauuagagcaaguuaaggcauuaau

SEQ ID NO: 4135401 - RNA, 102 nt, Human
auuaauaguaucugucagaaauuagaagucaugcucccaucuugcucagccaugaguuuucaaaaagcaaaaugggacaugggauuuugacauacuauuagu

SEQ ID NO: 4135402 - RNA, 93 nt, Human
auuacagauuugucucaugguaagagggauaauauguauuguaaccucauauuuacaucaugcuuaucccuuucauggagacgaggguguaau

SEQ ID NO: 4135403 - RNA, 78 nt, Human
auuacaggcaugagccacugcacccagccuuuuaaaaaacuuuuuggccagguuguuuuauaggcucaugccuauaau

SEQ ID NO: 4135404 - RNA, 76 nt, Human
auuacagugaaugaauggcugugcauaaguccuagaaugccaaucuggaugggcacauuguuacucuuacugugau

SEQ ID NO: 4135405 - RNA, 58 nt, Human
auuacaugggccauuuagacaugcauguaaguagaauuaucauuuggcccuaugugau

SEQ ID NO: 4135406 - RNA, 83 nt, Human
auuacccaaggacauuuauacuauuuugaagguuaauuccaaccucacucauucagcauauguuuggaguguccuugccuaau

SEQ ID NO: 4135407 - RNA, 55 nt, Human
auuacucuucuagagguccuagaaggaagauuuucucuccucuagucaggguggu

SEQ ID NO: 4135408 - RNA, 69 nt, Human
auuacuguagaccuuaauauauagagcugugacacuguuaggaaacgcuuuuguuaaggauccaguagu

SEQ ID NO: 4135409 - RNA, 59 nt, Human
auacuacaaucauaauuguacauuuagaaauaauuaaaguguauaauuggauugugugu

SEQ ID NO: 4135410 - RNA, 57 nt, Human
auacuacauuauuagagccuggguuuuagguccauggagcugggaacuauguaguau

SEQ ID NO: 4135411 - RNA, 129 nt, Human
auacuauuggucccgagggaaagaucauugcucuuaguugccuuaauuuuguuucuauuauagggccuuuucucaaagcuuugcagacaaaauuccagcugagguuuuuccuucaaggcagcauuguau

SEQ ID NO: 4135412 - RNA, 57 nt, Human
auacucugggcuguuaggagcugucuugucauagauguucuagcagcuccagggagu

SEQ ID NO: 4135413 - RNA, 103 nt, Human
auacugagaauacauuuccuagagaugcugaaaucugaguguagauuuaaaugaauuucaguuuguuuuagaucucuaauaaggagaaauauagucuuuguau

SEQ ID NO: 4135414 - RNA, 55 nt, Human
auacugagggucaacuugauuguauugaaagauacaaaguauugauccugagugu

SEQ ID NO: 4135415 - RNA, 55 nt, Human
auacugauugccggguugccuaccagcuagcuucacagaccugacaguacagugu

SEQ ID NO: 4135416 - RNA, 85 nt, Human
auacuguuuugaaaagugaugcugaagucagauuacuuaugaaucugggcuuuauuuugcaugaaugcuuucucaaggcaaguau

SEQ ID NO: 4135417 - RNA, 63 nt, Human
auacuguuuugugacuuaucuuugaccccacaacaugucuuggauaucuuuccacagcaguau

SEQ ID NO: 4135418 - RNA, 76 nt, Human
auacuuaaucaagaaucucugaucaggcuuuauuaacaugagagucaggccaccaaaggauucuauggaccagugu

SEQ ID NO: 4135419 - RNA, 60 nt, Human
auacuuccuguugcucugucucaugcucuguuuaugcugagacacucauucauggaguau

SEQ ID NO: 4135420 - RNA, 67 nt, Human
auacuucuggaaccugcucccccaccaaaaaaagucuuaauucuggugggagauuauccagaauuau

SEQ ID NO: 4135421 - RNA, 66 nt, Human
auagaaacagggaagcaaagcagcuuaguuuuuagaaugacuucaacuuuguucucugcuuucugu

SEQ ID NO: 4135422 - RNA, 80 nt, Human
auagaaacugauuugguuaauuuaggcuugcauuuccuuaguguuggaaauguacuuccucugacuuauucaguguuugu

SEQ ID NO: 4135423 - RNA, 64 nt, Human
auagaaauuuuguuuuauaugagcuaacagauggauccugaaagcuauggaacagaguggcugu

SEQ ID NO: 4135424 - RNA, 79 nt, Human
auagaacaaaguaaaugucuggaaagacaguguaaaccagauagucaugguuuaaaugucaauagauugcuuggguuau

SEQ ID NO: 4135425 - RNA, 72 nt, Human
auagaagcaauguguuuucaacauucagcaugugaaaaauguggaguuaguuggugaaauucauuguucuau

SEQ ID NO: 4135426 - RNA, 75 nt, Human
auagaauuacacagugcaguaggcacguggcugugauugggugauggcuguugccugcugcuagugauguucuau

SEQ ID NO: 4135427 - RNA, 103 nt, Human
auagaccaaagugauguuugcuuuucuaugguucccuucuaaaauuccacaaagucuuucaaaguaacaaccacgaggagucguaagcacaugcuucaucuau

SEQ ID NO: 4135428 - RNA, 69 nt, Human
auagagaugcccaggcuucaucccagauguacaaaauucaacucucagggacagggucugggacucugu

SEQ ID NO: 4135429 - RNA, 72 nt, Human
auagaggggacuggggggagccugcaagccuagagggaaagaaggacuugcuuccuccuagccacuugcuau

SEQ ID NO: 4135430 - RNA, 56 nt, Human
auagaguacagucuuugauuauggucaauuuaccauguuauaaggcauuacucuau

SEQ ID NO: 4135431 - RNA, 71 nt, Human
auagauaacccugcacuuccuggauuuuaaacaaucgguaguuggauggcagggaguugcaggauuucugu

SEQ ID NO: 4135432 - RNA, 68 nt, Human
auagaugagggaaaauaaaauugcaguagauuaagauuuauaggcaaguaauuuucuaccugauuugu

SEQ ID NO: 4135433 - RNA, 102 nt, Human
auagaugcaguguguuucuguuuuuuccuuaugcaaucugaaaauaacuucaugaagccgagaaggaagaugugaacagucaagcauccuaaucacauuuau

SEQ ID NO: 4135434 - RNA, 56 nt, Human
auagaugugccgcugggucccgggagccgucaugcccaccuggcuggcgcacuugu

SEQ ID NO: 4135435 - RNA, 67 nt, Human
auagcaaauuucuaagucaagaagaaccagacuauuccuuguuaggcuuaucuuuucuuagggcuau

SEQ ID NO: 4135436 - RNA, 61 nt, Human
auagcagggagacagugcagcauuaaacugguggcauaauguuguaaauauucuuugagau

SEQ ID NO: 4135437 - RNA, 101 nt, Human
auagccacacauauauacuuuuguuacuuuuuauuccuuuugauuuuaacuagccuggcugaauaugaaugaugggaaggagaaaagcaaaaggggguuau

SEQ ID NO: 4135438 - RNA, 96 nt, Human
auagccgacugccggcuccauggaggggccugugccggagaacgcacauguugacuuauuucuucagucuaggccuuucuuggcccccuugguuau

SEQ ID NO: 4135439 - RNA, 77 nt, Human
auagccugaugagggcuuuaauuagagaauucuuguuauuguagaauuuuagaucuaggaaagccuuucacaacugu

SEQ ID NO: 4135440 - RNA, 70 nt, Human
auagccuggguuuuuauuaaggagugggaagguguccucaguuucguuagugaagagcccucuagguugu

SEQ ID NO: 4135441 - RNA, 56 nt, Human
auagcuguagcugcaaaaauucuguuuucuggaauuacaugagcaaauauagcuau

SEQ ID NO: 4135442 - RNA, 62 nt, Human
auagcuuucuuaaauauauaaaaaccugaggaauggcaggggaugugaaguaggaagggugu

SEQ ID NO: 4135443 - RNA, 62 nt, Human
auaggaaauuacagaucaccaaugcauaagguuuuaugcuaggugcucugugaucugcuuau

SEQ ID NO: 4135444 - RNA, 70 nt, Human
auaggaacuauuucugccaaaguggggaccuuguccauagcaacgucccuguccugcagaaaguuugcau

SEQ ID NO: 4135445 - RNA, 70 nt, Human
auaggaggaggaaaggaguugaaaugggcaagccaauuuaugcuuuuucuuauucuuuuugucuuuuuau

SEQ ID NO: 4135446 - RNA, 65 nt, Human
auaggaucucacauacgaauauacauaugcauaaaaccccauuguguauuuucguggaggccuau

SEQ ID NO: 4135447 - RNA, 84 nt, Human
auaggaugaaauuguucauucaucaaauauuuacugugugcauagacuaugcaaaaaguaagauacuugauaaugagcuccugu

SEQ ID NO: 4135448 - RNA, 59 nt, Human
auaggcccugcuuugcacccaggcuggcucucugagccagccggcaagggagugccuau

SEQ ID NO: 4135449 - RNA, 75 nt, Human
auaggccuuaacauaugguaguguaacugcuuuagcugcuccaaauagguuuugugcucccaaauguaggucuau

SEQ ID NO: 4135450 - RNA, 76 nt, Human
auaggcuccaagggggugaaugucugucuacauaucaaccuaucuaguuaauaggauucacucuuuugcugucugu

SEQ ID NO: 4135451 - RNA, 93 nt, Human
auagggaaacaggcagagaaagacuugcccuuagucugguuggggacagugcuggaacuagaaugcaggauuggucucuggccucucaccugu

SEQ ID NO: 4135452 - RNA, 80 nt, Human
auaggggagaaaaaggcaagauuaggaccagaagaauaaugacuuuuuguaaagaauucauaaaccuuuuuuucuacuau

SEQ ID NO: 4135453 - RNA, 91 nt, Human
auaggguucugcauaaaacaugauuucugcuagguuuauauuaaauaugguuguugaacaaagcuuucuugauuuugccuguaaacccuau

SEQ ID NO: 4135454 - RNA, 88 nt, Human
auagguagugagugagccagcugggaucagaaccugugugguuuggccccacagucuccucucuuagccugucuacugccacuccugu

SEQ ID NO: 4135455 - RNA, 66 nt, Human
auagguugaguaguaaggauauuaucuuuguuggaggaaaaacagucuuuauuauuuuaggccuau

SEQ ID NO: 4135456 - RNA, 80 nt, Human
auaguaaacacacccaugucacuggagauacacacaauucugcuugauggugacaguauacuugugaugggauuuauuau

SEQ ID NO: 4135457 - RNA, 95 nt, Human
auaguaauacacaauuuaaaugguuuaauuauguuuaauguuccacagaacaaugaaacuguauauagacuguaugcuugauauugguauucuau

SEQ ID NO: 4135458 - RNA, 61 nt, Human
auagugcugaauuugagaaacucugcuagacagcaguggguucucaaauguuagcaucugu

SEQ ID NO: 4135459 - RNA, 67 nt, Human
auaguuaccauuuaaggaaaauguaucacaguccugguacugugccaaguccugaauguguuucuau

SEQ ID NO: 4135460 - RNA, 129 nt, Human
auaguuauagauguauagguaguuugaucauuugggaagaaguugcaaauuuauauaacccuaaaacuucaguguauauuuuggguacucuuuuucacaauuagaauaaaauuaucaaaaucaauaugu

SEQ ID NO: 4135461 - RNA, 59 nt, Human
auaguuccagcaucuuugguaaccugaaacugagagucauuaaaguaagcuggcacugu

SEQ ID NO: 4135462 - RNA, 59 nt, Human
auaguuccuauccuagagccauuugaggaucugacaucgguuauaggagagggaauuau

SEQ ID NO: 4135463 - RNA, 70 nt, Human
auaguuucaaguuuuuguuuguuuguuuuaccuaauuaccugaaagcaaauaccaaaggcugaugucugu

SEQ ID NO: 4135464 - RNA, 68 nt, Human
auaguuuggacaaaagacuccuuagauauucaaauauguagaggccugucaagucauguucagauuau

SEQ ID NO: 4135465 - RNA, 69 nt, Human
auauaaacuaaaugacuuccagugguuauaucuguggaauaagauuauggagaagucauuuguuuuugu

SEQ ID NO: 4135466 - RNA, 58 nt, Human
auauacacucaccaugguauuucugaugcuuuuugaugguacugucuugagugugugu

SEQ ID NO: 4135467 - RNA, 56 nt, Human
auauacagaagaacuauagccacuuuucuagugaaguguccaagucuucuguuugu

SEQ ID NO: 4135468 - RNA, 106 nt, Human
auauacuacauuuucuuuauccauucauuugucaacaggcauuuagguuguuuucauaucuuugcuauuguaaaucacguggcaauaaacaugggaauguggauau

SEQ ID NO: 4135469 - RNA, 83 nt, Human
auauagggaauguuaacuaauggucuaacauuucuuaaucuuuacuuuguaucaaauggggcuauuacuuaaauucuuuguau

SEQ ID NO: 4135470 - RNA, 77 nt, Human
auauaguguauuaugagguauuuggacuuuaucaaagggacuuuuguuguccaaagcccaggugucuuucacuaugu

SEQ ID NO: 4135471 - RNA, 73 nt, Human
auauaguuggauccacuggcaauaguagaaaaaacaagaauagcaacugcuaggugucuaguguccacuaugu

SEQ ID NO: 4135472 - RNA, 55 nt, Human
auauauaucgaguucaugucucuuguuuucaugaggagacacacuugauaugugu

SEQ ID NO: 4135473 - RNA, 100 nt, Human
auauauauguauguaauauauauguuauauaugauguauguauguauauguaauauauguauguuucuauauaugacaugaguauguguuauauguauau

SEQ ID NO: 4135474 - RNA, 110 nt, Human
auauaugcagaaaaguugaagaauugugaagguagcaaucguguauaugccaucuaaauccuaccauuaacacuuugcuacauuucauauucuugcuuuuuuucauuuau

SEQ ID NO: 4135475 - RNA, 66 nt, Human
auauaugcccaguuagaaccagaguggggauucagacccaagucucugugucacugaggccugugu

SEQ ID NO: 4135476 - RNA, 71 nt, Human
auauauggguauauagaaguaaauacagauguaaaauguacacauguauaugcuuguguguguguaugugu

SEQ ID NO: 4135477 - RNA, 75 nt, Human
auauauuggcaggcuuuaauagugacugguuuuucacuggagaucugcaguuuucuaaagucucuuuaaauguau

SEQ ID NO: 4135478 - RNA, 83 nt, Human
auaucaggaaaguaaugagauguaggaaacaaagacuuaaaaauuaaagcuguugguuaucuucuauuucucauacuugguau

SEQ ID NO: 4135479 - RNA, 76 nt, Human
agucauucuagucauugcagcugagguuauccuagauuagcugagcugcagaugacuguaagauccaugagugagu

SEQ ID NO: 4135480 - RNA, 64 nt, Human
aguccaagcauagaaaucaggugagaaucuggucagccaggcaugcugugucuaugcgggggcu

SEQ ID NO: 4135481 - RNA, 57 nt, Human
aguccacagagucucuccugaaagaagaaaauuggcaaggagacugcuuuguagacu

SEQ ID NO: 4135482 - RNA, 130 nt, Human
aguccaggacuguuuuccuacagcgugccucaaaaguguuguagagggcaggauucuacauucacagccuguuccaucuacgagauuuuccagaugcuacuugugguagacauuccuaacucaugguacu

SEQ ID NO: 4135483 - RNA, 59 nt, Human
aguccagggaaauagcgacaggggaguucaagacugccccugcuaguccuuccuuggcu

SEQ ID NO: 4135484 - RNA, 56 nt, Human
aguccagugaacuguaaauaggcaaguuggaucucguuuaggcagaaaauugggcu

SEQ ID NO: 4135485 - RNA, 56 nt, Human
aguccaugcugucuacagaaucaguguauauggguuccacauaggacaguuggacu

SEQ ID NO: 4135486 - RNA, 61 nt, Human
agucccagaucuccauucggucauuucugaaaccaccucagggagaaggggaugugugacu

SEQ ID NO: 4135487 - RNA, 84 nt, Human
agucccaguagaagggagaucuguuuuuucuuagacagugaaaauuguuccuggaaaagaacaggauucucaaucucugauacu

SEQ ID NO: 4135488 - RNA, 60 nt, Human
aguccccuuguauucuuguaccuuucaaugccuugaaaagaucuggggugaaggaggacu

SEQ ID NO: 4135489 - RNA, 61 nt, Human
agucccguagcaggaaaccuguguugagggaggcucuuuucauucuuuucuugcuggggcu

SEQ ID NO: 4135490 - RNA, 89 nt, Human
aguccuaggguggugaucaaggcuuuagauccacagaauguagaagcucugauaucuggagcuugaagcuuugguugcauccacuggcu

SEQ ID NO: 4135491 - RNA, 84 nt, Human
aguccucacacagccugcccagggaggcugucuuaugccugcuuuacagaugaggaaacaggacccccagggaggugaaggacu

SEQ ID NO: 4135492 - RNA, 108 nt, Human
aguccuccagcuuuauugaugggugguaaagcuggagcuggaagcuuccacaccagauuuccagccuaauguucuucccaccucaucauuuaguucaacccaaugacu

SEQ ID NO: 4135493 - RNA, 61 nt, Human
aguccuggugacacuccucuucauugccuccauuuggcaaguggauccucaacugugggcu

SEQ ID NO: 4135494 - RNA, 56 nt, Human
aguccuuccugcacccuccuggggaaccauauacacuccaggaaugguagaggacu

SEQ ID NO: 4135495 - RNA, 57 nt, Human
aguccuucuuuuaguugcuugggccauaguucauguuggcuagcacaaagcaggauu

SEQ ID NO: 4135496 - RNA, 67 nt, Human
agucguguucgauaucaggguguuggaugcccucagauggguucuaaacauugguauggagcagauu

SEQ ID NO: 4135497 - RNA, 78 nt, Human
agucuacaaauugauggaugggaggaauauauacuuuuuaauuuuucuccagcucaauauuuauuaauuuguaaggcu

SEQ ID NO: 4135498 - RNA, 82 nt, Human
agucuagcuagugaaaccugacagaucaugugaaagcucuguauucuucuagucauugaugucaguauuaugaguuuagacu

SEQ ID NO: 4135499 - RNA, 87 nt, Human
agucuauugcaguugccuaggcaagaguugguguggacuugaacuaaacaauuucaucacuuucaugccugaaaauauuaauagauu

SEQ ID NO: 4135500 - RNA, 58 nt, Human
agucucauugccuuaguaucauucuacgaauuagaauguguuacuguguaagagcacu

SEQ ID NO: 4135501 - RNA, 63 nt, Human
agucuccccugcagccuggcaauagcuuguagauccuauacccagccccagcugcaggaagcu

SEQ ID NO: 4135502 - RNA, 130 nt, Human
agucucccuucaguggcuggaggagguguggcacagugggagagccccagacucagaggcagucagagaucugcuacugggacucuaucacccuggaccuucauuuccucuuugcaaaaugaggggcucu

SEQ ID NO: 4135503 - RNA, 130 nt, Human
agucuccuggagacugaaggaagcaucaagaucaaaccagagaggcaaaguuacugguauggagacucucacagguaaccagcagagcucaaacuuccugccucucuuuaugguguugucuccauuaucu

SEQ ID NO: 4135504 - RNA, 77 nt, Human
agucucguuuugucacccaggcuggauugcaguggcgcgaucucggcucacugcaaucgcuggguuccagcgagucu

SEQ ID NO: 4135505 - RNA, 74 nt, Human
agucucuccacggggcacuuugaauucugccaggcacagccucccaaguucacguugcuuuuugaggaaugacu

SEQ ID NO: 4135506 - RNA, 61 nt, Human
agucucucuccaguauugagaaguauaguccuccaguacugccucuuggugcugagagacu

SEQ ID NO: 4135507 - RNA, 56 nt, Human
agucucugugagcucccaauggaagguauagaagcuacugggagcuaacggagauu

SEQ ID NO: 4135508 - RNA, 98 nt, Human
agucugacacuucuaagcccauuuagaguauaagagagagacacuaauucugaaucuuuucuggacucugcauggagcuuaagauuuacuagucagcu

SEQ ID NO: 4135509 - RNA, 64 nt, Human
agucuggaguguuuuguagcaauccugggauauuguauucuuuugcuugcagaacuuucaggcu

SEQ ID NO: 4135510 - RNA, 59 nt, Human
agucugggaacauuuugagggcaaagauuguguuuuuguccaucuguauuucccaugcu

SEQ ID NO: 4135511 - RNA, 77 nt, Human
agucuggugcaaauaucauggugcgcacaaacuaggcuacucacuguuuccugcacacguguuauauucacccaacu

SEQ ID NO: 4135512 - RNA, 55 nt, Human
agucuguugcagauuuucaggccuuaggugaggaaggccugggaugggcagaacu

SEQ ID NO: 4135513 - RNA, 88 nt, Human
agucuuaaagcacugcccacauuuccaaagaugccagucacugaacuccgaguggagcuggcuuguggaaguugggcuugccaggacu

SEQ ID NO: 4135514 - RNA, 65 nt, Human
agucuuaggcuccauuaguagauccaucagggagacucuuauucugcauauggaguguugagacu

SEQ ID NO: 4135515 - RNA, 65 nt, Human
agucuuccugcccagcaggagguagguggcggucacuucguuguacuucuggcuggucaaggacu

SEQ ID NO: 4135516 - RNA, 81 nt, Human
agucuugcuuugucacccaggcuggagugcaguggugcuguauuggcucauugcaaccuccuccuggguucaagcgauucu

SEQ ID NO: 4135517 - RNA, 66 nt, Human
agucuugucuggaugcuuuauagguauuaacucguuuaaugccuuuaaccagucuagacagguacu

SEQ ID NO: 4135518 - RNA, 67 nt, Human
agucuuguggcugaaagucaagcugugucuaugaaaugaaauggcuucaaagguagcauacaacacu

SEQ ID NO: 4135519 - RNA, 57 nt, Human
agucuuuccuuuuggaagaaaaaagcucacuucuuucagucacauaaggaaaagacu

SEQ ID NO: 4135520 - RNA, 129 nt, Human
aucuuuuaccccuguuggcuuucacuuuuauuacaacauuuuuacuaagauuggcaaaguuggcaaacagcuauuccagugugaucuuuguagggaauggugauauaaaugauaacagcuguaacugau

SEQ ID NO: 4135521 - RNA, 67 nt, Human
augaaagaaugagcaucaugacuuaagaucugagauauuagagaaguuacuaugacucuucuuuugu

SEQ ID NO: 4135522 - RNA, 75 nt, Human
augaaauggugcauaggaaugugauuuauaaaugcuaaaggguggcauaaauggacguuuuuguuaucauuacau

SEQ ID NO: 4135523 - RNA, 58 nt, Human
augaaauucugauauuguuaaggaucacacaagggugucaagacaagacagaauucau

SEQ ID NO: 4135524 - RNA, 122 nt, Human
augaacacugccuuucaaaugugaaaaaacguuuaagguauaaaaagaagaagaagcaaaugugcuucuuuagcuagaaauacucuaaaguacauuuuacauuuuuucagcaguaguuucau

SEQ ID NO: 4135525 - RNA, 57 nt, Human
augaacagaggcacuaggagggaauaaguaugggaucaucucugugucucuguuuau

SEQ ID NO: 4135526 - RNA, 56 nt, Human
augaacaucucugauccaagcauuugcccaaagacaugccuggauuagaaugucau

SEQ ID NO: 4135527 - RNA, 67 nt, Human
augaacuaucaucaguuccaccuccacuguuaacacucuggagaacuugggauagagagauuuucau

SEQ ID NO: 4135528 - RNA, 85 nt, Human
augaacuccgaagagucccaaaaugauucuuagaggaccagccuccugggacugugacugcuuuugagagcucuucagagaucau

SEQ ID NO: 4135529 - RNA, 57 nt, Human
augaagacaggucucaucaccaguaagaaauuuaaaggugauuaaucaugucuccau

SEQ ID NO: 4135530 - RNA, 83 nt, Human
augaagauucuauuuaucacuuggaaaaauauccaucacuuauuaugcuuaugggagcugggugaggaguacagagucuucau

SEQ ID NO: 4135531 - RNA, 120 nt, Human
augaaguaaggguguguauguccagcaacacagcuaauuucugucaauuggccaaugcucaacaauugacaaauuaguagacugugcuugaguugacacuuuuacaauccagugcuucau

SEQ ID NO: 4135532 - RNA, 130 nt, Human
augaagucagggagaaaauaugugucacgauguuuaggcuuuccaaugucacuaugaauccuuuacucugagagauacggggaaccauuggaggguuuuaagcaaauaagucaugugaccugacuuucau

SEQ ID NO: 4135533 - RNA, 61 nt, Human
augaauccauuccugccacagaauuugauugcgggccuacugugugcucggauggacucgu

SEQ ID NO: 4135534 - RNA, 63 nt, Human
augaaucugcuuucugucuccaugaaucugccuauucuagauacaucauguaagcagaaucau

SEQ ID NO: 4135535 - RNA, 87 nt, Human
augaaugaaaccuacaauguauuuaagucuacauaauucuaagugggaucugaagauaugaaauauuugauugugguugccauacau

SEQ ID NO: 4135536 - RNA, 116 nt, Human
augaaugaauggucugccucuugucuuugauaacagugaauaucaugcuaggaaaacaggggcauguaacuuuuacuuaucaaacucuacgaguugcacugagaauacucaaucau

SEQ ID NO: 4135537 - RNA, 88 nt, Human
augaaugcucugaucuggagaggucuucacaaagaacagcaggugccuguggguuuuugugaagaucucuccagaucagagcauucau

SEQ ID NO: 4135538 - RNA, 72 nt, Human
augaaugugaugauucuguuacagcccuggaauugcacaagacgaaagcuuaaggagagucaugauauuuau

SEQ ID NO: 4135539 - RNA, 63 nt, Human
augacaaggguugacacaugucacccggcccuaucaggaguguuauuuguuugccacuugcau

SEQ ID NO: 4135540 - RNA, 61 nt, Human
augacacaagcagaggcucuaaaagcacuugcuuauugagaaucuucccucucuuguucau

SEQ ID NO: 4135541 - RNA, 92 nt, Human
augacacauaucuggaaugauggucauaugcuaauucaggauuuccuaauucuaauguucauauggcuaugcuauacuuagaguaguggagu

SEQ ID NO: 4135542 - RNA, 57 nt, Human
augacacccaaaaccagugcagagcauaguuguguauuauaaggaauggguagucau

SEQ ID NO: 4135543 - RNA, 74 nt, Human
augacauuauucaauucuaguggagagaguuuauggagcuccgguuccauaaacucucuccccuagaauuucau

SEQ ID NO: 4135544 - RNA, 70 nt, Human
augacccacaaaccuauuggcaagaauaauaaauguuuguuguggcaggucaaugggauuuguguguugu

SEQ ID NO: 4135545 - RNA, 113 nt, Human
augaccgaauauggcagaagugagaggaugucacuuuugagacuagguuauaaaaauacuguggcuucugucuuggugugaucucucucuuucccucugucuuucucucucau

SEQ ID NO: 4135546 - RNA, 68 nt, Human
augaccgggaaccucuuugaaguguguugccccaugaagguuuugcuugaaagggguuucccagugau

SEQ ID NO: 4135547 - RNA, 94 nt, Human
augacuaaugguauugagcaucuuuuuacagguuuaagggccacuugaauaucuucucuugugaaguguuugaauuauuuugccuauuauuuau

SEQ ID NO: 4135548 - RNA, 62 nt, Human
augacuccaguuuaugugaauguuugagggaccccaaacauugcaaauaagcuugcagugau

SEQ ID NO: 4135549 - RNA, 130 nt, Human
augacuccuccccaacuucuccuaguuauuuucaguuagcuuguuucuccugaucuuucaaaaagaaggaaucaggagaugagcacgguggauagaagggggaaauuuaagugggagaggauuuauauuu

SEQ ID NO: 4135550 - RNA, 76 nt, Human
augacuggggguagguugcuuaacuucuguuuccuuaucuaugaaauauccauaagcacaucuauguccuagugau

SEQ ID NO: 4135551 - RNA, 89 nt, Human
augacugugaaucugcuugcaggcuggcccuuccuagauucugaaccguuuguagagaguccuuaguuugcagguagccccaaaguuau

SEQ ID NO: 4135552 - RNA, 57 nt, Human
augagaaaguuguuugagucccuuuugaaaccaaaugucuuauacagauuuucucau

SEQ ID NO: 4135553 - RNA, 74 nt, Human
augagaacauucuggaugucugaugagagcuuuugaaauuucugcucuuauucaaauauaagaauaagaaacau

SEQ ID NO: 4135554 - RNA, 69 nt, Human
augagaaggacauaaauuauagaggucuaggaacagaaugcaauggacugaacauuugugucccuccau

SEQ ID NO: 4135555 - RNA, 95 nt, Human
augagaaggaggucuucuuugaaucauagugaccaauaggcugaaaggaauugacaugcccaggagcaccccagaucagagaaccuccuuguuau

SEQ ID NO: 4135556 - RNA, 100 nt, Human
augagacuauuuugaaagauaaacaggauuacuggauuaugacauauaugauagauauguugauuaauuugauugugguaaucauuucaaaauguaucau

SEQ ID NO: 4135557 - RNA, 82 nt, Human
augagagagaucaauucuccuggagaaaugccuuauucucaucucuagaaagaagagcauuuggugagauuugacuccucau

SEQ ID NO: 4135558 - RNA, 73 nt, Human
augagagcaacaccuucacuugaaaacugguaagaguuuggugauaguguguugggggagguauuguuuucau

SEQ ID NO: 4135559 - RNA, 58 nt, Human
augagagcucuaugaucuguuugugacucacuucucacagacagauguagcucuacau

SEQ ID NO: 4135560 - RNA, 64 nt, Human
augagagugauagagcaggcccugucacaaacaguuuucaaggcucugcuucuaucacauccgu

SEQ ID NO: 4135561 - RNA, 63 nt, Human
augagaguuuaaaaccagacacuguuucugggaccccugggguucgggagucuggaacuccau

SEQ ID NO: 4135562 - RNA, 64 nt, Human
augagauuuggugggggcagggguagaaugauaugguuuggcuguguccccaccaaaauuucau

SEQ ID NO: 4135563 - RNA, 60 nt, Human
augagcagcauugcuccucuuagaacuccugacuuuugauuugaggaugugauuguucgu

SEQ ID NO: 4135564 - RNA, 65 nt, Human
augagcagccaaguuugagaagcagagcccuacuggagcaaugcuucugcaacuugaauguacau

SEQ ID NO: 4135565 - RNA, 86 nt, Human
augagcauuucauaaaggcuggcugcugugagcauacuaaugugcuaucccagcucccacuuugaugaguaccacguaauguucau

SEQ ID NO: 4135566 - RNA, 61 nt, Human
augagcccuuugcuauucuaauaucucacaacaagacaucucaagaggaagcagggcucau

SEQ ID NO: 4135567 - RNA, 77 nt, Human
augagcuaguuuguccuagguucagaauagagcuauacugauuuauggcucuggauuaaucuaggaacauuagccau

SEQ ID NO: 4135568 - RNA, 86 nt, Human
augagcuuggccaauccucuuucucucccugaaauuugaacuuuaagcagaacuucagggacagaaaagagcuggagccacuucau

SEQ ID NO: 4135569 - RNA, 63 nt, Human
augaggaauggaaugccacuucugauauuagguuacaaagacuguggcuuccaucucucucau

SEQ ID NO: 4135570 - RNA, 89 nt, Human
augaggaauuuggagguuaugcauucucgcagucuggggaucugugauagucacucuguuagguguuuuugagccaccagguuccucau

SEQ ID NO: 4135571 - RNA, 56 nt, Human
augagggaagcucacguguccaccuggcaauugguaggagcaucugguuuccccau

SEQ ID NO: 4135572 - RNA, 55 nt, Human
augagggagucggacuagaugauuccuaagaguccuucccaucugacacccugau

SEQ ID NO: 4135573 - RNA, 67 nt, Human
augaggucaucuugaaguagggugugccccaauccaauaugggguccuccuaagaggauggccacgu

SEQ ID NO: 4135574 - RNA, 90 nt, Human
augaguagaaagaggucuugguuacacagacucuucaauucagagggcaggccccaucgaggggagcugugugcaaaccuugaugcucau

SEQ ID NO: 4135575 - RNA, 85 nt, Human
augaguauuugaugaaauuugggcagguuaaaaauuagaauaagaauauuuaguuuaagccagauuucagcaaaauaucuaccau

SEQ ID NO: 4135576 - RNA, 109 nt, Human
auuccugcauuucucuggaguuuugaccauuugaaaugagaaaccugucagaugaugcugaguauucugaauuucaaacucuauuagauuuccaggggagugcaguaau

SEQ ID NO: 4135577 - RNA, 61 nt, Human
auuccuuggcauucuggacuugccugaucuucagcagagcagguuccagcagccagagaau

SEQ ID NO: 4135578 - RNA, 77 nt, Human
auucggccugggcaccaggcaugacagggcaggugccgaaucacccuccgugugauaguguggugcccuggcuuagu

SEQ ID NO: 4135579 - RNA, 72 nt, Human
auucguuuacuuaucuguucugccauuggacccuaagcuuuauaauggcagaauccauaguaggugccgaau

SEQ ID NO: 4135580 - RNA, 56 nt, Human
auucuacgguagaacgugggguacugugugugcacauagacacacuuacguggaau

SEQ ID NO: 4135581 - RNA, 75 nt, Human
auucuacuugauacuacaaugauuccuuaguagaauuuucucacuuuagaggaaacauugaguugauaaaggaau

SEQ ID NO: 4135582 - RNA, 61 nt, Human
auucuagaugcuguaaguagcaauaauaaaagaggaagcaaacacgugcagcuucuggaau

SEQ ID NO: 4135583 - RNA, 68 nt, Human
auucuagccauuguauucuuccuguuuugccugaaacaauaauucaaggagaauacaugugcugugau

SEQ ID NO: 4135584 - RNA, 74 nt, Human
auucuaucucuauauuucugcaaaaaauuucuacaugacaaaaaaguggacucuaggaguguggaagguggaau

SEQ ID NO: 4135585 - RNA, 87 nt, Human
auucucagaaagucccagucuuagacagaagaguuauuuuauaauauaaaauaaugacauucuuagacuggauuuuauuuugggagu

SEQ ID NO: 4135586 - RNA, 85 nt, Human
auucucaguaaucaaucuguuuaacagauuucuguuuauuuucaaauguaccuaacagaaauugggcaaauggaaggaugagaau

SEQ ID NO: 4135587 - RNA, 61 nt, Human
auucuccauauuugcaauguagaaauaacuguagcuaccuugugcaaaugcuguugagaau

SEQ ID NO: 4135588 - RNA, 76 nt, Human
auucucucacagugagcugggcaucaguuuccucauaugagaagucugucuggauagccacagugaaucugggaau

SEQ ID NO: 4135589 - RNA, 58 nt, Human
auucugaagauuggguuuguuuuguauauuuuuguacaguaaucccguucuucugagu

SEQ ID NO: 4135590 - RNA, 77 nt, Human
auucugagucacuguccaccugcauacagaacagagagccaucucaguagcaggauuugggauuauugauucugaau

SEQ ID NO: 4135591 - RNA, 77 nt, Human
auucugauauauuccauuuuuauugguuccccucaaaaauaaauuaggaugagcuauauagaugguguguuuggaau

SEQ ID NO: 4135592 - RNA, 84 nt, Human
auucugaugcaggcucugggacccucucgcuguuccguagaggggagcuguugucucagagcuucagaaagcacccaucagaau

SEQ ID NO: 4135593 - RNA, 57 nt, Human
auucugcagagaucuugaaucuggaaggaagaguagaaagcaaguugacugcagaau

SEQ ID NO: 4135594 - RNA, 71 nt, Human
auucuggccuuuuugcuuuuaggaaauuagaaagucuccuucuuuuccuauaugcaaagaaugcaaaggau

SEQ ID NO: 4135595 - RNA, 57 nt, Human
auucuggcuuccucaggggcugaacuugucuaccucagccugagcuauugccaggau

SEQ ID NO: 4135596 - RNA, 79 nt, Human
auucuguccaagaagauuaaugagaaaccugcuggggcucucaggaagaguuucuucauugauuuacaaaaggcaugau

SEQ ID NO: 4135597 - RNA, 109 nt, Human
auucuguguauagaaugccgagcacagugcucaugugacauggugggaggcaaguaacauuuacuggcugucuaugauacuguugggcccugcaugagaugcacaggau

SEQ ID NO: 4135598 - RNA, 129 nt, Human
auucuuaacuggccaccugugucacaggucaccuauguggcaugcagggcuagguggacugcaggccugucugcccucugccuccucugcagauggguggguggccugugacuguaguccuucccucgu

SEQ ID NO: 4135599 - RNA, 65 nt, Human
auucuuaagcaccuaaaaaguggcaggcguacauggggucuccauuuuuaaagagcuuaaguaau

SEQ ID NO: 4135600 - RNA, 65 nt, Human
auucuuaaguguuuuugggcuagugcccauuccauuguuuuugcccagagaggcucaccaggaau

SEQ ID NO: 4135601 - RNA, 60 nt, Human
auucuuauucuugaaaugugggacucuaaaauuaaggguccuaguuuuuaaggugggaau

SEQ ID NO: 4135602 - RNA, 112 nt, Human
auucuuguuccuuuaacagccuuagacacugauguucagcucaauggacagcuucuucacacagccuacugagcugaacaucggugucuaaggcuguuaagguaacaagaau

SEQ ID NO: 4135603 - RNA, 57 nt, Human
auucuuuaaauuagccuuugaggauugguuuuccaagagagggcucauuugaacaau

SEQ ID NO: 4135604 - RNA, 81 nt, Human
auucuuuaaugcuagucuaaugaugacacuguuuuguuuauuagaacauguauuuuccuuggcaacuaguuuuuguugggu

SEQ ID NO: 4135605 - RNA, 61 nt, Human
auucuuuuguccuagcuugauaguuuagcaaacuggagcagcaggaaaugggccaaagagu

SEQ ID NO: 4135606 - RNA, 55 nt, Human
auugaaaaaugacuauugcuuaaguuuguuuucuuaagcugaguguuuuuuuaau

SEQ ID NO: 4135607 - RNA, 61 nt, Human
auugaaauggggauguugcggauggagguaacucaugccacagguguuucaucuucucagu

SEQ ID NO: 4135608 - RNA, 80 nt, Human
auugaagguggguaggcaaagcaaugacguucagcagguuaggagucuuaaacgcauuuuugacuuacgauauuuucaau

SEQ ID NO: 4135609 - RNA, 74 nt, Human
auugaauaguagcucuguuuuaaguuauuugagaaaucuuuaaacugcuuuccacaguggcuaaacuaauugau

SEQ ID NO: 4135610 - RNA, 56 nt, Human
auugacacaaugggauguaagggaguuucuagcuguaccauccuauugugcacaau

SEQ ID NO: 4135611 - RNA, 66 nt, Human
auugacagcaggggcugucacugcuggggucucagugccaggggugucagugcugcggacgucaau

SEQ ID NO: 4135612 - RNA, 63 nt, Human
auugagagacaccuugaccuuuuuacacaucuguccuagacaaugucaaggugaucauccagu

SEQ ID NO: 4135613 - RNA, 65 nt, Human
auugagcuaaauagaucaagggacucuaauacuacuuagaguaauggguugaaauuuaguucaau

SEQ ID NO: 4135614 - RNA, 77 nt, Human
auugaguauacacguacuugugaaaccugcaucuguucauaaagcaccugccugugucacagugauguuugcugagu

SEQ ID NO: 4135615 - RNA, 79 nt, Human
auugaucagauuggcugcuauuuccauauuuauuacaaggagacaagaguagaaauggggaaguaguuaggagagaggu

SEQ ID NO: 4135616 - RNA, 130 nt, Human
auugaucuuacuuggagaaugcuucuuaggauuuuugcuugcauuggaguagauaguucaagauauggauaugaauucauuuuuccaauuaggauaaagaucaagaaaaacaauucugggaagucaaauu

SEQ ID NO: 4135617 - RNA, 70 nt, Human
auugauggaaggaagcagcagaaauugccugagaauucuucauggauaaugucucuguuucccccacaau

SEQ ID NO: 4135618 - RNA, 72 nt, Human
auugauuucaaguagugacaugcugaaguuguugaaucauauagaaaaguuaaaguucuacuugagaugaau

SEQ ID NO: 4135619 - RNA, 82 nt, Human
auugauuuguagcuaaaauauguuuacauguauucuauccauaugagcaaaauacaguaauugcauaggcuucaaagguaau

SEQ ID NO: 4135620 - RNA, 79 nt, Human
auugcaaugcauugcaaaucucuuguguuugguugcaaacuuucaacugaaacacugagugaauuguugccucugcaau

SEQ ID NO: 4135621 - RNA, 64 nt, Human
auugcaccuuggguuuugaaaggauucuuauauccuaaaucuauuugaaaaugcauugugcagu

SEQ ID NO: 4135622 - RNA, 86 nt, Human
auugcauuuuauaauuaucucuacucuuagggucauaugucuauuguguguguaugugugguggaaauaauauauacucuugcaau

SEQ ID NO: 4135623 - RNA, 61 nt, Human
auugccaaggguaugggcaagauagcuugaguccagcuacuuugcauuacaaccuggugau

SEQ ID NO: 4135624 - RNA, 65 nt, Human
auugccaaggucucuaaauuguuaagaaauaauaaagaauuaauaguuggaggcaguuuggcaau

SEQ ID NO: 4135625 - RNA, 67 nt, Human
auugccaauuaacacugaguauuaugugauaacacacacagcaaaaugcuuagguuaaauuuguaau

SEQ ID NO: 4135626 - RNA, 91 nt, Human
auugccauuauuguuguuguuauuuuaaaugaggaaauugaaguucagaaaaauuguauagcuucuuaaagauuacacaaugaaaggcaau

SEQ ID NO: 4135627 - RNA, 76 nt, Human
auugcguggcuggucccugugacccuguuaagccuuauguuuuacuuaacucggaagcacgaaccaaccacccagu

SEQ ID NO: 4135628 - RNA, 77 nt, Human
auugcuagaaaagauaacauucugugccuucauuugucauguucauuugagcaauaauguuacuuuuuuaaggcagu

SEQ ID NO: 4135629 - RNA, 74 nt, Human
auugcucucaggaaaauauugaagaagugguauuuauauuauacauuucauaaaaacuuuaccugagguguaau

SEQ ID NO: 4135630 - RNA, 108 nt, Human
auugcuggcgggacuauaaauugauauaggcuucaugacagaggggcaauuugguguuccucucaaaaagcauguauccuuugacccagggguucugauucuagcaau

SEQ ID NO: 4135631 - RNA, 67 nt, Human
auugcugugucuggggcagaugcacaccccugaccuugacgcgugucugacagcuccaggcagcaau

SEQ ID NO: 4135632 - RNA, 65 nt, Human
auugcuuagacacuuguuaguuucaccugcauauguaagguggaguuggcuguaguucaagcaau

SEQ ID NO: 4135633 - RNA, 75 nt, Human
auugcuugagcccaggaggucaaggcugcaguggguuaugacugugccacugcacuccaaccugggcaaugcagu

SEQ ID NO: 4135634 - RNA, 70 nt, Human
auuggaacagaaacagacaaauagaaugaaaaagauaaugaguucuguuugggaccuguuguguuucaau

SEQ ID NO: 4135635 - RNA, 55 nt, Human
auuggcaaacucuggccugugugccaaaucuggcccacuacuuguuuuugucaau

SEQ ID NO: 4135636 - RNA, 57 nt, Human
auuggcagggccagcaucucccugcagcugagaggguuagcucaggcccuagucagu

SEQ ID NO: 4135637 - RNA, 59 nt, Human
auuggcauccuagugagagaugcuaguuuuuggaacugagcaaugcagugggagcgaau

SEQ ID NO: 4135638 - RNA, 61 nt, Human
auuggcuuaucaucuaaggcccuuucaugauuaaugagagagggaaagaaaaugagcuaau

SEQ ID NO: 4135639 - RNA, 58 nt, Human
auugggagaggggugagagaugggaagagggugcuuuccccucaccauucugcccaau

SEQ ID NO: 4135640 - RNA, 76 nt, Human
auugggcagaucaaucaacuucuuagugccucagcuuuuuccucuguaaauuagaagauagugauuucugcuugau

SEQ ID NO: 4135641 - RNA, 130 nt, Human
auuggggcauguuauugggaggagguuggggggauuuuugguuauguuaaauguuugauguuuaaauuguugcauguugaauucaaacuuuuuaacaaguccuugauguuucaauuugaaagugaccaau

SEQ ID NO: 4135642 - RNA, 80 nt, Human
auuggucuuuucuggccuucagacucggacugaaacacugacucuucuugggugugaagucuguuggccuugggacuggu

SEQ ID NO: 4135643 - RNA, 69 nt, Human
auuggugugccagagcugacauguaaaggcuugcaagagccaauuguguacaucucuucucacauuggu

SEQ ID NO: 4135644 - RNA, 99 nt, Human
auuguaaucuauauguauguaugugugguuauaguuuuuuauaugugugugcaguucuuggcacguguaaugaucaccacaaucagaauauagaacagu

SEQ ID NO: 4135645 - RNA, 61 nt, Human
auuguauauauacauguuccuucauagcauuaggcugugaaggaauguguauauauacaau

SEQ ID NO: 4135646 - RNA, 65 nt, Human
aguucuuacaucuauaaaguuggggauaauaacaaugccuucuucauagagagauggugagaauu

SEQ ID NO: 4135647 - RNA, 59 nt, Human
aguucuucauaaccuuacugugcauguccuucugagauaagggagguaaugaagcaacu

SEQ ID NO: 4135648 - RNA, 97 nt, Human
aguucuuguuuuguugcucaaugggaauaagaaugaugcaguagaguagaaaaauggauuauucaggagccaauuggcaacagagacacaaauaacu

SEQ ID NO: 4135649 - RNA, 127 nt, Human
aguucuuuuuaaaaaacacuguucaaggcaagcacagauagacucagcccauagauacccaagcugcaacuucuggcuuauagucauucuguuuuuaauuugucaguuaguuucaauuauuaggacu

SEQ ID NO: 4135650 - RNA, 120 nt, Human
aguugaaaaccacaccuuuuuaagaaguucagaaauugaggaugcgguauucugaauuaucuaauuugauuuuucugcaucucuacaguuguuucauuacuuaguaaagcguuuccaacu

SEQ ID NO: 4135651 - RNA, 72 nt, Human
aguugaaagccuuauuucucugagcacauuucccuuuaaucacugugcuuuccagagacccaggcuucagcu

SEQ ID NO: 4135652 - RNA, 72 nt, Human
aguugaaauugucuuuaucacaguucaaaaauaguuaaauaguugaggcugcugauggugaggacaaaaacu

SEQ ID NO: 4135653 - RNA, 66 nt, Human
aguugaacacuaaguuuccaggcugaguuucacccauggggcuuuugguguaguugucauucaacu

SEQ ID NO: 4135654 - RNA, 65 nt, Human
aguugaagcuuggugggaaauggaacuccugugugaggaccauugaaccccucuaggccacaccu

SEQ ID NO: 4135655 - RNA, 56 nt, Human
aguugacaauaaauuuaauuggccauuuauuugggccaauuaaauaaaugucagcu

SEQ ID NO: 4135656 - RNA, 73 nt, Human
aguugaguuacagaugguuaacucccacuuguaugucccgugcuggugaaguaauaccagguguacaucaacu

SEQ ID NO: 4135657 - RNA, 83 nt, Human
aguugaugacugcuugucuagaauaucccagccuuuccuggauaacuccucccuguuauucaagacaaaggcagucaucaucu

SEQ ID NO: 4135658 - RNA, 73 nt, Human
aguugauuuucauagugacccacaguauacagagaaaaagguauauacacaggaaucugugaaaauuauggcu

SEQ ID NO: 4135659 - RNA, 67 nt, Human
aguugcaagcaggugggcagauauuacaauaggagcuuguagaauuauucucucaauugcuucaauu

SEQ ID NO: 4135660 - RNA, 82 nt, Human
aguugccuguguacuuuggguugggugggaagguauugugaaaacaaaacuucauuuucaacugcaaaauuuauggguaauu

SEQ ID NO: 4135661 - RNA, 130 nt, Human
aguugcgaacagcuguaucagagaucaggcggggucacugcacgcucaggcaggccgcguggauuugucugcuggucccugcagugugcugggcgggacacuccuugaucucuccaugcugucaccgggu

SEQ ID NO: 4135662 - RNA, 88 nt, Human
aguugcuguguuauuacuucagaucuuuguuaauagaugcucaugcaaucgaguguaugcaucuuugauaaauaguugcaaagccucu

SEQ ID NO: 4135663 - RNA, 61 nt, Human
aguugcuuuggauauaacuucuccugaggagaaaccugaaguuaguuucaauaaagcaauu

SEQ ID NO: 4135664 - RNA, 124 nt, Human
aguuggacauauuucaaaguaguacaaacauuaggaacuagggaguaugcuuucuguggaggcagagagcaacuucaauaguacuauuuuuuugucccacuaaguaacugaaauuauguucacu

SEQ ID NO: 4135665 - RNA, 78 nt, Human
aguuggauuuggacugugaacaauuugcugaaauuaugacauuauuuuuuaaaaaauuagaccaguucagguccaauu

SEQ ID NO: 4135666 - RNA, 58 nt, Human
aguuggcaggcugcaccaaccagccucuuagggcagaaugggccugagccugugggcu

SEQ ID NO: 4135667 - RNA, 63 nt, Human
aguuggucuggggaccuucccaagagacaucuuguucucccaggagggcagcccagacuggcu

SEQ ID NO: 4135668 - RNA, 62 nt, Human
aguuggugcuuuagcugaguuggucaaauaccaauauuaugacuuuagguaaagaaccaacu

SEQ ID NO: 4135669 - RNA, 82 nt, Human
aguuguaucaguccuugaagaaugauucuuggaaauguuaucaaauuaucugggaagauguuucaaagguccuaugccaauu

SEQ ID NO: 4135670 - RNA, 90 nt, Human
aguuguggagaaagcuuacauuaaguaagagauugaacugaaugaccucuaaauuucauuucagugcuaauguaauaugcuucuaugacu

SEQ ID NO: 4135671 - RNA, 57 nt, Human
aguugugucugacuaucugagaaaggaugaauuuacacauucagcagcagacacacu

SEQ ID NO: 4135672 - RNA, 130 nt, Human
aguuguguuugauucccaagcccaagauauugccgucugucaacauuaucaugcuucuuuacuuuaauaagaguaaacaggcaugauaguguugaaugacaaagcucccuaguggcuuccuuacaccccu

SEQ ID NO: 4135673 - RNA, 74 nt, Human
aguuguuaaaauuacaaauuuacaaguaagcuacaaaaaguaugcuugucuucaggauuaugguuuuaauaauu

SEQ ID NO: 4135674 - RNA, 72 nt, Human
aguuguugcuucugcugguguuuugugaggcugcaaagaaacccucacaaaauaucagcagaagcaacaacu

SEQ ID NO: 4135675 - RNA, 80 nt, Human
aguuguugugccauugagagguuucagaucuccuagcauaauuugauugcuguuucugcccuacuuaggugauagcaucu

SEQ ID NO: 4135676 - RNA, 92 nt, Human
aguuuaaauugauuuuaguuuuacuugcgaugauaauuucugccugagcaaggaauaucuucuaaggauagaacuggaugcuaauuuaaauu

SEQ ID NO: 4135677 - RNA, 58 nt, Human
aguuuaacuggccaugcccucaauuuucaguauagaagcaugguucacaguuaguacu

SEQ ID NO: 4135678 - RNA, 76 nt, Human
aguuuaccuacauaguuaaguaacaaacucaagaaaugaauuuggcaauuugacuguauaggccauugaaugaacu

SEQ ID NO: 4135679 - RNA, 68 nt, Human
aguuuacuuguaaacauagagauuuagguuggaguuccauuuauuguccucuguguuuacaguuuucu

SEQ ID NO: 4135680 - RNA, 59 nt, Human
aguuuagccuuccauuucacuggauaagcauaugacccuagaugagauggaagaagacu

SEQ ID NO: 4135681 - RNA, 66 nt, Human
aguuuaggaaggaugaacugaguuugccuugcacugagucacuagacaguuuaucuuuccggagcu

SEQ ID NO: 4135682 - RNA, 65 nt, Human
aguuuauaggagggagaaaucaaaaguacaaccuuacuuuuugcuggucucuuccauccucugcu

SEQ ID NO: 4135683 - RNA, 101 nt, Human
aguuuaucaaugaaaaugaacuugaugccugagcuauaauugaaaucuuuauagcgucucugcuguuuguccauuguguuacagagcauucauugaaaacu

SEQ ID NO: 4135684 - RNA, 58 nt, Human
aguuuauguuguuuauaagccauccaguuuacaguguuugguuauagcagccugaacu

SEQ ID NO: 4135685 - RNA, 70 nt, Human
aguuuauuuauaucauauuuuauauagaugcuuuggcauuuugcuuuaaaguguggauaugauuaguauu

SEQ ID NO: 4135686 - RNA, 81 nt, Human
aguuucuagugcugaggccaaugucagggugucucaucuucauaucucucaggcacugauccuuccucaccaucagacacu

SEQ ID NO: 4135687 - RNA, 130 nt, Human
aguuugaaagaaucagaaugcuauugguaaugaugaaauguugaggcagugacuuggacuuggauaaagcuucuucauuuuuucaacauauuuaagauuaagugguuguagaauauugucuuucuuugcu

SEQ ID NO: 4135688 - RNA, 83 nt, Human
aguuugagcuaggcagaggcuauggaaauggcaggacauccagcagagaugaccugcagccauagugcugucagaggcaugcu

SEQ ID NO: 4135689 - RNA, 89 nt, Human
aguuugccuuaauuuuucuucugcuuucuuacuaaaaaugaagacauucaauacuaaucuugcuggaagaagccuuaaccaagcaaacu

SEQ ID NO: 4135690 - RNA, 81 nt, Human
aguuuguuagcaacaagucucaaugacucuuucacauaagaaagaaaugcaaugucuuugaaacauuguaugcuucugacu

SEQ ID NO: 4135691 - RNA, 127 nt, Human
aguuuuacuugaaauauuuguaaauugguuuguuacaagucuugagguacuuucacagcuugaguggaagccuugccuauuugaugacauacuaacguuaccaacugaacaugucccaaauagaacu

SEQ ID NO: 4135692 - RNA, 65 nt, Human
aguuuuagaucauuguggauguuauacuagggccauggaaaaugccuguucacagaucuguaacu

SEQ ID NO: 4135693 - RNA, 71 nt, Human
aguuuuaugcaguguucugauauguuauacucauuuugcuucuaaaaccuucuagaauccuguauaagacu

SEQ ID NO: 4135694 - RNA, 71 nt, Human
aguuuuaugcaguguucugauauguuauauucauuuugcuucuaaaaccuucuagaauccuguauaagacu

SEQ ID NO: 4135695 - RNA, 67 nt, Human
aguuuuauuggaagagagccacaguuaauuauuuacacauuggcaguguuuucuguuccauaacacu

SEQ ID NO: 4135696 - RNA, 79 nt, Human
aguuuucagaaucuuaagacauuacuuccacuaacuuuaacucaggggagagaauucagcuuaagauuaucugacuacu

SEQ ID NO: 4135697 - RNA, 67 nt, Human
aguuuuccaguacuuuuauguuuuuauugaugaaacaguaggaacauaugcagugcuuuuuaauacu

SEQ ID NO: 4135698 - RNA, 59 nt, Human
aguuuugauugcccuaagcuaucuacuacgcugagauugagacuuaggcaauuuaggcu

SEQ ID NO: 4135699 - RNA, 66 nt, Human
aguuuuuaugucugugaauuggcaagcauuuucuucugcucugcuuucauugugggcauuugaauu

SEQ ID NO: 4135700 - RNA, 95 nt, Human
aguuuuuauuagguugaugcaaaaguaauugcaguuucugccauuacuuuuaguggcaaaaaacagcaauuacuuuugcaccaacuuaaauagcu

SEQ ID NO: 4135701 - RNA, 76 nt, Human
aguuuuugccuggguagacuuugaagcauucuguaaaccuuuuaaagaaaggagugccuuugaaaccucaaaaacu

SEQ ID NO: 4135702 - RNA, 63 nt, Human
aguuuuuuucccuaacuuuccugauuguuuuggaagggagcagggaauagcggaaagaauacu

SEQ ID NO: 4135703 - RNA, 122 nt, Human
auaaaauaguaauuugauaaggcaagcuuuucauuuugugaaguaauuuguucauuauauauuuggcuuaaagauagaauuacauaauaaaaugagagcuagaucagaaauuaacauuuuau

SEQ ID NO: 4135704 - RNA, 71 nt, Human
auaaaaugguagguuuucuuaagaaaaaggauguuauuccugguucucagauggaaaaccuuucagauugu

SEQ ID NO: 4135705 - RNA, 129 nt, Human
auaaacagcuguggcuagagcaagaaggugaccgggagggagggauaggauacagauaggucaagaaagagacagugaauccaaauuccuaccagaugcuuauuuuuuccucaaaguuaagcuguuucu

SEQ ID NO: 4135706 - RNA, 56 nt, Human
auaaaggcagauuuuggaccucugguuguuuccugaacucuagaaauugucuuugu

SEQ ID NO: 4135707 - RNA, 96 nt, Human
auaaauacaguuucugcauugcaccacauugcaucccuggggggcuacagggauguucauuuuguggcugaaauaggauaaaaggguuguauuuau

SEQ ID NO: 4135708 - RNA, 88 nt, Human
auaaaugaaacauauaaugauagauauaguuugccucacacuuucuuuauauuggggaauuguacuuuuauuacauguaguuauaugu

SEQ ID NO: 4135709 - RNA, 102 nt, Human
auaaauggaacagguggauuucaucacauacauugugcaucucaugguucuaaggugcuaaaaugauugccugugugugagaaaugccuugcuaagauuuau

SEQ ID NO: 4135710 - RNA, 67 nt, Human
auaaauugcuucuacacaucccucuugcuuuuuaauggaaagaaaagggguggaguagaucucuuau

SEQ ID NO: 4135711 - RNA, 69 nt, Human
auaacuacuacaugcuagacucaguuaacaaucucuauuaacagaguaacagguauguaaaaugguugu

SEQ ID NO: 4135712 - RNA, 76 nt, Human
auuguaucuugucauuaugcauaaaaggccauauuuuucccuaguucuugaugcagaucugugaaaggaauacaau

SEQ ID NO: 4135713 - RNA, 73 nt, Human
auuguaugauuuuuuugucccagagagccuggauuaauagaaguccaguuucuaucaggcaauuaucaacagu

SEQ ID NO: 4135714 - RNA, 82 nt, Human
auugucacuauuucucauaagacuuucccucaucagaacgaacgccucuuugcuaggugaaagucuuuuggguucugucagu

SEQ ID NO: 4135715 - RNA, 71 nt, Human
auugucauccaagaaaugcagugacauuucauuuccagaggaaagaaaccucacagcaauucugaagcaau

SEQ ID NO: 4135716 - RNA, 85 nt, Human
auugucuaaauugacuuucuagacuguccagaugaucgcucaagccucugaauuauugacaguuuagaugugaguuuaugauaau

SEQ ID NO: 4135717 - RNA, 60 nt, Human
auugucugauuccauuuaugugaaauguccacaauaggcacaucuauggagacagagagu

SEQ ID NO: 4135718 - RNA, 87 nt, Human
auugucuguuggcauuuuucugagaauaugagaggaaaacaagauucccuugaaaacauaguucagaaaaaguccguacuugacaau

SEQ ID NO: 4135719 - RNA, 61 nt, Human
auugucuuagucagcucggacugcuauaacaaaauaucauagacuggguggcugaaacaau

SEQ ID NO: 4135720 - RNA, 55 nt, Human
auugucuuggaaccaaggucuuugucaguauggugaugaacgauuucaggacaau

SEQ ID NO: 4135721 - RNA, 64 nt, Human
auugugaauaaugccgcaauaaacauacgugugcaugugucuuuauagcagcaugauuuauagu

SEQ ID NO: 4135722 - RNA, 69 nt, Human
auugugaauuuaacugagaguacuuuuaaaacuauaacuaagcagugaaaggaaaguugaauugacagu

SEQ ID NO: 4135723 - RNA, 64 nt, Human
auugugaguagugccacaauaaacauaugugugcaugugucuuuauagcagcaugauuuacaau

SEQ ID NO: 4135724 - RNA, 78 nt, Human
auuguggcugucuaggaaaguuuaguacuuuuucucuuuaaggcaaaaacugguaacuauuccccagauuaacacaau

SEQ ID NO: 4135725 - RNA, 75 nt, Human
auuguguaucaaucauguaauuuggugguggugggaagacugacccuacacuaaacugcacagaugggucauaau

SEQ ID NO: 4135726 - RNA, 113 nt, Human
auuguguuucaggagagaaggcauucaagagucucccugugggguccgccuguccggccccaucagcgggguggccaggccccacagggcuguguucucuuuccuaagccaau

SEQ ID NO: 4135727 - RNA, 78 nt, Human
auuguuagaaagauccuucuggcugccuccuuguggagaguggcuuggagggggccagauggggacugaucagacagu

SEQ ID NO: 4135728 - RNA, 93 nt, Human
auuguuagguuguuccacccacugccgauguuccaucuugucccaggaaugcucaggauggcaggauaggcagggaacagccauucauacagu

SEQ ID NO: 4135729 - RNA, 81 nt, Human
auuguucaagaaugauacucuaugccaaauuggaguaugaaccauccauuugggaauaggguaucaucgucuuguaauggu

SEQ ID NO: 4135730 - RNA, 74 nt, Human
auuguucagagaagggaagaauaaaaagccucauuaagccaucauuuugggguagaauucucuuccuggauagu

SEQ ID NO: 4135731 - RNA, 72 nt, Human
auuguugaucuucugguaagccugugugaagauacaaaagcaaaggguccaacauaugagaagauuagcaau

SEQ ID NO: 4135732 - RNA, 57 nt, Human
auuguugcuaggauucaaugaguuaacacacacauagaacagcuccuagcacauaau

SEQ ID NO: 4135733 - RNA, 63 nt, Human
auuguuuuuggagagggcuuggcacuagguagaaauuuaauaaaaguuuucuccaaauacagu

SEQ ID NO: 4135734 - RNA, 91 nt, Human
auuuaaacaaaaagaguuuggugaagcaauuugaaaaacauguaaauauuuuuauuaguguuaaauuugccuagauucuaguugauuaaau

SEQ ID NO: 4135735 - RNA, 130 nt, Human
auuuaauguguauauuuaucacucugggaucuuguucaaugaaagauugugauucaauauguuuggaguagcgucugaaaugcuguguuucuaacaggcucccagguauacugauacugcgcuauuaaau

SEQ ID NO: 4135736 - RNA, 71 nt, Human
auuuaauguucaguaucugguccaccugcugcugugcaugagcugcggugaucugacacugaucaugaaau

SEQ ID NO: 4135737 - RNA, 84 nt, Human
auuuaauucauggguguguguguguguacguguguguguguguguguguguguguuuucaugcacacaagcuuauguauuagau

SEQ ID NO: 4135738 - RNA, 72 nt, Human
auuuaauuuucucaacagugcuaccaggugaguacucuuuucccauacauuuuacugaugagaaaauugagu

SEQ ID NO: 4135739 - RNA, 68 nt, Human
auuuaccugaaagguuaauuuccaguuagccuucaggagcuaguuggaaacuagccuuuuagguugau

SEQ ID NO: 4135740 - RNA, 91 nt, Human
auuuacuuagauuguugcauaucugguugauuuaaauaaacauggucuuucuucauuuaaaugaacgagauaugcaacaaucuaaguaaau

SEQ ID NO: 4135741 - RNA, 57 nt, Human
auuuagacaaucuguugguaagguguaaacuauggaccugccaugaaugucauaaau

SEQ ID NO: 4135742 - RNA, 69 nt, Human
auuuagcagcagugguguauuuagauacuuccccacuuguggaagucugauuagcuccauuugcuaagu

SEQ ID NO: 4135743 - RNA, 64 nt, Human
auuuagccaaaaaguagcaauuauuagaaaaauuacuuguaaaauuguacuuuuguggcuuugu

SEQ ID NO: 4135744 - RNA, 90 nt, Human
auuuagccgcauauggagugcugguuaauuucugguacuugauaaaugacuacugaaggaauuaauaaccaguaagccaacugguuauuu

SEQ ID NO: 4135745 - RNA, 116 nt, Human
auuuagcuucugucuucccuugggagguacaaaaggagaaagauaaaugacaucagacuuccuggaaaaauauaccucauucuuugagugcuuuuuaggugagaaguuaguugaau

SEQ ID NO: 4135746 - RNA, 64 nt, Human
auuuaguaaguacuuguugaauagaugaaugaagucauaugauuaacucaaguauuuacugagu

SEQ ID NO: 4135747 - RNA, 100 nt, Human
auuuauauuguaagcagcaguucaauuguuuuguaaaaguaauuucaauuuuaaucacugaacuaaagaaaugggcaaggcugacuuccguaauauaggu

SEQ ID NO: 4135748 - RNA, 98 nt, Human
auuuaucagcaccagauauugucuucaaaguguaggauuggaauuucugucuuuauuccaauuuuauacuuugaagacaauaucuggagcugauaaau

SEQ ID NO: 4135749 - RNA, 55 nt, Human
auuuaucucuggaaacuaagcaaacaggaauuccugauucugauccagaaugaau

SEQ ID NO: 4135750 - RNA, 129 nt, Human
auuuauguuuauguuaaaauuuagaauuugcuucauguaguuuuaaauacuguagauaauagaguuccgaugugucaaacuuugauuuuaguguuuuuagcgaaauguuuucuuugacuugcauaauau

SEQ ID NO: 4135751 - RNA, 60 nt, Human
auuuauucuacagauaaguuaguuugcagaaugcccacugauacaucuguggaaguggau

SEQ ID NO: 4135752 - RNA, 79 nt, Human
auuucacacauacuuuuugugaguagcuguaaaugaugaagcauggaaauuucacagaacucacuaaggagugugaaau

SEQ ID NO: 4135753 - RNA, 79 nt, Human
auuucagagcaguuauuucucuuuugagggauugaauuucuuucugguuugucuugggaggauguauguguucagaaau

SEQ ID NO: 4135754 - RNA, 55 nt, Human
auuucaguaguccuuacuuguacccuacuuggucuugaguaagugcugcuggagu

SEQ ID NO: 4135755 - RNA, 59 nt, Human
auuucauuauucagcaaacgcagaaacuuaagauuuucugcuguuuguaguaauguagu

SEQ ID NO: 4135756 - RNA, 58 nt, Human
auuucauuggcccaaacuagucuuauggcucugccuaacuggaagugggucaggaagu

SEQ ID NO: 4135757 - RNA, 60 nt, Human
auuucauuguuagcucuguccucuccacuugcauuucaggccagagcaguacaaugaggu

SEQ ID NO: 4135758 - RNA, 73 nt, Human
auuucauuuaauccucauggugaccccugauggaggacuguuaucuacccuucacagaugaggaaaaugaagu

SEQ ID NO: 4135759 - RNA, 55 nt, Human
auuuccgggauuuuaucaaguaguccauagacauuuuggcaguuucccaggaaau

SEQ ID NO: 4135760 - RNA, 69 nt, Human
auuuccuaacagaggcaacagucuauauaaacacucugaagugagagauugaacugucuuugaagaaau

SEQ ID NO: 4135761 - RNA, 91 nt, Human
auuuccuacaauguugcaucuuccucagagacaguaacuggaauuguuuacaauacuguagauaaacuguaacugaagggugcagggaaau

SEQ ID NO: 4135762 - RNA, 65 nt, Human
auuuccucucuuaucucucugaagagucuccccugauuucccucuuuucagaauugggaggugau

SEQ ID NO: 4135763 - RNA, 69 nt, Human
auuuccugcuuucucuucacugauguucaagugcuggcuuggaaagaccccaaagaggaggaaggaaau

SEQ ID NO: 4135764 - RNA, 58 nt, Human
auuuccuuggaaagagacgucgcuuucauccccaagugcaccgucccuccgaggggau

SEQ ID NO: 4135765 - RNA, 64 nt, Human
auuucgauaggaagugaagaauuagaaaacaccaaaaccuauggcuucauucucuuauuguugu

SEQ ID NO: 4135766 - RNA, 75 nt, Human
auuucuaacauaauuggccaaggaaguagcaacggacacuuugcccugcuuuccuuaggccgaacaccugggaau

SEQ ID NO: 4135767 - RNA, 59 nt, Human
auuucucacccuaccucacuccccaggaauaaggggaaagcagaaguagugugggaaau

SEQ ID NO: 4135768 - RNA, 78 nt, Human
auuucucauuguuagcagagcagcugacagaauaugaucacaaauguugcugaugcuguucuguuaggagguagaaau

SEQ ID NO: 4135769 - RNA, 56 nt, Human
auuucuccuuguugcaaugcaguucaaguacaagaggguucggugcaaggagagau

SEQ ID NO: 4135770 - RNA, 82 nt, Human
auuucucuaagcauccguuugcucaucuacauuggaugauccaucauccaauguagaugagcaaacggaugcuuagagaaau

SEQ ID NO: 4135771 - RNA, 81 nt, Human
auuucucuguuguauucuuuaugacuucccuccagguugagcugugaaagggugaggggaaaggagccaugucggagaagu

SEQ ID NO: 4135772 - RNA, 71 nt, Human
auuucuggcccggacccacucggaucccagccgucguccggcugcauuuccagugcguucgggcuucgagu

SEQ ID NO: 4135773 - RNA, 60 nt, Human
auuucuuccuaucuaguuccuauucauaucaagauagccugagcccaaguagggagaaau

SEQ ID NO: 4135774 - RNA, 57 nt, Human
auuucuuccucugucaguaacuaccucaagcagcuuuggacuacagggggaagaagu

SEQ ID NO: 4135775 - RNA, 81 nt, Human
auuucuucuaaugauucuggcaaauuuauuaugaaaaaacucauggaauuugcaauaacaggaugacaaacugggagaaau

SEQ ID NO: 4135776 - RNA, 79 nt, Human
auuucuucugacaggaaacaugcagugauuaauaaaagcgccuccuugagcacugauuuauuuuugucucugaaggaau

SEQ ID NO: 4135777 - RNA, 55 nt, Human
auuucuuggccaaaggaacagcagaacucucuuaaguaacucuggcuaaguaaau

SEQ ID NO: 4135778 - RNA, 129 nt, Human
auuugaauuacaugggaaccucuuuaaaauacugaugccaggcccucccacagauuaauugcauuugauucucuggggauggggucaggcccccaguauuucuuucaaaguucuccaggugauucuagu

SEQ ID NO: 4135779 - RNA, 90 nt, Human
auuugaccccaauauuucuuacccuuuggcuggccuuguucugugugguaucagagaaccagcugcaggggagcaguggaggaggcagau

SEQ ID NO: 4135780 - RNA, 128 nt, Human
auuugagaugauucuauggcaacagaaaugugcuugagggaaaucaguugcggcaucuucuauaauugugucaccuagauuuugccuuaggaauuucuagauuuccauagaacauugugaccucaaau

SEQ ID NO: 4135781 - RNA, 102 nt, Human
aucuuaguuauugggaauaaaguuggagugaacaugagauugucgaugucuguuugauguaccaauuuucaauuccuucagauauauacccaaaacugagau

SEQ ID NO: 4135782 - RNA, 88 nt, Human
aucuuaguuuaagaugaugauuuaaguggccaaaguagacauauuuaauucuacuuauguaacuaaaaaucaguuuuuaaaugaagau

SEQ ID NO: 4135783 - RNA, 78 nt, Human
aucuuauaugcaaaggcccugaggcaagagagaacuuguccaguucuaggagcuuaaaggaggccaguguguugagau

SEQ ID NO: 4135784 - RNA, 84 nt, Human
aucuucaguacacacagagcagcaggguguaauugggcaggagugcacugcacaaaggcucccugcugaggugguaaaugagau

SEQ ID NO: 4135785 - RNA, 58 nt, Human
aucuuccauauuagacuaugugggggcccacguggccccccagaguugauauaaagau

SEQ ID NO: 4135786 - RNA, 128 nt, Human
aucuuccuucaucgucuucuauucagacaacuugcugcuuucagauucugacauaagauauaccuacaguauguguccagggcuggaagugagguggcuguguucuuagggaaaauggaagaggagau

SEQ ID NO: 4135787 - RNA, 86 nt, Human
aucuucuaaucucaguuguuucugucaaaugccaguagagaacaaucacaucuguuuugacugacagcauagcugacaaggaagau

SEQ ID NO: 4135788 - RNA, 64 nt, Human
aucuugaaugaaugacucuuuauaaaauauggaauuggaacaagggucauucauguuuuaggau

SEQ ID NO: 4135789 - RNA, 64 nt, Human
aucuugcugagacuggcaaguuugaugcuuuccagcuguuccaaaugccuccuucuagcaggau

SEQ ID NO: 4135790 - RNA, 57 nt, Human
aucuugggccccuguaagauggauacaagaaugugcauuuccaaggguaccuaagau

SEQ ID NO: 4135791 - RNA, 94 nt, Human
aucuuuaaucuuaaauaaucauuaguuuagcaaauauuucuguugaugguuuucacuggaacagagcuugcugauaugauuguaaguguaggau

SEQ ID NO: 4135792 - RNA, 73 nt, Human
aucuuuacaaguaaagcuaucaucaaugcaacuuuucuaaaaggagguugaguagauaguucuuuguuuagau

SEQ ID NO: 4135793 - RNA, 61 nt, Human
aucuuuagcaguuuguuucuacugauguguuugauccagugggucccaaacuccuagaggu

SEQ ID NO: 4135794 - RNA, 122 nt, Human
aucuuucucaugcugacuuuaauccagccuaugcuaguuucuuguuggcagagauguuauggcuucuggccaacaaaaacuaagucaguucuagcugguuagugucaugaugucauaaagau

SEQ ID NO: 4135795 - RNA, 104 nt, Human
aucuuucuuucaaauacuuaaugauauuggcauuauauucuguguacaaaauacuuaguugacacaaacaagauauuugcccaguaagaguuagaauggaugau

SEQ ID NO: 4135796 - RNA, 77 nt, Human
aucuuuugcaagaaaaacagcuccacugaaaacuucuuuuuaaguaagccagaauucauugagcuguucuugaggau

SEQ ID NO: 4135797 - RNA, 93 nt, Human
aucuuuuggugagccgguuccucuggacugggaacuucccacacgcuucucagaauuuuccccuuccuaggugggacaggaugaccagaaggu

SEQ ID NO: 4135798 - RNA, 65 nt, Human
augaaaacagacagccaguguagagacaguccguauccuguuucuacuguaugacucugauucau

SEQ ID NO: 4135799 - RNA, 83 nt, Human
augaaaaguccuaacuugagcucucagugcuauuuaugaucucgggaggagggucugaagcugggguucagaaucuuuuacau

SEQ ID NO: 4135800 - RNA, 76 nt, Human
augaaaauauguccucccucuggcuucaguuauaucacugcuaugagacugaauaggaaagagggaauguuuucau

SEQ ID NO: 4135801 - RNA, 84 nt, Human
augaaaauguuccucaaaaauucuaguccacagucuucucucucuguuucgaacaucuguggcauuuagagguugcguuuguau

SEQ ID NO: 4135802 - RNA, 95 nt, Human
augaaagagauguuacccaaaacaagaauaaaaacuguuuaccuagaugcuugguaaacauuuguuauucuuguuuugggaaccauuucuuucau

SEQ ID NO: 4135803 - RNA, 129 nt, Human
augaaagccuuaaaaagucucaaaccauuagcaguuuucauuauauuaugcucaagaaacuuuauucugagggaauauugauagauccgcuaauggauuaugcaaagauacaguuauacgaauguucau

SEQ ID NO: 4135804 - RNA, 61 nt, Human
augaaauucaucugagaaugcugucaacaaacugauaaccuauuucucugguggauguuau

SEQ ID NO: 4135805 - RNA, 60 nt, Human
augaacaaauggaaauaaccagugggaaugaaugauccaucugauuagauccuuugucau

SEQ ID NO: 4135806 - RNA, 61 nt, Human
augaacaagagagggaagauucucaauaagcaagugcuuuuagagccucugcuugugucau

SEQ ID NO: 4135807 - RNA, 61 nt, Human
augaaccuuugggagggugacagucauuaggauggacagauguuacaguccaaauguuugu

SEQ ID NO: 4135808 - RNA, 58 nt, Human
augaacggcucuucacacagugaugucaguuuuugacagauuauugaagggucuuuau

SEQ ID NO: 4135809 - RNA, 76 nt, Human
augaagaccggugguucucuaacuuugacuggaggcuaguggcuaacaguggauuagaggccaaagucucccucau

SEQ ID NO: 4135810 - RNA, 101 nt, Human
augaagauaugaaauuauugaucuuuuauguuauggguaggaucaauguuaaugaacuuuguauccugaugccuggcauguagcaaggauuuuauauucau

SEQ ID NO: 4135811 - RNA, 76 nt, Human
augaagaucuaagaggcaucaagacaagcuucauauuuauaucuugcuucucuuaaugccuggcuuuaaguuucau

SEQ ID NO: 4135812 - RNA, 78 nt, Human
augaagcacaguccugcaggagcaaacugcaguguggacaaaguuuacuucaauaguuugauccugacugugacucau

SEQ ID NO: 4135813 - RNA, 78 nt, Human
augaagcucugagguuuugauggguguagauauagacauccaaagcugucauuucacacuagucagaauaccagucau

SEQ ID NO: 4135814 - RNA, 61 nt, Human
augaagcuucucaacugguggaaugcugccagaggauuucaacagaguuugaaggcaacau

SEQ ID NO: 4135815 - RNA, 67 nt, Human
augaaggacuaucuagggcuucccaaaagaaggggaauuucaaacucuugcccucagaauuuuucau

SEQ ID NO: 4135816 - RNA, 93 nt, Human
augaaggauuauuuguuucauacacugucagauuucgauugcuaauauuuguccugguauucacauuuaugacagugaacgagaauccuuuau

SEQ ID NO: 4135817 - RNA, 74 nt, Human
augaagggauguuaaauauuaucaaaagcuuuuucagugcacauugaaaugauuauaugguguuugcccuuuau

SEQ ID NO: 4135818 - RNA, 96 nt, Human
augaaguugcgugugugcauguuaaugagaaaaagagagcagaccuaaaccucuccccugugugauuuucucaugaacaugccauguaccuuucau

SEQ ID NO: 4135819 - RNA, 106 nt, Human
augaaugaaccaugaggacauuaugcuaaguggaauaagccagucauaaaaagacaaacacugugugauuccacuuauaugggguaccuagaauggucaaguucau

SEQ ID NO: 4135820 - RNA, 82 nt, Human
augaauggugcugucuggaaugcaguacauagucugcaugcaacccugugugcuaaacauauuagauuuguaaaguguucau

SEQ ID NO: 4135821 - RNA, 77 nt, Human
augaauguccauucuauguucagcacugugcuagguguuagggagagggcagugaacauaacacagaagguuuucau

SEQ ID NO: 4135822 - RNA, 55 nt, Human
augacaugaggcaucuuuggagagaagaagcugccacaauccgaugccuccucgu

SEQ ID NO: 4135823 - RNA, 67 nt, Human
augacauuuaaucccuaaauauuugagugugugcuuuuuaccaaguguuguauugaaugaauguuau

SEQ ID NO: 4135824 - RNA, 55 nt, Human
augacauuuauacagugagcuuuuucuaaaugacaagcagauuguuagauguuau

SEQ ID NO: 4135825 - RNA, 63 nt, Human
augaccagacucucagugggguucaugcucuuuaucagcuuucaccaacugcagggcuggcau

SEQ ID NO: 4135826 - RNA, 68 nt, Human
augacccucugaggagaaagguacugacaauccuuuggguacaaagugcucugaucuccuuggguugu

SEQ ID NO: 4135827 - RNA, 111 nt, Human
augaccuauuauaacaauaaucuguuauaauaccuaggcucuuaaucuagcucuaagaugauuguggcuugagccagcuauguagcaagaggaauuguaaaaaugggucau

SEQ ID NO: 4135828 - RNA, 78 nt, Human
augaccuggcaccaucugugugaccaaaaccucugugccugccuagauccuggagcagagaugguggccuucugucau

SEQ ID NO: 4135829 - RNA, 94 nt, Human
augacuauuuuuagcugcauaugagaauaggagaaaguccauacagaaauuuuauacuuucucucuccuccaugugcaagagcaaagaucccau

SEQ ID NO: 4135830 - RNA, 74 nt, Human
augacucugcugaggcacccggaauauggcaccaaacucccuugcuuacgugugcucuucaguuuuagggucau

SEQ ID NO: 4135831 - RNA, 91 nt, Human
augacugaggggugaugcucaacuaucaauaacagcaacaaugucagcuguccuuucuauguguauugagcauuguuaccacuaaugucau

SEQ ID NO: 4135832 - RNA, 73 nt, Human
augacugcauuauuggaacggcugaacuuugacuuauguaucauguuucagcaguuuuaagaauaaaaggaau

SEQ ID NO: 4135833 - RNA, 84 nt, Human
augacugggccuaugaauaacagguggacacagcagcagucuccuucagcacugcuuggugugucccuugauacggcucuucau

SEQ ID NO: 4135834 - RNA, 78 nt, Human
augacuuagucaaaucauucuguuucucucugcuuccaaucaaaacauagagaaauagaaugacuugacuaaggccau

SEQ ID NO: 4135835 - RNA, 88 nt, Human
augagaauucaaaguauguaugugugugguagugauggugggggcacccauuacuuuccaauauaucaguauaacuccuuauucuuau

SEQ ID NO: 4135836 - RNA, 56 nt, Human
augagagucucagagucucuuccugcuggagguuuccguggcucugggugucacau

SEQ ID NO: 4135837 - RNA, 85 nt, Human
augagauaagggaucugccccuagaagcugucuggcugcuuuuugguagagcaggcaugcugcauugaggggcucucuuccucau

SEQ ID NO: 4135838 - RNA, 59 nt, Human
augagauacuacaaaugaguuuccgguuuccggauccaaucaccuuuguugguauucau

SEQ ID NO: 4135839 - RNA, 59 nt, Human
augagauaggggauaccuuaguaucuauuaccauuauacuaaaguaucuccuauuucau

SEQ ID NO: 4135840 - RNA, 61 nt, Human
augagaugugucuaauggaaccuuggaacaugcuguccccaucucacagacaucgucucau

SEQ ID NO: 4135841 - RNA, 66 nt, Human
augagauuuaggaggggccagggaagaaugauauggucuggcuccguguccgcucccaaaucucau

SEQ ID NO: 4135842 - RNA, 60 nt, Human
augagcaaaugaaacagaagugacuguuuugaaagcaacagcccuguuucauuaguuuau

SEQ ID NO: 4135843 - RNA, 59 nt, Human
augagcaagaugaucugccaacacagcuugucaguuaccuuauggcaucuuuugcucau

SEQ ID NO: 4135844 - RNA, 55 nt, Human
augagcacacugauaagccccuuccacaucuggcuucuacuugucuguugcucau

SEQ ID NO: 4135845 - RNA, 69 nt, Human
augagcacuacuaauuaguuuccauaauauuuucuagaaauuugggaguugcuagugaguuaaguucau

SEQ ID NO: 4135846 - RNA, 58 nt, Human
augagcagguuuaagagaggccuggagaaaaugcugccucucuugagaguugcaucau

SEQ ID NO: 4135847 - RNA, 127 nt, Human
augagccauauuuacggugaacggcggcaacuccaugcccaggaacagggcucagacccgcacugagacuuuagcggguuucuuaaccuuuucugugccacggaccccuuugccagucuggugaagu

SEQ ID NO: 4135848 - RNA, 78 nt, Human
auaacuagaagaggagaauuugcguaguauagugauaugguuuggcuguguccccacccaaaucucaucuugaguuau

SEQ ID NO: 4135849 - RNA, 59 nt, Human
auaacucaguuggaauaauuagagggugacuggcucuuuauuuauuuaggcugagggau

SEQ ID NO: 4135850 - RNA, 104 nt, Human
auaacugcccaguaaauacucauuuuaccauccucuuuuagaauuguguaccgcuaauuccccaagagaaggauggauccaaaagagauuguguuggcauuuau

SEQ ID NO: 4135851 - RNA, 75 nt, Human
auaacuuuacuuugcaacuuuuacuuucccgaaagugccuggauaaguaauguguaaaguguaaggcaaaguugu

SEQ ID NO: 4135852 - RNA, 129 nt, Human
auaagaauuccguagggaguuuuaggaauacagaagacuagucuuuaccuucagagauuuggauucaguaggucucagguagggccuaggaaucuguguuuagaaaaucacucuaaguaaugcuaauau

SEQ ID NO: 4135853 - RNA, 99 nt, Human
auaagacugaaacauugucuaacuuagggaauacuuuaguguauguuggaugaauauguuuaaaugauucucagauuuggacagguaaaucauuuuuau

SEQ ID NO: 4135854 - RNA, 130 nt, Human
auaagacuuacucagagaaugcuaauuaaaaauucagauucuugauccuguagccugucuuuaugauuuacuagaacagaaauggagcccaggaaucugaauuuuuagcaguuucccugggugauccuau

SEQ ID NO: 4135855 - RNA, 60 nt, Human
auaagagcuaccucauagaugagagggcauaggaauuccuuaauaaaugguagcuguuau

SEQ ID NO: 4135856 - RNA, 77 nt, Human
auaagcugguaaaauuugugagauuuucagaaggcaaaauccauguuuuuugucuauucacugauucagccacuuau

SEQ ID NO: 4135857 - RNA, 79 nt, Human
auaagcuugugagugcuuauauguuaaauugagguauuuagguuucucuuuagcaacgaagcacucgacagaagguugu

SEQ ID NO: 4135858 - RNA, 58 nt, Human
auaaggaaauugagacaaaggagauuaaguauuuuuccugaggucacaacuugcuuau

SEQ ID NO: 4135859 - RNA, 86 nt, Human
auaagguugccuugagcagaguuguaagaaaucugaucugaaaauccaaguuaauaaucuucacaauucuaacagggcaauguugu

SEQ ID NO: 4135860 - RNA, 78 nt, Human
auaaguagaaaauauggugcuaaugacuaguauuugguauaaguagauaaauguuuuguaucacauuugcaugcuuau

SEQ ID NO: 4135861 - RNA, 84 nt, Human
auaaguaguaguaguauuucuguagaggcuaucaagauuagcuuugaaagaacucuucagagauaaauucuaaaagccauuuau

SEQ ID NO: 4135862 - RNA, 66 nt, Human
auaagugagaacaaaaauuagaggcuauaaagauagacuggaaucugaauuacuguuuucauuugu

SEQ ID NO: 4135863 - RNA, 60 nt, Human
auaaguggcuuuucuuucgugaggguacucaauuuucacauuuauuucaaaguuacuuau

SEQ ID NO: 4135864 - RNA, 89 nt, Human
auaaguugaguugucaaguuuggaggucacuggucuuugaggcucaagguucagaugacuuuuaugcugaugacaugaaccaaauuuau

SEQ ID NO: 4135865 - RNA, 83 nt, Human
auaauaucacagggagugugcacacaugguauacagucccugcgacaugguguacacaugguguacacucccugugauauugu

SEQ ID NO: 4135866 - RNA, 126 nt, Human
auaauaugucauucuucugaaaauaguuacaguucugauauuagugcaaguaaguguauguuuuucauucugaauguaucuacacuauaacagaaugcuucacuguuuuauuuuccuuugacuuuu

SEQ ID NO: 4135867 - RNA, 77 nt, Human
auaauggcuugauuaguuaaugugaggcaccuaguccagagcuggcacauuguaagcauauuagcugauguaauuau

SEQ ID NO: 4135868 - RNA, 125 nt, Human
auaauguaaauauucauagguuccauggccauuuacagcagacugaugaaacaaccaaaugaagccaucuccagguuuucaucuguuuugugcauggcuauuccaucaaagaauuacuauauuau

SEQ ID NO: 4135869 - RNA, 129 nt, Human
auaaugucuaauuaagacaucuguuaaaugucuacaauauuaauagaagggguucuaauagaacuguauuggaauuguccauuuaauuaaccucgugagccuuuaauggaugucuuaaauagacaucau

SEQ ID NO: 4135870 - RNA, 79 nt, Human
auaauuaggucuuauaacgucuugcaaugacauuugcaagauguaaaugucauugcaagauguuauaggaccuaauuau

SEQ ID NO: 4135871 - RNA, 112 nt, Human
auaauuuacagggcauccauccaugauggaauauuauucaggcauuagaaaggaugaugcaggaaugagguucucaguuagaguucaugguucaggaaaucucugaaauuau

SEQ ID NO: 4135872 - RNA, 89 nt, Human
auacaacaacuuauucauuuuauuaugauggacaccuucgcuguuuucaauugggggcuauuauaguguuuccaugaauauccuuguau

SEQ ID NO: 4135873 - RNA, 55 nt, Human
auacaacugccuuagaaggaaauaauuuauauuaccugggcauggcaaguugugu

SEQ ID NO: 4135874 - RNA, 72 nt, Human
auacaacuuccugcagcaguacucagcagccaggcuucugggcugcccgcuacuguugcaacuugucugugu

SEQ ID NO: 4135875 - RNA, 56 nt, Human
auacaaguggccacuugaauucucaaaaaguccauugugaauucaguuauuugugu

SEQ ID NO: 4135876 - RNA, 101 nt, Human
auacaaucuuuucugcauuauucauguucucuuaauguuaacuaguuuauacaugguuaauaaaguagagaaugacauagaauuuguuggaauuuauguau

SEQ ID NO: 4135877 - RNA, 130 nt, Human
auacacaauggaacuuggcagucuagauuguuuuggcuuuauuuccauucacuuaaaacaaguaugugugggaaggagcuugugggaaaugggaguggaagagauauaauuuauuuuggguauuguguau

SEQ ID NO: 4135878 - RNA, 78 nt, Human
auacacacauauaugcacauucacacaaaaauguaugcuuauauauguguguguguguguguguauguaugugugugu

SEQ ID NO: 4135879 - RNA, 66 nt, Human
auacacacuucacccuugagcuaaggcuuggguagcaguugguuuaccagagggaacgugggguau

SEQ ID NO: 4135880 - RNA, 59 nt, Human
auacacugugguaaacucaaaguauauugucuuugaacuuagaguuuaguauagucugu

SEQ ID NO: 4135881 - RNA, 70 nt, Human
auacaggcauaaaucuauuggacaugugugugcauauguguacguguguguguggguugugugugugugu

SEQ ID NO: 4135882 - RNA, 56 nt, Human
auacaguaauuuguaacucaucauuuaggaugaguugggcagaaacuuacuaguau

SEQ ID NO: 4135883 - RNA, 81 nt, Human
auacaguagaaguccuuugugacauguauuuaggcuugagacuaauacuugucauaaaggcauuauaaguguuuauuguau

SEQ ID NO: 4135884 - RNA, 77 nt, Human
auacaguagucgucuuauuuugacagaagagaauaaaaagaggauuuuuauggucaagucagggcagaaaacuguau

SEQ ID NO: 4135885 - RNA, 83 nt, Human
auacauagaaguucuaccauugggaaaacagccugcauccuuugggcuauuuacuuauguggaaaagcucauucuucuuguau

SEQ ID NO: 4135886 - RNA, 56 nt, Human
auacaucuuccuuuuaaaaugcauuuacaaaaguaaaauuuaagaaggaggggugu

SEQ ID NO: 4135887 - RNA, 106 nt, Human
auacaugugguaagauugcuugauacccagucaaucuccauucuccccuuccuccuuacuaaaagaaccugauuguuggugguaucaauauaucugacuaaaguau

SEQ ID NO: 4135888 - RNA, 71 nt, Human
auacauuggauguaaagcuucagagccggcagccugcagcggaugccaccucucucuugacucgagugugu

SEQ ID NO: 4135889 - RNA, 73 nt, Human
auaccaaagcaaagagcuaacauugccgagauacuauguacuugauuuugugcuagcucuuugcauucaguau

SEQ ID NO: 4135890 - RNA, 57 nt, Human
auaccacucucccagcuaaagagccuucacaggagggugcucaggauggagaggugu

SEQ ID NO: 4135891 - RNA, 61 nt, Human
auacccugccauguuaccugcacagguccaggaccacaggacccaugagucagugagguau

SEQ ID NO: 4135892 - RNA, 87 nt, Human
auaccucuugugauguuagguguuauugacugaauuauguucucccaaaauucacauguugaagcccuaaccccaacacacugguau

SEQ ID NO: 4135893 - RNA, 79 nt, Human
auaccuuguguacugaugcugagagcaauuucauaagaaauuucaaaaaugcuuuagcagugauuagugcuuguggugu

SEQ ID NO: 4135894 - RNA, 73 nt, Human
auacguguaucaguaacuguggacaguagagaagaugcgcuuuuuauuuguuuguuguuguugguauuaguau

SEQ ID NO: 4135895 - RNA, 71 nt, Human
auacucaaaucaggacugugccaaaccuaucaguguaaugauucugggugucaucaaagucuugggaguau

SEQ ID NO: 4135896 - RNA, 62 nt, Human
auacucaugacugaugaauaccugcucugugccugaccaggacaacagcagcucaugagugu

SEQ ID NO: 4135897 - RNA, 69 nt, Human
auacucgacucuuugacgugcccaugucccuacagccaggagacaggcugcaugugaggugcugauugu

SEQ ID NO: 4135898 - RNA, 57 nt, Human
auacugaaaggguguuaccuaauuguuuaagguuagcaagacaacuuuucucagugu

SEQ ID NO: 4135899 - RNA, 129 nt, Human
auacugauguaggggauguaccaggagugaagcuggaagcaugcagacucgaagaucccucuccccuugaccuaucuucaggugagucugucaggcuuuccauuuccaauucuggcucuucgucaaaau

SEQ ID NO: 4135900 - RNA, 76 nt, Human
auacuggcuacuggcccauugucaacaugaugcucuauugaauuaugguggaucccaguggguccuuuaucaguau

SEQ ID NO: 4135901 - RNA, 72 nt, Human
auacuguaccagacacaguguucuugccauucuugagcaaacaucagugaugucugugacauguuacagugu

SEQ ID NO: 4135902 - RNA, 75 nt, Human
auacuguugaaaauuacagcuuguuuaccagcuauauaaccucaagcaggccugagcuuuaauuuucuugugugu

SEQ ID NO: 4135903 - RNA, 84 nt, Human
auacuuauauaggcuugacuuugauuaaaucaagcaaacuaucaguuugucuuuagugaaugaagucuucuuuuauauaugugu

SEQ ID NO: 4135904 - RNA, 70 nt, Human
auacuuauggcccucaagcugcauaaggaccuucuguugaaguucauuguaacuugauggaaugagcuau

SEQ ID NO: 4135905 - RNA, 88 nt, Human
auacuuggagaaagagaugugcugauaaguuugagcucuaauuaagcagcuucuuuuacagcucaugcuuuaauucaauuccagguau

SEQ ID NO: 4135906 - RNA, 103 nt, Human
auacuugugaauaggacugaaauuuauauuuugggcacucuuuaccucagauucagaguucuuaggauuauuuaaaauucauuugcuggauguuuucaaguau

SEQ ID NO: 4135907 - RNA, 62 nt, Human
auacuuugcuaaaaugugcagaacuugguucaagcuuucuagaaaacaauuuagcaagguau

SEQ ID NO: 4135908 - RNA, 101 nt, Human
auagaaacuauuagauugcugcaaaagucauugugguuuuugacauugaaauuaaaggcaaaaaccacaaugacuuuugcaccaaccuaaugguuuacugu

SEQ ID NO: 4135909 - RNA, 62 nt, Human
auagaagugggccauggugagaguuuggcaugacccaaaguuuaugauuaauccaauucugu

SEQ ID NO: 4135910 - RNA, 65 nt, Human
auagaaguuuguaacuugugcuuccuggagaucuagguaauaacaacuuuacagauacauuuugu

SEQ ID NO: 4135911 - RNA, 81 nt, Human
auagaauaauauaauccuacuucccaugaugcuaauuuaucucucacuguaacaugaagguuaaggaucauauugugauau

SEQ ID NO: 4135912 - RNA, 89 nt, Human
auagaaugauauaagaaguaguauggauuaaacuaggggucaagaacuuuuccuauaaagguccagauagcaaauauguuugguuuugu

SEQ ID NO: 4135913 - RNA, 69 nt, Human
augaguccucagauagaaagugcguuuccaacagcaaacagcauaaaauaaaucuacaugaggacacau

SEQ ID NO: 4135914 - RNA, 65 nt, Human
augaguggggcuuagggaggcucagaagguccacucuuucucagagccuaacuaaccuaacgcau

SEQ ID NO: 4135915 - RNA, 130 nt, Human
augaguguguguguguguguguauuuguguggguguguguguuuuccagaaugguguuuugggucauccaaacaguuucuuuuuggagaacagaucaccaaauacuagucuucuucauagaaacauguau

SEQ ID NO: 4135916 - RNA, 82 nt, Human
augaguucucaacuauagaucaaaugaguuuacugaagaauucagaagauuaaaaaacaugugacuguaugauaggauuuau

SEQ ID NO: 4135917 - RNA, 96 nt, Human
augaguucugcuguggacaugcuaaaucugagaugcuuauagaaaauuuagguggagaaguccagaaggcaauuggaauauagaugcaaaauucau

SEQ ID NO: 4135918 - RNA, 72 nt, Human
augaguugggacagggaaucugauccccuguugauuucucucaagggaggaaggggcccugccuuuacucau

SEQ ID NO: 4135919 - RNA, 72 nt, Human
augaguuuguagaacuauacuuacauuuuccaaccuuggaggaucuaucuuuggauaguuuuauaaacacau

SEQ ID NO: 4135920 - RNA, 97 nt, Human
augaguuuuguuauauugguuccaauauuucucauauauggaaaaugucauuuucccugggaauuaauauuuggaacugguguuuaagaaaaaccau

SEQ ID NO: 4135921 - RNA, 102 nt, Human
augauaauuucuauuucuugcuugacuuauuauuugguguuuuguguuuuaucccaauauggaacaucagucauaauuuaacgaagaguagaauuuuauuau

SEQ ID NO: 4135922 - RNA, 56 nt, Human
augauacaccuaggagugggaggggaggccucuuuggauauuaccugguuuaucau

SEQ ID NO: 4135923 - RNA, 72 nt, Human
augauaccaagauaucaaugacauaguaucaccccucaguauagugcaguguucuugaucaucuuuguucau

SEQ ID NO: 4135924 - RNA, 130 nt, Human
augauaguagugucuacuugauaguguuguuuuaaggauuauaugauauaaugaauguaaaaugauucccaccauaucuaucacauaguguuuaguaaauguuaccuauucauaguagaagcacuuuaau

SEQ ID NO: 4135925 - RNA, 75 nt, Human
augauaguuacugggaaauugcccuaguucuucagucacuccucaguaggacgcaauuuccuuagugcuagucau

SEQ ID NO: 4135926 - RNA, 96 nt, Human
augaucauauggcauauucugaaugacccagcuuaagucacauguucaacauugaacuguggccagggacuggaguauaguucaugucuaggucau

SEQ ID NO: 4135927 - RNA, 65 nt, Human
augaucccucaggacagugugaugaaguuuuuggcucccuucucagaacaaugccuuaggggcau

SEQ ID NO: 4135928 - RNA, 109 nt, Human
augaucgccauucuaacuggugugagacgguaucucauugugguuuugauuugcauuucucugauggccagugaugaugagcauuguuucauguguuuuuuggcugcau

SEQ ID NO: 4135929 - RNA, 114 nt, Human
augaugaaaauauucuauaucuuguuuugaauggugguugcaugaguguauaaaguugucaaaacccauuuaacugaacaucucaaaucaaggcuuuuauugaauauacauuau

SEQ ID NO: 4135930 - RNA, 78 nt, Human
augaugaagcaaacauagugaagcaaugacagaauuuaggugaugugcaaaaauuagcuucgcuguagguuucaacau

SEQ ID NO: 4135931 - RNA, 112 nt, Human
augaugaggaaggagcaugaguaugaguagcccccaccucuuaaaaagaauguaguuuauauagagcuuugaagaauguggcauuuauuuauaacagccucuuuuuuauugu

SEQ ID NO: 4135932 - RNA, 96 nt, Human
augaugcagcaauaccacauguggauauauguccaauggaaauaaaauuaguauuucuaagagauaucuguacuucuguguucauuguagcauuau

SEQ ID NO: 4135933 - RNA, 60 nt, Human
augaugcuuccacuguucugcucucccugggaaagcggaggcagaacggugaagcagagu

SEQ ID NO: 4135934 - RNA, 65 nt, Human
augaugguaaauucaguauccgugggcugugcccaccaaauaacagggacuagguuugccuucau

SEQ ID NO: 4135935 - RNA, 61 nt, Human
augauguaaggguaauugucuauccaugugggaaaaagauaaagcuguaccuuuacaucau

SEQ ID NO: 4135936 - RNA, 73 nt, Human
augaugucaguucuacaaguccaguuuuugcaagggcaaauuaacuuuguuucucagcuguggagccuaucau

SEQ ID NO: 4135937 - RNA, 103 nt, Human
augaugugaaaggauucggucauaguggcugguaguuacugagcacucacuaugugcugacacuuauaauugccagguauauauugacuuauuuaaucaucau

SEQ ID NO: 4135938 - RNA, 55 nt, Human
augaugugcccuaaguauccagagcagagucuggcauacaguaggugcucaauau

SEQ ID NO: 4135939 - RNA, 79 nt, Human
augauguuuuugagaucugugcauguuaguuaauguagaucaguccauccucuguaauugcuguauagauugucaucau

SEQ ID NO: 4135940 - RNA, 118 nt, Human
augauuaggcuuuuugguauuuauucagaaaaaacuucaauaagugggaaaaagugagaaggccccaaugauuacuuguuaguuuuaucugcaugauacccacacugccaaagauuau

SEQ ID NO: 4135941 - RNA, 82 nt, Human
augauugcucugccuuugagguuagcuagcagaucagcccaguucugguugaucuagguuggcuucaacugggacagcucau

SEQ ID NO: 4135942 - RNA, 65 nt, Human
augauuucuucuagccugccuuugaugugucuugcacauuuuuaagaagugguuggaagaagcau

SEQ ID NO: 4135943 - RNA, 57 nt, Human
augauuugcugaauaucuuggaugucagaaagacauccaggcagagcaacaaaauau

SEQ ID NO: 4135944 - RNA, 63 nt, Human
augcaaaugucaccacuucuaaacgucugaauucaucuaguuuguugaagugugacuuugcau

SEQ ID NO: 4135945 - RNA, 69 nt, Human
augcaaauguuuaaguuacuauugucauugcccucaucuuagcuaauagugauugaaaacauucuguau

SEQ ID NO: 4135946 - RNA, 83 nt, Human
augcaacaacuuggauggaucucaagggaauuaugcugagucaaaaagcuaaucccuaaagguugcauaagguaugauugcau

SEQ ID NO: 4135947 - RNA, 85 nt, Human
augcaaguuuuuacagauugagguuuuuaauauccaguuuugcuuuguguauggauguuuuagagcauaguuuguaaucauguau

SEQ ID NO: 4135948 - RNA, 74 nt, Human
augcaauguccaauuucagagucucauuugccugugaauugagagaguucaguggacucauggaagacuugggu

SEQ ID NO: 4135949 - RNA, 75 nt, Human
augcaauugcacuuuuaaauggguccguguuuuauuaaccucaaacacuuauccacauuugaaagauaguuguau

SEQ ID NO: 4135950 - RNA, 97 nt, Human
augcacaaauggcucaggguccccaaaugguuucuguguccucaacuuucuauguaauaagagccauggauauuucugagcacaguuugaccugcau

SEQ ID NO: 4135951 - RNA, 89 nt, Human
augcacaagccccacacauuuuucacuuaccguaggaagauuuaaaaagaaacccuuuugugugugugugugugugugugugugugugu

SEQ ID NO: 4135952 - RNA, 57 nt, Human
augcacuuucuagagauucugauucagccuagagucuauauuuucugaaagaugcau

SEQ ID NO: 4135953 - RNA, 77 nt, Human
augcagacauuucaaauagaaucuuuccaaaguacugcuuuuuuuggauuuuuuuuggcuuugauuuuguauuguau

SEQ ID NO: 4135954 - RNA, 66 nt, Human
augcagccuaugcauauguguucauuggagugugcacacuuguguacauauaugcauguguaccau

SEQ ID NO: 4135955 - RNA, 77 nt, Human
augcagccuguccagcugaccagagcagcagagauggcucaguuuucagcugccucuccugaguugacaggaggcau

SEQ ID NO: 4135956 - RNA, 94 nt, Human
augcagggaucuucccauacuuccugcuucccugaucugaaccaagauuggaaagaggcaggcagcagagaagaugcccaagaaacucugacau

SEQ ID NO: 4135957 - RNA, 65 nt, Human
augcaguaaauguuaagaaaaagaagauagcaauuaugaguuguauuucuuagcuuuugcugcgu

SEQ ID NO: 4135958 - RNA, 79 nt, Human
augcaguguuauguagcagaaagauguuuggcagaaugcuauuuguccaacuuuuaacucugcugaugacuggcugcau

SEQ ID NO: 4135959 - RNA, 78 nt, Human
augcauaugcacacaauagauaugcauacauaugauauacauugguagauauguguauaucuguaugugcauguguau

SEQ ID NO: 4135960 - RNA, 57 nt, Human
augcauauuucuugggcuuaccauauaaaugcugagggugaggcuaauaaucugcau

SEQ ID NO: 4135961 - RNA, 129 nt, Human
augcaucuccagauaaguuucaaaauuugcaucauaacuguaauucaucuaccauugggacaauaauggcuaggaggauagacagcuuauuaaguaaaauguugguacuaguuuuaauaaucuuggcau

SEQ ID NO: 4135962 - RNA, 88 nt, Human
augcaugaauuugggcgaggagggaggcaugguucaaccuacaacaaacuuuaaaccaguguuucccaaauuucagccauuuauguau

SEQ ID NO: 4135963 - RNA, 69 nt, Human
augcaugggagaaggcaaggggaggugaccucauggaacaggucauccagacuuugccucugccagugu

SEQ ID NO: 4135964 - RNA, 63 nt, Human
augcaugucagcugugcccauguugccuucacaccccuugccaacgcagggcugcacacgcau

SEQ ID NO: 4135965 - RNA, 70 nt, Human
augcauuugacagcuguacagaguaacuuccuuuagagggaaggauuaaaauuugacagaguuugagcau

SEQ ID NO: 4135966 - RNA, 101 nt, Human
augccauuaaaaaugagcugugggcagauccauagaguucuggagaaugccaugccuucuucagcagagaauuaugauguuugcaaaacagcuccuggcau

SEQ ID NO: 4135967 - RNA, 78 nt, Human
augccauuaucucaguugaacuuaugacguggacauuauuaauauccccauauuuuguaugagaaaacugaggugcau

SEQ ID NO: 4135968 - RNA, 73 nt, Human
augcccaucaaugccuguggaaaggcuggugcuuucuggacugagagcuggccuuggacaugaggaaggguau

SEQ ID NO: 4135969 - RNA, 90 nt, Human
augccccaccucuggucuggaugcccacuaucugcuggcugaccuccucuugcacauggagccugcuggugggugccccuggugaaguau

SEQ ID NO: 4135970 - RNA, 78 nt, Human
augcccccagaacacaggcuaaacugagauaguuaaucaaagacaacuguaaaucucagacuguguuuuucacagcau

SEQ ID NO: 4135971 - RNA, 59 nt, Human
augcccgauaccuaguuaacucucuacauguuauuguuguuuugcugguaucuggggau

SEQ ID NO: 4135972 - RNA, 61 nt, Human
augcccuuuucauaucucaaccucucaucauaggugagguccaguuuucugacaagggcau

SEQ ID NO: 4135973 - RNA, 65 nt, Human
augccuagacuauagacucugcagaggaugcugcuacacaagggucuguggaugcaucuggggau

SEQ ID NO: 4135974 - RNA, 59 nt, Human
augccuauguauuauauacugugugugaauacauauauuugugugugauuuaugaguau

SEQ ID NO: 4135975 - RNA, 68 nt, Human
augccucacuugcaagauuauucaauuugugauaaaauagaugaaaggucuagcacagugccuggcau

SEQ ID NO: 4135976 - RNA, 64 nt, Human
augccuccaaaacauaugcccuacuuaugccgccguaguaugagcaccagggcuuuugagacau

SEQ ID NO: 4135977 - RNA, 99 nt, Human
augccuccaucuuccccuucccuuuguucugcugggacauuacaauauucaguagugacagccucaugaggagcaaaagaauggagagauuuuuuguau

SEQ ID NO: 4135978 - RNA, 59 nt, Human
augccugggccucaucuucaaugagucugauucaguaggucaagguggggcccgagcau

SEQ ID NO: 4135979 - RNA, 85 nt, Human
auuugaggguggcucagcugcacuguucugacccaggguuucucaugagacugagucaacauguuggccgggacuacccucagau

SEQ ID NO: 4135980 - RNA, 84 nt, Human
auuugaggguugugaggguuaaguaagaagaauaugaaaauacuuuguggucucuaaagcacuuuaaccacagaacuuuuaagu

SEQ ID NO: 4135981 - RNA, 83 nt, Human
auuugaguauaguuuggggaacuauucaagaacauauuaaaaugucacuguaaugcucucugccauagcuaacuaacucaagu

SEQ ID NO: 4135982 - RNA, 93 nt, Human
auuugauccuugauccagaggagggaaaggaccaaucaccuucacucuacugugaggcaauguccuucauccuugguucugcuucagucaaau

SEQ ID NO: 4135983 - RNA, 58 nt, Human
auuugauguaugugagugauuggcguaauaacauaguaagucacaugcauacacaagu

SEQ ID NO: 4135984 - RNA, 76 nt, Human
auuugauuuagaaugacauugagccauaacaucaaguagugaaaauuuaagaugcugguucaauuucccaucagau

SEQ ID NO: 4135985 - RNA, 69 nt, Human
auuugcauucauauggaaggaaacuaugguauuagaggguuuugugguccuugcuauagagugauaaau

SEQ ID NO: 4135986 - RNA, 63 nt, Human
auuugcuuccuaauacucauauggguucaugcuauucaucuguaugcuuauuagggacuaaau

SEQ ID NO: 4135987 - RNA, 56 nt, Human
auuugcuucugaguguuuaggaagccccuuguuucugaggaugaaggauagcaagu

SEQ ID NO: 4135988 - RNA, 76 nt, Human
auuuggaauagggaggcuggcauagucucuguucaagucacacugaucugcucuaucccguuucccucuuccagau

SEQ ID NO: 4135989 - RNA, 71 nt, Human
auuuggaccucuuccauugaauaggcugugcaaccuccuuggaugccaggcuaaguggaggacuuccgggu

SEQ ID NO: 4135990 - RNA, 98 nt, Human
auuuggagagguuauaguaggaauugcuaaccaauucaaaaugugccauuuugaaucagaaguuggcaguguuauuuauaauagugacccauuugaau

SEQ ID NO: 4135991 - RNA, 91 nt, Human
auuuggauggaauggucuaauaaucugaagaaacaggacuugaacacauuuuaaguaugguagucucagaauuggcccagagcauaagaau

SEQ ID NO: 4135992 - RNA, 58 nt, Human
auuuggaugggcauuaggaaagucagggauauccuuuggcaccaauccuacuccaagu

SEQ ID NO: 4135993 - RNA, 94 nt, Human
auuuggcaaugccuggaucuaugauuugguugucacaauuguggggaaggcacuccugacaucuaguagguagagaccaggaauguugcuaaau

SEQ ID NO: 4135994 - RNA, 72 nt, Human
auuugggaguugucagagugucuguuggugcuacauacuaguauuacaacuaugugcucugcaagccuuuau

SEQ ID NO: 4135995 - RNA, 65 nt, Human
auuuggggaagggagucauuugauuagggaaucauccaccucaaucacaugcuuauuccuggaau

SEQ ID NO: 4135996 - RNA, 60 nt, Human
auuuggggcuuauagcauuguauggagaagacaaugcaguguuaaauuucgcaccuaaau

SEQ ID NO: 4135997 - RNA, 67 nt, Human
auuugguauucaguuggauuuggauauauuaggauuaccugucagucacaguucaacuaguucagau

SEQ ID NO: 4135998 - RNA, 61 nt, Human
auuuguaaagugcuuaaaaguaugccuugcaaaggaaaugcuauguaagcauuuauuaaau

SEQ ID NO: 4135999 - RNA, 57 nt, Human
auuuguacucaggaauucugcucacgcaucacaugcagucuuucuugguguacaaau

SEQ ID NO: 4136000 - RNA, 130 nt, Human
auuuguacucuguaauuuugccaggagacauaacaugcauauacuuaaauaugucagaggugaauaguuacacauuauauauucaugaguauugcauuccuguguuggcaacaaugguauuguacauaau

SEQ ID NO: 4136001 - RNA, 60 nt, Human
auuuguagugaagugaaaauaagaccgucaaauccuuaauguguuuccuuugcuacaaau

SEQ ID NO: 4136002 - RNA, 86 nt, Human
auuugucauacuucuuaaaaguaugccaauuggagaacaagacacuugcuuccaaaaugagaauaccuuugugaaaauugacaaau

SEQ ID NO: 4136003 - RNA, 56 nt, Human
auuugucugagcagggagugacgaaaugacagucaugccaguuugugcaggcagau

SEQ ID NO: 4136004 - RNA, 75 nt, Human
auuuguggaauuugaacuucauaaagaaauguuaugauuauagucaucuucacauuuuaagaaguucuugcagau

SEQ ID NO: 4136005 - RNA, 79 nt, Human
auuuguguggcaugggagggacugcauucgauuuggaauugaucucuguguugaacucuccuacauuucauucacaaau

SEQ ID NO: 4136006 - RNA, 62 nt, Human
auuuguucacugcuuuauuuucagcauuuaucacagugccuggcacauugcaguggauuaau

SEQ ID NO: 4136007 - RNA, 80 nt, Human
auuuuaaugucuuagauuucaccgauaaugaggaaauuguccucguuuucauggguagagguucuuaaagguuuuaaaau

SEQ ID NO: 4136008 - RNA, 60 nt, Human
auuuuacaaagugggaaacgaagguuccucuuaggaaccuaguugucaccuuuguauaau

SEQ ID NO: 4136009 - RNA, 82 nt, Human
auuuuaccaagucacuuaugugcagauauccucaaauacaaaggccuugggauuaaguauauuugcaagugauugguaaaau

SEQ ID NO: 4136010 - RNA, 92 nt, Human
auuuuagaggauucauguucaccuguggcacuagugguuaaaauaauaauuaacaugacuguugccauaugggggcacguaaacccugagau

SEQ ID NO: 4136011 - RNA, 114 nt, Human
auuuuaggaaagaaagaggccuagaguguucccggcagaggaauauagcccugcgcagagauaaaaagacagggcauguguugggaacagcaugagguuuaauuuggcugaaau

SEQ ID NO: 4136012 - RNA, 86 nt, Human
auuuuaguaauaauuuuagcuuuuauuucaucauauauaauaauuuguagugacuggugugaaguuaaauagaauuaaccuagaau

SEQ ID NO: 4136013 - RNA, 95 nt, Human
auuuuagucuuucuucucuuuagacaucucauuguguaacaccugaacaaucaguuuuuguauuuuuagauggaagagauagcagagcauagagu

SEQ ID NO: 4136014 - RNA, 125 nt, Human
auuuuaguuccucaguuuaaccuacaacuagucucuauuacuuugaccacuggauuauuacguaagaauuuuaauuuacaguguuacuugauguccacuaggggggaccaaaccacgaacagaau

SEQ ID NO: 4136015 - RNA, 82 nt, Human
auuuuauauuuauuaugcagugaaaaagugcacccuguguagaauuacaaggcucuaauuucauugaaaguuucuguaaggu

SEQ ID NO: 4136016 - RNA, 57 nt, Human
auuuucaaagucuuuaucuuuuuucguuugauaggaaugggucgggaaguugagaau

SEQ ID NO: 4136017 - RNA, 91 nt, Human
auuuucaucaccuagggaucuuguuaaaaagcagauucugauucagggaccaagauucugcauuuuuagcaaguucucaagugaugcuaau

SEQ ID NO: 4136018 - RNA, 63 nt, Human
auuuuccacaauguaugaauaagauuaccuuuuccuaauuuuaaaaaaagcauuguggugagu

SEQ ID NO: 4136019 - RNA, 63 nt, Human
auuuuccugguaguaagaugacccuauuguuauguacauucaggucuucuauucccagaaagu

SEQ ID NO: 4136020 - RNA, 111 nt, Human
auuuucucuguucaaguaguacaguaggcacagauuaacauuuaaauuuuucacauaugguauauuucagaaauuugaaguuaagcaaaaauuuuaaugaguagagaaagu

SEQ ID NO: 4136021 - RNA, 130 nt, Human
auuuucugacauaaacuugaucuguguggcucaaggcuucagugugacaaaacaauaaagcacuuuuuuuuccguuuaaauuauacuugagccuuggucuggcuacucuucuuauaaauguaaguuugau

SEQ ID NO: 4136022 - RNA, 70 nt, Human
auuuucugucaaacucacaggccgaguaguguaauugaaagaaugcuaggccaggagucagacagauuau

SEQ ID NO: 4136023 - RNA, 129 nt, Human
auuuucugucucuauggauuugccuauuugggacauuucauauaaauggaauuaugcaauauauggucuuuuguuauuccauuauuucacuuaggauaauguuuccaagguuuacccauguugcagcau

SEQ ID NO: 4136024 - RNA, 89 nt, Human
auuuugcagagaugaacugugccaguuuaaaccuugugaauacaguuaaugcuauauuuauauuaguaaaugcacaguauuuacaaagu

SEQ ID NO: 4136025 - RNA, 90 nt, Human
auuuugcauauuuugcaucuuucuuagaacuuucagugcauccagguuuuauugcauugauccuaaagagaggaaagaaguaugcagggu

SEQ ID NO: 4136026 - RNA, 61 nt, Human
auuuugcuucucauuucucugugcaaaaccuacuaagaugcacaauagauuugagcaaagu

SEQ ID NO: 4136027 - RNA, 76 nt, Human
auuuugcuuuagucuauugauuuggauuuuucccccuacccugggaguaaucaauuuuucgguggaugggcagaau

SEQ ID NO: 4136028 - RNA, 64 nt, Human
auuuuggggagacauggccagcugacuucacaauuacuuagucugcuccaggcucucccaaagu

SEQ ID NO: 4136029 - RNA, 61 nt, Human
auuuugguagugggagguugaggauuuucauaucugauugcuucuauuacuacuuugagau

SEQ ID NO: 4136030 - RNA, 64 nt, Human
auuuuuaagcuuccaauuucuccaagagaguuguuuagcucuguugucuguggaagcaaaaaau

SEQ ID NO: 4136031 - RNA, 71 nt, Human
auuuuuaugacaaaccauccucccacauccaacccuuuaucuggguguaaagaagggauugugguaaagau

SEQ ID NO: 4136032 - RNA, 80 nt, Human
auuuuucaaaaugaaauaauuuaugacauucaaguggccuaauggcacacuugaagugaauugcucaccuuuuggaagau

SEQ ID NO: 4136033 - RNA, 77 nt, Human
auuuuugcugugucagucuaagaaugguguuucuuaaaugcaaaggagaaaucauuuuaggcuugauguaagaaaau

SEQ ID NO: 4136034 - RNA, 98 nt, Human
auuuuuggauugugucccugcaauuugaucauaagguccucaagaucaugaaaguuuuugagaaggugacaaauucuacaaggaccacucaggaagau

SEQ ID NO: 4136035 - RNA, 79 nt, Human
auuuuuggguugcuagaaggagucuccaaaggauuugcugagaaggccucugggucuccucugacaucaacuuaaaaau

SEQ ID NO: 4136036 - RNA, 129 nt, Human
auuuuugguguaucugagaugcuaauggccuuucauuuucaaguuuuuauuucccaguuggcaguaccacuuuuacacuuugaagauggaaacuuggcaggaaaauuguaugucaggguguauuucugu

SEQ ID NO: 4136037 - RNA, 92 nt, Human
auuuuuguguggagacaaggucucacuauguggcccaggcuggucucgaacuccugggcucaagugauccuccugccucggccuccaggagu

SEQ ID NO: 4136038 - RNA, 62 nt, Human
auuuuuuaccuguggcuccccagacaagcaucugauuuaagggacuuacauagguaaggggu

SEQ ID NO: 4136039 - RNA, 80 nt, Human
caaaaaauucgauugaugugcugcugacuucuguuugguuuagcagauguuuguugagcagcuguuuguugaauugguug

SEQ ID NO: 4136040 - RNA, 80 nt, Human
caaaaagaucugaaagacgcuauuuugaggggucuauuucuagaaugggacaccucagauagugucuugugaucauuuug

SEQ ID NO: 4136041 - RNA, 61 nt, Human
caaaaaguauuggccaugguugaagaccuucauuacauuucaggagugccaguaccuuuug

SEQ ID NO: 4136042 - RNA, 69 nt, Human
caaaaagugucugcaaaaugaaagagccacugugacaagguggcucugucauuuugcagacacuuuuug

SEQ ID NO: 4136043 - RNA, 84 nt, Human
caaaaaguucauucuuugaguuugauuucuguuauuuuauaauauaucagaaauagucacauuggaggaaaucagaacuguuug

SEQ ID NO: 4136044 - RNA, 111 nt, Human
caaaaauaacaguuguuauaauuauacaaaaaggcaugcagcuccaugugcuucuagaaguuucuuuguuuugcaggucuauuuaaaugauugaaucacuuuauauuuuug

SEQ ID NO: 4136045 - RNA, 55 nt, Human
augagccuucucuugucaggaagacagcuaaguuugcccuggcacacuggcucau

SEQ ID NO: 4136046 - RNA, 94 nt, Human
augagccuuuuggggaaggauaaaaaccacuucuaaucugacaaguauaaggcugaaguagcauugaugauuuuucucuuccccaaguccucau

SEQ ID NO: 4136047 - RNA, 128 nt, Human
augagcucugggguguucuguaauggaaagagauggaaggcaauggcaagagaaagcaccuacucugugcuacuuuuacauaugcuauuguauuuaauccucaaaacaagccaaagauguggguacau

SEQ ID NO: 4136048 - RNA, 97 nt, Human
augaggaaaagagaaaggacuugggaaagaaguuucaccgauacugguuuaugguucuugagacauuguuuuccaaguuguuuauauacaguuucau

SEQ ID NO: 4136049 - RNA, 79 nt, Human
augaggaagauaucaggagagaaagaauacaauuaguuugcuaauguguaaaagguuuucuucaggaauucuuacucau

SEQ ID NO: 4136050 - RNA, 86 nt, Human
augaggccucccaucuauccuuaucugucugguugagucauucugggcugacugggcaccaucaugagaugggcaggaggucucau

SEQ ID NO: 4136051 - RNA, 61 nt, Human
augaggccuuucuucacccuuucuugguggcuugccuugaggguguuaggagaugguccau

SEQ ID NO: 4136052 - RNA, 82 nt, Human
augagggacaggccacagcucacguuccccauuuuccagaccaggaaaacugggacgcucggcugaguuccugguccagcau

SEQ ID NO: 4136053 - RNA, 56 nt, Human
augaggucauccuggaguaaggugggcucuuauuccaguaugucugguguccuuau

SEQ ID NO: 4136054 - RNA, 76 nt, Human
augaguaaaaaacuagaagccaacauuccaaguagaauggccuggguucugucuuguguugagcauucuggcucau

SEQ ID NO: 4136055 - RNA, 94 nt, Human
augaguacugagcacagagcuuuggguuccagccacuucuguuauguagacaaguggcaucaaaucaagguuuggcaucauuucuagugcucau

SEQ ID NO: 4136056 - RNA, 60 nt, Human
augaguccacauuauuauaugucugugacugaaauuacagaauucuaguauguggcuuau

SEQ ID NO: 4136057 - RNA, 79 nt, Human
augaguucagacuacaggaguaaaauaauuucaauuuguuuugaaaagugcuuuauuuccugucuaaauguugaaccau

SEQ ID NO: 4136058 - RNA, 55 nt, Human
augaguugaagcuacaagaggcacaagacagaaagugccuaugucuucaaaucau

SEQ ID NO: 4136059 - RNA, 76 nt, Human
augaguugacagacucaccucacuugcugaaggacuagcccagcagguucuacgggugagaucacugcuagcucau

SEQ ID NO: 4136060 - RNA, 67 nt, Human
augaguuggcaaguguuccuuccucuucuguuuuuuggaagacuucaugaagaauuuguuaauuuau

SEQ ID NO: 4136061 - RNA, 58 nt, Human
augauaagaacacaguauggggagcaaggcaaucuguuuccuuuccugcucuuauuau

SEQ ID NO: 4136062 - RNA, 66 nt, Human
augauacucuaggugauuuacaguuuaguuucauauuaucugcuacaaauacgcugggagugucau

SEQ ID NO: 4136063 - RNA, 72 nt, Human
augauaucugccaggccauuuuguuacuugugguauuuuagguaucuucugguuaguggucuguuauaucau

SEQ ID NO: 4136064 - RNA, 74 nt, Human
augauaugggaaaauuuugucucugaacagcuuacuaaauaguuuuagagccucuuuagggacuucccugugau

SEQ ID NO: 4136065 - RNA, 57 nt, Human
augaucauggaagugcacccauugggguuauauaaggguugugugcuucaugaucau

SEQ ID NO: 4136066 - RNA, 65 nt, Human
augaucucuuuugauucuguucucuucauuuuacagaggagacaauggaggccaaaagaagugau

SEQ ID NO: 4136067 - RNA, 77 nt, Human
augaucugucugccuuucugcugcugcuuuuccaacacccuccucaccuggaagcugggcaguuaaggcacagucau

SEQ ID NO: 4136068 - RNA, 88 nt, Human
augaugacaaagcccuuuccauuuaaaaaucacaguucaucaacaucaucgaaucaauggcuggaaaugaauggagagguggucucau

SEQ ID NO: 4136069 - RNA, 84 nt, Human
augaugaguuaacacauaguuggaguaaaaugacugcaguggagugcuggagcaggcuugucccagcuuuugagaacugauuau

SEQ ID NO: 4136070 - RNA, 91 nt, Human
augaugccaggacugcagcuucagggacuuguggcagaugcacagggugccucuggcucccuggagcuccacacugcagucccagcucugu

SEQ ID NO: 4136071 - RNA, 55 nt, Human
augauggagguguccuggauuugaaagaucucaguuucugggaugauuuucacau

SEQ ID NO: 4136072 - RNA, 97 nt, Human
augaugugugaugcuaccuggaugaaagccaggcucauauggaugaaugaaauauucaaaaugauauccugacuuuuauuaaaguaaaauauguugu

SEQ ID NO: 4136073 - RNA, 92 nt, Human
augauuccuuuguucuuuacaugcugucuauaagggcaaucauuuuuaaaagcuuuuauuggauagcuugugcagaaucacgcccuaauuau

SEQ ID NO: 4136074 - RNA, 104 nt, Human
augauugaguuuguacugugugccaggcacuugcccaggcuugaaggaaagagugauguuugagacaggguacgggcuaggcacaaaacaagcugguugguuau

SEQ ID NO: 4136075 - RNA, 101 nt, Human
augauuggcaaaauaauuagucuagucaugcuucaaagaauguuaguuuagcuaugggguuuucuaauacuuugaaugagagcuaaaaaugucaaauucau

SEQ ID NO: 4136076 - RNA, 101 nt, Human
augauuggcugauuauauuaauguaguuuuaguggauucuuagauuuugcugguuaaagcccucuguaaaucuacuaagagcucauauaagugccaauugu

SEQ ID NO: 4136077 - RNA, 61 nt, Human
augauuuaaagucauugugaacauccauuuagacagguauguucagagauuauugagucau

SEQ ID NO: 4136078 - RNA, 57 nt, Human
augauuugaggggaaauacugcauagagugggauccuacaacugcccccucaaacau

SEQ ID NO: 4136079 - RNA, 80 nt, Human
augauuuguugccccauuuaaguaaugauaaacugaaauaaaaucagugauuaaaauugaaguggggaagaaaaauucau

SEQ ID NO: 4136080 - RNA, 61 nt, Human
augauuuuuaguacauucuugggggauggcauaagucuucuaggucuugauugaaugucau

SEQ ID NO: 4136081 - RNA, 55 nt, Human
augcaaaaugcaucccagaauuggagagaaacaacauguggguuuuauuuugcau

SEQ ID NO: 4136082 - RNA, 92 nt, Human
augcacacaauuuaauacaccugcucaccugauguggcaacucagccugugcuugcuguggguugccacaggaugagacauggucugugcau

SEQ ID NO: 4136083 - RNA, 58 nt, Human
augcacacugggauucaacuggucuacacagagauagcagagggaucccaggugacgu

SEQ ID NO: 4136084 - RNA, 62 nt, Human
augcaccaggacuuaacacauucccauuaaagaaguguggacuugcuguccuggacuuguau

SEQ ID NO: 4136085 - RNA, 66 nt, Human
augcacgccccacacuggugugccucaccugccuuuauacagccaggcuucagugugugugugugu

SEQ ID NO: 4136086 - RNA, 99 nt, Human
augcacuucaccauaaaaccuaagaucugguaugugacagcuggcuguagcugcagucccaugagcccagaacauucuauguuuguggugugugugugu

SEQ ID NO: 4136087 - RNA, 66 nt, Human
augcagaagcagaggagccuaugaguagaaaugacacuacucagaagcaagcuucuacuucugcau

SEQ ID NO: 4136088 - RNA, 56 nt, Human
augcagaaugaguucacgaucuccuagagguggaauauuguucuuucguuuugcau

SEQ ID NO: 4136089 - RNA, 111 nt, Human
augcagaguuaaaguuagaggagauugcuguuugugauaaugacauuuccuucacuucuguugaaagcuauucaacacgaacaugugacucuuuuacuaauuguaaugcau

SEQ ID NO: 4136090 - RNA, 56 nt, Human
augcaggagcccucuugagggccauuaugacuggccacucuugggguuuccuggau

SEQ ID NO: 4136091 - RNA, 88 nt, Human
augcaggcaauaagcguauauuuucaaauguguccauauccucaaguaggauucacaugugggaaauggugcuuauaugccagugcau

SEQ ID NO: 4136092 - RNA, 74 nt, Human
augcaggccugguggugcuauuccuucucucuuguucacggcucaaggccaggggcuggcgccuccuucugcau

SEQ ID NO: 4136093 - RNA, 58 nt, Human
augcagucuugcaggaacugaaggauguuugauguagcuacaggaaucaagacugcau

SEQ ID NO: 4136094 - RNA, 62 nt, Human
augcaguuccacaggcgcaugggccacguuuccagugcuugguggccauguggggcugacgu

SEQ ID NO: 4136095 - RNA, 77 nt, Human
augcauagugcaguggacugaguuaauacuuggguucuauuucuacucugcuuuugaccuagucauugaucaugcau

SEQ ID NO: 4136096 - RNA, 62 nt, Human
augcauauuucaugaaucuuugagguauucuugccauuugaggaauuccugaaaugagucau

SEQ ID NO: 4136097 - RNA, 103 nt, Human
augcaucaggguuagcuguaugagaaguaugagaaaaucugcuuauauuauuuuuggcuacagacagguguuuccaauuucucauguuuagucuuaaaugcau

SEQ ID NO: 4136098 - RNA, 59 nt, Human
caaggcuaagcuuuggcuuucuuugggauguaccuuaacgagguaaucaauuggucuug

SEQ ID NO: 4136099 - RNA, 60 nt, Human
caaggcuuaucagccaggagccaaguacagggaaggguauuuccuggcuggaggacuuug

SEQ ID NO: 4136100 - RNA, 70 nt, Human
caaggcuucacguccccagugcccccaccuuuaccagauggggaccugagcuggggaugucacagucuug

SEQ ID NO: 4136101 - RNA, 63 nt, Human
caaggcuuugugggcugcaggcagaaacuuggacuuuuucccugagagcacuggggagccaug

SEQ ID NO: 4136102 - RNA, 63 nt, Human
caagggaagaggacagggaccugccagcaucaccagucgccacuccuuuccuccuucuaaaug

SEQ ID NO: 4136103 - RNA, 59 nt, Human
caagggcaagguauuuggaacuggaccagucaagcucaaaauuucagcacuagcccuug

SEQ ID NO: 4136104 - RNA, 77 nt, Human
caagggcacuugggacuuaacaauccagucccacguguggggcuucuuuguaacgugccagccaacagugcuccuug

SEQ ID NO: 4136105 - RNA, 96 nt, Human
caagggcaggucacugcaggcugcucaagacuuagugaggagaccagccagugcucacuaaggacuguggcgccugccguuugugccugucccuug

SEQ ID NO: 4136106 - RNA, 56 nt, Human
caagggcuaugcauuugugcacuuucagaaccagagugcugcagacagggccauug

SEQ ID NO: 4136107 - RNA, 96 nt, Human
caaggguagaacgcacacugagaugguuucucugaacucuacgacccugagauuaagguuuggggaaagaaggcgucuuaaauguuauuacuuuug

SEQ ID NO: 4136108 - RNA, 86 nt, Human
caagguacaaaggaggugcauagaacauccccgaauucuuagaaagaaaagcuccacguguuuuugccuuccccuuuuguucuuug

SEQ ID NO: 4136109 - RNA, 98 nt, Human
caaggucaagaggaggagguggagggaaagccucucgacuuucuuuuggggaaggcuucccuguaccuaacagcaaaaauccuucaaaaugacuauug

SEQ ID NO: 4136110 - RNA, 76 nt, Human
caagguguauauucugccuaaaagcuuuuccgcacucuuuacacuuaaaaggcuuuucuccagaauguacucuuug

SEQ ID NO: 4136111 - RNA, 58 nt, Human
caagguuuacauugggcuaucaggaguggcuucauggguagcugagaaguaaauguug

SEQ ID NO: 4136112 - RNA, 62 nt, Human
caagguuucuaugcucaaaggaccacauggcccaauguuccugcugaggcaugaggccauug

SEQ ID NO: 4136113 - RNA, 111 nt, Human
caaguagcugggaccacaggcauguggugucucucgcuuucuuaaaaggauagcauacccuuuuacacaaaagauagcacaccauaugcacuguucuauaccuugcuuuug

SEQ ID NO: 4136114 - RNA, 91 nt, Human
caaguaucaaaauguuaaaaugcugugcuauaucucugaguguauaauggaaacaacauucagcaaauauauauagauguucuacugcuug

SEQ ID NO: 4136115 - RNA, 81 nt, Human
caaguauuauggcucuauuuccuugucuagauacugauauaacuguaauuguggauggguugaaaugugagccaaugcuug

SEQ ID NO: 4136116 - RNA, 61 nt, Human
caaguauuuccugauggccuguuuugugcaaggugauguaacagguauucgggaggauuug

SEQ ID NO: 4136117 - RNA, 61 nt, Human
caagucagucaaaauauaaauuguuagccuuauuugccagguacaaaauuugacugauuug

SEQ ID NO: 4136118 - RNA, 65 nt, Human
caaguccuaaauguauuuguugcugaaacauguucucuuuguaucaagugcauuaaugggaguug

SEQ ID NO: 4136119 - RNA, 58 nt, Human
caaguccuuagaugguucuuugguuuggguggucagagaaagcuucucuaaggaugug

SEQ ID NO: 4136120 - RNA, 77 nt, Human
caagugcauucagguaguugacagaacuuaguuccugcagcuguaggucuagggaccucagcuccuggaggcaccug

SEQ ID NO: 4136121 - RNA, 82 nt, Human
caagugcucacauaaacucucuguaccaauauacuauauguaauauuguguguacaaguaguuaguaucuaaggagcauaug

SEQ ID NO: 4136122 - RNA, 61 nt, Human
caaguggggccuggugguacagucaagugagaguaagccauggcuggccacgccccaguug

SEQ ID NO: 4136123 - RNA, 67 nt, Human
caaguggguggguccgcuugguuccgguggcuuugugccugccagagaaaaguggaucuugaauuug

SEQ ID NO: 4136124 - RNA, 72 nt, Human
caaguguacuauauauucuauuguaccucuccuuaaaagcucagcaaaggagagagaaagaauaaacacuug

SEQ ID NO: 4136125 - RNA, 115 nt, Human
caaguguauugugccuuguucuagaacuuuuauuaaguagguacacuugacaguauugaggucauuugucauggugcuauuuaauuagucuagguuuaggcccuuguacuuauug

SEQ ID NO: 4136126 - RNA, 55 nt, Human
caaguguccaugauagucuuagacuaaguuuucugugcuauaugcuggacauaug

SEQ ID NO: 4136127 - RNA, 59 nt, Human
caaguuaugugcuggagcccagagucagugugaaagggacuccauaagcacauggauug

SEQ ID NO: 4136128 - RNA, 104 nt, Human
caaguucacaugcauccuuaauucuccacucuagaauuucaaauggaaguuuuaaacaauguuuuggcuucuugugaaaucugagaauccaguguauguccuug

SEQ ID NO: 4136129 - RNA, 66 nt, Human
caaguucugcagagauuuuuaugcacaccaauuuauugguaggcuuggaaaacuuugcuaaaaaug

SEQ ID NO: 4136130 - RNA, 80 nt, Human
caaguuggagucgauucaagguauugguucuuggucagucugcugaauucaaaacacuauuaccuuuaaucagcaacuug

SEQ ID NO: 4136131 - RNA, 62 nt, Human
caaguuuaaagugagguuugaacuugaaacacaagagcuucaaaccuucacuugcagaguug

SEQ ID NO: 4136132 - RNA, 104 nt, Human
caaguuugaccucccggucccugugccauucucccugcacuuugcgguuagccaggucaggcuggcucgggaagcaggggaucugggaaggaggcacuaacuug

SEQ ID NO: 4136133 - RNA, 122 nt, Human
caaguuuuuuuagcagaggagugacacguucagauuugcauucuagaaaaauuucuguggucuuagcaggagaaagguuuuagaagcagauggaucaguuaaaagauugcuauagaaauuug

SEQ ID NO: 4136134 - RNA, 106 nt, Human
caauagaagaaaccuugcaauuugggccuuggugccauggccaguuaccauguaagauguuguaacaccgugagaccaccagaucauaaggaaauauaaguuguug

SEQ ID NO: 4136135 - RNA, 74 nt, Human
caauagcagaccuagaaagcaaccaucuuucuucucuccuaaggauuccuggugcuuaucugucccugcaguug

SEQ ID NO: 4136136 - RNA, 64 nt, Human
caauauauucaguggaaaauguguugaagagaggauguaguucuucaaaaacacugaauauaug

SEQ ID NO: 4136137 - RNA, 55 nt, Human
caauaucuuuggcauuucuggugucaagaccuagccagagcuguuauggaugaug

SEQ ID NO: 4136138 - RNA, 75 nt, Human
caauauuucucucagacauggaagagagaguugaccauaaaauuuggugguccuuuuauuuuggagaaauaggug

SEQ ID NO: 4136139 - RNA, 72 nt, Human
caaucauucaagggagauaugaucguggcugagaccagguugagucacaguucugcugucugagagagauug

SEQ ID NO: 4136140 - RNA, 82 nt, Human
caauccaaguaaugauuguugccuggcuuugaccuucagcacaaccccuggaggcaguuuaggcagcgauuuaucaccauug

SEQ ID NO: 4136141 - RNA, 73 nt, Human
caauccauugcugcuucuugcaugaagucugacacauaugucuuauugcucagcacaagcagcagaaggaaug

SEQ ID NO: 4136142 - RNA, 65 nt, Human
caaucugccugugauuuuucucuaguagucuaaacacgagcauggagaaggccacaggugguuug

SEQ ID NO: 4136143 - RNA, 85 nt, Human
auggcauauuagcaaaaaugacaccagcagaggccugaaaagcauuuucauauuuucugcuugcucacucuugcuccuuugccau

SEQ ID NO: 4136144 - RNA, 79 nt, Human
auggcaucucguccacacuuaaguuuucaauacccuaaaaaauuuaucgaagggagauuuuaguuuggggaggugcugu

SEQ ID NO: 4136145 - RNA, 66 nt, Human
auggcauuuauguugacaauggacuccuacacagaggaugaucauggucuaggacauaauagucau

SEQ ID NO: 4136146 - RNA, 57 nt, Human
auggcauuuguacaauuuaggaauaaggucuuaaccaaaagcuauugugcaugccau

SEQ ID NO: 4136147 - RNA, 73 nt, Human
auggcccugccaggcagagugcuccagaaagcaaagucuuuuucuucauuuggagaacugugcuuugggcuau

SEQ ID NO: 4136148 - RNA, 58 nt, Human
auggcuacagauuugcugacaaucucugggccuauggagagaagccccuguuagccau

SEQ ID NO: 4136149 - RNA, 95 nt, Human
auggcuagcagcaaaacaauguuccuauauuagagacacauacaucuauaaauuucuaugcaggaaguaaugucauauaugcugcuauaacccau

SEQ ID NO: 4136150 - RNA, 77 nt, Human
auggcucaguggccaauuuccaucuguaaggcuucaaaccauuagguccaaagauggcugaauuaggccuguaccau

SEQ ID NO: 4136151 - RNA, 126 nt, Human
auggcucuggagaagacaagaggauagacaguuguaggggagaggagucacugauguguggugggaacauuccucucucuggcuuucucccccagcuucucucaucuuguccagcucuuggaacau

SEQ ID NO: 4136152 - RNA, 61 nt, Human
auggcuggucucccauggaaaacugaccuuuuccauuuucaguaacuccaagaccagcugu

SEQ ID NO: 4136153 - RNA, 88 nt, Human
auggcuucugcaccucuuaauaacuuucuaaagucaaauugguauaagagcaguuguaucuggaaaggguuagggggaaaaaggcuau

SEQ ID NO: 4136154 - RNA, 86 nt, Human
augggaacacauaacauugucaguucaacugcuuuaggaaguaauuuacugaucuuuagcaaagcugaagguguuauuuauuuuau

SEQ ID NO: 4136155 - RNA, 72 nt, Human
augggaaggugauuuuccaaaagcucaccuuuuuaaaggcaauuuuuaaaaggaaauccucacuuucuccau

SEQ ID NO: 4136156 - RNA, 55 nt, Human
augggaggcagacacuaaguucuggggucuccaguuuuaguggguggccacugau

SEQ ID NO: 4136157 - RNA, 101 nt, Human
augggagguaauaaauggaaaugcuguuauaagguacuugugugcuauucauaaagugguauaguauuauuugaaagagaauuuggauuaguuauaaacgu

SEQ ID NO: 4136158 - RNA, 84 nt, Human
augggauuguaacuagaagaaugcaccaagaaaucuuuugagacaccgcuuaucuuguaugucuucaucugguugugauuacau

SEQ ID NO: 4136159 - RNA, 82 nt, Human
augggccacagugaaguuuaaaguguagauguuuuccaauuauucagggcauuuaugcuaauuguacugacaaagagucuau

SEQ ID NO: 4136160 - RNA, 55 nt, Human
augggcccugugugcacguguguacgccugcacguguguuggucagggggcccgu

SEQ ID NO: 4136161 - RNA, 71 nt, Human
augggcccuuguaacgggcugacccaagugcccaggggcuagcugcccugggccagcucggaaggucccau

SEQ ID NO: 4136162 - RNA, 58 nt, Human
auggggaguuccaggcucugaugugagaucuaacucccagagcugggaagcucccuau

SEQ ID NO: 4136163 - RNA, 127 nt, Human
auggggcagguuaggugaauuuguggucccucuccuguuucugcuccacucucuccaggaugguggucuguccaggaguggggcagaggucucaggaacaaugcagauaccucuccccuagccccau

SEQ ID NO: 4136164 - RNA, 113 nt, Human
auggguaacaaaaugauuuguuucucuccaucucucucugcucccugguggagcuucuauaaaagauaggcuucagaggagaagaggguggaaaaagucuccagauaucccau

SEQ ID NO: 4136165 - RNA, 103 nt, Human
auggguaaccguggauggcacauuuuucugauuugacuugaaguauccauaacuaugauggacuuugccugacucagaaaucagcugccuuucagucucccau

SEQ ID NO: 4136166 - RNA, 75 nt, Human
auggguccaggaaucaaaagauggaaguaggaauagccccuuucaacuugaagaauugauacuuccugucccuau

SEQ ID NO: 4136167 - RNA, 91 nt, Human
auggguggaaggaagagaguguuuguuuccguggcugucucccugcaagggggcccagaggaggcaaagcucuguuaguugucccauccau

SEQ ID NO: 4136168 - RNA, 78 nt, Human
auggguggccaaugugagcugucaucuaggaccucagauaaggccuguggccagaacagccuauaguggccuuuccau

SEQ ID NO: 4136169 - RNA, 56 nt, Human
auggguggucugcuggaggcugugagagaauucucucuccugcagaccagaccugu

SEQ ID NO: 4136170 - RNA, 102 nt, Human
auggguucuggggcuuggggugguggaggagaggcgccuugcggaaagcccucuucaggcacucgaaggccucuugcuccucgacuccccaguagaacuggu

SEQ ID NO: 4136171 - RNA, 74 nt, Human
augguaccuacugaugugagaaugaaaugaaauaauauauguaaaacauuuagagauuggcacagaggugcuau

SEQ ID NO: 4136172 - RNA, 56 nt, Human
augguacuacauaaauauucaaguaggcagcuauuuggaaauacgaguaguaucau

SEQ ID NO: 4136173 - RNA, 77 nt, Human
augguagcugcagggaugaacaucuggccuccucaacgaacugcuugaggccagaugucaugucuuaugcuucucau

SEQ ID NO: 4136174 - RNA, 70 nt, Human
augguaugguccuuuucuugaagaaggccagagucauaucugcaauaaucagaacaggacuggcugccau

SEQ ID NO: 4136175 - RNA, 62 nt, Human
auggucaguugcagcuaauguugaugagagauuaaggaagauggaguuguagcagugacuau

SEQ ID NO: 4136176 - RNA, 57 nt, Human
auggucauaauccuugauucaaauaauucuaauuaaaggaaauaaggauaugauugu

SEQ ID NO: 4136177 - RNA, 59 nt, Human
augguccaaggaaaauggucguguaucuucugucaccaucaggaacguucauggacugu

SEQ ID NO: 4136178 - RNA, 69 nt, Human
auggucccaggaagacaacugggggcaagcuaucauggaaaagcuccaccuguuuucaagugggauuau

SEQ ID NO: 4136179 - RNA, 56 nt, Human
auggugagacaggaucaaccccucuaucuccaaauauagggggauuaucuuaccau

SEQ ID NO: 4136180 - RNA, 83 nt, Human
auggugagugauguuuauaucuaacuuaagugacaccagucuaaguuauacuugauuagaguuuuaugaauaagaaccaucau

SEQ ID NO: 4136181 - RNA, 60 nt, Human
auggugggauauucaugcaaugauguggucugcaucagugaaagugaauguucuagccau

SEQ ID NO: 4136182 - RNA, 75 nt, Human
augguggguacaguuuacaugagaggaagccuggcuuuacacaccuguuuccucuuucuaagcucuggccccuau

SEQ ID NO: 4136183 - RNA, 79 nt, Human
auggugucuuuugacagacaaauguuuuuaacuuugauuaaauccaacguauuaauuuuuguuuggcaguuuacgcuau

SEQ ID NO: 4136184 - RNA, 55 nt, Human
augguuggugccucuagagguagccauuaagcauaugguccuuggcaucagcugu

SEQ ID NO: 4136185 - RNA, 75 nt, Human
augguuuacugaucuuuuuggucaucaagaucaggaguuuaaaagaugguggucagggugaggaguggaauccau

SEQ ID NO: 4136186 - RNA, 87 nt, Human
augguuucaauuccugaugaugcaaagaaguuauuuggacuuuugaguaaaaauguguaugauaccuuugcugaggaauguagcuau

SEQ ID NO: 4136187 - RNA, 61 nt, Human
augguuugcagagacauuuccauuucaggcacuccucuaaaggcuuguuauugcauuucau

SEQ ID NO: 4136188 - RNA, 81 nt, Human
augguuuuauuguuuucauuucuuugaguuggauuugcugcucucuuaucuugauuauugaaauggaagcuauaacauugu

SEQ ID NO: 4136189 - RNA, 66 nt, Human
auguaaaguaucugaaaugcugccugacacauaguuagcacacaguaaaugcagauauagauacau

SEQ ID NO: 4136190 - RNA, 127 nt, Human
auguaacacuuauucuccuacagaaguaguguuuguggaauauucuuuaagaaacguuguucuagagaggucuuuuaaucuauucccuaaacaccuaaagucuuauuagcuuuuuacuguguugcau

SEQ ID NO: 4136191 - RNA, 65 nt, Human
auguaacaugcuugcuuugggcuuauguuguaaaagaauugcuaagaacagacaagcauuuacau

SEQ ID NO: 4136192 - RNA, 110 nt, Human
auguaacugaaguuaaucuuucauaagcucuugaaauuaugaaucuuguuuagagaaaaacuauaguuucaugagcuuuuuaaagcaggauauuguuauuuuaguuauau

SEQ ID NO: 4136193 - RNA, 71 nt, Human
auguaagaggacauucuggacaaggcaagcuccuggcauuugacagaugcuaaugcugcuucuuuuugcau

SEQ ID NO: 4136194 - RNA, 63 nt, Human
auguaagaugcucuauucuggacaaauauagacaauuucuuccugaggaauggcaucucacau

SEQ ID NO: 4136195 - RNA, 69 nt, Human
auguaagccgcgucuuuguuccacaguccuugcucugcugcauucuguggccagagcgccguugaccau

SEQ ID NO: 4136196 - RNA, 86 nt, Human
auguaauaagugaacuuuucuucuuguaaauauggucuuucuuuagagaucuuugaacaaucuggaaaaguuaacuauugugacgu

SEQ ID NO: 4136197 - RNA, 92 nt, Human
auguaauagguuaaaguauugguucauuuguucuucccucuucugaaagaaaaaguucaaaaauguaaucaguguuuaucuaguaguuacgu

SEQ ID NO: 4136198 - RNA, 73 nt, Human
auguaaucacuuccuguguuuaaacugucugugaauagaucauguauuuagcuuugcaaaggaaguuuuacau

SEQ ID NO: 4136199 - RNA, 111 nt, Human
auguaaucuuacuuuaggagaaacugcuucuaauuuuaggcauuuguucauagcaggugcuacaugaaccaaugccaaauuagcauuguuuuuaggguaauaaaucuacau

SEQ ID NO: 4136200 - RNA, 129 nt, Human
auguaauuccugucuucagagagcuugcagacugauggggaggugcaaucugaauguaaugcaguuuauguuuacauaguagcugcccuguauuaggccuugagcuaagcacauuuaugcagguuaucu

SEQ ID NO: 4136201 - RNA, 62 nt, Human
auguacaccaggugaagaugaauaugccaaccaaucacaguacaucuccacuggggguacau

SEQ ID NO: 4136202 - RNA, 68 nt, Human
auguacacguguccucacacguagggaguaauuuuuuuaaauucucucaaaaguagaggacaugacau

SEQ ID NO: 4136203 - RNA, 63 nt, Human
auguacccagugauuccuucuucaccacugauuggugagaaacacaggcaugaauaggugcau

SEQ ID NO: 4136204 - RNA, 58 nt, Human
auguagaaaguuauugucacugaucuggcaugucagagccugcaauagcuuucuucau

SEQ ID NO: 4136205 - RNA, 114 nt, Human
auguagaaauaagcauuguuaauauuauguuguauuuccuugcagucuuuguucuaaaugcucauaguugcacagaaugacaauauguacauguuuuuaauguuguauuuauau

SEQ ID NO: 4136206 - RNA, 129 nt, Human
auguaguaaaaaucauuuguauucucugauuauauaugucagauuccuaaauaucuugaucauguuauuuugcuaaagauauucugaugguggaucuguauaugauuuacauaaaugaggcauuugcau

SEQ ID NO: 4136207 - RNA, 80 nt, Human
auguaguaaagccaagauucuaauucaagauugucaccaaaauccauccaccaaucuagaagucauggcuuucuuuacau

SEQ ID NO: 4136208 - RNA, 56 nt, Human
auguaguaagugcgcaauaaauacugccaguaguaguauuugaugucuuuuuacau

SEQ ID NO: 4136209 - RNA, 68 nt, Human
auguauaaauuccuccucugcgccacccacuauucuagguacagggguaacaguggggaauaaaacau

SEQ ID NO: 4136210 - RNA, 76 nt, Human
auccuuggcuuuaagaagacugacagcucagcucaaacuccaguuggcguuagagaagcuuuuuaguuagcagggu

SEQ ID NO: 4136211 - RNA, 84 nt, Human
auccuuucaaucagcguuuaaagauagcuaauaagcaaacaauucuguuuucuuuaguuuugcuuuuaaugaaggacaagggau

SEQ ID NO: 4136212 - RNA, 78 nt, Human
auccuuugcaauagcaguuaaaaaucagcccuggagacauugagggcuguuugguaaaugcauguucguuuuuaggau

SEQ ID NO: 4136213 - RNA, 63 nt, Human
aucgagcuacucgcuaggaggagcagacugugaaguugcagcccugcagggugagugggcgau

SEQ ID NO: 4136214 - RNA, 68 nt, Human
aucgagcuguguuuccagaugguagcuuccaugccaucuuggcugcauaccaugaagcacaccuggau

SEQ ID NO: 4136215 - RNA, 74 nt, Human
aucgagggacauuaaucauuucugcauuaucucacucaccaguagaauauguaaaugugauuccugucaaugau

SEQ ID NO: 4136216 - RNA, 63 nt, Human
aucgcagaguggaaauugaugagcucuugucucuugaggcaugcaaauucuuuacucugugau

SEQ ID NO: 4136217 - RNA, 56 nt, Human
aucgggcauguccaugcuuucaucaaugaaaugggagcagaggggacauguuugau

SEQ ID NO: 4136218 - RNA, 94 nt, Human
aucgggugccugaaccgaucuuggucaaggcuuggagauaguagcaacucuguuucuucuuccugccuuagacuuggcucuccaugcaccugau

SEQ ID NO: 4136219 - RNA, 63 nt, Human
aucgguggguuuucacauuugggucuggacuguuuguucagcuucagugucaggcccguggau

SEQ ID NO: 4136220 - RNA, 63 nt, Human
aucuaaacuguuuacucucugccuccucagggagguuuuaugagaaguuagcucuguuuaggu

SEQ ID NO: 4136221 - RNA, 118 nt, Human
aucuaaauaaguuuaugucuuguagggaaggcacuuugucaugcuucuuuguaccuaagcauaugcuuugcaaaucauaaacaauaguguugauuuuauuugauauaaaaacuuggau

SEQ ID NO: 4136222 - RNA, 74 nt, Human
aucuaaugaugugaacaagcagcuuuuaaagucuuugcagggacugggcuuauuucuugugaacauugugagau

SEQ ID NO: 4136223 - RNA, 83 nt, Human
aucuacuuaaagaugucaaggcuguuucugcuuuauucugcaagagacaauuuuugguuuugcaaguucuaguaugggugggu

SEQ ID NO: 4136224 - RNA, 76 nt, Human
aucuagaugaaaaguaaaaggguuaauuaucuauacauaaagacaauugacuguauuuuuagcuuguguucuagau

SEQ ID NO: 4136225 - RNA, 79 nt, Human
aucuagauuggcaggaguauuacauuuucagacugaauauuuucauggaaagccaguguuccaucagccauuuuaagau

SEQ ID NO: 4136226 - RNA, 70 nt, Human
aucuagcuccuaugcaccuucagucucaaagaaaacugaugagcauccugcaagguacaagaugcuggau

SEQ ID NO: 4136227 - RNA, 71 nt, Human
aucuaguuuauuuugugucuuuuaugaggaaaagaaacauuacuuuucuggaauauuugacacaauuaggu

SEQ ID NO: 4136228 - RNA, 86 nt, Human
aucuaugaaaacacaauugucuugaaagcaacacuuuccuuuauaggaaccagguuuuauuuugugauaaaaauggauuuauggau

SEQ ID NO: 4136229 - RNA, 81 nt, Human
aucuauggccaauuuagucacucaagcagugcucaaaaucucuggguuagggcugcaaugggagauaacuugccauaagau

SEQ ID NO: 4136230 - RNA, 62 nt, Human
aucuaugucagacgcugugcuagucaguagcacaagacugaacaacacaugucuacauggau

SEQ ID NO: 4136231 - RNA, 99 nt, Human
aucuauugcguuuauauggcagccugagcagaggaauguaagcauguauaccgcugucuccauacugugcugagagcuccaugagagcagugaucagau

SEQ ID NO: 4136232 - RNA, 66 nt, Human
aucuauuguggugguuguggugauggucuagagcucugaauacacuaaaaaucacuuuaaaugggu

SEQ ID NO: 4136233 - RNA, 88 nt, Human
aucuauuuaggaaacauucgcaguguacaucagaacauaucaauagcaccuuuggugagugcuauguaccacauguucagagguugau

SEQ ID NO: 4136234 - RNA, 122 nt, Human
aucucacacccaaacucuuuagcuaacuuucucuacuccuucauauuuuaauugaaggcuucccugaucaagugauacuuuaggaagaucugaaggaagaaauaguuaacaguuugggagau

SEQ ID NO: 4136235 - RNA, 62 nt, Human
aucucagccuggauucgugcauccacauguugaaugagaugagagaaagucaaggugaagau

SEQ ID NO: 4136236 - RNA, 56 nt, Human
aucucagcuuuguggaaauggcugauggagucuucacccagaugagcagcugagau

SEQ ID NO: 4136237 - RNA, 84 nt, Human
aucucagggcugagaauuuagagacauagcucagaagguaauucaauaugugauugucucuaaauaggagucuuaccuagaggu

SEQ ID NO: 4136238 - RNA, 127 nt, Human
aucucagucaaauuguucccucucuuaucauucuauuuucauuuuuauuagcucuuguuuauacucaaaagaugggguuauaaaggugauaauggucagaucuagaagugaacucucuuacugcaau

SEQ ID NO: 4136239 - RNA, 77 nt, Human
aucuccagguccuggucuugagucuuaaccaccgcuucaguggcuugagccaaccaccaggaacacagucuggggau

SEQ ID NO: 4136240 - RNA, 77 nt, Human
aucucuagcuagaauauugaucugaaauuuguuuaaucagagggaauauauuuacagaagcauguaauagcuaaggu

SEQ ID NO: 4136241 - RNA, 128 nt, Human
aucucuaugccucaguuuggguauagccaaagaggauauuuugagaaauccuaugaauacucauaauuauguuuggugagauuuuucaaaauaccuuaauucugacucuuuaggaggcucagagagau

SEQ ID NO: 4136242 - RNA, 66 nt, Human
aucucucugcccaggggcuguggaugucauccauccuggccuaacuagccuacugagcugagagau

SEQ ID NO: 4136243 - RNA, 129 nt, Human
aucucugaaggaagguggaucuucuugaguccaggcuuggguucucugaguuauucuccugucucuugguuucaugggucagaggaccucguggccaaaggucugacaaggucauuuucuuuuucuuuu

SEQ ID NO: 4136244 - RNA, 62 nt, Human
aucucuggcaaugcagcaucgucugcccugcuuggcucucacauugguguugcugccuggau

SEQ ID NO: 4136245 - RNA, 78 nt, Human
aucucuuaagucuuauuuggucagccaggaaaacauaugagguaauauggcuuggacuaaauggaccguauaauagau

SEQ ID NO: 4136246 - RNA, 59 nt, Human
aucucuucugaaaccugucuuuagaauaaggaaucuagggcaagcaagcagaaagaggu

SEQ ID NO: 4136247 - RNA, 79 nt, Human
aucucuuucagauaagcagcgugguuuggugcagacacaaacaguagcacugaaucacaugcugcucuuuugaagagau

SEQ ID NO: 4136248 - RNA, 72 nt, Human
aucucuuucaggcccauauuuuucaaauccaucauuauucaauugaagauuuugauguuccugaggagaggu

SEQ ID NO: 4136249 - RNA, 57 nt, Human
aucugaaagaugagugguccauuaucaguugagaaugggucaaagaauauuucagau

SEQ ID NO: 4136250 - RNA, 58 nt, Human
aucugaaguccuuauaaucugauuuucacuauauuagauuuguguaggggcuacagau

SEQ ID NO: 4136251 - RNA, 101 nt, Human
aucugacuacagccuguguuacccuuaucagaacuuucuaacagcuccucuucuccgcucaggagaugagggguagaaaggacuuaggcuaaguggcaggu

SEQ ID NO: 4136252 - RNA, 58 nt, Human
aucugacuuuugcaccugugaaaauaaccacagcaccucgcaggucauuaggcuaggu

SEQ ID NO: 4136253 - RNA, 86 nt, Human
aucugagcuccauguucuauucauugcuccacgagguaacacaugauuuucuacuguacugggcacugaaaagaaggcugccaggu

SEQ ID NO: 4136254 - RNA, 57 nt, Human
aucugcaggugggugucucagagaagaaagccaucucucugugcauugccugcuggu

SEQ ID NO: 4136255 - RNA, 126 nt, Human
aucugcaucaucagcaucacauaggcgcuugcuagaaaugcaaauucucucucgcucuagaggcuugugguagggucuagaauuuguauuucuaguaagcucccagaugaugcugauucugcuggu

SEQ ID NO: 4136256 - RNA, 60 nt, Human
aucugccuggccugcaagcuaaaaaucuaagauugcuuggaugacugacaggcuggagau

SEQ ID NO: 4136257 - RNA, 79 nt, Human
aucugcugcuccugagguuggagauccaucaaguugaucuuaccuuuuguugcgauuuucuccucuggauguuuuagau

SEQ ID NO: 4136258 - RNA, 128 nt, Human
aucugcuuuucauguaacccauguccuuugugucugagcaagcaaaaugggagauucccugaauacaugggcccucuguacauuuuguuuugaugcuucucaaggaaaggguuuccauugggguggau

SEQ ID NO: 4136259 - RNA, 62 nt, Human
aucuggaggcauuacucugucuugcuacauagccuuucaggacuuucuaaugcucuguagau

SEQ ID NO: 4136260 - RNA, 130 nt, Human
aucuggcaguagggucaggugucuaaggcacaacauuuaaggaggcacugacucacaaugucuuauucucagugcacucgcucucagugccuccuuaaauuuugccuccuaaaagcccugcuugccucau

SEQ ID NO: 4136261 - RNA, 127 nt, Human
aucuggguggaggcagggagguggauagagugagugaguuucuccuguagucuggaggaaauccccagggcaggagaaagacucaccauacucacuuuucuauucuaaccuugaaaaucucccagau

SEQ ID NO: 4136262 - RNA, 128 nt, Human
aucugguacuuaauaguaauuggcauuauaagagucuguauauaacaaauauccauccaaacaacugcgguauucaguuagccacagcuauucuugcaugcuuagucuucauuguuaacuguucguau

SEQ ID NO: 4136263 - RNA, 61 nt, Human
aucugguccauugugcgcccgugaaccugcuaaugauuacauguguacacuuggccauggu

SEQ ID NO: 4136264 - RNA, 58 nt, Human
aucugguguagccuccuuugcuggcaguaaaccagcaaagcaguggcuaagcugagau

SEQ ID NO: 4136265 - RNA, 95 nt, Human
aucugguucggauuuugaucuguacuuagaauuaaauauuuuugguuaguauugaaaugguaguucccugaguauuuacagucaagauuccagau

SEQ ID NO: 4136266 - RNA, 88 nt, Human
aucuguaauauccauacuuuuagugauguuaagguuauguucauauguaagaauaaugauuucuaagaaccagugaggauauuuaggu

SEQ ID NO: 4136267 - RNA, 56 nt, Human
aucuguaauuuugaaugcaaauauaguaauuauauuugcauggccggauuauggau

SEQ ID NO: 4136268 - RNA, 73 nt, Human
aucuguagagaagaagaguauuuguaguagauacuguugccugcauauuauuaugguugcucuuuucccagau

SEQ ID NO: 4136269 - RNA, 125 nt, Human
aucuguagaugcagagagacuggagaccagaagacaaagacagccucaugugcaugaacuuagccaaguugcacacuggcuugcugacuaaucugucuuaucuccuuaucucugugaaugcagau

SEQ ID NO: 4136270 - RNA, 82 nt, Human
aucugucagauuuuuuaugaccuaaaacuauucuauggcauacaguaaugguuuauaaucuaggugugaagcccugcuagau

SEQ ID NO: 4136271 - RNA, 81 nt, Human
aucuguccaacagugucugaaauaacaccggauggccggcaaaaggguauccauugucacaggcguauugguaccgcaggu

SEQ ID NO: 4136272 - RNA, 62 nt, Human
aucuguggcgcaaacaaaggcucuacuuuauuuggaggcugaccuuuuugcuguuacaagau

SEQ ID NO: 4136273 - RNA, 57 nt, Human
aucuguucuugugucaguaauuguuaucuccuuaaggagaacugaguaagaacaggu

SEQ ID NO: 4136274 - RNA, 87 nt, Human
aucuuaacuguacuuagugauuggaaggugcuuaaggugaaaggcuauguugacacuaagauuuccaaacaucuaguauauuuagau

SEQ ID NO: 4136275 - RNA, 89 nt, Human
auguaauaauuguugcagacucaagaaaauaaauggauuagucauaaaauccccugccauuugugcacuucuguagcugccuauuacau

SEQ ID NO: 4136276 - RNA, 72 nt, Human
auguacauauagccuggugagacgguugacaggagcaaccugcccacgucauguuucauuugugcuguacau

SEQ ID NO: 4136277 - RNA, 106 nt, Human
auguacugucguguuacugagcucgguggaaggugcuagaacaaggacugcucuccagggcucucuguguuucucaccuuaccucgaggucaugccugcaguuugu

SEQ ID NO: 4136278 - RNA, 86 nt, Human
auguagacuccuuuuucaggcaugcauucugcagguuagaauuugucucuccuaaccacauugugguugugucccuggaacuacau

SEQ ID NO: 4136279 - RNA, 82 nt, Human
auguaggauguaagaauuuuauguauuuacugauuaauuuauacuucaugucaauacagaaaggauauuuugcaaccagcau

SEQ ID NO: 4136280 - RNA, 65 nt, Human
auguaugaguuucuucauucucuuguggugcccucuuucaguaacaaggagaagaaauuggucau

SEQ ID NO: 4136281 - RNA, 60 nt, Human
auguauguguacacaaguauauauacauguguauauauguauaugaguguauacuuacau

SEQ ID NO: 4136282 - RNA, 78 nt, Human
auguauuaugguguauauugcugggccaaaggcuauguaagucuucaacuucccuagaugucauaccaacucauacau

SEQ ID NO: 4136283 - RNA, 56 nt, Human
auguauuucuccaugacacucauaaaaacaagaaaugagguauuugggagauauau

SEQ ID NO: 4136284 - RNA, 71 nt, Human
augucaauguguacaggagcucagagacuauaauuauuagcuaugggcuaagaaccuggcauacaucacau

SEQ ID NO: 4136285 - RNA, 57 nt, Human
augucacauguuuaauguggacuugcuggaagucagggggucuuuagcgugugauau

SEQ ID NO: 4136286 - RNA, 79 nt, Human
augucacauuuucacaguauucaugaacauggaaugggagccuccaauuucuguaaucaagauauuugagaguugaugu

SEQ ID NO: 4136287 - RNA, 83 nt, Human
augucacugauaaucccacuagggagaaaaguccuuggucaacacuuugggguuuuuuucucccugguauuuacuuaguacau

SEQ ID NO: 4136288 - RNA, 90 nt, Human
augucacuguuuacccaaaagucacucaggagcaaguuuuuacuuuucauguaauugugugguuuugagagaucuuuuugguauugacau

SEQ ID NO: 4136289 - RNA, 56 nt, Human
augucagagcuuccacaauagucuguugucaauuuagaguauggguagcuuugcau

SEQ ID NO: 4136290 - RNA, 73 nt, Human
augucagccucugaggucacagauuucaagagaagcuuuagauauuuugccaucugacuucaugggcaggugu

SEQ ID NO: 4136291 - RNA, 66 nt, Human
augucaggccugcucaaacagauuccugggcccaagcccagagguuugaucgaguaggucugggau

SEQ ID NO: 4136292 - RNA, 76 nt, Human
augucagucuuugcuuaugacaauagaaaugaucaaaugaaccuguuuuuuauauuccuuuuggcagggacugcau

SEQ ID NO: 4136293 - RNA, 60 nt, Human
augucauuuuauuaauaauggagagagucugcauggucuaucuccagaugcagaugacau

SEQ ID NO: 4136294 - RNA, 62 nt, Human
auguccauuuuuauaagugaagcugaaagagguagagaaguuuuauuaacaacuguggacgu

SEQ ID NO: 4136295 - RNA, 85 nt, Human
auguccccuuagcuacacugaggcugcuuaauuuugauacagguuggacagaauuuaucuucagugaggaaaucugacaggacau

SEQ ID NO: 4136296 - RNA, 101 nt, Human
auguccuaugcaaguauacaccaaauguggcaggaaaguauuuuaaaauuuuauauauuuuacuuuugcagccauuauugcugcauuguuugcagaaacau

SEQ ID NO: 4136297 - RNA, 89 nt, Human
auguccuuaaguaccucuugaaagcuccauauuguagagaagacccuaugacuucuagauccgcagguuuucagugggguaggguacgu

SEQ ID NO: 4136298 - RNA, 74 nt, Human
augucggaggaugcacuuugucaguaaguuaggcauucagucuucacugucaacacaaaugcauucugugacau

SEQ ID NO: 4136299 - RNA, 97 nt, Human
augucuaaaauuugagaaguaugaaaacgugcaaaguagaauuaaccacuggccaugcccguucauucauacuuaaccucuauuaacauuuaggcau

SEQ ID NO: 4136300 - RNA, 85 nt, Human
augucuaagauacacaugcauuuggaguuuucaaguccuucagugaacaaauuggacuaaaggcucucagugacacaucagauau

SEQ ID NO: 4136301 - RNA, 77 nt, Human
augucuaauuacucaguggcacuuuggaauuuuuaugaguaaauagccaaugaagcaauugaaauuuaguuagauau

SEQ ID NO: 4136302 - RNA, 64 nt, Human
augucuagguaaucguugaggcccagcuccaccacggcgucuccucgaagcaaccugcaggcau

SEQ ID NO: 4136303 - RNA, 80 nt, Human
augucuauauugagcguauauguacacauauauuuaugcauauguggauguguguuuauacauauauucuauguauauau

SEQ ID NO: 4136304 - RNA, 69 nt, Human
augucuccaagcagcugaccuuuaaaggguccaauucuucuuuuaagaggaggcuguuugaagagaugu

SEQ ID NO: 4136305 - RNA, 70 nt, Human
augucugagacaaaugauuugcuaaaaauuugccauagcaauggcauauagaaacauauguuugagacau

SEQ ID NO: 4136306 - RNA, 63 nt, Human
augucuggagguguggggugucuaacuggaucagauuucuacaaccuggcuuccucuuggcau

SEQ ID NO: 4136307 - RNA, 57 nt, Human
augucuucauucuguauguccaguuguauaccaaaaacuggaagaagggaaggacau

SEQ ID NO: 4136308 - RNA, 56 nt, Human
augucuuugccauaguucauauugaauaaaacaguagauaaaagggcaaagggcau

SEQ ID NO: 4136309 - RNA, 70 nt, Human
augugaacauacauuuucauaucucuuaggaguagaauuacugggucauauggcuguuguguguuaacau

SEQ ID NO: 4136310 - RNA, 74 nt, Human
augugaacauucuucacaccuguuccuguucauagggcaaugggcuucgacauacgugaggaauacagucauau

SEQ ID NO: 4136311 - RNA, 103 nt, Human
augugaagaaaaagggacaggaaucagcauaucuugagcuucaugcccagccacgggcuagaaacauuacauguguuaauucaaguuccugcaaucaucauau

SEQ ID NO: 4136312 - RNA, 71 nt, Human
augugaaguaaugcauguauucauuguggaaugguuuggccauuccaaaaugugcauguguuucagaauau

SEQ ID NO: 4136313 - RNA, 59 nt, Human
augugacccacuggugugguguuagguuggacauaugacacucuuucugugggucacau

SEQ ID NO: 4136314 - RNA, 65 nt, Human
augugacccuuggucagagugcccuagagaagcuagagccaaacuguggcaaggccagucuucau

SEQ ID NO: 4136315 - RNA, 75 nt, Human
augugagggucauuuggaaguggaaucuugaaaguugacuggauaguccacucuugaugaucugugaauuuacau

SEQ ID NO: 4136316 - RNA, 81 nt, Human
augugaguauuccuucugccuccuucaugcugaauuccuuggaaauagaagaggaaaggggcauguagggaucacucagau

SEQ ID NO: 4136317 - RNA, 78 nt, Human
augugaucaaaaaccugaaggaugauacaacagugauaauuuguuucauucuugcaucauccuucuaggugauuccau

SEQ ID NO: 4136318 - RNA, 96 nt, Human
augugauuauuaacuucuugagacuauauuguuaguaauauuuugaaaguaauauuguuaguaauauuucgaaagaauaaagugccauaaagacau

SEQ ID NO: 4136319 - RNA, 75 nt, Human
augugauuguccuuuuccuuaucugugucuccaacuacuggacuauacacagugucagggcaggggccaguccau

SEQ ID NO: 4136320 - RNA, 81 nt, Human
augugcaaauggaggcaaaauugguuucuuucauaguaggggagagaagucgauugaaccuacuagacaaaauuugcaugu

SEQ ID NO: 4136321 - RNA, 90 nt, Human
augugcaaucaguaucaggagcugcauuauccugugcauggagcucagaacagaccacaagauuaugcagcucccuuuguuacuugucau

SEQ ID NO: 4136322 - RNA, 64 nt, Human
augugcacuguaauagcauuauaagugacucacuggagugcaauuaucaguauaguugccacau

SEQ ID NO: 4136323 - RNA, 64 nt, Human
augugcagguuuuacuugcagucaucuccuaauacagagaaaggacacacagagacaugcgcau

SEQ ID NO: 4136324 - RNA, 87 nt, Human
augugcauugauuaguauugcauuuuaauaugugcauugauuuuagugccuauucaauauaugcauuuacuauauaucgaugagcau

SEQ ID NO: 4136325 - RNA, 71 nt, Human
augugccuaagcucuguucauuaaucugugauaauuagacuuauuugcaaagguuaacagcaguggcacau

SEQ ID NO: 4136326 - RNA, 65 nt, Human
augugccuggcuuagagguugccuuucagguuuaccaggaggggcaguugaaaggcaagcaucgu

SEQ ID NO: 4136327 - RNA, 55 nt, Human
auguggcagaaagcauguggacagauaauaacuguuuguaugacuuuguauauau

SEQ ID NO: 4136328 - RNA, 61 nt, Human
auguggcagugggaggugaauuagaggguaaccaaguaauguuagcuuucuauggcugugu

SEQ ID NO: 4136329 - RNA, 88 nt, Human
auguggccuguggggcagaugucuggacaccucaugcuuuccuugccuuagcugaaagguuauuuaggucugcuuguucaggccacau

SEQ ID NO: 4136330 - RNA, 56 nt, Human
auguggcucagcaggcucccguuucacuuuuuugccaugggauuucugaggcacau

SEQ ID NO: 4136331 - RNA, 55 nt, Human
augugguaagggacuugugaaugcugaagaagcauuuauugaacacugacuaugu

SEQ ID NO: 4136332 - RNA, 130 nt, Human
augugguaggagcuggccuggggaugauuuaucaggcucucuucagugguccuccggcccaaauaggacccuucauagaggagaagcuguaggugccuuuugacccaggcuuggaaauagcccuuugcgu

SEQ ID NO: 4136333 - RNA, 86 nt, Human
auguggugauggugggaacagaauuagaguuuaauaaaguuuaucuaguuuaucugucauuucccauauccaaaacuucaccauau

SEQ ID NO: 4136334 - RNA, 57 nt, Human
augugugcaaugcuauuuuggcuuuuaaaauuaagucaggaaagaaaacguacauau

SEQ ID NO: 4136335 - RNA, 60 nt, Human
auguguggauauguguguguauauauuuguaccuauguauauguaugcguauacacacau

SEQ ID NO: 4136336 - RNA, 57 nt, Human
auguguguaugagucuguggagaccuggagauaggaagauacagauuauagauacau

SEQ ID NO: 4136337 - RNA, 84 nt, Human
augugugucagguuuuguggaagaagggaauuauuuauacuuauauuaaauaguuaggaaaguccagggagcuuggacaggcau

SEQ ID NO: 4136338 - RNA, 76 nt, Human
augugugugugugcgcguguauauauguauacaucuauguguguguauauguguauauauguguguguauauauau

SEQ ID NO: 4136339 - RNA, 123 nt, Human
auguguuaaaaauggcauuuguuaucaguccuccagguguuacauaugacucccagucacacuuagaugacaguauaugugaaagaugcuuaggagaggcaagagucugaaaggccaacauau

SEQ ID NO: 4136340 - RNA, 57 nt, Human
auguguuaguggaaaccaaaaugucuguggaccagcacagauucuccacuaacauau

SEQ ID NO: 4136341 - RNA, 104 nt, Human
auguguuggcaauagaaacagauuuaagaagccaaggugaagaauuuuaccaguuuuuaaauuguguuaguuuuagaucuuuuuccuuguuggguccuccauau

SEQ ID NO: 4136342 - RNA, 65 nt, Human
auguguuguauagaugagcuucuauacaugggaacagacaucuggcauuauuuguuacagcacau

SEQ ID NO: 4136343 - RNA, 63 nt, Human
auguguuucagaggguguagacuacaaaaugaaagagacuguagauuacaaaaugaaaugcau

SEQ ID NO: 4136344 - RNA, 129 nt, Human
auguauaaucauuugcuuccuguuccuugugguuuuaaaguuguuuuguauguuuaaauuugauuuuacucaaauuucagaacccaaauuagcgcaagaaucagacaaagcauaacuuucuauaaauau

SEQ ID NO: 4136345 - RNA, 88 nt, Human
auguauagguuggugcaaaaguaacugugguuuugccauuacauuccauggcaaaaaccgcaauaacuuuuguaccaaccaaguacau

SEQ ID NO: 4136346 - RNA, 68 nt, Human
auguauauuacaaguagacuaacuuucagguagauugguuccuggaggaauaucuguguaaauuacau

SEQ ID NO: 4136347 - RNA, 73 nt, Human
auguauauugauaaaaugcagacauguauuagguuuaaauaacuuugacaugucugcguuauaucaauaucau

SEQ ID NO: 4136348 - RNA, 74 nt, Human
auguauguagaauaaugcuggagauugaguguuguauacuuuugcauuuagaaccagcauuuguccuggaucau

SEQ ID NO: 4136349 - RNA, 58 nt, Human
auguauguaguguacauauacaguguguauaugcacacacauauguacacauauauau

SEQ ID NO: 4136350 - RNA, 57 nt, Human
auguauguguguguacuuaugucauuuaaauguuuguauauguguacguguauacau

SEQ ID NO: 4136351 - RNA, 63 nt, Human
auguauuauucagucuuguaaggaguuaagucucuuuguuuucacuccugcugagugaaacau

SEQ ID NO: 4136352 - RNA, 76 nt, Human
auguauuauugacaguagagcauuuguuuugaugaggcaucaaugacaguugaauucuacauuugacauuuuacau

SEQ ID NO: 4136353 - RNA, 79 nt, Human
auguauuuuguggcuugguugcucuugauucuaugcuauuaaugcuuugcaggcccaucaagucaucagcaaaauacau

SEQ ID NO: 4136354 - RNA, 95 nt, Human
augucaauuuucuaucauuaacucaacagacauuuuuaagcacuuacugagugucuuuggcuaagugcugugagagauaaaaauagaagauacau

SEQ ID NO: 4136355 - RNA, 69 nt, Human
augucacuccagggacacaggugcagcaaauuuauggaggaagcaccuuguguuucuccugagucacau

SEQ ID NO: 4136356 - RNA, 107 nt, Human
augucacuugcauuugagcaaagcccccuaucucuugucuguuuugcaaagccacugcuguguucuccuacagauaaggagggcagcuuaaguagucuguaaaacgu

SEQ ID NO: 4136357 - RNA, 65 nt, Human
augucacuuuacacuccuacuaaaucuuucucgggauccgggcuuugggggaggguggggugcau

SEQ ID NO: 4136358 - RNA, 129 nt, Human
augucaguagaguucauuugagccaaauuugaggacugcaagcugggaguaucuauuuaaguugcccggaauauacacuccuggguugcaguccucaaacuuggcccaaaauaaacucuauacuuauau

SEQ ID NO: 4136359 - RNA, 55 nt, Human
augucagugguagacccagagguugagaaaaggcuuccagaagacucauugacau

SEQ ID NO: 4136360 - RNA, 72 nt, Human
augucaugcuaguuaagaacacaauguauuuauagcucaauuauacauuuucugaugaauuuggcauggcau

SEQ ID NO: 4136361 - RNA, 86 nt, Human
augucauguucuguaaggagaacuacauuauuccuacaaggauucaaauuggaucccauguaggagaauguuacagaucagcacau

SEQ ID NO: 4136362 - RNA, 69 nt, Human
auguccauucucuuccuagugaugggcuuugcuacaggaggagggccaggauaggagugagauagacau

SEQ ID NO: 4136363 - RNA, 108 nt, Human
auguccuuuaagacuauccaagccuguuuagaaaauagugaagcaaguaucaacuacauugacuucugucacuuuguuuucugagaacuugauacacuuacuugacau

SEQ ID NO: 4136364 - RNA, 78 nt, Human
augucuauuagauacccaaguggaucugucuaauggguauuuagacagauccacuuggauaucugucucaauggacau

SEQ ID NO: 4136365 - RNA, 71 nt, Human
augucuccagucuguguccauaugcuucuggacaauuaacuuccaguuuaaggcaggacaugggaaugcau

SEQ ID NO: 4136366 - RNA, 105 nt, Human
augucugaauuuuuaccugucacuuuucucccuccugccuucaucuauaucuauaugaagaugaaggcaggaagggagaaaacuuuacaggaaauucauagauau

SEQ ID NO: 4136367 - RNA, 59 nt, Human
augucugcgaaggcaagggcauguauagcuugaaaaauauccuuugguuuccaugacau

SEQ ID NO: 4136368 - RNA, 70 nt, Human
augucugcuuuccuuuuaaucacaaucuaagaucaggucuucauuucacagugguagaggaaguugacau

SEQ ID NO: 4136369 - RNA, 69 nt, Human
augucuggaggaaaagguuaaaugaaauggccuuacuuugccaucccaggaaaucaauucuuccagcau

SEQ ID NO: 4136370 - RNA, 59 nt, Human
augucugugggggaguccuuugacugaauccuguggucagagaggcccccugcagagau

SEQ ID NO: 4136371 - RNA, 66 nt, Human
augucuguuaaucgacccuaauccaucaugcuguuaguaguuacugggaguccuguugacagauau

SEQ ID NO: 4136372 - RNA, 63 nt, Human
augucuuauuaagaccagugacucuugugacuaauucacaagucauguuuuuuggaaagauau

SEQ ID NO: 4136373 - RNA, 69 nt, Human
augucuugaaaugucucacuuagacuuucuuauguucagagaaauacagagagaacauuuccuagauau

SEQ ID NO: 4136374 - RNA, 77 nt, Human
augucuuuaugacuuauucagaaggagaaauggaacuaaagcucaguccucuaauucuugaaugagaagugaagcau

SEQ ID NO: 4136375 - RNA, 63 nt, Human
augucuuuauuaauaucaugccaagggaugacauuaugagccuugcagaauugauuaggacau

SEQ ID NO: 4136376 - RNA, 55 nt, Human
augucuuuggcuuugacauggccuuugaaaugaguccaugcgagguugaaggcau

SEQ ID NO: 4136377 - RNA, 57 nt, Human
augugacaugggucaucaaaagugucuguucagggacagcagauccaaaagucacau

SEQ ID NO: 4136378 - RNA, 71 nt, Human
augugacuguggguuucugguuccugacccauaaauggaaaaggcagggcugaaagcucucacagucucau

SEQ ID NO: 4136379 - RNA, 66 nt, Human
augugagcaaggccagggccgugaauuaaaugagagacccauggcugcuuucccuuagcaccacau

SEQ ID NO: 4136380 - RNA, 56 nt, Human
augugagcaucuuggcagauaugaacacacuguguucagauucaggguguuuacau

SEQ ID NO: 4136381 - RNA, 88 nt, Human
augugaugaaaagggucacagggaaaauagugcguccacauucaacaauucugauuucagcauucuuguuuuuccuacccucauacau

SEQ ID NO: 4136382 - RNA, 64 nt, Human
augugauuaggcuucaggaacuugagauggagagauaauccaggugaacccagucuaaucauau

SEQ ID NO: 4136383 - RNA, 82 nt, Human
augugauugacuaaaaucccaucggagaggaggauuguguuguagcaucccccucuuggauggcggcaagaugaaauuacau

SEQ ID NO: 4136384 - RNA, 83 nt, Human
augugauuuggggaguuucuguaauucccuguaacaauguuuucaucuguuaaaaguggaauaauaguugcuaccuuacacgu

SEQ ID NO: 4136385 - RNA, 63 nt, Human
augugcaguugaagcauggggagaaauauaggcucaugggucuuccugaacuaucaggcacau

SEQ ID NO: 4136386 - RNA, 57 nt, Human
augugccugcuaccugacuuguuucuaggcagauacgaguauauuguggagguucau

SEQ ID NO: 4136387 - RNA, 76 nt, Human
augugcuccauucauucaucucuaaaaugccugucaaucaaagucaggcaaauugugagaaaaugaaacuguaugu

SEQ ID NO: 4136388 - RNA, 62 nt, Human
augugcugaauccacucuuaggaaaaugacuggucuuuuuccuugcuguguauucagagcau

SEQ ID NO: 4136389 - RNA, 92 nt, Human
augugcuuucugcaugguuauauacuacuagugauuuuaucaaaacuucuaaaauuuaaauuacgugguaaaagaucuguaaaaggcugcau

SEQ ID NO: 4136390 - RNA, 72 nt, Human
auguggacaagauugcugcaaucaacaaguauggggcacacccaugcuggguagugcaggaauagaccauau

SEQ ID NO: 4136391 - RNA, 55 nt, Human
auguggacacugcuggacggucaaagaugcacuuuagaauguccaguguucauau

SEQ ID NO: 4136392 - RNA, 66 nt, Human
auguggauuauacuuacagaagcuguuuggaaaccuucuuagcaguuugaaaguaugaguccauau

SEQ ID NO: 4136393 - RNA, 62 nt, Human
auguggcuagugcaacugagaaacuaaaucuuuuauuuuagcuuaaauguaaauagccacau

SEQ ID NO: 4136394 - RNA, 63 nt, Human
augugggaauuuguaaguguucagcaugguggaagcauggaggucacagggcaggucucaugu

SEQ ID NO: 4136395 - RNA, 74 nt, Human
augugguagucuccagcauuccuuccaucccucacccauuguguaggauguggauuguaggaaacugaucucau

SEQ ID NO: 4136396 - RNA, 55 nt, Human
auguggugaaucuaugugugacuaauugaaguugcacacagugaucuauccacau

SEQ ID NO: 4136397 - RNA, 65 nt, Human
augugguugcuucaucuguaaauaaggauaaauuauuuccucauuuacaggugaagcaacuauau

SEQ ID NO: 4136398 - RNA, 59 nt, Human
auguguaaaaaaaugccuuugacaacaagcauagugggucaaagcacauauuugcacau

SEQ ID NO: 4136399 - RNA, 73 nt, Human
auguguaucuuuacuuagugacuuauggagucguaacuauuaggacacauacagcaguaagucuaaggcauau

SEQ ID NO: 4136400 - RNA, 55 nt, Human
auguguauugagcaccuacugcaugccagcccugugcugaggacucaauauacau

SEQ ID NO: 4136401 - RNA, 71 nt, Human
augugucuuacauaauuacaugugugaguugagagguccaggcuggagaugugaaugugagaccuaagcgu

SEQ ID NO: 4136402 - RNA, 112 nt, Human
augugugaguacauuuauaaauagcuuugacgugguuucaguuuucuguuuugacaacauagaaacagauugaaauucguaguauuuucuccuuccugcucccauuccacau

SEQ ID NO: 4136403 - RNA, 81 nt, Human
auguguguguguauauauguaaauaagucuaauguauacuuauaaucuauauauuuguauuucguguguguauauguauau

SEQ ID NO: 4136404 - RNA, 58 nt, Human
augugugugugugugcauguguguguguguacacacauauaugugcguguauauguau

SEQ ID NO: 4136405 - RNA, 65 nt, Human
auguguuaacauuuguaagauaagcauagcucagugagccaauauuuuccaaaugaugacuacau

SEQ ID NO: 4136406 - RNA, 88 nt, Human
auguguuaaggaaugcaaguuguaaauguagccagaagauccuaauucuucuagggcaucaugacaaauuacagaaauuuaacuucau

SEQ ID NO: 4136407 - RNA, 56 nt, Human
auguguuaauuggagcagcagggagaaggcucagcagcugcuuucaaaugacacgu

SEQ ID NO: 4136408 - RNA, 69 nt, Human
auguguuagauauauuuaugugggcuuucuugggcagaugucauuguguacaugaguguaugagcauau

SEQ ID NO: 4136409 - RNA, 76 nt, Human
auguguuaucuuauuaucacuuaugagcuuuuugcaugacaccaguagaguugaguagugguaacagagaccacau

SEQ ID NO: 4136410 - RNA, 68 nt, Human
auguuaagauucugaauauuaugguggccuaaaguaggcuucuugguacaccagauuauuuauaacau

SEQ ID NO: 4136411 - RNA, 81 nt, Human
auguuagcuauaagaagagcucuuaugacuuaaugggcaaccuugauccauauguguuacuucuccugguauagcucacau

SEQ ID NO: 4136412 - RNA, 67 nt, Human
auguuauguaugagggaaugauuaaauacaauaaugaaaguuugguuaggaaacuucuauaugacgu

SEQ ID NO: 4136413 - RNA, 90 nt, Human
auguuauuccuaccauuugguauagugaaaaggaacuuuucaggaguucucuuaaauacuucacaucuccaggcagugguacuuuaauau

SEQ ID NO: 4136414 - RNA, 127 nt, Human
auguucaauauaaaugagaucaacugaagaagcagaaaagggcacuuuuggcaccauccaacacgccuuaggaagugcugccuucucugccuacuuugggugaauauccagagauguuuuagaacgu

SEQ ID NO: 4136415 - RNA, 59 nt, Human
aucuuagaauauacacuacagcuuaauucauggaauauaagauguguauauauugggau

SEQ ID NO: 4136416 - RNA, 61 nt, Human
aucuuaggaguaccauggaugccuagaaucuugucaaaggcucuccaggggcucccaggau

SEQ ID NO: 4136417 - RNA, 117 nt, Human
aucuucaaggcagagcuggggaaaggguauuuuaucauuucugcaaacaacauagcauggcuccaguguugcaguaaaaauggagaggaauccaguagucuucggcaagguggagau

SEQ ID NO: 4136418 - RNA, 63 nt, Human
aucuucaauuagauuuaccaauuguuaguauuuugugacauuugcugaaaguuaguuggagau

SEQ ID NO: 4136419 - RNA, 68 nt, Human
aucuucacuguuaugaagcucugggaguuauuuaaaucucucagcaugcuuccucugacggugcuggu

SEQ ID NO: 4136420 - RNA, 96 nt, Human
aucuucaggccgacaaccucaucuuuggugagcugcgagugaggacugcggugcggcuccuuagccggagcagcucaucuaguaguuccugaaggu

SEQ ID NO: 4136421 - RNA, 81 nt, Human
aucuucaucccaauggaauguuggcagaagugauauacaccauuucuagaucaaacuuuuauauacaugggcaugugagau

SEQ ID NO: 4136422 - RNA, 90 nt, Human
aucuucauuuauguauauguuauuuauguuuguugugagaguugaugucuacagcuaggcaaaaaugacauuucaugcauuugugcugau

SEQ ID NO: 4136423 - RNA, 59 nt, Human
aucuucuaacgaaauaccucagacuuucacuugaaagauaaagaaguuuuguugaggau

SEQ ID NO: 4136424 - RNA, 86 nt, Human
aucuucugggaccaucugugucuacuuuuucaaaaagcagauugugugaaaugacagguggguaggacacagaagguaauagagau

SEQ ID NO: 4136425 - RNA, 82 nt, Human
aucuugacugagaauggcauaugauuuuguuuuaucuuauuuuagagagaaacauuuagauuauaugucuuuuaucuaugau

SEQ ID NO: 4136426 - RNA, 70 nt, Human
aucuugagaguuaauguaucuucuacauaauaggcauucagcuuacaugugauaaauugauuaaaaggau

SEQ ID NO: 4136427 - RNA, 75 nt, Human
aucuugggaccuuggaggucagcuggcccaccuuuaccugaggucuggcucuucuccacagaauucuugcaaggu

SEQ ID NO: 4136428 - RNA, 64 nt, Human
aucuuguucucccuuguucuuagaacaauauaugacaccuaagagcaaucaacagaggcaggau

SEQ ID NO: 4136429 - RNA, 63 nt, Human
aucuuuacaguguaagugcagacucuaaauaucacuaaagagaugaaaaugugcuguaaagau

SEQ ID NO: 4136430 - RNA, 67 nt, Human
aucuuuacuuucagugcugagccgugauuguucagggacggcuaaaccucagacugaaaguuuagau

SEQ ID NO: 4136431 - RNA, 70 nt, Human
aucuuuagccuggaagaaccugaagucuccacugcuucccaagagacucagauauuaaaggacuuaggau

SEQ ID NO: 4136432 - RNA, 66 nt, Human
aucuuuguugcucucauuucugcuucuguaguguuucuauucuucugaacugcagagagcaaagau

SEQ ID NO: 4136433 - RNA, 74 nt, Human
aucuuuucuauuauuaucuuugagugggacucauuauugucugagcuauuuauuaaaauggugaaggaaaagau

SEQ ID NO: 4136434 - RNA, 74 nt, Human
aucuuuucuuuuauuaucuuugaaugggacucauuauugucugagcuauuuauuaaaauggugaaggaaaagau

SEQ ID NO: 4136435 - RNA, 59 nt, Human
aucuuuuguuuauguagauuauauguauuaauauguaauuuagaaaugaacacaaggau

SEQ ID NO: 4136436 - RNA, 77 nt, Human
augaaaagauauuuuaucugccagaguggagacaugcuuugaaugucuguuauuucugccaggugaguuucuaucau

SEQ ID NO: 4136437 - RNA, 75 nt, Human
augaaaccucugaauacuguuggcagagcugugaauugggaagagucauuauggaaaacaguacagagguuccau

SEQ ID NO: 4136438 - RNA, 61 nt, Human
augaaaccuuugcagugaauccauaaauauuuguguguuuagguuagcuccaaagguucau

SEQ ID NO: 4136439 - RNA, 68 nt, Human
augaaagcaaggugagcccaucauuccuuaaaaguugaggccaugacuuaaucauacuugcauuuuau

SEQ ID NO: 4136440 - RNA, 69 nt, Human
augaaaguaccuguaauauguuguaguucuccaauacccuugagaugaacaugugagcagguuuuuuau

SEQ ID NO: 4136441 - RNA, 130 nt, Human
augaaauauuauugugauguucaauaauaguaccaugauguucaacaaguacauauuuaacgaauaacugcacuuguugaaugccaugacaguugugggcuauaauuaaaugagucucaaaauauuuugu

SEQ ID NO: 4136442 - RNA, 61 nt, Human
augaaaucauguaguuauugcaagauugcaauuugucuuugcauauauuucaugguuuugu

SEQ ID NO: 4136443 - RNA, 65 nt, Human
augaaaugcuguagagacuguauuugacacacaaagucugaaauauuuacucuuuggcucuucau

SEQ ID NO: 4136444 - RNA, 61 nt, Human
augaaauguuucugaguguauauacauacauauguauguguaugcaugugaaacugauuau

SEQ ID NO: 4136445 - RNA, 70 nt, Human
augaacagcauugaaauccagccacaggaauuuaacaucauaauccuauugcauauuuuagugcugucau

SEQ ID NO: 4136446 - RNA, 61 nt, Human
augaacugcuuagugauggaugacccugcaggucuauaggguuuucaaagaggcauuucau

SEQ ID NO: 4136447 - RNA, 110 nt, Human
augaacuucaaauaaauaaaaacuaugguauguacucuuuuaugucuggcuuaauuuguccaguauguuugggagacaugacccuuguguugugugugucaguaguucau

SEQ ID NO: 4136448 - RNA, 100 nt, Human
augaacuuugaagacauuaugguaagucaaauaagacugucauaagagacaaauguccuauggcugcacuuaucugaggcccuagagucaucaaauucau

SEQ ID NO: 4136449 - RNA, 82 nt, Human
augaagaaccacucuucuaggcgaucuucuauguuguucucauuauaaaacacaugaagauucaacuggaugugguuuucau

SEQ ID NO: 4136450 - RNA, 71 nt, Human
augaagauagauaggcagauggaaggacagacggauagauagagucaguguguaauucuuuguuucuucau

SEQ ID NO: 4136451 - RNA, 58 nt, Human
augaagcacauccuguugaaucagccuagaggagaagcagcaggaaugaugcuuucau

SEQ ID NO: 4136452 - RNA, 58 nt, Human
augaagcuaaacccugcagccacugcucaggaccugcuggcugcacuguggcuuucau

SEQ ID NO: 4136453 - RNA, 88 nt, Human
augaagcugcuuccaucagugaaauauuuaacguccaggucccugaggggccuaucugucaaauuucucuggccugagaacacuucau

SEQ ID NO: 4136454 - RNA, 85 nt, Human
augaaggcaccaacaauauuuaugacaggaaguagcauuuauuuuucaugcauuuucuuuuauauauguggcaaaucauuuucau

SEQ ID NO: 4136455 - RNA, 86 nt, Human
augaagggagacgcccacccccugcagcaugacacugccauccugcucaucagguacugcagcugcaggagggugggagccugcau

SEQ ID NO: 4136456 - RNA, 56 nt, Human
augaagggaugacugagacagcuguguuuauuggcugcccucagucuugucuuuau

SEQ ID NO: 4136457 - RNA, 78 nt, Human
augaagggauuuugaugcuaucuaaugaaugcuugcaauacauuuuauuuaguauaguauauaaaaauugccuuucau

SEQ ID NO: 4136458 - RNA, 104 nt, Human
augaagggcuaccauugcuugagugcucagagcucuggugcagguguuucuccuacagucuccacaacagcccugauaaguagguaguacuguuacccuauuau

SEQ ID NO: 4136459 - RNA, 74 nt, Human
augaaggucaguguaaguuauguagaugugcauaagauuuuauacauuuaaauaugccuuauauuuuacuucau

SEQ ID NO: 4136460 - RNA, 66 nt, Human
augaauagagaaagaugaagaguggcguuuacaugaagugacacuugaacguuuugucucuuuuau

SEQ ID NO: 4136461 - RNA, 84 nt, Human
augaaucauggcuggcaugugcauaacgggcuauuaagggaaauaggguuguucagaaugcauugcuagccuuguguguuucau

SEQ ID NO: 4136462 - RNA, 72 nt, Human
augaaugaaauacagaguacuucucucauaaaguaagcaccagagagcaaguauucaguuuguuucauucau

SEQ ID NO: 4136463 - RNA, 74 nt, Human
augaauggaugauugguuggauggauaagagaagaauguaaaauucuauuacuuaccacuaauucagaauucau

SEQ ID NO: 4136464 - RNA, 130 nt, Human
augaauggguggacucaguaaaguagauugcccuccccauugugaccucauccaaucuguugagggucuggauaaaacaaaaggugaaggaaggagggauuuacuuuuuuugcuuccugucugccugcau

SEQ ID NO: 4136465 - RNA, 64 nt, Human
augaauuagcaacaguuuuauaaagaaagagcuuucugagcuuuuagaaucuguucugauucau

SEQ ID NO: 4136466 - RNA, 87 nt, Human
augaauuauaggacaguuauggguuuuauuuaugcuauuguugcauacuugaguagggccuuuaaaauuuguaccugcuauccucau

SEQ ID NO: 4136467 - RNA, 81 nt, Human
augaauuggaacaugaagcaagaaagaugcuagacacuucugguacauucuacuuguuuuacaagaauugcuuacauucau

SEQ ID NO: 4136468 - RNA, 72 nt, Human
augacaaugugacagaccaaugauacaaugggaaaagccugaaacaguacguugaguuugauuaaaagucau

SEQ ID NO: 4136469 - RNA, 75 nt, Human
augacacauguuucaccaagguaaccuuugaucuguuuucuuaucuguuaaagucuacuuggugauucaguucau

SEQ ID NO: 4136470 - RNA, 57 nt, Human
augacacugagaauaacagguaugcugaguggcagcuuuaucuggggauagugucau

SEQ ID NO: 4136471 - RNA, 61 nt, Human
augacacuguccuaguaaggaaguggaacucaguaggggacacugcugcgacagcuguuau

SEQ ID NO: 4136472 - RNA, 57 nt, Human
augacagacccucuaaagacaaacccuccuguugagucguuagaguaguuugugcau

SEQ ID NO: 4136473 - RNA, 78 nt, Human
augacaggacuguggcaggcucagcacugcuggcauccaaccuucagagcagggcacuggcacucuucuuccuguuau

SEQ ID NO: 4136474 - RNA, 75 nt, Human
augacaggucaguaucuacuaucuugaugagguaauacagcacucacaaacugagaaaggucuugauuuguacau

SEQ ID NO: 4136475 - RNA, 55 nt, Human
augaccgcagccguaacagccugcauucagcaaaugcuggccaugugcugggcau

SEQ ID NO: 4136476 - RNA, 70 nt, Human
augaccuggacagccuccaucgccccgggggcucugacaugcucagaucccaggauggggcugcaguuau

SEQ ID NO: 4136477 - RNA, 71 nt, Human
augacuaauggguaucgguuuauuuuugggauaaugaaaauguccuggaauuagauggugaugaugguuau

SEQ ID NO: 4136478 - RNA, 84 nt, Human
augacugccucuuuuagagaugaaaauugguaaaacgaccuuuuugauccaaugucuccuagaagagaaucacuucuaagucau

SEQ ID NO: 4136479 - RNA, 90 nt, Human
augacugcuaaaaugguaugaaaagagauuucaacucccuauggcacugcuaauguaccugaaauuuuuaaagugcauuuuaguaguuau

SEQ ID NO: 4136480 - RNA, 128 nt, Human
augacuggcaucacuucugaguugccucugcaccuccagagcucugggcauagcugaagaguacaaacaucaacagucuuguccccaggcucuccagaggcagcaucugaaaagugugaucugguagu

SEQ ID NO: 4136481 - RNA, 56 nt, Human
augacuggcuuuaucccccuugaaaccaugaacacuucaaggguugggucugucau

SEQ ID NO: 4136482 - RNA, 58 nt, Human
augacuuauuacaagucauauuuuuacuaaugugugaaacuggcuugcaguuagucau

SEQ ID NO: 4136483 - RNA, 78 nt, Human
augagaaacgaggauguugaauaggugaaauacaaaaguaggccacauuuuugccauuucuuucaauauucuucuuau

SEQ ID NO: 4136484 - RNA, 65 nt, Human
caaugaacaguuacuuuguagaagaggcauuucuugcuugcuucuuugcagugacuuguucuuug

SEQ ID NO: 4136485 - RNA, 58 nt, Human
caaugacuuuacaguguucucagaaucaauuccugagagagcucacuauauagcauug

SEQ ID NO: 4136486 - RNA, 66 nt, Human
caaugaggaguccaggacucauucagcuuuccuaucauaagcaacaguccuugaaacucuuucuug

SEQ ID NO: 4136487 - RNA, 63 nt, Human
caaugaguucugacacuucacgagguagaauaaugaccuaagugaugauugggaugcucauug

SEQ ID NO: 4136488 - RNA, 130 nt, Human
caaugauaguucccacauagcccuggcaggucugaaccaguuaugccugccuacugaguuuuauauuucaugagucaugagccaugggcagguacugggggauguagcugguaaagugggacaugcauug

SEQ ID NO: 4136489 - RNA, 85 nt, Human
caaugaugcaauaugcaaacaaauacuuacugaaccugugcucuguuccaggcacggugcuaaguguuucauguugcuaucucug

SEQ ID NO: 4136490 - RNA, 57 nt, Human
caaugauggcuaggcagcugcuacauaagaaaguucugccccgaucugucaucauug

SEQ ID NO: 4136491 - RNA, 82 nt, Human
caaugcaagcccuucuauucagauuucucagcucuagggggcaaugguaagagcuggugagauguauggaggguugacuuug

SEQ ID NO: 4136492 - RNA, 129 nt, Human
caaugcacaaugguugaugaguuaguucuggaggcuucugaauuuuaaugaugcuggagaugauauuguguguccuucagcuuguuagagugacaccagcacuccauaaaucauaauaccuguguauug

SEQ ID NO: 4136493 - RNA, 80 nt, Human
caaugcccuaggcagcugcaaacuucgguccccuagagcuucucccuaggggcugcccacagcggguguuucgggaguug

SEQ ID NO: 4136494 - RNA, 69 nt, Human
caaugccucaguggcacuagccacuuccuugguccucaauggacacauguggccagugacuacuuauug

SEQ ID NO: 4136495 - RNA, 64 nt, Human
caauggaacacccuuuggaaaauggcaaagagaacgaugucuucacauaaacaaagggccauug

SEQ ID NO: 4136496 - RNA, 76 nt, Human
caauggagacaggacacaagcugcauaagggauaaaaacugcuucccuccuuuguucgggugugcugucaccauug

SEQ ID NO: 4136497 - RNA, 87 nt, Human
caauggagggaaauucccaggacucugggugucuuggaaguuuccaaggccugcaacugaucacagauccugguuuuccucccauug

SEQ ID NO: 4136498 - RNA, 69 nt, Human
caauggcuuauguaaugcuguuuacuuuuccugcuaugucuagcuuaaacaguauuucaaggaccauug

SEQ ID NO: 4136499 - RNA, 59 nt, Human
caaugggacaggcaugggacuuagagucagagacacugagcuccaagucuuuccuuaug

SEQ ID NO: 4136500 - RNA, 55 nt, Human
caauggucgcuauuuucucacagcagccaacuguggaaugaaaauggagaucuug

SEQ ID NO: 4136501 - RNA, 55 nt, Human
caauguacuacaaagauugucaaacccggguggagugugaucuuugaguauaaug

SEQ ID NO: 4136502 - RNA, 66 nt, Human
caaugugaacaugagcucuguguuuggcacauaguaagugcucaacauacauacauggucagguug

SEQ ID NO: 4136503 - RNA, 93 nt, Human
caauguugcuaggcuauuauuuugcuuaauguugauuuuaaagguaagcauuauaauuuaucuuuggauuuuuaucaggcaauggcaauuuug

SEQ ID NO: 4136504 - RNA, 85 nt, Human
caauuaauuuauuuuucaaguacagaaauacugggggguucuuacaaaggggauugucccauuucugucuaauuuaaguuuauug

SEQ ID NO: 4136505 - RNA, 125 nt, Human
caauuaguaucugggcaaaaauauuuuuaacuguauuuaggauaauuuccuuggaauauuauucccagaagugaaauuucuagaccaaaagguaugaaaguuuuugagguuccugauacaaauug

SEQ ID NO: 4136506 - RNA, 68 nt, Human
caauuaucacaggagauuaugugugcuaguguguuuacauggcaugcugucuucuccuggagcauuug

SEQ ID NO: 4136507 - RNA, 117 nt, Human
caauuaucuguauaaugaaagaagagaaacaagacugcauaggaccaaauaguaaaggcaaaagccauguauacuauguucuguagcagguuuuacuugugauuuuacaauuaauug

SEQ ID NO: 4136508 - RNA, 60 nt, Human
caauucaaaccagucugucucuucuugugcacaaggugacagacagaaggcuuugaauug

SEQ ID NO: 4136509 - RNA, 72 nt, Human
caauucagcaugguuaugugauuuuucugcagcauuggaaggcacagagggagaaaagaaucaguuggauug

SEQ ID NO: 4136510 - RNA, 99 nt, Human
caauuccuucaugcagauuacguaaucaggauguaugauuuuccaagcaguucaugaauccugaaaacuuacgaaguggguaugggaagaggggaguug

SEQ ID NO: 4136511 - RNA, 130 nt, Human
caauucucucuccuucauccucagauuuggcaguagaagcuuguuuuucagaacagggcuggaguggccucuuugaaacucugaacauguuucaacuguagaauagagccauaaugggugaucuuggaag

SEQ ID NO: 4136512 - RNA, 71 nt, Human
caauucuucuggucuggauugggcuugguaauuucaugcaucugcaucagcuucagaucagcuagagauug

SEQ ID NO: 4136513 - RNA, 130 nt, Human
caauugccuagcauugaaucugauauacaaacuuccuuggauacaaguaacuuuauaccuuggccugagaacgcugaaucaggcaaaaugaaaguuuuugaugcaggaaagauuuauacuuauguaauug

SEQ ID NO: 4136514 - RNA, 93 nt, Human
caauuuagagagaauagagcacacaguuguuaaggucacggugacagaaagaaaguguuucugaccugcaacaguuuacuuuucuccaaauug

SEQ ID NO: 4136515 - RNA, 55 nt, Human
caauuuauagauuggugccaaaguggcuuacauauugguaucaauuacuagauug

SEQ ID NO: 4136516 - RNA, 68 nt, Human
caauuucacuguggagcacauuuuccaacacuaaaaaugauggcaaauguguauacauaaugauuuug

SEQ ID NO: 4136517 - RNA, 59 nt, Human
caauuucagugcuguggagagggaagugcauucucaaaaagaccaacacauugagauug

SEQ ID NO: 4136518 - RNA, 59 nt, Human
caauuuccauagagcgucucacagaacuaguguuuuguggaauaaaauuuaggaaaaug

SEQ ID NO: 4136519 - RNA, 74 nt, Human
caauuuccuaaucugugaaauagguaugauaauuguagaagcuaccucauuagccuauuuugaagauugaguug

SEQ ID NO: 4136520 - RNA, 83 nt, Human
caauuuggcugccuuagcuuugcaaaucuaaaaccaacuggucacagaauuuaagauucaguaaggcaaacccaguuaaguug

SEQ ID NO: 4136521 - RNA, 74 nt, Human
caauuugguaugucaugaguuauuucauaggacaaaguuuguuaaaugaacacucacuggcagugucauuagug

SEQ ID NO: 4136522 - RNA, 62 nt, Human
caauuugugacuggguucgugccuucaggaauucucuguagggcauguaagucaccauauug

SEQ ID NO: 4136523 - RNA, 57 nt, Human
caauuuuaucaguaguuguucccuggcaccuuacugcuaaagcugcagaugaaguug

SEQ ID NO: 4136524 - RNA, 59 nt, Human
cacaaaaauauucuguaguauguuuuaguuaagaugacauagaacagaauauauuugug

SEQ ID NO: 4136525 - RNA, 69 nt, Human
cacaaaauuagccgggugugguggaacuccugaggucaggaguuccagaccagacuggccaacauggug

SEQ ID NO: 4136526 - RNA, 103 nt, Human
cacaaacccccgcagcccggccuggccagaggcgugccugugcaucccggcaagugagcgcccagggacucucggccagagaggcugugaggguggcuuugug

SEQ ID NO: 4136527 - RNA, 79 nt, Human
cacaaagacuccuguuuauuacacuggauagcagagacacucuucugcugucuuugaaaaaguaaacugucauguugug

SEQ ID NO: 4136528 - RNA, 74 nt, Human
cacaaagcccugcugacucauuuucaacacuucuccacaggacuagugcuaugcgucagcagacgcugccugug

SEQ ID NO: 4136529 - RNA, 73 nt, Human
cacaaaguagcaguaguuuuaugggcugguauuaacaccuauuaugaccagccaggcauugcaaacugaugug

SEQ ID NO: 4136530 - RNA, 93 nt, Human
cacaaagugaaguuugggcugaaaugcuguggacuagugcuuuauacuggguguacuggauaauuaccagcauucagcacacuucacuuugug

SEQ ID NO: 4136531 - RNA, 60 nt, Human
cacaaauccaauuuaauucuggcucaaaaaagcaauaaguguuuaaauuggauuucugug

SEQ ID NO: 4136532 - RNA, 58 nt, Human
cacaaaugugcagaaaugugagggaggauaugcucucgcacacuucggcauuuugaug

SEQ ID NO: 4136533 - RNA, 63 nt, Human
cacaacacacauuaauaucaaaggcucauuauagcagugacugugaaccugggugugugugug

SEQ ID NO: 4136534 - RNA, 84 nt, Human
cacaacugcaggggacacuguucacauuuuagucuaugcagccucugguggccaaagauuaaaugagaacaccuuugcugugug

SEQ ID NO: 4136535 - RNA, 80 nt, Human
cacaacuuguuuauccaugcucccguugauggauauccauguuacuccugucuucaacuauuaugaauaaaauuguugug

SEQ ID NO: 4136536 - RNA, 64 nt, Human
cacaagcugggcaaguguauauucaccuccauuucauaacagaauaaacaaaugcugagcugug

SEQ ID NO: 4136537 - RNA, 58 nt, Human
cacaaggacuggauggagugggcuuccccuguuuugcccuuccaccuucugccaugug

SEQ ID NO: 4136538 - RNA, 65 nt, Human
cacaaggccuuaucuccaaauacagucacauucugagguacucgggguuagggcuucaacuugug

SEQ ID NO: 4136539 - RNA, 63 nt, Human
cacaagguggcaggacugagggaaucucuaaggcaugucuuccaggcccugccacagcuugug

SEQ ID NO: 4136540 - RNA, 55 nt, Human
cacaagucuguggucuccaacauaaacuucaugcucugaggaaacaggcucugug

SEQ ID NO: 4136541 - RNA, 57 nt, Human
cacaaguuuuuacugcauuccucugaccucuucuggggugucaguaaauauuaugug

SEQ ID NO: 4136542 - RNA, 72 nt, Human
cacaauauuaaaaggaggacaugguuacagagaaguaaaugaguucuuagugauucucuuuugaauuuugug

SEQ ID NO: 4136543 - RNA, 77 nt, Human
cacaaucuauuuugcuuaaaguucuuucuggugugugagauauuauacuugaagaaaauaggacaagaaaaauugug

SEQ ID NO: 4136544 - RNA, 63 nt, Human
cacacaaacuacagugagaauugcuauaaaacuacaaugcauagcuagcuugucauuugugug

SEQ ID NO: 4136545 - RNA, 77 nt, Human
cacacacaggccuuaguaggugcucccuucccccaucaugcagccaucugccagggggcacuuucuucuugauggug

SEQ ID NO: 4136546 - RNA, 64 nt, Human
cacacaguaggcacucauuaauaaugguaauaucaacuaacauuuauugaauguuuaccgugug

SEQ ID NO: 4136547 - RNA, 56 nt, Human
cacacaguaguaugaggcaaaauaucugauuacagagucuaaaacugcuuugugug

SEQ ID NO: 4136548 - RNA, 56 nt, Human
cacacaguuuacagggauuugagcuuacuuaauuguagagcugguuaaacugugug

SEQ ID NO: 4136549 - RNA, 94 nt, Human
cacacauaugcucaucuaguuuucguuuuaagucauucuaaagaucaaaugucuuuacacuccuggaaaugauauuguguugugugugugugug

SEQ ID NO: 4136550 - RNA, 87 nt, Human
cacacaugaaugcaaaagacacacagugcuucaguuggcaugucuaguaacugauguaaugucuguguguaugcaugugcgugugug

SEQ ID NO: 4136551 - RNA, 82 nt, Human
cacaccuguagucacagcuacuugggagacugaggugggaggauugcuugagcccaggaguugguggcugcagagaggugug

SEQ ID NO: 4136552 - RNA, 70 nt, Human
cacaccuuuguauagugcugcuuuguaguaugugggcauacugcuuugaggggcucuguauauauuugug

SEQ ID NO: 4136553 - RNA, 71 nt, Human
auguucaccagucuuucuuaccauugugguaucuauagauagaguucaaagguaugagaaaggguguuuau

SEQ ID NO: 4136554 - RNA, 64 nt, Human
auguucagaauaaagguacaauugaguaagcagaugcagcuccgugguaccuuauuuauuacau

SEQ ID NO: 4136555 - RNA, 73 nt, Human
auguucauuaugacuagauuuagauguguauuuuguauaauguagaggcauaggacaucuaugucaugaacau

SEQ ID NO: 4136556 - RNA, 85 nt, Human
auguuccugggcugaagucaagugugggauauucugcuucuuauaaauaugugcccacauccacgaauuucaguuuaauaugcau

SEQ ID NO: 4136557 - RNA, 67 nt, Human
auguuccuuuucauagauuuggauaugugaauuaacauauauucacuccuggugagacuagcagcau

SEQ ID NO: 4136558 - RNA, 95 nt, Human
auguucugaaguacugaggguuagggcuucaacuuacgaauuuggugaguucacaguucagccuguaacacauuucuucaggauuuccagagcgu

SEQ ID NO: 4136559 - RNA, 69 nt, Human
auguucuuggauguuguguauaaguguguguuuuagaaaaacaaaguaauaauuuagcaucaagaacau

SEQ ID NO: 4136560 - RNA, 92 nt, Human
auguugaaugggauugaauucaggcuauagaccaauuugggaauaauguauuuaaauucuucaaaguaucgagucuuccaauccaugaacau

SEQ ID NO: 4136561 - RNA, 64 nt, Human
auguugccuccuuuuaaggaaaucauuuuuuucuaaugaaaugaucucucuugggaggcaauau

SEQ ID NO: 4136562 - RNA, 70 nt, Human
auguuggcauauauauuaugaggaaauacguugauagaaauucaagaaacccucaaauaagugccagcau

SEQ ID NO: 4136563 - RNA, 66 nt, Human
auguuggcucaggcugcuuucaugcuuagaaauugagauucucugugacugcagcuuugcaaacau

SEQ ID NO: 4136564 - RNA, 101 nt, Human
auguuggucaggcuggucucaaacuccugaccucgugauccgcccgcuuuggccucccaaagugcugggaacaggcaugagugaccacgcccggcugauau

SEQ ID NO: 4136565 - RNA, 77 nt, Human
auguuggugaaguuugauuguauggguuuuaauuuaauugaguugaauuuuuuauaucaagcauuccucaucaacau

SEQ ID NO: 4136566 - RNA, 87 nt, Human
auguugguggcuugccuucuuuuccuauagaaagaggaagacagagcucuuacuagggggaggcagagauggcacagcaagagacau

SEQ ID NO: 4136567 - RNA, 130 nt, Human
auguuguuugggucuauuaaaugugaugcagaaguaaaugugacuccaccugaguuguucucauugaaugugacacaggcucauccugaguguauuuauuucgaguaccaccaacugacagggaggaaau

SEQ ID NO: 4136568 - RNA, 71 nt, Human
auguuucaaaagucaggcuauucucagacaugcuauacgcaagagaauguguccagauuuuugauuugcau

SEQ ID NO: 4136569 - RNA, 71 nt, Human
auguuucaacuguugucauauggucuuaauuauguuaaauuagaggaucuggcugacaacacuagaaacau

SEQ ID NO: 4136570 - RNA, 71 nt, Human
auguuucaaugcacuuuagccuuagggauuuuugucaaacauggcaggaaggccaaauguguauaaaacau

SEQ ID NO: 4136571 - RNA, 100 nt, Human
auguuugaaggaaucaaaauuggaagaugaugagaagaaaguagaagacauuucuaugaaucaauuuuaacauccuuguugauucuguguuuucaaacau

SEQ ID NO: 4136572 - RNA, 79 nt, Human
auguuuguuauauuaguuagacuugcugugcagcaguaaaccaaauugccacauuucuaauuuaauguaacaaagacau

SEQ ID NO: 4136573 - RNA, 68 nt, Human
auguuuuauauuuuuugcauguccccuggggcuaggugccagagacaccccagaaaauaagagagcgu

SEQ ID NO: 4136574 - RNA, 58 nt, Human
auguuuucuuucagacuucccuuccacccugagaagggaagagcuugcaagaaaccau

SEQ ID NO: 4136575 - RNA, 85 nt, Human
auuaaaaaaagcacaguaaggaaugaaucaggcaaguccuccugcacaguugccuuauuuccuugcuguuguugagaaauuuaau

SEQ ID NO: 4136576 - RNA, 127 nt, Human
auuaaaaaauacuuucaugcauaaagagugguacaugaccacaaccugggaaagccguggaaagggcauaggcuuugaaauccacgucccaguucuggcuccaucucuuuuuuaauggaaggguaau

SEQ ID NO: 4136577 - RNA, 74 nt, Human
auuaaaaucugugccuggggaauaaucagaugcuuuaaaagcaauuuaauuguucuucuggcuauagagauaau

SEQ ID NO: 4136578 - RNA, 75 nt, Human
auuaaaugcuucaucauucuacugugcaaauuguuuucaagcugccuguaaaaugugugaugccagcaauuuggu

SEQ ID NO: 4136579 - RNA, 64 nt, Human
auuaacaaguguuuguguguguccugcagacccugcaaggagggauagaaaaauacuugugaau

SEQ ID NO: 4136580 - RNA, 76 nt, Human
auuaacagggugggaggaaaucagucucuucugguggaaacaaguuccuauuggucaccucccucagcucuuuaau

SEQ ID NO: 4136581 - RNA, 78 nt, Human
auuaacuuaaauacaccuuuuuuugcugcuauucguaauggauacaucaaggaugaugguguaaguauaagccuuaau

SEQ ID NO: 4136582 - RNA, 130 nt, Human
auuaauaauugcuagaggcucccugagcacauuaacaauuuccauguccaaaaauuaguuuuaaccuguaacaguacuuuuggauuugugaaagauugugugugguagaagcauugagguuuguuauuuu

SEQ ID NO: 4136583 - RNA, 59 nt, Human
auuaauauuugcaccuucugucuuuugucagcuggcagauuugggugaggguaguuaau

SEQ ID NO: 4136584 - RNA, 86 nt, Human
auuaaugcacagaucacagcauuuaaugcagugcuuccagcagagaugggcagcaucuuauuauguguaaugauaaagcauuuaau

SEQ ID NO: 4136585 - RNA, 84 nt, Human
auuacaagccuaugaaaauuucuguuuacucuaucuugaaaacuaagaguuuaaaacagcagaacauuuucagggcugugugau

SEQ ID NO: 4136586 - RNA, 113 nt, Human
auuacaagccugcugccugcagucauuugucuggcacagggaauaucaggauggauuagauauggucuugggcuuaggcagaguguugacugguggugcugcggguugcugau

SEQ ID NO: 4136587 - RNA, 71 nt, Human
auuacaguaggauuggaaaggaaaacuugaacgugcacugcaaguugauucuuugauuucuaaucugugau

SEQ ID NO: 4136588 - RNA, 92 nt, Human
auuaccugggaucuuguuuaaaugcagacguugauucaggaggucuggaguggcaccugagacucugcauuucuaauaacauuucaagugau

SEQ ID NO: 4136589 - RNA, 94 nt, Human
auuaccugggggauguuauuaaaguacagauucugauugaauaagguugaaacagagccugagagucugcauuucuaacaagcucccaggugau

SEQ ID NO: 4136590 - RNA, 75 nt, Human
auuaccuuccgaaggucggucuggaguugucgaagaauuaauuccagcugauugacuuucccggucaguggugau

SEQ ID NO: 4136591 - RNA, 76 nt, Human
auuacuagcaauuuccagagcuucagagaugaaagaugucaucaagacauguucugaggucugcaauucuaguagu

SEQ ID NO: 4136592 - RNA, 56 nt, Human
auuacugagaaagcugggucagaagcucccuucagccuggcuuggggcucaguggu

SEQ ID NO: 4136593 - RNA, 55 nt, Human
auuagaacaaagccaccaggugaaaggaacuauccaucccggacuuuguucuaau

SEQ ID NO: 4136594 - RNA, 76 nt, Human
auuagaaccauuguaauacuuguugcagggaaugccaaacaagcuuccuuuguuguacaauuauuuuggcgcuaau

SEQ ID NO: 4136595 - RNA, 130 nt, Human
auuagaaucauguggggagcuuaaaaauacagauuccugggcuccacuccaagagcacaggaaugaugauugcugggagaggaccuagagcucuguaccuuuaucgagucuuccccuuggugguucugau

SEQ ID NO: 4136596 - RNA, 98 nt, Human
auuagacucccacaggaggcuccuuggagcaugguccagcuaguuuaugucuugaaggggcagccaugcuccaggugcagucuugggagccaucugau

SEQ ID NO: 4136597 - RNA, 68 nt, Human
auuagaggagcugggacccugucaucugaucuuaguucaguguccagagcccauggcccaaaacuaau

SEQ ID NO: 4136598 - RNA, 70 nt, Human
auuagaguaauauuuucugagacaggaugaauuugcuauucuaaacuguuauuugagaguguugaauaau

SEQ ID NO: 4136599 - RNA, 66 nt, Human
auuagcuuaguguuuccguaauggcccaaaacagacugaggucuucugcaaacacugauggcuagu

SEQ ID NO: 4136600 - RNA, 70 nt, Human
auuagcuucauuaaccaaaaugcaauaugacugucuccauuguugcucucagauguugacugacgcuaau

SEQ ID NO: 4136601 - RNA, 58 nt, Human
auuaggcaauucugggcaucucagucuagaaugaaauguccaaagggauucgucugau

SEQ ID NO: 4136602 - RNA, 83 nt, Human
auuagguugaaccauauggaauugacauuuuuugcaugucaaagaagguauaaauuugucaacuucauauguuucaaucuaau

SEQ ID NO: 4136603 - RNA, 82 nt, Human
auuagguuggaccauaugaaguugcccauauuugacuguuucaaccuacaaaaaaagucaaguucaugugguuuaacuuaau

SEQ ID NO: 4136604 - RNA, 79 nt, Human
auuagguuggugcaaaaguuauugcgguuuuugccauuaaaauauggcaaaacugcaauaauuuuugcaccaaccuaau

SEQ ID NO: 4136605 - RNA, 56 nt, Human
auuagucaguauuuguuugccaucccuugaagucauggcauaacacacuggcucau

SEQ ID NO: 4136606 - RNA, 77 nt, Human
auuagucugaguuaaauuucuuguggccaauccuggagguuuggcucauuaaagaugauaauuaacccauugcuaau

SEQ ID NO: 4136607 - RNA, 70 nt, Human
auuagugagcugcacagaacagucauuggcccuuuauaagcaggggcuacuucugcugguagccacuggu

SEQ ID NO: 4136608 - RNA, 87 nt, Human
auuauaaagcauaacaguacauccuuuucucuugcaguccuuuauuaaaagaaagaggaagaggaaguauuggaccaugccuauaau

SEQ ID NO: 4136609 - RNA, 130 nt, Human
auuauaagaauccgauaggagguguguguuaaaaauucagauucccugucuacucuggaucugauccagagaucuaggguggagcugggaauccguauuuuuaacaagcaccccuagcgauuuauauaau

SEQ ID NO: 4136610 - RNA, 71 nt, Human
auuauaauccacagaaggaacuugaaaggacgcccaagugucuuuaauguauucuuuggaaccauuauagu

SEQ ID NO: 4136611 - RNA, 119 nt, Human
auuauaaugaugaugaucuauaccauuuauuaagugcguacuguaugccaggugcucuucuuggcccuucauauaacagcagcaguggcaguuaauauuuguggaaauuacauuauagu

SEQ ID NO: 4136612 - RNA, 57 nt, Human
auuauagcaaccagaacagcacucuaguccucuagagagcaauguuucugcuaaaau

SEQ ID NO: 4136613 - RNA, 106 nt, Human
auuauauuuuuagggagauuuuaguuguucauuuuuguuuccauaucuuauucagauuugucaauaagaugaacauauauuugcugcuaaaucaauaaaaaguaau

SEQ ID NO: 4136614 - RNA, 62 nt, Human
auuauccucagaaaacaugugauaagcauaaaccuuucacugcuaugauugcuggggauaau

SEQ ID NO: 4136615 - RNA, 98 nt, Human
auuaucuuuucuuggauggaaucgguucauuggguccugauaccucugcaaaaccuguaaaaugggcuucagauccagggaccucuaccauuggugau

SEQ ID NO: 4136616 - RNA, 67 nt, Human
auuaugcagaggaauugguuccugaaaggauccugaauccaaucaacccuguuuucuuugcaaugau

SEQ ID NO: 4136617 - RNA, 68 nt, Human
auuaugcugguuuacacauuuuuaauugagugugcauaugugcauuugugugugugagaggacauggu

SEQ ID NO: 4136618 - RNA, 57 nt, Human
auuaugucuuuagauauuuggucuucccugcaagaguccaagcuucuuaagcauagu

SEQ ID NO: 4136619 - RNA, 65 nt, Human
auguguuugguuauaugguauugccccuggucccacugggggcuuaggucauauacuauauauau

SEQ ID NO: 4136620 - RNA, 68 nt, Human
auguguuuuaguuguaaaauggaauuuguguaauaaauagcacuuccaggaacugccgcuaaccacau

SEQ ID NO: 4136621 - RNA, 93 nt, Human
auguuaaacugcugccuuaguaaccagggaaaugcuuuuuaaaauuuuguauuucauuauguuccuggaagagcaaccuugucaguuuaauau

SEQ ID NO: 4136622 - RNA, 58 nt, Human
auguuacaacccugaggagccgguuucugagucauauuugcucugccagugguaacau

SEQ ID NO: 4136623 - RNA, 60 nt, Human
auguucagcuugcagugggggaagauagaaaaucgaaauucacaugacagggugaagcau

SEQ ID NO: 4136624 - RNA, 100 nt, Human
auguucuaauuugguaaaacgucauugauugaugguaguacacauuucucaaacuugacugcucuuaggaagugacaaaaauauugaauuucagggacgu

SEQ ID NO: 4136625 - RNA, 90 nt, Human
auguucuacuguuuccaugaagggcagccucucagugcaaaaagacgucucugaguugguuacuguuccugaauaaauccaagugaauau

SEQ ID NO: 4136626 - RNA, 71 nt, Human
auguucuccugaagaccaugugcacuuaggucuacgggaccccucagagccaaucuucagagcagagacau

SEQ ID NO: 4136627 - RNA, 100 nt, Human
auguucugggaaaacuuuuucugcuguuauaguauguauguauucaggaagugcaacauuauuaaacuaagcauaauucagaagcuaaguuuccuuucau

SEQ ID NO: 4136628 - RNA, 55 nt, Human
auguucuucuaucuuuauuaaacuguuucuaaaggaacaagagaaagaaggaugu

SEQ ID NO: 4136629 - RNA, 84 nt, Human
auguugaauguauaauauuuaaugcuuuuggcaucccugaaaauugagagcaaaagaguauuggaauauauuacuguuuaauau

SEQ ID NO: 4136630 - RNA, 66 nt, Human
auguugagauacuuugccucuaugcuugucagcucaugaccaguccuagaagaggagucgagacau

SEQ ID NO: 4136631 - RNA, 129 nt, Human
auguugagggugaggacgaauccaguggugguggcgguagggauggccacugucauuacagagaccucucagacagcagcuaaccccugggccacauccuggguuucugucgucauucucuccuggcgu

SEQ ID NO: 4136632 - RNA, 63 nt, Human
auguugccgaagcuguugaacauuuaguaaaaaugcaaaauguucuggcaccuuuaaaaacau

SEQ ID NO: 4136633 - RNA, 72 nt, Human
auguugcggcaugcagugguaaaaagucagggguaaggucccugauugcgaagcuacuaguauacuagauau

SEQ ID NO: 4136634 - RNA, 95 nt, Human
auguuguguccuuccuucuguaggcuuagcuagaagugaugccuuaguaauuuucaacuaguucaggcuuuagauuggaaggauuaaaauggcau

SEQ ID NO: 4136635 - RNA, 67 nt, Human
auguuuaaauuuauagacagugaaauggacuuccauguaguguacaguucuaugaguuuuaagacau

SEQ ID NO: 4136636 - RNA, 57 nt, Human
auguuuaagagccuguacaaauauuuuauguuagugaaguguuggcuguuuaaacau

SEQ ID NO: 4136637 - RNA, 77 nt, Human
auguuuaauuugccuucaggcuaguuucuggacugaacacaauuuccuucaggcucugagcugaugcuaauuugcau

SEQ ID NO: 4136638 - RNA, 58 nt, Human
auguuuaucccaaaugccaggaguggacgaggcggacgaguggcagugagguaggcau

SEQ ID NO: 4136639 - RNA, 68 nt, Human
auguuucacuuuuaagagucaguguauuaaugcauacacggggaauacaucucuuugaagugcuuuau

SEQ ID NO: 4136640 - RNA, 62 nt, Human
auguuucauccacuggccuuucccacccuaaauguugggaaaaggccaccaacaugaagcau

SEQ ID NO: 4136641 - RNA, 68 nt, Human
auguuuccauagaagucacaguuguaaggggagacacaccguaaugggcaguggcuucuguggaauau

SEQ ID NO: 4136642 - RNA, 58 nt, Human
auguuucccagagcaaaucuggcuucaccaacugcacagaaaaucuuaugggaaacau

SEQ ID NO: 4136643 - RNA, 86 nt, Human
auguuucuauggaucuuucugcuuuugaauuacauggccugaaaaugaaguaaucugaaagcuaggaguucucaugcauaaaacau

SEQ ID NO: 4136644 - RNA, 65 nt, Human
auguuugggucuacuuggcucugagaaaacacauucucuuucaagaaucugguagaaccaaggau

SEQ ID NO: 4136645 - RNA, 56 nt, Human
auguuuguugaucauuuaugaaacagcagacuguauuaaaaaugcuuggcaaauau

SEQ ID NO: 4136646 - RNA, 87 nt, Human
auguuuguuuaccaguaguaacagguguacagacuaucaggugucauuaugacagauagcacacuuguugcuucugcugucaagcau

SEQ ID NO: 4136647 - RNA, 111 nt, Human
auguuuuaaaauuccaaacuccugugggaaugaaauguguuucuuugugaauggguaucuguuacugucacaugccgcgcaaauucucauggagguagggauagcagacau

SEQ ID NO: 4136648 - RNA, 91 nt, Human
auguuuuagaggaaguaguuaaccuggagggagauucaaaggaggcuggauaagagaaugucuauuuuucuccuucccuaucaccuuacau

SEQ ID NO: 4136649 - RNA, 79 nt, Human
auguuuucaaaguaaacuuguauucauaaagucaaaaguuuugaaagugguuuuuaaacagguugaacugugagaacau

SEQ ID NO: 4136650 - RNA, 95 nt, Human
auguuuuccaagggaacagaucucuaauguggcauuuacuaaaaaauauugagaaaaugucuuucaauagagaaaucugcuuugcaggaaaacau

SEQ ID NO: 4136651 - RNA, 65 nt, Human
auguuuucuugggcucuuaggucguguccgacuuggcauaucacuaucugaggguccagaugcau

SEQ ID NO: 4136652 - RNA, 107 nt, Human
auguuuuuucuuuccuccuacucaaaaaguuaugaaucauaggaaugaguuaauguuucaaagauguuuauugcuuuuuuuguggggggaggugcaugaugaaauau

SEQ ID NO: 4136653 - RNA, 59 nt, Human
auuaaaaagccacucgucaggaaauugaagcucagaauucuaacaaguggcuuguuagu

SEQ ID NO: 4136654 - RNA, 71 nt, Human
auuaaaagagauaauguguguugcugaggcuaaagugugauuacggucccacauauuauuugcauuuuaau

SEQ ID NO: 4136655 - RNA, 74 nt, Human
auuaaaaguauauuuuuugaagcauauauguauuaaacacauugcuuggugugcuuaaugaaauguuuuuuaau

SEQ ID NO: 4136656 - RNA, 72 nt, Human
auuaaaauguucaagcaugcugguuuauuuuaccguucagaugaaauggcauuuauuugaauauuacuuagu

SEQ ID NO: 4136657 - RNA, 74 nt, Human
auuaaauggauaauucuuguugauuuugagcuggcaaucucaggcuucuaaaucacaaggaaacuccauuugau

SEQ ID NO: 4136658 - RNA, 65 nt, Human
auuaacacuucccaucagagggacauugcagcuuauaagaaugucacuuugugagaagugggagu

SEQ ID NO: 4136659 - RNA, 56 nt, Human
auuaaccagcauucuucacaacuugcuccccaagcaaugaggagcagcugguugau

SEQ ID NO: 4136660 - RNA, 80 nt, Human
auuaacggaugugauagaagcagagccuugaaaacuguuugugacagggccugcucuaucacucucaugccuuuguuaau

SEQ ID NO: 4136661 - RNA, 62 nt, Human
auuaagauaguaaacauuuucugcuuugaaggccagacagucucuguugcugcuguuuuaau

SEQ ID NO: 4136662 - RNA, 69 nt, Human
auuaaucuguauuuugaguccaaucuccucucaugggagagugagaaaaaggcugaaaauaagcuugau

SEQ ID NO: 4136663 - RNA, 68 nt, Human
auuacaacaagaaaaggguaaggacguuuacgugaguauauucagucuugcucauuugcuuuuguaau

SEQ ID NO: 4136664 - RNA, 67 nt, Human
auuacacaaaacuuagucuuucaauuugauauauguuugcaugucuuugggggacuuagugugugau

SEQ ID NO: 4136665 - RNA, 74 nt, Human
auuacacaaccacauucucagcauacaagcuggcucccucuuggcugcugaaauauguucugggguucaguagu

SEQ ID NO: 4136666 - RNA, 68 nt, Human
auuacacagcgguuacuacuagagccaggacuagaaucuugauucuuuauuuagugcuuuuguguaau

SEQ ID NO: 4136667 - RNA, 58 nt, Human
auuacacuuguucaucaucaccaugagagacauuccagggagaugaacguggugggau

SEQ ID NO: 4136668 - RNA, 60 nt, Human
auuacagggaaccaauccagugucauccgaacaggcagcauucugaugguucucugugau

SEQ ID NO: 4136669 - RNA, 75 nt, Human
auuacauuacauuagugaagcaauauuggcacuucauuauuaaugaaguacaugcuuuauucagaguucuguagu

SEQ ID NO: 4136670 - RNA, 75 nt, Human
auuacauuggacccaugauuuauuaccccuuugguauaaaaaaggcuaaaguaaacuguggguacagaugucaau

SEQ ID NO: 4136671 - RNA, 103 nt, Human
auuaccauagcagugaaauuuauaugcaacagcauuauuacaauuuucggcuacuaaugaaauuauuguuucuguuugcgauguguuuuggcgcuauaaugau

SEQ ID NO: 4136672 - RNA, 62 nt, Human
auuacccuuacuguuuucacugugucacucugagaggucucgccugaagacaugagguuagu

SEQ ID NO: 4136673 - RNA, 88 nt, Human
auuaccugggaacuuguuagaaaugcagauucucaagccccagaaauaaugaauuagaaucugcauuuuaacaagauccccaggugau

SEQ ID NO: 4136674 - RNA, 77 nt, Human
auuaccuuguuugaugucuuauuuaaggcuuauacaaguucaauaacuuguccaaaguaacacaucuaguagguagu

SEQ ID NO: 4136675 - RNA, 64 nt, Human
auuacuaaggcaguuuugccugagauauuugguaaucaucuuaauuucaaggcugucuggugau

SEQ ID NO: 4136676 - RNA, 78 nt, Human
auuacuauucagguuuaaguagucuucuuuaagcagcccagguaugaggaagaaacugagcucugacagacuaguaau

SEQ ID NO: 4136677 - RNA, 64 nt, Human
auuacucugaaugaguuagguauagauucguugguguggguguauaccuacacauuuuugugau

SEQ ID NO: 4136678 - RNA, 69 nt, Human
auuagaaaaucuggagguggggccuaggaaaucugcaucuuuaaacuauccacuccaggugauucugau

SEQ ID NO: 4136679 - RNA, 63 nt, Human
auuagaauccuggccaaguuuuuaagacaguaauguacagacuucacucccagagauucugau

SEQ ID NO: 4136680 - RNA, 85 nt, Human
auuagagugccuuuuaagagcaguguuaggaauaaaaaugauggaaaauauauacauuauccugacaacuaaggucgacuagaau

SEQ ID NO: 4136681 - RNA, 86 nt, Human
auuagauuuagcucauuugaugcaucucuacuuuguuccugcuucugggaagagagggacuuauuaaagucuagcauaaaucuggu

SEQ ID NO: 4136682 - RNA, 89 nt, Human
auuagcacaguuuacaugcaaauaaagcaacuauacagguuuaugugugaaucugcuuguauuugucccuguaaaugacugcagcuaau

SEQ ID NO: 4136683 - RNA, 58 nt, Human
auuagcuagaaaguuucagcugugaguggcaacuuacaagaauuucuuucugguugau

SEQ ID NO: 4136684 - RNA, 60 nt, Human
auuagcugccugcuuaugagcuccaugacuaaaauuccuuggugucaacaggcagcuaau

SEQ ID NO: 4136685 - RNA, 68 nt, Human
cagaggaagacaugcgccuugucagugaucccugcaucccuaggggugggcagcacgucauuccugug

SEQ ID NO: 4136686 - RNA, 78 nt, Human
cagaggaagagcaacuuggaaacacucagucugcaucagaacuaauaguggaguccaaguucucccauccaugaucug

SEQ ID NO: 4136687 - RNA, 58 nt, Human
cagaggaagcuggguguggaguauauggaaacuccguacuaucuucacagcuauucug

SEQ ID NO: 4136688 - RNA, 102 nt, Human
cagaggacugggauggacagagaaccagcagcacaguaucccaggagugacguagcccagccagcucacagcacccugaggugcuggccccacccaccucug

SEQ ID NO: 4136689 - RNA, 82 nt, Human
cagaggaguauaauucauguuccugcaagcaugcacccgcaaaugucugcucugcaagcaggagcaagaucugugcucccug

SEQ ID NO: 4136690 - RNA, 73 nt, Human
cagaggaguucaguacacagccccuggaggaagggcuggggcuggguuugcacugaaguucuagcucuuacug

SEQ ID NO: 4136691 - RNA, 100 nt, Human
cagaggaucacauggaaggggccuugcagucguuaagcucaauccuucuuuucacaauagcauggacugcagggcauccuggccaagugacauccuacug

SEQ ID NO: 4136692 - RNA, 93 nt, Human
cagaggaugguggcuuggcccagguguuuguggcagagguggugaggauaucagcuuuuaaauacauuugggcaguagagccaauaggauuug

SEQ ID NO: 4136693 - RNA, 83 nt, Human
cagaggcaucauggcgagccccgacugaguguucagugaagagggaaaacagagacaguggggcaucccgagaagauccucug

SEQ ID NO: 4136694 - RNA, 88 nt, Human
cagaggccaauuugugguaucuggccuaauucuauagaaaguuccucucauguaguguuucucagauauuugcauuccuugacuucug

SEQ ID NO: 4136695 - RNA, 64 nt, Human
cagaggcuagacugugcuuccuggcuuucccacgaaucauggagcauuuuggucacagccuuug

SEQ ID NO: 4136696 - RNA, 80 nt, Human
cagaggcugcagagaagagaaaaagucucuggaggaagcaaagaacuccugcacgugggcucucugcucuucagccuuug

SEQ ID NO: 4136697 - RNA, 78 nt, Human
cagagggcaaggugagaguuuggguucuggagaaauuugcuacaauuggcagcugaaacccaggccucagcucuucug

SEQ ID NO: 4136698 - RNA, 58 nt, Human
cagagggcguccggguuaacuucccucaagaaaaaggcaguuaacccaagcccuucug

SEQ ID NO: 4136699 - RNA, 95 nt, Human
cagagggcugaaggcauuuggguuacuuguaugagcacuuaggguagagaauguaucugucaguucucauuucacaggcagugcucagcccuuug

SEQ ID NO: 4136700 - RNA, 80 nt, Human
cagaggggauggugcauacuggcagaacgggcccucugggccugagucuuucccauugcgcugggucucaguucccccug

SEQ ID NO: 4136701 - RNA, 71 nt, Human
cagaguaggcuugcucuaaucaggugagccccgaaaaagagauacucuccugcaaagaaacaagccaccug

SEQ ID NO: 4136702 - RNA, 65 nt, Human
cagagucccagaugccccuccuaaauaaucuaauucaguaggccugguagagggcaccuggucug

SEQ ID NO: 4136703 - RNA, 75 nt, Human
cagagucuagaccacaggcaugcacagagcauuuguggcgucaaggcucaggcauguaugugguugcagagauug

SEQ ID NO: 4136704 - RNA, 58 nt, Human
cagagucuuguguguucagccccagacugagaagggcugaaaacacacaaggacucug

SEQ ID NO: 4136705 - RNA, 92 nt, Human
cagagugagccaggguccaguggcaggcggugaggucagggaaggcccggagggccucaugggccauggagaggacuuuggcuuuuucucug

SEQ ID NO: 4136706 - RNA, 55 nt, Human
caauagcagcuucugaaugcaaauaauuuuuuugaguugcauggcugcugcuuug

SEQ ID NO: 4136707 - RNA, 93 nt, Human
caauaugaagaaaaagucaagaaucucagcaucuuuggcucugacaucauagauggaaaaggcuugguucuuugaugacauuuuugaguauug

SEQ ID NO: 4136708 - RNA, 86 nt, Human
caauaugugaggacuggacuggugugcuuuuguuacauauaaucauccuauagauucaaguauucaguuuggauaauuacauguug

SEQ ID NO: 4136709 - RNA, 85 nt, Human
caauauuuaacaaugaauaucaugaaguacuagugcaaccuuauaacuuggacaguauuauagaguuuauuguuuaugaaaauug

SEQ ID NO: 4136710 - RNA, 81 nt, Human
caaucaacauccagagacuggggcugggauagggugaggaauccuguaauaucuuagcccaggcucucugaagguuuauug

SEQ ID NO: 4136711 - RNA, 57 nt, Human
caaucaauaggugacuucauaugcagaagugucuuuuuugcaaauaucuauugauug

SEQ ID NO: 4136712 - RNA, 62 nt, Human
caaucacuucagacuaaggaagcuccuggaaaagagagcaaauauuuuguugaagugcauug

SEQ ID NO: 4136713 - RNA, 78 nt, Human
caaucagucaccuugacuauagcuguaguuggagaaaaacaagcucuagacuaguucuacucaaagugugauccauug

SEQ ID NO: 4136714 - RNA, 63 nt, Human
caauccaucaauuacacaggcugccucacccaaaucugcuuuguccugguuuuuguuggauug

SEQ ID NO: 4136715 - RNA, 124 nt, Human
caaucuucagugacuuucuuuccagacugaaucuucagugucuaaaaagcaaccuguagcaguuaugauuuggggaagcugugguguaguuaggaaaacaaugacauggucaacugaaauguug

SEQ ID NO: 4136716 - RNA, 100 nt, Human
caaucuugaagccugguucuccuguguaagauguaaaggcaauauaaaggcaauauucuuuccuuacauacauuuugaaugaguacuaugugcaaaauug

SEQ ID NO: 4136717 - RNA, 80 nt, Human
caaugaccaguuuuauggagcagacagcuggucaguuguacucuggcacagaaaaaugcuccauuccuauuguucaguug

SEQ ID NO: 4136718 - RNA, 88 nt, Human
caaugagaacauauacuugaaagcacuuaguaaauuagaaaugugggucacaaauaauacugcugugcuugaguuguuguuguuguug

SEQ ID NO: 4136719 - RNA, 66 nt, Human
caaugagcuaauguauguugaaagcacuuugugaauuguaaagugcuacacaaauguuaguuguug

SEQ ID NO: 4136720 - RNA, 80 nt, Human
caaugcagucagugguauuuuguuauggcagcccaagcagacuaauacagcugucauuauuugccuacugacuugcacug

SEQ ID NO: 4136721 - RNA, 84 nt, Human
caaugcccugcccaaauugcuuacuguuuuucaccuuguucccaagguugaggaacagaaaguagccugugguuggaggaagug

SEQ ID NO: 4136722 - RNA, 59 nt, Human
caaugcuaggcagauccugcguguuacccauauugucaugcagccucugcccagcagug

SEQ ID NO: 4136723 - RNA, 56 nt, Human
caaugcugugaauccacaagccucacuuucagugacaaggcucuggcacaggauug

SEQ ID NO: 4136724 - RNA, 57 nt, Human
caauggggaagcaauuggauuuccucugaaagagaggagaacauaucucccacauug

SEQ ID NO: 4136725 - RNA, 62 nt, Human
caaugguccccauuggcaggaacugaacccuucucuccucuccuuucuccgggggacuguug

SEQ ID NO: 4136726 - RNA, 62 nt, Human
caauggugcagcucaguugaaaugcaggguuguacacaggcccugcucagagcuguccauug

SEQ ID NO: 4136727 - RNA, 61 nt, Human
caaugguucucaaacuaucauggggaagaagcaccaggaagguuuguuaaagaacagauug

SEQ ID NO: 4136728 - RNA, 115 nt, Human
caauguaaaauuauggguuucacuguaggacucugucauuugaacuaguaaucaguccauaacacuauagauugcuguaguuaaaaugaugcuuucccccauuaacaaaacauug

SEQ ID NO: 4136729 - RNA, 60 nt, Human
caaugucagagaagcucauaucagugguucugaugaaaaacgaguauuucucugauguug

SEQ ID NO: 4136730 - RNA, 122 nt, Human
caauguccacauggagauccaaagccuucugucuguucuaggcuugcugagccucgggguggaccugggccugcuaaccugaaacggagcaugagccuggcuugauuuucacaagggcguug

SEQ ID NO: 4136731 - RNA, 77 nt, Human
caaugucuucucuuguugaauuuaaaugacugugacauuauuuuucauaccuuggcaaauuuugcaaggagauauug

SEQ ID NO: 4136732 - RNA, 65 nt, Human
caauuaacaugcagccagacacacacagugacuacacauuuuggugugguuggcggcauuaguug

SEQ ID NO: 4136733 - RNA, 59 nt, Human
caauuagaacuuuuaucaaacuaugggaaacaucuguagucaguauguaagucuaauug

SEQ ID NO: 4136734 - RNA, 80 nt, Human
caauuaucaccuugguugacugucuugcaacuccaccacucacacgcaggaauaggcagccauuaccaagggcaugguug

SEQ ID NO: 4136735 - RNA, 61 nt, Human
caauuauugugcaccuacugugugcaggcccugccuggacacuggggaugcgcaguggaug

SEQ ID NO: 4136736 - RNA, 60 nt, Human
caauucauuacauugcaaagacugagcucagaauggcuugucugaugcuugaugcaguug

SEQ ID NO: 4136737 - RNA, 96 nt, Human
caauucuauacuaagugcaagcaggacuuaguuucaaacaacaccauuuaucauguaaaauuaagguuauuagcuugccuuguuuuuguaguuuug

SEQ ID NO: 4136738 - RNA, 82 nt, Human
caauuggcuuauagaucacucgauuuugcuuggaauuucuagaauuccuugauacaggcuugaugugucuauacuuugguug

SEQ ID NO: 4136739 - RNA, 72 nt, Human
caauuguuucauuuugacugccuugauauacaaggacauaacuuuguaaaucauggucagaauaaauuuuug

SEQ ID NO: 4136740 - RNA, 76 nt, Human
caauuuaauaaaaguuccuuuuauagacaugacugagaccagagagucugucuauguuaagagagcugcgaaauug

SEQ ID NO: 4136741 - RNA, 75 nt, Human
caauuucaagaucucaguggguuaaaagagaaggagcuugucucuuucccacacaguccacugcaggucuaguug

SEQ ID NO: 4136742 - RNA, 61 nt, Human
caauuucacugacacccuggaaugaugcccaggucuaauucuagucucuggucaguaguug

SEQ ID NO: 4136743 - RNA, 59 nt, Human
cacaaaaucuuucucgauuauuuuauguuauguaaugugauugucauguggauuuugug

SEQ ID NO: 4136744 - RNA, 127 nt, Human
cacaaaccacccucaauacacuuuaaauacucuucccaggguuuugugcucaggaguuguuugaaaggcacaggcaccugggugguuuuaugggguaauaaaaagauguggaauggaggugggugug

SEQ ID NO: 4136745 - RNA, 59 nt, Human
cacaaaccucacagcuccuccucauuaacccgauccuguuauaggagcuggggguggug

SEQ ID NO: 4136746 - RNA, 130 nt, Human
cacaaacgccaucuuguuuauuucuguuuuccagaagcugguacaaggccuagagccuaguugguucuggauaaauguuugcuuuagauagcugacuggauggguggaugagugaauggauggaugggug

SEQ ID NO: 4136747 - RNA, 82 nt, Human
cacaaacucuaguagccuggcugcaaaaucuauucacucucaucaggaacugucauguauugcucauggcuaucugugugug

SEQ ID NO: 4136748 - RNA, 77 nt, Human
cacaaagcuuuuuaggaaaugcuccauugcauaaagagagauguucuugugcuagcuaauuuccucucagcuuuaug

SEQ ID NO: 4136749 - RNA, 75 nt, Human
cacaaauauauugccaaugagcuucuauaaucuugucaacaauggcaauuuuuuaagaaguuuaggggauuugug

SEQ ID NO: 4136750 - RNA, 79 nt, Human
cacaaauguuagaggcaggccugcuucuuacccuucaggccaacccuggacaguauugugaagcaggcagauguuugug

SEQ ID NO: 4136751 - RNA, 102 nt, Human
cacaaauuuguauuuggggaagcaguauccugacagcaccacaaucugaauuuaaaaauuggcggugcguaggagauaccuuucccacagcagcuuucugug

SEQ ID NO: 4136752 - RNA, 84 nt, Human
cacaacucauuauugcccuccugaggggcagggaagcugggauauuuauccaccaauuccuucccucaguggcugaaguuugug

SEQ ID NO: 4136753 - RNA, 88 nt, Human
cacaacuuggucaucagucuguauuucaaauuguuagucauauacauuuguuauuuuuuaaugcagucugagacauagugaaaaugug

SEQ ID NO: 4136754 - RNA, 81 nt, Human
cacaagagcaacaacaguaaugauaaccagcauuuauuuugcacuuaacaaaugccaguuauugcugucaguguucaugug

SEQ ID NO: 4136755 - RNA, 63 nt, Human
cacaagcuggauccuagggcuuugaccuccacugcucacugccacaugggauccgucucugug

SEQ ID NO: 4136756 - RNA, 59 nt, Human
cacaaggucagaaucagacugaguccagaugauacuccucuaauaaacuugaccuugug

SEQ ID NO: 4136757 - RNA, 59 nt, Human
auuguaaaugguugaaccccagagaauuuuccugucucacugggccauccuuuuacaau

SEQ ID NO: 4136758 - RNA, 71 nt, Human
auuguaagcaguuacuaguuaaaugcauguuuuggucuuuuacaugcuguuuguuagaauuguucaucaau

SEQ ID NO: 4136759 - RNA, 88 nt, Human
auuguacaaaguagauucauggauguuucguuaacuguagagcauugggcaacaguaauuaaacauucugauuuuauuuugcuagaau

SEQ ID NO: 4136760 - RNA, 78 nt, Human
auuguauacaaaauguuuucucugugaacacauucccaugugcagcuuuucuagagaaggcccaugcuuuuauacaau

SEQ ID NO: 4136761 - RNA, 82 nt, Human
auuguaugacagauuuugauggcuaauagaaauuuugaaauauggaguuaguuauauaggcuauuaaagacugugaaauaau

SEQ ID NO: 4136762 - RNA, 81 nt, Human
auugucaaacugccaacagagaagcauuauucaggguucuugguuuucugagugucaaggcucucuuuggcauuugguaau

SEQ ID NO: 4136763 - RNA, 73 nt, Human
auugucacaaggauuuuuggaaugagauggcgugugaaagcaccuggcacaggauccgagaccuuguggcgau

SEQ ID NO: 4136764 - RNA, 77 nt, Human
cacaccuggaucagagcccugagucaguucuggagaccaacaucucucuguucuuauucagaggccuuucaggugug

SEQ ID NO: 4136765 - RNA, 112 nt, Human
cacacgcccggggagggcgagacugucugguuugggcgcuggagcaaggcucggaccuccggcuccuugcucucccaagcccgcagacaguggcuccuuccccagggcugug

SEQ ID NO: 4136766 - RNA, 61 nt, Human
cacacucauuaccucauuuaaucuucucaacagccaggagcaaugggcuuugaugagugug

SEQ ID NO: 4136767 - RNA, 58 nt, Human
cacacugcuuacacaaaaugauucgauagccugauucauuauguauuuaguaagugug

SEQ ID NO: 4136768 - RNA, 59 nt, Human
cacacuuuuguuugaagucuccacacuagaaccuguguguuggaaucuguaaaugugug

SEQ ID NO: 4136769 - RNA, 76 nt, Human
cacagacagggugguggacacacaguaaggugacccccagggaguccugcccuuguguagucccuuccccugagug

SEQ ID NO: 4136770 - RNA, 59 nt, Human
cacagacccagcauacaggaccuuccccgggaggggcaggcugaugacuggaguuggug

SEQ ID NO: 4136771 - RNA, 101 nt, Human
cacagacccauggcucccuccaggcuucaagggccggcccugagcaguccagcagcccagcgaggggucggcagccucugaggggagagagcgucacugug

SEQ ID NO: 4136772 - RNA, 81 nt, Human
cacagagagaagcuaaugucuuggagugucaagacugucaaacaucaguugaaauacauugaaagcauauuaucuccugug

SEQ ID NO: 4136773 - RNA, 72 nt, Human
cacagagccucuucccaauagucggacugggaaaacucauaauuacugagguauugggaaguggacucggug

SEQ ID NO: 4136774 - RNA, 72 nt, Human
cacagagcgagggagagccaagaugugagcucuucucugacuccacauuucgugcucuguuuuguugcugug

SEQ ID NO: 4136775 - RNA, 79 nt, Human
cacagagcuggguuugggaaaccucgugugacacuucagagguuuccagcaggccauagauuuauuuacuuuuucugug

SEQ ID NO: 4136776 - RNA, 98 nt, Human
cacagagcugguuuccaaacugucuuccuccaucccgcggagcaggcaugggagcaucugccugcaguggaggugggcuggacaguguccuuucugug

SEQ ID NO: 4136777 - RNA, 57 nt, Human
cacagaggugauaguggucaaggcaggaacggccuugcccccgcugauccuuuugug

SEQ ID NO: 4136778 - RNA, 65 nt, Human
cacagauaucguaacugaacugcuggggauaccuagaaguauacaguaaugacauaucucuagug

SEQ ID NO: 4136779 - RNA, 66 nt, Human
cacagauuaugagacgagauacuggguauaaacugaugaacaaacucucaugguuucugguuugug

SEQ ID NO: 4136780 - RNA, 65 nt, Human
cacagcaccuauagaaguuguguucacagagcacucaacaauuucuaggcuugaauaaugcugug

SEQ ID NO: 4136781 - RNA, 98 nt, Human
cacagcaccuuuccacaucuaucuuuugggucccagaucaagugcucuaccccucagcaugcaugaagauucagcaagauucagugggagguggugug

SEQ ID NO: 4136782 - RNA, 58 nt, Human
cacagcagagggagccauugaaaguugagugaucuguuuggaugcaccuucugaagug

SEQ ID NO: 4136783 - RNA, 72 nt, Human
cacagccaucuucucaagcagcauccugugcaacuaacguccgcagaagguuguuugggaaaggucccugug

SEQ ID NO: 4136784 - RNA, 66 nt, Human
cacagccuugaaaauaaauaaaaaucauugccugcauaaaauccagguauauauuuugggguugug

SEQ ID NO: 4136785 - RNA, 66 nt, Human
cacagcuaaucagagucagaggcuagagcugagccagcagcuagacuucagaaucuguguccugug

SEQ ID NO: 4136786 - RNA, 59 nt, Human
cacagcuaauggaaguggaaucaguucucagagcuggguuuuccauuccaguggcugug

SEQ ID NO: 4136787 - RNA, 64 nt, Human
cacagcucagcauuuguuuauucuguuaugaaauggaggugaauauacacuugcccagcuugug

SEQ ID NO: 4136788 - RNA, 68 nt, Human
cacagcucgucucuugccuuagugugcugcugugagagucacaguggaaacugcagggaggaggugug

SEQ ID NO: 4136789 - RNA, 59 nt, Human
cacagcugugagaagggagccuuaauuccaagucuccugaauugucccucacagcuuug

SEQ ID NO: 4136790 - RNA, 55 nt, Human
cacagcuucccgugcauggagaguuccuguuucuggccaugcagagggaucugug

SEQ ID NO: 4136791 - RNA, 84 nt, Human
cacaggaaauugucuuaaauggauggacaaugaaauuagaauaggcuuaaauuauuuccauuucauuuaucauaggguucagug

SEQ ID NO: 4136792 - RNA, 100 nt, Human
cacaggaauccaggagcccuuuacugugaugccgaccacuccaguagcguauaacucgcugggugcagugauuggcauugcagugcuggggucccuugug

SEQ ID NO: 4136793 - RNA, 79 nt, Human
cacaggacuagaugauaaaauguuguaaugggaagcuaauuguuucauuggcuuuauacguuugucuuuuauuucugug

SEQ ID NO: 4136794 - RNA, 85 nt, Human
cacaggaucucuacuuauuugucaaucccuugaaaaccucccauaaaacaaaggugagggcucugggguggcagagaucucugug

SEQ ID NO: 4136795 - RNA, 125 nt, Human
cacaggauuauaaaggaaaucaaucauugaaauguaguuucaucugucuucucaggacucugauguagaccuacauuaucagcacuucauggaugauuucuaaauuguaguagaagacuccucug

SEQ ID NO: 4136796 - RNA, 56 nt, Human
cacaggccgccuuggcagaagugucgagucugcagcugcugcccagagcacuugug

SEQ ID NO: 4136797 - RNA, 100 nt, Human
cacaggccuagccggccccuguuagcauugcuguggugcuuucuguuaacgagaggccacugaagcugggcgaugccucccagcaggggacgggcuugug

SEQ ID NO: 4136798 - RNA, 77 nt, Human
cacaggccucaguuucuccaucgcuccagugacgggcuggauccaacaccugugggccaggaggcugagucucugug

SEQ ID NO: 4136799 - RNA, 130 nt, Human
cacaggccuggaggcccaggaggaaaaagugguuuuguggauggggcccaggguccccaugcucugugcauccuagggccuuggugcucuguguugcagccacuccagccacggcugaaacgggccagug

SEQ ID NO: 4136800 - RNA, 68 nt, Human
cacagggaagcaggaauagcucugagcuacaaauagucauguuuccuucagaauuuuccgccucugug

SEQ ID NO: 4136801 - RNA, 82 nt, Human
cacagggagcaucuuggccagcgacgaccuucuuaguaccccucugagguggucguucuguugugcuugaugacuuccagug

SEQ ID NO: 4136802 - RNA, 55 nt, Human
cacagggaggcggucacuggcuugaggaggucucaauugacccuuucucccugug

SEQ ID NO: 4136803 - RNA, 55 nt, Human
cacagggccagcccuauuuuugguaaaguuaaauuggaaacuggcuuggccugug

SEQ ID NO: 4136804 - RNA, 61 nt, Human
cacagguagaugccaugcagcagccuccagcgcccucccugugccuggcauguaaccugug

SEQ ID NO: 4136805 - RNA, 79 nt, Human
cacaggugcuuuggggagguugccacauuccacucucaggggccacuccuguggguggcaaggccccacggcacaugug

SEQ ID NO: 4136806 - RNA, 63 nt, Human
cacaggugucaugccaccguuucccagagugucuucugggugguaguauuggcauggaaugug

SEQ ID NO: 4136807 - RNA, 63 nt, Human
cacaguacgcacccgauacaugugguugacuugaacuucauguggguacaggguguguaggug

SEQ ID NO: 4136808 - RNA, 77 nt, Human
cacaguagcuuugguugccaugaucugaggacagcagcacuuuaggucacaucggugaccaaagacaucagacuuug

SEQ ID NO: 4136809 - RNA, 56 nt, Human
cacaguauucacugggcagauuacuccaaaccuuuaaaaugccaguguguauugug

SEQ ID NO: 4136810 - RNA, 62 nt, Human
cacaguccuccugggccugccuuccugcuuguuguauuaggaaagcucccaguagggcucug

SEQ ID NO: 4136811 - RNA, 56 nt, Human
cacaguccugccagagggccuuugcacaugcuuugcccucaucuggaaccccugug

SEQ ID NO: 4136812 - RNA, 105 nt, Human
cacagugccacuguguuacauaaaagcuugagccauguaggagcuuucuugucauucagaacacugcagcucuagcuuuugaccucagauacuuuguuuucugug

SEQ ID NO: 4136813 - RNA, 91 nt, Human
cacagugcgggcacucagcaggugcucauuaaauauuagcugcuauugucaguugcuaucgugaagcacguggcaagugccugauacugug

SEQ ID NO: 4136814 - RNA, 55 nt, Human
cacagugcuuuaugagagaucuagggaaauccacuucuauuuguaaagggcugug

SEQ ID NO: 4136815 - RNA, 55 nt, Human
cacaguggcaguguagaaaaaccuauuucugucuggguuacauugucuacaugug

SEQ ID NO: 4136816 - RNA, 103 nt, Human
cacaguuguggaggcuggcagugcaagaucacgguguugagagggcugguuucuucucaggccucucuccuuggcuuuuggguggccgcguccucucccugug

SEQ ID NO: 4136817 - RNA, 72 nt, Human
cacaguuucaauaauuauucuuccaguguaaugaaguaaaugacuaacugaauagaugaagauugaacugug

SEQ ID NO: 4136818 - RNA, 85 nt, Human
cacauaacacuuuucucuuagcuuagcugccaggaaaauaauuuaauaccacuguugcuacuaagucauggaaagugugugugug

SEQ ID NO: 4136819 - RNA, 68 nt, Human
cacauaagaugugcauggguaugcaauuuuuaaauguaaaagugcuacuauuugacauguuuuauuug

SEQ ID NO: 4136820 - RNA, 62 nt, Human
cacauaaguggguuccauugcauaaccauggaauucucagcaucuuaaaaccuacauaugug

SEQ ID NO: 4136821 - RNA, 79 nt, Human
cacauacaaagauuuucacagcaacacugucugcaagagucaaagcuguagacagccugcuguggacugaagguuugug

SEQ ID NO: 4136822 - RNA, 70 nt, Human
cacauaccugaucaagcuacuugucuucguuuccuucuauuuaggaaagaaggaccagagcugaucugug

SEQ ID NO: 4136823 - RNA, 77 nt, Human
cacauacuugcucauuugccuuuagguuuucuguuuucuuaaacauacaaacauacaaaggaaaguaggaaguugug

SEQ ID NO: 4136824 - RNA, 61 nt, Human
cacauauaccagccgcgguacgugaauucuccacagccuucagagcagcugggagugugug

SEQ ID NO: 4136825 - RNA, 58 nt, Human
cacauauccaucuuugaaacuuuaaguuuagauaaugcagcucaaagauggguaaaug

SEQ ID NO: 4136826 - RNA, 59 nt, Human
cacaucaagcauccaugaguuuuguccugguucuggccuugcucuggauuguugaugug

SEQ ID NO: 4136827 - RNA, 86 nt, Human
cacaucauucacaucauucagggccucguuggcauguccaggcauguucagugggaggccauugaaugguuugaaacaggaaagug

SEQ ID NO: 4136828 - RNA, 104 nt, Human
cacaucgcccucucugcagagcucacacacgaagcccuuggccuggcaccgcucgcguuccagcuugaugugcuuggugaagagcgugugagucucggugagug

SEQ ID NO: 4136829 - RNA, 68 nt, Human
cacaugaaacagggaguaguaauuuacagaaacauuuuccaguaaacauaaacccuguugacauugug

SEQ ID NO: 4136830 - RNA, 70 nt, Human
cacaugacacccaggcauagcaccgcagaccucuggggagcugcuucuugcuguggguucuuggaaugug

SEQ ID NO: 4136831 - RNA, 57 nt, Human
cacaugagguggagaugaaugagucuucuuuugacaaaacauuuuaucccuuaugug

SEQ ID NO: 4136832 - RNA, 127 nt, Human
auuguccuaagccauccauacacaaaacguuuaauguguuauggaaggcuaacaguuuuucagcuuuucucaauacuuucagccauccauacauaaaauguuuaauguguuauggaaggcuaacagu

SEQ ID NO: 4136833 - RNA, 58 nt, Human
auugucgcuuauuuaggugcuucaaauuuuuugcuguuauuagcacugaagugauaau

SEQ ID NO: 4136834 - RNA, 88 nt, Human
auugugaaggaagauggaacaugauuugacaccauauugacaacuaaaagugauucuagucaugauucuaguugucuugcuuuggaau

SEQ ID NO: 4136835 - RNA, 57 nt, Human
auugugaugggacccucguuuaucuggcugcaggagaugaaagcuucccaucacagu

SEQ ID NO: 4136836 - RNA, 85 nt, Human
auugugcaucagaaauugcuaccaguggagaauuaaauuaauuagaauccuauuaaauaacugguugcaguuaagcugguacggu

SEQ ID NO: 4136837 - RNA, 68 nt, Human
auuguguucugaagcaccagaaguccccccuuccccuccaaacuggggcagccacugccuucaacaau

SEQ ID NO: 4136838 - RNA, 69 nt, Human
auuguugauuucauaguauauacaugaaagauauucauuucauggagaaaauuaagaagucacagcaau

SEQ ID NO: 4136839 - RNA, 80 nt, Human
auuguuuuguagaaugacccuugguuuaagcuugucugucaguuuucuuguggucauaucuaauaucauuucaaagcaau

SEQ ID NO: 4136840 - RNA, 120 nt, Human
auuguuuuguuugauuaaaugugggagcauuaguucuuguauuuuaauguguuuagcuuuuaaacauguuuucugaauauuuuuaguagcugaugccuggucucccaaccacaaaauaau

SEQ ID NO: 4136841 - RNA, 85 nt, Human
auuuaaacuugucugaauacauuucuguuacuugcaaguaaauaauuacaacauaugauaggagucuaaagggcauaggauagau

SEQ ID NO: 4136842 - RNA, 66 nt, Human
auuuaaagaagagaaggcauuuaugaguaauaugcugugguaguuaaauccuuaucuucuuugaau

SEQ ID NO: 4136843 - RNA, 93 nt, Human
auuuaaagcuaauuugcacuuggcuucaagguuaagguccacagcauaagcugaagaccuuuaaaucagaagucagacugaaaagccuuaggu

SEQ ID NO: 4136844 - RNA, 85 nt, Human
auuuaagcauuugguaauugagaugucuuuucugacaguuuggggaaacuauaagaaugagauaaucucagccuacauguuagau

SEQ ID NO: 4136845 - RNA, 78 nt, Human
auuuaagggggcacuuacucucagggcaagugccgacucuacauuuacaccacccugagagugcgugccuccuuaaau

SEQ ID NO: 4136846 - RNA, 79 nt, Human
auuuaauguagaccaaagaaaacacaucugggccaauauccagcucuuagggcaccagugugcaaucucuggcuuaaau

SEQ ID NO: 4136847 - RNA, 62 nt, Human
auuuacagaaacuuaaucauagcagaaauaugcaaaaugcuguuuguugaguacuugugaau

SEQ ID NO: 4136848 - RNA, 61 nt, Human
auuuacauagcagcauagucacaggcuguccuguggaagacagugacugguuguguuagau

SEQ ID NO: 4136849 - RNA, 84 nt, Human
auuuacuuuagcugagaaccucaugaagucauuucaaaguuggucauucauugagggauuuacagaggugggucguaaagagau

SEQ ID NO: 4136850 - RNA, 59 nt, Human
auuuacuuuugguaaggucauuucagaacuggguuuugaggugguuccaauaaguaggu

SEQ ID NO: 4136851 - RNA, 56 nt, Human
auuuagcaaaaaaugaugaagcauccauuagaugcuauaauugcaaauugcuaagu

SEQ ID NO: 4136852 - RNA, 76 nt, Human
auuuagucacaacuaggagcuucugccauagaaagcaaaaacagucuucugggacauucucuccauaguacugagu

SEQ ID NO: 4136853 - RNA, 74 nt, Human
auuuagucaucacucauguguuccuaauagauacuugguaagagcugguugaaugaauggauggaugacugaau

SEQ ID NO: 4136854 - RNA, 66 nt, Human
auuuauaauucuguuuuccauggcaguuauucuguuaugcuaaauucagacaggguuaauguagau

SEQ ID NO: 4136855 - RNA, 124 nt, Human
auuuaucaaauuacuaucauuaaugucuuaguaugaacucauuuauuuuccucuuucuauggaaaagaugaccaaaacagggaaguacauaggguucuucuuagagaaggugguuuugguagau

SEQ ID NO: 4136856 - RNA, 68 nt, Human
auuuaugcauucagagguugggugugcuuauguuuccagagagacaacagcuauugaauagcauaaau

SEQ ID NO: 4136857 - RNA, 66 nt, Human
auuuauggccagguucuggggagguacaaaguaugauucuugcuuccagggacuuggaauuuaaau

SEQ ID NO: 4136858 - RNA, 103 nt, Human
auuuauuaaccagaucucagaggggaaaauguaacauugaauuauauaguuuauaaauuugggcuauauacauguucauuacucuuuaacucugcauuuaaau

SEQ ID NO: 4136859 - RNA, 70 nt, Human
auuuauucauuuaacuacaagugucaaaccaaugaacaauggauagaaacuuucuguuagaugaauggau

SEQ ID NO: 4136860 - RNA, 62 nt, Human
auuuauuccuuuuguguuagcugcuuugaacaugauuagggaaguuugugggaggaauauau

SEQ ID NO: 4136861 - RNA, 61 nt, Human
auuuauugagacuuaacaacccaguuauguguguugugugguuguuaaggucucaauaaau

SEQ ID NO: 4136862 - RNA, 89 nt, Human
auuuauuuuucauuagugguguuauuagagcauuaauuuuccaaaagaaaauuuguagaauguuaaugaagcuacaguaggaaauaaau

SEQ ID NO: 4136863 - RNA, 58 nt, Human
auuucaaagguuuugucaugucuggcagugaugcaaagguaagcaaauuuuuuggaau

SEQ ID NO: 4136864 - RNA, 64 nt, Human
auuucaaggucauuuuugccuucuauuuucuuaggacucugaggagaaagaugauuuaugaaau

SEQ ID NO: 4136865 - RNA, 83 nt, Human
auuucagaggauugccuccuuuuuaaacucucaaucggccugcucaaaggaccagaauucagaaagggcauaaaaucuggaau

SEQ ID NO: 4136866 - RNA, 68 nt, Human
auuucaggcuuagacuaccuggucuguaauuuaggauauuaaugaccuaggugguuugagcucuaggu

SEQ ID NO: 4136867 - RNA, 57 nt, Human
auuucaguguugguuagcaagcuguacuggugagaguuaugggacagacacugaaau

SEQ ID NO: 4136868 - RNA, 75 nt, Human
auuucaucuggucuaguuuuuaguacucuuucuggauuacuggcugaggauuaagaaacauggaccagaugaagu

SEQ ID NO: 4136869 - RNA, 58 nt, Human
auuucaugagcuaauggaucucugaaaagccaauuuaaauuuccaggguuuaugaaau

SEQ ID NO: 4136870 - RNA, 80 nt, Human
auuucauuauggaaggguuuauaaaauguuggauaauucuguguaauucucacaauugagauccucccacccaaugaggu

SEQ ID NO: 4136871 - RNA, 74 nt, Human
auuuccacuaaaaguauuuauggcuauguaaaaugaauuuguaguuuuaagccauuuguaugcuucagggaagu

SEQ ID NO: 4136872 - RNA, 112 nt, Human
auuuccagggacaauuuuugcauccucaggggcuagcacuuaauguuucuugaauaaacaaauaguaaagugguagccaucauuuugggauucaauuguuuugaauggagau

SEQ ID NO: 4136873 - RNA, 56 nt, Human
auuucccaaguguaaacauggcaaaagacugcuggccugccuuuauucugggaaau

SEQ ID NO: 4136874 - RNA, 128 nt, Human
auuuccccuggagucaaaagccuacuuuuggagccgccacacccucgugcucccucccgcaucucggggguuccgggggaugcacguggggguggccccaggagcccugggugggaucucggggaaau

SEQ ID NO: 4136875 - RNA, 130 nt, Human
auuucguucauauguauuuaauagguuugugaguaacaauacuauuuucaguauccuagguaagucuaagugauucuuuaaagugguauuuauucacucaguuugaaaugaguaaaauguuuaaugggau

SEQ ID NO: 4136876 - RNA, 59 nt, Human
auuucuaaagagggugguuuggcagacagcuuacuuucaugagcuauccucacugaaau

SEQ ID NO: 4136877 - RNA, 86 nt, Human
auuucuauaucuguaaaacggggauaauagaauccuuaucccacuggauuguaaugaggauuaacuguugucauagguguugaagu

SEQ ID NO: 4136878 - RNA, 57 nt, Human
auuucucaguaggugcacagugguuuggaaaauuuccagcucugcauuuauggaagu

SEQ ID NO: 4136879 - RNA, 70 nt, Human
auuucucauuuagaguggcagggaagagugaagugaaaucaaaugcauccuccgauucuuaaauggaaau

SEQ ID NO: 4136880 - RNA, 60 nt, Human
auuucuccaagguucuuugucauguguuacauguuacaacucccugaaccucggagcaau

SEQ ID NO: 4136881 - RNA, 82 nt, Human
auuucucuaagcauccguuugcucaucuacauuggaugauggaucauccaauguagaugagcaaacggaugcuuagagaaau

SEQ ID NO: 4136882 - RNA, 63 nt, Human
auuucucuggacugcaguaagccucaugacucuuuaaaagacaugggaaaugcaaagagaagu

SEQ ID NO: 4136883 - RNA, 59 nt, Human
auuucugccauagccaggggauucacuuuaugacggauuguuuucuggaugguugaagu

SEQ ID NO: 4136884 - RNA, 56 nt, Human
auuucuguugcuuauaaauuacccagucuaagguauuuuguuauagcagcaggaau

SEQ ID NO: 4136885 - RNA, 79 nt, Human
auuucuuccccagugcucuuaaaggucauaagaucauuaugauuauuaauuaugggccuuuagaaguaccaguagaagu

SEQ ID NO: 4136886 - RNA, 120 nt, Human
auuucuuuccaucucaugggcuacaccuugaucuaacauuuuaauacuugugcuuacuuuaagaccuuuuuagcugaagaugaugguauauaggguauguggcaagagauggaagggaau

SEQ ID NO: 4136887 - RNA, 66 nt, Human
auuucuuugugcuucucaagaaaagugaagggugaaugaaaaucucuucacuugaaguucagaaau

SEQ ID NO: 4136888 - RNA, 90 nt, Human
auuucuuuuucuuuguauuuuuguugauuacuguguugcugacauuaguuauggaagcacuuuaagcaacagaucaacagaaaaaggagu

SEQ ID NO: 4136889 - RNA, 76 nt, Human
auuugaagguuuaugaaggauagggcaaaauuuucuaaggaaaguugcauccuaugaccucaggcugacuucaagu

SEQ ID NO: 4136890 - RNA, 87 nt, Human
auuugacugguuuuguauacaauucacacuucccaguggaugcauaauggagaggugguuguauugccacuaagggauuagucaaau

SEQ ID NO: 4136891 - RNA, 57 nt, Human
auuugaugggcccgugggacaaccacauugagauguugucuuuaggaccuguuaaau

SEQ ID NO: 4136892 - RNA, 58 nt, Human
auuugauugcaguuaguuggauccccaagcuuuuaacuacauuucacugcaauuaagu

SEQ ID NO: 4136893 - RNA, 59 nt, Human
auuugccaguguaaaacaaauuauuugguauuuauuguauuuggauauugcuggcaaau

SEQ ID NO: 4136894 - RNA, 79 nt, Human
auuugccuagaauaugugguguauacuuuuggcugauaagauauaguugucaaaaguauauaccacauauuugccagau

SEQ ID NO: 4136895 - RNA, 98 nt, Human
auuugcugggaggcuggaaacccuaguucugucauuggcuggcuagaugaccuugaaccuagcugugggccugggagagcuguuagccucuggcaaau

SEQ ID NO: 4136896 - RNA, 61 nt, Human
auuuggcucgauggacuuugaauccuuuguauuugaaauucacucuccauugaguauaaau

SEQ ID NO: 4136897 - RNA, 124 nt, Human
auuugggcuuugaaaggauccugcuugucugugugccagcauccugguggugguugggggagucugcaucaauccugggugcuguuaccugaaaaaauagcagguguuagacgaaagaacagau

SEQ ID NO: 4136898 - RNA, 55 nt, Human
cacaugcaugaaauccauaaacacaggggcauggcugugugugcgcgugugugug

SEQ ID NO: 4136899 - RNA, 55 nt, Human
cacaugccaggguagcauugugacaugugacuguccagacugcccugcacaugug

SEQ ID NO: 4136900 - RNA, 56 nt, Human
cacauggcagcugaugauuggaaaccaugcugguucacuguuacggcugucauuug

SEQ ID NO: 4136901 - RNA, 78 nt, Human
cacaugggaugauugauuugcacugucacacggcucugcugggugucauaacuuagugacaaaucaaggauuacagug

SEQ ID NO: 4136902 - RNA, 62 nt, Human
cacaugggcugugaacccaggcugucugaguuugaauuccagcugcggucauuagcugugug

SEQ ID NO: 4136903 - RNA, 69 nt, Human
cacauuaaaaugauggagaacaaagaaaaucuggcccaguuuuucuagaaaucuccuccuuaaggugug

SEQ ID NO: 4136904 - RNA, 62 nt, Human
cacauuaaugggaugagguggaaaguuggacacacuaccucacagucugccuuucccuugug

SEQ ID NO: 4136905 - RNA, 87 nt, Human
cacauuacgggcuaucgcuucauccgugaagccaaagaaauguguuuauuugguuugguuuggggugugugugugugugugugugug

SEQ ID NO: 4136906 - RNA, 55 nt, Human
auuuuagugaaauuuggccuuugugucuaggcacagaagucaauugaacugaaau

SEQ ID NO: 4136907 - RNA, 98 nt, Human
auuuuauuuuugacauaaugguuagaaagguuuugcucugaaauaucugaaauugaaauuugagagggcuuuuuuggcucuauaagguuaaaugaaau

SEQ ID NO: 4136908 - RNA, 99 nt, Human
auuuucagauauguuucaaugucuauguacauuuuauuguguugucucuaagaaaguuagcaguugaaauguagauuaggcauucucauuucugaagau

SEQ ID NO: 4136909 - RNA, 78 nt, Human
auuuuccaauguagaugucucugggauugccagcagcuuaucgaaucuggaccagugaaacuuucuauguugugaaau

SEQ ID NO: 4136910 - RNA, 66 nt, Human
auuuuccagccuuucuagaacucgagguuauauauaacccuacugacuuuugagaagcuggaagau

SEQ ID NO: 4136911 - RNA, 87 nt, Human
auuuucccccuuuuuuguagcuaaaaaucacccaggcuuguccagacgagagggcagaaaauuaugcggugaaagagaagggaagau

SEQ ID NO: 4136912 - RNA, 58 nt, Human
auuuuccuaaaagagcaaaguggaccauucccccuccucucagcucuucagggcaagu

SEQ ID NO: 4136913 - RNA, 80 nt, Human
auuuuccuaggaugacacagcaaguauaguaaaucugaaaucagagccagcuacauaaucugugagguccuauggaaaau

SEQ ID NO: 4136914 - RNA, 75 nt, Human
auuuuccuuucauguucucccuucacuuuauugugagcaacauagugauuuggcggcagaguuagaaauaagaau

SEQ ID NO: 4136915 - RNA, 57 nt, Human
auuuucuagauagaugaugcauaaguuuuuaaucuucugcuugcacaucuagaaagu

SEQ ID NO: 4136916 - RNA, 58 nt, Human
auuuucuauucugcugguuuaggguuaccaucacagacucauccuguagauagaaaau

SEQ ID NO: 4136917 - RNA, 69 nt, Human
auuuucucuuucauggagaaaagcuauagcuuucacuauucauggcuucuuaaucaugagagugaaaau

SEQ ID NO: 4136918 - RNA, 108 nt, Human
auuuugacuauuuaaaucaacauuugauuccauccucuacuacagaucuauauaugaaagauaucggaguagaggaugggguuaaauauugacuuaccaagucaaaau

SEQ ID NO: 4136919 - RNA, 58 nt, Human
auuuuggcaguuugugcugaggucuuugcugacacucaaacuguuauauugccagagu

SEQ ID NO: 4136920 - RNA, 103 nt, Human
auuuuguccuggggcccauaggucacucacagcagacuaugagggauauaaacaugaauaaauggaguccuuagcugucugugcuggaaguccuaggcugaau

SEQ ID NO: 4136921 - RNA, 55 nt, Human
auuuugugaauuaucuacaggacuucuucauucucauguggaggguucucagaau

SEQ ID NO: 4136922 - RNA, 77 nt, Human
auuuuguuuaagauaugguaggaaguuuggcaguguugacaggaaggcacaaaucauuccaucauucuuagcaaaau

SEQ ID NO: 4136923 - RNA, 79 nt, Human
auuuuguuuuauagguccugugagauuuaugcuuuaaagagguucuguuuggauguguuuccaggauuuguuucaagau

SEQ ID NO: 4136924 - RNA, 98 nt, Human
auuuuuaaaaacauggaaacaaaccaggagacuguacugauauuuggauuuaaguuagagaucacaguuuuuuggccaacuucuuugauuuuaaaaau

SEQ ID NO: 4136925 - RNA, 70 nt, Human
auuuuuaauauuccugucaagaucuuacaagaagaaauuacuuugugagguauguagggaugcuaacagu

SEQ ID NO: 4136926 - RNA, 101 nt, Human
auuuuuaugacuucuauuugguguugucauaggaaacucagccagagccuaagucuggcuuuagcugccuagacagcuauagcaaaagaagcuguagggau

SEQ ID NO: 4136927 - RNA, 65 nt, Human
auuuuucaaaucaaauuuguuucugauuacucaaguagguagaaauagauauugguaagaaaaau

SEQ ID NO: 4136928 - RNA, 73 nt, Human
auuuuucauauggaaauaauuagacaagugcccaaaguuauagguauauguuuuguguuugccacugaagagu

SEQ ID NO: 4136929 - RNA, 87 nt, Human
auuuuucuuuuaggcuuuucuauguauuucagauuuaccacaaugaauguguguuuguuuagugcagagagaaaaauaaggaaaaau

SEQ ID NO: 4136930 - RNA, 114 nt, Human
auuuuugaacuggacuuugacagaugcguaggaguuugcuggauggaguaacagcuucaggcccaacgcacagcuucugacagauccccauguuaagggucuauucucaaaggu

SEQ ID NO: 4136931 - RNA, 75 nt, Human
auuuuuggguagcucaauagagccacaaagugaagaaagcaauaauuauguggccaccagagcugcuauuagagu

SEQ ID NO: 4136932 - RNA, 82 nt, Human
auuuuugguucaagggcuguaguuuguugaucaccauccuaggagggugguucucaaaguauacucccagggaacuagcagu

SEQ ID NO: 4136933 - RNA, 68 nt, Human
auuuuuguauuauuauaaucagggcacaguguuuccaaggcugugcauaaguauaauaaaccaaagau

SEQ ID NO: 4136934 - RNA, 82 nt, Human
auuuuuguauucuuugcccuuaaugaaauaauuguuauaugcuggaaguuagugauugccguuuuggguagaaugagggagu

SEQ ID NO: 4136935 - RNA, 80 nt, Human
auuuuuguggccuuucaaggauggaaucuuuuucugaccugauccacaaauucuggaaaggccccucuguugacagaaau

SEQ ID NO: 4136936 - RNA, 112 nt, Human
auuuuuuauaucuaaguuguuaugguuugucuaaaugaguaauacuuuauaauuuguugcuuucuguuacauauuuggauagguucugucaaacuuuagguuuuauuugagu

SEQ ID NO: 4136937 - RNA, 90 nt, Human
auuuuuuauuuuugauacuuugugcaauuucucuagaauaugaggauuaagaaccuuagggauuguauuagugucacagcaguagaaaau

SEQ ID NO: 4136938 - RNA, 85 nt, Human
auuuuuuccaucagacauuuuuauauuugugcugagauaaugcuucaaauguuucaacacaacagagaaaugcuguggaaaaaau

SEQ ID NO: 4136939 - RNA, 78 nt, Human
auuuuuugaacaguuucuauguuagugguucuuaauccuaacugcaagccagaaccacccaagaggcuuuuauagaau

SEQ ID NO: 4136940 - RNA, 76 nt, Human
auuuuuugcucuaucuuaaagacugcggaauuugaauggaaaauucaacaggaaagcacuuuacagagcagagagu

SEQ ID NO: 4136941 - RNA, 79 nt, Human
caaaaaauaagauugacacaaguaccugggaggaugugugugcauacauacaggucuuguuuaguaauuuauaaauuug

SEQ ID NO: 4136942 - RNA, 70 nt, Human
caaaaacuggaaauagcccagguguccuaguuuuagaaauggagaacugauuagcauuugccaggguuug

SEQ ID NO: 4136943 - RNA, 121 nt, Human
caaaaagaaccaccaccccaaagauagugucauuauuucuucucuuucacggucagccuguuuaaucugaaguuuguagauagaaaaaugauuauaucuugcaagggucauaaauuuuuug

SEQ ID NO: 4136944 - RNA, 82 nt, Human
caaaaagacuucauuauucacucagaaauagaaugaaccagaagaaaaugguuuuucugguuugaguuaguguucuuuauug

SEQ ID NO: 4136945 - RNA, 81 nt, Human
caaaaagcaagaaucuccauuccuguuuuaccuuauguaagaagguugggcacggacagguggggaugaagcuugauuuug

SEQ ID NO: 4136946 - RNA, 72 nt, Human
caaaagaccugaaauauaaucuaguacccuuuuuaccuggggauccuuggauggauuucagagauucuguug

SEQ ID NO: 4136947 - RNA, 55 nt, Human
caaaagacuuucaccuagcaaagaggcguucguucugaugagggaaagucuuaug

SEQ ID NO: 4136948 - RNA, 83 nt, Human
caaaaucaggaucuacauugaccuuuguuagguugaaaugauggcucaaaucuaccaacauacggucaguagucuugaucuug

SEQ ID NO: 4136949 - RNA, 77 nt, Human
caaaaugaaaacaaaacccagccgcuggugcagagucccuugaaagcucuggauccggcugggucuguuagcuguug

SEQ ID NO: 4136950 - RNA, 122 nt, Human
caaaaugauaccgaauauaaggagcaauagucacgugcaucuuuccauaugugguugcagaaacacaauucagaugucagcaagagguguuaauauugcucuuuaucuaaaaucucauuuug

SEQ ID NO: 4136951 - RNA, 55 nt, Human
caaaaugcaucugagaccaggcacggugacucaugccugucaucccagcauuuug

SEQ ID NO: 4136952 - RNA, 81 nt, Human
caaaauguugucucaagggaggcuggaguacaugauucuucugauguggacuguguuuccccuccuggagaaggcaggcug

SEQ ID NO: 4136953 - RNA, 61 nt, Human
caaaauuggguuagcucucagcagcccgcucuugagcucugaaaaagcuugccuucuuuug

SEQ ID NO: 4136954 - RNA, 90 nt, Human
caaaauuuugcguguggucuguguagauacauauguauauccguauauacauauguauauguacacagucauuauuauguauauauuuug

SEQ ID NO: 4136955 - RNA, 75 nt, Human
caaacaaaaugacauacuuuuagauagaugggcuuugaagagaauaaccauccucuacagguucaagaguguuug

SEQ ID NO: 4136956 - RNA, 72 nt, Human
caaacaaauuuagcucugagugcuggggucucuuuucuaauuacucagcuuuuaguacguuaaaauuggaug

SEQ ID NO: 4136957 - RNA, 60 nt, Human
caaacacagacauagugauuacaggagccagguaggcaacugaaaucagucuagugggug

SEQ ID NO: 4136958 - RNA, 88 nt, Human
caaacagaaagagaacaugagaaccaggucuguguuuugccucugggaaaagcauaccauguguucaucuuguuuccucuuuuguuug

SEQ ID NO: 4136959 - RNA, 55 nt, Human
caaacagcaucugccaacucuacuuucacaguacagccccaugcagguguguuug

SEQ ID NO: 4136960 - RNA, 55 nt, Human
cacauguguauaugugaggggguggucugggugucucuauaggugugugugugug

SEQ ID NO: 4136961 - RNA, 58 nt, Human
cacauguuuggcaugucaccaaggguuuugacccaccggcuggcacuccaagcuagug

SEQ ID NO: 4136962 - RNA, 69 nt, Human
cacauguuuuuggccaucauggauaauauuuauuuucuaaacuucuggauggcuuuuuuaaagcuugug

SEQ ID NO: 4136963 - RNA, 78 nt, Human
cacauucacauuuuucccucuaaacaccaauuaaaauucagaacuucuggugaaauggaaggaaggaaguccaaugug

SEQ ID NO: 4136964 - RNA, 57 nt, Human
cacauucaggauuuuccaugucuuagugauggcauuucuggaauauuccuggaucug

SEQ ID NO: 4136965 - RNA, 78 nt, Human
cacauuccagaaaccuuugucuuaaucaaccugagagaauccagcuuucagccagagggggcaaaggaagggugugug

SEQ ID NO: 4136966 - RNA, 69 nt, Human
cacauuccagguagggaauaaaugucaugugagugccacacgugagugaaaaauuugccuggagcugug

SEQ ID NO: 4136967 - RNA, 74 nt, Human
cacauucuaaagcaugcucaggauauuaucauuuauuuuugcacauauucuuucugaguaugauuuugucugug

SEQ ID NO: 4136968 - RNA, 60 nt, Human
cacauugaacuugucuggugggcagccucaacaauuccauccaccaacauaggaaaugug

SEQ ID NO: 4136969 - RNA, 56 nt, Human
cacauugccacacaaguaaagaaacaacuucuguuucaacuagguguggucaugug

SEQ ID NO: 4136970 - RNA, 88 nt, Human
cacauugccucuugguccuagccagggcucugcuguuccuggaggagcggcugugggccagcuagacccuuguccacagaggcgagug

SEQ ID NO: 4136971 - RNA, 66 nt, Human
cacauugcuucuguugcaaugauccagcgcugccauuguagugugaaaggagccauagacagugug

SEQ ID NO: 4136972 - RNA, 130 nt, Human
cacauuggaaugaccucaggagcuuuaaaaacuacgaaugcuuggguuucagccccagagauuugcguuuaaucggucugagguguagcugggcuucaagcuuuuaaaagcuccucaggugaugucacug

SEQ ID NO: 4136973 - RNA, 55 nt, Human
cacauuuacauauaaaacuuuccccagugggccacagaggauuuauguggaugug

SEQ ID NO: 4136974 - RNA, 55 nt, Human
cacauuuagaguucuuuacuccaguaugguaccguauggaauggauuuaaaugug

SEQ ID NO: 4136975 - RNA, 81 nt, Human
cacauuucuucagaguaguuggauuuggggaacagggaguaauauuuuuuccacaaaucaauucugcugaaggauggugug

SEQ ID NO: 4136976 - RNA, 60 nt, Human
cacauuugaugcucuauuuaaaaggacauccaacaugucuuuagaagaacaucagaaaug

SEQ ID NO: 4136977 - RNA, 69 nt, Human
cacauuugcuggcugaauguuggacacuuacguuuauuaaaggcaugagguucaccauucagagaugug

SEQ ID NO: 4136978 - RNA, 89 nt, Human
cacauuuuguuuaucuauucaucagcuaauggacauuuggauuguuucaauuuuuuggcuguuaugaguaucauguacaaguuuaugug

SEQ ID NO: 4136979 - RNA, 57 nt, Human
cagacaggguuuuggucuuugguuucugugaucccaguuguucccaugacccugcug

SEQ ID NO: 4136980 - RNA, 58 nt, Human
cagacagguugcaaaacuucaaacagaagagaguuguuggaguuaugugauaugugug

SEQ ID NO: 4136981 - RNA, 57 nt, Human
cagacaguauuuaacuaguucauucgccucaggccuaauggccuagaagugcugcug

SEQ ID NO: 4136982 - RNA, 73 nt, Human
cagacauacaguaagugucccugaaaccuuagaccuugucucucuggcuuuaaauacuguacuguuuugacug

SEQ ID NO: 4136983 - RNA, 58 nt, Human
cagacauccagguacgagcuuuacaggguuaaacuucugaucguugccuggaagucug

SEQ ID NO: 4136984 - RNA, 60 nt, Human
cagacaugagauacagcugcuacaaaacaacaccgauuaauaguuguauuuuaugugcug

SEQ ID NO: 4136985 - RNA, 60 nt, Human
cacugaaguuucuuauuucaacuggaacauucuucuugaaugugugugauaggaucagug

SEQ ID NO: 4136986 - RNA, 58 nt, Human
cacugacacucuugauccuauaguaggguuggguuccacaauagaauagaguguggug

SEQ ID NO: 4136987 - RNA, 65 nt, Human
cacugacuaggucggugaccuccaccagccaguccgggccuaacauggugaccaccuggucagug

SEQ ID NO: 4136988 - RNA, 57 nt, Human
cacugagcaagucaguacagcacaauccacgcuagcuacaaauggcauuguuuagug

SEQ ID NO: 4136989 - RNA, 79 nt, Human
cacugagcagaucucaggccuucuguugcugggugguaaaggaggucuuuguggccacgggagggcuguuugcuuggug

SEQ ID NO: 4136990 - RNA, 65 nt, Human
cacugagcaugcacccaggaaggguuaacccucacccuaucccuucccuaaagcgucgcuuagug

SEQ ID NO: 4136991 - RNA, 79 nt, Human
cacugagcuauguuucagggaaguguugaaaaggcccagccugcgcauauucuugaaauuuugaaauaauggcucagug

SEQ ID NO: 4136992 - RNA, 69 nt, Human
cacugagggacucccaccuggcagcagucaccuccgcaccuucaccgaccacugcagggagccccggug

SEQ ID NO: 4136993 - RNA, 59 nt, Human
cacugagguaucugucucuccuacuauaguguaaacaccuuggaggcaggucucaugug

SEQ ID NO: 4136994 - RNA, 101 nt, Human
cacugaugaacacuuucuuccuugcucaggccuggaagagugguaggcccuuagcaaaugagccagauugaagagaugaaugaauuuguguacucacagug

SEQ ID NO: 4136995 - RNA, 55 nt, Human
cacugauuaagucugcuagagggcuaacagaggucacugauaggcuuuaucauug

SEQ ID NO: 4136996 - RNA, 56 nt, Human
cacugauugcuuuuggccucugaggagcuacagcaggcugagacugugcauuagug

SEQ ID NO: 4136997 - RNA, 56 nt, Human
cacugcacaaaaagcugcaacugucuguccaguggagaguagcagaaagugcagug

SEQ ID NO: 4136998 - RNA, 67 nt, Human
cacugcacacuccaagaccuacuuucucuggagcucuagaaaaagucaaggaauuggacaggcagug

SEQ ID NO: 4136999 - RNA, 71 nt, Human
cacugcagaaggaggaggaaauccauuuaucucaacaagagaagcuuggcuuugucuucugucugcuugug

SEQ ID NO: 4137000 - RNA, 62 nt, Human
cacugcagccacauagaugacguucccuuuguuggaauugcaaaguuuuguggcuaguagug

SEQ ID NO: 4137001 - RNA, 60 nt, Human
cacugcaggggaccaaagucugacuccaaaaggaggcagaaugccaggucuucugcagug

SEQ ID NO: 4137002 - RNA, 87 nt, Human
cacugccaccagcaccaguacuugcuaccucaauugaguauuuuuaugaaacacauugcagguugcacagugcagcuucaggccaug

SEQ ID NO: 4137003 - RNA, 62 nt, Human
cacugccagguaagugcuccugccaaugcaucaguguagagcaagccugccaccugguggug

SEQ ID NO: 4137004 - RNA, 65 nt, Human
cacugcccaccaaguggcugguaugggcacuuacauugccgcccucauggucacuguggauagug

SEQ ID NO: 4137005 - RNA, 84 nt, Human
cacugccccacuggacccgucgccccccugggaggggccgccaguucggcuggcccugugggccaugugucuacagggguugug

SEQ ID NO: 4137006 - RNA, 61 nt, Human
cacugcuugcaguaugaguggaaguuuaaacaagguuucuuguauucauaagugaacagug

SEQ ID NO: 4137007 - RNA, 74 nt, Human
cacugcuuucugaggauaacaguuuaagauauuucuucugaaaaauaauagcuguuuucuucuaggaagacaug

SEQ ID NO: 4137008 - RNA, 70 nt, Human
cacuggaaccuggcagcccuauaucugcagugcacuucucagggggacuuguuagguuuuauauauagug

SEQ ID NO: 4137009 - RNA, 65 nt, Human
cacuggacugaccacccuucccccuugugcaguugcgcccaaagggguggucaguacccgcagug

SEQ ID NO: 4137010 - RNA, 55 nt, Human
cacuggccuaauccaauggacauuuauuguuacuucauuaugguugggcacagug

SEQ ID NO: 4137011 - RNA, 130 nt, Human
cacugggaauuucuggagucugggaguucugucuuggggugccucugcaugcucagcacccacauuugagaaaugcuggugagugaagagaugagaggucccuggccuuagaagucuuccagucuaguag

SEQ ID NO: 4137012 - RNA, 55 nt, Human
cacugggcugauaccaggcuucgugagggucggagccuugugcuguuguccagug

SEQ ID NO: 4137013 - RNA, 88 nt, Human
cacuggggaugcuuauugaaaugcagaaucucaggccccacccuagaccuagugaauuggaaucugcaauuuaacaaaaucccuugug

SEQ ID NO: 4137014 - RNA, 107 nt, Human
cacuggggugauguuaccauaauaauuauggaauuauggcuuaaaaucaaaucacuauuguggacauuuaagucaugauucuguguuacuaggaaaccaaacuagug

SEQ ID NO: 4137015 - RNA, 87 nt, Human
cacuggguggugugugaauuagagagggaauacagccugggcaggauggagaaaccccaucucuacaaaaauuagcaugcaccugug

SEQ ID NO: 4137016 - RNA, 63 nt, Human
cacuggguuuccuggcacuacccucccuguggaaccuggccggcugccaggagaagcucagug

SEQ ID NO: 4137017 - RNA, 75 nt, Human
cacugguaugucugagucugcuccaguugaaaaucaugccuugaaaaugcaaccugagacuccaggcaccuaaug

SEQ ID NO: 4137018 - RNA, 60 nt, Human
cacuggugaguccagaagucauaagagcagaugcugcaguagcaguuuggaucauuagug

SEQ ID NO: 4137019 - RNA, 61 nt, Human
cacuguauuauuaggaaugacaucuuggcaaagaaaaugccaauucucuaguggugcaaug

SEQ ID NO: 4137020 - RNA, 79 nt, Human
cacugucugacccuuuagagaaaguuugucaaccccuggccuagaacauggguggcuucuuacuagggcucaguaagug

SEQ ID NO: 4137021 - RNA, 62 nt, Human
cacugucuguagacauuuuugguugucacaacugggugggaggcaaggugcuacagacagug

SEQ ID NO: 4137022 - RNA, 58 nt, Human
cacugucuuuugugaagacaaugaggaagcacguacucuuuuguagcaaauggcagug

SEQ ID NO: 4137023 - RNA, 69 nt, Human
cacugugggccugucguggguggggccagcagcacaugcaugccuggcucacagagcagccuuugggug

SEQ ID NO: 4137024 - RNA, 82 nt, Human
cacuguuagauuaaaugcuuugcaagaucugccaugaugcacuguaucaucucauucauccaaggauuuauuucaaccugug

SEQ ID NO: 4137025 - RNA, 61 nt, Human
cacuguucagcuugaaucuggcuuugacaaaaguuaugccaaucccaggcuggacacagug

SEQ ID NO: 4137026 - RNA, 67 nt, Human
cacuguugaagauacuuccucuagcaauuaaacaccugaaaaagaugaugugugucuucagcuagug

SEQ ID NO: 4137027 - RNA, 92 nt, Human
cacuuaauaagaaugccaccuucugcuugagcucuaucucagugugccacaacaaacugggaagcacgcucagcagaaaaaccaguuaagug

SEQ ID NO: 4137028 - RNA, 57 nt, Human
cacuuacacuucugaaagccuagguccaacuauagggcugauaccgggagagaagug

SEQ ID NO: 4137029 - RNA, 57 nt, Human
cacuuacauacugagaaaauauccugccuugucagggugugugugugugugugugug

SEQ ID NO: 4137030 - RNA, 96 nt, Human
cacuuacauguucaggagagcuucuuccaaggacgcaccuuguguauccaaggcuuaugugcauucuuggaagaagcucucccaaacauguaagug

SEQ ID NO: 4137031 - RNA, 69 nt, Human
cacuuaccagagaugucuaauaggggcagccugagaauuguccagacggccucaggcauccugcaggug

SEQ ID NO: 4137032 - RNA, 69 nt, Human
cacuuacugagagccuccuguuggcuaggcauaguucuaggcacuagcgacaccaaggcaggggaagug

SEQ ID NO: 4137033 - RNA, 71 nt, Human
cacuuacuuugauacugugaagccuaacuuauacauuuuuauagaaggcagaucaguacaggguuaagaug

SEQ ID NO: 4137034 - RNA, 99 nt, Human
cacuuaguuuucuagacauuucuauguacaugaucuuauuagacccucuuaaugacugagguaggacuguaucagaugugaucuagaguauguuaagug

SEQ ID NO: 4137035 - RNA, 102 nt, Human
cacuuaugaguaaacaauuaguuuggggauugaaauguaaauaggacuagaauucaugaauuuguucucaacauuuuuccucucugacaaaacucauguuug

SEQ ID NO: 4137036 - RNA, 82 nt, Human
cacuuauuuuaaagauugaauauagagauucuuguggcaaaccuaagcuacugguagccacucuuuacuaucaaaauaagug

SEQ ID NO: 4137037 - RNA, 61 nt, Human
cacuucagcuacaaucacaugauggagaaaauuaagaguuaugugaauuaugugcuaagug

SEQ ID NO: 4137038 - RNA, 79 nt, Human
cacuucccaacuguuggaggauuauuuugcuccacacgaagacaggagagcaaaguauuaaccaacaggauguggagug

SEQ ID NO: 4137039 - RNA, 69 nt, Human
cacuucccacugcaccagcugcuagaacaucacaggaagaaaugccuuggagcagcuggagguggagug

SEQ ID NO: 4137040 - RNA, 60 nt, Human
cacuuccguauaauaauguuaacauauaaauugauguguggccuuauuuguaugggggug

SEQ ID NO: 4137041 - RNA, 90 nt, Human
cacuuccuuugucagucaugucugcuuuucuucaaauggagccuuaagaggcccuuaugcaaaggcagaaauagauuuauaaauuaagug

SEQ ID NO: 4137042 - RNA, 56 nt, Human
cacuugaaugagaauuuccuggggaugguccugggaauguguauuuuuaacaagug

SEQ ID NO: 4137043 - RNA, 61 nt, Human
cacuugaggaaauggaagccaagagacuugaucaaggucacacagcuccuuuccuuaguug

SEQ ID NO: 4137044 - RNA, 84 nt, Human
cacuugcaacaaagagaaggcaagcuuuggauaugaguaaagacaauuacauauauuuauuuucuucuuauugaguagcaagug

SEQ ID NO: 4137045 - RNA, 73 nt, Human
cacuugcauuuucagccucacaauuggcaacuuuaccagaaaaaaguagcuauuuugcuuggaaauacaggug

SEQ ID NO: 4137046 - RNA, 70 nt, Human
cacuugcccaagauccuacauccugaaagucugaauuuuggcuugucagggacaguucuuagggugggug

SEQ ID NO: 4137047 - RNA, 88 nt, Human
cacuugucccaggagaggaggcucccucaacucugggugcucacugugggcacccacagacaggcagcccuucagcagggugcaggug

SEQ ID NO: 4137048 - RNA, 84 nt, Human
cacuuguuuaauggaauacuuuuuagccuguaggucaacagaucaauaugcuggcacgaaaggguguccaugauagauuaagug

SEQ ID NO: 4137049 - RNA, 63 nt, Human
cacuuguuuugugaauuacagaaaugguaagugcccacauuucugugaauuauaaaauuugug

SEQ ID NO: 4137050 - RNA, 65 nt, Human
cacuuuaauuucuuuucccuagugucagcugcucaagccugaccaggguagaggugagaggagug

SEQ ID NO: 4137051 - RNA, 57 nt, Human
cacuuuacccuuguuacucauggcuucccgucaagccauggguauuaggugacagug

SEQ ID NO: 4137052 - RNA, 75 nt, Human
cacuuucauucauuuacaauccauaacuuccaguucaagaaucuaauuuggaguucagaguaaauguugaaggug

SEQ ID NO: 4137053 - RNA, 65 nt, Human
cacuuugaguggccaggccuauguauauucugggaucuugcagaggcacugugucaguuggggug

SEQ ID NO: 4137054 - RNA, 71 nt, Human
cacuuugccuuuagauaagccuucugcaaauuagaauguaaugaaagaccuuguaacuagaggcccaagug

SEQ ID NO: 4137055 - RNA, 70 nt, Human
cacuuugggaggccaaggcggguggaucagcugacuucaggaguucaagaccagccuggccaacauagug

SEQ ID NO: 4137056 - RNA, 70 nt, Human
cacuuugggaggccacggcggguggauuacuugaggucaagaguuugagaccagccuggccaacauggug

SEQ ID NO: 4137057 - RNA, 88 nt, Human
cagcuuacucugccuguugcauuuucccuccagagguccaaauauuaucacguauggauauggaaauagcaauaugguuggaagguug

SEQ ID NO: 4137058 - RNA, 56 nt, Human
cagcuuagcagcuggagguaccauggacauucauuccuucuucaucuccugagcug

SEQ ID NO: 4137059 - RNA, 59 nt, Human
cagcuuaugguauagacagaguacuuuacccacuucuauauucugcuguuccuaggcug

SEQ ID NO: 4137060 - RNA, 64 nt, Human
cagcuuccaagccucaguccucaggcuacaaugagucaaaaauaggaagaaagguuggagguug

SEQ ID NO: 4137061 - RNA, 71 nt, Human
cagcuugacaacugugcuuugaggccgggugugguggcucacgccuguaaucccagcacuuugggaggcug

SEQ ID NO: 4137062 - RNA, 71 nt, Human
cagcuugcuaauuuuagauacaauuuccagggugaccuacccugaagagcacucuagaguugacugaguug

SEQ ID NO: 4137063 - RNA, 130 nt, Human
cagcuuuaauuaccaagcucuuauggaagcugagggaauuggcauuaacucuguuucaauuuguacuuuugcaaaugagauguaguuacaugacaaugauucacuucugugaggugucaaaaauaaacug

SEQ ID NO: 4137064 - RNA, 58 nt, Human
cagcuuuaccaauauuuggaaaguuugacagcaaccuguuuaagugcugguaggguug

SEQ ID NO: 4137065 - RNA, 57 nt, Human
cagcuuucacugauaugcuuugacuccccucuuagagaucaugcaaucagugaacug

SEQ ID NO: 4137066 - RNA, 63 nt, Human
cagcuuuccagagaccugcccccuuuucuagcuggggugcugauucuacuccuggaauagcug

SEQ ID NO: 4137067 - RNA, 83 nt, Human
cagcuuucuuauagucuuccacauuucaagaggcugccgccaaaguguaugguuuucugugggaagacagggagaggaggcug

SEQ ID NO: 4137068 - RNA, 76 nt, Human
cagcuuuugcauguuguguacaucaugcagggccugacugcagccagguaugcugccuacgaacaugcagaggcug

SEQ ID NO: 4137069 - RNA, 87 nt, Human
caggaaaagggauauuuagaagagaacaaugcauucaagcuuuuugaaaguauuugauuucuauuaccacauuucccuuucauucug

SEQ ID NO: 4137070 - RNA, 130 nt, Human
caggaaaagugccccacccaggggagggaccgguaugauaaaaggcaagcagcuugagggacagauccucccugcauccaaaggccuccucagucugcaguuccagcuccagguaagugcaccuucucug

SEQ ID NO: 4137071 - RNA, 63 nt, Human
caggaaacaaaccacucaugguggugcucuuuuugccuucacuaugaaguguuugucugccug

SEQ ID NO: 4137072 - RNA, 67 nt, Human
caggaaagggcagaugcuggaggagcuauuauagaaccuuccaucacucccuacacgaaucuuccug

SEQ ID NO: 4137073 - RNA, 71 nt, Human
caggaaauggggugacagugcaguggucauugaccugccaguguguccaggcccugugaccuugucucuug

SEQ ID NO: 4137074 - RNA, 62 nt, Human
caggaacaacucccagcaucucagaaucaaaucuccacuccuggaugcucuagucuuuccug

SEQ ID NO: 4137075 - RNA, 66 nt, Human
caggaacaggggagugaaccugaauuggacgacuaggaagaauuucaggcucugccauugucccug

SEQ ID NO: 4137076 - RNA, 61 nt, Human
caggaacccccacucucagcucugccaugucaaggcucagggcagagagggagggaucuug

SEQ ID NO: 4137077 - RNA, 60 nt, Human
caggaacccugacagguguccgaagcaggaaagccaugcuggcccuggcucagggaacug

SEQ ID NO: 4137078 - RNA, 58 nt, Human
caggaaccuaaagagacauuacaacuaaacgcaaugugguaucuuggaugggauccug

SEQ ID NO: 4137079 - RNA, 55 nt, Human
caggaaccugcuccaagaggcaagaaugaggcgauguuuugugaggagguuccug

SEQ ID NO: 4137080 - RNA, 57 nt, Human
caggaaccuugucuguguuguucauggcuauauccccagcacucagaacagggccug

SEQ ID NO: 4137081 - RNA, 94 nt, Human
caggaacuagauccaguuuuugccaggugucuuggcugacugucagagacagucaucugguuuugcauggcagcaucugguuuuacaguuucug

SEQ ID NO: 4137082 - RNA, 62 nt, Human
caggaagagguggggcuaaaguugguaauaugccaggggagugguaccacaucuugucccug

SEQ ID NO: 4137083 - RNA, 66 nt, Human
caggaaggagcugggagggacacaugcauuccuaggaugagcaugacagcugcccagcuccuccug

SEQ ID NO: 4137084 - RNA, 73 nt, Human
caggaaggcuagggacacagcucugcuccaucacacaggaaggcugggggcacugcuuugcucugucacacug

SEQ ID NO: 4137085 - RNA, 89 nt, Human
caggaagggguugucuaaacacgucucuuugaauauauucaacaaauaaaugcuuguaucuaaaggccuguugagaaacuacuuucuug

SEQ ID NO: 4137086 - RNA, 72 nt, Human
caggaagugaaauccuggucaacagguagguuccggcuuccuacuguucauuuggauuucucuguaaaccug

SEQ ID NO: 4137087 - RNA, 61 nt, Human
caggaaguucagagguuaauuuauuugccucaauggcacaaugaauuuuuuuggaggacug

SEQ ID NO: 4137088 - RNA, 83 nt, Human
caggaauauuacuuuuacccagugugguuuauagcauacauuuguacugaagcauauagggauguuaaugugaucuuuuccug

SEQ ID NO: 4137089 - RNA, 57 nt, Human
caggaauguccuugucauuucaguucagcgugaaaugcuuuuacaggauauuaucug

SEQ ID NO: 4137090 - RNA, 74 nt, Human
caggaauuggcugaaucccaauaagcagggaguagcauguuuggccacuuccuuugggaaaucacuaaggccug

SEQ ID NO: 4137091 - RNA, 84 nt, Human
caggacaaguuuaagaacugaguacguuaauaaauaagguccaguuuucaguuuggggaugucugaguuguugauaagguccug

SEQ ID NO: 4137092 - RNA, 61 nt, Human
caggacaucuucuguguuuuuacuguuggagucucagaaaaacaaaucuuuagguauccug

SEQ ID NO: 4137093 - RNA, 66 nt, Human
caggaccagcuggucaguugaagauuauagcaauaauccuccagcagaugauuagacccuggacug

SEQ ID NO: 4137094 - RNA, 65 nt, Human
caggaccuggggcuccaucuugcagaacagcucguggcucuuccaggaccuggggcuccaucuug

SEQ ID NO: 4137095 - RNA, 62 nt, Human
caggacuggcaccuagauccaaaggcaccaacuaggugcuugggaauguggagucagaccug

SEQ ID NO: 4137096 - RNA, 65 nt, Human
caggacuguguuuacagagaaacacgacugucucuuguugaagccgcugugaacacauuuuucug

SEQ ID NO: 4137097 - RNA, 78 nt, Human
caggacuuugggacuggggaguugaagcacuuucccaagggaggacggccaggagcucucccacccccacuuggccug

SEQ ID NO: 4137098 - RNA, 100 nt, Human
caggagaaauguccuaucaaggccuucuaccaaggcugggggcgguggcugacgacugcaaucucagcacuuugggaggcugaggcgggacgaucucuug

SEQ ID NO: 4137099 - RNA, 68 nt, Human
caggagaagcagggagucggggcugcggaucuuugccucugagcccucuguuuucccucugcuuccug

SEQ ID NO: 4137100 - RNA, 93 nt, Human
caggagaagguggaggcaggacuugaauccaggcaguuuggucauuuugcuuuacuguccggcacaagugccaccucugucugaggucuucug

SEQ ID NO: 4137101 - RNA, 55 nt, Human
caggagaagucucuagggggugccucucaacuggcccuauggagacccuuuccug

SEQ ID NO: 4137102 - RNA, 66 nt, Human
caggagagaagcacacugauuuuauuucugugggaccccagguuggagugcaguggcucaaucuug

SEQ ID NO: 4137103 - RNA, 65 nt, Human
caggagagauaugaguccccaccugcagaaucacugaagcagcuacucuggggauaucuuaccug

SEQ ID NO: 4137104 - RNA, 57 nt, Human
caggagaggagagacagccuaccuauucggucuugcuguccccaugcuccaucccug

SEQ ID NO: 4137105 - RNA, 55 nt, Human
caggagaggcuguacguuucucuuggcacagugcucuagaacugcaccucuccug

SEQ ID NO: 4137106 - RNA, 62 nt, Human
caggagaguucaguuguagccauauugguugggcaccaguuuuguggucugaacuuauucug

SEQ ID NO: 4137107 - RNA, 81 nt, Human
caggagaucagaguuagaauuguacugcaaucaggggaauauuuugccuugacuacgguucaguuaaaaguucauuuccug

SEQ ID NO: 4137108 - RNA, 67 nt, Human
caggagaugaaaguggcagcucuaccucaggggcggugccugaagcagcuucuuucugucaauccug

SEQ ID NO: 4137109 - RNA, 67 nt, Human
caggagaugacagggaagaaccaggaagcaccuccucucccagccuggggcuucccaccaucuccug

SEQ ID NO: 4137110 - RNA, 59 nt, Human
caggagcaaauccaaaagaauuuuaguaaaagacaaaucucuuuuucugguugcuucug

SEQ ID NO: 4137111 - RNA, 62 nt, Human
caggagccaggccccauggggcugccacucugcagccccucuccccugaggccuggcuugug

SEQ ID NO: 4137112 - RNA, 66 nt, Human
caggaggagaggcuggaguuagggcuugacugucugaguuugccuugggccagcugcucuggacug

SEQ ID NO: 4137113 - RNA, 79 nt, Human
caggaggagcugaggcugaggccucacugucaccuucugugagguccaugacauccucacuccugagcucaccuuccug

SEQ ID NO: 4137114 - RNA, 59 nt, Human
caggaggagggcagccgccuccucuccaaacaacuagcgagcgccgcucaccuccccug

SEQ ID NO: 4137115 - RNA, 85 nt, Human
caggaggccagcagguggaucucuaaggacugauguaaagaaugcuuccagguucugagaaauuggcaucccaggcaggcuccug

SEQ ID NO: 4137116 - RNA, 55 nt, Human
caggaggguguggaaaacuggggacaacaauccacucuauccacacucccuccug

SEQ ID NO: 4137117 - RNA, 64 nt, Human
caggaggugcugguccccucgagcagaaaaauaguucaguuccagaggccugggcacacuccug

SEQ ID NO: 4137118 - RNA, 117 nt, Human
caggagguggggccuggugggcggggccucagcguaggccuuaggucucaggggagcagcacgccugagcaccccaggaccugcgcucaggugagaugcgcuaugccuuccuuccug

SEQ ID NO: 4137119 - RNA, 96 nt, Human
caggaguacgacgcugugguagcuaugaucaugccacugcacuccagccugggugacagagcaagaucuagauaauuacagucuguccugcuccug

SEQ ID NO: 4137120 - RNA, 69 nt, Human
caggaguguggcaggaaugacuagaacuaaagccaaggugcuacucaauucaccugccacucuauccug

SEQ ID NO: 4137121 - RNA, 72 nt, Human
caggaguguugauugcucaggaaugaaaucauagggagucgaagcugucuucuugagcugagucaguuccug

SEQ ID NO: 4137122 - RNA, 95 nt, Human
caggaguguuggcugggcauagaggccugugugcuccaguggugauaucugucccacagacaaggcuuuugacccacgugguggccauacucuug

SEQ ID NO: 4137123 - RNA, 81 nt, Human
caggaguuucaaaaugccaguaaaucugaggauaucaaagauuucugagccagcaaguuaauugguauuuugauccuuuug

SEQ ID NO: 4137124 - RNA, 92 nt, Human
cacuuugggcauucucagaugcuuuguauguggugggacucuagaugcugagcuauguuucucuuaacacauaaaguaggaagcuuaauuug

SEQ ID NO: 4137125 - RNA, 93 nt, Human
cagaaaaccugacucaaaugggcuuuggccaguaggagcuguauuggcucauauugcugguggucuaaggugggguggcuuccggguugauug

SEQ ID NO: 4137126 - RNA, 130 nt, Human
cagaaaagaauugagaaaguuugaguuuuaaucuuacuacaucaggaaaaaacuggagccagaauaucuuaguucuugcauuuucuugagguagagaauucuuuguaauuuuuuuuucuuauuuccauug

SEQ ID NO: 4137127 - RNA, 71 nt, Human
cagaaaagcgaagagaacugaaguuugauggucguuuagauaaggaacuuucagaauccuaugcauuucug

SEQ ID NO: 4137128 - RNA, 79 nt, Human
cagaaaauaacaguguggagcauauucuggagcuugguaucugauugcuguaguuuccauaauugcccugcauuuucug

SEQ ID NO: 4137129 - RNA, 87 nt, Human
cagaaaauaacugagagcuugaguaucacuggcaaagaauuuagcugugauuccauuagcacaguugucucaaagcuucuuuuucug

SEQ ID NO: 4137130 - RNA, 92 nt, Human
cagaaagaccuauacugauauacugauagcugcacuucuagcuauggaaagccaagggguguaguucuuauggacuagauaaagguuucaug

SEQ ID NO: 4137131 - RNA, 63 nt, Human
cagaaagaccugauuggcaguuucacugagaguugcgucaucugggcugucgacaggugucug

SEQ ID NO: 4137132 - RNA, 75 nt, Human
cacaucaaagggccuguggugcagccucuucaaauaccaggauucuugcacuuaacacaggcacucuuugucuug

SEQ ID NO: 4137133 - RNA, 59 nt, Human
cacaucauagagacucaauccaugcuuuuugaauugaguucuguauuucugugacugug

SEQ ID NO: 4137134 - RNA, 109 nt, Human
cacaucauagcuuacccaaaaacuuugccuguuuuuuauucagaccuaugugcaugcaaauauauacacauaggucugaauaaaaaacaggcaaaguuaagcagaagug

SEQ ID NO: 4137135 - RNA, 129 nt, Human
cacaucucugcccguuaacaaaauuaaaggcuuuacuuuuccugggagagugugauuuaagggcuaaucagcaccaugguccuugcacauuaucugggaaaguagaaauuacuggcuacugaaucugug

SEQ ID NO: 4137136 - RNA, 85 nt, Human
cacaucugcaacaugggaauauacuaguccucugcuucccuccuuggguugccugaggacagugugaccauggaugcgaagagug

SEQ ID NO: 4137137 - RNA, 65 nt, Human
cacaucuggagaucagcugguggcaggcucaucccacccuucccugcaauggcucuuuagaagug

SEQ ID NO: 4137138 - RNA, 83 nt, Human
cacaugcaucacgacuuccuuugucuaucauaaacgucuacccucaugguuuauaaaauccaggaagucggccaggugcagug

SEQ ID NO: 4137139 - RNA, 57 nt, Human
cacaugccaggcacccgcuggacuuucccucuuuccucucaguggugcugggaugug

SEQ ID NO: 4137140 - RNA, 57 nt, Human
cacaugcugugaaaagaauuucaacacuaaacagugccugugccucuauagcaugug

SEQ ID NO: 4137141 - RNA, 61 nt, Human
cacauggcuugguuuuguuugcugugguuuuuuuaaacgaacaaucuccaagaccaaugug

SEQ ID NO: 4137142 - RNA, 92 nt, Human
cacaugggaauuuuaaagaauuggaguugugaaacagaaaugaaagcacaagaagcauuuccucuguacagccucuuuauuguucauuggug

SEQ ID NO: 4137143 - RNA, 59 nt, Human
cacauguagacaucaccaaggguaucaauagacacaaccacagaggugucugcagugug

SEQ ID NO: 4137144 - RNA, 57 nt, Human
cacauguccccucuaggggcuuuauuuucacuuaaauucuucugcagggugacagug

SEQ ID NO: 4137145 - RNA, 62 nt, Human
cacaugugcaguuacaugaauuagaaacaugcaucuaggauuaugagaugucuguucaugug

SEQ ID NO: 4137146 - RNA, 63 nt, Human
cacauuccuuacauucauagaguuuuucaccagaaugaagucucugaugucgaguaaggugug

SEQ ID NO: 4137147 - RNA, 83 nt, Human
cacauugcaggaauuuuuugcagaaagggaaaaaacuaaaaaccuucauccuuuggccucugggagaauauuccuuuuaugug

SEQ ID NO: 4137148 - RNA, 67 nt, Human
cacauuuaagugcuuguucagagcucgcuauucacucaaagcuuuaggggcagagacacuuaaagug

SEQ ID NO: 4137149 - RNA, 59 nt, Human
cacauuuccuuggccuuuaauuuucaucugggcuuggcccuuaagggcccugggaugug

SEQ ID NO: 4137150 - RNA, 91 nt, Human
cacauuucuccugucuuucuaggcuuggacuugcucucugccaaagcagaugacucccagagcagccacagucugggacagggcaaaugug

SEQ ID NO: 4137151 - RNA, 89 nt, Human
caccaaacucuuacuuagcauucagcagucacucaaaaacuucaauuccaaauuuugcaugugggccuguugggguugaguuaguggug

SEQ ID NO: 4137152 - RNA, 93 nt, Human
caccaaagaaagugacuaacgaggcauuucuguauuuggguaggaggagaauacucuaagugcuaccuggaaauggcuuuaguuacuuuggug

SEQ ID NO: 4137153 - RNA, 69 nt, Human
caccaaaugaaagagaaauuuggagcuauauucaggcucuaaagaagaggguucugcggucaauuggug

SEQ ID NO: 4137154 - RNA, 82 nt, Human
caccaauaauauucccaguuguggugaguagacucaaaagugaccccaaugacccuacaaaguaccacagacuggguggcug

SEQ ID NO: 4137155 - RNA, 73 nt, Human
caccaauggacuuacuuaacuagacgcucugggagggggauacagaaaucugguucaguaaguccuccaggug

SEQ ID NO: 4137156 - RNA, 83 nt, Human
caccaccauagccuguaggucccuaacuuccagacccugcucaggguuaaacaagcuggacacugaacagccucuggggggug

SEQ ID NO: 4137157 - RNA, 73 nt, Human
caccaccaugccuggcuaauuuuuguauccuuaguagagacgggguuucaccauguuggccaggcuggucuug

SEQ ID NO: 4137158 - RNA, 57 nt, Human
caccacguagcucuggacuacaaagacaaaggcagguaguccagagcuacuguggug

SEQ ID NO: 4137159 - RNA, 71 nt, Human
caccacugcccacgaugccggccgccugccugccugaagaccuuugcacaggcuguuggccuucagaggug

SEQ ID NO: 4137160 - RNA, 62 nt, Human
caccagaguuguccaaaugauucuacagugugauguaauuaguuuauuuggggacuuugcug

SEQ ID NO: 4137161 - RNA, 59 nt, Human
caccagcuaauuaaaacagcagucucaugacuauuagugagguguuugguugauuggug

SEQ ID NO: 4137162 - RNA, 61 nt, Human
caccagcuucucauugcgggucuugaucuucuucacaaccacgacccugguggagcuggug

SEQ ID NO: 4137163 - RNA, 56 nt, Human
caccaggaaccccagacccacacuucaugguugcagguagggaagguucgcuggug

SEQ ID NO: 4137164 - RNA, 60 nt, Human
caccaggcagcugggggugauguggagacacaggcacaggugugccccaccugccugcug

SEQ ID NO: 4137165 - RNA, 61 nt, Human
caccaggcugcccaggacagggggagaggcccaccccaccuguuccuuuaugagcuuggug

SEQ ID NO: 4137166 - RNA, 56 nt, Human
caccaggguacaauuucgcagauucuugcuucugagcucuaaauaguacccuugug

SEQ ID NO: 4137167 - RNA, 58 nt, Human
caccagguggaaaugucacagccugacccagaggcuggccccagaguuucacuuggug

SEQ ID NO: 4137168 - RNA, 64 nt, Human
caccauacauucucuauaagugcauguguguuuacauaaaugcacagaaaggauguggaaggug

SEQ ID NO: 4137169 - RNA, 64 nt, Human
caccaucagcagcaggugucaacccccaggacuggaguugucacaucacugcuggugauaugug

SEQ ID NO: 4137170 - RNA, 56 nt, Human
caccaucugguaggcauuagugucaccagaacacgggagcacuuaucagauuggug

SEQ ID NO: 4137171 - RNA, 111 nt, Human
caccaucuucuuugaaucuacccuuagaggugacaugccaucacuuucauuccuuggagaccgaugaauaaguccuggccacccucaagggaagcagagaguacuagggug

SEQ ID NO: 4137172 - RNA, 130 nt, Human
caccaugaaccgcuuccuaacucccccagacagaaaugccgccuguuucuucuuuucugagcaauacacuguucuagaaacuggagcaaacagacacugccccugcucuccuggagcacauauucuggug

SEQ ID NO: 4137173 - RNA, 60 nt, Human
caccaugccuggcuaauuuuuuuguagggauagaguuuugccauguugcccaggcuggug

SEQ ID NO: 4137174 - RNA, 64 nt, Human
caccaugggcaagugccugggcucugguggcagaagaauccauggcucagguuugggcuuugug

SEQ ID NO: 4137175 - RNA, 75 nt, Human
cacccagcugcauccuauucacugccucccuuccucucagcuggguggcaguguuggcaggauggggcugaggug

SEQ ID NO: 4137176 - RNA, 73 nt, Human
cacccauuuuuacuaggguguaaguucugucuugagcauccuuccuacccuuaaggagcuugcacucugggug

SEQ ID NO: 4137177 - RNA, 57 nt, Human
caccccuaguguuugugggcccccuccaggaagcgccuccaaaccucuaggcuggug

SEQ ID NO: 4137178 - RNA, 85 nt, Human
caccccuucccugggcacucagauggcaccgagucccucaaggcucugagggcagcuaaggugcugacuggaggcugaaggacug

SEQ ID NO: 4137179 - RNA, 106 nt, Human
cacccggcccggcuuggggccagcacccugcccucgggcccucccauagcugagacugguggcuguggcuguggcucugggccugcuccccaggccacccugggug

SEQ ID NO: 4137180 - RNA, 80 nt, Human
cacccugcaccagcuccuccucagucaggucuaggguccugccucugucccaguggccaccuggcugugggggcagggug

SEQ ID NO: 4137181 - RNA, 69 nt, Human
cacccugccacuggggugaugccgccucauguuccacaugauuagagccuccuccagaagggcagggug

SEQ ID NO: 4137182 - RNA, 76 nt, Human
cacccugccaggcuuucagguuugguuggauuauacaucuuuuuuucccccuccagauccuugcuuggcaguugug

SEQ ID NO: 4137183 - RNA, 70 nt, Human
cacccuguggaggaggagagcagucuccauauaaaaguucuaaagaugaggacucuuuuucccuugggug

SEQ ID NO: 4137184 - RNA, 70 nt, Human
cacccuguugcugcagccaaauucauugucauagcaggaaaugagcuugacaaaguggucguucaaggug

SEQ ID NO: 4137185 - RNA, 61 nt, Human
caccgcaugcauuucacuagguauguagcuuauuaaaaccagugugugaaaugcaucagug

SEQ ID NO: 4137186 - RNA, 109 nt, Human
caccgcucauuaugaugacagagucaugggccgucaggcaggggcauuuguuuuuggacgcacuuggcugcccauaguccuugacucuagugugcuuaguguggcggug

SEQ ID NO: 4137187 - RNA, 60 nt, Human
caccguggaggagcuggagggcucuccacugucccgaucccuggagcugcuugcauguug

SEQ ID NO: 4137188 - RNA, 76 nt, Human
caccgugguaaguuuuuccuuaugugcucuucauuuuaauucuuauuggaaucucugguaucuggggaccauggug

SEQ ID NO: 4137189 - RNA, 70 nt, Human
cagagacaucgagaauuggcagcuaaagcuggaggauuuaaugacuuugcaacuuuagcugucaucuuug

SEQ ID NO: 4137190 - RNA, 59 nt, Human
cagagacccuaggcaggugacagagcccagccuggcaugcaucggccuugagggcucug

SEQ ID NO: 4137191 - RNA, 56 nt, Human
cagagacugagggacagggcaguggaaaacuccaaagccaagguuuuuuauuacug

SEQ ID NO: 4137192 - RNA, 77 nt, Human
cagagagagagaggcagaaagagagagagagaguaauauauauaguucuguugguucuguuucucugaagaacucug

SEQ ID NO: 4137193 - RNA, 62 nt, Human
cagagagcuccauuagcuaagaggucauacucucaaaagauucagcuaauggaaguuuacug

SEQ ID NO: 4137194 - RNA, 58 nt, Human
cagagaggaggcuauaugcaaaccccuguaugacuugcaaugucccuuugccucucug

SEQ ID NO: 4137195 - RNA, 62 nt, Human
cagagaggauggauuccauagcauaggguauagucuucagcuggggaugaccauguucagug

SEQ ID NO: 4137196 - RNA, 85 nt, Human
cagagauagaagcccagcuuugaaccauaucaauccagguaacuggauuaagaugaucaccaaaugcuggugccucuggcugcug

SEQ ID NO: 4137197 - RNA, 64 nt, Human
cagagaucaacaugugucacagacucccagccuguccgccucuaagacacaguugguuccuuug

SEQ ID NO: 4137198 - RNA, 55 nt, Human
cagagaucugagagcagucagggagucuguccuggacuuucuuaccagauuuuug

SEQ ID NO: 4137199 - RNA, 88 nt, Human
cagagcaacuacaugaaguugucuaaacuggccuguuuuaaccuaauauucccucaagccagaccuaaccagcuuuuguacaagccug

SEQ ID NO: 4137200 - RNA, 60 nt, Human
cagagcacaggcucaccauuguuuccggagacccccacgggaacacccugagcuggccug

SEQ ID NO: 4137201 - RNA, 57 nt, Human
cagagcagggugcaccuugggcucggccgacccagccugugccuaugcccagcucug

SEQ ID NO: 4137202 - RNA, 89 nt, Human
cagagcauacaaauuacucagagaauucgauuaaaugcauauucuuguucauuuaaucagaaucucuaaguaauuuggaguguggccug

SEQ ID NO: 4137203 - RNA, 71 nt, Human
cagagcauuccuauuacuuugacccugcuagugaaccuggaggucuugucugauagggaaaagugucucug

SEQ ID NO: 4137204 - RNA, 56 nt, Human
cagagccaacgccaccugcccauugcugcccaaugggcagaccacacuggcuucug

SEQ ID NO: 4137205 - RNA, 106 nt, Human
cagagccgaggggcccuguccccagcucuccagcaacccagucauccugagagggcugcuuccuggggaaugcucggaggacucgguguccccucagaggucucug

SEQ ID NO: 4137206 - RNA, 57 nt, Human
cagagccugcugccuucugaaguagauccuuauuucauuuuaacaaguaaggcucug

SEQ ID NO: 4137207 - RNA, 99 nt, Human
cagagcgagagauuuauugugguuuuuagggggcguuuaggagccgacgugauaaugucugugaacgcacuuuguaaacuguaacgggggagugcugug

SEQ ID NO: 4137208 - RNA, 59 nt, Human
cagagaguuuauucuagaacucugagauuccacucccaggucagcuagacagcucucug

SEQ ID NO: 4137209 - RNA, 74 nt, Human
cagagauaagcagccacuuguccagggacauguggggccaccuggcaucccugucgucaagucucugcccucug

SEQ ID NO: 4137210 - RNA, 73 nt, Human
cagagauaguaagugauggugcugaauuugaauccaggcagucuggcuccagagcccauccuauacucuccug

SEQ ID NO: 4137211 - RNA, 64 nt, Human
cagagaugucucuccacauggcugaggccugcaacccaggcucugagcagggagaaacaggcug

SEQ ID NO: 4137212 - RNA, 71 nt, Human
cagagcaauaagccagguguuuguguugcgggacaugaggaguaacaacacacugagucuugggugcuuug

SEQ ID NO: 4137213 - RNA, 64 nt, Human
cagagcaauacuuggaaagucacauacauaucagcaagaaaugugucaauuuucaaaugcuuug

SEQ ID NO: 4137214 - RNA, 59 nt, Human
cagagcagagccagugaccugggacacagcuucacugacacucagucuggcucugccug

SEQ ID NO: 4137215 - RNA, 121 nt, Human
cagagcaucuccucccuguucuuggggcugggagaagagaaggauucugagccugggucauccccuaaccuguccucaacccauccuucuccccaacccuucaucaggucuccugagccug

SEQ ID NO: 4137216 - RNA, 81 nt, Human
cagagccagcuacaucuccccucucuagucucauccaugaggcccugcuguuuagagagcuacagaggugggcuggaaaug

SEQ ID NO: 4137217 - RNA, 60 nt, Human
cagagccaggugguguuggggcgaagcccagcucuuccacccaacagccccaugguccug

SEQ ID NO: 4137218 - RNA, 55 nt, Human
cagagcccagauuggaauuucccaccuaacagguggguaagaauugggggcucug

SEQ ID NO: 4137219 - RNA, 74 nt, Human
cagagccgucuguggcugccucaccuacaggauccaguuuaaacucagccugugagugcuggccucagaaucug

SEQ ID NO: 4137220 - RNA, 92 nt, Human
cagagcuagacauuuccaaguccacuuguauuuauuguguuaccaugacguagccagugacauacgauugggaaaaaauguguccuguucug

SEQ ID NO: 4137221 - RNA, 79 nt, Human
cagagcuauacauccauuugcuuuauuugcugaucuuuugaagauguuacuaguuguggagaagugauguauuguuuug

SEQ ID NO: 4137222 - RNA, 64 nt, Human
cagagcugcaaaugccccuccgcucauuagagcaggaguuagucucggcauuguacagucucug

SEQ ID NO: 4137223 - RNA, 64 nt, Human
cagagcuggacuuaaauauauuugggagaggucacauugcuuuaaugucuuuguccaugcucug

SEQ ID NO: 4137224 - RNA, 64 nt, Human
cagagcugggaucccaugggcgcagcagcacacccagcucccauggcgucacucccuagcucug

SEQ ID NO: 4137225 - RNA, 57 nt, Human
cagagcugggcauggugaaaggcggcaaguuacugcuuccuuccccuucagccucug

SEQ ID NO: 4137226 - RNA, 56 nt, Human
cagagcuggggacuguuggaugggaagaugcccagccgcgguggucccaggcucug

SEQ ID NO: 4137227 - RNA, 62 nt, Human
cagagcugucauuugccagugagagccuccgacagggcagguacugugccagggcagcucug

SEQ ID NO: 4137228 - RNA, 86 nt, Human
cagaggagauguagcauuuagaacaccuugagacaugacauuguaaaauagcuuguuuuauguuccugaagcuaucuuguucucug

SEQ ID NO: 4137229 - RNA, 77 nt, Human
cagaggaggaugggacuaaguguccuguuggguuccauaacucuccaggacuuuggcccaauuacuuaccgccucug

SEQ ID NO: 4137230 - RNA, 57 nt, Human
cagaggaggcuugggcugcaaggaugccaaacuagcgcugcccccagcaccucccug

SEQ ID NO: 4137231 - RNA, 59 nt, Human
cagaggaucgcuacaucuuguuccuauguauauauguggaauggccaugggauccuuug

SEQ ID NO: 4137232 - RNA, 63 nt, Human
cagaggcacagugcgggccacuuccacggcgccucugccccaccuugggcugccuggccucug

SEQ ID NO: 4137233 - RNA, 62 nt, Human
cagaggcaggcggggcccagguggcguggaccgcccgucaccagcucugccucgccagucug

SEQ ID NO: 4137234 - RNA, 56 nt, Human
cagaggcagugggguugcuccuguugucugugcagacuggaguuccucugccucug

SEQ ID NO: 4137235 - RNA, 83 nt, Human
cagaggccaguuucuuauucuuaguuauguagccaaguuaauagggucacgugacacaaagauugggcaaagaacugcuucug

SEQ ID NO: 4137236 - RNA, 55 nt, Human
cagaggccccagaacuagcucuuuguuuucaaaagcuucaacaggauggcuucug

SEQ ID NO: 4137237 - RNA, 79 nt, Human
cagaggcucuagcagcaggcauggccgcccuggcaggagccccgaucaggcguggacgccgcauucacuggagacccug

SEQ ID NO: 4137238 - RNA, 71 nt, Human
cagaggcugcucuggguggcaugcugcagcucaaaaccaacagagaggccucacuccagagacggccucug

SEQ ID NO: 4137239 - RNA, 93 nt, Human
cagagggcaggugcagcuggaagugacacucuguguuucccugcaucccccugaggucacagguccucaagucagcugggaagccguucucug

SEQ ID NO: 4137240 - RNA, 89 nt, Human
cagagggcuaaagccagcucccuguaucccaucagcucacugggaauggagagcuccuggacgaacagggaguuuguguugccuuccug

SEQ ID NO: 4137241 - RNA, 55 nt, Human
cagagggcucaguccugcuggaacccaagggucaucucgccaggcuugcccucug

SEQ ID NO: 4137242 - RNA, 77 nt, Human
cagagggcuccagcccacugccucugugguagccgcuggcucucagaaguagcacgugggcaggagucucuccucug

SEQ ID NO: 4137243 - RNA, 66 nt, Human
cagaggguagacugucaaacacuagccagggcacaaugcugugacuacaaaagguucuaccugaug

SEQ ID NO: 4137244 - RNA, 127 nt, Human
cagaggguuaaccaagcgugaugccaugacuuucucaaggucagagugaggguugggagguaguacccauguauccugaccucuugcucugaccuuuaagcaggcggcguccuuggaacacaucggg

SEQ ID NO: 4137245 - RNA, 55 nt, Human
cagagguacagccauugaagauacucaaaaggcaaucucggucacugugccucug

SEQ ID NO: 4137246 - RNA, 74 nt, Human
cagaggugacucagaggcccugcucacacagcccagcugcugcuguggcaggaagagcuucugagcuacaccug

SEQ ID NO: 4137247 - RNA, 78 nt, Human
cagagguggcaaagugacaaccauuuauuaaguaccuacugugugcuagagccuguguugugcacuguacgcacuuug

SEQ ID NO: 4137248 - RNA, 74 nt, Human
cagagguggcuguaagugacucauuaacucccucucccauguuuccaucaccgugaauuacaacgucaucucug

SEQ ID NO: 4137249 - RNA, 58 nt, Human
cagaggugggguuuuguucuugaacucaugugagaacacauucgugcccuacauucug

SEQ ID NO: 4137250 - RNA, 72 nt, Human
cagagguuccuggcuccaucuuugcuuccugaugcucaucuguacagguauccacaggugggccuuccucug

SEQ ID NO: 4137251 - RNA, 83 nt, Human
cagagguuggaaacauugccuagaguugcacaucugggauccaauuucaggcuugucucuagagcaauggcuauagcucucug

SEQ ID NO: 4137252 - RNA, 88 nt, Human
cagaguaaaacaguagucacacuggucugcaaggccauauagagacucgucuccauuugccucgcagaucauauuugcuuuuucuuug

SEQ ID NO: 4137253 - RNA, 58 nt, Human
cagaguaaggagcugucaaacgggaauaaauucugccuucuaacagccuucuucuuug

SEQ ID NO: 4137254 - RNA, 81 nt, Human
cagaguagcagguucugggugccaccuaagacaucugauuuaaggugaagagugauguauuuagaauuggccagugcuuug

SEQ ID NO: 4137255 - RNA, 101 nt, Human
cagaguaguacauuugcgaaugagauuuuuuggcuuuuuucacuuaguaggaacccuuguguguggaaaacugagaaaauugcuuucugcuguacacucug

SEQ ID NO: 4137256 - RNA, 86 nt, Human
cagaguaguggagugauauacuuuauaaaagcauuuucccaaaauuacagaaacaggcugaaguuuaugucuucuuuucugcucug

SEQ ID NO: 4137257 - RNA, 70 nt, Human
cagaguaugaaagcaucauuccugcugcuucuccucuaggcugauucaacaggaugugcuucaucuuuug

SEQ ID NO: 4137258 - RNA, 57 nt, Human
cagaguccucaccuguauucguuuauuucuccagagaugugugcuagaggacuacug

SEQ ID NO: 4137259 - RNA, 88 nt, Human
cagagugaguaugaagcaaauuucaaguguaaguuaaagugaucagugaugcauugguagaguuuguuuuauaaauuuuauuucucug

SEQ ID NO: 4137260 - RNA, 55 nt, Human
cagagugauaaauauagaaauuucaucaaggaaaagacuauauccugucauucug

SEQ ID NO: 4137261 - RNA, 127 nt, Human
cagagugcccuugcugccuucaaguguguaccccuggcuauccuugagccaaugacugauugauguggagucaaucagucauuagccaagguagcccagcccuugcuuacagacagguggaacucug

SEQ ID NO: 4137262 - RNA, 82 nt, Human
cagaguggagugucucuuagcuaagaaguuugugcugcucaaggguuugcacaaauacaaaguugagaaauacuccuugcug

SEQ ID NO: 4137263 - RNA, 73 nt, Human
cagaguugccuggcuaguuagugucagguucauuagacuagaugcaucucuccuggcuugccagagucucuag

SEQ ID NO: 4137264 - RNA, 89 nt, Human
cagauaauuuuucuucauauuccuugcacaucagauaguugcugaauuggcgaaacuaguaaagaauauccuaauuagagaagugucug

SEQ ID NO: 4137265 - RNA, 67 nt, Human
cagauaggguuacaauguggucucauuuucaucuugccccauugugaucacagaguagccuugucug

SEQ ID NO: 4137266 - RNA, 84 nt, Human
cagauaucuuuauagcaaugccccacuccuugguuccaauuuucuguauuaggcuguucuuguguuguuauaaagaaauaucug

SEQ ID NO: 4137267 - RNA, 99 nt, Human
cagauauggcaagacuucacaacuugaagcugauuuaagggucuuauagccuguuaaaccacuuuguugcaaguaaagucuuuuaaaaaccauaaucug

SEQ ID NO: 4137268 - RNA, 78 nt, Human
cagauauuucauugugaugcuuuuaucacuuugaaucuuuaaauuaugauuauugguagaagcaugcaugcagcucug

SEQ ID NO: 4137269 - RNA, 110 nt, Human
cagaucaauagguauuagacucucauuaaggacagcgcaaccuagaucccucacaugcacgguucacaacagggugcguucuaugagaaucuaaugcugcugcugaucug

SEQ ID NO: 4137270 - RNA, 76 nt, Human
cagauccugggcuccugaugcucagauuucagcugcuaacauauguaaaugaucccauccaggggcccagcuguug

SEQ ID NO: 4137271 - RNA, 112 nt, Human
cagaucuagcuccauucuccuucauucccuaaagacaauaggaaaguuguuguacacagcagauuuuacugaggguuuugaugauggaggagagugccauuauccuagucug

SEQ ID NO: 4137272 - RNA, 79 nt, Human
cagaucuggccuagaaaaacauccuccugaccccucagagagagggagagacacaggaauguguuucuaggcuguucug

SEQ ID NO: 4137273 - RNA, 65 nt, Human
cagaugaagccugccaucuguucaucaaacuuguaguuggagggagcagcugcaguuucuaucug

SEQ ID NO: 4137274 - RNA, 70 nt, Human
cagaugacaaaacuuuugccagcagauaggaagugacaggguggucuguggggaauucauuugucaguug

SEQ ID NO: 4137275 - RNA, 65 nt, Human
cagaugagaguggccaggguucauggucaugcucacauccucccuggacacacacuuuuauucug

SEQ ID NO: 4137276 - RNA, 83 nt, Human
cagaugaucucaugugcuguuagaggaaguguaaauuagucaacacuuucuggagcugcacauauucugauuuauccaaucug

SEQ ID NO: 4137277 - RNA, 66 nt, Human
cagaugcaaaugggaaacccagcaguaaaucaauagacccugagcuucugaucccaguugcaacug

SEQ ID NO: 4137278 - RNA, 69 nt, Human
cagauggcagaggucagugucuuguguauucaauguagucaauaauaaagucaggacuuaugcuaccug

SEQ ID NO: 4137279 - RNA, 63 nt, Human
cagaugggggaagcguggcauucaauauuuagacagaugccaccuccuuauuccaccugucug

SEQ ID NO: 4137280 - RNA, 56 nt, Human
cagauggugaaaugugauucccuagaauugcuagggagaggagcguuucacaucug

SEQ ID NO: 4137281 - RNA, 61 nt, Human
cagaugguuaucuuuucuuuguauucucacaugggagagaguacagagagcuagcucucug

SEQ ID NO: 4137282 - RNA, 74 nt, Human
cagauguacuucucugugucuuagugaagggagcacauucuuuggucucuuuuggccaacacggaaggugaaug

SEQ ID NO: 4137283 - RNA, 67 nt, Human
cagccuucagucugguucuugaccccgauagggcaugcccacagggugucaucagcuugaagaccug

SEQ ID NO: 4137284 - RNA, 80 nt, Human
cagccuuccagaaauacuugccuuuuagaagucauguuccaagcaggccucgacaggcuucaugauggcaggaagagcug

SEQ ID NO: 4137285 - RNA, 63 nt, Human
cagccuuuagcauuaauuccaaauuaauaauaauaaagauggaaaauuaguagugaaaggcug

SEQ ID NO: 4137286 - RNA, 79 nt, Human
cagccuuugacuuuuagaaccuucagauuaggagguggucuuggggccccuuaggagugcgggugaaaguguagagcug

SEQ ID NO: 4137287 - RNA, 96 nt, Human
cagccuuuguucucagugucacguuuugccuuaguaggagaugauguccccacaaucacguccauucaugaggcaagagcacuggggucugcacug

SEQ ID NO: 4137288 - RNA, 79 nt, Human
cagcgacuccaaagcauagguggagauuaguguuuucagccaacuaacgaagcauuuauugaccugcugcugaguacug

SEQ ID NO: 4137289 - RNA, 58 nt, Human
cagcgccauuauugucuccauuuuacagauugaaaaauggaggcacgcagugguuaug

SEQ ID NO: 4137290 - RNA, 87 nt, Human
cagcgggcucagagugugccacugccugaggacccugaagagugagugguggcccgggcgguggcugccugcacccugugcuuucug

SEQ ID NO: 4137291 - RNA, 118 nt, Human
cagcguagaaacaagccagcagacaugaggccagggugccaugaaaugaaggaacagguucauuugauacaacucaggcaucaccugagccuuuggaagaugggugggauuuacacug

SEQ ID NO: 4137292 - RNA, 64 nt, Human
cagcgugauugugacugguauggcugcauggaagcuucccuguggcauuaaucauaaaaugcug

SEQ ID NO: 4137293 - RNA, 97 nt, Human
cagcguggaggggacuggccccagagagcccuucugugucacugugggagcaggcacaaggguggucucuggagcuggcucaauggaagaccaccug

SEQ ID NO: 4137294 - RNA, 59 nt, Human
cagcguucgaaucauuggccuguaacccugugggcugcuucacaagaauucaggaccug

SEQ ID NO: 4137295 - RNA, 71 nt, Human
cagcuaaacuauguuuuguggaugaaaaaggaauuaacuauuuacaaucauaaacaaaacaguuuaugcug

SEQ ID NO: 4137296 - RNA, 57 nt, Human
cagcuaauccucucuauccaaguugaguacauuucuaaaauagaggaggguagcgug

SEQ ID NO: 4137297 - RNA, 65 nt, Human
cagcuacagucugauugguucagaggagagcagauucuagccaugaacgaauggggcugugguug

SEQ ID NO: 4137298 - RNA, 74 nt, Human
cagcuacauggcaugccuugucagacagugaauccuugcucacauaugcacuggaugaaaaggugccugaguug

SEQ ID NO: 4137299 - RNA, 86 nt, Human
cagcuaccguucuuuuguaaagugcuuguuguaucucacaacuaguggguuggcaagguguuuuaacaggaaaacugaaauagcug

SEQ ID NO: 4137300 - RNA, 63 nt, Human
cagcuauaccuuuuacucauuauccauguaaaauuccacagggaucagcagagggugugguug

SEQ ID NO: 4137301 - RNA, 59 nt, Human
cagcuccagccugacaccaagauauuucauucucaguggcguuccugggcuggaagcug

SEQ ID NO: 4137302 - RNA, 112 nt, Human
cagcucccaggccaugccuuucccucugugguugguucuguccuucguggccccccucagugcaggguucauggacugggcuccaagagggagaggggagggcagggagcug

SEQ ID NO: 4137303 - RNA, 55 nt, Human
cagcuccucuguuagcccuggggacagagccuccuagggagcaaggugggggcug

SEQ ID NO: 4137304 - RNA, 63 nt, Human
cagcuccugggccaucuccuagaggagaggcugccucccuggaggagugaggcuccagggcug

SEQ ID NO: 4137305 - RNA, 71 nt, Human
cagcucgaggccaggacccugcaaacccuguugcuugcaaaugagcaucaggauggguuuggcuuaggcug

SEQ ID NO: 4137306 - RNA, 59 nt, Human
cagcucgggagcuugggguagcuuugugaaugcguggcucccuggaaaucccgaggcug

SEQ ID NO: 4137307 - RNA, 60 nt, Human
cagcucgugguucagggaugugggugaugcugucgcagcccaggacccuggacagagcug

SEQ ID NO: 4137308 - RNA, 58 nt, Human
cagcucuacugggcaccauucguacagacugcagugugaauugugccccuugguguug

SEQ ID NO: 4137309 - RNA, 57 nt, Human
cagcucuggccagaucuauccucucuuuucuacaggacaggcuacaugcaggagcug

SEQ ID NO: 4137310 - RNA, 55 nt, Human
cagcucuguugccaaagugggcauucagaaaacacuguugcuaggcaacaggcug

SEQ ID NO: 4137311 - RNA, 64 nt, Human
cagcucuuccuagccaugccacauuuccagugguuccacuugggagcguggcaggacagaguug

SEQ ID NO: 4137312 - RNA, 55 nt, Human
cagcucuuggagccuccaguaaguguuuugcuggccaacaaggcuccaagaggug

SEQ ID NO: 4137313 - RNA, 80 nt, Human
cagcugaaacaaauauugacuuuuaaagugauauauuugacauucaaguguguacucaauugagccauuuauuucaguug

SEQ ID NO: 4137314 - RNA, 75 nt, Human
cagcugaaugcuucaaccucccacaugugcuuuuuuuaguuuuguaacaugacagggaaugaggugaaugagcug

SEQ ID NO: 4137315 - RNA, 83 nt, Human
cagcugacccacaaacauucuuucacacuggguuucucugaauuagaauccaaaggaugucccuguguuuuauuuggucacug

SEQ ID NO: 4137316 - RNA, 58 nt, Human
cagcugagaaggucugaucagguugcauuguuuccucuugguuggauuucucuggcug

SEQ ID NO: 4137317 - RNA, 55 nt, Human
cagcugaggucaaagaagcagguuuauuuugaagggucuuguaagccucgagcug

SEQ ID NO: 4137318 - RNA, 103 nt, Human
cagcugauggauaaggcagccagacuguggauacaauugcugcaggaguagcucaaugccaucuggaguaugucccuggugaaucaugcccuauauguagcug

SEQ ID NO: 4137319 - RNA, 68 nt, Human
cagcugauucuucagugacuccacuucuacugacagagguaaaagaaaaugcugaaguugucagucug

SEQ ID NO: 4137320 - RNA, 76 nt, Human
cagcugcacugaagcagguuuggagggcccuaggaaggcaugggcagaaacugaccugcucucuaggggcaugcug

SEQ ID NO: 4137321 - RNA, 92 nt, Human
cagcugcaugagcuuguacaaauuacuuaacucucugggccucaauuuuuugaaccagagaaauggagugauaacaguacacucugcaacug

SEQ ID NO: 4137322 - RNA, 69 nt, Human
cagcugcauggagggugcccaggaggggacgguggcugcaccucaauccagcucccuucaauggcacug

SEQ ID NO: 4137323 - RNA, 55 nt, Human
cagcugcauuaauuuuagugaauggagaacaagugcucuagauuuaguguagcug

SEQ ID NO: 4137324 - RNA, 60 nt, Human
cagcugccaugugugaaaggggaggucagaaggccuucagcccacucauauauggcucug

SEQ ID NO: 4137325 - RNA, 63 nt, Human
cagcugccauguugugaggacacucaagcagccucauggagagguucacacggcaggcaacug

SEQ ID NO: 4137326 - RNA, 72 nt, Human
cagcugccuggccacaacccagggucucucagggauccugccgaucauugcccuggcugugcuaagcuguug

SEQ ID NO: 4137327 - RNA, 130 nt, Human
cagcugcuaauggguggagacccccucacucccaccccacuuccugccugcugaugcugccugagagcuuccuggcaguuucucaggcagggguauggggaaggaggggggcccuacucaccuuuagcug

SEQ ID NO: 4137328 - RNA, 72 nt, Human
cagcugcucugaaaaugacuguuggccuuccuuauauuccuacaugguagcagaagaaauucagaguugcug

SEQ ID NO: 4137329 - RNA, 84 nt, Human
cagcugcuucugggucacaagugaucccaggccaggugagaaacgaaugcagguggcuucugggacuugugagcaauguggcug

SEQ ID NO: 4137330 - RNA, 69 nt, Human
cagcuggacuccaaccuucaucuuaugauucugaagcuaagguggaggacaggacuggacagccaguug

SEQ ID NO: 4137331 - RNA, 74 nt, Human
cagcuggauaaggaucaguuucuuucacuuugggucaugggcccuccaagaaugaaaugauacuuuauucacug

SEQ ID NO: 4137332 - RNA, 65 nt, Human
cagcuggcuccaccucugggcucaccuaagcagggacucacacgcccggagcuggggugaggcug

SEQ ID NO: 4137333 - RNA, 58 nt, Human
cagcuggguccuuuugucccccaccuacagcuucagguaggggcuggggcuccagcug

SEQ ID NO: 4137334 - RNA, 55 nt, Human
cagcuggguggcucuucugcuccauuugacuuuggcugggucacucaggcagcug

SEQ ID NO: 4137335 - RNA, 65 nt, Human
cagcuggugcucugggcccugaggagagugaaagcccuugguggugcagcccugggcaccagaug

SEQ ID NO: 4137336 - RNA, 84 nt, Human
cagcugucagaaaccccaacaauggagacuuaaugucuacuuuuccagagcaguuucuccaaguuauuguggguaucuuggcug

SEQ ID NO: 4137337 - RNA, 58 nt, Human
cagcugucagccggugcaggcucagcacaucuccugggucuggcaggugaacgagcug

SEQ ID NO: 4137338 - RNA, 69 nt, Human
cagcugucuagccccuuuauuuuacagacgaucuccucgucugaggccuagagaggggcuugauacuug

SEQ ID NO: 4137339 - RNA, 58 nt, Human
cagcuguguaaacacauguguauaugugcauauacuuuauauauaugauacacaggug

SEQ ID NO: 4137340 - RNA, 60 nt, Human
cagcuguguagaugcagggucagguuuuguuucauccucucugucugaucugcauggcug

SEQ ID NO: 4137341 - RNA, 62 nt, Human
cagcugugucauccuggaaaaugaaggacagugauuuauuuuguaguguguagacacaggug

SEQ ID NO: 4137342 - RNA, 107 nt, Human
cagcuuaaacaacaaaauggugcgggcucccucaucaugagcugguauguguugugaugguguacacaucagaaccagcugggugaggaguagccauuagggggcug

SEQ ID NO: 4137343 - RNA, 76 nt, Human
cagcuuaauuaacacugcagcccaguuacuguuuaguucauugcauaguacaguacugggcucuaguucuggguug

SEQ ID NO: 4137344 - RNA, 89 nt, Human
cagcuucaguucugggaaugaaaagcaacaauuucagguguugauaaaugcuuggcagaguucuuuuucucuuuucagagcugauccug

SEQ ID NO: 4137345 - RNA, 58 nt, Human
cagcuucauugccugaugucuucgggaaguauuuugaagucaucguggcuguggauug

SEQ ID NO: 4137346 - RNA, 63 nt, Human
cagcuucugcuaucgaacaucucaggggaauaacaggucagaaguguugaguacagaaagcug

SEQ ID NO: 4137347 - RNA, 57 nt, Human
cagcuucuucaguccuggagcugaaguccaccugcuucaugauuuuacuuggggcug

SEQ ID NO: 4137348 - RNA, 77 nt, Human
cagcuuuauauuuaaugaauucuaauagaugguaggaaguaaagcgccaugagaaaagaauuuuuaaaaauaagcug

SEQ ID NO: 4137349 - RNA, 61 nt, Human
cagcuuuaucacaauauuggcuacuggcuuagugguuggaaaaauuguuuuguuaaaguug

SEQ ID NO: 4137350 - RNA, 56 nt, Human
cagcaguguggcucucucagaauguguagcucuagcuacauguggcuaagcugcug

SEQ ID NO: 4137351 - RNA, 127 nt, Human
cagcaucaccugggauccuaugagaaaugcagauucucaggcuccaccccgccagaccuuguaaaucagggucucugggaguagggcacagcaaucuguguuuucagaauucauccaggugauucug

SEQ ID NO: 4137352 - RNA, 55 nt, Human
cagcaucucugggagaagcaucugugcaaagacacugcuuaaggccagagagcug

SEQ ID NO: 4137353 - RNA, 61 nt, Human
cagcaugcauuuuuggacugugcacagcuuagguaaaagauggcagagucaagagcugcug

SEQ ID NO: 4137354 - RNA, 64 nt, Human
cagcauggacccaucgcugagucggcacaaagugcccugccgagccaugccucuauccauguug

SEQ ID NO: 4137355 - RNA, 82 nt, Human
cagcauguaauuuuagccaagauauguccuguuacuaaguaucucccaaugcuuuaguaaaacguauuuaggagaaauguug

SEQ ID NO: 4137356 - RNA, 61 nt, Human
cagcauucacugaggcuuccuuaggcaaugggauauuuuuucaccagggacuucagggcug

SEQ ID NO: 4137357 - RNA, 86 nt, Human
cagcauucagagcuucagaucuccuggacgucuuguuaaauugcagauucugauuuaauagguguagggaggggcuccagauccug

SEQ ID NO: 4137358 - RNA, 63 nt, Human
cagcauuccugagaaugcagagugucagcuggggagacacagcgcagcaucagagagcugcug

SEQ ID NO: 4137359 - RNA, 78 nt, Human
cagcauugaagguguggcaggcauucugaggcugggucuguccaguuuggggauauccuccagggcugucuuuugcug

SEQ ID NO: 4137360 - RNA, 74 nt, Human
caguguuagcacagagcuuuuaaacuuccgcacugcugaugagggagugugauuguucucuguuaccagcacug

SEQ ID NO: 4137361 - RNA, 56 nt, Human
caguguugcuaaugaauucauuaugcugcaaaugcaagugauuuguuaguacauug

SEQ ID NO: 4137362 - RNA, 67 nt, Human
caguguugcuagacagguagauacagaaaggcaauuugggcagcuguagcugucugagcagacacug

SEQ ID NO: 4137363 - RNA, 59 nt, Human
caguguuucaagugaugcuuuggcaguuguaaaaaucuagucuauuauuugagacauug

SEQ ID NO: 4137364 - RNA, 61 nt, Human
caguuaaauacauuaaggaggaauuccagcaugguaaagcucacuuauaauguauuugcug

SEQ ID NO: 4137365 - RNA, 68 nt, Human
caguuaaugaugugugucaacuagacugagccauaggauacucagauaacugguuuacauuauugcug

SEQ ID NO: 4137366 - RNA, 129 nt, Human
caguuacauuugaauuucagauaaauaacaaauagugauuuaguguuaaguauguuccaaauauugcaugggacauaguuauacuuaaaacaaaguauuuguuuucauucugaaauucaaauguaacug

SEQ ID NO: 4137367 - RNA, 89 nt, Human
caguuaccacaguuuaguccaaugacaccagucccccaacaacacaguucugguaucaguugcuauggucuauuaacugugaauaauug

SEQ ID NO: 4137368 - RNA, 107 nt, Human
caguuacuggggcagagggucugacacacaggaugaagcagcagaaauccugucacuaaguucgcuucuccaaauuccugcagucuugccccuguuugaucucacug

SEQ ID NO: 4137369 - RNA, 65 nt, Human
caguuauuucacucuucggcaucucuguaacugucccagauacaggagcacaaaagaguugacug

SEQ ID NO: 4137370 - RNA, 73 nt, Human
caguucacauccuugugaggauuuucauuucuguuuugcugaugaagaacccaaggcccagggaugugaagug

SEQ ID NO: 4137371 - RNA, 59 nt, Human
caguucacucacuuaacaaguguuuacugacagcuuauaugugcaggagagugaggcug

SEQ ID NO: 4137372 - RNA, 62 nt, Human
caguucauugccucuguggauauacuugcuuucacagguaaggaaauugaggcaauuaacug

SEQ ID NO: 4137373 - RNA, 81 nt, Human
caguuccacaagguacuggcacaagaagagucguggaagacugaccuggccauggcuucucaugucccagcucaggaccug

SEQ ID NO: 4137374 - RNA, 66 nt, Human
caguuccggugccgccgcugcggccgcugaggugucgggcugcugcugccgcggccgcugggacug

SEQ ID NO: 4137375 - RNA, 65 nt, Human
caguucuacauggguagguuaagucauauguuauuugguguuacuccuucccuacucauguccug

SEQ ID NO: 4137376 - RNA, 68 nt, Human
caguucucuaugaagucuauugucuuauuuuauuaguuuucucuuuaggacaauccuauagugaacug

SEQ ID NO: 4137377 - RNA, 64 nt, Human
caguucugacuuucauaaugucuagcaucagaggcuaguuucuucuugaagugucugagaacug

SEQ ID NO: 4137378 - RNA, 92 nt, Human
caguucugggguccaaaauuaaggguggcaggguugguuccuucuguaggcucugagggagaagccaauccuugucucucucccagcuucug

SEQ ID NO: 4137379 - RNA, 101 nt, Human
caguucugucuugcugggguaagucugugcuagcacgcagcaagggcagcaaagaaggaaccccaagcugacgagcucagcuacauagccccaagaagcug

SEQ ID NO: 4137380 - RNA, 124 nt, Human
caguucuucugcccuaaaauggccacguuuugccuuucuucccuccccuacacccagguuugggccccagggguagagcuggggguuggauaaggguaagacugcacaggggccagaugggcug

SEQ ID NO: 4137381 - RNA, 56 nt, Human
caguucuuucacuuguucaguccuuucgcuagcggggaagagcagggaaagaauug

SEQ ID NO: 4137382 - RNA, 58 nt, Human
caguugaacagaugcauuuauagguucugggcccuguaacacucaaucuguuuaacug

SEQ ID NO: 4137383 - RNA, 129 nt, Human
caguugaagggaaaagcgggauggguuucgugccucuggcagcgaagcguguacuuggucuaagaucuugagcagaagguaagagcguguugccaaagcagagcucagugcucccgauauaucuucugg

SEQ ID NO: 4137384 - RNA, 75 nt, Human
caguugaggauuuagugguccauguggcaggcuacugcucaguagcuucagggaaaccacugcuugccuccccug

SEQ ID NO: 4137385 - RNA, 57 nt, Human
caguugccgggaguguccuuaucccccaugcagggcaggaucaggagccgacaacug

SEQ ID NO: 4137386 - RNA, 58 nt, Human
caguugccuacuacuugaauaaauggguuguuucuggauucugggaauuggguagcug

SEQ ID NO: 4137387 - RNA, 90 nt, Human
caguugcucagaagccugggauuugcgccagaccuuguuugaguggggaaggacuggcacaugcggaugccagagcugagggagaaucug

SEQ ID NO: 4137388 - RNA, 87 nt, Human
caguuggaaaccucggagucuuuguaaguuucugcagcagagcuguggagcacagcagggcucugggugugguucuguguucagcug

SEQ ID NO: 4137389 - RNA, 68 nt, Human
caguuggaaaggagggugcuauuggcaucugcuggguagaggccagggacacugcucaacauccucug

SEQ ID NO: 4137390 - RNA, 56 nt, Human
caguuggcucaccuuaucuguagguucuacauccauggccaagaaauugccgacug

SEQ ID NO: 4137391 - RNA, 60 nt, Human
caguugucauccugaauuuuccaacagggaauuccuuuccuguguuuagauaugaugcug

SEQ ID NO: 4137392 - RNA, 66 nt, Human
caguugucucaacaccacuugcugaagaggcuguucucucuccauugaguggucuuggcacucuug

SEQ ID NO: 4137393 - RNA, 71 nt, Human
caguugugcaguccauugacagaggucuuuuggagagagaggaggccguucguuuguugacuaagcaagug

SEQ ID NO: 4137394 - RNA, 121 nt, Human
caguuuaauuggauuugaggaagacaguaauuuuuuuaguguaaguauaucccaugcaauauuagggauaugcuuacacuacaagaugauuuguuguuuaugugagauccaaauuuaacug

SEQ ID NO: 4137395 - RNA, 58 nt, Human
caguuuauagcucuagcagcuucugcuccagauuaucagagguuggucgcugugacug

SEQ ID NO: 4137396 - RNA, 59 nt, Human
caguuuauaugucagagcuguagugccaaaugcuuuacaagccuuuuacauguguucug

SEQ ID NO: 4137397 - RNA, 69 nt, Human
caguuucagucaguuucagucggaaagaaagacaaguguuugguuaguaacuggaucuggcuggagcug

SEQ ID NO: 4137398 - RNA, 55 nt, Human
caguuuccaggguauuucugggaagucagaccaugaaguuugccccaggaaauug

SEQ ID NO: 4137399 - RNA, 80 nt, Human
caguuuccuacaacuuaguguaaugcaguacaguaugucaagagaccugggcugcaggcacuaauuggcaagugacgcug

SEQ ID NO: 4137400 - RNA, 67 nt, Human
caguuuccuaggaaugguaccucuuacaaggcucaggccuaucugagguucauucuuauaguaacug

SEQ ID NO: 4137401 - RNA, 65 nt, Human
caguuuccuauuuaagguguuguucuuuuuaauggacaucacauuauguagugaaaagggaacug

SEQ ID NO: 4137402 - RNA, 90 nt, Human
caguuuccucuccucugucugcauguuuacauuuuugagaaguuauaccaauaucugugaaugaaagacauguauggaggcauuaaacug

SEQ ID NO: 4137403 - RNA, 73 nt, Human
caguuucguuguacuuccauucggaggcaacagccucauuggcugcugucuuuuccuggcaguaaaauagcug

SEQ ID NO: 4137404 - RNA, 55 nt, Human
caguuucucagacuucccuuguuuuuuaauaaccuugguagguuugaggauacug

SEQ ID NO: 4137405 - RNA, 58 nt, Human
caguuucucaggccucucccagggcccuguggcuccaugggacacaguuuggaagcug

SEQ ID NO: 4137406 - RNA, 70 nt, Human
caguuucugguguuuuuaccuaggucaucucaacucuagaugacauccggccacuagacuccaggagcug

SEQ ID NO: 4137407 - RNA, 88 nt, Human
caguuucuuccuuuguuuaauaggugguuuaagcaaggucugagcaucccucaaguccugcuguggaccacacaaaggcaaggagcug

SEQ ID NO: 4137408 - RNA, 60 nt, Human
caguuugacgguaucugacuccaaaagguugcuuauggucacaguguauugaucaggcug

SEQ ID NO: 4137409 - RNA, 72 nt, Human
caguuuggaagacagguacuuaauggacuauagccuccucggcaaugucugggagaccugugauauaaagug

SEQ ID NO: 4137410 - RNA, 76 nt, Human
caguuuggacuuuauaguaaucuguacaauuucagacuuuugaaauguacugauacuuauuuuaugguuccaauug

SEQ ID NO: 4137411 - RNA, 80 nt, Human
caguuuggagagaaacaucuguggguggcaagagcaggcugucacuauugcaagccuuccccagugauucucucagccug

SEQ ID NO: 4137412 - RNA, 121 nt, Human
caguuugguuucacuuuccucaguucuaaaaugaaaauaacaaguucuaccucacaagguuuuucugggaaucuaugagggaagggaugugauguuauauuuuguaaacugaaaagcccug

SEQ ID NO: 4137413 - RNA, 81 nt, Human
caguuuuggcagggacaggggagaaaagaugaaaucacucccugcagcaucauuucccacuguccgugugugugagaauug

SEQ ID NO: 4137414 - RNA, 116 nt, Human
cagcgggacugggaagauuuaggcugaccaggucuucuucagcacuuggaaggcacaaaacuucguaaaggccuuaagaagccugcucugggcagaaaccuuucugguuguuguug

SEQ ID NO: 4137415 - RNA, 71 nt, Human
cagcgggcagggccucgaagccucugggcagcacauuggccuggcgggcuugggggcccgggcugcugcug

SEQ ID NO: 4137416 - RNA, 59 nt, Human
cagcguccauuguucccuuuucccagagccaagagcuggguagagcugcaaggacacug

SEQ ID NO: 4137417 - RNA, 91 nt, Human
cagcguggcguaccuugggcacacugaaucugcuauuggguacaacuucaaaaccaaagccagggacagugugcaugcgugugaaaugcug

SEQ ID NO: 4137418 - RNA, 70 nt, Human
cagcuaaauuuuuccaugacugcuuuaaaagugauuuccauuuaaagcuagguggaacaaauuccugcug

SEQ ID NO: 4137419 - RNA, 68 nt, Human
cagcuaauucuuccuuucauucauguguuaaagaugaaauuauaacagaaagagagaagacaaagcug

SEQ ID NO: 4137420 - RNA, 66 nt, Human
cagcuacaggaccugaugcaccauugcuaucagaaaaucuugcuugguguuaguuuucuguauuug

SEQ ID NO: 4137421 - RNA, 58 nt, Human
cagcuaugggcagacgcuguuggaaggcacuccuugugccgucuauuucugccagcug

SEQ ID NO: 4137422 - RNA, 57 nt, Human
cagcuauucucugaaaugaauaacucugcauuugaaagagguuuuugagagaagcug

SEQ ID NO: 4137423 - RNA, 72 nt, Human
cagcuauuguucuguauaaugaagcccuggcuguugacccucagaacugcaucuuauacagcaauagaucug

SEQ ID NO: 4137424 - RNA, 130 nt, Human
cagcucaauguggcacauaggcacucacuagagggagcaagguggccuucugcugggggugaggggucuccccaggagaugggagcaucuaaaaagcagucccaguguugccugcugccaagaggacagg

SEQ ID NO: 4137425 - RNA, 62 nt, Human
cagcucacagccacgccauuccccucuacaacccgcccugggaggcuggcugggaugggcug

SEQ ID NO: 4137426 - RNA, 78 nt, Human
cagcucagauacuaguuucuugacgauguuuuccauggaccuuaucugaauacaccaaggaaucagaauuuugaacug

SEQ ID NO: 4137427 - RNA, 59 nt, Human
cagcucagccucucuuuaaggccacacaccgaugcugagcugaagaguggccugaucug

SEQ ID NO: 4137428 - RNA, 55 nt, Human
cagcuccagccugcagugccagaauuccucggugagguggccagggcaggggcug

SEQ ID NO: 4137429 - RNA, 62 nt, Human
cagcuccaucuugcuuauaccagagcugggguugacaguggguucaaagccugaugggguug

SEQ ID NO: 4137430 - RNA, 61 nt, Human
cagcuccuaugaguaugauucccucccuucuccaggaacuguccucagcugaugggagcug

SEQ ID NO: 4137431 - RNA, 55 nt, Human
cagcuccucuggccagcccugcaccugcucuguggggcuagggccuggggaggug

SEQ ID NO: 4137432 - RNA, 107 nt, Human
cagcucucgaaaucuucaauagggugcuuuaccuugcagggaauauuaucauuggcuuuugauacaauuucugcugcagggaaagacuuucaaagcucagaaugcug

SEQ ID NO: 4137433 - RNA, 75 nt, Human
cagcucugaccugcgggcugugcugaagccugggccucucucuauaccaggccgucugcaggccugcaggggcug

SEQ ID NO: 4137434 - RNA, 90 nt, Human
cagcucugcugcucucagcugcuguguuguuuccuacaaguuguuugcuaguguagaaacuacacaugcaacagauuagccuuaggguug

SEQ ID NO: 4137435 - RNA, 57 nt, Human
cagagaugggucgcagagauggccuguguggaagguuggauucucaccccaccucug

SEQ ID NO: 4137436 - RNA, 75 nt, Human
cagagaugugauccagcugucuucuccaguacccuaagaaagaagagaaaccccgccaucuggaugauucuccug

SEQ ID NO: 4137437 - RNA, 61 nt, Human
cagagauucucagaaguacuaggaaugaguagaugggacuuccugggagucugagauccug

SEQ ID NO: 4137438 - RNA, 79 nt, Human
cagagcacaagaccaauuugaauuaaccagagcagaagugaccucucauugaagcauuuuguguauuuccuugguucug

SEQ ID NO: 4137439 - RNA, 59 nt, Human
cagagcagaaaccugggugauucuuuuacucccagagagagaugcccaacucuguuuug

SEQ ID NO: 4137440 - RNA, 59 nt, Human
cagagcagaagcgguccucacagcacccauucucugcuugagcucccgcuucuucuuug

SEQ ID NO: 4137441 - RNA, 62 nt, Human
cagagcagacuggagccucuacggggcaucuccccauauuggagaauucagucuuuguuuug

SEQ ID NO: 4137442 - RNA, 65 nt, Human
cagagcagauguaagagccaggucuuuggucacggcgccagcaucugaaaagcauuugcaguuug

SEQ ID NO: 4137443 - RNA, 66 nt, Human
cagagcaggcuggacauagacauagccauuccaagggacagugggucaguguccagcuuacaucug

SEQ ID NO: 4137444 - RNA, 70 nt, Human
cagagcaggucuccugagguggcccguggagccuguggacccgguggcauuucagagaaaaucugcuuug

SEQ ID NO: 4137445 - RNA, 74 nt, Human
cagagcagugggguuggucagaugccauaugaugcacacacuuaagcagggcaaaggacuacacauugacucug

SEQ ID NO: 4137446 - RNA, 83 nt, Human
cagagccaccagaucacugcauguaugaaaguaaauauugugaauugugcuuucauugugauaggaagccauggaauguucug

SEQ ID NO: 4137447 - RNA, 71 nt, Human
cagagccagaagcaagggccaaagucuucucugaguugucaagauggacuuggacucuggcucuggcucug

SEQ ID NO: 4137448 - RNA, 74 nt, Human
cagagccagggugggaggcugaaggcguugcugcccucugccugcuucagacauccucaccggcccuuccucug

SEQ ID NO: 4137449 - RNA, 62 nt, Human
cagagcccauggcacauguggaaaauccucugcuggaugaggugacugugcgauggucucug

SEQ ID NO: 4137450 - RNA, 70 nt, Human
cagagcccgggauggacugacgguagcgcgggguucgaaucccagcucuguaaauuccuucaucguucug

SEQ ID NO: 4137451 - RNA, 69 nt, Human
cagagcccuuggcuggagcccagauaauucuccuccuaaaucuuccagggcuucucccuaaggacucug

SEQ ID NO: 4137452 - RNA, 69 nt, Human
cagagcgugcagucuggagcaguaggagguagauguagguuaauaccuugaugcucacacugaccucug

SEQ ID NO: 4137453 - RNA, 86 nt, Human
cagagcuaaugaaugagaaagcugaaaucuaaacccaguucugccuggcuccagaaaaaucaguguucuuuuucaugugaguucug

SEQ ID NO: 4137454 - RNA, 64 nt, Human
cagagcuaguuagugucggagucaggauuugagucucggguuucugacaauuagccuaguccug

SEQ ID NO: 4137455 - RNA, 60 nt, Human
cagagcucaaagcaaguguggauugggguuguuuauaggugcaguuuugcuugaucucug

SEQ ID NO: 4137456 - RNA, 100 nt, Human
cagagcugagguuagauacuagagucccuucuggccucucaggccucacaguccuugaugggaggcagguaggugaugauggugguuccuggaagcccug

SEQ ID NO: 4137457 - RNA, 77 nt, Human
cagagcuggagagauagucauucuagagccuggcccuaguggugccuuuucagaacugucuguccuuuucagaacug

SEQ ID NO: 4137458 - RNA, 59 nt, Human
cagagcuggagggaacccuggcuguccccacggucacugcaucccaucuccagccacug

SEQ ID NO: 4137459 - RNA, 64 nt, Human
cagagcugugauaaauagauaugguuuuaagaugcuaaauuugugauaauuuguuacagcagug

SEQ ID NO: 4137460 - RNA, 63 nt, Human
cagagcuguguccugugcacuaggccuucugcaguuaaagaaacucacagucaugcagcucug

SEQ ID NO: 4137461 - RNA, 72 nt, Human
cagagcuuucuuacuugggugguggggagaaagauauuuugaguucuuuucaucauuuaauagguagcccug

SEQ ID NO: 4137462 - RNA, 80 nt, Human
cagaggaaacacuaggcggguacccuggcucgaaaccuucugguuucccauucccacguccugcuccagcacuuccucug

SEQ ID NO: 4137463 - RNA, 69 nt, Human
cagaggaacuucucuccacccaagucccuggguuugguucaaggacuauuggaggaggggagggcucug

SEQ ID NO: 4137464 - RNA, 61 nt, Human
cagaggaagagauacaagcccucugugaaauacaaaccagggggcuuaguauugauccuug

SEQ ID NO: 4137465 - RNA, 64 nt, Human
cagaggagauacuguuucucuucuacaugaaacucauuucaugcagauucagcagaucccugug

SEQ ID NO: 4137466 - RNA, 86 nt, Human
cagaggauacagcuagggcugaaggaugaaagcugcagauuaacuugauuucagcuuuucacuuuagcacaaguuugugcuuucug

SEQ ID NO: 4137467 - RNA, 72 nt, Human
cagaggccauggaggcagagucgaggcucucugcugaccacagacggagccuguggcugcuugaagccucug

SEQ ID NO: 4137468 - RNA, 58 nt, Human
cagaggccccugggguuguacuggcuugggaggcuggcagcugcaggcaggcuugcug

SEQ ID NO: 4137469 - RNA, 107 nt, Human
cagaggcccugugcccccauauuauccuacccaggcagccugcagggaaggggauuuguucccuaugccugucacucugcgcuguguggagggcaauagggcuuuug

SEQ ID NO: 4137470 - RNA, 60 nt, Human
cagaggccuggcuuggacaccucccccagcuggccguggagggucacaaccuggccucug

SEQ ID NO: 4137471 - RNA, 78 nt, Human
cagaggcugggcugccagcucuccagaugcugucacagugaucucaucucaacuaggaggcuggcacucagucuucug

SEQ ID NO: 4137472 - RNA, 66 nt, Human
cagagggcaccuucaguaauagcuaguuuuaacugauuuccugagcauugaugcaaggugccccug

SEQ ID NO: 4137473 - RNA, 64 nt, Human
cagagggugcaggaggaugguaguuacagccugacauuacugccauagacucugccaccuacug

SEQ ID NO: 4137474 - RNA, 62 nt, Human
cagagguaaagcuagccaaccacugucuuccacuauagggaggggcaagcugcuuaucacug

SEQ ID NO: 4137475 - RNA, 56 nt, Human
cagaggucuccaucacccuccuccucacugguugaagguugucccuggaacuucug

SEQ ID NO: 4137476 - RNA, 69 nt, Human
cagaggugaggccuggagggaggaguuucugccccagcaggugaauuuaaaggccagaccugagcccug

SEQ ID NO: 4137477 - RNA, 55 nt, Human
cagaggugcauacaggucauuagugacaggacuggaaucugaccuguguccucug

SEQ ID NO: 4137478 - RNA, 130 nt, Human
cagaggugucuaccacagcuggaaacuccuguucaaauuucuuaggucaugacccuccauaagguucuggagcaugacaguccugaagagaacggggaagguuucuauacaccuagcugcuucaucucag

SEQ ID NO: 4137479 - RNA, 69 nt, Human
cagagguugagcugacaccacaugguccguggccucccaccauaaaucacauuguuagcauagacugug

SEQ ID NO: 4137480 - RNA, 73 nt, Human
cagaguaaaacuguaauuugcugucucauuuguguucuaugggcacuggugugaaacaguagauuuuauucug

SEQ ID NO: 4137481 - RNA, 87 nt, Human
cagcuuucagagcaacuuguggguguccaugauuaaguacugguuagugauucauccuggcauucauuuaugggcuuaugauggcug

SEQ ID NO: 4137482 - RNA, 118 nt, Human
cagcuuucuauuccuaugugcucacugugccuacugugggagcgucaguugguaggagagaguuccaguuagaggcuuucagcgguaggucccaggaagcaaugaaagagauacguug

SEQ ID NO: 4137483 - RNA, 56 nt, Human
cagcuuuggcaucugacuagccguaagagcuucuggguggcagugauguuaaguug

SEQ ID NO: 4137484 - RNA, 72 nt, Human
caggaaauaucucaacacuuuacaucccaagaauugucauuuguaagggacacugaugagaaauucuuccug

SEQ ID NO: 4137485 - RNA, 61 nt, Human
caggaaaugggguuuaguuauuaagcuugcguagauugcuugauauacugaauauuucuug

SEQ ID NO: 4137486 - RNA, 60 nt, Human
caggaaauuagucucucuguuggaagugagaguaugggauagagagagaugaugccacug

SEQ ID NO: 4137487 - RNA, 65 nt, Human
caggaacaauguaagucucauuagauuugugcugaauauacuaaugaggcauugcauugauucug

SEQ ID NO: 4137488 - RNA, 99 nt, Human
caggaacaggccauuuucacuucuuuugugauuccucaguuacuucaggccaucuggauguauacgugcaagucacaggggauaugauggcuuagcuug

SEQ ID NO: 4137489 - RNA, 99 nt, Human
caggaacuggccauuuucacuucuuuugugauucuucacuugcuucaggccaucuggauguauacgugcaggucacaggggauaugauggcuuagcuug

SEQ ID NO: 4137490 - RNA, 69 nt, Human
caggaagaaagaggugagguguaauccaaaaagcaaucagcucacugacauuuuauuuauuuuuaccug

SEQ ID NO: 4137491 - RNA, 73 nt, Human
caggaagaaucuuaauccagaaaccuaagaucucucucucacacuuggguucaucaaaggacagacucuccug

SEQ ID NO: 4137492 - RNA, 56 nt, Human
caggaagaccagggcuguggcuccagcucccccgaccacccccugagucacuccug

SEQ ID NO: 4137493 - RNA, 68 nt, Human
caggaagaggacaggcuuccccugcaagugcaacuuguguucccuggaguggccugucucauuuccug

SEQ ID NO: 4137494 - RNA, 76 nt, Human
caggaagcacauaguaaauaaugcagaugaucauuauuaauagaaauuauuauuauuauuacuagggagcuuccug

SEQ ID NO: 4137495 - RNA, 55 nt, Human
caggaagcugccggugagcgaggccacugugccauugagcaccugcagcuugcug

SEQ ID NO: 4137496 - RNA, 97 nt, Human
caggaagggcuguguagggagugcgugagaucuauguggcaagguccugggaccaggacccugaggucuccugugagcuagacugccucccuuucug

SEQ ID NO: 4137497 - RNA, 62 nt, Human
caggaaggggaggagggggugggauauuaugaugcagcucacauugaacacucucuuuccug

SEQ ID NO: 4137498 - RNA, 68 nt, Human
caggaaucccaggccuggucugggccaguaagguuucugccauuggcaccaaggcaggccuuuaccug

SEQ ID NO: 4137499 - RNA, 56 nt, Human
caggaaugccuucuucagccauguaagaggaagcugggguuaggaaggaguuugug

SEQ ID NO: 4137500 - RNA, 59 nt, Human
caggacaagcugccagcaucccggaagggguuaaucccccucugguggcucagcuccug

SEQ ID NO: 4137501 - RNA, 60 nt, Human
caggacacauuguggcugcuuuccucaacacaggccuguggcuguggcaagugcucacug

SEQ ID NO: 4137502 - RNA, 100 nt, Human
caggacacuaagguuguauuauuaacacaaagaacuggauauuuggacucucaaagaguucaggagaaaguucaguacuuucacuguaaugauugucgug

SEQ ID NO: 4137503 - RNA, 55 nt, Human
caggacacuacagaugggagggccgacaggcagacauuuacuucucacuguccug

SEQ ID NO: 4137504 - RNA, 83 nt, Human
caggacagaccugcagcugaggggagcccgcccuggacgcggcagggaugaccggcguccgcccccuccugcaggaugaccug

SEQ ID NO: 4137505 - RNA, 64 nt, Human
caggacaggaguggggucaaaguccaagauuaaaaaggacccuuugcauacccucccugugcug

SEQ ID NO: 4137506 - RNA, 56 nt, Human
caggacaggcugcagaggcagaugaugcuguccaucucuggccccuuccuguccug

SEQ ID NO: 4137507 - RNA, 59 nt, Human
caggacaguuggcaucugcugcuucaugaauuguuuguagcagaguggcagcucuuuug

SEQ ID NO: 4137508 - RNA, 55 nt, Human
caggacauugauccauuggcacugcuucgagacagaacaguggacaaaugaccug

SEQ ID NO: 4137509 - RNA, 75 nt, Human
caggaccagaguacauaggagcaaaucagucaucgccuacucaggcuuguuugcaguuguguguuugugguccug

SEQ ID NO: 4137510 - RNA, 55 nt, Human
caggacucacuucucacauccccuugccagguagguaaugguagaugagucucug

SEQ ID NO: 4137511 - RNA, 87 nt, Human
caggacucuggggacccugggcagucugcacuucaggugcugauccugcggugggcugggcugucccgagucagccccuccguccug

SEQ ID NO: 4137512 - RNA, 58 nt, Human
caggacuggcucgcaguggguguuguggacugccgugccccacugugcagcaguucug

SEQ ID NO: 4137513 - RNA, 55 nt, Human
cauaggagccacacaaguugaacagcuuugaagcugguuaauguggcuuacuaug

SEQ ID NO: 4137514 - RNA, 85 nt, Human
cauaguacauucagagaaaguuuccauccuggggggcuuaaaauaaagcaucuaauugagugaaacuuuuccuguaaugauugug

SEQ ID NO: 4137515 - RNA, 85 nt, Human
cauagucuggccuccucucuucugcacacucugccccuucuucagaucacgcucaugggcagagugaagggagaggugugcugug

SEQ ID NO: 4137516 - RNA, 77 nt, Human
cauagugggucauuagguuggaaauguagagccaugcuagaauuagcuguggcucuccagagccuaugguaacuaug

SEQ ID NO: 4137517 - RNA, 74 nt, Human
cauaguguaaguccucaagucaaaaccguguguguauuagguacaaaucagucccucuuggaauuuacauuaug

SEQ ID NO: 4137518 - RNA, 72 nt, Human
cauaguguugugagucguaaaugagaccaugccuguaaggcaccuggcugaguuccuggcacacggcacuug

SEQ ID NO: 4137519 - RNA, 80 nt, Human
cauaguuagugguucagagcaaggacccuggagccagacuaaccagcuugaaucuugauucugauccuuugcuagcugug

SEQ ID NO: 4137520 - RNA, 58 nt, Human
cauauacacuuccaccucugugcuaucuuccuggaaaacacagaguagaagugccaug

SEQ ID NO: 4137521 - RNA, 64 nt, Human
cauauaguuuuauagauauuguguauguucauuguacauauguaauagacauuaagacugaaug

SEQ ID NO: 4137522 - RNA, 86 nt, Human
cauauaguuuugcaagauguuaccacugggggaaacugguuaaagggcacacaggaugucucuguaauaucuuuuacaacuauaug

SEQ ID NO: 4137523 - RNA, 86 nt, Human
cauauauaucuugauucuuauugauuccugcuuucugcucucuuucauagagaagaagacauggaacaauaguuaaggaauauaug

SEQ ID NO: 4137524 - RNA, 62 nt, Human
cauauaucacagcaguggaguggggugacauuuaagacacugauacucugugauuagauaug

SEQ ID NO: 4137525 - RNA, 67 nt, Human
cauauauuuggagguggaguauacaauuugacccaucaucugaguauacauacuucuagauuaaaug

SEQ ID NO: 4137526 - RNA, 56 nt, Human
cauaucauaguagcuugcacgugugccuuauguuuggguacaguaacuauguuaug

SEQ ID NO: 4137527 - RNA, 55 nt, Human
cauaucuguuuccuaugcaugugaauuuguuuucauaaggcauguaacagaaaug

SEQ ID NO: 4137528 - RNA, 79 nt, Human
cauaucuuguaaguguauaggcuuugggacagcuuuuucucucuccuguuauuuaaaagcuucuauucacuuacuugug

SEQ ID NO: 4137529 - RNA, 68 nt, Human
cauaucuuuccauggccacacagucuuguuaacacacggugggcagaguggccuggagguggucagug

SEQ ID NO: 4137530 - RNA, 56 nt, Human
cauaugacaguguucaaaguuguuucagugacagcugaacaagauagugucaugug

SEQ ID NO: 4137531 - RNA, 58 nt, Human
cauaugagauugcuuccuuuccuccuugcugaggaaguggcugagaguguuucauaug

SEQ ID NO: 4137532 - RNA, 63 nt, Human
cauaugcagugaccaaucaugguuagauuuuggaagaaguacugugauugggcacugaucaug

SEQ ID NO: 4137533 - RNA, 60 nt, Human
cauaugucagcugugccuauuugaagaaaauucauccccaggcagcaucugauuuauaug

SEQ ID NO: 4137534 - RNA, 90 nt, Human
cauaugugauaaauuauuuauuauuaauuugcagcagaugaaaccacauaagcaucuguucagaaaacagauaacuaauuuggacaugug

SEQ ID NO: 4137535 - RNA, 83 nt, Human
cauaugugugccugugcaugacagcauacaaacgugcauaguguguauguguguaugcaugugugcaugagugugcacaugug

SEQ ID NO: 4137536 - RNA, 56 nt, Human
cauauguguguguguguguguaauauccuacugugggauccacauauauuuauaug

SEQ ID NO: 4137537 - RNA, 73 nt, Human
cauauguugaaguccucuccccucaguuccucaguguacgacuguauuugaagacagggucuuuaacgaggug

SEQ ID NO: 4137538 - RNA, 111 nt, Human
cauauuaacuuuuuuuguugcuauguguucagcuuauaucuuaguuuuagguuuccuuuauuccuuuagcagauauuuguugagcacuugcuauguaauaggccaaaugug

SEQ ID NO: 4137539 - RNA, 69 nt, Human
cauauucagcucuuggaugugaacucuuagccaagaaacuauucaaauauuauucaggggcugaaugug

SEQ ID NO: 4137540 - RNA, 80 nt, Human
cauauucuaacagccaggaauucuggagaagaaaaauuggguaauaaaucuuaucagauuaucugggcuguccugauaug

SEQ ID NO: 4137541 - RNA, 61 nt, Human
cauauugucuauugcuguuuuucugccauaaaaguuagaguccaguaguuaggacagagug

SEQ ID NO: 4137542 - RNA, 79 nt, Human
cauauuucauauacuuguagcagguggcauuuauugguuuauucuauuaaacgcuacacaugccacguuaggaaaugug

SEQ ID NO: 4137543 - RNA, 56 nt, Human
caucaaaaucacuugugccauuagugaacauuaacuagcaggagcgaauuuugaug

SEQ ID NO: 4137544 - RNA, 62 nt, Human
caucaaaaugaaagacaucucauagacaauaguacaguaggucagauucucucauuuugaug

SEQ ID NO: 4137545 - RNA, 85 nt, Human
caucaaagguuauuuagggggaagguaguggccaaaaaucuacugagaaauucuuucuuucacucuagguguauacccaaaugug

SEQ ID NO: 4137546 - RNA, 106 nt, Human
caucaaauccuuacucugugcaaauggcuuagaagauauaagaucuagaaguaacaucuaucugagugucuuaauaggcucuucaauaugaauaaguucuaugaug

SEQ ID NO: 4137547 - RNA, 66 nt, Human
caucaagauauuuuagaacauucacucuggcuacagagggagaaauggaucagaggggucagggug

SEQ ID NO: 4137548 - RNA, 103 nt, Human
cagaguaggcugaggcugagguggcagccacagaaguuucauagucucgauuuaggaaucaggggcugcuucaguccucuucugcucucuagccccuucucug

SEQ ID NO: 4137549 - RNA, 86 nt, Human
cagaguauugccagccagggaagcucacccaaguuucaguguccagucuccgggucgcgggugguuuuuacuggggcucuauuuug

SEQ ID NO: 4137550 - RNA, 60 nt, Human
cagagucagagcaccugggauuggaucccagcccuaacccuuccuaggugugcaauuuug

SEQ ID NO: 4137551 - RNA, 63 nt, Human
cagagucaucuucaaacugugcaagcugaaaaucagcucauaaagugagaauaugaccaacug

SEQ ID NO: 4137552 - RNA, 82 nt, Human
cagaguccggacaccaccugugagacugucccucugccuggggaugcggagggacuccgugcacagugguucagggggucug

SEQ ID NO: 4137553 - RNA, 62 nt, Human
cagagucuuucugggcuuguucuuugaucacccucaucugaagaggaagcaggaaagaacug

SEQ ID NO: 4137554 - RNA, 62 nt, Human
cagagucuuuuuuucuaaugaaguccuaccuggagcuccaauauggauaaaaggggccucug

SEQ ID NO: 4137555 - RNA, 73 nt, Human
cagagugaaacucgguucccagugauaucagcuucuaaaauguugccaaagcuauuucauugugcugagucug

SEQ ID NO: 4137556 - RNA, 60 nt, Human
cagagugaguguaagguuggauuauguauauaaauagugagccuguuaauacuggcucug

SEQ ID NO: 4137557 - RNA, 65 nt, Human
cagagugauggccaguaauuccaaaagccuaagguuuucugaaugaucuacucucauuaucucug

SEQ ID NO: 4137558 - RNA, 55 nt, Human
cagagugauuugaugaguugcauauuuaauggcaucaucguggaaugcacgucug

SEQ ID NO: 4137559 - RNA, 58 nt, Human
cagaguggcacucugcuggaugcuguacaucagucagaagagcagcugugccacacug

SEQ ID NO: 4137560 - RNA, 105 nt, Human
cagagugguuaagcugugagcuuuggaguuaaacaaaacuagauauggacccagcccugucucuuacuuugauucuugguucaacauuugcuuuaugccauacug

SEQ ID NO: 4137561 - RNA, 61 nt, Human
cagagugucugaauuagagcacaaaggcaaauacuaccuuucugccuugcucagcacacug

SEQ ID NO: 4137562 - RNA, 55 nt, Human
cagaguguucguggggacuuggccacguacauguggcugaccauaaaucacacug

SEQ ID NO: 4137563 - RNA, 82 nt, Human
cagaguuacagaagcuauacaaugcacaaaugaugaaaucaugaguggauuaauauggcucaaggaagcauuguugauucug

SEQ ID NO: 4137564 - RNA, 71 nt, Human
cagaguuacauucauuguuacgcuggguuccaagucuagaaucaaaaagucagggcaggaauuuagcucug

SEQ ID NO: 4137565 - RNA, 82 nt, Human
cagaguuggugguggagccagcugggagugaagcggucugcuuccagagacugagcucuucaccacaacacuacugccucug

SEQ ID NO: 4137566 - RNA, 86 nt, Human
cagaguuucucaaacaauugguuaagacgcaucaugcuuuaugcaaagagcaugaggguguuaaaaccagauucuugcugacucug

SEQ ID NO: 4137567 - RNA, 78 nt, Human
cagauacuaauccaacugguggcucuugagcccugucgccuaugcauagggcucugcucaucaguugugcuggugcug

SEQ ID NO: 4137568 - RNA, 79 nt, Human
cagauagggagcuaugacacuagcaccaaagagagauuuuucuucugguuggguggugcuggugccacgccccuuucug

SEQ ID NO: 4137569 - RNA, 105 nt, Human
cagauauauacaguaucacccugaaucagcuuuucucaucagaaauggagcuacuguacuuuauugugaugucagagauugaacuggggugagaaugcacuucug

SEQ ID NO: 4137570 - RNA, 62 nt, Human
cagauauauuuuccuuauuagggagaagguuacuaauuuucuaauacugaaagugacaucug

SEQ ID NO: 4137571 - RNA, 80 nt, Human
cagauaucuaaacaagggauuauaauugauggugacaaguaacucagauuugucuuuuguaugcuuuguuuggccauuug

SEQ ID NO: 4137572 - RNA, 59 nt, Human
cagauauuuuuaguauuucugccuuaguuuguuaaaugauucaggucugagaguaucug

SEQ ID NO: 4137573 - RNA, 60 nt, Human
cagaucucaccucuguguauuauuugagaagguaggaaaugucggacagauugagaucug

SEQ ID NO: 4137574 - RNA, 67 nt, Human
cagaucuuuacuacugccuucucuaugaaaagauauagugugggggcuuuggugucacauagaucug

SEQ ID NO: 4137575 - RNA, 77 nt, Human
cagaugaacagcgcuucagggaggagcauggguucagguacauguggcaccugcccucccuggccgcccuuucacug

SEQ ID NO: 4137576 - RNA, 64 nt, Human
cagaugaacucuauccuguggcuuuaaguaggaaacucuccuuauauucagaugggguucucug

SEQ ID NO: 4137577 - RNA, 122 nt, Human
cagaugaaguacccagccuaaggugaccacaauagcagaggguagugccggggcagaucauggguccucugacugccacuccucucuagcaaaggucucuuugcaauguuuucuuuuaccug

SEQ ID NO: 4137578 - RNA, 55 nt, Human
cagaugaggcaaccucauugcugagacugagcugagagugagcauggcuugacug

SEQ ID NO: 4137579 - RNA, 72 nt, Human
cagaugauuuuuuuuccuggcuuugcuucccuuuuagaggauguggauugagccagaaaggggcauuaucug

SEQ ID NO: 4137580 - RNA, 76 nt, Human
cagaugcacugaguuauuauugaugacaguaaaaugaacacauuuaaauuguucaauguaauaauuuugauaucug

SEQ ID NO: 4137581 - RNA, 59 nt, Human
cagaugcugcacagcuggagcggcuguuggggaggcugacgccagcccugcagcaccug

SEQ ID NO: 4137582 - RNA, 73 nt, Human
cagaugcuuaaaugucauuggucuguuuuaaaguaauucuauuugaucucugugaaacagauggaaguauuug

SEQ ID NO: 4137583 - RNA, 76 nt, Human
cagauggaaacugguuucugagauggaacuuggcagugguaccuauguucccucucagaaauccagguuuuaucug

SEQ ID NO: 4137584 - RNA, 66 nt, Human
cagauggagaaaauugggggaagcugaaauaugugcugaaguuagaguccacaagauuuuccagug

SEQ ID NO: 4137585 - RNA, 67 nt, Human
cagaugggcuacagccauugauugguuagucuugcuuucaacauuuaugaagcuguggcccaauuug

SEQ ID NO: 4137586 - RNA, 64 nt, Human
cagaugguauuucaaauuuggcaagugcuaagaaagaacuuacccaaauuagaguuaccagcug

SEQ ID NO: 4137587 - RNA, 85 nt, Human
cagaugguuucugcggcucuaagccgaaaucuccagugcgucccagggucacgugggugguguauuagagcugcaggaaugucug

SEQ ID NO: 4137588 - RNA, 66 nt, Human
cagauguauguaugcugugcuugcacauacacacugugaauugugagacacacguauguauaccug

SEQ ID NO: 4137589 - RNA, 70 nt, Human
cauagccuccuguaguucuguccccuugguccgccucuuuggugcuccaggaaaugaauccaggaggaug

SEQ ID NO: 4137590 - RNA, 89 nt, Human
cauagcucccauaagauucuaaaauaguuccauaguucaaaaacaauagcuaaggacaguugauuuagagcaucuaaugauuaccuaug

SEQ ID NO: 4137591 - RNA, 74 nt, Human
cauagguuccagcuugacaaaugauuuuaugauauuaaguaugaaaauauuucuaacaguugguuaugccugug

SEQ ID NO: 4137592 - RNA, 69 nt, Human
cauaguccacagugagguguuuaaauuguuucaguaguuaugaaaugaagaacauugauauugucuaug

SEQ ID NO: 4137593 - RNA, 121 nt, Human
cauagugaugaaaaaagaacagacuccaaagccagauacuuggguucaaaucccagcucaguuccauaagaacaguguaauuuuggacaaguuacugguuuccuguguuuucguuauuaug

SEQ ID NO: 4137594 - RNA, 55 nt, Human
cauaguggcaaugacccugauagaguggcaacaguccagcccucuuaccacugug

SEQ ID NO: 4137595 - RNA, 85 nt, Human
cauaguugcauucaauguaucaaccagaaaguucagggaaauacgauucuggacuagggaugacauguuuucuccuguaacuuug

SEQ ID NO: 4137596 - RNA, 61 nt, Human
cauauaauguuugaagauguggguuuuaaauaaaaaugagaugcaucucaaauuuuauaug

SEQ ID NO: 4137597 - RNA, 55 nt, Human
cauauauauuuagauuucacugucucugagaguucaguuauucuugaugugugug

SEQ ID NO: 4137598 - RNA, 80 nt, Human
cauaucacgugaucacagaucccagcuuaggugcagucauucgagccacugagccugcuguucuguuuagugaacauaug

SEQ ID NO: 4137599 - RNA, 68 nt, Human
cauaucuagaauccauuccuccagugaggacacgcagugccccuucaugauggaaaggguucagugug

SEQ ID NO: 4137600 - RNA, 90 nt, Human
cauaugauuugggaguugacuuuauguguauguuuacuuguuuauagcauaaguugaggguaaauacuaaacucacuuuuggauuauuug

SEQ ID NO: 4137601 - RNA, 55 nt, Human
cauaugcaggcucagguccggcccgacggggcuccagaggccuuaccugcaucug

SEQ ID NO: 4137602 - RNA, 62 nt, Human
cauaugcauguauauucacauguguauguauguauguauguguauaccuauacaugugugug

SEQ ID NO: 4137603 - RNA, 98 nt, Human
cauaugccaucaacaaugucaacacuugguaugucaggguuauuuuuuaguuuuagccauucugguggccauguggugauaucuuauugugguuuuug

SEQ ID NO: 4137604 - RNA, 55 nt, Human
cauaugcucuaacuauaaaacauucaaaagguugcuuuuauauguaggguauaug

SEQ ID NO: 4137605 - RNA, 75 nt, Human
cauauguggcuagugacuaccauaauggauaguacauuaugcacugcccauuaugguagucacuagccacauaug

SEQ ID NO: 4137606 - RNA, 69 nt, Human
cauauuaaauggaaaggauuguggcccaacuuuuuuagcccuuggucacaacucuuuccauuuaauaug

SEQ ID NO: 4137607 - RNA, 75 nt, Human
cauauuauaaauuacugauauuuggaaauuucuaagaguaugucacuuagaaaugaauauguagugguuaaugug

SEQ ID NO: 4137608 - RNA, 70 nt, Human
cauauucaguccugagccaaucaugauggcuggaaaagauggcccucugguugcccaggacuaggucaug

SEQ ID NO: 4137609 - RNA, 59 nt, Human
cauauucccucccucuucagcccuauagguggggaaacugaggcuggggaagggaagug

SEQ ID NO: 4137610 - RNA, 70 nt, Human
cauauuguuguagagaugggaucauaguauacauaguguucuguacccaacauuuuuacuccauaaugug

SEQ ID NO: 4137611 - RNA, 66 nt, Human
cauauuuauucuucugccagugcuugaaaucaagcuugaucagccauggcaguaggaugggaggug

SEQ ID NO: 4137612 - RNA, 112 nt, Human
cauauuuuaaagaugagaaugguagauauauggauagugaucauaagaauuauguuaguggucuucacuaucuguauguauuuauucacugccuugcuuuccuuuaaaauug

SEQ ID NO: 4137613 - RNA, 64 nt, Human
caucaaaucugacuuuucuuccauucuaauguuuauaaccuggaagauuaaagccaguuuggug

SEQ ID NO: 4137614 - RNA, 55 nt, Human
caucaaccugguauggaugcuaccagcugaaacagguagaguccagggugaggug

SEQ ID NO: 4137615 - RNA, 69 nt, Human
cagguucuggagaugcagagauaaaaggcaggccccugcucaggcaucaugcggucuccaggguaccug

SEQ ID NO: 4137616 - RNA, 65 nt, Human
cagguugagguuuauggagggcugcccuugaggguccucaguguccuucauuggaaucucuccug

SEQ ID NO: 4137617 - RNA, 59 nt, Human
cagguuggucggcaaguacacagaggaaaucuggacacucuguggguguuaugggcuug

SEQ ID NO: 4137618 - RNA, 67 nt, Human
cagguugguugcugucacgugccucugaggucaaauacugcuaucaggaguugacaguugcuauuug

SEQ ID NO: 4137619 - RNA, 91 nt, Human
cagguuguuguugcaucuggagaaggaagagucuuugaacaugauguggcccgaacccucccuuucgacaggucaauuccauaacagucug

SEQ ID NO: 4137620 - RNA, 129 nt, Human
cagguuguuucucagagaccauuuaaagucugugcuauagaguaggcauggcuccaguuccagaaggaagacuugggucaaguagcucacaggcaaaugacuuaaaugcuucuuauaagauacuaccug

SEQ ID NO: 4137621 - RNA, 79 nt, Human
cagguuuccgggcaucggggcaucuggcagaagauggaagcucuggccucacugcuggcuggccuggccuggacuccug

SEQ ID NO: 4137622 - RNA, 63 nt, Human
cagguuuuuucuguguuugguuguuugcacacguaugagcaauagccaauacagcaaaauuug

SEQ ID NO: 4137623 - RNA, 90 nt, Human
caguaaaaaugcucuauguacacgguggcucugaaggacacauuucaucucuuuuucagaccugcugugcuaucuauugcuguuuuggug

SEQ ID NO: 4137624 - RNA, 96 nt, Human
caguaaaacugaucaaugcaggcagcuaaaccauguaauucaaucccugaaguggguuuuguucaguuuggcugucuguagucaucacauaaauug

SEQ ID NO: 4137625 - RNA, 73 nt, Human
caguaaaucagaccucaccggagcggauuagugauaaaaaugcaucuuguuccgaccgugggguuugauccug

SEQ ID NO: 4137626 - RNA, 118 nt, Human
caguaaaucauguguucaaaguugugguuccauauagugauggguuuauguggaaacagacauccucaucuugcuucaucugcuguguaaucauuaacucaugaagauaacaggacug

SEQ ID NO: 4137627 - RNA, 55 nt, Human
caguaaauuugagggaucuaauuaugggguuucaguagauccuggggauuuauug

SEQ ID NO: 4137628 - RNA, 87 nt, Human
caguaacagaaaagcuacaauguguuuuugaaacuauaaagugaaugguuucuugggaaaaauuguggauuuguauaucuguuguug

SEQ ID NO: 4137629 - RNA, 59 nt, Human
caguaauaaagcuaaguauuuccuuggucucucugaccgcuauacuggguuuuauuuug

SEQ ID NO: 4137630 - RNA, 66 nt, Human
caguacauaauaggugcucaauaaugacuucuugaauuuggaagugucuagcaccuggaugcacug

SEQ ID NO: 4137631 - RNA, 66 nt, Human
caguaccacacagucuugguugcauagcuuuguggucaguuuuaaaaucaggaaguguguguccug

SEQ ID NO: 4137632 - RNA, 60 nt, Human
caguaccagucaccacauugauggccugaauuuauuccauugaccuggcagacuggacug

SEQ ID NO: 4137633 - RNA, 78 nt, Human
caguagaucagaaguuaauuccugaaauucuccuguugcuuucagguugcagaauugcuggaauuugcuuuauccaug

SEQ ID NO: 4137634 - RNA, 130 nt, Human
caguagauuguauaagauucaagccugugauugauuaaguaugaaaguuaaucaauuuaauuuaugugauugauguugauucuuucauuuugaaauugccuguuuguaucuuauuuuuaucaagauacug

SEQ ID NO: 4137635 - RNA, 70 nt, Human
caguagcaagauucuuuaucaguuacucauagggagaaaacacuaccagagugacgugaagugugaacug

SEQ ID NO: 4137636 - RNA, 55 nt, Human
caguagcaggcaggugcuuuuguaguucagggaugcugccaucuuucuguaauug

SEQ ID NO: 4137637 - RNA, 60 nt, Human
caguagcuacuagccacauguuaauguuacugaguacuugaaauguggcuagugcaacug

SEQ ID NO: 4137638 - RNA, 56 nt, Human
caguagcuuacuuuucuugaucacccgagcuugugauccgaaagucaaagcuacug

SEQ ID NO: 4137639 - RNA, 72 nt, Human
caguaggucuaaggcaccgaggcaggagcgucccccgcggccucgcucccugcucucugggccccaccgcug

SEQ ID NO: 4137640 - RNA, 61 nt, Human
caguagucuuuuuccuccuagagaacucggugaaucuuuuccagggaguuaggcucugcug

SEQ ID NO: 4137641 - RNA, 62 nt, Human
caguaguggaagggagagaaaaaagcaaagauaaccuccuuuggagcucuuuuuuacaacug

SEQ ID NO: 4137642 - RNA, 67 nt, Human
caguaguggucuaucacuggagugcaguggggagaaacaaagcaaaacacagcugaggaccaaacug

SEQ ID NO: 4137643 - RNA, 67 nt, Human
caguaguuuuuccacaugaagacaaggcuuguuuguuugaagaagucucugcugguugugccuauug

SEQ ID NO: 4137644 - RNA, 79 nt, Human
caguauaacuaugacccuucuggaacugcuucuccacaaaccacuacagagcaggcaauuuuggaaggucaguaugcug

SEQ ID NO: 4137645 - RNA, 62 nt, Human
caguauauucugcagagccuuaaggaacauaagagccaggcugaggaguugcugaaauacug

SEQ ID NO: 4137646 - RNA, 85 nt, Human
caguaucuguccuuugugacuggcugacuucaccuaacaugauguccucaugccuucauccauguuauaguguggaucagaauug

SEQ ID NO: 4137647 - RNA, 64 nt, Human
caguaucuguuaggaucagagcugggucaugggaugugcacccacucugguguuguagaugcug

SEQ ID NO: 4137648 - RNA, 62 nt, Human
caguaugcaguugaaaauaagcuuauuauuaaacuaugcauuuauuuuuagcaaacaugcug

SEQ ID NO: 4137649 - RNA, 91 nt, Human
caguauguauuuuguaugccauguguucauguuuuucccuuugaagacugccugggaaaggcuaacagucauggaaguaacaaacauauug

SEQ ID NO: 4137650 - RNA, 83 nt, Human
caguauucaacauauggucaugaugugggucauucuuugugauuacagaaugcuuccuaaccauggccgugugccgauuacug

SEQ ID NO: 4137651 - RNA, 84 nt, Human
caguauucauaacuauccaaauuagagccaggauguuuaugcucaaaucuugucuuggcucuguguugaugggacugaauaaug

SEQ ID NO: 4137652 - RNA, 82 nt, Human
caguauucuucuagcacuccugcccguaaguuagaaaagcauauuguucucaguguuugugggugaggcuggaaggguagug

SEQ ID NO: 4137653 - RNA, 65 nt, Human
cagucaaagaaacgcaccuuacaugcagucauuauuaguccaucugcaugugcacucuucagcug

SEQ ID NO: 4137654 - RNA, 80 nt, Human
cagucaaucagaacagaagcuggcuauaaacagugaguauaucacacaguuguaucagcugcuaaguucuacuaagacug

SEQ ID NO: 4137655 - RNA, 61 nt, Human
cagucaaugguaaacaaagugauggauggaugccaucagaucacaaaaguuucuauuacug

SEQ ID NO: 4137656 - RNA, 58 nt, Human
cagucacugguucuauaggccccucugagcagagguaggcaucccaggccagugacug

SEQ ID NO: 4137657 - RNA, 57 nt, Human
cagucagggaggcugggacgggugcugacccuagcccuggagcacucucccuggcug

SEQ ID NO: 4137658 - RNA, 98 nt, Human
cagucaugcuauaggggaucagugauggugauggggcauggcauuuucacagccacuauuuauacuuccugaucccucuagcuaaaaaaugguggcug

SEQ ID NO: 4137659 - RNA, 64 nt, Human
cagucauucauuuuugcauugucuguggccacuuucacacuacaacagcagaggugagcagcug

SEQ ID NO: 4137660 - RNA, 69 nt, Human
caguccaggcauguugggaagaugaacauccaucagggaucguuauccaccccgaugcuguguguuuug

SEQ ID NO: 4137661 - RNA, 58 nt, Human
caguccaucugguuucaagaugaccccaauggucacugcugcugccaugauggagcug

SEQ ID NO: 4137662 - RNA, 76 nt, Human
cagucccuggguacuauaauuugcauugcaauaugaggcuuccauuuaaugcuugcaaauuaugggaccagggcug

SEQ ID NO: 4137663 - RNA, 75 nt, Human
caguccgugagugccuucagauuugccccagugccccugccugaggugugaaaugguggcaacuucuggcaccug

SEQ ID NO: 4137664 - RNA, 91 nt, Human
cauucuuggcaaaacagaaagcuuaugggaaauauucauugacuucuucuuguagcaauguuauuucugcauaguagucaggcuaaggaug

SEQ ID NO: 4137665 - RNA, 130 nt, Human
cauucuuucauuaaaguggcuguucauaggauauagcuaagaaagugugauacuuugucauuguggugucaaaauggcaggguggcaacuuuuggugguaacuuuaucuguuuucuaguuagagggaaug

SEQ ID NO: 4137666 - RNA, 62 nt, Human
cauucuuuggaugcuguauuuaagaugcuaugucagacaucucuaugcaggaucucaccaug

SEQ ID NO: 4137667 - RNA, 73 nt, Human
cauugaaacuggcuagggaaaaugauuggauagaaacuauuauucuauucauuuauccccagccuacaaaaug

SEQ ID NO: 4137668 - RNA, 105 nt, Human
cauugaaccugcaucugagacugugggucuugaaauaaaaauccuguuuauggagaaauguucaagaugguuauuucaucaccuauaaacuauuagggguuuaug

SEQ ID NO: 4137669 - RNA, 111 nt, Human
cauugaggggaggaugcagagcucuaugccauaugauuggcaucccuguggcaucauaugcaaucauauggcauacagcucuucaaaccuguauguguuuuccuaucaaug

SEQ ID NO: 4137670 - RNA, 79 nt, Human
cauugaguaaacaagucuaccauuagaagcaggacuuccuucuugauauacuuggauggagacgauuuguuugaaaaug

SEQ ID NO: 4137671 - RNA, 59 nt, Human
cauugaguccugacccccaggaccucagaaugugcugucuuggagauagggucuuaaug

SEQ ID NO: 4137672 - RNA, 65 nt, Human
cauugaguguauuacagaacugacauuucaacuacuaguguacaguuuguaguacuacaaaagug

SEQ ID NO: 4137673 - RNA, 77 nt, Human
cauugaugaucacaauguuucaggaaaucagcuagaguuaaaguauacucugaaugaccaugaaauaaucaugaaug

SEQ ID NO: 4137674 - RNA, 65 nt, Human
cauugauuaucaucugaaggcgccgcucaaauguucacugaaguuguguuucaugugauacaaug

SEQ ID NO: 4137675 - RNA, 66 nt, Human
cauugauuuuuccaccguacuuccugagggaggacucuccggggacuuaaagugaaggaaacaaug

SEQ ID NO: 4137676 - RNA, 109 nt, Human
cauugcacaauucuaagaagcaccauucaugucucaucauauuucuaugcucugggaguugccuuucacauagaauaugugugauuguuaucccuagaauugugcagug

SEQ ID NO: 4137677 - RNA, 78 nt, Human
cauugcacagcuucccagacaauuauauggacgcacugugacuaagaucuggccaaaugaaaucugagcaaugcaaug

SEQ ID NO: 4137678 - RNA, 74 nt, Human
cauugcuaaguuguacuccauuuuguagguaugcuacaguuuaucuguuuaccuauugauggacauuugcauug

SEQ ID NO: 4137679 - RNA, 65 nt, Human
cauugcucucauaagugugcugaaagaagacaaagacaagcuccucagaggcacugagagcaaug

SEQ ID NO: 4137680 - RNA, 96 nt, Human
cauuggaaauaaugcuauauuugacaugauuaugauucucuauuugugccaucagaaucagcaagcaugguuagguguaugucauuucauuugaug

SEQ ID NO: 4137681 - RNA, 130 nt, Human
cauuggaaucaccuaggaagcguaaacaacauacuagugccugggacuugcuccggauuaauuaaaucagaauaacuggaagugaagccuagguaugagugucucuuaauauccccaggugauucuaaug

SEQ ID NO: 4137682 - RNA, 65 nt, Human
cauuggaguuuggggucagacuugagcuuggauaggcuuggcucugaaacccaagcucuuucuug

SEQ ID NO: 4137683 - RNA, 60 nt, Human
cauuggccugucuuuguauaccacuggucauauugguucuauguaguagcagagccaaug

SEQ ID NO: 4137684 - RNA, 57 nt, Human
cauuggucuucuaacagagagauauuucuuucuuuugucucucugagaauauuaaug

SEQ ID NO: 4137685 - RNA, 72 nt, Human
cauugguucaguuaugugaccucaaaaggaauauucaauaauaaaguuuugaauuccauuacugagucacug

SEQ ID NO: 4137686 - RNA, 56 nt, Human
cauuguaagcuguugaauccuccugcuaagacuagauugauucucaguguacagug

SEQ ID NO: 4137687 - RNA, 75 nt, Human
cauuguagccaaugaauauauuucauaugauuuugauccuuuuaaauucauugagacuuguuuuguggcccagug

SEQ ID NO: 4137688 - RNA, 79 nt, Human
cauugugacuguggacacuacgauaggggaaaaguuucuuuuuaaaaaaauuuuaauuguuguggguacauaguauaug

SEQ ID NO: 4137689 - RNA, 128 nt, Human
cauuguucaauugcuucuuguuccaggaaaauucucucugcuacauuuugaacaagauguauucagugcaugaacuucacuuguaaaugcagccuugggggucuucuuuuaaccuggcaccuacuuug

SEQ ID NO: 4137690 - RNA, 59 nt, Human
cauuguuggcagagggacagaggcccagaggggagacugagagccuucuagccacaaug

SEQ ID NO: 4137691 - RNA, 60 nt, Human
cauuuaaauaggacuccuggggguuaccaguggaugacccccaggaauucuacuuaaaug

SEQ ID NO: 4137692 - RNA, 72 nt, Human
cauuuaacacugagcagcaacuguccauggcaggcuacugcuuguuauucucagcugccagacgaaggaaug

SEQ ID NO: 4137693 - RNA, 80 nt, Human
cauuuaaccuucccaagcuuuaguuauuuucaucuguaagauggaaauaauaucugcuugaguacuaaaggagguaagug

SEQ ID NO: 4137694 - RNA, 58 nt, Human
cauuuaauagaugcuguuucaggcuacugaggaaagacagaacagugucuaugaaaug

SEQ ID NO: 4137695 - RNA, 80 nt, Human
cauuuaauguaugcacaguacaaacuggaaaccuuugaguacaaagguuuccagucaacuuguguguguguaugugugug

SEQ ID NO: 4137696 - RNA, 58 nt, Human
cauuuaauuuggucccauauuaguuaagccucaggcuugacuagcacccagguaaaug

SEQ ID NO: 4137697 - RNA, 57 nt, Human
cauuuacuacuaggugcaguaauaauccaggugacugcauguccacugguguaaaug

SEQ ID NO: 4137698 - RNA, 66 nt, Human
cauuuacuguugaaucccuagcaccugugguaauguagggauccuaguagguucagcacguauuug

SEQ ID NO: 4137699 - RNA, 128 nt, Human
ccacguggugggagcggggaugaucugggaacugcccggcuccagggggcauccacacagccuacggcucggauggugccccuggaugugugcuguucggcuuccaggccugggacucccccaaaugg

SEQ ID NO: 4137700 - RNA, 81 nt, Human
ccacguugugucacacguaucacacuagaaugcauucagcgucacacauuguugaauucauacaguggauaccacacgugg

SEQ ID NO: 4137701 - RNA, 102 nt, Human
ccacuacaagcacugcaugauuccauuuuuaugagcuaucaaaaauagucaaacucgaagaagcaaagaauagaauaaugguugucaggagcuugugggagg

SEQ ID NO: 4137702 - RNA, 78 nt, Human
ccacuacuguugggagcccuggaagcacaaagauggaucaaacaugccccuggcaucaagggacuuccagacaggugg

SEQ ID NO: 4137703 - RNA, 88 nt, Human
ccacuagaggaagaguaacaggagguggaacccagggauggccacaugcaaccuguuugucccaccucaugccucuucccagcuaugg

SEQ ID NO: 4137704 - RNA, 56 nt, Human
ccacuaggaagggaucagccucagccucacaucacugggccugucccucuuggagg

SEQ ID NO: 4137705 - RNA, 64 nt, Human
ccacuaggggcucaggcccagggauauccagguucugucccugagccccugagccucuggcugg

SEQ ID NO: 4137706 - RNA, 63 nt, Human
ccacuauugcuacauacuguaugggauuuagggauacugucaggagagugugugaaauggugg

SEQ ID NO: 4137707 - RNA, 111 nt, Human
ccacucaccccaucccccaguucacuuugcuugugggaucucccuguugcuccugccccuggguggaguggcgggccauccuacaaguacccagacacuugacaugagugg

SEQ ID NO: 4137708 - RNA, 77 nt, Human
ccacucagaugcugagcuguauggcugguccucagggagacuugaaagcuuagcucuaaggugucaggaucugaagg

SEQ ID NO: 4137709 - RNA, 58 nt, Human
ccacucccuuccgguccagggcaugucugcucugcuguaaaaugggaagggaaagugg

SEQ ID NO: 4137710 - RNA, 55 nt, Human
ccacucuuuacuguuggguuuuaggcuacuugccgaggucucagcuaaggagagg

SEQ ID NO: 4137711 - RNA, 73 nt, Human
ccacugaagggcccugcgggcuccuggaacucuugccuuugggaugggggccugcgagguucaacuucggugg

SEQ ID NO: 4137712 - RNA, 72 nt, Human
ccacugagcugaggcugugcugauggcaauacucuugcucuuccaaggugcagaucuucuugaagcucaggg

SEQ ID NO: 4137713 - RNA, 59 nt, Human
ccacugagggcggagcccagggaggacaucucucccuuccacuaucccccuacuggugg

SEQ ID NO: 4137714 - RNA, 65 nt, Human
ccacugcaaggcauuaccauggcuagagucacagaagucauugcaguccuauugccuuguuuugg

SEQ ID NO: 4137715 - RNA, 56 nt, Human
ccacugccgugggccuuggggacagaaguucuuaaaggcacugccaugguaagagg

SEQ ID NO: 4137716 - RNA, 61 nt, Human
ccacugcuccugaccaaggucacucccagcccccucugaagugaccgcaggcagggagugg

SEQ ID NO: 4137717 - RNA, 79 nt, Human
ccacugcugaaacaggcugagcguccaucuucacuccuuccugagucuuaagucaggacucucagcucauucuuuaugg

SEQ ID NO: 4137718 - RNA, 70 nt, Human
ccacugcuucuuaauaccuauuuucuaccaguaccaugaaaguacaauggugaacuguugagaagcaugg

SEQ ID NO: 4137719 - RNA, 75 nt, Human
ccacuggaugaggaaugauaguaaaagagaaugguaaucucagcaauuuuugaguaucaucauuucguccacugg

SEQ ID NO: 4137720 - RNA, 94 nt, Human
ccacuggcagaggaaacagauggagcagagcugaugggccucagaguagguuucagacaaggcuuuugcucuggcuccucuuccucuuccaugg

SEQ ID NO: 4137721 - RNA, 64 nt, Human
ccacugggagagacacuucugauuaucugugaccuauacaaauuaucaugauucuccccacugg

SEQ ID NO: 4137722 - RNA, 106 nt, Human
ccacuggggcuggggcuaggggaucuggcaggcggcagagcccaggcugagcagacucugagcagcucccgucagucagagcugaccugccaaucagcuucagugg

SEQ ID NO: 4137723 - RNA, 57 nt, Human
ccacuguauuuuggaagcagauaacuuaucuuuuagcuucacagaaucaauaguugg

SEQ ID NO: 4137724 - RNA, 93 nt, Human
ccacugucccuccuguguucacuucaccuuaucacaguucucaggagggccugggguaaugaacagguggcagagacagcaggaagagucugg

SEQ ID NO: 4137725 - RNA, 60 nt, Human
ccacugucgcuuucacacagguuagcuuggaagacaaaagagcuuugguuaagccagugg

SEQ ID NO: 4137726 - RNA, 81 nt, Human
ccacuguuugaggcccagaggaggggggucuuucugccauuugcggcagcagccuggccccuccucggguagcacuggugg

SEQ ID NO: 4137727 - RNA, 75 nt, Human
ccacuuacuagcuguguaagcuugguaagagccauuucuucucucugaucuuugguuugcacauguguaaagugg

SEQ ID NO: 4137728 - RNA, 84 nt, Human
ccacuuagaauacuagugaagucaucgaaaaaagugaugggcauuaacauuaacugguggcugcuuauaugguagauuaaaugg

SEQ ID NO: 4137729 - RNA, 58 nt, Human
ccacuucacauacuuaugauaaauaauugcuguucguagccacuaaguuguggagugg

SEQ ID NO: 4137730 - RNA, 68 nt, Human
ccacuucccagucugucaccugggccugaagagacauuuuaaagcccucugaucacacuggcuggugg

SEQ ID NO: 4137731 - RNA, 56 nt, Human
ccacuucuccuugcugcuauuggucauguggaccaggaaaugcuuggaggggcugg

SEQ ID NO: 4137732 - RNA, 59 nt, Human
ccacuucuugaugaaaaugguacuuguauacaaagacuagaugaguaucaagauagugg

SEQ ID NO: 4137733 - RNA, 79 nt, Human
ccacuugccccaggagcugcucagagccagucccaagggacccccagggagacugcagcugggagggcugggugagugg

SEQ ID NO: 4137734 - RNA, 65 nt, Human
ccacuuuucugucuccaucacaccgguuuucuagcuggucagaguggggauagagucuaaagggg

SEQ ID NO: 4137735 - RNA, 92 nt, Human
ccagaaaauauuauuagcaucauuaucaguccaguaaauuguuuuaaaaaccaaaaagacacuaguggaaauugauuugugguguuuccugg

SEQ ID NO: 4137736 - RNA, 127 nt, Human
ccagaaacccauuuuagacuucugacugcaaaacuguaagagaauaaauguguggugccuugagccaccaaauccaugguaaucuguuacagcagccauaggaaacuaacaugggccucauuccugg

SEQ ID NO: 4137737 - RNA, 78 nt, Human
caguggugccuuucaggcagagcuaccugggaacuucacccaagggccccagaaggcuugccaggaagcccaccacug

SEQ ID NO: 4137738 - RNA, 63 nt, Human
cagugguugguagauacuugagaauguaaucauugggcaugucucagggccaucuugccacug

SEQ ID NO: 4137739 - RNA, 60 nt, Human
caguguagacgguuauguauuuaggucuuuuaugggccacauuuccuaacguauacacug

SEQ ID NO: 4137740 - RNA, 92 nt, Human
caguguaggaagugguggguaggcagugcguccugccuccagucccugggaaggucccaggccgcucugccucuucugucccucucaugcug

SEQ ID NO: 4137741 - RNA, 66 nt, Human
cagugucaugguuuguuagcagcccgggaucguccaggaugggcccaggcuacaaauuaugcucug

SEQ ID NO: 4137742 - RNA, 76 nt, Human
cagugucauuucccuccuacaaagaggcacugcaaacucagcagguaugggugggcucagggaaugguuuucacug

SEQ ID NO: 4137743 - RNA, 58 nt, Human
cagugucugggacagaaagucacagcagccuguaugcugucacuugugccaggcacug

SEQ ID NO: 4137744 - RNA, 62 nt, Human
cagugucuguuucuaucucuguguuucccccccagcaccucagauaguugggcaugcagcug

SEQ ID NO: 4137745 - RNA, 71 nt, Human
cagugucuuuuccacaagcucuuuuccuauggccuuuaggggcacaugacuuugaggaaaccagacagcug

SEQ ID NO: 4137746 - RNA, 104 nt, Human
cagugugcagcuccccagguuucuccagacauccaguucucaagggguccugcugugauugggagaaaccgaggcuggggagagacuaaaagcuucugugccug

SEQ ID NO: 4137747 - RNA, 63 nt, Human
cagugugguagccacaagccacacacacuuuuugagcaauggaaauguggcugguccacacug

SEQ ID NO: 4137748 - RNA, 58 nt, Human
caguguguggauugcccuugcaagcuccuuggcccugcgcucuggcauuccggcauug

SEQ ID NO: 4137749 - RNA, 77 nt, Human
caguguucagagauggaguuagcagugacaucuggauaaaaaagauucacaauucuguuuuucaucucuuccccuug

SEQ ID NO: 4137750 - RNA, 76 nt, Human
caguguucccauggcacccagggcuggcgccgggcacauaacaggcacccucuggguaucuguggaaguaacgaug

SEQ ID NO: 4137751 - RNA, 65 nt, Human
caguguugaggucuucaggaucaggcucugggucuucagaaaccggguccagaucuucaggauug

SEQ ID NO: 4137752 - RNA, 73 nt, Human
caguguugggucuuuagaauuuauuuaaaagguaacacgguaccugcucuugguuugugaagacuuucaccug

SEQ ID NO: 4137753 - RNA, 69 nt, Human
caguguuguugauuuuuucugguugauuuggaaacgagagauggcaaucaggaaacuaucaacacauug

SEQ ID NO: 4137754 - RNA, 85 nt, Human
caguguuugaaggaaaaguuaaaguugagauguucauugaauaagaauaauguaucucagaaaguuuaauuuuucuugaacucug

SEQ ID NO: 4137755 - RNA, 82 nt, Human
caguuaacacuagcuguggccaauaguggaaaaggaaguauuacuuagaaaauuccaacuaggcacacagcugguaaagcug

SEQ ID NO: 4137756 - RNA, 71 nt, Human
caguuacagauauagggcgagcuuaggguaaacauaaauguugaaacugcagccaccuauauauugugcug

SEQ ID NO: 4137757 - RNA, 56 nt, Human
caguuaccaucuucagugaugaagccucguuuuucagugugaguuugugguaacug

SEQ ID NO: 4137758 - RNA, 71 nt, Human
cauuuaguaugcauuugacgggauauauuuuaugguucuaugaaguccugccagcaaauguauaagcaaug

SEQ ID NO: 4137759 - RNA, 61 nt, Human
cauuuauugaguggccacagugugucagguacuaggauacauuugggagcaaaaauagaug

SEQ ID NO: 4137760 - RNA, 77 nt, Human
cauuuauugcugcaaaauuguucuuugcuccagcauuuagccauaguugugagcauauuaguauugcacucuaaaug

SEQ ID NO: 4137761 - RNA, 98 nt, Human
cauuucacaggcuccaagugcuucguucuguauugggaacuugggagaaauucaaugccugucagaugaaguaauuguggaguaauugcugugagcug

SEQ ID NO: 4137762 - RNA, 111 nt, Human
cauuucacagugcugguugaauuauuugggcuagguugccacaugguguuccauguacaauucuccuugguaggcuggguuaaaaaauguggcuagguaaaaugugagaug

SEQ ID NO: 4137763 - RNA, 66 nt, Human
cauuucccccucauguugcagcgguuccccaucauuccaaaagcaagauuugacagggguggaaug

SEQ ID NO: 4137764 - RNA, 57 nt, Human
cauuuccucugagugagcugggagccaacagacgguuuugagcaaaggagggacaug

SEQ ID NO: 4137765 - RNA, 82 nt, Human
cauuuccuuuuaggauaugcauuuuuauacaucugacuuuaacugauaaaugacuguaaagagguguaucuuuauggaauug

SEQ ID NO: 4137766 - RNA, 56 nt, Human
cauuucgguagcuugaacuuuacaagguuaagccaugauuucaagauauugaaaug

SEQ ID NO: 4137767 - RNA, 67 nt, Human
cauuucuagacaaguccuggagcucccugcaggccggaaaaaggggccuccgggaaugucugacgug

SEQ ID NO: 4137768 - RNA, 97 nt, Human
cauuucugguuuucaugucuguuguaucugacauucuaaagaauucaaaauagauuguucuugaaggggauauaaauagaagugaugggccggcaug

SEQ ID NO: 4137769 - RNA, 113 nt, Human
cauuucuucaucccuuuuuucgaaguccuguauguuuucuccuuugguuggaggcuugaugugaacuaaagaacuggaaaacauacagucagacuuugaauggauguuaaaug

SEQ ID NO: 4137770 - RNA, 130 nt, Human
cauuucuuuaaauucucaauuuuaauuuguaauaugguaaauacagauagauuuaacccauguaaauaaaauuuauuuggggucuucugauuuauuagaguauaaauggauacugagaccaaaaguuaug

SEQ ID NO: 4137771 - RNA, 60 nt, Human
cauuugaaccuggauguucuuagcauggaagagcuuaacugguaacucuaggauuaaaug

SEQ ID NO: 4137772 - RNA, 110 nt, Human
cauuugacucaucacuggagugugcagauuacuuaaggaacuacaaugcgugcauucauucaguguauauuuuuugaguaccuguuauguuccaggcacuguguuaggug

SEQ ID NO: 4137773 - RNA, 76 nt, Human
cauuugacugugaacuuuuuggccuggauucuggagaacagauuuccaggauugucagccagaaggcagacagaug

SEQ ID NO: 4137774 - RNA, 80 nt, Human
cauuugagaagcuauuucuuucauuaguuucuggaaagccaaggugaauaguuauauuaugaaaguggcuugauuaaaug

SEQ ID NO: 4137775 - RNA, 111 nt, Human
cauuugaugcgcaauucucauuauccuuuagaaaauucauuccucagacugccaagaggcugcuggcagauguaguuuauauuaaacagaugguuagucugcaauuaaaug

SEQ ID NO: 4137776 - RNA, 79 nt, Human
cauuugauggagggacauaguuagcuuagagauacuugacaagguaucuccuucuuaucuguuucuaaacuaucaccug

SEQ ID NO: 4137777 - RNA, 56 nt, Human
cauuugauuccuuuacucuuauuuuuuaggaucucaagaguuagaggagacaaaug

SEQ ID NO: 4137778 - RNA, 62 nt, Human
cauuugccuuucgaaucaacaggaagucacuucuuccucuugaaugccaggaaggacaggug

SEQ ID NO: 4137779 - RNA, 58 nt, Human
cauuugggaaauaaaccuagaggaagauuuauaauuccagguuguguuuccaugagug

SEQ ID NO: 4137780 - RNA, 61 nt, Human
cauuugggcacagugaguugccuuuaguccagcuugguugucucacuuccugcccaccaug

SEQ ID NO: 4137781 - RNA, 83 nt, Human
cauuugguuggauuaauauauguacucuaauuugucucauugaucuccugucaauagauauuugaguuguuuccaauuuugug

SEQ ID NO: 4137782 - RNA, 63 nt, Human
cauuuguccugugauuucagggccugcucccucagccucaggcucugcaguccgggauagcug

SEQ ID NO: 4137783 - RNA, 68 nt, Human
cauuugucuucaauagagccucaauuugaaagaaagcuuucaaauuggcccugaugaagagucaacug

SEQ ID NO: 4137784 - RNA, 60 nt, Human
cauuuguuaauuacuauuaucuaugacugcuuugcaguaauaugacagaguugauaagug

SEQ ID NO: 4137785 - RNA, 129 nt, Human
cauuuuaaccaguuccccugacuccagccuuucugcucauuuuauugcauacacaaaugucagguuaaccugcagcacaguuguaguaaacagacaaaggcuugcgaugucuccacacugcccaggaug

SEQ ID NO: 4137786 - RNA, 79 nt, Human
cauuuuacuccugacugauuacauuacauauugauauuagugagcaucaguauguagugcaaucagucaggagaaaaug

SEQ ID NO: 4137787 - RNA, 77 nt, Human
cauuuuagccauucugauagguauguagugauaucucauuguaguuuaaauauacuuuucacuaauggcuaaugaug

SEQ ID NO: 4137788 - RNA, 91 nt, Human
cauuuuagucuuuuuaugguuuuauuuauguugagucagugagacaauucgcaugauucagauuauaaaaaguaugaaaggacuuagagug

SEQ ID NO: 4137789 - RNA, 80 nt, Human
cauuuuaguugggagaggccugggagaacuguuuuugccuuuaggcagacacacagauccugagguggcccagccugaug

SEQ ID NO: 4137790 - RNA, 94 nt, Human
cauuuucacaggcccacuugaaauggagcucaaucuuauaaguauagaagucuggggugagcgucuaggaauuucaacaggcacugagaaaaug

SEQ ID NO: 4137791 - RNA, 72 nt, Human
cauuuuccaggcucccugggcaguggcaggcuuccggcuaguuucuaccaaggggagcgcugaugggagaug

SEQ ID NO: 4137792 - RNA, 70 nt, Human
cauuuucugaguuuuuaagagugaaaugucaugauaucuaugauucaaauuaaguuaauucagcaaaaug

SEQ ID NO: 4137793 - RNA, 81 nt, Human
cauuuucuugguuugcauguggaaaagacugaugaauuauuaguuacaucaaaucuuuaacaugugcaaauuagucaaaug

SEQ ID NO: 4137794 - RNA, 77 nt, Human
cauuuugaauucugaugauacugcauuguaauuuaugauaguuauagugucagaaaaucauaagaaaaaacaagaug

SEQ ID NO: 4137795 - RNA, 101 nt, Human
cauuuugggaacaacugcuguggacuaacaccacaccauugcacuggauguagucugauguguggcaguuaaacuguuugcuaugguuuuuuccuggagug

SEQ ID NO: 4137796 - RNA, 77 nt, Human
cauuuuggguggucauguuaauuaugaucccuucccagccccaggggacaaagguugauaagacuaacccaagcaug

SEQ ID NO: 4137797 - RNA, 65 nt, Human
cauuuuuaggucauguuuuucuucucuguauauuuaucugugaagaauaaaugacauuaaaggug

SEQ ID NO: 4137798 - RNA, 64 nt, Human
cauuuuuuauagcaaugaacccacauugaucuaauagggagugagugcaaugcuauuaaaggug

SEQ ID NO: 4137799 - RNA, 57 nt, Human
cauuuuuuggaggcacuuugcagaauuaggguucuuuguuaugugcuucaagaagug

SEQ ID NO: 4137800 - RNA, 57 nt, Human
ccaaaacaauguaaugauucccagggaacgauggaaguccucaaugcauugucuugg

SEQ ID NO: 4137801 - RNA, 72 nt, Human
ccaaaagugaaguuaucuggugauauuuagaaaaugaaauguuuuucuguuuauuccuaggagcucaaaugg

SEQ ID NO: 4137802 - RNA, 64 nt, Human
ccaaaaugaaaauacucaaagcaguguaauuccaaccugaaugaguggauuuuucauuucuugg

SEQ ID NO: 4137803 - RNA, 128 nt, Human
ccaaaauucguucuucauauuucaaacaaagaugggaaagaguuguagucaaagcuauguuagcucgcuuguuuaaccaguacuuuacacagcucuugaacauuugcucuaugaacaacugauguugg

SEQ ID NO: 4137804 - RNA, 65 nt, Human
ccaaacagacugucggaaacacuguggguuaauuuacugccauguggccugcagcucugguuugg

SEQ ID NO: 4137805 - RNA, 74 nt, Human
ccaaacaguaguaugaaguuaccugugaugacgcuuucuugugauggcuauuuaauuuuaacugugcuguuugg

SEQ ID NO: 4137806 - RNA, 65 nt, Human
ccaaacauuuucacuucaggugguuucugaaagagggaaagacugaggggaaagugaugaugugg

SEQ ID NO: 4137807 - RNA, 89 nt, Human
ccaaacucaaaacuauucucuuacagagauaaacuguaagugcucuaaagaaagugaaaacagcucucuggggaaugcuugggauuugg

SEQ ID NO: 4137808 - RNA, 61 nt, Human
ccaaacuugaggagaugcugagaacagauuuucuaaaauuuguuagcauacucuaguuugg

SEQ ID NO: 4137809 - RNA, 55 nt, Human
ccaaacuuggggugcuggaugcagaauggacugcaagcagcugugcccuguuugg

SEQ ID NO: 4137810 - RNA, 63 nt, Human
ccaaacuuucaagauaauaggaaugaaaaauguagcauuuagauuccugugucuugaccuugg

SEQ ID NO: 4137811 - RNA, 65 nt, Human
caucuugugaauuucugauucuaccacaucacauaccucaguggcucaucagaacuucagaggug

SEQ ID NO: 4137812 - RNA, 87 nt, Human
caucuuuacugcccgucccuuugcucucgcgcugcuacaacgaggagagacugcagccugagucggggcuggggauggggggagaug

SEQ ID NO: 4137813 - RNA, 56 nt, Human
caucuuuauguguguguguaugugugucuacccacauacacauacacauaaaugug

SEQ ID NO: 4137814 - RNA, 77 nt, Human
caucuuucauguaauaggauguguuaauugaggauuuuuccuuuugacugaagccucauuagugagaauaauagaug

SEQ ID NO: 4137815 - RNA, 67 nt, Human
caucuuucauuugcagacucuuuggcggguaguuuuccccaaacugguaaucggcaagugagacaug

SEQ ID NO: 4137816 - RNA, 86 nt, Human
caucuuucucguugacauuuccugucuggaggucaaaggccuuguugccuuugaguuucacacagcgaaccacacagcuggagaug

SEQ ID NO: 4137817 - RNA, 59 nt, Human
caucuuugagacagcauuacccauggauacuaacuggaugauguuuggucacaagggug

SEQ ID NO: 4137818 - RNA, 73 nt, Human
caugaaacagcugugauuucuaucaugauuuguuauuuuuauauguuaugguagaauuuauaguuuugucuug

SEQ ID NO: 4137819 - RNA, 68 nt, Human
caugaaaucaaccauauauuugauggggguagggucagccuucauagauuaacuggaugagguucgug

SEQ ID NO: 4137820 - RNA, 79 nt, Human
caugaaaucuauuauguucccuuaagagaacaguuuucaaugagaaauugcugcauuuguaaggaacauauugaccaug

SEQ ID NO: 4137821 - RNA, 77 nt, Human
caugaacaagcacagguguacaaugcaugacagcacgugugaccguggguucgugcaccugcgaguuaaugcacaug

SEQ ID NO: 4137822 - RNA, 72 nt, Human
caugaacaauuugcucacugauuuauauucuguuauuuagugugaaauagcucagguggcagaguguuuaug

SEQ ID NO: 4137823 - RNA, 129 nt, Human
caugaacaggaagagaacagggucugggauugggguaaagaagggagucguuuuucucucaguccccauuucuuccccacccguccgucucagacuccaccguuuccucuccacuuuuccagaauugug

SEQ ID NO: 4137824 - RNA, 64 nt, Human
caugaacuguaacacucauacugaaguggguucucuccuggcuguaguguguuagagugaaaug

SEQ ID NO: 4137825 - RNA, 98 nt, Human
caugaacuguuuuggacaguguguggcaaacugggccugcaagaagggugaauuucuggggcaugcugaguuugccacaagaauuuaaaauuuuugug

SEQ ID NO: 4137826 - RNA, 117 nt, Human
caugaagauuuuguuccaugaaacauaaaagccugcaucuuuuuccaaguuuauuuuauacugccauaaggaaagugaguggaaugaguuguaggcuugacucaacaguagcucaug

SEQ ID NO: 4137827 - RNA, 90 nt, Human
caugaagcaaccucagagccuuaguucuccuagaaugcagagagaagcauucuggaagccaugggaacaggagcucgaggcugcauccug

SEQ ID NO: 4137828 - RNA, 57 nt, Human
caugaaggaaugaguauacuguuucuacuugcagaaaacgugugaucuuucuuucug

SEQ ID NO: 4137829 - RNA, 72 nt, Human
caugacagagcuauaauagagcuucagugauagcuucuugcuucauuuuccuaccuuguagcucaguacaug

SEQ ID NO: 4137830 - RNA, 79 nt, Human
caugacugggauguugcugcuguaaacagugguguccccauuaggggacaugugcagacagcaagcaggcucagugaug

SEQ ID NO: 4137831 - RNA, 81 nt, Human
caugagcacguucaugugugcaucugugugugugugugugugugugugcaugcacaccugugcacauuuguauguguggug

SEQ ID NO: 4137832 - RNA, 57 nt, Human
caugaggcaaggcuggccguguucccugggaacacuccaggucugacuugccccaug

SEQ ID NO: 4137833 - RNA, 116 nt, Human
caugauaugggcauaucauauuuuauguaucuguucaucaguuaaugggcacauggauuguuuccacuuuuuggcuggugaauaaugcugcuuugaauauuuguguacagauuuug

SEQ ID NO: 4137834 - RNA, 84 nt, Human
caugaucauuggauuuuguagugcuuuuguaguucaugggaaacccaugaaacagcuaucaguagacugcaguucaaauuuaug

SEQ ID NO: 4137835 - RNA, 130 nt, Human
caugaugcaggaugaguuuugagagauaaaccaugaaggacuuaggccuugcuaagcauuuuggccuuuuucccaaaaguacaggaaagccuagccauuuuauuauuuuauaccacccauccauuacagg

SEQ ID NO: 4137836 - RNA, 130 nt, Human
caugauguuccucugccacauccuaggacauuguucccaucugcacaguugaaguugggguaccaccagcuccagauuccugcuggcagaaaaggggauaugaauauggaagaagcacaaccagcgucug

SEQ ID NO: 4137837 - RNA, 80 nt, Human
caugauuuugcacaacacagggacucccaggagaagagcaagggagcuauucaaucugccuuucccugucuguguuuaug

SEQ ID NO: 4137838 - RNA, 56 nt, Human
caugcaaaggucaagaucaggagaaggaaggaauuccuccugaucagccuuugcug

SEQ ID NO: 4137839 - RNA, 85 nt, Human
cauuuaaucauuuggauauucacggauuggaguucuuuaugucacuacagacaggacagcaaccguuauucacacuaguugaaug

SEQ ID NO: 4137840 - RNA, 66 nt, Human
cauuuaauuugcuguugcuuaguuucauuaucccugauaugaaucaagugagaacagcaucaagug

SEQ ID NO: 4137841 - RNA, 60 nt, Human
cauuuacccucuguaugcauccucuagaaaaacauggaaauguaaucacagaggguuuug

SEQ ID NO: 4137842 - RNA, 68 nt, Human
cauuuacuuaaaucuuuacaagagagagggaagauaaucuaaucagauuguaaagguuuagaagaaug

SEQ ID NO: 4137843 - RNA, 115 nt, Human
cauuuagcaauauauguagucaauaaacauuuaugauugagguaaauauacacuagucacucaauaaaugcccaaugaaugaaugaaugaauggcugauuauauguuucugaaug

SEQ ID NO: 4137844 - RNA, 89 nt, Human
cauuuagcuucagguugucuuguuucuguauauaaugacagcauucugcugccaucuuagccguggacaaugggggaucagcuggcaug

SEQ ID NO: 4137845 - RNA, 72 nt, Human
cauuuagguuuugaugauaguggaauuaaauguagcacauuuaauugaacuaacaugcaaacaucuuuuaug

SEQ ID NO: 4137846 - RNA, 57 nt, Human
cauuuauucauuugcuagggcuagaggcuuagcacagucccuggcacauggaaaaug

SEQ ID NO: 4137847 - RNA, 55 nt, Human
cauuuccacucugggagucagauuugaggcccugauguggcugccaggagaaaug

SEQ ID NO: 4137848 - RNA, 75 nt, Human
cauuuccucccaggccugauugggaaucuugcaccggcaucgcgagccccgcucuucggccuccaggagcgagug

SEQ ID NO: 4137849 - RNA, 61 nt, Human
cauuucuaagaagaucuggguaaucaauuauuagcaugccaagaucuuuucuauagaagug

SEQ ID NO: 4137850 - RNA, 73 nt, Human
cauuucuauauggugaugaacuucaggcuucagguuucuuauugcuugagcucuccucaucacccuggcaaug

SEQ ID NO: 4137851 - RNA, 57 nt, Human
cauuucucacuuucuguucaucuggaauaucuucugaggaaagagagugggauguug

SEQ ID NO: 4137852 - RNA, 87 nt, Human
cauuucucagggucugguccuuagauuugaaagaacugggaaguaaaaaaauuggauuuugaaacuaagaaccaggccugagaaaug

SEQ ID NO: 4137853 - RNA, 87 nt, Human
cauuucucauuucuccucccuaacucaugaugagugguaggccugaucccaucagccaugaguggggagggcugagcugagggcaug

SEQ ID NO: 4137854 - RNA, 57 nt, Human
cauuucuccgccgagaucacugaggcagggagcaggugagucgggggcggagagaug

SEQ ID NO: 4137855 - RNA, 77 nt, Human
cauuucugaugacuggauggccccacuggauccaugacucuugacucaacugguccuauggccacuacucagaagug

SEQ ID NO: 4137856 - RNA, 76 nt, Human
cauuucugcucuaaucucuagcccaugcaaagacauguuuugugucuuuuucauucuuagagguugcacugaagug

SEQ ID NO: 4137857 - RNA, 130 nt, Human
cauuugaagcuucugagaauuuuuagcaauaaaugggaaagguacacucucauuuuugucuuggacaaaaugcugaguuuugauagaguguugccucucaauuauagcuuuuacuguuugagcuucaucg

SEQ ID NO: 4137858 - RNA, 84 nt, Human
cauuugaaguugacguacaaguauucaugacauugcauaugcaguggaaacacucagcucaugauucuguaugagaagcaggug

SEQ ID NO: 4137859 - RNA, 57 nt, Human
cauuugaauggcauuucacuuugucgucugggauucugugaaaaauccguucugaug

SEQ ID NO: 4137860 - RNA, 86 nt, Human
cauuugacuacaaugaguaauuucugagaaaggauagugagggagaagaacuuuucugucagcgucagaaauucuuaagucugaug

SEQ ID NO: 4137861 - RNA, 83 nt, Human
cauuugcgaaagugcaaucugaugaguaaagcacuaugggaauaucauagugcauuuuauuaucagcaacauuuuugugaaug

SEQ ID NO: 4137862 - RNA, 72 nt, Human
cauuugcuggggucuugggaguuaaagccaaguaaacuugagacaacucacuuccaguugcuucagcauaug

SEQ ID NO: 4137863 - RNA, 72 nt, Human
cauuugcuguauuuucagauucacuuaccuauauagcagaguuuaguacuuaucuggaagaacugguaagug

SEQ ID NO: 4137864 - RNA, 60 nt, Human
cauuugcuucugugaaaucaaguucuccaucaaguggaacaugacuauaggagucaggug

SEQ ID NO: 4137865 - RNA, 87 nt, Human
cauuuggcagucaguauaauagaguggaaaaaccuuugguuugaaagaacuguauucuagucauguuugucacugucuagucaaaug

SEQ ID NO: 4137866 - RNA, 60 nt, Human
cauuugguguuaggcauguuaaucugauaaccacggauacaggcugcuuccaccaauaug

SEQ ID NO: 4137867 - RNA, 58 nt, Human
cauuuguaggaugcuucuuguuuguaagcuggcauacuugaaguaguccuaauaaaug

SEQ ID NO: 4137868 - RNA, 59 nt, Human
cauuuguagggagaagccuuguugaacgcuagcaggugcguuacuucacucuccagaug

SEQ ID NO: 4137869 - RNA, 55 nt, Human
cauuuguauagugcuuagaccagcaucugguaucuuuuuaagugcuaugcaauug

SEQ ID NO: 4137870 - RNA, 55 nt, Human
cauuugucuuugagugcccugcucuuuccacugaagagcccacagaacacagaug

SEQ ID NO: 4137871 - RNA, 70 nt, Human
cauuuguuucagcuauucaguaccuuacacagaaaaauguguuaauaguguacauaguuaggaacaucug

SEQ ID NO: 4137872 - RNA, 82 nt, Human
cauuuuagucgacauauguuuguuaucagagagaggugcugugaacacacagccauuuucuuagcagcuuuuugacuguaug

SEQ ID NO: 4137873 - RNA, 104 nt, Human
cauuuuauaccugaagaaacugaaucuuagaaagaugauaggacuugcuuaaggccucuuagccaguaagaauaugaaucaggauuuauucuagguaggaaaug

SEQ ID NO: 4137874 - RNA, 120 nt, Human
cauuuuauuuugcauacagagucuuugagucaggaaauuagacagcaacuagcagggguggcuagccucugcucccuggugucugagaccucagcuggaaagacuugaaagcugagaaug

SEQ ID NO: 4137875 - RNA, 67 nt, Human
cauuuucaagggcagggaaaucauuucaguuaggaaccuuagaugguguccccagccuuugaagaug

SEQ ID NO: 4137876 - RNA, 56 nt, Human
cauuuuccuagucaugugcuucucuggauugccacagagacacuggauggaaaaug

SEQ ID NO: 4137877 - RNA, 76 nt, Human
cauuuuccuuucuccagggacugaggcuggagucccuggaugggcccagccuggugcacugugggguaggaaggug

SEQ ID NO: 4137878 - RNA, 73 nt, Human
cauuuucgccuuguuaucaagcuuaucuggcaucauuugcaagaacucagaauagggugcagggcgugggaug

SEQ ID NO: 4137879 - RNA, 68 nt, Human
cauuuucucaagauccaaugcacucacucaucuguuuuuugaaagagucuuuguauuuugaaagagug

SEQ ID NO: 4137880 - RNA, 116 nt, Human
cauuuucugccauacuauaauaaggcaguauaggucguaugucuuucuaguaucugccacauaguagaugcucuagacauacuggcuauguccagucuucaugguauuagauagug

SEQ ID NO: 4137881 - RNA, 68 nt, Human
cauuuucuuguuuuagucacaggacuuuacaauaauaauaaaggaaccuggaguagagggaguggaug

SEQ ID NO: 4137882 - RNA, 66 nt, Human
cauuuugagucuuuucauuguguggauuucuuaacaaguuguuuuuacaagaaaagccucugugug

SEQ ID NO: 4137883 - RNA, 62 nt, Human
cauguacuuaucccaugagaagaagaaaauaaaaucuuuuucauucaaaaggaaaagucaug

SEQ ID NO: 4137884 - RNA, 73 nt, Human
cauguagaagcugcggaagauuggugaguuacucuuuaaaaaaccaauuucuuggcuuccaaaucacuacaug

SEQ ID NO: 4137885 - RNA, 68 nt, Human
cauguagaguccauuaaugcaaguuucuuuaacuuuguguuuaugaaauaggcaaaugcuucugggug

SEQ ID NO: 4137886 - RNA, 76 nt, Human
cauguaggguaaguuccugacauugccauggcauuuguaaacugucauggugcuagcgggaaugucucuuagcaug

SEQ ID NO: 4137887 - RNA, 74 nt, Human
cauguauaguuuaaaaguuagggaugaucuauaauauaguaugaucauuuucuaaaauuuuugaaaacaauaug

SEQ ID NO: 4137888 - RNA, 58 nt, Human
caugucagcaucaaaaauuaugagucguguugauaguaugaacuuuugaugugacaug

SEQ ID NO: 4137889 - RNA, 85 nt, Human
caugucauguagccuugaugcuuucauucucucuggaccacaacagagaugcccuugaaaggauuagcaguuugacucugacgug

SEQ ID NO: 4137890 - RNA, 58 nt, Human
cauguccauuuaugcacagaaaaggcuagcucugagcuucauggcaagaauggaaaug

SEQ ID NO: 4137891 - RNA, 80 nt, Human
caugucugccugcaagaaguccucucuggguggcagccucagccucucaguuaugagggcuuguuagcacacacaccaug

SEQ ID NO: 4137892 - RNA, 62 nt, Human
caugucugucuccgugaauaggccuuccuuaguugggaaagucauuuaaaagggaacacaug

SEQ ID NO: 4137893 - RNA, 77 nt, Human
caugucuuauuuaugcuucuuacuccccaugaugaagaaaaccagcuccgaggggugaggacauuggucaggacaug

SEQ ID NO: 4137894 - RNA, 86 nt, Human
caugucuuuuuuguggcucuuaguuuaucuuugacaaaguuaauauauuaugcugaauuuaacuugggaaagacaagaaggaaaug

SEQ ID NO: 4137895 - RNA, 109 nt, Human
caugugaaagacucuguacuugggucugaccuugagccucaggugggucuggcucagcugaggaugccugccuguuggcugaggugcaaacucagggagcagacacaug

SEQ ID NO: 4137896 - RNA, 96 nt, Human
caugugauuuugguaggaagcugacaguguguaaaggaugguggguguuuagguauaugcacaggacacugcagcaucagcuacggaaauuagaug

SEQ ID NO: 4137897 - RNA, 58 nt, Human
caugugcaauaauaccucaauuacugaaacucaucggaaaugaguuauuuuguauaug

SEQ ID NO: 4137898 - RNA, 57 nt, Human
caugugcagcuucuucagcgagaucucacacuccaucacacuggaggagcugccaug

SEQ ID NO: 4137899 - RNA, 81 nt, Human
ccaugggaaucccagcuuuggaguguuguugcuguugcugcuuagccagaauuuaaauugcaguggcugauguuuccaugg

SEQ ID NO: 4137900 - RNA, 129 nt, Human
ccauggggguuuuggugggauucuggguaggccaggaagcaguguggcuaggaagagaccuccaggcaaaguugacgcugucacccagauggccuauaauccaggguaguaaacucagacgcuugcagg

SEQ ID NO: 4137901 - RNA, 82 nt, Human
ccaugguauucuggcaggagaacaccagguagaaaggaaacuggguccuaaggcuuggacuucuccaacccugauauagugg

SEQ ID NO: 4137902 - RNA, 56 nt, Human
ccauguaacuguagcuaaccgaugagagcaagcucuccuccuagauacagucaugg

SEQ ID NO: 4137903 - RNA, 69 nt, Human
ccauguaugagguaggacaucaggaaaugcuggacagguuaauuucguguguguucuacuuaaguaugg

SEQ ID NO: 4137904 - RNA, 55 nt, Human
ccauguggcaggaagguguuuccucugaagcagggcaaacucugaaggccacugg

SEQ ID NO: 4137905 - RNA, 58 nt, Human
ccaugugugcuaauguaugcucuaagaauaaaguuuuuaaagcaguuuguauacaugg

SEQ ID NO: 4137906 - RNA, 64 nt, Human
ccauguugucaaacuuagaguagaugaccucucagucccuuucuauuuaguuuuacaaaugugg

SEQ ID NO: 4137907 - RNA, 64 nt, Human
ccauuaaagcaccacuguaauaauuguuucuggcaagauccaucagugguugcugaauuagugg

SEQ ID NO: 4137908 - RNA, 61 nt, Human
ccauuagaauuccacagcugcacagagguguuccacacagucucagcaaguggaaggaugg

SEQ ID NO: 4137909 - RNA, 56 nt, Human
ccauuaguaccucuggaaaauugacgcuccguucucuauauucagagggcuaaugg

SEQ ID NO: 4137910 - RNA, 72 nt, Human
ccauuaugaauccccaugccaggccacaaugugguuagcccacagguggaaacaugguguuggguuuuuagg

SEQ ID NO: 4137911 - RNA, 97 nt, Human
ccauuaugucuugguggaaauauagcaauuaugccuacuagccucucgaacaaugcuaaugggcauaauuguucauauuuccaccaagacaugaugg

SEQ ID NO: 4137912 - RNA, 92 nt, Human
ccauuaugucuuuaguugcuuagauuugaucuugacccggggcugaugaagaggagcugggcuugcagcucugagacugaggcuauggaugg

SEQ ID NO: 4137913 - RNA, 80 nt, Human
ccauuauugcuucuuauguagugacugacuguuagguaggcugauucuuuuucauauugcaaacuuggggagcaugaugg

SEQ ID NO: 4137914 - RNA, 79 nt, Human
ccauucagagcuuuuacuuacauucuaugccagaaaaaaauucccuuuagggccuguagcuuguaaauagugcucuggg

SEQ ID NO: 4137915 - RNA, 92 nt, Human
ccauucaggacauauuuauguacccuuuuuuaugucaagcauugugucaggcacuugggagacacaagaagacauggucuguguccuggagg

SEQ ID NO: 4137916 - RNA, 58 nt, Human
ccauucaguaugucuauucucugucucauuccaggacagaguacagugugcuuagugg

SEQ ID NO: 4137917 - RNA, 86 nt, Human
ccauuccacuuagucucaccaguucaguuuuccuucaucugucuauuuuacuggaagacagaacugugugaugauuaagacccugg

SEQ ID NO: 4137918 - RNA, 88 nt, Human
ccauucccccacgcugacugugcuccuugaggacagagcgcccuugguuagaggcagaucugcaggagcagggcguggagggugaugg

SEQ ID NO: 4137919 - RNA, 60 nt, Human
ccauucuaaaguucaagcaagggcaugguuaguaaaauaccagcucuaauuuuagaaagg

SEQ ID NO: 4137920 - RNA, 109 nt, Human
ccauucuggcuagacuguuguuuaucaaauagaguaguagagucuauuuaacucugaauauuacuugauuugaaaaucauagcccuuuuauuaauuagcccugacuugg

SEQ ID NO: 4137921 - RNA, 63 nt, Human
ccauugaagcuugagugucaguuccucuuggaagaggaucuugaacccuacaggcuuaguugg

SEQ ID NO: 4137922 - RNA, 86 nt, Human
ccauugauaguuuucaugaaucguggaaugauuuaucuuuucagaaacagauaaaugguuccgugauucaugaaaacuaccagugg

SEQ ID NO: 4137923 - RNA, 99 nt, Human
ccauugcccuguguggagagagacuggagugucuuuaggguucuaccugcuagagucccagggacacuccagacuuggaaacugcacgugguucaaugg

SEQ ID NO: 4137924 - RNA, 70 nt, Human
ccauuggaggcuauuauuuuuaugucaaggacaacaaaccugaggcuuagauuugguaacucgccaaagg

SEQ ID NO: 4137925 - RNA, 72 nt, Human
ccauugggguucacaacacccggcuguccccagacuuguguccagggaagauaguguugagggcccucaagg

SEQ ID NO: 4137926 - RNA, 129 nt, Human
ccauugguuauuugauucacagacaauucccauagagcuauaagaauuuuguguuuuccuagaaagucacauauuugaugaagcuuuguuguuuucuguguccuuaacaaaugacauucaguaaugugg

SEQ ID NO: 4137927 - RNA, 58 nt, Human
ccauuguaaagaguauacuuuguuucaaaacagaaaaauguauaugucuuuagggugg

SEQ ID NO: 4137928 - RNA, 62 nt, Human
ccauugugacuuuauuucgaaauggggucuuugcagauauaaucaagaugaggucauacugg

SEQ ID NO: 4137929 - RNA, 99 nt, Human
ccauuuaaaaagacaaaaucugcuaugcuauucuucagaguguucuuuggguacaauaugaaugcuuugggaauucagaauaguaaguuucuuucaugg

SEQ ID NO: 4137930 - RNA, 65 nt, Human
ccauuuaaaugacuuuuauuauucucauaugaguuaagaugggagaagauuuggcauuuaaaugg

SEQ ID NO: 4137931 - RNA, 56 nt, Human
ccauuuaauaucucacacuuccaugccuggauugucagguaggugauaaugagugg

SEQ ID NO: 4137932 - RNA, 83 nt, Human
ccauuuagugagugugaaucaaaugcuaggcaccagacugaugcuuucuuuuugcuauuucauuugauccucacaauaaaugg

SEQ ID NO: 4137933 - RNA, 65 nt, Human
ccauuuauagauguauuuggcugucaguuaccuuugacuguagaagcaccuuacagcuauaaugg

SEQ ID NO: 4137934 - RNA, 65 nt, Human
ccauuuauguaacagugccgccauggauaaaguggacguaauaccuggaugcugcacguagaugg

SEQ ID NO: 4137935 - RNA, 82 nt, Human
ccauuucauugccuguaaagugaguggaugcuugcuguaccccugucauaaaguuuuauaggcucaaauaaaaugaaugugg

SEQ ID NO: 4137936 - RNA, 99 nt, Human
ccauuuccaaguagaguauucagguuagcauuaagacuucauuaguaauauggugcaugcuguuaaaauguggucuuaaaauuauaccuguguuaaugg

SEQ ID NO: 4137937 - RNA, 100 nt, Human
ccauuuccuccagggccucuuuccuggcuuuugggcuaauucaguauucagugagaaggggguauagaucagggguugggagaauggcagcuggacaugg

SEQ ID NO: 4137938 - RNA, 85 nt, Human
ccauuugccaaggcuguuauauuuuugcccaugaggaauuacucaauuuuggucauguaguagagacagcuuuguagacaaaugg

SEQ ID NO: 4137939 - RNA, 65 nt, Human
ccauuuggaauggauguccuagaggucucaggaacuaagccugaguuggggcauccaccgaaugg

SEQ ID NO: 4137940 - RNA, 70 nt, Human
ccauuuguaugucggugcuguuuugagugcuacccccugcugguggggcuuucauacagcacacagaugg

SEQ ID NO: 4137941 - RNA, 55 nt, Human
ccauuugucaccucugcacuccauuugucacagagucccaguggugggcugaugg

SEQ ID NO: 4137942 - RNA, 60 nt, Human
ccauuuugagggggguagggucaagcucugcaacuugacaaagccucauccuucagaagg

SEQ ID NO: 4137943 - RNA, 115 nt, Human
ccauuuuuaaaauaaagacuuuaaaaaucacuagcacaagauuggcacauaauagguaaccaguaaaugaugucuaucuuuguaguauuugcuauuguuauuugaguauagaugg

SEQ ID NO: 4137944 - RNA, 66 nt, Human
ccauuuuuaggauuuuuugguuguucucaaagguuguuccuuuaaaacuaaggaacugaaaaaugg

SEQ ID NO: 4137945 - RNA, 129 nt, Human
ccauuuuuuucaaaauuacauagaaagaagauguagucuuaagggggguggagggacaaacuuccauugaguaccuggagacacugcguguacaucuucaucuccacaguaggcacgugagguaaaugg

SEQ ID NO: 4137946 - RNA, 65 nt, Human
cccaaaaauuagauacacauauauuauguuuuggaaauauguguacaguauacugguuucuuggg

SEQ ID NO: 4137947 - RNA, 67 nt, Human
cccaaacaguggcaagaacaguaauaaugauuauuuuaguucaucuuuacacugcacuugcuauggg

SEQ ID NO: 4137948 - RNA, 59 nt, Human
cccaaaccuaggcagaguuccgugcgugauucacaacuuuggaggccugcagguuuggg

SEQ ID NO: 4137949 - RNA, 65 nt, Human
cccaaacucaagucuaugaacaaggacauucugguguggccuuguuccguaauggccuugguggg

SEQ ID NO: 4137950 - RNA, 80 nt, Human
cccaaacugaacuuucuugcugcagacucuugguuugcuuaugaaccaagugaguacuuggcagaaaccaaguauauggg

SEQ ID NO: 4137951 - RNA, 73 nt, Human
cccaaacuggagcguggguccaaggcucugguucuaucccagggaucaaagcagcauggcccaguccaauggg

SEQ ID NO: 4137952 - RNA, 64 nt, Human
cccaaagaguuagguccacaagaucaaugcaguaauugcaugugaucuggggcuucucccuggg

SEQ ID NO: 4137953 - RNA, 57 nt, Human
cccaaaggagagugagucagaugcccugcacaccagccaggggcuccuccccugggg

SEQ ID NO: 4137954 - RNA, 69 nt, Human
cccaaaggcugccuguuccaaucuccuucccugcuagggacaaggcaaagagagagaaggaggccuggg

SEQ ID NO: 4137955 - RNA, 63 nt, Human
cccaaagugcugguauuacaggugugagccacugugcccggccuguuuuaucaguuuuuaagg

SEQ ID NO: 4137956 - RNA, 100 nt, Human
cccaaauaaaaaucuacccacaaucuuagagagauucuuuuaugauguauugggguaaauguguggaagguuucuuaagguucuagggagggaguuuggg

SEQ ID NO: 4137957 - RNA, 75 nt, Human
ccagacccuccacucacugcuguguuugaaccagggcaaagaaacacucagcaccugacuggagcuucgguuugg

SEQ ID NO: 4137958 - RNA, 57 nt, Human
ccagacuccagggcuccaucccuugucagcacagagaagcugggagccuggggaugg

SEQ ID NO: 4137959 - RNA, 90 nt, Human
ccagacucuucaauccucacuucugaauccaaguggcuaaugggaaccuuaucuuucugcccuguucaagggaugauugaccagagcugg

SEQ ID NO: 4137960 - RNA, 87 nt, Human
ccagacuggggcuccuugagggcaggggccaagcucccauccaaggggaggcaagaaccugccacucgggcagggcuucagaacugg

SEQ ID NO: 4137961 - RNA, 68 nt, Human
ccagacuuucaagcaagaacacuuugagaugauaagucuuguauuguuuuaggcuaugaaguuucugg

SEQ ID NO: 4137962 - RNA, 73 nt, Human
ccagagacuggaagaugggggcuuaauacuucucaaugauuacaugucaaagagauggcucccaggucucugg

SEQ ID NO: 4137963 - RNA, 68 nt, Human
ccagagagcuacaaggcauaaauuuagauuucagaacauuuuuuaugaaccaacaugauggccucugg

SEQ ID NO: 4137964 - RNA, 72 nt, Human
ccagagauccaugcaauacaguuuauaguaauucuucauuugcaauuugacaaguugcauguuuccaucugg

SEQ ID NO: 4137965 - RNA, 90 nt, Human
ccagagcuggugucaaaugucagauucuguuagagcugaaggggccucuggcuugucucagggucugauugaccuugggccagccccugg

SEQ ID NO: 4137966 - RNA, 64 nt, Human
ccagaggagggacugugagcucuccaggccgcuuccucggaggaggaguucccagcccuccugg

SEQ ID NO: 4137967 - RNA, 55 nt, Human
ccagaggcugauggcuguagccaugcugagcugauggcuggagcagaggcucugg

SEQ ID NO: 4137968 - RNA, 84 nt, Human
ccagaggcugcacccagugcucccgcugccgcugugaagcacugcccacaggagggagcgggcagccagcuggggcugccaugg

SEQ ID NO: 4137969 - RNA, 84 nt, Human
ccagaggucaggaguggcccugugaacagcgcagucccgugguacagugggagggugcuguggcugggccggucuggguccugg

SEQ ID NO: 4137970 - RNA, 55 nt, Human
ccagagguggugggugcuacaggagagggacuccagcaagcuucucauccuuugg

SEQ ID NO: 4137971 - RNA, 73 nt, Human
ccagagucuuugggcaaaagaguuucccagugcccaggcugggucggaaugcucuuugguccuagacuccugg

SEQ ID NO: 4137972 - RNA, 72 nt, Human
ccagagugggagaguagcagaaggaugagagaguguccucucucauuucuccgaccugcugucccuuuuugg

SEQ ID NO: 4137973 - RNA, 59 nt, Human
ccagaguguguucgaccuuccagagucuucuuucuaaaggcucuuuggacaacuacugg

SEQ ID NO: 4137974 - RNA, 75 nt, Human
ccagauaacuuuccauuuccaaccaagccuauucuuggucaucuugaguuagaagugcuuugggauggagucugg

SEQ ID NO: 4137975 - RNA, 64 nt, Human
ccagauagucaucucuucuacaauaugggaacuauucucagaugauuguaggaugaaaaucugg

SEQ ID NO: 4137976 - RNA, 55 nt, Human
ccagauaucacugccguguuguuccacuaguuuaacaauaugcucagugguuugg

SEQ ID NO: 4137977 - RNA, 85 nt, Human
ccagauaucgugguugcauugaaaauauauuuuaaaguacaaacgcuucuugagauauaguuuuaguuuuguucacuaaaccugg

SEQ ID NO: 4137978 - RNA, 66 nt, Human
ccagauauucacuuuuacaugcaguaaauuguuuaucaucaauagcauguauuagaugauaucugg

SEQ ID NO: 4137979 - RNA, 65 nt, Human
ccagaucuccgggggcccacgcagccccgcacgccagggcucugcuggaaguucucuggaaaugg

SEQ ID NO: 4137980 - RNA, 90 nt, Human
ccagaugagauaaugacgcagaagggccuggcgugccgagggcagaaggccuggucacugcccucccuuuugcacuuacuuguugugugg

SEQ ID NO: 4137981 - RNA, 67 nt, Human
ccagauggggcucaguguggaggccagacagaggugugugccucccagugagcugggcccugccugg

SEQ ID NO: 4137982 - RNA, 55 nt, Human
ccagauguauguaugagugcauaaucaugguuaugugauuagcugaauacacugg

SEQ ID NO: 4137983 - RNA, 130 nt, Human
cccaucuuggagggcugugcuauagaauaagugaggaagugguuguaugguuuccaucauauauuagcugcuugauggacacuggauaacccuguuggcucucuauacugucccagguacaagaauauag

SEQ ID NO: 4137984 - RNA, 64 nt, Human
cccaugcaacaaaugcuacgaaucgcucgcugucgauuuagaagcauuugugguggacgauggg

SEQ ID NO: 4137985 - RNA, 108 nt, Human
cccaugccagauguuaccauaagcuuuguuauuguuucuugaucaaaccaagacuaugguaauuaggaaacugaaugucagaacuguguuauuauugauuaaaauggg

SEQ ID NO: 4137986 - RNA, 71 nt, Human
cccauggaauaguucugaaaugcuugggaaauaauccaaggcacagaggcagggcacuuguauuuuauggg

SEQ ID NO: 4137987 - RNA, 55 nt, Human
cccauggcaauaaggucacagguccagaggacccuugugcugcggugcccguggg

SEQ ID NO: 4137988 - RNA, 89 nt, Human
cccauggccacucccucacucuuucuuucuuggagucugggauuccucucuguuucuauaaagacaagaguuuucagaguguuuauggg

SEQ ID NO: 4137989 - RNA, 60 nt, Human
cccaugguauaagcuggggagauuuacaggaccauguguccugggcccaggcugccaggg

SEQ ID NO: 4137990 - RNA, 60 nt, Human
cccaugugucuccccuggaaguagaaguagaagcucuuaugggaagcagaggcacguggg

SEQ ID NO: 4137991 - RNA, 72 nt, Human
cccauuggucaucaugcuugggucuagcucugguccugccacuaacuagcugugugaugggaaaccuuuggg

SEQ ID NO: 4137992 - RNA, 62 nt, Human
cccauuuuacagauguaggaacugaaguuuggaaagcugaaguaacucacaucguuaguggg

SEQ ID NO: 4137993 - RNA, 121 nt, Human
cccauuuuguaucugacucuuucuaauaguagggcuggagccugaggccagggaccuccacucuaccccucagggucucucacagcaccuggcaugagaaaggcucaggacagauaugcgg

SEQ ID NO: 4137994 - RNA, 63 nt, Human
cccauuuuugugugaguaaugaagaauggagggaauuauuuccauacuuauuagaaauauggg

SEQ ID NO: 4137995 - RNA, 129 nt, Human
ccccaacaugugcuuuccagagccucagauguuuccuuaguucuacagaugguuuguaaauucauuucagcucaauuugccagugcugcagaaaguaucuauggcugauuggagucacaguuuggacgg

SEQ ID NO: 4137996 - RNA, 108 nt, Human
ccccaacuaagguccaacaagaugugugagugaacaagucuuuagaucuuuccagcccuagcuggaacuaucugccuguauuuaccaucauugcuguaccuguugggg

SEQ ID NO: 4137997 - RNA, 60 nt, Human
ccccaagccucauguuugccagaguugcuuagcuuacauugugugcaugaggggaugggg

SEQ ID NO: 4137998 - RNA, 70 nt, Human
ccccaaggaucuugcggcccgcagcgcccucugaguuuaucuagcuguccacaggccacagagcuugggg

SEQ ID NO: 4137999 - RNA, 70 nt, Human
ccccacaauucucccucaucgccucuuucauugccacucuuugaagcguaaauaaaugaggcauuugggg

SEQ ID NO: 4138000 - RNA, 88 nt, Human
ccccacacaugcuccucguagccauggcucuggcacagugccaggugcuggccucagagggucaugguggugcuggcgcugucugggg

SEQ ID NO: 4138001 - RNA, 57 nt, Human
ccccacagccgccagcagggagcucccuuucggcucggccugcgcggucgcuggggg

SEQ ID NO: 4138002 - RNA, 74 nt, Human
ccccaccagccaggccacucccggguccugcccaccaugggugcccagaaccuggagggcuugcccaggugggg

SEQ ID NO: 4138003 - RNA, 82 nt, Human
ccccaccugcucagagccagccugggugcuggaaccacacuugccucaggacccugggcuugcuccuggggaaagagugggg

SEQ ID NO: 4138004 - RNA, 88 nt, Human
ccccacucaggaaaccuugacuucugaauuccuaucagguccagaggguggaaggcccuggcaggaagcaggaggaggaggagagggg

SEQ ID NO: 4138005 - RNA, 58 nt, Human
ccccacucucggccagauaggcucuucucggccugauucugagaagucaaggaugggg

SEQ ID NO: 4138006 - RNA, 72 nt, Human
ccccagaauacuuccuguguugcaucguuaaauaucaacugagcaggagcagcucaagaguaguucgagggg

SEQ ID NO: 4138007 - RNA, 128 nt, Human
ccccagauaggccgaaguccccuccugagugcagguggcaggucagagaggggcaggaaaguucuucugaggucucaugacuugcauaaggccuugaggcacucaccuggggaaaauauuaccugggg

SEQ ID NO: 4138008 - RNA, 72 nt, Human
ccccagcaccugggacccagaggcaccagcggguacugggaggugccgguggcccuggcccagcugcagggg

SEQ ID NO: 4138009 - RNA, 58 nt, Human
ccccagcacuuggaguggggagacacaagcuggcagcucccuaagccagaugcugggg

SEQ ID NO: 4138010 - RNA, 83 nt, Human
ccccagccaugcaaagugcuguacaguguguaaaucuaccuuuaccuuggauugauggguacaguaguuuugcaucugugggg

SEQ ID NO: 4138011 - RNA, 63 nt, Human
ccccagcccuccggauguucugggcuuccaacaugggagcccugagaguugugaggccaaggg

SEQ ID NO: 4138012 - RNA, 56 nt, Human
ccccagcccucgguagucccauagaagcugugggcuccugcagcucaggccugggg

SEQ ID NO: 4138013 - RNA, 64 nt, Human
ccccagccucugcugccaucucuuccucgugcugcuccuggggcagcggugggugcggcugggg

SEQ ID NO: 4138014 - RNA, 58 nt, Human
ccccagcugagauuugaggagauugcuaauucuaacuuuccucacaggcacacugggg

SEQ ID NO: 4138015 - RNA, 88 nt, Human
ccccagcugcagguucagcauuccaccugccucgucaagcuccaaggcaacgugacugaaagcugaccuguggaucuaggagcugggg

SEQ ID NO: 4138016 - RNA, 72 nt, Human
ccccaggaaccugcaagacagacuugacggauacuuacugcugugucuggguggcugcuuucagcucugggg

SEQ ID NO: 4138017 - RNA, 61 nt, Human
ccccaggacguggcccucauagggggguugagcuucuaggucugaggccgcauucuggagg

SEQ ID NO: 4138018 - RNA, 128 nt, Human
ccccaggagaaaacauacgcuccagacaccagcuucaucuuggcaguggucucaguuggacuugagaguaaauaggagaugacagcugaaucugguguggagauucaggaaggugguuuuccuggagg

SEQ ID NO: 4138019 - RNA, 80 nt, Human
ccccaggaguacagcgcauggcauuuguguguguuuucaagagaauggcagaaagaaccaugugcaaggcaauuaugggg

SEQ ID NO: 4138020 - RNA, 80 nt, Human
ccccaggucccugucccccaggccuguaccagggucugagcccagcacugguacaaggguugggagacagggccaugggg

SEQ ID NO: 4138021 - RNA, 55 nt, Human
ccccaggugugauuuggcagugucuggagacauuuuugguuuucacaacuggagg

SEQ ID NO: 4138022 - RNA, 107 nt, Human
ccccaucccuagaagcccuugcuaacccagucuccucguguaaaccuuuccccagguuuacacuccaggcuggggugggcaaagaggggcucagcuauaggaugggg

SEQ ID NO: 4138023 - RNA, 62 nt, Human
ccccaucuccaaauaccaucacauuggagguuagggcuucaacaugugaauuuggggugggg

SEQ ID NO: 4138024 - RNA, 67 nt, Human
ccccauggucuugauagguagaauggcugagguguuaggcauggucuuugcuugcaggauacagggg

SEQ ID NO: 4138025 - RNA, 78 nt, Human
ccccauucagcagaaagaaguuaguacaguuguuggccaaccuccccaacagcacuuggguuuuccuguugagagggg

SEQ ID NO: 4138026 - RNA, 129 nt, Human
cccccaaaccuaccccaaacaagaaacuccccagaccucaggcuaagaaggccaagugcacaugagugccugcgcccucucuucucuggccucugcuggucgguucugcuaugggacuguguucugggg

SEQ ID NO: 4138027 - RNA, 65 nt, Human
cccccaagguuccucucuccacccagcccucucugggcuuggcugggaugaggugacccaggggg

SEQ ID NO: 4138028 - RNA, 88 nt, Human
cccccaccauuccggguuucuccaaucucuccaggggccucagagaccccagacagaagaggaacuuggacagaggcuuggguggggg

SEQ ID NO: 4138029 - RNA, 74 nt, Human
cccccacccaggguuccuccacccugaacaauagaagcuaaguauagggcuggcccagcgcccagggcaggggg

SEQ ID NO: 4138030 - RNA, 77 nt, Human
cccccaccuucaucacuaugggcauuauauuuagggaguaguucuugggcuggauuuucugguuguggaaguggggg

SEQ ID NO: 4138031 - RNA, 68 nt, Human
ccccucagacuggggcucccugaguaagggcugugucuccccucagucugagcccuaucuaggagggg

SEQ ID NO: 4138032 - RNA, 93 nt, Human
ccccuccagcagugccacugccuccccaggcuccacacugccauguggugauguggguccuguguggggagcagcccauguguugggaggagg

SEQ ID NO: 4138033 - RNA, 56 nt, Human
ccccucgaggccuuaaaaagcugguaaccaaagagcagcugaagaucuggaugggg

SEQ ID NO: 4138034 - RNA, 103 nt, Human
ccccucgguccccggagucggaggguggaccggagcuggaggagcuggguguccggggucagcucugcaaggucaccuccccgcuccuggggaaagacugggg

SEQ ID NO: 4138035 - RNA, 128 nt, Human
ccccugagccuuggcuucuucaucugugacugagcugugagugaggcuaauaggcaaugguuuuaaaauuauguuuugcugagcccucaguccuuccacagacagcauuguaagaggagggucagggg

SEQ ID NO: 4138036 - RNA, 68 nt, Human
ccccugagugaccuccaagccucaguuucccguuugugaaagugggcagcccaggaggucuugagggg

SEQ ID NO: 4138037 - RNA, 76 nt, Human
ccccugagugcuuccagagucaugggaguccagccauuuuuccccuuuuucaugacauccugaagcugcacagggg

SEQ ID NO: 4138038 - RNA, 92 nt, Human
ccccugcguuucugcuccugcaccccugaaauuugaagaccugaauguucacuauugcacggacuaaauuuacagcggggagcagacggggg

SEQ ID NO: 4138039 - RNA, 74 nt, Human
ccaacugugaaagcaugcuugccaagcuuucagcaccacagcaucgggggaagcgggaggcacguuuguacugg

SEQ ID NO: 4138040 - RNA, 59 nt, Human
ccaagacagaaagugggucuagaauggcccuugggcuaagacugccauuguucuuuugg

SEQ ID NO: 4138041 - RNA, 83 nt, Human
ccaagaggcuucaauguucagggcagcccugcuacccuauuuuuugggugguggggugggaacuuggaaagaggucuugcugg

SEQ ID NO: 4138042 - RNA, 68 nt, Human
ccaagagggcuguuggugcccucgagggcaguggugggcugugugggcgaagacagccuuugccuugg

SEQ ID NO: 4138043 - RNA, 63 nt, Human
ccaagcagacuaaaacaauuaccaucuaagagauacucugaguguugcuuuagucugguuugg

SEQ ID NO: 4138044 - RNA, 76 nt, Human
ccaagccuaggucugggucuagcagaaaagagucaaagguauggcuugaccugcuuuaauuuagacaaggcagugg

SEQ ID NO: 4138045 - RNA, 95 nt, Human
ccaagcuacaugcaccccaucuggugccaucccaacacugggcuugacauuugcuccagcugucucagggaggugauccagggccauaggcuugg

SEQ ID NO: 4138046 - RNA, 59 nt, Human
ccaagcuuucgaucaaccagaagcuccauggauaauuugaguuacugcagaaaguuugg

SEQ ID NO: 4138047 - RNA, 58 nt, Human
ccaaggcagugguugugauacuguguuccaguaaggugcauuaguagcuagugccugg

SEQ ID NO: 4138048 - RNA, 66 nt, Human
ccaaggcuccucagcuggucuugggcugagggaagccuggagugaccaagcugguaugggguuugg

SEQ ID NO: 4138049 - RNA, 58 nt, Human
ccaaggcugagguuuccaguuggaagguacauuugaugggggagcugucugcccgugg

SEQ ID NO: 4138050 - RNA, 70 nt, Human
ccaagggaccugggaagucagccaaggacgcuugccugggugucuccuggcugguuucucugugcugugg

SEQ ID NO: 4138051 - RNA, 74 nt, Human
ccaagggcauaugucagaagugauguugagcuaguccucuagaggcuauuuagcuuccacucucaugcccuugg

SEQ ID NO: 4138052 - RNA, 59 nt, Human
ccaagggccuccaccuugcucgucgucagaggcagacagccaggacuuggcccucuugg

SEQ ID NO: 4138053 - RNA, 93 nt, Human
ccaagggcuguugccagggaaacauaguucucggucuucagccuggucuuccugagggcugggaguuugauuugacugguaggaaagucugag

SEQ ID NO: 4138054 - RNA, 69 nt, Human
ccaagguagaggagcugauaaaagggggucagguagccugacuuccggauguaugcucugauuucuugg

SEQ ID NO: 4138055 - RNA, 61 nt, Human
ccaaggucuuggacagcuaaugugaaugaacauaugcaauacuguaaaccaggcuucuugg

SEQ ID NO: 4138056 - RNA, 92 nt, Human
ccaagguggucuggcgucagaagucacugacuuggcccucgugcuuucucuggcagcaggagucacugacuugguccuaguacuaucucugg

SEQ ID NO: 4138057 - RNA, 76 nt, Human
ccaaguaaaugguguuuccguuaagcugaacuauaaaauguggguuacuuaaacagaaaugcagaaaggcacuugg

SEQ ID NO: 4138058 - RNA, 80 nt, Human
ccaaguaauaucuggcaccaggaacuuaacuguacuuaacagccauuuacaauuuccugcaaagccagaugucgacuugg

SEQ ID NO: 4138059 - RNA, 93 nt, Human
ccaaguagcugggacaacaggugagcaccaccacacccagcuaauuuuuguauuuuuuggagagacagggucucacuauguugcccaggcugg

SEQ ID NO: 4138060 - RNA, 124 nt, Human
ccaaguagcugggauuacaggugcgugccaccaugccuggcuaauuuuuguguagagacgggguaucgucauguuggccaggcuggucucaaucuccugacuuuaagugaucugccagccuugg

SEQ ID NO: 4138061 - RNA, 59 nt, Human
ccaaguauuugucuuguuggucuccaaucacguccuggaaccguagaggcagaauaugg

SEQ ID NO: 4138062 - RNA, 82 nt, Human
ccaaguauuugugcuacaaaugaguuguaugaaccagugcaacagcuugcuuucuauuccuucauuuccaggacaaauaugg

SEQ ID NO: 4138063 - RNA, 60 nt, Human
ccaaguccucugguuucaaauaguguuuuuucaaucaauuguauaguacuagaggcuugg

SEQ ID NO: 4138064 - RNA, 73 nt, Human
ccaagucugugaccauuggguguccuuaaacaggcagcuggagaucccagaauuuggaucaugauuuuacugg

SEQ ID NO: 4138065 - RNA, 84 nt, Human
ccaagucuuugcuauugugaauagugcugcaauaaacuuaugugugcaugugucuuuauaguagcaugauuuauaauccuuugg

SEQ ID NO: 4138066 - RNA, 69 nt, Human
ccaagugaucaauaggcuuuuaaaaaucucugaguaaucucagaagugacaguguauuugacuauaugg

SEQ ID NO: 4138067 - RNA, 61 nt, Human
ccaagugcauguguguuccaaaacaucaugccaugaggcugcugaagauacacaugacugg

SEQ ID NO: 4138068 - RNA, 62 nt, Human
ccaaguggaugguguucucuggggccuguuuaccugucuucuugggguucaccugccuuugg

SEQ ID NO: 4138069 - RNA, 82 nt, Human
ccaagugucgguggagaguguugaccuggaaguccugugauuggcaggggacaaccaacuuagcauuacaaacugauugugg

SEQ ID NO: 4138070 - RNA, 77 nt, Human
ccaaguugucauaagccuauuauuucuuuacauuacugaagugaaagacagcauuaauggcuaaaugccauacuugg

SEQ ID NO: 4138071 - RNA, 124 nt, Human
ccaaguuuuugucuucuucuugucuugaacucuuuaacugaaauacaggcauagacaauccguguccgcccuuuaaagaugccuguuaucugcagaccuucagggcagagaagcuggaaguugg

SEQ ID NO: 4138072 - RNA, 72 nt, Human
ccaauaaccuaaauuaucaugagaauuaugaagccaaguuuuuauguacuuugugauaauuuagguugaagg

SEQ ID NO: 4138073 - RNA, 95 nt, Human
ccaauagaagggccacacugcaggccacaggauugcacagcaugcggggcugacaugcugcugcaguacuugcuguguucaguggcccuuucugg

SEQ ID NO: 4138074 - RNA, 86 nt, Human
ccaauauacuguaacuuacaguggaaguuaaccccauuuugaaaaauuagauuguuuuaauuccauugugaaguugaaaaaauugg

SEQ ID NO: 4138075 - RNA, 62 nt, Human
ccaaucaguuagaaggaagagaauauuaagcucaaauauuccccuucugccuacgcugaagg

SEQ ID NO: 4138076 - RNA, 129 nt, Human
ccaaucccaaaaaauuacauauuacaaaauucucuuuguauaacaucuugacauaaaaucauaguaaagaacagauuagugguugccagguguuaagcggagagggagcguaguagaaaggugaguugg

SEQ ID NO: 4138077 - RNA, 57 nt, Human
ccaaugaaauucuuuccgagccuuuauuaaaagaucuguuugaaagaguuuuauugg

SEQ ID NO: 4138078 - RNA, 89 nt, Human
ccaaugagaaaaacaguuugaaguguauaacgaccuacaggaaaaaauuccugaucccauuuaauacugagaacaugauuuucuuuugg

SEQ ID NO: 4138079 - RNA, 56 nt, Human
ccaaugagacagaaagagccuccuaggaggagacagugucuugaaugucccauugg

SEQ ID NO: 4138080 - RNA, 83 nt, Human
ccaaugauuucuuuauugagaaggagauuggcaucuagagaaguuaagugacuuaaucuccucucaggguaagucagcauugg

SEQ ID NO: 4138081 - RNA, 58 nt, Human
ccaaugcauugaauuagguuuugauucugagugagaaaaggagccaucaguggguugg

SEQ ID NO: 4138082 - RNA, 104 nt, Human
ccaaugccacaacaauagaauacauuacauucauguuuucuugcuucaagcucucauuucugaguucugcaugaaaagaacugaacaauguauucauggaaggg

SEQ ID NO: 4138083 - RNA, 79 nt, Human
ccaaugccuuaucaugucuuucucaucacaucuaguugcugaagucacuuggauauaaaggcauaaggcacaucuuugg

SEQ ID NO: 4138084 - RNA, 66 nt, Human
ccaauggcugccuuaauucuucagcgggggcguucuuuuucuuccucccaagcaggcggccguugg

SEQ ID NO: 4138085 - RNA, 67 nt, Human
ccaauuaauuuuucugacagccacagcccuccuaaggcugauccuagcugacagaggaauagaaagg

SEQ ID NO: 4138086 - RNA, 83 nt, Human
ccaauuagagaucgauuucauauccucuuaucuagcagcuuaguuuugagugggagagaaauggaacagugagaagcugaugg

SEQ ID NO: 4138087 - RNA, 77 nt, Human
ccaauucauugauuauugaagggucuuuaggcaagaugguuaacgucucugaaagauuuuccugaucugugaaaugg

SEQ ID NO: 4138088 - RNA, 65 nt, Human
ccaauuugcuauguaugucucaucuacaaauuguccguggagugaggcauuuguagcugagaugg

SEQ ID NO: 4138089 - RNA, 57 nt, Human
ccaauuuucuggccagaggcucaaccaagaaggggagcccagggaaccaggaagugg

SEQ ID NO: 4138090 - RNA, 71 nt, Human
ccacaaauuauguagcuggccugucuagagccuuacuacucaaagugugguugcaggaccagcagcauugg

SEQ ID NO: 4138091 - RNA, 75 nt, Human
ccacaacuacagucccucauauguugguaaauauugguugcaacaaaaagaccaucagcuaugcuggcugugugg

SEQ ID NO: 4138092 - RNA, 91 nt, Human
ccacaaugcuggaucuuaggcuuuugaggaggggauaccugcugguguuggcaucucugagagaguuugaugcaccugguucugauagugg

SEQ ID NO: 4138093 - RNA, 128 nt, Human
ccacacaaaauuuaauucucaguuuuuuucauguagauuuuuuggagacucucuguaucuccucugaaauggagaguuuccaggaaauuaucagcggcuccuaauacaaauuuuuaauacaauugugg

SEQ ID NO: 4138094 - RNA, 102 nt, Human
ccacacagccccucuccuccaggaacucacaguacagcugagaaauuaccuggaaaaggcuggaaauuguauaaguaccuggaaaagacuaaggugugcugg

SEQ ID NO: 4138095 - RNA, 68 nt, Human
ccacacaugcuccucguagccauggcucuggcacagugccaggugcuggccucagagggucauggugg

SEQ ID NO: 4138096 - RNA, 72 nt, Human
ccacaccagggagugaaucuuucuggcuaccaaaccagcaggagucagaagcaaacaucacucuaggcuugg

SEQ ID NO: 4138097 - RNA, 80 nt, Human
ccacagacuuugcagccucugcuuuugcacagugacccagggaaccaguggcagaggaagggugcugcgaaagccugugg

SEQ ID NO: 4138098 - RNA, 88 nt, Human
ccacagauccuacuuucugagcuuagagccuccaaguucaguccugucucucugaacucagagccugagcuaggagacagauucgugg

SEQ ID NO: 4138099 - RNA, 74 nt, Human
ccacagauggccauauuacuauauuuuucaaaaaauggugacauuucacuguguaagugguuggccauccuugg

SEQ ID NO: 4138100 - RNA, 56 nt, Human
ccacagauuagcguacacccaccuccaaccugcagcugcauggcgcacaucugugg

SEQ ID NO: 4138101 - RNA, 65 nt, Human
ccacagcaggacuggagccgccugagugucccuccgacccaucucccuggcagguccagcugugg

SEQ ID NO: 4138102 - RNA, 65 nt, Human
ccacagcucucuagggagcugguugcagauuugauuccuacagccucuucccuggaguggauugg

SEQ ID NO: 4138103 - RNA, 57 nt, Human
ccacagcugacaauggauagacuguuaucaaucaaacuguucccauugcaguugugg

SEQ ID NO: 4138104 - RNA, 63 nt, Human
ccaggaaugcuggccaauacagaaacaucauaaacauuuuccuuguauuucaugcauuccugg

SEQ ID NO: 4138105 - RNA, 81 nt, Human
ccaggaauuguguacaaugacucucaguuuggcuuuguuuaguguuuuucucauggucaaauagagguuauguguuuuugg

SEQ ID NO: 4138106 - RNA, 66 nt, Human
ccaggaauuucgaaauacuguuuccccuuuauguauuuuccauuugauggaaauaauuucuccugg

SEQ ID NO: 4138107 - RNA, 55 nt, Human
ccaggacaagcucuuguuucaugguuuuuguagagccccuaacaguuugucaugg

SEQ ID NO: 4138108 - RNA, 66 nt, Human
ccaggacacugcuucacagcagagagcggcuggagaagacagccgaagcuuugagcagugauuugg

SEQ ID NO: 4138109 - RNA, 117 nt, Human
ccaggacaguggucaggaacaggagcccggcacaugcaggguuaacccugucucucuucacugccgcucagggugcccugccaggaugugccaucuccauggugaccgcuguccugg

SEQ ID NO: 4138110 - RNA, 74 nt, Human
ccaggaccccauuuagauaacaguucaaagacauucucuuugaacaugacauuuaaacuuagaucuggggaugg

SEQ ID NO: 4138111 - RNA, 89 nt, Human
ccaggacuauuuuaaaagucucucugaguaaaagugacaaaauacugcauuucuuaaaacuucagggagaaauaaugaaucuguuaugg

SEQ ID NO: 4138112 - RNA, 65 nt, Human
ccaggagccugggccaggcugggcaagcguugcagagccaaguccgaggcccagcaggcuccugg

SEQ ID NO: 4138113 - RNA, 66 nt, Human
ccaggagcucaaagaugccaggaggaacuuaggucuauaucuugccucugcucucugaguuuuugg

SEQ ID NO: 4138114 - RNA, 57 nt, Human
ccaggaggaaauucuaaagguaacccagucccuggagccacugauguuaucuccugg

SEQ ID NO: 4138115 - RNA, 63 nt, Human
ccaggaguggggaccccggggggcucccucacagagccuguccccaaggugcucacugucugg

SEQ ID NO: 4138116 - RNA, 129 nt, Human
ccaggaguugccucucuaguggugaauaccuuugggcugagucaggaagucucauacaucaaaagaccauguguauauaagcauuuacuuguuauuugguucagagccuccagaaggcaaaucuuuaag

SEQ ID NO: 4138117 - RNA, 94 nt, Human
ccaggaugaagcagugggcuuggcacaugggcucagccucagggcguuaggagcucagcaugguugaggugaugccagcccugcccuuuccugg

SEQ ID NO: 4138118 - RNA, 73 nt, Human
ccaggaugcgacuccccagagggccccuggacuguccaucccugggacaggaggccucuggagacaucucugg

SEQ ID NO: 4138119 - RNA, 70 nt, Human
ccaggauguggccuagaggugcaaggaaccagacaccacuggccuacaucaaacuccaggccacagaugg

SEQ ID NO: 4138120 - RNA, 69 nt, Human
ccaggauuguggaagucagugguucugauggaagcgggagaaccaguggagcuugccacagagccuugg

SEQ ID NO: 4138121 - RNA, 61 nt, Human
ccaggcaauucugaaagcauuuagugauaaacacauucacagagugauggauguugccugg

SEQ ID NO: 4138122 - RNA, 89 nt, Human
ccaggcaccuuuuuucaucucagggcaauucucagcgacagcugccaggugacgcuggaugugcccuugauuccugaaggggugucugg

SEQ ID NO: 4138123 - RNA, 55 nt, Human
ccaggcagaaugaaaccccuguuguuggugaggugggggucagccuccagccugg

SEQ ID NO: 4138124 - RNA, 88 nt, Human
ccaggcagcccuuguuugggaaggaugagagauggagauuaugcuccuacauccuugguauucuccccggaucagggcaaugaaaugg

SEQ ID NO: 4138125 - RNA, 81 nt, Human
ccaggcagcuuugcagacagcaggccgcauugcaggaggugcuccucccuccucggcagcugauugcagagcaccgcuugg

SEQ ID NO: 4138126 - RNA, 55 nt, Human
ccaggcauccauugcuuccucucaucgugaggucccugcagcagacugccaaugg

SEQ ID NO: 4138127 - RNA, 75 nt, Human
ccaggcaugugguccuuuagaggauguaauauggacuguagcuuuuauugagucagagaggggaacguuguaggg

SEQ ID NO: 4138128 - RNA, 61 nt, Human
ccaggcccccgagcagaagacaaacaacaggaacagaguuuggcuuuuguacugggccugg

SEQ ID NO: 4138129 - RNA, 56 nt, Human
ccaggcccugcugcugagaccuugaccccuccaagucccuccacgcagcgggcugg

SEQ ID NO: 4138130 - RNA, 67 nt, Human
ccaggccuugcauuugugauuuagcuuggugcuucccagaauucuaggcugcagaugcauggaaugg

SEQ ID NO: 4138131 - RNA, 61 nt, Human
ccaggcucaggugcgagagacacauguaacccagugccugaccuuaugcagcugagcuugg

SEQ ID NO: 4138132 - RNA, 55 nt, Human
ccaggcuggagugcaauggcaugaucucagcucacugcaaccuccgccuccuagg

SEQ ID NO: 4138133 - RNA, 69 nt, Human
ccaggcuuggggaugccaacagaagacccgcuccuccaggucuccucccuuucauucaccucggccugg

SEQ ID NO: 4138134 - RNA, 56 nt, Human
ccaggcuuuaagagguggaaacuaguaguuuccaccguagacucuuggaagucugg

SEQ ID NO: 4138135 - RNA, 59 nt, Human
ccaggcuuuggccuucaccaccuguuuuauguaagugacugcugaggccugaggccugg

SEQ ID NO: 4138136 - RNA, 61 nt, Human
ccagggaaggacucucuuucccuuggacugucagcuccacaggauaaggauuuuugccugg

SEQ ID NO: 4138137 - RNA, 76 nt, Human
ccagggaaggaguacagggagggucccugugugcagcugcucagggaguuccgaucugugcacccucuugaccugg

SEQ ID NO: 4138138 - RNA, 59 nt, Human
ccagggaagucacauugucuaguaacaauuguauggacacuggggugugacugccuugg

SEQ ID NO: 4138139 - RNA, 56 nt, Human
ccagggauguggggcuugcagugcuaaaauugcaaauauuccagguacaucccugg

SEQ ID NO: 4138140 - RNA, 65 nt, Human
ccagggcagccgcgugaccugccaggccugggggccccgaggagcuggaggcagguggugccagg

SEQ ID NO: 4138141 - RNA, 55 nt, Human
ccagggcagggaccacgugucuuuaugucccugaccacggggccuggcacccugg

SEQ ID NO: 4138142 - RNA, 63 nt, Human
ccagggcagugggagaaggugccuucgaucaucagggcacaagccuggcucucacuggccugg

SEQ ID NO: 4138143 - RNA, 63 nt, Human
ccagggccuccuaaggcaucuaaaauaugcaaaucuuuggugagcccccagugaggcuccugg

SEQ ID NO: 4138144 - RNA, 89 nt, Human
ccagggcugcuguugggccagggguggggacaccuuggauggggcguugcucuccccaggcucagagacuaagacacacacagacuugg

SEQ ID NO: 4138145 - RNA, 61 nt, Human
ccagggcuuuaucugccuuugacuuugaagcaaaagggagaaaggaacgaucaggcccugg

SEQ ID NO: 4138146 - RNA, 59 nt, Human
ccagggcuuuguaauaugagcacuuaacaucuuucaagugaucucuccaaggcaccugg

SEQ ID NO: 4138147 - RNA, 64 nt, Human
ccaggggaaacagggagcacuccaccuucuuaauaccaaauggccugcuuccaacagcuccugg

SEQ ID NO: 4138148 - RNA, 64 nt, Human
ccaggggaaggcuagagaaugaucacguggccgggauggggcuguguuccuggcaguccccugg

SEQ ID NO: 4138149 - RNA, 61 nt, Human
ccaggggcuacuuguuauggaaaaguuaugauugguguagaacuguacagguugcuucugg

SEQ ID NO: 4138150 - RNA, 57 nt, Human
ccaggggcugcagauccaugguggccuuccagccaucacccaucuuucugcuccugg

SEQ ID NO: 4138151 - RNA, 79 nt, Human
ccaggguaaggucauauuucuggcuugucugaguucaugaauuuucauaguauuuccagaaauagucuagccuccuagg

SEQ ID NO: 4138152 - RNA, 73 nt, Human
ccaggguaaucagauaucaccugggggauggcaagaauuuuuuucagcuauugaggguggugaguuauugagg

SEQ ID NO: 4138153 - RNA, 87 nt, Human
ccaggguagaagcuccauccugcauugcuauucagaugcacacaucacaucugggagguggcagggugcaugcugcugcucccuugg

SEQ ID NO: 4138154 - RNA, 56 nt, Human
ccaggguagggagguuuucauacaauuuuguagcccgcguaaccucucuacugugg

SEQ ID NO: 4138155 - RNA, 85 nt, Human
ccagggucuccugccuguuugacuggucucugcugugugcaaacuuccccaucacagcaggugacccaagcaggcuggagccugg

SEQ ID NO: 4138156 - RNA, 57 nt, Human
ccaggguggaggcuggauggagguaucuacucguggcccgcauugccucugcccugg

SEQ ID NO: 4138157 - RNA, 70 nt, Human
ccagggugggucugugugcacagcgagugccugggccaggcauuugacucagugacuggguuugcucugg

SEQ ID NO: 4138158 - RNA, 55 nt, Human
ccaggguggugugcaguggugcgaucucgucucacugcaaccucugccucccagg

SEQ ID NO: 4138159 - RNA, 59 nt, Human
ccaggguuauaaaugcaucugucugggcacauuaucuaaauuguuauguaucacccugg

SEQ ID NO: 4138160 - RNA, 65 nt, Human
ccaggguugcuguauggcacuuugcagaggagggcauggcugagaagugugucccagcagccggg

SEQ ID NO: 4138161 - RNA, 77 nt, Human
ccagguaccuguucucugcagcaaccuuucaccucccauacuugggagugaguucuguuccugcagagugcccugug

SEQ ID NO: 4138162 - RNA, 76 nt, Human
ccagguacuuucucccccucccacugucagcuggauucccucagugaugugaggugugagagggaaagccccuugg

SEQ ID NO: 4138163 - RNA, 81 nt, Human
ccagguaugagcaggggcguuuguggcgcggagagagcuccuaucccugccguccaucuacgucucaggcuuggccccugg

SEQ ID NO: 4138164 - RNA, 57 nt, Human
ccagguauguccuaagcuucagggauccaguuucuuguccuucugaaauauaucugg

SEQ ID NO: 4138165 - RNA, 101 nt, Human
ccagguauguccuucacauggcaauagagagggaaagagugaagaagcccaagagcccuucuaacccuccuuuugugugaugccuguuaagauucacuugg

SEQ ID NO: 4138166 - RNA, 88 nt, Human
ccaggucauaguuaguuaauugcuaggugcaucaucuugacaacauauguccaggaaucugugccuagcccugauggugauuucuugg

SEQ ID NO: 4138167 - RNA, 122 nt, Human
cccucacacccuccccuuuuuuuuuccacccaccaggugggguucagucucagccggguucggucuggcagaguucgcuccuauucagugaguggagggcauggggaagacgggagaagggg

SEQ ID NO: 4138168 - RNA, 59 nt, Human
cccucaccagccccagguccuuucccagagaugccuggagggaaaaggcugagugaggg

SEQ ID NO: 4138169 - RNA, 63 nt, Human
cccucagcccucucauccccuugccccuuucugugggguccagaaugagaaugggcuccaggg

SEQ ID NO: 4138170 - RNA, 60 nt, Human
cccucagcuccacccucagcagaugauaauaucaagacaccugccgagcgucugcggggg

SEQ ID NO: 4138171 - RNA, 62 nt, Human
cccucagcugccccaguggccccagcauccacugcuugggggcgguggggucaggugcaggg

SEQ ID NO: 4138172 - RNA, 64 nt, Human
cccucaggaugcuuggaucaccuuuauagcacacuccuaaaaggucuucucaaacaucccaggg

SEQ ID NO: 4138173 - RNA, 83 nt, Human
cccucaucaucuagauucaacuuaguuugcaugauuauggagcauguauuuagacuccaguaucagauuagggaugaugacgg

SEQ ID NO: 4138174 - RNA, 73 nt, Human
cccuccaggagaggcccuggcacugccugggaguggggagacauguucaguagggucagggcugagaaagggg

SEQ ID NO: 4138175 - RNA, 59 nt, Human
cccuccaggcuggauccaagucaagggcuguaccucgcugcuggaaccugccugugggg

SEQ ID NO: 4138176 - RNA, 60 nt, Human
cccuccagugagugagcaggcgaccacggccaccuuguugccuguggcucugcugucggg

SEQ ID NO: 4138177 - RNA, 119 nt, Human
cccuccauagaguugaacuuccucucuuuuuagaagaauggauuucucggagucugaaaaauuuaugguucuucucuggaagaauuuuauuuuaaagguaaguugaacuaccuauaggg

SEQ ID NO: 4138178 - RNA, 62 nt, Human
cccucccacucggauccacgcaucaaagggguccucggaugcagggaacuuagugggcuggg

SEQ ID NO: 4138179 - RNA, 130 nt, Human
cccucccauggugaggguggggggugcuccaggccugcccuggcuggggccccuuccuaggugaaccccaggaauguguguccaccggggaauguguggaggagccucucucugcucaaaaugggugggg

SEQ ID NO: 4138180 - RNA, 55 nt, Human
cccuccccaggcccugugccuguagcuuuagggcacgagggcacacgugggaggg

SEQ ID NO: 4138181 - RNA, 56 nt, Human
ccguccgauugucggcaggacucgcuuucaggaggaccuggcugcauucaggacgg

SEQ ID NO: 4138182 - RNA, 57 nt, Human
ccgucggacgcccgugggccucugcuccgugcgcgcccacccucagcguccucacgg

SEQ ID NO: 4138183 - RNA, 59 nt, Human
ccgucuuucuucuuuauuacaguggcugggacuuucaguccuguguuaaacaagagcgg

SEQ ID NO: 4138184 - RNA, 67 nt, Human
ccgugauaugugcaagaguuuauuuucuuccauuuaggaugaaagaacuaccuguaugauauucagg

SEQ ID NO: 4138185 - RNA, 67 nt, Human
ccgugcagguguuuuggcugccagcccuggcuaaggucucagcugucagccaguagcauuugcaagg

SEQ ID NO: 4138186 - RNA, 61 nt, Human
ccgugcccaaacuuacugguuuaaaacuacuaauuuauuuaguucaggaguuuguggaugg

SEQ ID NO: 4138187 - RNA, 60 nt, Human
ccgugcuucaguucauaaccuugcuaaucauguaucugaccuugugagcugaagaacagg

SEQ ID NO: 4138188 - RNA, 56 nt, Human
ccguggucaccugagcuccuuggcguuucaucugacaggugagguuggugccaugg

SEQ ID NO: 4138189 - RNA, 76 nt, Human
ccgugugcuuugguuuuacaggaugucaggagagcugcagagccaugugagcaucuguaaguagcagagcccaggg

SEQ ID NO: 4138190 - RNA, 101 nt, Human
ccgugugucugcgggugugaggcugaggaucguacuuuccaccuauaggcacagguggaggcugcaucaucacucgagccugucggccccauucacucagg

SEQ ID NO: 4138191 - RNA, 61 nt, Human
ccgugugugggccuucaacccugucuggguggguucuggacaguggguggggacccggcgg

SEQ ID NO: 4138192 - RNA, 66 nt, Human
ccguuagaggccuguggcugucgcugugagcugauucuccagcuaacaccuacuggccauugaugg

SEQ ID NO: 4138193 - RNA, 94 nt, Human
ccguuguacugacaguguucugaaaguugaggguguguguuuacuugccuuuauauccccacaacaaaauucagagucacuauuuguauauagg

SEQ ID NO: 4138194 - RNA, 72 nt, Human
ccguuguccagaacugagucucauggccauaucuagcugaaagaugggcuaggaaauguaguuuuaaaaugg

SEQ ID NO: 4138195 - RNA, 80 nt, Human
ccguuucugccacugaaauccuuaacaugaucuauuaacccggagauaaaagauaucuuagggauuuguguaagacuugg

SEQ ID NO: 4138196 - RNA, 71 nt, Human
ccggguaccucaguuggaaaugcagaaaucacccaucuucugcguugcucacgcugggagcuguagacugg

SEQ ID NO: 4138197 - RNA, 57 nt, Human
ccggguucaccuugcuuagguaugucucgcuuuagaucauaaggcaauuggauuugg

SEQ ID NO: 4138198 - RNA, 64 nt, Human
ccgguauguuuugucucuugaaacguuggcccaaauggcauuuucaaacauucaaauaaaccgg

SEQ ID NO: 4138199 - RNA, 60 nt, Human
ccggucagucuugaacagcccccugugugcauguguguauaguggggacaggaugguugg

SEQ ID NO: 4138200 - RNA, 72 nt, Human
ccggugaccugggagagaggagccggcggaacaugugucuuggucucucgccuccugucuuccagucuccgg

SEQ ID NO: 4138201 - RNA, 56 nt, Human
ccgguuugccuuguguuacaguuuuguggguaauuacccaaggcacagggcacugg

SEQ ID NO: 4138202 - RNA, 81 nt, Human
ccguaaagaggagcugguggcagagacaucagguguuugcucagugacacagugacaucacggccaccucuuauuucaugg

SEQ ID NO: 4138203 - RNA, 66 nt, Human
ccguaccccaggagcugugccuaguccaggagaggcuggggggcgccccauggaggugagacgcgg

SEQ ID NO: 4138204 - RNA, 59 nt, Human
ccguccauugcccaacagcaugggcagcauugcuuggugccagugagggcagaggaugg

SEQ ID NO: 4138205 - RNA, 98 nt, Human
ccguccccgaccuccucggaaaaggugagcagugcagguggcagaggacagccucugggcugcugucaucuggcgcugugcaggcgagacggggacgg

SEQ ID NO: 4138206 - RNA, 74 nt, Human
ccgucuggaggcugggucgggugcuguccaggccuuccugugacgugucuccuggcaccacgugccaccagagg

SEQ ID NO: 4138207 - RNA, 116 nt, Human
ccgugaggcuggauaggcagcacaugaugccucuggcuggcauugcuggacuuccaugggagggggauccuggcaaguaggggcuggugcuugggagccaauguccaguguugagg

SEQ ID NO: 4138208 - RNA, 89 nt, Human
ccgugaguuuggggcuggcuggagagaggccaacugggggacacagaggauuccucaggauccaucuccugcccuccucacacuuuugg

SEQ ID NO: 4138209 - RNA, 65 nt, Human
ccgugcccaucgacgcagggauggggacaucccuggaccccagcccagcguucgagggguucugg

SEQ ID NO: 4138210 - RNA, 55 nt, Human
ccgugcuucuucagaugugaaugacuuuauucagagagaucuagagggagccugg

SEQ ID NO: 4138211 - RNA, 108 nt, Human
ccguggcgggccucugucuugcagagaagcaaccguguggauagugacaggccacaggccucuuccagcuguugcuuccagggcugagccagaggccacuuuccaugg

SEQ ID NO: 4138212 - RNA, 65 nt, Human
ccguggcuccuggcuccaggcagccaaggcccucuggccuccuccaugcagccaggagcuucugg

SEQ ID NO: 4138213 - RNA, 116 nt, Human
ccguguggcgggcgagggggcccuggaacugguucuggaggcugcaggggcccccacauccacugcagcuccggaagcgggugaggaugaggguccccccagcccuggcaagacgg

SEQ ID NO: 4138214 - RNA, 61 nt, Human
ccguguuauauaauuccugugguagucuauguggaaguaccccaagaguuguguagaaugg

SEQ ID NO: 4138215 - RNA, 65 nt, Human
ccguguuuggggaugugcugagagugcggagccugauaaauauccguccagaagucccugagcgg

SEQ ID NO: 4138216 - RNA, 74 nt, Human
ccguuacagccccagcacuuagcugagugacuggcaccuaguaagcacucaguaacuguuugcugaauaaaugg

SEQ ID NO: 4138217 - RNA, 125 nt, Human
ccguuauuaaucuagguuuuuaauccauauguaauguauuaugaggacugguguaagguggagcucuaacuucaauuucuucauaucacucguagagcugacauuucacuaccugguuuggaugg

SEQ ID NO: 4138218 - RNA, 70 nt, Human
ccguuauuguaggaacaaggugugcaggucugaaaugggacuagggcaucuuaauuucuaacaggcacgg

SEQ ID NO: 4138219 - RNA, 78 nt, Human
ccguuccuuacacagcuucaguuucugacuugggaauuauucuuaguuaugaugauggugaggcuuuagcaggaacgg

SEQ ID NO: 4138220 - RNA, 75 nt, Human
ccuaaacagauacugcccagagcugcccguggaccuugugagggcaccagggcugccuggccgugugugugaagg

SEQ ID NO: 4138221 - RNA, 92 nt, Human
ccuaaagauguauuugaaaucauuuaugccccaauuagaugggucaucucauaaacuaauugggguauaguuauaugaucaaaguguuaagg

SEQ ID NO: 4138222 - RNA, 75 nt, Human
ccuaaauauuuugaaaauaugaugcuagucauuccaauguauguaccagauguauguucucagauaaauuuuagg

SEQ ID NO: 4138223 - RNA, 92 nt, Human
ccuaaauucuccaaagucucaguuucuuuaugugcauaaagauaguaauaccuaucuccaaagcacuugaagaauugaacuggaaaaugugg

SEQ ID NO: 4138224 - RNA, 70 nt, Human
ccuaacaguuuaugagauaugcuauguuuccucuucugauauaugguauacaauuauggacuguucuagg

SEQ ID NO: 4138225 - RNA, 84 nt, Human
ccuaagaagugcuuuuuaauauuuauacaucuaaagaggguuugcccuuccagacauagaaaaucauuaggaagcauucucagg

SEQ ID NO: 4138226 - RNA, 66 nt, Human
ccuaagcacaguucuuagaguuacauucaggagggaggaauguaaccugacugcuuugcucucagg

SEQ ID NO: 4138227 - RNA, 62 nt, Human
ccuaagcccagcucugccugcucugcggacuccccuauagcaguagaaugcugugugguagg

SEQ ID NO: 4138228 - RNA, 70 nt, Human
ccuaagcgugcagggccuggaguggcaccucugcaagaguggcacugcccagcgucuuaggcacaaaagg

SEQ ID NO: 4138229 - RNA, 77 nt, Human
ccuaagggaucuagauguccucugaauagcccaugggaagguuuucagaggagagcuggaccaaacaugcccuuagg

SEQ ID NO: 4138230 - RNA, 127 nt, Human
ccuaauaaauuacauuauuuuuuuccugggaugaggaaacaaggacagaguugaaacaccuucccccagaaaugugcuugccucucucagaccacagguaagggcuuaauaugaugugagaaagagg

SEQ ID NO: 4138231 - RNA, 57 nt, Human
ccuaauaacagugucugugguuaaagguguucacuguaugccuggcacuguucuagg

SEQ ID NO: 4138232 - RNA, 67 nt, Human
ccuaaugguaauagcaugcauccugcauagaaucacuggugaaucugggcacugcugagccuguagg

SEQ ID NO: 4138233 - RNA, 75 nt, Human
ccuaauuaucucccaaagaucccaccuccuaauacccucacacuggggguuaggauuucaacagauaaauuuggg

SEQ ID NO: 4138234 - RNA, 61 nt, Human
ccuaauugacugagggaaugcugguacuguuagaaaguauuagugaaagaauuaguuuggg

SEQ ID NO: 4138235 - RNA, 62 nt, Human
ccuaauuugacagcaauagaagauuuauguuugcaugaaugucuaugauccuuuaaguuggg

SEQ ID NO: 4138236 - RNA, 90 nt, Human
ccuacacugagagcucuucaggguuauccacauaggaguaaauucaagaauuccuggcugagugccuugggcuggagacaucaguguagg

SEQ ID NO: 4138237 - RNA, 72 nt, Human
ccuacagcuugcaugcagaggcacugaagacacauuaggguuuugagugcuucuucugugccaggcuguggg

SEQ ID NO: 4138238 - RNA, 76 nt, Human
ccuacaggcacaccaguuuaauaacugcucaaggcuccuugccagcaccauaaugugagcuugggugccacguggg

SEQ ID NO: 4138239 - RNA, 65 nt, Human
ccuacagggcucgucgggcccucggggucggcggcugcuggaggcgcccaggggaguccugcugg

SEQ ID NO: 4138240 - RNA, 75 nt, Human
ccuacagucuggcaggaauguuauaucauuagccauauuuaaacucagaaauaacagccaugaagauuguaaagg

SEQ ID NO: 4138241 - RNA, 77 nt, Human
ccuacauaacacugccaaacuguacacuuagagaugguuaagaucucuaaguguacaguuuggcaguguuauguagg

SEQ ID NO: 4138242 - RNA, 67 nt, Human
ccuacauguggucccuguaggcuggguggggcucuuuucacaccauccuaucugaccuacuuguagg

SEQ ID NO: 4138243 - RNA, 87 nt, Human
ccuacccccacuagaagcacaggaaccuauggggaaacaccuugacaaacccaccaggcaccuggagguuuacuggauggcuuuagg

SEQ ID NO: 4138244 - RNA, 85 nt, Human
ccuacccgcauguggugccgaguuccagccgcccugaguccccaaggcccagccuggagcuuguugugcacucagugggggaagg

SEQ ID NO: 4138245 - RNA, 62 nt, Human
ccuacccugggaacuggaaacuggauuuggcaagaaucccaggaagaucccagggacccagg

SEQ ID NO: 4138246 - RNA, 58 nt, Human
ccuacccuucucccccucugcggcguggugcgcaugcgaggcgggaggaggccuuagg

SEQ ID NO: 4138247 - RNA, 73 nt, Human
ccuaccucggcugggccuuggccacugcaacagggucuccauuggcaugugagcuggggcccggccagcaagg

SEQ ID NO: 4138248 - RNA, 66 nt, Human
ccuaccuucucccugaggguuccacacaccgaugaugucaugugugggacccuuagguuguguggg

SEQ ID NO: 4138249 - RNA, 98 nt, Human
ccuacggcguggccgaggcgggcggcuccuucgaccugcggcccuuccugacgcagccgcaggugguggcgcgcgcccugugcuuggugagcccgggg

SEQ ID NO: 4138250 - RNA, 64 nt, Human
ccuacgggauuacucaggccucaggggaagauuuggggugccugguaucugagaaugcuggagg

SEQ ID NO: 4138251 - RNA, 64 nt, Human
ccuacuccaaaauacucacacuggacugaaugaagucuacagugucaaugugucuugagagagg

SEQ ID NO: 4138252 - RNA, 82 nt, Human
ccuacuggaucagaaucucugagaguuuggagauggagaaaucauuuuuacuaaauucuucagguaauuuugaucaucaagg

SEQ ID NO: 4138253 - RNA, 80 nt, Human
ccuacuuagccacaguuuccauuaucuucaugagcaguagcuggaaugaaggagaaauggaaagugggaaugaagacagg

SEQ ID NO: 4138254 - RNA, 66 nt, Human
ccuagacagcauuucccggaaccgcauaggccauugacauuaugcuguuuccccaugugcugaagg

SEQ ID NO: 4138255 - RNA, 67 nt, Human
ccuagaccccaucccugauuuucacucgucuuggaggagccugaaucagagggugagaggucagagg

SEQ ID NO: 4138256 - RNA, 57 nt, Human
ccuagacuggaugguucgcauuuuucuggaugcaggaaagagagcuauucacuuggg

SEQ ID NO: 4138257 - RNA, 60 nt, Human
ccuagaggcugcaaggagaggcuguaaaauccuccuaaccuugcuuccagccuuccuagg

SEQ ID NO: 4138258 - RNA, 84 nt, Human
ccuagauuaggaaguagauagguuguucucugcugucauuguuuggacacagcucuauuuaccuuauuuauuguuccugcuagg

SEQ ID NO: 4138259 - RNA, 71 nt, Human
ccuagauuuuauuguucuguagugacauguagccaaaaagcaacauguaucuaaggacaagaugauauugg

SEQ ID NO: 4138260 - RNA, 130 nt, Human
ccuagcaauuuacucaacauuucucugagggcccaggccacuggguguaaaggacuuaagcaccuguucacaucuaauagcuuggucauauacgucuccggggguugcugggccagaacauggggagagg

SEQ ID NO: 4138261 - RNA, 82 nt, Human
ccuagcagccauccugugcccucuuauggacacccuuucaucagccuguccagaggacagggcuuugagcauggggcugugg

SEQ ID NO: 4138262 - RNA, 79 nt, Human
ccuagcguaaguauagcuuugucuauauugugugaauaagaaaacugagcuacaagaugauaaagcagcuugccuaagg

SEQ ID NO: 4138263 - RNA, 63 nt, Human
ccuagcuggcucccacaaacucacuacuuuacccccagaagucacugagauggugaggcuagg

SEQ ID NO: 4138264 - RNA, 71 nt, Human
ccuagcuucaguaaagucucuagaggguaggacaaguaacuccucucucagcauuacucuuacuaggcagg

SEQ ID NO: 4138265 - RNA, 57 nt, Human
ccauugagaacugugaacugugaugaagaaagcauucauccguuuauaucucugugg

SEQ ID NO: 4138266 - RNA, 81 nt, Human
ccauugauagccuuuuucuguccccagaauguggccaacauauguaugacucacauucacaggacagaaggauuguucugg

SEQ ID NO: 4138267 - RNA, 56 nt, Human
ccauugcagauucuucucagggagauaacuaucuuguuuagaaaaaugucugcugg

SEQ ID NO: 4138268 - RNA, 80 nt, Human
ccauuguggucagagaacauauuuuguaugauuuaaaucuuuuuaaaucuauugagacuuguuuuauggcccauaugugg

SEQ ID NO: 4138269 - RNA, 84 nt, Human
ccauuguuucuugcaggucacucacugagcguaggagcagacagagcugacuucaacuuaggggcgacuucaguaagaaagugg

SEQ ID NO: 4138270 - RNA, 62 nt, Human
ccauuguuuugaaacuccaucaaauugggcagcucuuuccagaagacagucucaagacaagg

SEQ ID NO: 4138271 - RNA, 73 nt, Human
ccauuuauucucuaguuggucagaugauguuuauuauugaucauaugaagaauuccaauuuggagaguguugg

SEQ ID NO: 4138272 - RNA, 63 nt, Human
ccauuucacccacugcuuuaggcugccagucucuugucugucucuucagcaguggugaggugg

SEQ ID NO: 4138273 - RNA, 55 nt, Human
ccauuucuuguuccaacuguguacuguucaagggaacacuugacaccagaaaugg

SEQ ID NO: 4138274 - RNA, 63 nt, Human
ccauuugaagacuuagaagaggacaaaggagauagaagcgucccuaagggaguuugcaggugg

SEQ ID NO: 4138275 - RNA, 115 nt, Human
ccauuugcauaaaauuuaaauuccuuauaaaagcucacaguaauacaaggccuguggagucaggccuuguauuugucaggcugugguaagaaauagacccaaaaaugcagacugg

SEQ ID NO: 4138276 - RNA, 106 nt, Human
ccauuugcaugcagauuuuacauuauuagcaaccaagagccucuagcaagaaggcugauggaagggucaguguguugcuuuucugagugagaucuggauggagagg

SEQ ID NO: 4138277 - RNA, 59 nt, Human
ccauuuguacauguugucuucuuuuaucuacacauuuaaagaggucaaauuauaaaugg

SEQ ID NO: 4138278 - RNA, 101 nt, Human
ccauuugugacccagauuguccaacuuucuccuuuauacugaguguauggcucaaaugaagcaauuagaaacuugaaggacaaaagcugaguugcagaugg

SEQ ID NO: 4138279 - RNA, 56 nt, Human
ccauuugugauguggcagcaucuuucaugaaaaugacaagcuccagaucaaggugg

SEQ ID NO: 4138280 - RNA, 99 nt, Human
ccauuuuaacacaccuccacaacucacagcuguuuggauuaggcauucaagacaagcauugacuuagccucaaaagucgugaggagguuacugaauugg

SEQ ID NO: 4138281 - RNA, 74 nt, Human
ccauuuucaguaugagugacuuccagggguucagucgguugcucugaacaucaguauucucaucuguaaaaugg

SEQ ID NO: 4138282 - RNA, 130 nt, Human
cccaaaacauucuucuagucagguccuuagcucagguauuuccaccuauuauuuucuguauuuacagaaugaguuuuuaggggggcauagugauauuuguaguggccuaagaagccugcaauuaguuggg

SEQ ID NO: 4138283 - RNA, 67 nt, Human
cccaaacaguggcaaggacaguaauaaugauuauuuuaguucaucuuuacacugcacuugcuauggg

SEQ ID NO: 4138284 - RNA, 71 nt, Human
cccaaacucuuggcugcguccuggcuguggaccuguauccuagaaacacuccaaggcagccaggagguggg

SEQ ID NO: 4138285 - RNA, 63 nt, Human
cccaaacuucagaaguucuuauuuuaaagcacucgagcaccuaggaaauacuguaaguuuggg

SEQ ID NO: 4138286 - RNA, 72 nt, Human
cccaaagauacacguuguauugaauacaagugugguaaacaacaagacuauuuuuuacaacuuguuucuggg

SEQ ID NO: 4138287 - RNA, 58 nt, Human
cccaaagguguuggccuucagugugggaagggccuccacccugacuccccaccuuggg

SEQ ID NO: 4138288 - RNA, 98 nt, Human
cccaaagucagcuaguaaauuuguggcaguauaagagcuagaaccuagucccuccucucaguucauagcauuuuguccugcucugugcugccuuuggg

SEQ ID NO: 4138289 - RNA, 76 nt, Human
cccaaaguuuuuauaguuagcauuaagaauauuaauaggcaacuaugaacuaagugguagcugcuaagauuuuggg

SEQ ID NO: 4138290 - RNA, 113 nt, Human
cccaaauccuagcugucccagggggccugugcuuggccagagagguuccucaccuuacugagguggcucugcuugaggccagccugcaggccgcuggugaaguaggaaguggg

SEQ ID NO: 4138291 - RNA, 66 nt, Human
cccaaaugccuuggcaggaccuccuguguacacaucccugacaggacacugcuguagcauauuggg

SEQ ID NO: 4138292 - RNA, 65 nt, Human
cccaaauugucuuggcuauugugagucuguggcgguaaucuauggauagugucuggauauuuggg

SEQ ID NO: 4138293 - RNA, 95 nt, Human
cccaacacauuaaaguagaauuggcagacaguguuacaauuuaauggaauuuccuccuuuaacauuagcauuguuucuuuuugcuuauuuuuggg

SEQ ID NO: 4138294 - RNA, 62 nt, Human
cccaacagaaaaucuaaaaaucugaaguuggaccaugcaagaguuuucuguuuucuguaggg

SEQ ID NO: 4138295 - RNA, 66 nt, Human
cccaacaugcccuaaguccaucagcaugccuugucuucauuagacaguugaugggacucauguggg

SEQ ID NO: 4138296 - RNA, 60 nt, Human
cccaaccccacuacacguuggagaagccauuuaucuucagguagugaguggggugcaggg

SEQ ID NO: 4138297 - RNA, 74 nt, Human
cccaacccccucccugaccugguugggcagggugugcaugagcucaugggagccccaggcagggcagggcaggg

SEQ ID NO: 4138298 - RNA, 77 nt, Human
cccaagaaccagcucagagcaggcuccugcccuguacgaggaaacccagagaaugauucugagacuugcuucauggg

SEQ ID NO: 4138299 - RNA, 109 nt, Human
cccaagacaaaaccgcaaagccccagaaugaggaaugugacaaaaccaaggagcccugcagcuugccuuugaaagcauuucuccucuggccguuuugugggcuccuggg

SEQ ID NO: 4138300 - RNA, 102 nt, Human
cccaagacagcaggcuagagcuaugguggcugagcugaguuucccagcuagacacuccccuagacacuuggcucagauaccaugcccuagcagugccugggg

SEQ ID NO: 4138301 - RNA, 56 nt, Human
cccaagagcuggcucuugcagcagccuccucugaggcucccugcucagcuccuggg

SEQ ID NO: 4138302 - RNA, 129 nt, Human
cccaagaucacuuuaggcucuaauuguaggccagauauugugcuacccacauuauaacaaggaugaccuuuccuccauugcccacuggguagcauaguaucggguguacaauuagagccuggagugggg

SEQ ID NO: 4138303 - RNA, 84 nt, Human
cccaaggauacuggccaggcgaaccacacugcgauaagaaacagcagcugaaaguuuguuuuuggagccaccagauccaguggg

SEQ ID NO: 4138304 - RNA, 61 nt, Human
cccaaggccaucagguagguccugacaggacagcugaccaagggcauaugauggucauggg

SEQ ID NO: 4138305 - RNA, 68 nt, Human
cccaagggaugcuugaguaguuucuaaggcaagcagaaucuuccaucugcucaaauggcacuuuuggg

SEQ ID NO: 4138306 - RNA, 78 nt, Human
cccaagguccugggcuagaaggaccaggauggggaagaaguggccucugccauucuggaccaagcugggugccuuggg

SEQ ID NO: 4138307 - RNA, 68 nt, Human
cccaaguguaagcaaagcucaagcuuacaggaaagccacacggaggaugggcuuuuuugcaauauggg

SEQ ID NO: 4138308 - RNA, 129 nt, Human
cccaauacaucggugaacuccauuguagggagcgcuacuuaagagggguaaaaaggccccaaaucucucuuuuuaaccuaccuuaagagcaacagguuaccuuagcuuuauggaggcaaccguaugugg

SEQ ID NO: 4138309 - RNA, 129 nt, Human
cccaauaccuuccuuuuccuggccugggagccugcuugaguucagggguugauuggauuuaagcgauacagagagcuccggacauucauacauguuccccaaacuagggccagcucaggaagccagggg

SEQ ID NO: 4138310 - RNA, 88 nt, Human
cccaauacuucagaaugugaccuuauuuggaaagaggguuguugcagauguaauuggucaagaugaggucauacuggaauagagaggg

SEQ ID NO: 4138311 - RNA, 72 nt, Human
cccaaugcaucgaucuauuuacucuuuuccuagauccuuaggcuguggaagguuuagauagguaaaauaggg

SEQ ID NO: 4138312 - RNA, 102 nt, Human
cccaaugucagcccaaagcccagcagucaggcccuccugugaucugccuggggcacccaggaaggggauggggcaugcugggaugggccaugauguguuggg

SEQ ID NO: 4138313 - RNA, 76 nt, Human
cccaauuacuggccaucccugaguaaggaaaagcuucauaauauauuuccaaacaggguggcuuaauuccaaaggg

SEQ ID NO: 4138314 - RNA, 67 nt, Human
cccaauucagagccuugcuucucuugccuggaugcccaggcagcagccacaaggccugagcauuggg

SEQ ID NO: 4138315 - RNA, 82 nt, Human
cccaauugauuugagaagcagauccaaaccauguccuuauuccaagauggucaaggauacuguucaucuacaagucuguggg

SEQ ID NO: 4138316 - RNA, 101 nt, Human
cccaauuuuucagguggucaaaauauccacuuguugaaaccagccuaggcgaacuuaaggacauugguuuugaguaauguaaaacaccuggggauaauggg

SEQ ID NO: 4138317 - RNA, 73 nt, Human
cccaauuuuuggaguuuucaagagaagccagaaaucuguuguauauuuuugugaaaucuccagacauuucagg

SEQ ID NO: 4138318 - RNA, 68 nt, Human
cccacacaggcaaaggaugauguuuguaaaucuaauuacauugaauuucacuuuuguaccuuuuuggg

SEQ ID NO: 4138319 - RNA, 58 nt, Human
cccacaccauuucuagagucccaagaggugucuuaaaugccuccagaauuggucuggg

SEQ ID NO: 4138320 - RNA, 70 nt, Human
cccacagaaccuggaccuuuuggguauuguuucaguggaacaugccuuucauaaguucaguuuucuuggg

SEQ ID NO: 4138321 - RNA, 76 nt, Human
cccacagcccaggguucagugggcccucuuguccaucugggcugggccuggagcccacgagccccuggccuuuggg

SEQ ID NO: 4138322 - RNA, 63 nt, Human
cccacagcuggggcucuagcgugauguauaaccuuugcuuccuaugcugcuguccuugcaggg

SEQ ID NO: 4138323 - RNA, 64 nt, Human
cccacagcuucacccauuaucccugccuucacccucaauucagggcaaaucugaagacucuggg

SEQ ID NO: 4138324 - RNA, 72 nt, Human
cccacaggcagaccucccacauccuagcucugcuuccaagaaccacccccuuggguguggaaggucaguggg

SEQ ID NO: 4138325 - RNA, 61 nt, Human
cccacagguccccaugaacucguuccugcuucucagccucugaccuucaggugaccguggg

SEQ ID NO: 4138326 - RNA, 73 nt, Human
cccacagugugcugagcagguggggguguguucuagacugaucacauccucacauucucaggacaaccuuggg

SEQ ID NO: 4138327 - RNA, 55 nt, Human
cccacaugcuggaaugcccacuuacaggacagguacugcauaacuggcauguggg

SEQ ID NO: 4138328 - RNA, 102 nt, Human
cccaccaagcccuguguucauaggaggagaugggaguaaccaggacagccccuggccaccucugacuccuggacuuggggcucuugaauacugccugguggg

SEQ ID NO: 4138329 - RNA, 58 nt, Human
cccaccacgugcuuugcuggagccuuuccuucuuuacuucagcucuuacccugguggg

SEQ ID NO: 4138330 - RNA, 89 nt, Human
cccaccccaggugguucucaggaguagugggauccauggagaagucagcccagucuugcauuuucugaagaugccaaguggggaauggg

SEQ ID NO: 4138331 - RNA, 76 nt, Human
cccaccccaucacacagggaggaggugcugugcccgcugggggggcagcugccccucucugggcccuuuggguggg

SEQ ID NO: 4138332 - RNA, 103 nt, Human
ccuaggaggaucacugcagauucuuaaauuuucaucuacaagaaacuaacaguuucaugggagugagaugaaaauaaauaaaggucacguuguggucccuggg

SEQ ID NO: 4138333 - RNA, 88 nt, Human
ccuaggauucccaacuuguaaucucauaccggucucuuugggcuucauguucacaguauuggggguggaggagguggggaaguuuagg

SEQ ID NO: 4138334 - RNA, 56 nt, Human
ccuaggcucgagugcaguggcgggaucucagcucacugcaaccucugccucccagg

SEQ ID NO: 4138335 - RNA, 60 nt, Human
ccuagggaugcugguucaaagugaagauccuugucuacacaacuaaucagaaucucuagg

SEQ ID NO: 4138336 - RNA, 67 nt, Human
ccuagguacauccuuccuaccacugcccuccgccaccccacaaccaggcuuucaggaauguccuagg

SEQ ID NO: 4138337 - RNA, 106 nt, Human
ccuagucgaacagccugauuuguaugcugaaaucuuagccauucugccuuggaaaaagucagaggcagaugagaugggaagaagcauagucaggggaugauggagg

SEQ ID NO: 4138338 - RNA, 67 nt, Human
ccuauaacagagugaaaaucagcacacauuauucggguuuacugugugcgugaugcuuuguugaagg

SEQ ID NO: 4138339 - RNA, 66 nt, Human
ccuaucuggcuuuuaccccacggcccaguucuagcuggggcauuguaaggcaaaagccauuugagg

SEQ ID NO: 4138340 - RNA, 62 nt, Human
ccuaugaaagacaggagaugcgagggauccagcagacaauuuuuucucuuuucuucuauggg

SEQ ID NO: 4138341 - RNA, 66 nt, Human
ccuauggaaucuucauaaaaaucuaguagaauuagauuucuacuagaauuuagcgagaucacaagg

SEQ ID NO: 4138342 - RNA, 104 nt, Human
ccuauguaaacaucauuaggacuagguucucuauugcccccaaagauauauuuuaguaucuccugcaaaguuagagcugaauuuuaugacucuguuuucauggg

SEQ ID NO: 4138343 - RNA, 109 nt, Human
ccuauuaaaaugcaaauacccuuaggagauauuagacuugaagucauuuaaaucaaguguaacuuacugugaguuuauuuaucugaucugaguagauugcuuugauagg

SEQ ID NO: 4138344 - RNA, 81 nt, Human
ccuauucucugaccaccagagguccguggguauguguucgugaguaugugggcuuuggggguuuuggcugaagagggaagg

SEQ ID NO: 4138345 - RNA, 68 nt, Human
ccuauugcagauagagggcauccccuucgcccuuugcugguaagggaauccaucuaucuucauuuagg

SEQ ID NO: 4138346 - RNA, 83 nt, Human
ccucaaagcguucacuccagaaauucaacagcaaauuuacuucauuucagagauuugugucucuuucagugaaacauuugggg

SEQ ID NO: 4138347 - RNA, 89 nt, Human
ccucaacccccuuccccugcgugcagaggcagcacugaucuggugaggacauugucucugccaugcuugagggugagcagggucccugg

SEQ ID NO: 4138348 - RNA, 79 nt, Human
ccucaacgagacauucuuaggaacaauguugucaaggaaacauacugaaacuguuacauaaaagaaugucucugugagg

SEQ ID NO: 4138349 - RNA, 74 nt, Human
ccucaacguuuccaucuaaaaugguucuuugguagaugguacuauaggaccauccuaagguaggcaaccugggg

SEQ ID NO: 4138350 - RNA, 87 nt, Human
ccucaacuccacuccuccucccaccgacuuuucagaggugauuuuuaauugcuuuuucccagguggagagagggaguggagaugagg

SEQ ID NO: 4138351 - RNA, 110 nt, Human
ccucaagaagggggcaugaccuugggaaagacaauucucucagucaaggcaguuucaaagagaguugacaguugaggguugucuaaacuaaaguuauucuguuucagagg

SEQ ID NO: 4138352 - RNA, 118 nt, Human
ccucaagagcucugccaccuguccaaggagagagccauguugggcuggccacagcuaaaaacuguccuggcccaguggcaucuucacugcuuggguugugugcaguuguauuuagagg

SEQ ID NO: 4138353 - RNA, 60 nt, Human
ccucaagaugcacugaacauauguugacagucaagcacugaugugucuuagagcaucagg

SEQ ID NO: 4138354 - RNA, 109 nt, Human
ccucaaggaaaagauaaguacaguugauucuuguuauuugcaguagcuguauucuauaaaguugccaccagcacugaauuagggaacacugaacuauuguuccuagggg

SEQ ID NO: 4138355 - RNA, 65 nt, Human
ccucaaggagcugugauguguccagaaacagacgaagccaucgacaucacacgccuuccaggagg

SEQ ID NO: 4138356 - RNA, 73 nt, Human
ccucaauaucagugcaugaaacaauaugcagugacuaaaagucucuaauuuuuguucugcauugaauaugggg

SEQ ID NO: 4138357 - RNA, 62 nt, Human
ccucacaagcuggagguuggagcuacuaucaauauaguggagagaccaauuagcugaggagg

SEQ ID NO: 4138358 - RNA, 106 nt, Human
ccucacccaucaacacuauugcccacuuaagcugauuaagccccuucuagcagagagguuggaggaaucagggcuuaggcuggucaagggaaugggaaaagugagg

SEQ ID NO: 4138359 - RNA, 77 nt, Human
ccucaccugggcaggcugccgugaagcaggccugagacuggugcucaggcccugggcaguucuguagcaccaggagg

SEQ ID NO: 4138360 - RNA, 113 nt, Human
ccucacucccuggcugcuccugugccugcacucccucuaguugcauucuguuccugacaagucuaacauuuauagggaguauagagagcagaguagguccugggaguuugagg

SEQ ID NO: 4138361 - RNA, 67 nt, Human
ccucacugcuauguguuugcucauagcagcugcuaauccagaaagaacaggcacuaagcaugugggg

SEQ ID NO: 4138362 - RNA, 56 nt, Human
ccucacuguuuaauagcuggaucuaaaaagcuaggccaugcgggagaauagugagg

SEQ ID NO: 4138363 - RNA, 66 nt, Human
ccucagaaaacagugaacuacucuaggcuccaaggggcuuaguaggagagcuuguucauucugugg

SEQ ID NO: 4138364 - RNA, 61 nt, Human
ccucagaagaaguggaauugaugcucccuuuaccuucuaagcaucaaacugcucuuugagg

SEQ ID NO: 4138365 - RNA, 59 nt, Human
ccucagaagcucaaggacauugucuguaaaacagaaauaauauuccuugucuugugggg

SEQ ID NO: 4138366 - RNA, 55 nt, Human
ccucagacgcaggccuaugggccaugggcccuaacuaggaccugcugugcugagg

SEQ ID NO: 4138367 - RNA, 76 nt, Human
ccucagaguuuggguggaaggaggguaaggaggcaagauuccuaugcccauucgcuccaccacccaccccucuagg

SEQ ID NO: 4138368 - RNA, 67 nt, Human
ccucagcacagugcaaacuuuugucuccucugcgaaagagaggaggccuguguuugucuguagaagg

SEQ ID NO: 4138369 - RNA, 58 nt, Human
ccucagcagaauguggcaugucacccaaacagggacaugcgaaguccugcugcaaagg

SEQ ID NO: 4138370 - RNA, 96 nt, Human
ccucagccucccaaacuguugggauuacagguguaagccaccaugcccaggugagaugcuggcucauuucuaaacccagcucauuggcaagugagg

SEQ ID NO: 4138371 - RNA, 63 nt, Human
ccucagcuagaaagucuguuagggagauaguuuuccucuucuuauucgucuuuuuugcugagg

SEQ ID NO: 4138372 - RNA, 130 nt, Human
ccucagcugagauggccagaagugggagccuaccuuugcuauccuuggaauccuaguucaauugaccucaucaagaagugggccaaauggaggcaaguggcucauaccauuguuuauuuucugagcuagg

SEQ ID NO: 4138373 - RNA, 67 nt, Human
ccucagcugcuucccuggagccauccaaguaaaggccaagaauaaauaggaggagcaggcucugggg

SEQ ID NO: 4138374 - RNA, 58 nt, Human
ccucaggguggcaucagaucuuuuuaucuucuaaccuaagacggaggccgcccugagg

SEQ ID NO: 4138375 - RNA, 56 nt, Human
ccucaggugugggccagcugucaacuuaaggcgaugcugguaccuggcaccagagg

SEQ ID NO: 4138376 - RNA, 75 nt, Human
ccucaguccugggcucagaaccuuguuaaggcucugacagccugcuuagaaucuugacuaucugagucccugggg

SEQ ID NO: 4138377 - RNA, 66 nt, Human
ccucaguuuucaggucuguacaaugggaugugaacaaaaauaccucccuugcuaaagacugugagg

SEQ ID NO: 4138378 - RNA, 107 nt, Human
ccucauaaccuagcaugccuuucauggaacaucagguuaagaaaugagcaucucaccuucugaagaugaguuucuacagggagcggcagaaugcuggcaaugugggg

SEQ ID NO: 4138379 - RNA, 78 nt, Human
ccucauaccccauccguccaaccuccggcgggcgccacugcuuguccucuggucuucgguguggacagauaggagagg

SEQ ID NO: 4138380 - RNA, 63 nt, Human
ccucauauguguauauuuauuguaguuucuuuuacuaauaagauucuagaauauauugugggg

SEQ ID NO: 4138381 - RNA, 72 nt, Human
ccucaucacucuuuaucuuuuaugucugcaguauaaauagcauagacauuuggugugaagggaggagaaagg

SEQ ID NO: 4138382 - RNA, 70 nt, Human
ccucauccugaacccauuuucugagcacgcugcauucauaaauagccugccaggcuuugggcuucugagg

SEQ ID NO: 4138383 - RNA, 103 nt, Human
ccucaucuuagcuuccaauaagagauuuuguauuuguuucucauccagcuggucauuguuggugaaagcuaaggagcaaguaggaguucucaagaugaaaugg

SEQ ID NO: 4138384 - RNA, 107 nt, Human
ccucaugaucugcccuccucagccucccaaagugcuaggauuacaggugugagccaucacauccauuguuuugucccagccugggccccaggagcacaggcaugagg

SEQ ID NO: 4138385 - RNA, 61 nt, Human
ccucaugaugcugagaguggauugacuaugcaguuauuccacuccaauaagugucaauagg

SEQ ID NO: 4138386 - RNA, 60 nt, Human
ccucaugccucaguuugacuggcuggucuuauugucuuccaggaaacugaggccaugggg

SEQ ID NO: 4138387 - RNA, 63 nt, Human
ccucauuagaucagaucggcaguaauccaggaggaagacuggugauuggaucuaaggaaaagg

SEQ ID NO: 4138388 - RNA, 102 nt, Human
ccucauuauuaccaaucucacugauuagaucaauacuaaagaaguuacguuuuuuguaugcuuuuaguauuguuuuauagcagguagaaguuuaaggagagg

SEQ ID NO: 4138389 - RNA, 55 nt, Human
ccucauucauugcaagcacacgcaaugaauguuguaguggaacagguggaugagg

SEQ ID NO: 4138390 - RNA, 86 nt, Human
ccucauucgucugccaggaaggcgccuccuacaggugucccaggcuggacacuggacucacguauuccugagcaaagucaaugagg

SEQ ID NO: 4138391 - RNA, 75 nt, Human
ccuccaaacaccuuuacaguuuaagaggaaacaaaaugauuguuuuuauuucccuucuuugacugugguuagagg

SEQ ID NO: 4138392 - RNA, 85 nt, Human
ccuccaagacccuaaggccgggcaagguaggcaagaagauaggucucugccucuuucaggccuggcacacucagggggcuggagg

SEQ ID NO: 4138393 - RNA, 94 nt, Human
ccuccaagcuugagcagcaguuuugaaguguggagaugggaggugaguuauucacaucucuaacaaaggagcugcugcuucuggcuucaggagg

SEQ ID NO: 4138394 - RNA, 56 nt, Human
ccuccacagguaggcagagcgagucugcaucuguuggcugccuucccugcuggagg

SEQ ID NO: 4138395 - RNA, 65 nt, Human
ccuccacuauuggucccugggcaagaaugugugccccagggcauguaacuaaugguggccacagg

SEQ ID NO: 4138396 - RNA, 70 nt, Human
ccuccacuccucagccagcaucagggagaaagaagcuuccagaguccauguuggcucaggaccaaggagg

SEQ ID NO: 4138397 - RNA, 88 nt, Human
ccuccagaaucaaugcuauguaacuggcagauagauugucauuaugcugaauuugucccaggacuugcauagauaucuucuuuggggg

SEQ ID NO: 4138398 - RNA, 121 nt, Human
ccuccagaccuccccaacuccucgccuccccaccucccugccucuuggcgucagcgaaggcucugcugccugcagggcagagaggagagggaggaggccagcgagagggagccucugucgg

SEQ ID NO: 4138399 - RNA, 63 nt, Human
ccaggagguucugggccagguugagugucuucagaugggucagaggcuggaagagccuccugg

SEQ ID NO: 4138400 - RNA, 59 nt, Human
ccaggaucuggguccaugggaccccuaccuuaucaacuguccccauacccaggcccugg

SEQ ID NO: 4138401 - RNA, 80 nt, Human
ccaggaugcccgaggguggggagaagcagcucagauggcgucacuguguugccuucccccagccgaugggauuuuugugg

SEQ ID NO: 4138402 - RNA, 64 nt, Human
ccaggauggucaggugggcaguggguugagcgugcagccucguacccagccuccuguguccugg

SEQ ID NO: 4138403 - RNA, 66 nt, Human
ccaggaugucagggcucuagagauacaacucagugauucucuggguuuuuguccuguacguaaugg

SEQ ID NO: 4138404 - RNA, 58 nt, Human
ccaggauuugggaucccugaggccuuuaacacaucacucagucauugccuccuucugg

SEQ ID NO: 4138405 - RNA, 77 nt, Human
ccaggcaaaaucaaaucaggauagaaccucacgugugauaacauucauccucaccaugacuuucauccugagccugg

SEQ ID NO: 4138406 - RNA, 128 nt, Human
ccaggcaaguaaaugaacaucaacuuacaucuacaguccauaacuggaaccuggcuaggaacagggaaacguuugaauagaaauuagcaaggugaaguaugggugagaaaagugauguuccuuccugg

SEQ ID NO: 4138407 - RNA, 76 nt, Human
ccaggcacugaccugggcauuacaggugcaguggggacaagugggccaguccugccuaaggugguugacagccugg

SEQ ID NO: 4138408 - RNA, 86 nt, Human
ccaggcagcauugcaugagugucacaggguaauuguuuaacguaauuuugaauaaaauauauugugaugaaguggaaagagcuugg

SEQ ID NO: 4138409 - RNA, 57 nt, Human
ccaggcaggcagcguucucagggccuggcccccaggcugugggaugugugugucugg

SEQ ID NO: 4138410 - RNA, 71 nt, Human
ccaggcagucaggguuguguguuaggaggaaccuggguuccucaucuugcagagcugcccuauugccuugg

SEQ ID NO: 4138411 - RNA, 72 nt, Human
ccaggcaugguggcaugcaucuguuguccuagcuacucaggaggcugaggcaggagaguugcuugaaccugg

SEQ ID NO: 4138412 - RNA, 72 nt, Human
ccaggcaugguggcuugugccugugguucuagcuaaucuggaggcugaggcaagaggaucacuugagccugg

SEQ ID NO: 4138413 - RNA, 67 nt, Human
ccaggccaguguuugguccagguuccucagaaaucacaccugguuacacgugaaccacugggccugg

SEQ ID NO: 4138414 - RNA, 96 nt, Human
ccaggcccuagucuucucuuccuuugucaacugaucaugggcaacaaccuaugaggccaucagugcagggugggagagagaaggcaggguggcugg

SEQ ID NO: 4138415 - RNA, 85 nt, Human
ccaggcccugccccccagagacagucucaccuggaguuuaaacuuuuugaaaaccgugggaggcugaaucagggaggcagccagg

SEQ ID NO: 4138416 - RNA, 82 nt, Human
ccaggcccugugagacugcaaggguacaaugaugagcaaguuacagagccugcuuucaggagcucacagucuuugggucugg

SEQ ID NO: 4138417 - RNA, 84 nt, Human
ccaggccucaguguacccauuuguggaccaccacccaccuuggaggguugagugggauuaaaugaggugacagugaggcacugg

SEQ ID NO: 4138418 - RNA, 72 nt, Human
ccaggccugugcaaggagggaggguguccguucaccugcccucccagauugcaagccacaaccagugccugg

SEQ ID NO: 4138419 - RNA, 100 nt, Human
ccaggcgagcagagggaguagagcaucuccuucaaccccauggucccugcauguacguuagcaggugguccagaggagaugccuccucugugcuguuugg

SEQ ID NO: 4138420 - RNA, 85 nt, Human
ccaggcguuuccaacucugaguuuacaguauguuuugauuugaucauuacagauuauaaauuugagcugguuuuaaaauuucugg

SEQ ID NO: 4138421 - RNA, 71 nt, Human
ccaggcuagugcuugcgaaccuuggccaaccuuucccaaguccuuggcccagcaugcgggucugugccugg

SEQ ID NO: 4138422 - RNA, 65 nt, Human
ccaggcucagucagaaaauguaucucugccuccuggggaaagaaacauuuuucuugcuggcaugg

SEQ ID NO: 4138423 - RNA, 63 nt, Human
ccaggcucgucauacgccugcuugcugauccacaucugcuggaagguggauggcgaggccggg

SEQ ID NO: 4138424 - RNA, 73 nt, Human
ccaggcucuccaggagcucaggcucucagcacaguauuugcaccugucuaggcugcugccuuggagagugugg

SEQ ID NO: 4138425 - RNA, 76 nt, Human
ccaggcucucuguggcgccgcugagagcagagggcugucuuggggucuucgagcucuggagccaaggauggccugg

SEQ ID NO: 4138426 - RNA, 62 nt, Human
ccaggcugcuuagccuuaucuuaguccucauccgcuuucagcccagggagaagcagccaugg

SEQ ID NO: 4138427 - RNA, 68 nt, Human
ccaggcuuugucuccagccaagccccaggcaggcagcacugccuggacaggcaagcaagacauacugg

SEQ ID NO: 4138428 - RNA, 63 nt, Human
ccagggaaaggagguugacuuguuugggacuuuuucacuccagaauuccgccccuauucuugg

SEQ ID NO: 4138429 - RNA, 62 nt, Human
ccagggaagaaagaugaagugccugguggcuccaaggcagccaccucauuuauccucuuugg

SEQ ID NO: 4138430 - RNA, 83 nt, Human
ccagggaagaggccuuugggcaacaucccaauucauuacagcuagaaaagaagaagggcugcuuuuaagggucucagcuuugg

SEQ ID NO: 4138431 - RNA, 60 nt, Human
ccagggaauaguaacuuuuguuacuuacauacuauguauaaaacagaaagcacuaccugg

SEQ ID NO: 4138432 - RNA, 60 nt, Human
ccagggagacuaguguggaggucaccaaaagagcaggaagagccccaaaagucacccugg

SEQ ID NO: 4138433 - RNA, 62 nt, Human
ccagggaggucgagggcccuuggucaccauccucucagcaccaggagccaagaucucccugg

SEQ ID NO: 4138434 - RNA, 77 nt, Human
ccagggauggaugugguuuuaguaaaccugauaggguguaagcaggaucagaauggagcccacauggucgaccgugg

SEQ ID NO: 4138435 - RNA, 55 nt, Human
ccagggcaggggcuggaguucaaccuggucuggacagucucugccccugccccgg

SEQ ID NO: 4138436 - RNA, 62 nt, Human
ccagggcucuaugaggguggagaccauggagcagcacuggccaccuggagcuggagccuugg

SEQ ID NO: 4138437 - RNA, 55 nt, Human
ccagggcuggcgcuggagcacguguugaguucaggcucuccagggccagcccagg

SEQ ID NO: 4138438 - RNA, 74 nt, Human
ccagggcugggucuggaugcucagguggaagguggggaugggauccagaaccccagggcagcucccagaccugg

SEQ ID NO: 4138439 - RNA, 84 nt, Human
ccagggcuguggggugggaugccgcugucuccaccucuuagcugcaugagauggagcaugcgucucaaccccucaaagccucgg

SEQ ID NO: 4138440 - RNA, 56 nt, Human
ccaggggaggcagcgauaaaccuggauaauuugggccaggccucuuccuccccugg

SEQ ID NO: 4138441 - RNA, 94 nt, Human
ccaggggaggcugucagcgagggcuguguacuaugaggaggggaaguacaaacaucucugggcucugcgaagcccuucuccagcccuuuccugg

SEQ ID NO: 4138442 - RNA, 68 nt, Human
ccaggggcaggagaagguuuggagugcaggcagaaacuuccugaaucuuccccuuacuccugcuaugg

SEQ ID NO: 4138443 - RNA, 75 nt, Human
ccaggggcugcuaugacaauaccagugggcucuguccucacuagcagccugcuggcuguccauugcagccccugg

SEQ ID NO: 4138444 - RNA, 74 nt, Human
ccaggggcuuugcaaagaaauuauugcuguguuagguagaacacuaacauagauaucuugaagagccuuucugg

SEQ ID NO: 4138445 - RNA, 58 nt, Human
ccagggucacaaauaacugcagcuccagcuuccugcugcagacauuugauaacucugg

SEQ ID NO: 4138446 - RNA, 61 nt, Human
ccagggugaggaggcucccacgcugccgagaggcugggaaggagacgcguccugccacugg

SEQ ID NO: 4138447 - RNA, 58 nt, Human
ccaggguucagacaggguaauggugaagaaauucccaagcaaugagucagggcccagg

SEQ ID NO: 4138448 - RNA, 101 nt, Human
ccaggguuccaguaggcggguggugggaguccauuagucacucaccuucugcccuuucuggucucagcugggcucuuaucaccuguaccugggccuccugg

SEQ ID NO: 4138449 - RNA, 58 nt, Human
ccagguaaauuaccuacugaauuucacuuugguuuguuucuguuggugacuugccugg

SEQ ID NO: 4138450 - RNA, 78 nt, Human
ccagguaacccaugcccugcugccaucuggccggaccgggaugguccaaggagaggaggcagggcaggggccuccugg

SEQ ID NO: 4138451 - RNA, 84 nt, Human
ccagguagaaaaagaugugaucaaaagauuucauugguucuguuugcugugucuucuuucuggucucgccuuauucuaccaugg

SEQ ID NO: 4138452 - RNA, 64 nt, Human
ccagguagaagaccugucagccauaucaucucauucaaguggccugcaaagucuucuugcuugg

SEQ ID NO: 4138453 - RNA, 82 nt, Human
ccagguccugaccuugcacucacaucuuuaggcuuacaggugugcuuuuugugcauccugaucgaagauggagaggacuugg

SEQ ID NO: 4138454 - RNA, 85 nt, Human
ccagguccugcaggggcaguccacuuccuucauagagucuguggauccucuugggauugcugguuuguucuugcagucgaucugg

SEQ ID NO: 4138455 - RNA, 64 nt, Human
ccaggugauucuugagaaucuucucugaagaggaguuauauuuuucagauagauuuuuagcugg

SEQ ID NO: 4138456 - RNA, 68 nt, Human
ccaggugcaauaggauuauugacaaccuuguugaaagcagcuuuagaguggaaguucuguugcauugg

SEQ ID NO: 4138457 - RNA, 98 nt, Human
ccaggugcaguggugcacaccuguaauaccagcuacuugggaggcugagagguggagguuacagugagccgagauuaugccacugcacuccagccugg

SEQ ID NO: 4138458 - RNA, 81 nt, Human
ccaggugccucgccuccuggaucagcuguauuacaaauggucuucuucacagucccagagaggucggggccauauucuugg

SEQ ID NO: 4138459 - RNA, 61 nt, Human
ccaggugcuagcaaucacugucaagggaaauacaaugauggagaucaacagugagcccugg

SEQ ID NO: 4138460 - RNA, 64 nt, Human
ccagguggcagggggcuaaagggcacuuccugccagggaggcucucacccucugaccagacugg

SEQ ID NO: 4138461 - RNA, 56 nt, Human
ccaggugggguccagagcucagugcgucuugcuggcucccagaggccccagcccgg

SEQ ID NO: 4138462 - RNA, 80 nt, Human
ccagguguccgguuccucggcugagggcucgcuugacuccauggucuaggcagcagagguugaggaaaggggugcucugg

SEQ ID NO: 4138463 - RNA, 99 nt, Human
ccagguugccauggugagcuggcugccgacuggcucuuggcuggggacccaggaggccucccccggcggcccugccugaaccucaccauggcagccugg

SEQ ID NO: 4138464 - RNA, 56 nt, Human
ccaguaaaaaauuaagucaaaauuugaggggaaaaucccugcuuaauuuugacugg

SEQ ID NO: 4138465 - RNA, 78 nt, Human
ccaguaaccagauggcaugcauuucauaccaagcuuguugaaauaagaacugaaaucaucugccaauaaguugcaugg

SEQ ID NO: 4138466 - RNA, 70 nt, Human
ccaguaauggaaauagcaguucagcuaaaauauauauugacaaagcuaggucaugcuaugguguuacugg

SEQ ID NO: 4138467 - RNA, 66 nt, Human
ccaguacugucuccaauauuccauagguaauuagaauguugcagugaugauggcaggcagcacugg

SEQ ID NO: 4138468 - RNA, 85 nt, Human
ccaguaucugugaaugugaccuuauuugggaauagcaucuuuaacgauauuuaaauuaaguugagguuauaauggauuagcaugg

SEQ ID NO: 4138469 - RNA, 79 nt, Human
ccagucaaugucuauuuuacagcauacauuauuuaacaaaaaauaguagugaaauugcuguaagaggaaaugcagaugg

SEQ ID NO: 4138470 - RNA, 56 nt, Human
ccguuucugcuuuuagcuaaacuauaggaaacuguccccuaugaagcaaggaaggg

SEQ ID NO: 4138471 - RNA, 55 nt, Human
ccuaaacagaacaaagaggcagaggauggcaaaucugcuucuuguuugauuuggg

SEQ ID NO: 4138472 - RNA, 65 nt, Human
ccuaacaccaaugccauuuucuacacauuguguccuaauguaaagggcaugguauugggaggagg

SEQ ID NO: 4138473 - RNA, 56 nt, Human
ccuaacuuucauuaggccccagggacugcauccuagggccuaauaagaaggauggg

SEQ ID NO: 4138474 - RNA, 61 nt, Human
ccuaagaaggaggaaaagugccaaauuagugucucuaugacuggcaugcucucuuuuuagg

SEQ ID NO: 4138475 - RNA, 71 nt, Human
ccuaagcccuggaggucuacagugguagcucccaugccugucugagucuacucuaggcuauaggucuuugg

SEQ ID NO: 4138476 - RNA, 66 nt, Human
ccuaaggggucuugucaguuuuguauacuggcacacagccaugauuuacagaaacaggacuuuugg

SEQ ID NO: 4138477 - RNA, 102 nt, Human
ccuacaaaaguuuagaauguauugauucuuuggagagcuauauagauuaacgacuuucuuuaugcucauccaaggaagguauuuaaucauaauguaaauggg

SEQ ID NO: 4138478 - RNA, 129 nt, Human
ccuacagaauuaaaggcuaucacauagcaaccagcagagagcaguagagaacuucucgagugccugcugcuaagcucuuuguuucugcuguuuuaacuuuguguauagaacaaucauugagcugucagg

SEQ ID NO: 4138479 - RNA, 80 nt, Human
ccuacagagcuaguccugucugcucaggaguuugucgucgugcaacacagcaacuugcaguauggagcugccuuugaagg

SEQ ID NO: 4138480 - RNA, 80 nt, Human
ccuacauauuugccauauaauuauucagcaucaaaccuuauuaaucaaaucgaugcuguguuuuaaauggaaauugcagg

SEQ ID NO: 4138481 - RNA, 79 nt, Human
ccuaccacaguuacagccuucaucuuugccuugcaggguaaggcacgcauaagagggggccacguugugcaaggguggg

SEQ ID NO: 4138482 - RNA, 74 nt, Human
ccuaccaguaggaggccagagaugaggcuuuagagcaaagagauuucuguagucugaccuaaggaauugguagg

SEQ ID NO: 4138483 - RNA, 79 nt, Human
ccuacccucucccgccuccagggcuacaaggcaccagaccaguggguccuggccgcuggccccugagaggcagggcagg

SEQ ID NO: 4138484 - RNA, 87 nt, Human
ccuacccuuucagaaugugaccuuauuuggaaauaggccauugcagauguaauuaguugagaugagaucauauuggaguaggguagg

SEQ ID NO: 4138485 - RNA, 84 nt, Human
ccuaccugauaagcucuaugaguacaaggacucugucucucuuuaccaguauguagcauaggguccuaguacacaguuaggagg

SEQ ID NO: 4138486 - RNA, 77 nt, Human
ccuacuaccccugaaccccauuccauccuagagucuaugguaggaagcacuggaagggguuggggggggaaacgagg

SEQ ID NO: 4138487 - RNA, 72 nt, Human
ccuacuauaguuggaaguaaggaugggggccuugaguaauugcucugcuucuaaccugcuuccuguagcagg

SEQ ID NO: 4138488 - RNA, 105 nt, Human
ccuacucacagaaagcacacaccuguucuguccuccacacuguaaguuguugaggggcagcuccuacaagaggaggcuaguucagugcuaccugugaucaagagg

SEQ ID NO: 4138489 - RNA, 57 nt, Human
ccuacucccuuucuagaguauggcagagccaauucucaacccuaguaagggaguagg

SEQ ID NO: 4138490 - RNA, 62 nt, Human
ccuacucucacccagcccccuucuugguucccuaggggaggaaggcuugggugaguauuagg

SEQ ID NO: 4138491 - RNA, 69 nt, Human
ccuacucuggucauuuucacuuucaaguuaucaacaugaggucacuguagauggaggugggaagagagg

SEQ ID NO: 4138492 - RNA, 62 nt, Human
ccuacugcaugaccuuggacagaacuugccucuuaggccucaguuuccucaacugcagaagg

SEQ ID NO: 4138493 - RNA, 76 nt, Human
ccuacuuaauucuaguuuaacacuuaguaaggcuuccaggcuucaaaauuugagugcuaaaauagaauaaaguagg

SEQ ID NO: 4138494 - RNA, 80 nt, Human
ccuacuuaggucgauuugugucaagguuuuugaaaguaaacaaaaacuuucaaacauaaaacuaaaucgagcuauccagg

SEQ ID NO: 4138495 - RNA, 73 nt, Human
ccuagaaagucuuguagugaguuuccugcucuuucuuuuaaaagcaggaaccuaaugaaggcucaccucuagg

SEQ ID NO: 4138496 - RNA, 63 nt, Human
ccuagaacgucuuuacucuuacgaaugggacaccuaugaaaaguuaccagugaggacuucagg

SEQ ID NO: 4138497 - RNA, 66 nt, Human
ccuagaagaaacugucggggauauuuuguugugccggaaugugguucccgucuaguuuuaaaaagg

SEQ ID NO: 4138498 - RNA, 76 nt, Human
ccuagaauuauaaacuuauuagaauaagcuucauaugccuugaggaaugcguuuaauagguaguacuguauuuagg

SEQ ID NO: 4138499 - RNA, 80 nt, Human
ccuagaccuugagaggaaguuuguagaaauauugauauggugaacaaugauuccagcuugacuucuacuuaauauucagg

SEQ ID NO: 4138500 - RNA, 63 nt, Human
ccuagaggauccuaagaagauaugacaacuaaauguaaugugguauccuggaugggauccugg

SEQ ID NO: 4138501 - RNA, 63 nt, Human
ccuagaggguggugaggccugguucacagaucugcugcgcuguguaacccacagcccucuggg

SEQ ID NO: 4138502 - RNA, 83 nt, Human
ccuagagguuucaugguacauaguacauguauguguaugugugugcaugugcaaauacauaugcuguggaggugggacaaggg

SEQ ID NO: 4138503 - RNA, 61 nt, Human
ccuagccaucaugucuaucuggcuacuauuaguucaggucugggcacaugguacaauuagg

SEQ ID NO: 4138504 - RNA, 64 nt, Human
ccuagcccugucucucacuccagguggcccaucugugacugggguuguuaggcagggacagagg

SEQ ID NO: 4138505 - RNA, 103 nt, Human
ccuagcuuucaauugugugaaaaucuacuuguuugaaucucucuagagucaagauuagagggccugggcagaaguuaaaggaggcagauuucuaacaauuagg

SEQ ID NO: 4138506 - RNA, 56 nt, Human
ccuaggcuggagugcaguguugccaucucggcucacugcaaccucugccucccagg

SEQ ID NO: 4138507 - RNA, 65 nt, Human
ccuagggcaccacacaugacugugacuuccugacagauagaccaagugcaggugccacuaucagg

SEQ ID NO: 4138508 - RNA, 64 nt, Human
ccuagggccuuucuugucauggggcugaaaugaacccucagcucucagacagggaggcucuggg

SEQ ID NO: 4138509 - RNA, 90 nt, Human
ccuagguggauuucauaaggaccuguguucaggucgugguggaaagacaggaggggacacgugagaccuugcagagguggaauccacagg

SEQ ID NO: 4138510 - RNA, 88 nt, Human
ccuagucaaugguacagcugagagccugccucuggugagacugcacuucccagagucccuugcagcucaguguggcccagugacuagg

SEQ ID NO: 4138511 - RNA, 85 nt, Human
ccuaguguccccugcugugcuugcauggcucacuguuguaccuucagcaucuagcacagugcugggcacacaguaggugcucagg

SEQ ID NO: 4138512 - RNA, 70 nt, Human
ccuagugucuuaaugaaguagauuauacauuuuuaugaaccauaaucagaauucaugaaagauaacuagg

SEQ ID NO: 4138513 - RNA, 63 nt, Human
ccuaucaauaccuccugcugcuaaaaagcagcagcuaaaaagcagcaggagguauugauaagg

SEQ ID NO: 4138514 - RNA, 61 nt, Human
ccuaucaggugauuugauuugucccauugcuggugguguuaacuuugaucacuugauaagg

SEQ ID NO: 4138515 - RNA, 130 nt, Human
ccuaucauuccagcccaauucuuucuauggugaugucccugcuguccuguuugguauuuugaaggauuccguucaagcagcuuuuacagaagaggcgacaggugcagccaucuggagcuuuuagaaaugg

SEQ ID NO: 4138516 - RNA, 89 nt, Human
ccuaucugaacuacuguauuguuggcucuuuugucugaagcccauuauuuagccagaagccuaaauagugcaccagguaaaggaaaagg

SEQ ID NO: 4138517 - RNA, 55 nt, Human
ccuaucugggguccuuuggcuccauacacaccagacccagagcccgccagauggg

SEQ ID NO: 4138518 - RNA, 66 nt, Human
ccuaugacuauuuuguugugucuuuuagccagauauugagccagcacaauagagcaguuaaaaagg

SEQ ID NO: 4138519 - RNA, 67 nt, Human
ccuaugcuuguccaugcugugguuauuugauuaacuuaauguaauaccacuguuggacauuaauagg

SEQ ID NO: 4138520 - RNA, 77 nt, Human
ccuauguguguuuaaugggccuugcuggagggaggacuguuuuuagcagaaacucauuaaauugcagacauuucggg

SEQ ID NO: 4138521 - RNA, 73 nt, Human
ccuauguuugggcacacaaauauuuuaugacaaauuaaugcauaccaguacacauugugugcuacaugauggg

SEQ ID NO: 4138522 - RNA, 82 nt, Human
ccuauuucagcuacagcaucucugcuuuuaucuauuuuauuuguuagaucacugaaagaaagaauguuguggcuuaaagggg

SEQ ID NO: 4138523 - RNA, 74 nt, Human
ccuauuuugaaauuucaaguggcaucuuugaucugauuccuuaggcauuagauauccuugaaguuauagugagg

SEQ ID NO: 4138524 - RNA, 87 nt, Human
ccucaaaacauuuccagauauuuuuauguggaauauaugauuagauguuauuuuuccuuguuaauagugucuggauuugauuugggg

SEQ ID NO: 4138525 - RNA, 72 nt, Human
ccucaaaaugugugccuguuaaggggcaaauaaauguaauggauguacuuagaggguaacauggacuugagg

SEQ ID NO: 4138526 - RNA, 71 nt, Human
ccucaaacaguuuaugauaaauucuuagggucucuugauuucuuaagucucucguuugauucauuuugagg

SEQ ID NO: 4138527 - RNA, 125 nt, Human
ccucaaauguaauuggcauuggaaaacugcugguugguugaaugaauaaguggaugagugauuaauuuacucuguacucauuucaaacagcacaaaaguuacaacauugcacgauaaauuugagg

SEQ ID NO: 4138528 - RNA, 55 nt, Human
ccucaaauugucaaauaagaauuuccuuaaguaauuuuuaugagauaauaugggg

SEQ ID NO: 4138529 - RNA, 63 nt, Human
ccucaacccaggaaagaauuuagagccauuuguaauguuucuaaggaaauuccugcacugagg

SEQ ID NO: 4138530 - RNA, 82 nt, Human
ccucaacuguggaccaggggcgcacucccugcacacaaggguguccaguaggggcggagucccagggucuccggcagugagg

SEQ ID NO: 4138531 - RNA, 87 nt, Human
ccucaauucauuagagcugauaaugaggccaaggccaaggccagggcuaugaccucugugaauguccuaagcucccuggauaugagg

SEQ ID NO: 4138532 - RNA, 56 nt, Human
ccucacagagcacacaagaauugcagcacauccugcagaaguaggcucuguguagg

SEQ ID NO: 4138533 - RNA, 72 nt, Human
ccucacagcugaaguagccauguggccaggacagaaagcuugaguuagcacaauuauuucaguugucauugg

SEQ ID NO: 4138534 - RNA, 74 nt, Human
ccucaccucagagcccugaagcagagcuaaaguuggacugcuccaugcucuccuuagggcuaccccaggugcgg

SEQ ID NO: 4138535 - RNA, 76 nt, Human
ccucacgugauccacaugaggugacuuccaagcuguuaacuggcaagcucuugagucaguucaucuggggaugagg

SEQ ID NO: 4138536 - RNA, 80 nt, Human
ccucacugcagggcccucauuccuguccuucuucagcaccagcugccuuggaccccagggaaugagcucagcaagcgggg

SEQ ID NO: 4138537 - RNA, 59 nt, Human
ccucacugggauaugcccauuugcaagagagugacuucaaguuauggcuucccaguagg

SEQ ID NO: 4138538 - RNA, 57 nt, Human
ccucacuguacuacgaccuccagggccaccucuuugccauggagagcagcagugggg

SEQ ID NO: 4138539 - RNA, 58 nt, Human
ccucacugucaucaguaguuauggcugucucuuccagauuacugcuggagauguuagg

SEQ ID NO: 4138540 - RNA, 75 nt, Human
ccucacuuaugucaucccugugugguggcuuggacuuugguaguccagcacuguuaugggaugacuuaaggaagg

SEQ ID NO: 4138541 - RNA, 56 nt, Human
ccucagagcucuuccuccuguccaugggacuuucuuggaagccagcauccuugagg

SEQ ID NO: 4138542 - RNA, 84 nt, Human
ccucagagcuuauuagaaaugcauaauuuuaggaccccaucccaggccuacugaauuagacugcauuuuaucaagauucucagg

SEQ ID NO: 4138543 - RNA, 117 nt, Human
ccucagauguucgugggaaugucacauaagggguggcauguaugcagcuggcuuaugcauagggaaucacuagcuacauacuuggccauucuccuucauuucugccuuugucugggg

SEQ ID NO: 4138544 - RNA, 75 nt, Human
ccucagauuuacugcuugacacauugguugugucauucugcauugugaaaggcugauggugaagcagcaaacagg

SEQ ID NO: 4138545 - RNA, 83 nt, Human
ccucagccaaugacuaacaugaggaauaugcuaauuucugugccccucagguucagagacauguucuagaucaucgccagagg

SEQ ID NO: 4138546 - RNA, 115 nt, Human
ccucagcccacagugagucugguuucugaguugucccggucuagccacuuucguuuccccuggggccggguggaggcuggggcagaaagcggaacugagcccgcguguucugagg

SEQ ID NO: 4138547 - RNA, 70 nt, Human
ccucagcccuuuccaugaacugucucaauucccgcaauaaucauacauugcacaguuucggaaacugagg

SEQ ID NO: 4138548 - RNA, 130 nt, Human
ccucagccucucaaaguccugggauuacaggcgugagccaccgcgcccggccuguauucauuucuuaaaaauauuauuggccgggcgcgguggcucaugccuguaaucccaguauuuugggaggcugggg

SEQ ID NO: 4138549 - RNA, 93 nt, Human
ccucagcucaucuuacaccauauacuuacucuccuguuugcagccucaaaccugcaacaggagaguaaauauaugauguaagaugagccgagg

SEQ ID NO: 4138550 - RNA, 82 nt, Human
ccaguguaccauuugagaagcucuagagguguuuuugcuauacaaaagcuaguucaagggcuucuuucagaaugggggcugg

SEQ ID NO: 4138551 - RNA, 89 nt, Human
ccaguguagccagcauuaaaccagagaggaugaggaagguagggugcccaagucugcccuuggcucucuuguuguguaagcacauuugg

SEQ ID NO: 4138552 - RNA, 91 nt, Human
ccaguguauuuucaguacuuacauaaaaacugaauguauuuuguaugcaguacauaucgguugaaugcaaguauugaugaaggacagaugg

SEQ ID NO: 4138553 - RNA, 72 nt, Human
ccaguguauuuucauccacucacggagagguuaauuauuaacacacugaaggugagaugggguacaugaugg

SEQ ID NO: 4138554 - RNA, 56 nt, Human
ccagugugugcuguuccccggagggugaagcagcagcccuuucagacacacgcugg

SEQ ID NO: 4138555 - RNA, 55 nt, Human
ccaguguguuaguggauuucccucagacagaaacacagacccgcugacacacagg

SEQ ID NO: 4138556 - RNA, 66 nt, Human
ccaguguuuauaaguacuuugucugcuuuauuaauuuugaagaggaaugaccacuugugauauugg

SEQ ID NO: 4138557 - RNA, 129 nt, Human
ccaguuaaacuggaauuucagauaaaucacaaauaauguuucaguacugucugucccauucuuuuaauauuugggacacacuuuugcuaaaaauuguuugugguuuaucugaaauucaaauuuaacugg

SEQ ID NO: 4138558 - RNA, 100 nt, Human
ccaguuaacuuucauguacguugucuugauuagaaugaugggcucugcucuacuuagacguucugcucagacuuuauaguacguggagugugcagcuugg

SEQ ID NO: 4138559 - RNA, 68 nt, Human
ccaguuaagcaggcucguuggaaguccccuucugacauugaaggucuuguaaagagucugccuucugg

SEQ ID NO: 4138560 - RNA, 104 nt, Human
ccaguuaccuauguggacaguuagguuauuuugguuuuucacuaucacaaacaaugguacaauuaaaauaauuuuguaagcucaucugucagguaagucccugg

SEQ ID NO: 4138561 - RNA, 79 nt, Human
ccaguuauuucagguuucauuggcagcuucaucagagcccauuagggagaaaugaaaaucaugagauuuggagaauugg

SEQ ID NO: 4138562 - RNA, 78 nt, Human
ccaguucagcucuucuucuugucuacugugugaaauagccguucauuuuucaaacuguuuacagugagauaggacugg

SEQ ID NO: 4138563 - RNA, 67 nt, Human
ccaguucaugaaaccucuaagaaauggaaggucagaggcugcuguuuuccuguggagacaugacugg

SEQ ID NO: 4138564 - RNA, 61 nt, Human
ccaguuccccaagugugcuaccuuuuguuauaagaggagacuucagcaacuugggagcugg

SEQ ID NO: 4138565 - RNA, 101 nt, Human
ccaguucuuaucucaagguuuugcuuguaagggaacccaaaucaaacaggaugauacaggaguucacuuuaggggcaucaaaccuagugguaagggccugg

SEQ ID NO: 4138566 - RNA, 76 nt, Human
ccaguucuucuugacacgaaagacaguaaaauuuuacaccuaacugccuuuugauggaguucaagaagcagacugg

SEQ ID NO: 4138567 - RNA, 71 nt, Human
ccaguugcccugccucccugaggugauguuaccuuuuugaucaucuuccaucacuucacuagggguauugg

SEQ ID NO: 4138568 - RNA, 74 nt, Human
ccaguugggcaccuuauuccuuucucccuuuccacuuaagcugaguggcggggauuagcaguguuugccccugg

SEQ ID NO: 4138569 - RNA, 71 nt, Human
ccaguuucaggagucugauucuuuugcuugcuaggcagaaaaagaaaguggauuugucugcugaaaccugg

SEQ ID NO: 4138570 - RNA, 61 nt, Human
ccaguuucucucauacauauuugcaugucaaacauacaaauaagugauugauggaaaucgg

SEQ ID NO: 4138571 - RNA, 68 nt, Human
ccaguuucuuuagauagaaaguucaauuauuaauuugagaacuuuuauuuucuaaaguaagcauuugg

SEQ ID NO: 4138572 - RNA, 63 nt, Human
ccaguuuuguuuuguuuucagccaaggauuugguuuccuuuguuaaaggcaaaacaagcacgg

SEQ ID NO: 4138573 - RNA, 80 nt, Human
ccaguuuuucaugugcccugccaagaccaagugguuggauggcaagcaaguggucuuuggcagggugaaagaaggcaugg

SEQ ID NO: 4138574 - RNA, 82 nt, Human
ccauaacauuuuaguauauaaaaagagaaguaaaucaccacuuuuuaggagaugggcugagaauuuuauguacugaauaugg

SEQ ID NO: 4138575 - RNA, 80 nt, Human
ccauaacugccuuuugcuauauuuaauuacuuauaaucuccuaaggcuguuaugagauaauagauguguaaaugcuuugg

SEQ ID NO: 4138576 - RNA, 66 nt, Human
ccauaaguagauaagcgcucugaggauuuauuucuguuucagaguguuuuacuaaacaaguuaugg

SEQ ID NO: 4138577 - RNA, 85 nt, Human
ccauacgcuugcaugcauuuuuuauguuuuagguagugauauaaugcuugaauguaaauaauguacaggauaaaacaggcuaugg

SEQ ID NO: 4138578 - RNA, 58 nt, Human
ccauacucaguuaugcuuauccugugaaaggagccauaggcugcaugcaugagugugg

SEQ ID NO: 4138579 - RNA, 60 nt, Human
ccauagaauucaagaguucccuggggaucucugcaaaccucaagcuccugaacucugugg

SEQ ID NO: 4138580 - RNA, 91 nt, Human
ccauagagauccaugucuuagaaaaaugguauguuuuuaucagaucucaguaaagauaaugcuauuuucugacuuuuguuguuuuuaaugg

SEQ ID NO: 4138581 - RNA, 62 nt, Human
ccauagcccagcagggggcagcgcagaucagcaccugcugagggcuccccgcugcugugugg

SEQ ID NO: 4138582 - RNA, 75 nt, Human
ccauagcgaggccguggggcucugccgcccaggccaaugccugugauccuggccagggcucgcggucccucgugg

SEQ ID NO: 4138583 - RNA, 75 nt, Human
ccauagcuuucuccauaauaagcucucuaauugguggguguaacccagcaauaguguguuuguuucagagugugg

SEQ ID NO: 4138584 - RNA, 79 nt, Human
ccauaggagcaaaugcuaaaguguagagaccugaugugaugauaauacaaauguuuuuacacauuaauuuauucugugg

SEQ ID NO: 4138585 - RNA, 57 nt, Human
ccauaggagcccuggucccugaucucucugaggucagucuggccacuguuccugugg

SEQ ID NO: 4138586 - RNA, 62 nt, Human
ccauagugagaagaugcagcugcuaugguaauaugaccacaacauugcauauuucauugagg

SEQ ID NO: 4138587 - RNA, 111 nt, Human
ccauaucgaucccugaagaagacaugguucuggagaguccugcucacguccaguuugaucugguggauguguucagaagaccucuugcccuucuccuucaugaucuguagg

SEQ ID NO: 4138588 - RNA, 86 nt, Human
ccauaugaaggguauaguuugaaggcuguucuacucagaagcacugagagaaacuaaauggucuucuaaauuauuguuucauuugg

SEQ ID NO: 4138589 - RNA, 67 nt, Human
ccauaugcgugugaguauuuuuagguaaguaaauugccuuccaaaggagccacaucugcagcuuugg

SEQ ID NO: 4138590 - RNA, 70 nt, Human
ccauauuccuggcacauuguaauauauacacauauguaugugugugucuguggaaguguuccugguuugg

SEQ ID NO: 4138591 - RNA, 78 nt, Human
ccaucaccugucacuuuguuuguuugggcugcaguggaccaaugguuucccaggcacacugaagugacauguagaugg

SEQ ID NO: 4138592 - RNA, 61 nt, Human
ccaucagacaauucuuucucuuggugauauuaaccacuucaauaagaaagaguuuugaagg

SEQ ID NO: 4138593 - RNA, 56 nt, Human
ccaucagauuagcaaaauccaggauuccuauuuaucuuguuguuaaugaaugaugg

SEQ ID NO: 4138594 - RNA, 74 nt, Human
ccaucaggcaccaguggaauuauucuguggugauuagucauaggcuguaauaauucacauuguaugcucagugg

SEQ ID NO: 4138595 - RNA, 88 nt, Human
ccaucagguucccuggcagugcuccuuuagacaugcacccaccuuggcaaaggcauugaggucuggauggcugcaggguccgggaugg

SEQ ID NO: 4138596 - RNA, 65 nt, Human
ccaucauucucuggggaaagaaauuuggugucuguaccaccacaauuucugaucagugaauuugg

SEQ ID NO: 4138597 - RNA, 63 nt, Human
ccaucauugaucauccugcugucucauccacuacuagcagucagacagcagauagucgaaagg

SEQ ID NO: 4138598 - RNA, 63 nt, Human
ccauccagaaacuuccauccccaucugcaguuggguuuggccuugagaaaguggucugggugg

SEQ ID NO: 4138599 - RNA, 89 nt, Human
ccauccauaaccuugacacucauaauuuugaaaccuaucguucauuacaaggguuaaaaucuaaaaugugacugugcagguugagaugg

SEQ ID NO: 4138600 - RNA, 66 nt, Human
ccauccauggagcugguaguuugcugauuggaguagagucauugaauuucacagcuuuaugaaugg

SEQ ID NO: 4138601 - RNA, 88 nt, Human
ccaucccaggguacuuucuauucccacagagauagucaugguccauaaugagacuuaguccugaugaaagaauauuacucaugggugg

SEQ ID NO: 4138602 - RNA, 62 nt, Human
ccauccccacugcuucucaucaaguagcucuagccucagaucuugcagcagugaggugaagg

SEQ ID NO: 4138603 - RNA, 92 nt, Human
cccaccccuccuuccacccagccccucugccuuccagcaagugaaugaagucaggcaggcccugggccaucccgggugaaggagggaguggg

SEQ ID NO: 4138604 - RNA, 93 nt, Human
cccacccucaggagccaguugcuaaauguuuaccagcaaacaaccaauaaugguggguagaggaauugggcuaccuuuuauguagaggguggg

SEQ ID NO: 4138605 - RNA, 72 nt, Human
cccaccgaccuuccuggcuguccgccugaucccuggaacugggcagacgcuaggggagcuuuugucaguggg

SEQ ID NO: 4138606 - RNA, 78 nt, Human
cccaccgggagcuugguguuauuucuguggacgcuggggaauugggcaccggggaacugggcaccgagcgcgcguggg

SEQ ID NO: 4138607 - RNA, 104 nt, Human
cccaccucccccugcagcccaaagcaggcaccagcucucucccgagcagccggcuccacccugggcagcugggccugagcuggaagcugcaggggccaggaggg

SEQ ID NO: 4138608 - RNA, 57 nt, Human
cccaccuccucuuuagccccagcuggaguccagcccuccagggguuaagggggcggg

SEQ ID NO: 4138609 - RNA, 55 nt, Human
cccacgagcccagcaggccgucaaucuguagaaauggcuuuuauggagcucuggg

SEQ ID NO: 4138610 - RNA, 94 nt, Human
cccacgcugcccccuuuguucccugucgacagcacccacuccuguccugguccugacaugguggagcuguggacaggaaggacuguagccuggg

SEQ ID NO: 4138611 - RNA, 68 nt, Human
cccacgggacgccagcauccuucgguggggcucugcgugcacccagggagcggggcugggucucuggg

SEQ ID NO: 4138612 - RNA, 84 nt, Human
cccacgggugcuggcaagugggggugccagcuucugggguauuugaccucagcagacacgcuucucacagugcccaccuguggg

SEQ ID NO: 4138613 - RNA, 82 nt, Human
cccacucagagaccagugugaggaauuaguguccaggccacagauccagggacugggcacaaacaucugccuguugaguagg

SEQ ID NO: 4138614 - RNA, 55 nt, Human
cccacucccuacgacacgcucccaguuaaccaagaccaggcuucagggagcuggg

SEQ ID NO: 4138615 - RNA, 59 nt, Human
cccacucuccaugagguucccacgcucuuguggucuggagccagccuguggggagcggg

SEQ ID NO: 4138616 - RNA, 116 nt, Human
cccacucuccucucccaguccaggagggcuggagcucugggcaucucagggucagcugcggugagccuggccacagggcucugcauuccuucugggcuuugcuugguuugaguggg

SEQ ID NO: 4138617 - RNA, 56 nt, Human
cccacugcugcucuccauggcaaagagguggcccuggaggucguaguacagugagg

SEQ ID NO: 4138618 - RNA, 103 nt, Human
cccacuggggguuguccauaaaaucugacaaucggaauguucugaccaucuucagaaagcaucuccauuguagguauggggacacaagcgagacugcaguggg

SEQ ID NO: 4138619 - RNA, 71 nt, Human
cccacugugugccaagcgguggcccccacccugggaggucagcaggccaccgcugaaggcacuggcauggg

SEQ ID NO: 4138620 - RNA, 72 nt, Human
cccacuguucagucuuguugaaaacuuggcacacaugcuugaggaguuuaauagggaucuuguccaguaggg

SEQ ID NO: 4138621 - RNA, 106 nt, Human
cccagaagagaccccauuucucagucuccucucacaguuaaguguggccaaaugaccaaguuguggccaauggcucaugagcaggaccgacgggucuaauucuggg

SEQ ID NO: 4138622 - RNA, 111 nt, Human
cccagaagcagccagggcauggcugggcacgccugggaagguugagucccggaguaguccuggacucagcagccaggaguggccccacugccagcucugcacuccucaggg

SEQ ID NO: 4138623 - RNA, 70 nt, Human
cccaucuccugugucuuccccacuggugucacacagugugugagcacccuggggaagcacaaaggcuggg

SEQ ID NO: 4138624 - RNA, 58 nt, Human
cccaucugucagcuggagauggcaugggagcuuccaugccaggcagucgaugcauggg

SEQ ID NO: 4138625 - RNA, 71 nt, Human
cccaucuucaagcuugugucggaucugguugagggauuuaaccugaggagaacagugcuuggaaggaaggg

SEQ ID NO: 4138626 - RNA, 57 nt, Human
cccggggcugcuauuuuuagcucccacguugggagccuccaaaugucaggucccggg

SEQ ID NO: 4138627 - RNA, 55 nt, Human
cccggggcugugcucuugagcucagccagccugccgagcagagcagggccguggg

SEQ ID NO: 4138628 - RNA, 63 nt, Human
cccggugucuuggaccuggggcuggcacagacagugcccgggcccaugggcuccagaccuggg

SEQ ID NO: 4138629 - RNA, 65 nt, Human
cccgugcccaguccugccuugacagagcucaccacugcuucccaggcugucccugggcaaucggg

SEQ ID NO: 4138630 - RNA, 63 nt, Human
cccguggcacagacagaucaggagucucugggucccuaugaccucugcccucugugccaaggg

SEQ ID NO: 4138631 - RNA, 72 nt, Human
cccguggcuucacccguccuccccacgcucccagguucaguggguggagacugggugcaagcagguugaggg

SEQ ID NO: 4138632 - RNA, 57 nt, Human
cccguguggacagcgugccaguuugacggcucagaaucggaagggcacccacauggg

SEQ ID NO: 4138633 - RNA, 117 nt, Human
cccguuagagaaggccuguggugggcaggcauguccaggcacugggacucuagcugugcaagacuguccuggugccaggacucuugcugugcacagccaugggcuggggcugccggg

SEQ ID NO: 4138634 - RNA, 69 nt, Human
cccguuccuauaauagcauagagugcuuuuauuacuggaaguuaaugugauguuuuauaaaagaacggg

SEQ ID NO: 4138635 - RNA, 66 nt, Human
cccuaaaauauucuuauaacaugccuuguagcauaaguaacugaaggcaaagaggauauuuugggg

SEQ ID NO: 4138636 - RNA, 61 nt, Human
cccuaagaaucucccuuguagcacgccauaaccaggaauguacaaaaaaggaaauucuggg

SEQ ID NO: 4138637 - RNA, 85 nt, Human
cccuaagacccacaggcaggggcagagacacacaaggagccuguuggagcuuggccugucuagcccauugaucuuggccuugggg

SEQ ID NO: 4138638 - RNA, 69 nt, Human
cccuaaugagcuguaugaucugaggcaaguuacuucacuucucaugucaguuucuucuauaaauugggg

SEQ ID NO: 4138639 - RNA, 75 nt, Human
cccuaauuguuucccucuccgggagcaguugguugucugccugauucuccagacaggcagagggaaggugugggg

SEQ ID NO: 4138640 - RNA, 63 nt, Human
cccuaccaucaggcugcuacaaggaauucaaagauuccuggguagagaccugaugaaaauggg

SEQ ID NO: 4138641 - RNA, 73 nt, Human
cccuaccucaccccauucuucaugguuuccugugauccacagauugaaguccagaauggcuuggugcuuuggg

SEQ ID NO: 4138642 - RNA, 130 nt, Human
cccuaccugugcagugagagaggagcaagagaagaagaggaguccaggccaugguggacacagccugacaugcacagugggacugggcugccccaggccuccuuuucuucccauacucugcagaggaggg

SEQ ID NO: 4138643 - RNA, 78 nt, Human
cccuacucuggacagggacacagccagugagguggaugaccuggagccugacagcgugucccuggcccuggaaauggg

SEQ ID NO: 4138644 - RNA, 70 nt, Human
cccuacuguaccuuucacugaugucaaguggcuaucaauucauauagcugaaaauuagugauaguuuggg

SEQ ID NO: 4138645 - RNA, 100 nt, Human
cccuagauguccaugcuuaauucagcucuuugaguauuccauuuacauuuacaaguagaaaaauggagucagggagaaguuagguaauuugccuuugggg

SEQ ID NO: 4138646 - RNA, 61 nt, Human
cccuaggcccuggggucuguuaaauuguucaaguuagucaauauccaccaggagcccaggg

SEQ ID NO: 4138647 - RNA, 84 nt, Human
cccuagggggcucuacuccagacuggcuggcagguguccccuccccaccagccaucugagaguguccccaagucccccucaggg

SEQ ID NO: 4138648 - RNA, 84 nt, Human
cccuagucuucucuuccuuugucaacugaucauagggaacuccucaugaggcuauuagugcagucuuggggagaagaggcaggg

SEQ ID NO: 4138649 - RNA, 117 nt, Human
cccuaguguacugaacagagauuccuuggugaugguggcuaggccagugcuauuuuguguguggcagaggaaaaagucacugggaccaagagcuucugugaauuucacauguaaggg

SEQ ID NO: 4138650 - RNA, 70 nt, Human
cccuauauuguuccucugugaugaucccucuaaaauauugaucaaaagagagggcagggaaaagauaggg

SEQ ID NO: 4138651 - RNA, 67 nt, Human
cccuaucauuugguggauaaaaacugugacgccuaaugagauaaaguauuucaccagguagauaggg

SEQ ID NO: 4138652 - RNA, 65 nt, Human
cccuauugaucuggauauuuagacagguuucacccuauugaucuggauguuuaggcagguuuggg

SEQ ID NO: 4138653 - RNA, 58 nt, Human
cccucaccaggcuccaggcaugucugcagaagaucagcucccuaaaagccagggaggg

SEQ ID NO: 4138654 - RNA, 129 nt, Human
cccucaccaguuuaacuuucuuccuuuccuaaaauguuguuuuucugcaugucuauuuaaguuagugaacauucuuggaggaaauaacaggaccaggcugaaugauuucugagguuuagucuuuuucag

SEQ ID NO: 4138655 - RNA, 57 nt, Human
cccucaccucagucugggccucaucaugccccucgcacaugacccagacccagaggg

SEQ ID NO: 4138656 - RNA, 91 nt, Human
cccucagacucagugucuauuuuccuuguggguuagcgaagucagcuucugucuuugauaauacacaagagaaagucuuuugaauuuaggg

SEQ ID NO: 4138657 - RNA, 58 nt, Human
cccucagagccugaagcaagcauauacagggcucuucuuugcugcagucaggcgaggg

SEQ ID NO: 4138658 - RNA, 63 nt, Human
cccucagcuucugagcgagcaguuguaguuuguacaauggcagaaugggccagaagcuuaggg

SEQ ID NO: 4138659 - RNA, 58 nt, Human
cccucaggaugcaguggaagugcacccagaugucaagcggcacauuggauucuggggg

SEQ ID NO: 4138660 - RNA, 77 nt, Human
cccucagguacgugcuucuagacacagagucuucaugguuggugaaauuuuaguaaggaaguugaguaaauugaggg

SEQ ID NO: 4138661 - RNA, 92 nt, Human
cccucaguaacuguuaaaaacgcaugccauuugguggauugagagcgaagcuccagcuucaugaagugcgugcccugacagucgcugauggg

SEQ ID NO: 4138662 - RNA, 70 nt, Human
cccucaguuugauucugauccugucuggagacugcguggccuccugccagugauuaaauuagucuguggg

SEQ ID NO: 4138663 - RNA, 86 nt, Human
cccucaucaacagccaccucugggacaucccuuggccuaaaggugugccuagucagguccuaagaaguugguuuuaguugauuggg

SEQ ID NO: 4138664 - RNA, 59 nt, Human
cccucaugaccaaucuaccugaagaauguucauuuuacaaggaaguauugucaugaagg

SEQ ID NO: 4138665 - RNA, 66 nt, Human
cccuccaccaggaagcaucuggcuagcuaacaugucuauuuaggguuggggugcugaccugaaggg

SEQ ID NO: 4138666 - RNA, 62 nt, Human
cccuccaggcugacgcagcuauuuacguucagagugaaaugggcuguguggcugggauuggg

SEQ ID NO: 4138667 - RNA, 80 nt, Human
cccuccauacuuacaaaugaugguguugcuuucuugcugccuaugaauacuaaguuguagucacacaucccaggugaggg

SEQ ID NO: 4138668 - RNA, 96 nt, Human
cccucccgaccacaugggcagagggucuaugcuaagaugggcucucauaugggcucucuuuaaacugcauggcuucucuguugaugaggggcaggg

SEQ ID NO: 4138669 - RNA, 120 nt, Human
cccucccucugugucgagugccaaggucagucuaggugucugcagaggaacgguuguuugcccaaggaagacgcuugugauauuccuggccuggugacuggcagucacguggugggaggg

SEQ ID NO: 4138670 - RNA, 83 nt, Human
cccuccuaacugaucucuacuugggcuuugucaggaugggccuccuccaggccuaggccaagugauuggugagcugggagagg

SEQ ID NO: 4138671 - RNA, 63 nt, Human
cccuccuacuuccuuccaaacauucauuuaauuuaaaggugacagggacagggagagggaagg

SEQ ID NO: 4138672 - RNA, 89 nt, Human
cccuccucaacccugaacuucaaguccagcucaugcucuaggccauuuccuagaaagugccucccuugggagcucagggacggggaggg

SEQ ID NO: 4138673 - RNA, 78 nt, Human
cccuccucagucucuaaggccucagcuggaaagacuugaguggucaggcgugaugcugagggcuggggcugagcaggg

SEQ ID NO: 4138674 - RNA, 87 nt, Human
cccuccuccuuuucuuccaaucucccgccucugggaucuaagguggaugaaaggggcacuagaaugggagacuuuuggggggcaggg

SEQ ID NO: 4138675 - RNA, 59 nt, Human
cccucgccgcagcugcuucccggacucgggaggggacggaagcggcccugagcgcaggg

SEQ ID NO: 4138676 - RNA, 64 nt, Human
cccucgguggucauaaguggcuggcggauuguuuacuuguauaucuguuagaggccacggaggg

SEQ ID NO: 4138677 - RNA, 61 nt, Human
cccucuacagggaagcgcuuucuguugucugaaagaaaagaaagugcuuccuuuuagaggg

SEQ ID NO: 4138678 - RNA, 109 nt, Human
cccucuacccacuaguagaaaagcaggcuugacaaggaaauuacuagcuggauugauugcagucuuagaaguucauguuccagcuuauauuugcuaaguggcugcaggg

SEQ ID NO: 4138679 - RNA, 78 nt, Human
cccucuaccugccccgccgcggcggccugcggccaggagaaguaggcuggcgacaucuggcgggccgcgggccgaggg

SEQ ID NO: 4138680 - RNA, 93 nt, Human
cccucuauuaaaguaaacgccuugagccuugccugaauuuaucugaaugguggaacagaaaucauuuagggcucuauucuaauggauucuggg

SEQ ID NO: 4138681 - RNA, 55 nt, Human
cccucucccugcagaauguggcaggcggaccuggaauguguuggagggaaggggg

SEQ ID NO: 4138682 - RNA, 69 nt, Human
cccucucccugcugcauggccuccacgacccuggacuggguguggcucugccuggcaguauucagaggg

SEQ ID NO: 4138683 - RNA, 78 nt, Human
cccucucccuguccccaccccagaacuacuagggguccccuuuuccuucaaguugucugagggugggcauagugaggg

SEQ ID NO: 4138684 - RNA, 61 nt, Human
cccucucugacuucugaacuuggcuugccuuccugacaaguacaagagugaccggggcggg

SEQ ID NO: 4138685 - RNA, 59 nt, Human
cccucucugcacuuugggaauguugggccuccaaguuuucuggguucagagcaacaggg

SEQ ID NO: 4138686 - RNA, 55 nt, Human
cccucucuuagaagaaacacagccuucagcacuugguaccggcuucuggaggggg

SEQ ID NO: 4138687 - RNA, 57 nt, Human
cccucugccugcgcccuggugugugccuuggcuagccagggucccuggggcagaggg

SEQ ID NO: 4138688 - RNA, 64 nt, Human
cccucugcugccuggcuggguccacacacgugcacucauguacagaccugcgggguagcaaggg

SEQ ID NO: 4138689 - RNA, 66 nt, Human
cccucugucucuuggccuguguccugugucuggcagaggcugcccaugguccaggaagacagaggg

SEQ ID NO: 4138690 - RNA, 108 nt, Human
cccucuucgcucccuuccuugagagugaagcguaugccuucacugccuuuacggacagagugaagcauaugcuucucugccuuuauggacauuuccaguggggggugg

SEQ ID NO: 4138691 - RNA, 65 nt, Human
cccucuucuacuggccuggcugcuccucccucaaugaggagaggcagcuggcucagagagguggg

SEQ ID NO: 4138692 - RNA, 63 nt, Human
cccucuucugugaucuauguguuuuaagugagguuuaccccagguccagguuacagagguggg

SEQ ID NO: 4138693 - RNA, 77 nt, Human
cccugaagucuuccugaggccucaaggcuggcucauaggauucugccuuggcccuagccucaggcaaggcugcaggg

SEQ ID NO: 4138694 - RNA, 67 nt, Human
cccugaauaacuauucuguggacucuuauagucagugugguuuaguguagagaacgcaggauaaggg

SEQ ID NO: 4138695 - RNA, 57 nt, Human
ccugagaggcccucucacugucgucuuucugacaguggcaggcagaagcuucucagg

SEQ ID NO: 4138696 - RNA, 85 nt, Human
ccugagcagcucucauugucuuggugcccccgaaaccuggacuagcagcuagcccgaggaggcacuaguuagugacaguuucagg

SEQ ID NO: 4138697 - RNA, 130 nt, Human
ccugagcucaguaguucaagaccagccuggacaacacagcaaaaccccaucucuacuaaaaauagaaaaauauuagccaggugugguggugcaugccuguaguccuagcuucuugggaggcugauucagg

SEQ ID NO: 4138698 - RNA, 57 nt, Human
ccuggcagaauauuaaagugcaagaaccaguuuuucuugcucuuuaccccugcaagg

SEQ ID NO: 4138699 - RNA, 63 nt, Human
ccuggcagucaggggaguccuuaggaagaggaagacagaauagggcgccccgggaaugucagg

SEQ ID NO: 4138700 - RNA, 57 nt, Human
ccuggcaguuuugcccaggauuagcaggucauaacuaggcuugggaagcugaccagg

SEQ ID NO: 4138701 - RNA, 117 nt, Human
ccuggcauaauuccugauacagacuggaauccuaaauaaauuaagaaaggauugguggcaugucaaauuccuuuaacuugauuauuuucaucaucaugucaggaugucaaucucagg

SEQ ID NO: 4138702 - RNA, 55 nt, Human
ccuggccaguuuccaggcccuguuccugcacaugcucugugaguauuggcccugg

SEQ ID NO: 4138703 - RNA, 56 nt, Human
ccuggcccauugccuucucucucugcaaccucggagagaccuaaaagugggcgagg

SEQ ID NO: 4138704 - RNA, 60 nt, Human
ccuggccccauugccugugucugccuucaccaccuuuagcuucacaagcaguggccaugg

SEQ ID NO: 4138705 - RNA, 66 nt, Human
ccuggcccucccucucuucucccaccacuuuagggccugugagagaaauuggagggaaugcuuagg

SEQ ID NO: 4138706 - RNA, 62 nt, Human
ccuggcccugaaggccuugagcauuaggaugugugcugagccaaggucgccccagggcaagg

SEQ ID NO: 4138707 - RNA, 78 nt, Human
ccuggcccuuucuuccgugacuucugcuacucauuaguaucuccaccagagggcagacaguaaaagagaaaggaaagg

SEQ ID NO: 4138708 - RNA, 55 nt, Human
ccuggccucagccuagggcugagcagugagccccaccccaguggcuguggccggg

SEQ ID NO: 4138709 - RNA, 58 nt, Human
ccuggccuuugaacgcuagacugcagaaagcggcaggacagcgguucucaaagucagg

SEQ ID NO: 4138710 - RNA, 70 nt, Human
ccuggcgaggcagggcugugggcacugggcuguccauuguaggguggcagugcugguucugccugugggg

SEQ ID NO: 4138711 - RNA, 71 nt, Human
ccuggcgcgguggcucacgccuguaaucccagcacuuugggaggccaaggcgggcggaucacgaagucagg

SEQ ID NO: 4138712 - RNA, 78 nt, Human
ccuggcgcucuguggguggcugugccccaggaugcauccguguguucccugccagccugccaucccacagaggcaagg

SEQ ID NO: 4138713 - RNA, 56 nt, Human
ccuggcuccuucucucucuuccucaagucccaggaagugaaagggaaggaguuagg

SEQ ID NO: 4138714 - RNA, 58 nt, Human
ccuggcugguggcagcgacaagggaaagaauugcgaucccuuccugccaccugucagg

SEQ ID NO: 4138715 - RNA, 65 nt, Human
ccuggcugguugucugauucuaacauagcugcuaucccugauucuagaaaucagaaaaccacagg

SEQ ID NO: 4138716 - RNA, 56 nt, Human
ccuggcugugcauguuucuauggugucuguguguugagaggcagggugaggccagg

SEQ ID NO: 4138717 - RNA, 64 nt, Human
ccuggcuucagcauugcccucucccauuuccucguauugaaauagguggcaagcugcagucagg

SEQ ID NO: 4138718 - RNA, 84 nt, Human
ccugggaaccuuguuaaaaugcagauucugauucucaggucuaggcuggagauaaugauucugcauuucuaauuaacucccagg

SEQ ID NO: 4138719 - RNA, 60 nt, Human
ccugggacaggcaggaguuagcagaaccaaccaggugggauuccuuggcucugucucagg

SEQ ID NO: 4138720 - RNA, 58 nt, Human
ccugggagggaaguagacuaggaaagcuguugaaagggcuccuucacuucuuaccagg

SEQ ID NO: 4138721 - RNA, 68 nt, Human
ccugggcagcacugucuugucuuaggacucagaaaguccaguccugagaugagacagugcugcccagg

SEQ ID NO: 4138722 - RNA, 74 nt, Human
ccugggcagccacacuccagaacgagaguaauuauccuaauugcuuuauugcaucagugugggggcagcucggg

SEQ ID NO: 4138723 - RNA, 62 nt, Human
ccugggcagggcuggacucucaaggaaucaguaaacaaguugagaaguccggcaggcugagg

SEQ ID NO: 4138724 - RNA, 74 nt, Human
ccugggcaucacuagaauaaugagagacuugcacaaggcaaucucuaaagucuguucagcucugaugccauagg

SEQ ID NO: 4138725 - RNA, 74 nt, Human
ccugggccaucagauuuggcccuguccugcaggguuucgcucauucuguggaagcugccagucugaagccuggg

SEQ ID NO: 4138726 - RNA, 63 nt, Human
ccugggccugaaaacauuucucggguuuauuugacaaagcaagagggcaguggcggggccagg

SEQ ID NO: 4138727 - RNA, 78 nt, Human
ccugggccuguguccugugcaaggggaugauuuccuuugggccccucgaccacucugcaaggcacacaaggcucaugg

SEQ ID NO: 4138728 - RNA, 59 nt, Human
ccugggccuucauugcucucccauaccacuucaauggggaacagaucauaggcucuugg

SEQ ID NO: 4138729 - RNA, 66 nt, Human
ccugggcucaagcgaucuugucaccucagccucccaaggugccaggauuauaggcaugagccaugg

SEQ ID NO: 4138730 - RNA, 62 nt, Human
ccugggcuggugaggcugcccugcagggcuucucacuauguagcaccagucaccagcccagg

SEQ ID NO: 4138731 - RNA, 75 nt, Human
ccugggcuucaguggccagagaugaugccuguuagcaucauuuaguggggcauuggaauccgugcgcagcccggg

SEQ ID NO: 4138732 - RNA, 99 nt, Human
ccuggggaauuguuagcaaugcagauucucaggcccacagcagacccacggacucagaagcugggguggggccuggcacuguuuaucaagcccuccagg

SEQ ID NO: 4138733 - RNA, 90 nt, Human
ccuggggacccugugaaaugcagauucugauucuguagcgcugaaaaagagaugcagcccuggauucugcauuucuaacaaacuccuagg

SEQ ID NO: 4138734 - RNA, 65 nt, Human
ccuggggagcccuacgccucucagaaagcuguaacaagcaggaggguuuuguagagucccauagg

SEQ ID NO: 4138735 - RNA, 55 nt, Human
ccuggggcaccuccucuuggcaauuccugggaauaaaggcagagguggccucagg

SEQ ID NO: 4138736 - RNA, 120 nt, Human
ccuggggcccuucaugccaggccccgcggcuguguccgcaagcgcagauggucucgggacucgggccacccugacgccgcagacccagcacgcugcggaccgggcacguuggaucucggg

SEQ ID NO: 4138737 - RNA, 89 nt, Human
ccuggggcggcguuccaggggcgggagucggcugugugggcugcgcguccgggcgggggcucucgucaccugggaaguccuggcucagg

SEQ ID NO: 4138738 - RNA, 57 nt, Human
ccugggguccaugcugucaucauccccauuuuacagaugagaaaguagagacucagg

SEQ ID NO: 4138739 - RNA, 109 nt, Human
ccuggguaagagcaagccacccaggagagagcuauaaaaucuccugcugaaauuugguuuagcuuucuuugugugugugcccuauucuuugcuacauuuuuuucccagg

SEQ ID NO: 4138740 - RNA, 66 nt, Human
ccugggucccugaguuaguacaguugaguagggcuccuggccagcaugugcuacauaggcaucagg

SEQ ID NO: 4138741 - RNA, 69 nt, Human
ccuggguccuggcagccuccuggagcuagagaauugcuaagcuagucacagugagguccccagccuagg

SEQ ID NO: 4138742 - RNA, 78 nt, Human
ccugggucgucucagucugacugaagugcccuagcaugggccaagcaaguuccuagugagacuggaggaaaucccagg

SEQ ID NO: 4138743 - RNA, 57 nt, Human
ccugggucugggccuccuggaguuggcaagagcugcugacugagaaccugacccagg

SEQ ID NO: 4138744 - RNA, 59 nt, Human
ccugguauucaucuuuaccucacccucuaaguaaaauugagguaaaagugagcuucagg

SEQ ID NO: 4138745 - RNA, 79 nt, Human
ccuggucccccgcagagagugagauccuccuggggaugaccucguuguccuccaguuccuugguuucagugggaccagg

SEQ ID NO: 4138746 - RNA, 57 nt, Human
ccugguccuagggguggaaccauggaggaacacccuggucacccacugggacugcgg

SEQ ID NO: 4138747 - RNA, 84 nt, Human
ccuggucugguugaagaauuucaagcagugcaauguugcuagaaugcaaaguugcagguggugagagguagaagcaagaccggg

SEQ ID NO: 4138748 - RNA, 59 nt, Human
ccuggugcuuaccagagcuuuuguccucugagaauuggacucacuuuguaggcaugggg

SEQ ID NO: 4138749 - RNA, 57 nt, Human
ccugguguaucguaguuuggauuucugaauauaaagagcauuuaaacuacuacaagg

SEQ ID NO: 4138750 - RNA, 75 nt, Human
ccuggugucuguuuacagcagccucaugucaguggagucaaagcucaauggccagcucugugaaauuucaccagg

SEQ ID NO: 4138751 - RNA, 97 nt, Human
ccugguuucgggcucccugcuguucucucccucauaacccuuguuuguaucugagccaggucugagcaggggagaacagacauccagagcuucaagg

SEQ ID NO: 4138752 - RNA, 66 nt, Human
ccugguuucuguaggguaguaguggagauccagaaaauuugccaucuccauccacuucaguucagg

SEQ ID NO: 4138753 - RNA, 63 nt, Human
ccuguaacuccuuggcucaagugauccucccaccucagccucuugagcaacuaggguuauagg

SEQ ID NO: 4138754 - RNA, 68 nt, Human
ccuguaaugacuuucuucugugcugugcacuaguguaguguaagacauagccaagagcaucccauagg

SEQ ID NO: 4138755 - RNA, 61 nt, Human
ccuguaccaucucagcauucaggaacaaugguguccacaugucuuuuugagguuguacagg

SEQ ID NO: 4138756 - RNA, 68 nt, Human
ccuguagugauuuagaauucaaauguggcuaauuuauaaaacaaccacauuucacuguucacagcagg

SEQ ID NO: 4138757 - RNA, 62 nt, Human
ccuguaucuguguuggaugaguuuguauauuaaacaucuguagccacuugacacagaugagg

SEQ ID NO: 4138758 - RNA, 63 nt, Human
ccugucacccaggcuagagugcaauggcaugaucucggcucaaugcaacuucugccucccagg

SEQ ID NO: 4138759 - RNA, 58 nt, Human
ccugucaugucaguguguguguguggccucccagcccaaccagaaauugacagacagg

SEQ ID NO: 4138760 - RNA, 83 nt, Human
ccugucauucucuaggcagagaggccauaagaauuacacuaccugcgauuuuuaugguccuuuccugccuuaauacuuauagg

SEQ ID NO: 4138761 - RNA, 81 nt, Human
ccuguccccuggggugggcuucggcccauaggccccaaugguggagcagaagggggcccuggccgaaucccucuggacggg

SEQ ID NO: 4138762 - RNA, 68 nt, Human
ccuguccucccccaaaguuugcacggauaaucggaaggugugguagggugggcuugggggaagccagg

SEQ ID NO: 4138763 - RNA, 60 nt, Human
cccugaauggcuggcauccaggugggcuucccauaaggagcccccuucugcgggccuggg

SEQ ID NO: 4138764 - RNA, 57 nt, Human
cccugagcacaccuggcagacaaucagugaggccguagggucaggaugggcugaggg

SEQ ID NO: 4138765 - RNA, 55 nt, Human
cccugaggaaaggguggagggcacaagggauccaauaccaucucuuccucauggg

SEQ ID NO: 4138766 - RNA, 55 nt, Human
cccugaggggaguggugagguggacucuguugcucacccaaacuguucauuaggg

SEQ ID NO: 4138767 - RNA, 82 nt, Human
cccugaucaguuuguauaugaaacacuuuuuuuccugccuuaagguuggaaucugguaaguuucagacaagugguugcaggg

SEQ ID NO: 4138768 - RNA, 88 nt, Human
cccugauuccuucaacuuggagcacauuuggcugcagugcgcugccgagucaacuguacuuuagguacguauuauugacaaucagagg

SEQ ID NO: 4138769 - RNA, 57 nt, Human
cccugauuuuuaaagcaaaaucaaaacgugugcuugauucugcuuugagaaucaugg

SEQ ID NO: 4138770 - RNA, 56 nt, Human
cccugcaggaagccuuaccaagcccaaggaaaugugggccccaguuucuucagagg

SEQ ID NO: 4138771 - RNA, 89 nt, Human
cccugcccccagacacuggugcccuccugaagccaucacagauaagaaugcuggcugugugugcaggagagcagguguuguggcauggg

SEQ ID NO: 4138772 - RNA, 59 nt, Human
cccugccgguccgagcccccaccugcgcugcucaggagggugauccgggcuggucaggg

SEQ ID NO: 4138773 - RNA, 105 nt, Human
cccugccugccuucgccuuucugagggagcuggagucuccagggguuggguuaacaccuggauauguuucagcuugggaagauucugaggggaggugcagcaggg

SEQ ID NO: 4138774 - RNA, 66 nt, Human
cccugccuucaguuuucagguguuuaccucagagacuggggacagcagaaagaaggcaaggcaggg

SEQ ID NO: 4138775 - RNA, 99 nt, Human
cccugccuucugcuucagggaaaagucacacugggucggcuccaaagagugucccugcugauucacuguggcuuucucugaucauuagccaaaccaggg

SEQ ID NO: 4138776 - RNA, 70 nt, Human
ccuggaccucugggugccacugucuguacauguccagcuuggcaggcagcuggcauccuaaggauucagg

SEQ ID NO: 4138777 - RNA, 80 nt, Human
ccuggagccgugcagagccaugggagguuuuugagcaggggcucggaggccucagcucaugguuuccaucugguuccagg

SEQ ID NO: 4138778 - RNA, 60 nt, Human
ccuggagucugugacuuuccucaugcaaauugcucuaagguaagguaucagaaguccagg

SEQ ID NO: 4138779 - RNA, 62 nt, Human
ccuggaguuuguaggucaucacuagagcgcaccugcucaccuggcugccuacaugcugcagg

SEQ ID NO: 4138780 - RNA, 56 nt, Human
ccuggauuauaggcccucugaauauacaggaucaggaagggcaauaaaaucucagg

SEQ ID NO: 4138781 - RNA, 105 nt, Human
ccuggauuuccuaauucuguucuuuuguuauaaacuguguauuauuuuacuggcuuuaugguuucacaaacaaaagguucggcagaaucuuuggacaucaaaugg

SEQ ID NO: 4138782 - RNA, 59 nt, Human
ccuggcacauauaauaauuuuugaguauugccucagagugauggguugugcugaccagg

SEQ ID NO: 4138783 - RNA, 82 nt, Human
ccuggcacauguagauacaucuugaacuucuagaauauuaauuuaagucuagagauguaguguguauugcugacaguuuagg

SEQ ID NO: 4138784 - RNA, 61 nt, Human
ccuggcacgaagggcugagguugggaaaccccaugacaauccaauccuaggcccugccagg

SEQ ID NO: 4138785 - RNA, 58 nt, Human
ccuggcacuuaaugcaugugcuaugucucucuacagagcacugccccaagguguuggg

SEQ ID NO: 4138786 - RNA, 86 nt, Human
ccuggcagcuccugaggacugcugggaugaugacacagcauuuuugcaucagcaucguacucacagggacucggagcucagccagg

SEQ ID NO: 4138787 - RNA, 60 nt, Human
ccuggccaccucugcccuacugagugggacccuucaccgggcaggagggggguggccugg

SEQ ID NO: 4138788 - RNA, 60 nt, Human
ccuggccacucagguguggggcgggucucuccucauuuagcuuucaccugcgugcccagg

SEQ ID NO: 4138789 - RNA, 60 nt, Human
ccuggccagcagccccuuccucuguccuguuuauucugcagcugaagggaccuggucagg

SEQ ID NO: 4138790 - RNA, 124 nt, Human
ccuggccagcugggaagcccugaguggaccggacugccugugucccuucagugcccaccucccacuuuuccagggccauggauaggagcagcuagugguccgucagggcucccucuaggccagg

SEQ ID NO: 4138791 - RNA, 58 nt, Human
ccuggcccagggacuuucgccugggacugcccaguggugccagcucugugggcccagg

SEQ ID NO: 4138792 - RNA, 92 nt, Human
ccuggcccccagcccccagcagcucagcuacuggucaccugccaccgccuggaaugcugauuggcaguuggcuggggugggugggggcuggg

SEQ ID NO: 4138793 - RNA, 62 nt, Human
ccuggcccucuggcuuccgcauggggcuugugggaagccucagcaggggaccauagggaagg

SEQ ID NO: 4138794 - RNA, 70 nt, Human
ccuggccucugaggucauggacuuggccuccuucuuuuccaaaggggcccaugauccagcucagagcagg

SEQ ID NO: 4138795 - RNA, 61 nt, Human
ccuggccuggcacucccucugcacacauuccaugggcaggcaagcaggggcccgggccagg

SEQ ID NO: 4138796 - RNA, 76 nt, Human
ccuggccuuggccugggacagagcagcaguggggaggggccuuugugcaucucugcuccuacagcucagggcuggg

SEQ ID NO: 4138797 - RNA, 74 nt, Human
ccuggcggugcgagguucucgccggggaugcggcggcggcagcugcuuccugguuugaagcucgccgagugggg

SEQ ID NO: 4138798 - RNA, 105 nt, Human
ccuggcguaaccugccugauguuccauucuguucuucuguaaaguuaaguuguggcuacuucacaaauauagugagaaccagauguauguaacaagcacuccagg

SEQ ID NO: 4138799 - RNA, 58 nt, Human
ccuggcucccuggaccucauuaccucagacccuggagauaagagaaaaaggggcaagg

SEQ ID NO: 4138800 - RNA, 55 nt, Human
ccuggcuccugccucugcaggggcgaugcuucccgcggccgguggaugagccagg

SEQ ID NO: 4138801 - RNA, 57 nt, Human
ccuggcucuagaggccacuccuagcuuuuaaagcaaaguggaacccuuagggucagg

SEQ ID NO: 4138802 - RNA, 58 nt, Human
ccuggcucugaaguccacaucaauuccacuacacuggauguuaggauucagcaucagg

SEQ ID NO: 4138803 - RNA, 56 nt, Human
ccuggcucugagguaugccuggagcuugaguuugcagagguguaccuggagcuugg

SEQ ID NO: 4138804 - RNA, 72 nt, Human
ccuggcucuggcuggcugggccucaguggggaaggucugccccugauacuugggaugguggccagagcgagg

SEQ ID NO: 4138805 - RNA, 60 nt, Human
ccuggcugcuuccucugccaugugguuccaggcccacagccagcagggaagcagaccagg

SEQ ID NO: 4138806 - RNA, 84 nt, Human
ccugggaauuuuguuaaaguacagauucugauucaaacaggcuggagucgggucuaagggucuguauuucuggcaagccccagg

SEQ ID NO: 4138807 - RNA, 78 nt, Human
ccugggaccagguacacgguguuuccauggccuggacaucaucccagcccuggcaagugcuguguagcuucuucuagg

SEQ ID NO: 4138808 - RNA, 63 nt, Human
ccugggagaacaucauggaaggggcaggauucacaacgacugcagcuuugucugucuucgggg

SEQ ID NO: 4138809 - RNA, 74 nt, Human
ccugggagauugggcgaggagaaugcugugaaugagaaagacccauucuuugcuuccuugcuuucuaagacagg

SEQ ID NO: 4138810 - RNA, 84 nt, Human
ccugggaguuuguuaguaaugcagcaucuccaacccaucccagauuaacuuugucagaaucugcauuuuaacaaaacccccagg

SEQ ID NO: 4138811 - RNA, 74 nt, Human
ccugggaucugauagucauuucaggcugccuccaaaacugagggaccugucaaugacaguuauucauuuccagg

SEQ ID NO: 4138812 - RNA, 61 nt, Human
ccugggaugcuguccucaucuacaugguaaaaacuauucaggaccaugaccguauuccagg

SEQ ID NO: 4138813 - RNA, 65 nt, Human
ccugggauguuuaagcccaggcugacugaugcacagaagucaggcuugcgauggaagucaccagg

SEQ ID NO: 4138814 - RNA, 125 nt, Human
ccugggauucugggcucacugaguucaccugcgagucagcccuaccugcacugcucuggucuaguacaaacaggcugcuggcauugagguagguggcagagagaguaauggucccauggcccagg

SEQ ID NO: 4138815 - RNA, 68 nt, Human
ccugggcacuguggggagcagaaagaggacuaauacugcccuugugcugaggcaccuacagucucggg

SEQ ID NO: 4138816 - RNA, 55 nt, Human
ccugggcagccugcucaaggacuuuaacauugugucuccuuucagacuguucagg

SEQ ID NO: 4138817 - RNA, 85 nt, Human
ccugggcagcgacgggggaugugugagguuuagagcuaagaggagugcucuccuuucacuaaauauucuuaagucucuguccagg

SEQ ID NO: 4138818 - RNA, 58 nt, Human
ccugggcauagaaccccaggugaaggcacuuaacacugguuaucccugugcauccagg

SEQ ID NO: 4138819 - RNA, 60 nt, Human
ccugggcaucccuucuuccagugucauuccucuggcagagggagaggaggaugcauaagg

SEQ ID NO: 4138820 - RNA, 62 nt, Human
ccugggcaugaaaaggaugccaggcugcaggacugcaguuggcuucuccuuccugacccagg

SEQ ID NO: 4138821 - RNA, 84 nt, Human
ccugggcuaucagcuuagggcucugcuucuguuuuucugccugcugggagguguggaaacagagagggcaacagcuagcuuggg

SEQ ID NO: 4138822 - RNA, 69 nt, Human
ccugggcucccucguguucugaguucucuugaccuucuagaaaccugguucugcgugaggggguguggg

SEQ ID NO: 4138823 - RNA, 79 nt, Human
ccugggcucuccuggaggacaacagggaaauaaaaagggccugcaagucaaagaguguucuccaggguagagccuuugg

SEQ ID NO: 4138824 - RNA, 89 nt, Human
ccugggcugcagcaagaaggaagccuuccuguaugcuccacccucaaccguggagcagcuggacaggccucccuacacugcagcuuggg

SEQ ID NO: 4138825 - RNA, 57 nt, Human
ccugggcuggaguacagcagugugaucucagcucacugcaaccuccguccccccagg

SEQ ID NO: 4138826 - RNA, 55 nt, Human
ccugggcuucugucuagauguuuaagccuuugcaccuuuggacagaguguccagg

SEQ ID NO: 4138827 - RNA, 129 nt, Human
ccuggggacacccaauauuuacugccugaggccuaaguccuucccaagcauguaccuacagaucuguaccugagaggugaugaugaggaggcuuuucaggcucaggcagaugaagagcucagcuccagg

SEQ ID NO: 4138828 - RNA, 59 nt, Human
ccuggggccacaacggcgcacgcgcaaaaacuccaucgcgcgcaugcgcgugccucggg

SEQ ID NO: 4138829 - RNA, 70 nt, Human
cccaugaaugucuugagaagagaaaucuucccaucguuaaggauucucagcuucaaguuauucucuuggg

SEQ ID NO: 4138830 - RNA, 81 nt, Human
cccaugagucaaaugcaugagcuuugugauccugacugagguuugacuagggcuuaggaacuagacucaugacucaguggg

SEQ ID NO: 4138831 - RNA, 70 nt, Human
cccaugcuuagggcuccuccaauagaucauaaacgaaugcuuggucccauuguuugcucuaggcugaggg

SEQ ID NO: 4138832 - RNA, 58 nt, Human
cccauggccagcaaguucagaauuucuguaaucagaaaaugagaccucagcugguggg

SEQ ID NO: 4138833 - RNA, 58 nt, Human
cccauggccuugcaggcuuaacaggaagagcucugagccagacaagacagccaguggg

SEQ ID NO: 4138834 - RNA, 77 nt, Human
cccauggucuucugaaggauuuuaaaguacauuaaggaaacuugcagaaaauuucuuuggaaucuuaggaguguggg

SEQ ID NO: 4138835 - RNA, 64 nt, Human
cccaugucuuucacucucuuucucuuuaucacuacuuuggaagcuuugugaaagcagacauggg

SEQ ID NO: 4138836 - RNA, 101 nt, Human
cccauuauggacauccgacgaccuggguucagacccacauuugccccucugagauaguggugaugguggacucuugauucaggcagucuggauucaagggg

SEQ ID NO: 4138837 - RNA, 66 nt, Human
cccauucauugucuccaauucuauauauuacuauuauauaaacguuauagaaagaugauggguggg

SEQ ID NO: 4138838 - RNA, 68 nt, Human
cccauucugacuucauugccucagccgggccucuccuccgugaagcaguucucagaaguggggguggg

SEQ ID NO: 4138839 - RNA, 76 nt, Human
cccauuggaagaggcccaugacugccuuauugaucugagauuuacgaaagcagcaauuauguguuauuugaguggg

SEQ ID NO: 4138840 - RNA, 120 nt, Human
cccauugguaaaacuagaggggugguggucuccaucagcaugcaggcuguuccagcucaauuuugaugagccuaaugugcugguugcagaucauuuaccaccacagugagagacuagggg

SEQ ID NO: 4138841 - RNA, 66 nt, Human
cccauugugaucauuguaguuucccacugaacaaacaacagaaacucugcagugacuuauaaaggg

SEQ ID NO: 4138842 - RNA, 63 nt, Human
cccauuuaugacuacacaggugauccauggaaagaauggauuauguguggauacauacuuggg

SEQ ID NO: 4138843 - RNA, 62 nt, Human
cccauuuauuuaaguaggucuugccuuaacggaaagggagucuaucuucucaaauaaguggg

SEQ ID NO: 4138844 - RNA, 80 nt, Human
cccauuuccaggguucguuuccacguggcucaagauuucuuccuggcagucugggaacugggaacguuucccuuuguggg

SEQ ID NO: 4138845 - RNA, 58 nt, Human
cccauuuguauagagccuuauagucacaguaaggacucugggcuuuacuccaaguggg

SEQ ID NO: 4138846 - RNA, 118 nt, Human
cccauuugucaucuaaaugguccguccccuucuuaaacaucauuuuggcccaagguccauucauggggccugccggguguuccugggaagaugggcagaaaaucccaaggcaaguggg

SEQ ID NO: 4138847 - RNA, 67 nt, Human
ccccaaacaggcugcagaggccuuucauggucaaaaagacuuggauuuaggauuuucagcagagggg

SEQ ID NO: 4138848 - RNA, 67 nt, Human
ccccaaaguauauuggauugaauggguuguugucaacuggcaccaucagcuccaguaucuucugagg

SEQ ID NO: 4138849 - RNA, 72 nt, Human
ccccaaaugcugguuuccucuagauguuggaguuccaguuucuacgaaggucaacccuaaagcacuuggagg

SEQ ID NO: 4138850 - RNA, 82 nt, Human
ccccaaccagcgccaggccacgccccggcgugugacgcaagcacgcuccgugcgcgccgucgcgucgcggcgcucacugggg

SEQ ID NO: 4138851 - RNA, 62 nt, Human
ccccaaguggggagaucaauuagugcaacaacucuggccugucuccaucucauuacuugggg

SEQ ID NO: 4138852 - RNA, 55 nt, Human
ccgcgccacccauucccacugacuccagcuccauggaccugggugggaggagcgg

SEQ ID NO: 4138853 - RNA, 83 nt, Human
ccgcgcgcccacggggcuagagaagguuucuuucgaguuugagaaggaauuggcacggccuucucagucucccgaaagcgcgg

SEQ ID NO: 4138854 - RNA, 76 nt, Human
ccgcuaaaguaagcagagcagauaguauuaucucacuuuuuagaugaggaaacuaaggcucagugaagcuuagugg

SEQ ID NO: 4138855 - RNA, 96 nt, Human
ccgcuccagggccuccuccagcucugcugugcgccgguuggaauccccgccaggacccaggccauuggcaagagucuggagugagggaaggagggg

SEQ ID NO: 4138856 - RNA, 55 nt, Human
ccggaauccugcuuucaauucuuuugaaagaauugaaagaagugggauugccagg

SEQ ID NO: 4138857 - RNA, 71 nt, Human
ccggacucgagcgccacccgcuggaggcagggcucaucgcccagcuuccgaccgggggcugcaagggccgg

SEQ ID NO: 4138858 - RNA, 65 nt, Human
ccggacuggcccugcuccgcgccgcgggcucuuuggccggugaguggggcgcagggcgcggcagg

SEQ ID NO: 4138859 - RNA, 56 nt, Human
ccggacuugaaucuuuugccuggccgcaacccgccagccugcaauguagguaccgg

SEQ ID NO: 4138860 - RNA, 105 nt, Human
ccggagacuuacuacuaccucaaccaggucgggggagcccuuguggugcggcggggaggccugcccagaggaggaucucggcccggaggucugaggaguagccgg

SEQ ID NO: 4138861 - RNA, 72 nt, Human
ccggcaacuacaggcagauuaaggguaggcauuucagacucgaaauacugcucuuguuuuuuguuguuaugg

SEQ ID NO: 4138862 - RNA, 66 nt, Human
ccggcaagagaggaagugagaggguguugggaggugccagguucuuucacaaccugcuuuaguggg

SEQ ID NO: 4138863 - RNA, 113 nt, Human
ccggcagccuuucgcgggcgagaugggggagguuagccaggccuuugaucccggcggggcgcgccuccaccuccccgucugcccggccuuccuccaccuccucccgcugccgg

SEQ ID NO: 4138864 - RNA, 78 nt, Human
ccggccaccagccaccuuugcaaaccaaaucugagcugcugccagucagagacuggucugcagaugccucuuggcugg

SEQ ID NO: 4138865 - RNA, 55 nt, Human
ccggcccgcucagggcaggaaguuucuguucuucucugcucugcuuugcaggugg

SEQ ID NO: 4138866 - RNA, 63 nt, Human
ccggccucaaccuucagggucccugacugcugcauggaacacgccuuuggaggaugaggcugg

SEQ ID NO: 4138867 - RNA, 86 nt, Human
ccggcggcucccgcgagagggaacggaucccagcgcggccgcggcuccccgcgcgguaaccccgaucucucagcgcgggcccccgg

SEQ ID NO: 4138868 - RNA, 58 nt, Human
ccggcgggcagcggcagugagcccagcgagguggucucggugcgccaguguccguugg

SEQ ID NO: 4138869 - RNA, 62 nt, Human
ccggcuauuggcuucucccauccccuaccagagggugacgagacgggaagccgggaagccgg

SEQ ID NO: 4138870 - RNA, 76 nt, Human
ccggcuccaguucucaggcuguggagccgucuaggcaccgugcacgaagugggucuccagggcucugagaggccgg

SEQ ID NO: 4138871 - RNA, 71 nt, Human
ccggcucucuggaggagcucacccugcuggcucagcugaguuuaagggggaagcugcuccuggggagaggg

SEQ ID NO: 4138872 - RNA, 61 nt, Human
ccgggaaguucaaggucaaggcccuggcagauuuggugccucaugaaggucugcuuccugg

SEQ ID NO: 4138873 - RNA, 107 nt, Human
ccgggaugacugucaggauggcagcuuguucuaaggaagcauuuguaucuucagacgcaaauuuccccagaacgccccuggcugguuucaacugucagucacuccgg

SEQ ID NO: 4138874 - RNA, 94 nt, Human
ccgggcacgcgggggucggggccgccccucguccgccgcugccgcucgguggccgggccgggcgccuccaccccccucgcagucaugugccugg

SEQ ID NO: 4138875 - RNA, 108 nt, Human
ccgggcacucggagcuggccgggggagccccaccucggugcccgcagcccgggaccgacgggccauggccggggacgggguuccugggguaggcccggaagugucugg

SEQ ID NO: 4138876 - RNA, 82 nt, Human
ccgggccgggcuggagcgccucggaugcggcgccggagggagacccagguccuggccgccgcguggggccgggccgggccgg

SEQ ID NO: 4138877 - RNA, 92 nt, Human
ccgggcgcgguccccgcgcggggcugggggcacacggaccgagucuccgcccccuuguucucugcgcucccggcccgggaagccgugcccgg

SEQ ID NO: 4138878 - RNA, 65 nt, Human
ccgggcgcugcgcccccgcgcgcucugccugcugagcggcgccggagggaggugcggaggccggg

SEQ ID NO: 4138879 - RNA, 70 nt, Human
ccgggcuccgggcgugcgcacgaggagcaggugcccgggcgagucucgagcugcacgcccccgagcucgg

SEQ ID NO: 4138880 - RNA, 58 nt, Human
ccgggcuuugggaugcuguuccuuuguuggagggagcagagcccuuccauggccuugg

SEQ ID NO: 4138881 - RNA, 59 nt, Human
ccggggcugaggcaacgcggagauuggugccuggcgccccucuucggccuccgccuugg

SEQ ID NO: 4138882 - RNA, 58 nt, Human
ccggggcugcggggcucccgccgcggcuguucugccaaggcugucccgcggcugccgg

SEQ ID NO: 4138883 - RNA, 68 nt, Human
ccgggggcaauagaguuggaacugaaacccaguacaaccacuaucagaaguccaauuuucgcaccugg

SEQ ID NO: 4138884 - RNA, 86 nt, Human
ccgggugacucguacguagucagugcugggaagcgcuggucuacagucauguuucucaagcuugaaugcacauccgaaucccccgg

SEQ ID NO: 4138885 - RNA, 73 nt, Human
ccgguccgcgccuccgccgcuuuuuauagcggccgcgggcggcggcggcagcgguuggagguuguaggaccgg

SEQ ID NO: 4138886 - RNA, 68 nt, Human
ccggugagugagcucugcggugucuucccacaucacaccuuggacugcuggggcucauucaucuccgg

SEQ ID NO: 4138887 - RNA, 93 nt, Human
ccguaaccccauccuucaggcagguuucccggcugucaaugagguucguuguggcugcggauuugaucucccuuggccugcagggugggcagg

SEQ ID NO: 4138888 - RNA, 65 nt, Human
ccgucaccucugcucuaucuccagccuacuguucagucuggagagcugagcagaguuaggagugg

SEQ ID NO: 4138889 - RNA, 130 nt, Human
ccgucccccacccucuccaggguggaagacugcuccaaggaggccccaggucagcugcuggagaagcagagaggcugcccagugaggccucuugugagcagacuuccacccugggaggguccccugccgg

SEQ ID NO: 4138890 - RNA, 65 nt, Human
ccgucuccagggcagagaauagcaauggcaggaaacgucacuauccagaguugcugcuggagcgg

SEQ ID NO: 4138891 - RNA, 65 nt, Human
ccgugaaggcuuuuagcucugaaaacacugacaucucuuuucagaggccuaagagguuuacaugg

SEQ ID NO: 4138892 - RNA, 65 nt, Human
ccgugacgugcccagggccacagcaggagaggugccugucuggggcagcaaggcgcgcguuccgg

SEQ ID NO: 4138893 - RNA, 63 nt, Human
ccgugcugugcugguugcuggggugguugcaguccugccccagucagagcagcgcucgcaugg

SEQ ID NO: 4138894 - RNA, 63 nt, Human
ccgugggaguggcaggaaaugggagcgaaagaaagggacuucacucucucuccauucccaggg

SEQ ID NO: 4138895 - RNA, 63 nt, Human
ccgugggcaggaggcggcaccagcguggcucccgggggggccagggccaaggcuuucccacgg

SEQ ID NO: 4138896 - RNA, 63 nt, Human
ccgugggguggccuagggcccagccugugucaaggcugcgggcagggcacugguccccugugg

SEQ ID NO: 4138897 - RNA, 62 nt, Human
ccgugggucccaggaaggaccagcagacccgggucacugccacuguccacugagacugacgg

SEQ ID NO: 4138898 - RNA, 128 nt, Human
ccguggguguacuggacucagccuucucacagcgccggcaugggcugcucagugggaaucuccaaggcugucaggccaugugggccuugccugagccagggaucggagggacagcgagcagccagcgg

SEQ ID NO: 4138899 - RNA, 60 nt, Human
ccgugugcucagccucagagccguaggcgagagcgccugucugcaugagugagcauaugg

SEQ ID NO: 4138900 - RNA, 126 nt, Human
ccguuaccagucaagcaacauucaucauguucacccuaaggcuucuggagcuugcuggcuggcugacuggcucgccagguacauuuaagaagccugugcuuggggauguuucuuaacugcagacgg

SEQ ID NO: 4138901 - RNA, 60 nt, Human
ccguugcuucucuuaaguccagcuggaaguacauucaucuggcaaaaaagagaggggagg

SEQ ID NO: 4138902 - RNA, 95 nt, Human
ccguuuugggagggggcggaagugccaggacagcaggagcggucagugguggccagugugugcugccggcucccacguggccccccucgguuugg

SEQ ID NO: 4138903 - RNA, 94 nt, Human
ccuaaaagggcuugcccagaaaaggagcugcaggaugaugacagagagcugugcgucuugcaagaugcuccucauucaucauguccccccuagg

SEQ ID NO: 4138904 - RNA, 56 nt, Human
ccuaaaaggugaaaucauaugauugaguaaauuaugugauagaguuacuuuauagg

SEQ ID NO: 4138905 - RNA, 73 nt, Human
ccuaaaaugucucuuuagagcaacaguaagugaacuuauuuucuguaaagggacaaauaguaaauauuuuagg

SEQ ID NO: 4138906 - RNA, 114 nt, Human
ccuaaaguauuuuuagaaaauagcauugaauuuuugcuguugauauugugaauuauaauugagacacaguacagcugaaacuuuagugugaauucuaaaguuggcugauuaagg

SEQ ID NO: 4138907 - RNA, 62 nt, Human
ccuaaagugcuacagcagaagucuucaugaaccuucugaaaugugagcaaaaucucuuuagg

SEQ ID NO: 4138908 - RNA, 59 nt, Human
ccuaaauuuuucccuagugaauauuggugcuuggcagaugugagcuggggagagugggg

SEQ ID NO: 4138909 - RNA, 55 nt, Human
ccuaacagcuugaggaauaucaucauuuguaugaaugaccaucucaaugcugugg

SEQ ID NO: 4138910 - RNA, 65 nt, Human
ccuaacugacaguggcuaaaggaauugcuaaauauaagucacuucuacagcuucuucaguuaagg

SEQ ID NO: 4138911 - RNA, 83 nt, Human
ccuaacuugggagauuuuucaacaagaauaggaucuuuuagaaagaccuuucacagaguuuggaauuguuuccuuaguuaagg

SEQ ID NO: 4138912 - RNA, 70 nt, Human
ccuaacuuugagucauugccucuuuccacccuccuauaaaaaagggaaaagaauugugagucaagauggg

SEQ ID NO: 4138913 - RNA, 130 nt, Human
ccuaagaaucacuuggggugcuugcuaaaaugcagauuucuugaccccugucucagagauugauucaguaauucuugaguaggcaucaggaaucaguauuuuuaaacauacaccccagguuauucugaug

SEQ ID NO: 4138914 - RNA, 91 nt, Human
ccuaagagcaaguguggugcacagguaauagccuaggcuauagaggugacugaguguaguuuaauuccuggccuuuccacuugcucuuggg

SEQ ID NO: 4138915 - RNA, 113 nt, Human
ccuaaggugauuccagcagaugagccagauuugacaacucuguguuguagaauugaaucuucucuauaacaucuuugccaaauugcuauuuggcugugauugauuaccuuggg

SEQ ID NO: 4138916 - RNA, 94 nt, Human
ccuaaguccagagcccucagaagcccuccauacucuguuggcucucugagcuggcagcuuuaaaggaggcucugagguguguucuggaaggagg

SEQ ID NO: 4138917 - RNA, 63 nt, Human
ccuaaucccagagaauaaugaucaggcguugauccaagugagaauuauuacucuuugggcagg

SEQ ID NO: 4138918 - RNA, 110 nt, Human
ccuaauuaaacauauuucuguuccuauagugaaauuuaugcacagcuacacaaauuggguaguauuauaaauagacuucaauuuauucagguagaguuauguugacuagg

SEQ ID NO: 4138919 - RNA, 56 nt, Human
ccuacacagagccuacuucugcaggaugugcugcaauucuugugugcucugugagg

SEQ ID NO: 4138920 - RNA, 86 nt, Human
ccuacaggcuuaccuguccugagauagcaucugagguuccugaaauaagccuaguccuccuguccagugacuuugggccauguggg

SEQ ID NO: 4138921 - RNA, 84 nt, Human
ccuacagggaugaacauuuguaugcguuuuuacugucaguuucuaaacuguuuagauuuuuaaccaucacaaaugucuuugggg

SEQ ID NO: 4138922 - RNA, 60 nt, Human
ccuacaugcuuuaccaaagcagugaugagagugaucagugcauguggugugagugguagg

SEQ ID NO: 4138923 - RNA, 88 nt, Human
ccuacauuuuuuccagugauugcugcucucaucuuuuugccaaauugaucagaguuggcaguaaaacacaggcaguugaaaauguggg

SEQ ID NO: 4138924 - RNA, 58 nt, Human
ccuaccaguucccgugaacagaauaaaaaauaauauuuugcaaugggcauuuuggagg

SEQ ID NO: 4138925 - RNA, 56 nt, Human
ccuucagaaagccucccccgguguagucuuuuuaaagauucaugaaggcuugaagg

SEQ ID NO: 4138926 - RNA, 63 nt, Human
ccuucagaaugaaauucuaaugaucugguaagcaguuaguuagaauuugguucugcccuaagg

SEQ ID NO: 4138927 - RNA, 74 nt, Human
ccuucagcccacaccagagguuaccugcaaacucuuccgguaugugguggcagcucugagucucugucugaggg

SEQ ID NO: 4138928 - RNA, 76 nt, Human
ccuucaguaaaaucaccaaaagcagguggagaauaaaaaguguaacagccacuugaauggugaugcuacugagagg

SEQ ID NO: 4138929 - RNA, 64 nt, Human
ccuucaguaagcagcugauuucacagcucaggcuagaccuagauggugucacugcuucuuaagg

SEQ ID NO: 4138930 - RNA, 58 nt, Human
ccuucaugucaccaggucugaugcagccacguguggcugucauugaacaggugaaggg

SEQ ID NO: 4138931 - RNA, 71 nt, Human
ccuucauuuccucacccaugaaaugcaggaaguaaggucuacuuugcagagugguugugaggauuagaugg

SEQ ID NO: 4138932 - RNA, 56 nt, Human
ccuuccagggagucaaaugaacuacuuuaggaguauaaguuaaacacccugggggg

SEQ ID NO: 4138933 - RNA, 67 nt, Human
ccuuccaguucuugguuguaauuggauucaggcuaaaacaaccacguccccaaccaggaaaggaggg

SEQ ID NO: 4138934 - RNA, 69 nt, Human
ccuucccacaaacgccacggcccuguccaguccccacugugacaucgcugugucuguuuuuuaggaagg

SEQ ID NO: 4138935 - RNA, 81 nt, Human
ccuucccauuucaaugcugguuguuuuauggucacacauaacuacaaggcuacucauacagcugcauucuuaacaggaagg

SEQ ID NO: 4138936 - RNA, 67 nt, Human
ccuuccccccaugcuccaaaaacaagagaauugcugauuauucuuauuuuuguguauuggggguagg

SEQ ID NO: 4138937 - RNA, 66 nt, Human
ccuucccugauaagagccucagaauguuuucuguccaagcuguuuggguucaaguacagggcaagg

SEQ ID NO: 4138938 - RNA, 63 nt, Human
ccuucccugggcuggaagcaucuucuccauuuuacuguuggggaagcugaggcccagugaagg

SEQ ID NO: 4138939 - RNA, 61 nt, Human
ccuuccggcccugauuugcacuacacaguccuagauguagaaaagaagucuggccgggagg

SEQ ID NO: 4138940 - RNA, 65 nt, Human
ccuuccuccucaugcggcagcagcacgaggcugcggcccugaacgcugugcagaggauggagugg

SEQ ID NO: 4138941 - RNA, 84 nt, Human
ccuuccucucauuucccuuuuucagguguugguuccccucucucaaaucagugcaaaggagaggguagugagagaucacgaagg

SEQ ID NO: 4138942 - RNA, 77 nt, Human
ccuuccugcuucuggccuuuuaucucaggcugagaccacagccacugugagaggaccagggaguaauuccuggaggg

SEQ ID NO: 4138943 - RNA, 63 nt, Human
ccuuccuuuaugucuuaggcuguuuaugagacccauucuucuccacugucacauaaaggaagg

SEQ ID NO: 4138944 - RNA, 59 nt, Human
ccuucgaagaaaacccaggaagacccaugcaauagauuccugggacucaacuuagaagg

SEQ ID NO: 4138945 - RNA, 55 nt, Human
ccuucgaccccagaccaauggcuguauuuguaagacagcugucugaggucugagg

SEQ ID NO: 4138946 - RNA, 69 nt, Human
ccuucgcugccagcacaguucagcugugccguccccagcgcugcggugccuguagcuggugugcggagg

SEQ ID NO: 4138947 - RNA, 70 nt, Human
ccuucuaagagaguacaagcaauuuaauaagaaaacugucuccacggugaaguugcuugaaccugggagg

SEQ ID NO: 4138948 - RNA, 81 nt, Human
ccuucuacugaguguggagucugcguacccuccgggcuaguggauggccaggguggcguagaugcugggcucagcuggagg

SEQ ID NO: 4138949 - RNA, 63 nt, Human
ccuucuagccugcgccagggcagaccccuugcucaccccguccuuggugcucugcugggaugg

SEQ ID NO: 4138950 - RNA, 89 nt, Human
ccuucuauacaaagugagaugucugggccaauggagugcaccccccuagagccugcacccucucagaaaucccacucuguguacugagg

SEQ ID NO: 4138951 - RNA, 70 nt, Human
ccuucuauuccugcauggauugaggcuauuguggaccacaugcauggcccaggaaucaggcugugggagg

SEQ ID NO: 4138952 - RNA, 71 nt, Human
ccuucucaccagguguaaagugguuaguuaaacaucuaacuuuggccacaaguacccugaagcagagaagg

SEQ ID NO: 4138953 - RNA, 82 nt, Human
ccuucucguugcugcagcuauguaacagugccauggagggaguucccuguucuuugcacugugcaagcagaagccgagaggg

SEQ ID NO: 4138954 - RNA, 83 nt, Human
ccuucucucauaguuacuuugacuuagucuauagucaugggugcuucaugaaaaauuuacuguuaacaaauugugaauaaagg

SEQ ID NO: 4138955 - RNA, 61 nt, Human
ccuucucugucaauggggguaauaagauaagcauucuuggccccauuuuacagaugaaagg

SEQ ID NO: 4138956 - RNA, 65 nt, Human
ccuucugcauuauuggggccuguuucuucauucuuagaaggcaggccaauaaguagugccuuagg

SEQ ID NO: 4138957 - RNA, 72 nt, Human
ccuucugccgucugagugugucuaaucuuucucugccgcuaucuuagaagaacauuuaugauggcauuuagg

SEQ ID NO: 4138958 - RNA, 101 nt, Human
ccuucuucccucaaagaaaggguugugucuuaagcugguucccucaggggaacacccggagacauagauuuaagagcaauuaguuaauugggaggugaagg

SEQ ID NO: 4138959 - RNA, 64 nt, Human
ccuucuucuggacaggcagcucccgaggcagccccgcacuaaggcagcgccgccagucagaagg

SEQ ID NO: 4138960 - RNA, 73 nt, Human
ccuucuugcccucaggcuuccagcuggguuuggcaaaugggagacacagcuaggaaaccagagggcaggaagg

SEQ ID NO: 4138961 - RNA, 73 nt, Human
ccuucuuguugcugggugcuauuaugaacaguagaagcagcagcuguaauaaugaggcauccagccauggagg

SEQ ID NO: 4138962 - RNA, 71 nt, Human
ccuugaaccugggaggcggagguuguagugagccaagauggcaccauugcacuccagccucccauaauagg

SEQ ID NO: 4138963 - RNA, 60 nt, Human
ccuugaaggccaccuuauuggaacgugagguccugcccucggccaauguuggccccaagg

SEQ ID NO: 4138964 - RNA, 87 nt, Human
ccuugacgucuuuaagcuaauggccguuugcaucugugucuucaaacagauccugguuacagccauuuugugugauucacuucgggg

SEQ ID NO: 4138965 - RNA, 65 nt, Human
ccuugacucuuggugauuacuggguuaugcauguaaacaguacaacuccacaagacuagucaagg

SEQ ID NO: 4138966 - RNA, 78 nt, Human
ccuugaggccaggaaagcaaaaucacccacgauguuaaacaguuuggaugagucacugcuccuuuuugcgccucaagg

SEQ ID NO: 4138967 - RNA, 70 nt, Human
ccuugcaagguuucucucugccuaaaugagucuccauugcaggcgauagaguaggagaggccuugugggg

SEQ ID NO: 4138968 - RNA, 81 nt, Human
ccuugcagagauaagaagccgguaggggauucauaggcuuggcccuaggagcccccuggacugagcuccuugaggccaagg

SEQ ID NO: 4138969 - RNA, 64 nt, Human
ccuugcccacucuguuucccaagauucuaucuuugguucuagggagcucuagcagugguaaagg

SEQ ID NO: 4138970 - RNA, 58 nt, Human
ccuugccccagugcacugcuuuaguuguuugaaaaaggcugccagaaauuggguaagg

SEQ ID NO: 4138971 - RNA, 95 nt, Human
ccuugccuagcagcacauuuuucuugaguaucuucuguuguaccugugcugguacacaaagauaagucagaaagucacaguuccugccuucaagg

SEQ ID NO: 4138972 - RNA, 86 nt, Human
ccuugcgcccggccggccugcugcucacagucccuccacguacccacaggaggcccagacucagcggggcgggugcaagcgcgggg

SEQ ID NO: 4138973 - RNA, 64 nt, Human
ccuugcugugugucagucacugguaaggauuucuccaagcacuuccaguacugcacacucaagg

SEQ ID NO: 4138974 - RNA, 105 nt, Human
ccuuggagaagagccauguggcgcuggcauaggcuuguggggaaagugccuccuucagcugcuguggccacaucuggcucugauuuuuuuuuuuucucccugagg

SEQ ID NO: 4138975 - RNA, 56 nt, Human
ccuuggagagugugaggcucugggcucugaaugcccagaccuugugcugcccuugg

SEQ ID NO: 4138976 - RNA, 66 nt, Human
ccuuggcuuaggucacuggaccuccaggacucaccuggugcugggcaccagugccugcaggagagg

SEQ ID NO: 4138977 - RNA, 92 nt, Human
ccuugggaguuaggauuuuaacaugugaauuuuggaaggacacaaauguucaguccuuaccagccaccauguaaaguccuaccacccugagg

SEQ ID NO: 4138978 - RNA, 90 nt, Human
ccuuggggcggucgcucugcagauuucaugcgaaauggggucaaaaggccgcgcagaagcguggagucugcaggggaaggcuccccgggg

SEQ ID NO: 4138979 - RNA, 84 nt, Human
ccuugggggcuguugcagggcuuggggauuacagccuguuuucagcaucccuauuuaaagcccagcuucucaguguucccgagg

SEQ ID NO: 4138980 - RNA, 107 nt, Human
ccuuggguauugucagaguagaggaggcuggguccagauaauaaaagacuuugaguguaacaguugcuuucauuuguuuggaagaugcuuuuuccucuuaccuuagg

SEQ ID NO: 4138981 - RNA, 89 nt, Human
cccucagcccugaagccuaugggacccugaggccccugcucugcuccaggcccccagcaccaggccauggggucccugcucagggaggg

SEQ ID NO: 4138982 - RNA, 65 nt, Human
cccucaguccccuuaggcuuucagagcggccauagaggugguggcuggacucaggggacucaggg

SEQ ID NO: 4138983 - RNA, 59 nt, Human
cccucaguguguuuggggugaggcaguggguucugccucccacgaccacacauuggagg

SEQ ID NO: 4138984 - RNA, 62 nt, Human
cccucauaugcacauuugugcugccaacccgauggucagcaagauggugaaugagacgaagg

SEQ ID NO: 4138985 - RNA, 99 nt, Human
cccucauuaauuuaagccuaaaagugcauucgaaaguccauccuccugugugauuguaaggaugaugcacuggucacuuuggcaucugaaccaauaggg

SEQ ID NO: 4138986 - RNA, 55 nt, Human
cccuccagcucaaagcaaccggcaaagcuaggcuuuuguugagagacugagaggg

SEQ ID NO: 4138987 - RNA, 81 nt, Human
cccuccauuuuuagcuuggucaagucuuaaagaaaaauugaguguaaguaauuuuucggcuuagacccaguugaacuaggg

SEQ ID NO: 4138988 - RNA, 65 nt, Human
cccuccuaagccaugcaagccacaaggugauuuucuuccccuaugugauagcugguugugggggg

SEQ ID NO: 4138989 - RNA, 76 nt, Human
cccuccuaccauuccucuagcuucucacuaacauguauguugugaaacagaguugagguacaugguccuaggaggg

SEQ ID NO: 4138990 - RNA, 85 nt, Human
cccuccuccacccaauuauuccuguuccccaucaccacaguaccaccuggguggcaggauuggcaggaguggguaaggggaaggg

SEQ ID NO: 4138991 - RNA, 127 nt, Human
cccuccucugggacccauagcuucccacagaguuuggccaaggggaugcugaagauguuggugcuuccccugcugcagccagcaucgacuuccugccugaacuuugaguggaggaauuagaggaggg

SEQ ID NO: 4138992 - RNA, 79 nt, Human
cccucgcccgcagugccuggccggcuuccauuucuccuugagguggcugagcuggccggagcguucgcgggcugagagg

SEQ ID NO: 4138993 - RNA, 65 nt, Human
cccucgggcgcugggccugaggcguagcagggacugcacagagcaggcaccagcggccucgaggg

SEQ ID NO: 4138994 - RNA, 85 nt, Human
cccucucaggcccacagguuggggacuuaggaugacuuagaaugaaagucagcuuagacucccugccuggccaggcugaggaggg

SEQ ID NO: 4138995 - RNA, 108 nt, Human
cccucuccacgugccuccgugugggugcgcugggcugcuguguuccugaggcaccggugggugcgugacgauggcagcucccacccagcagagccgcgaacagaaggg

SEQ ID NO: 4138996 - RNA, 56 nt, Human
cccucuccauuuuccccagaaauaguuuuacuguaggggugagauguaggagaggg

SEQ ID NO: 4138997 - RNA, 65 nt, Human
cccucucccauuaggacaaccaaaagugucucuagacguugccgaauguuuccugaggugaaggg

SEQ ID NO: 4138998 - RNA, 58 nt, Human
cccucuccuggcugcauggagcaccuccaccacggugcaccccgcuugagagagaggg

SEQ ID NO: 4138999 - RNA, 103 nt, Human
cccucuggggucccauuggcccugcuggagggaggaggcugcuauuggggcccccucagccacaaccccaagccuacucgcuuggccugggacuccagggugg

SEQ ID NO: 4139000 - RNA, 76 nt, Human
ccgagguagggcagagcaggggcugaaccuggauccaacucccaaguguaggacuugcucugugaagccuucuugg

SEQ ID NO: 4139001 - RNA, 88 nt, Human
ccgauagacccucuuccuuaccuggcacuauggggagaaaaacuuccaaucuugucauuuggugccaggaaagauucauggucucugg

SEQ ID NO: 4139002 - RNA, 61 nt, Human
ccgcaccaccgcgcgcgcccgcucugcgccugcgcgcaggcaaugcuccgcgggggcgcgg

SEQ ID NO: 4139003 - RNA, 66 nt, Human
ccgcaccaggcuucccucaagauaaguuaaccuuggggacugggcuagaguggaagcugguggagg

SEQ ID NO: 4139004 - RNA, 70 nt, Human
ccgcagacccuuucugcaugcuuaucucaucagauugaaacucugcacugcgguaagguggaaauugugg

SEQ ID NO: 4139005 - RNA, 89 nt, Human
ccgccacguaccuaguuaccaguugcccuuugugucugcguguuugcauauuuagaaauaaaucugcagcuggggcuuuuugguggugg

SEQ ID NO: 4139006 - RNA, 64 nt, Human
ccgccagagccugccaccuuucucccugcugcuugcggugagguccugagaggcuugugggugg

SEQ ID NO: 4139007 - RNA, 77 nt, Human
ccgccagccccuucagcucggccuaggcccacggucagcccaggggagcugggggcugcagccgggugggugagugg

SEQ ID NO: 4139008 - RNA, 102 nt, Human
ccgccagcugcaucagaucccuccagggccucauugucaguccuguaaucuuuucauccgugauaggaugggccgugggcccuugugggugaagcucggcgg

SEQ ID NO: 4139009 - RNA, 69 nt, Human
ccgccaucccgcgggguugagcccucguggucugagccccagaacuagagaaacgccgugggaggaugg

SEQ ID NO: 4139010 - RNA, 76 nt, Human
ccgcccggacccugagggaugagaguugcagccuagaaaaccaggugccaggcccugcggggucccacgcgggcgg

SEQ ID NO: 4139011 - RNA, 65 nt, Human
ccgcccuaggcacugaggggagcaagguggacaaugacaucggccuagcucccguggguuggugg

SEQ ID NO: 4139012 - RNA, 70 nt, Human
ccgccgggcucgggcagcgugggcgaguggcggggggucccggccccacugcugcgccgggcgccggcgg

SEQ ID NO: 4139013 - RNA, 81 nt, Human
ccgccuacacgcgccagcaggucuuggagcuggagaaggaauuucacuacaaccgcuaccugacacggcgccggagggugg

SEQ ID NO: 4139014 - RNA, 75 nt, Human
ccgcgccccccgccgccccgauccgggccggcaugaugugccuggaaugcgccucggcggcggcgggcggcgcgg

SEQ ID NO: 4139015 - RNA, 59 nt, Human
ccgcgggaggcuguucuggggcugauauuaauugggucagucccaacagcuucuccugg

SEQ ID NO: 4139016 - RNA, 103 nt, Human
ccgcggucggugggugcgggccacgugguggcgaaggugcgcgcaguggaugcggacucaggcuacaacgcguggcuuucauaugaauugcagccggcggcgg

SEQ ID NO: 4139017 - RNA, 65 nt, Human
ccgcucaaggggugcuguuggaaacccagcuucugaggguggguguuuaaaagacccuagagugg

SEQ ID NO: 4139018 - RNA, 98 nt, Human
ccgcucaguagggagcacacggccaagguacauauuuucaucccaccauccuuuccagauuauuuugcacuuggcugugaucucuaggcccagagugg

SEQ ID NO: 4139019 - RNA, 56 nt, Human
ccgcucugcacuaguggucauauguccaagguacgugacagcauagagcagggagg

SEQ ID NO: 4139020 - RNA, 81 nt, Human
ccgcuuucccucuggaccaccucccgcugcguuuccuacucagagaaacagcaagggcggggucaagacacgggaugacgg

SEQ ID NO: 4139021 - RNA, 57 nt, Human
ccgcuuucugugauugcagccucuccggaugcccgaucgcugcagcagagaaacugg

SEQ ID NO: 4139022 - RNA, 65 nt, Human
ccgcuuuuucugugccuuucagaugucucucucuuucuugacauuucaagauauuuaaaaggugg

SEQ ID NO: 4139023 - RNA, 73 nt, Human
ccggaagaggcggcccaaggccaaggccagagagcgucaggccugccagcugugggccagccucccuccccgg

SEQ ID NO: 4139024 - RNA, 101 nt, Human
ccggaaguagaauggggucugagaggaggcagccucggauaauggggacaagcagccuugaggcaauguuucuucuaucuuacagcccuauuauccuuugg

SEQ ID NO: 4139025 - RNA, 97 nt, Human
ccggagcccaaggauugcuguguccacagaggagccagcacacugugacaugccggcaucgugaucuggaauucccugugguacacguggguucugg

SEQ ID NO: 4139026 - RNA, 64 nt, Human
ccggaggccgccugggagaagccagaaaccgcagggcuuccugccucgggcuggccgacuccgg

SEQ ID NO: 4139027 - RNA, 92 nt, Human
ccggaggggagcgcgucuagccugggcuccggcggccucaggcugaggagggagcagcaagccgcucggagcccagccacggaccccugugg

SEQ ID NO: 4139028 - RNA, 82 nt, Human
ccggagugggaagagguggcaggaaggggaucugaggaggagaacagggguccugguggucugugcuucuucccagacacgg

SEQ ID NO: 4139029 - RNA, 64 nt, Human
ccggauugucaucuccuggcgccuggauggauucacggccagagcaccagugggagacaagagg

SEQ ID NO: 4139030 - RNA, 66 nt, Human
ccggcaaaggccccuuccccaggacagaggugugguggcacagugcugggggccagggaccgcugg

SEQ ID NO: 4139031 - RNA, 67 nt, Human
ccggccacugggacacguugugcuuuaacaagaucgaaauugauugcugccagcguguccgugucgg

SEQ ID NO: 4139032 - RNA, 76 nt, Human
ccggccagggccugagggcugcucugcuggcagcgaagaccuugacacacugcagacggcccuggcccucgcgcgg

SEQ ID NO: 4139033 - RNA, 93 nt, Human
ccggccggcuccgcccccaagcccuggacggcccuucccccagcccgccuggcugggggccgcugcacaccggggguggaaguggggagccgg

SEQ ID NO: 4139034 - RNA, 66 nt, Human
ccggcgcagcuucagggccaggagggcggccccgugcacguccccaugaacuuguggcugcuccgg

SEQ ID NO: 4139035 - RNA, 63 nt, Human
ccggcgcgccucggaggcuuaucaggcuccccgcacgccccgcaagcuuccuugggcgcccgg

SEQ ID NO: 4139036 - RNA, 98 nt, Human
ccggcuaccgcugccccgagccgcagugcgcgcuggccuucgccaagaagcaccagcucaaggugcaccugcucacgcacggcggcggucagggccgg

SEQ ID NO: 4139037 - RNA, 62 nt, Human
ccggcugguuaggugagggugcgccagcaucagccuggcuggcuccaccuagguagcuccgg

SEQ ID NO: 4139038 - RNA, 89 nt, Human
ccggcuugccugggacugaggcauuuccaaggaugcaggacuucaaauguuaaacccaggaaagucucaggcaaaccaggacaaguggg

SEQ ID NO: 4139039 - RNA, 115 nt, Human
ccgggccaucgccgggcccgguuucacuguuaagggguuuucguuuguuccguuuucgccuccuguagagcugaacgggaauuccccgaagggugcuggggaacggguggccugg

SEQ ID NO: 4139040 - RNA, 90 nt, Human
ccugccauuuugacuuugguuagagguaaaaacauuaaguucugggauuugucauuaccauugcugccuucugagaaguuaaauggcagg

SEQ ID NO: 4139041 - RNA, 59 nt, Human
ccugcccaucccguccuuggccugagaaaggacaggcacugaggacggaugugggccgg

SEQ ID NO: 4139042 - RNA, 78 nt, Human
ccugcccauuauuccuuugaacuuggggauauuaggagaaagcaauguauccuggcaagcagaggagaacugaacagg

SEQ ID NO: 4139043 - RNA, 65 nt, Human
ccugcccuccccagccgugaaggagaggaggagccccuccgccuggugcaggcuggggaggcagg

SEQ ID NO: 4139044 - RNA, 65 nt, Human
ccugcccugccccaggcggcuucacucaccuggacuugaggggcuguagagggagcagggucagg

SEQ ID NO: 4139045 - RNA, 70 nt, Human
ccugccuacccuugcuugcccagucacaggccuggaaacacaggccuugcccugagcaggggucagcggg

SEQ ID NO: 4139046 - RNA, 57 nt, Human
ccugccuagggagggccucucugccugaguguggguggaggucucugucugggcagg

SEQ ID NO: 4139047 - RNA, 86 nt, Human
ccugccucggccucccaaagugcaaggauuacaggcaugagccacugugcccagccccuaauuuguguauuuuuaguagaggcagg

SEQ ID NO: 4139048 - RNA, 122 nt, Human
ccugccucuaaaugucaagagugucucaguugagggucuugcaaaaguagcaauuccuucucucuuuggcaugguccucacuauaaucauucugauaucaauuaaggauaauaaaaaucagg

SEQ ID NO: 4139049 - RNA, 64 nt, Human
ccugccucuggauguucuucugcaauuauggugccagccaugcuacaggaagacgucaggcagg

SEQ ID NO: 4139050 - RNA, 71 nt, Human
ccugccucugugcuauucauccacucacccaucacuaaauauucccugagugccuacggcacaggcgcagg

SEQ ID NO: 4139051 - RNA, 90 nt, Human
ccugccugaauccucugcugggauguaaagucuucuaaagcaggccugcacagggcuuuacuucucaguucuauggggacacaggauagg

SEQ ID NO: 4139052 - RNA, 77 nt, Human
ccugccugccaggccauucccagaguugcucuguccuggacagcuuggcagcugugaagugccucacacagugcagg

SEQ ID NO: 4139053 - RNA, 60 nt, Human
ccugccuguaagauggguacaauaguauccacagugcacagugccucuucuucagguagg

SEQ ID NO: 4139054 - RNA, 59 nt, Human
ccugccuuccaucuugugaaggaaugaggcugcucuaccugcaggaugcugaagccagg

SEQ ID NO: 4139055 - RNA, 105 nt, Human
ccugccuugaaacugucuguccuggugcagucaauguccucggcucuguggagguccaaguccacagggcacaagggagguuggggggaggaaugucaggguggg

SEQ ID NO: 4139056 - RNA, 104 nt, Human
ccugcgaggcacucgccgacccucccagcaguggaacuacccagggacaugaugaauggcuccucacugggcacuuuggagacagggugggaguagcaaguggg

SEQ ID NO: 4139057 - RNA, 77 nt, Human
ccugcgcuugcuggagcggagcgggugucagcagucaggagccuuaccccgugcacucugucuaguggaagcucagg

SEQ ID NO: 4139058 - RNA, 130 nt, Human
ccugcgggaaggagaggcuggugggaggaaagaagccuuguugagcaucuacugcagucccgcccuggggcuauggcugggagcuggacaggccggguccuugcccuccuggggccugccuucuaguggg

SEQ ID NO: 4139059 - RNA, 62 nt, Human
ccugcgggaaugguuucuaucuccgucugcguuuacgagugguggucagcccuuucuggagg

SEQ ID NO: 4139060 - RNA, 101 nt, Human
ccugcgggaugggcaagagacgcggugacggggcccagguuuccuuuaccuggaggaacuccacggucuugucgggcagcuuggugcuuaugaaccgcagg

SEQ ID NO: 4139061 - RNA, 57 nt, Human
ccugcggggguguggggagccuggccuggcccagguccucuccucacccgugucagg

SEQ ID NO: 4139062 - RNA, 63 nt, Human
ccugcuauaucuggacuuuaucaggcaaugagcuaaucagccaaagagacacagguaaguagg

SEQ ID NO: 4139063 - RNA, 70 nt, Human
ccugcuccguggguggauggcucaccuccaggcacccugaggccagccacagccacccucuggaaaaagg

SEQ ID NO: 4139064 - RNA, 87 nt, Human
ccugcucgaguuucauggggugggcgugcagggacacccagcuaauuuauggaauguguacugagugccccuuggaauagaugcagg

SEQ ID NO: 4139065 - RNA, 89 nt, Human
ccugcucggcggccgagccgcuguuccgcagcacccguaacuccaccggguccagcgacagcaggcucaggcgcaggccgcugaacagg

SEQ ID NO: 4139066 - RNA, 73 nt, Human
ccugcucguuggaagcuccaccuaagccuuguugccaggaaaugccacaaggccuguggggcugcuuuguagg

SEQ ID NO: 4139067 - RNA, 58 nt, Human
ccugcugagacccugaggugggccuagaaccucuuccgucucacaggucucagcgagg

SEQ ID NO: 4139068 - RNA, 65 nt, Human
ccugcugcugccuguagccagggugaccagugggcuuuuaccuuaagcagcagguagacaguggg

SEQ ID NO: 4139069 - RNA, 113 nt, Human
ccugcuggaaaugucuuaagguaggaacacauccuccucuagcacaaagcacaagauuuggcucuuggaagacaggauguguuugcugaaugauugaaauauaucagagcagg

SEQ ID NO: 4139070 - RNA, 58 nt, Human
ccugcugggacuccuauuuuauauauauauauuaguauacuuggugguguuccauagg

SEQ ID NO: 4139071 - RNA, 60 nt, Human
ccugcuguaaugugucuuuauuuguugcucaccauuuaauguuggcuauauugaaguagg

SEQ ID NO: 4139072 - RNA, 55 nt, Human
ccugcuucagacucuuggacgugcucuuaaaugcagauccuggcagucagagagg

SEQ ID NO: 4139073 - RNA, 127 nt, Human
ccuuuguuuaaaccuacuuaauauuaauauuucauauggaaauuagaaaacuauauagguucuggaaaucuuagaaucauuauauuuauuaagcacagugaaauguugauagaugggaaacgagugg

SEQ ID NO: 4139074 - RNA, 63 nt, Human
ccuuuuaguuuaguaugccauucuaccucaauuacagagaaguagauggguuaaagcuauggg

SEQ ID NO: 4139075 - RNA, 59 nt, Human
ccuuuuauagaucaguguguuaccacugaugacaguggaagaaaugcugcuauuagagg

SEQ ID NO: 4139076 - RNA, 81 nt, Human
ccuuuucauuugguugcgucaggagccucauagcagcaugcuacugacaggugauugugaacuaaguguuauagcagaagg

SEQ ID NO: 4139077 - RNA, 57 nt, Human
ccuuuucccauguuucuggagccaagagcauauuuacucuaauaauauggcaaaagg

SEQ ID NO: 4139078 - RNA, 84 nt, Human
ccuuuuccccuuugcuaggucaaaugcauguugaucauacacguauguaugauauauguguugagcuugcgguuggggaugggg

SEQ ID NO: 4139079 - RNA, 86 nt, Human
ccuuuuccugugcuuaauucucacugaagccagagaguguuaaaugcccaugaggauacaguggaguuaaggaauacaggaagagg

SEQ ID NO: 4139080 - RNA, 75 nt, Human
ccuuuucucugccacagcuucugccuuuggaggcuuacccuuccuaggagcagaacuguuguggaggggaagagg

SEQ ID NO: 4139081 - RNA, 108 nt, Human
ccuuuucuuaaaaaagagucucuuauaauguagccaaauuaagaugaggucaugcuggaguagaauaggcccuuaaucugauauggcuggugucuuuguaagaagagg

SEQ ID NO: 4139082 - RNA, 73 nt, Human
ccuuuucuugauaguugagucuccagcgaaguaggauacuauucuaucugcaugcugagagauucagagaagg

SEQ ID NO: 4139083 - RNA, 55 nt, Human
ccuuuugagaggcagggaccaccucauugccagagcccagagccucuccuaaagg

SEQ ID NO: 4139084 - RNA, 57 nt, Human
ccuuuugcucucccauccagaagggcaccuaaccaggccccuggagcagacaaaagg

SEQ ID NO: 4139085 - RNA, 59 nt, Human
ccuuuugucuaugaaguucuuuaucccauagaaggggugacaggcuaggaggcugaagg

SEQ ID NO: 4139086 - RNA, 98 nt, Human
ccuuuuuagugcuauugugauauggaaagagugcagacuguggaguuaaccacaucuggguucucuucuucauucuucuaucgcgugaccucaagagg

SEQ ID NO: 4139087 - RNA, 79 nt, Human
ccuuuuuuaaaguuuguauuaaauauaacccugagauaauucuucauaaaguuguuuuaaugggaacaucacuggaagg

SEQ ID NO: 4139088 - RNA, 103 nt, Human
cgaaccucuuuauucuugcagccaucuuucuuggaggaaaaagugaaaaaagauguagcaaauccugccagagaggugcuggcaguuuagcuuggcagguuug

SEQ ID NO: 4139089 - RNA, 72 nt, Human
cgaacuccugaccuugugaucugcccaccuuggccucccaaagugcugggauuacagguguuagccaccacg

SEQ ID NO: 4139090 - RNA, 57 nt, Human
cgaagacagaccaucugaguagguuugcuggcaagugaauagaugggcuguuguuug

SEQ ID NO: 4139091 - RNA, 74 nt, Human
cgaaggaaacacuuugccucuuaccuguggugccggcugggcuacuguacugguagggucgagugaagacuuug

SEQ ID NO: 4139092 - RNA, 72 nt, Human
cgaauuuaugugagccuuuucucuggacacagguuaguuucuggagcgugaauggcuaagcacauagacuug

SEQ ID NO: 4139093 - RNA, 56 nt, Human
cgacacuguagauauagaguuaguguaguauuggucucuagagucuauugugcuug

SEQ ID NO: 4139094 - RNA, 77 nt, Human
cgaccgggagcggcaguccuuccaguacaggcucgcaucgcucuaccugcacuaccuggggcugcugcgccgcuucg

SEQ ID NO: 4139095 - RNA, 120 nt, Human
cgagacucccauucagcccacacccucauguaggcacagcaucugagcaccuggcuugugggacaucacaccucacaccucgcaugcugcgucgcucagggugggagcagggagauuucg

SEQ ID NO: 4139096 - RNA, 91 nt, Human
cgagacuuaaagaggucuagcaacuugucuuuguugauaaguggcaaagcuaaaaucaaaacccagacaggcuggacuucagagccccucg

SEQ ID NO: 4139097 - RNA, 79 nt, Human
cgagagagaaucucuuuccaaaggaggaaccaguuuauuuagggagaaaaauugcuuuggaaagagaaaaacucucucg

SEQ ID NO: 4139098 - RNA, 107 nt, Human
cgaggacaaaggacuaagggaugagcagaauguucagauaaauggcuugggugaaccuagaagugacauuuaacaucuguucuucuccugcuucuugcuuuuucuug

SEQ ID NO: 4139099 - RNA, 63 nt, Human
cgaggaggaacgggcgacauuugcccaaguaaauugugcacauguugcuaguuacuugcuuug

SEQ ID NO: 4139100 - RNA, 64 nt, Human
cgaggcuagaagucugagaucaaggugucaguaaggcuguuuuuuucugaggcuucuccccuug

SEQ ID NO: 4139101 - RNA, 57 nt, Human
cgagggaggugguaagccuuggaaaacuguagaggugacaaggccaccauuucuccg

SEQ ID NO: 4139102 - RNA, 66 nt, Human
cuaaacaucuuuacaacagaccuagugcaaauuuagcuaucacuggucugcuagaaagaugcaugg

SEQ ID NO: 4139103 - RNA, 90 nt, Human
cuaaaccaacuagguaagaaaucuagguucauucuugauucuggcaauaacugugagaacuuaauucagugacuuaaccuuugaguuuag

SEQ ID NO: 4139104 - RNA, 77 nt, Human
cuaaagaaaagcaaggggaauaguaggaccugggacagcaguccuaggcccauuaauuccccuugccccucugacag

SEQ ID NO: 4139105 - RNA, 69 nt, Human
cuaaagagaguucaagacuccuuauuugaaaggucaagguuuaugggaaagucauguauucauuuuuag

SEQ ID NO: 4139106 - RNA, 65 nt, Human
cuaaagaucuacagaggcuuuugacauauaacauuacuucucagaagccuuucauggauuauuag

SEQ ID NO: 4139107 - RNA, 58 nt, Human
cuaaagcuucuuuuaccaggaaguugcaauucugcaacugaaugcuggaagaagagag

SEQ ID NO: 4139108 - RNA, 70 nt, Human
cuaaaggccuuucuuaucaguagauucuccuaagcauuuaugaguguaacaggauggaauaggccugggg

SEQ ID NO: 4139109 - RNA, 89 nt, Human
cuaaagggcugcaaagagauguaaauacuugugaauaggaaugauuauacacuguguaaaaugcacuuuuguuugcuguauuccuuuag

SEQ ID NO: 4139110 - RNA, 83 nt, Human
cuaaaggguguguaucucuuagagguguguguguguauguacugugccuuacauguguacuuuuaaggauguguguguuuuag

SEQ ID NO: 4139111 - RNA, 68 nt, Human
cuaaauauaccaguugccugcauccauuauaugauguugaaauaggugccuguucuuggcauauuugg

SEQ ID NO: 4139112 - RNA, 129 nt, Human
cuaaaucgucucuuaaauccucuucagcugucauuuucuagaauuauuugauuuaugguaaauuagaagggugucagaaaaaugauaugugaguacuugaaguggauuuuaguagguuaggaguuguag

SEQ ID NO: 4139113 - RNA, 58 nt, Human
cuaaaucuagucuuuacugauuuagagggacaagccaaauuagaagggacugauuuag

SEQ ID NO: 4139114 - RNA, 99 nt, Human
cuaaauuaauugaagccugugacucuuaaauauacuguugaaugaugccauuggauuguaauauaacaguuugaauauaggugccagugcuauguuuag

SEQ ID NO: 4139115 - RNA, 88 nt, Human
cuaaccaacgcauuuuaagaagaguuaucacuuucaaaguccauuuuugaggaaaggaauuuauuuuaaaaaugauugcguuucuuag

SEQ ID NO: 4139116 - RNA, 73 nt, Human
cuaaccugcuucugcccucacgguaacgugcacaaucuucaucgcauguccuggguggugguaggagcaguag

SEQ ID NO: 4139117 - RNA, 82 nt, Human
cuaacgcucuaagagcaugacauaagugaaaaacaucaauuaaauuuguguaaauauauguuauguauuuggcuucaguuag

SEQ ID NO: 4139118 - RNA, 68 nt, Human
cuaacugggucucuauuuugguuuuggcugccaagaagcucacagccagaucugagagaucuuuauag

SEQ ID NO: 4139119 - RNA, 73 nt, Human
cuaacuucuguucugaguaacugaagguauggcaaggguuugguggugucaggggacuuaggagagaaguuag

SEQ ID NO: 4139120 - RNA, 85 nt, Human
cuaagaaaagugccaaguccacaacauccacacccuccccagugaagcagggugggaaccacaggacucggcacauuucccuuag

SEQ ID NO: 4139121 - RNA, 75 nt, Human
cuaagaaucccuugcaaguuguuguaggucucugauaaguugagauauguacaauucuuuguaagguggucugag

SEQ ID NO: 4139122 - RNA, 89 nt, Human
cuaagagaagccucgcuucagggcaugagggacacauccugauacaaaaugguguuguccucuugcccugacauacaugguuuccuugg

SEQ ID NO: 4139123 - RNA, 82 nt, Human
cuaagaggagauagugcauagggggaugcacagcucuguaaaagauaaugccuccuugcauacccuauguucuguucuguag

SEQ ID NO: 4139124 - RNA, 61 nt, Human
cuaagauagauuuuuucacuuuccucuccugaucuggaagcugaaauaauaucuauguugg

SEQ ID NO: 4139125 - RNA, 100 nt, Human
cuaagauucccaauuauuugcaguuccaaguauaauugugaaaugccaucuuucauaacuuauuagauuggagcuggagugagccuuccaggaauuuugg

SEQ ID NO: 4139126 - RNA, 64 nt, Human
cuaagcagcaggcaaggcagccucugccagccggggccuccuccuggggcuguuccugcgcugg

SEQ ID NO: 4139127 - RNA, 101 nt, Human
cuaagcaggaggaucccuugagcccagaguuugaagauacagugagcuaugaucacgucacuguacuccaaccugggcaacagagugagucccugucuuag

SEQ ID NO: 4139128 - RNA, 92 nt, Human
cuaagccugccgcuugcuuuaccugugguauauuucagcaccauccuccaagcccaaagccacuaaaguggggcacagccuacagguccuag

SEQ ID NO: 4139129 - RNA, 87 nt, Human
cuaaggcaccagguuugacuaggugucaguaacuuugaaauguguguguuaagguccugacuucugcaauagugacuugggacuugg

SEQ ID NO: 4139130 - RNA, 91 nt, Human
cuaagggugagccccaucugaacacagggccuugugugacugcacuggcuacaggccugcucagcuggcccugcucaggaucacaccuuag

SEQ ID NO: 4139131 - RNA, 80 nt, Human
cuaaggguuaauugacuuuguuguuccuugucuaaagagacuuuguucaaggaauaguaaaugaauacauggacccuagg

SEQ ID NO: 4139132 - RNA, 74 nt, Human
cuaaguaaaugguucucaguugguggcaguuuugccccucagggacauuugucaauaacuggagucauuauugg

SEQ ID NO: 4139133 - RNA, 72 nt, Human
cuaaguaggauuaaugccgauuugaggcuuaggaauaaacuuaagccucaaauuggcauuaauuaagcuaag

SEQ ID NO: 4139134 - RNA, 101 nt, Human
cuaaguaggugcucaauaaauauguucugacucuacaugggagcccuuugaacaugaggcugggucccuggagucugaucacauuagguuuaccuucuuag

SEQ ID NO: 4139135 - RNA, 91 nt, Human
cuaaguauuacuagguuugcuuccucauuucugguauuugagaccugagacuugugaaggagaugaagggagugagccgcuaagugcuuag

SEQ ID NO: 4139136 - RNA, 104 nt, Human
cuaagugucauuuucacaucaugauuccuacaguggagaaggcaugaggcuaacagacugggcuagaguuucugucuucccauuaacuugauaagugaccuugg

SEQ ID NO: 4139137 - RNA, 57 nt, Human
cuaaguguuuaaugguuuugaugagucaauuugacuagucaacuagugagcauaugg

SEQ ID NO: 4139138 - RNA, 108 nt, Human
cuaaguugaauuucacugaccugaauugcaugugguauaauacuaacaaaugguucacuauuagcauaucaugaaugguuauacuuuauagaaauuccauagacuugg

SEQ ID NO: 4139139 - RNA, 61 nt, Human
cuaauaucucugugggccacuauuccgcucaggucaggagacaguggccgagagguacuag

SEQ ID NO: 4139140 - RNA, 68 nt, Human
cuaaucucaugagaucugaacugccugagcucucucucccaggaguccucaggggauuuugagauuag

SEQ ID NO: 4139141 - RNA, 84 nt, Human
cuaauggaaauggggaugcucaaguaaagcagagcuggaacaaucaguaguuucauguuaaauugaguuugcaauguccauuag

SEQ ID NO: 4139142 - RNA, 78 nt, Human
cuaauggcacaugaagagagucuaguaaucacauaauuacuuugccauuacuaagaaaucauuuucagaguccaugag

SEQ ID NO: 4139143 - RNA, 71 nt, Human
cuaaugguuaacuggaaugugguaucaguagaaagggacauccuaaacugguaugauauccuugccacuag

SEQ ID NO: 4139144 - RNA, 55 nt, Human
cgggcugcuuuuuucuuagcagauaaagcugaucugcuuauuuaacagcagcaug

SEQ ID NO: 4139145 - RNA, 66 nt, Human
cgggcuuucacagcagggagggacaaggcggaggagcggcuccuguuuuuucuugcgugaggccug

SEQ ID NO: 4139146 - RNA, 59 nt, Human
cggggacacacuggcagcuccuaccaauuagugaccuaacccugccagugugcucuccg

SEQ ID NO: 4139147 - RNA, 57 nt, Human
cggggagagcggccggcugcggacgccggccccgggaaaggcugcucgcucuccccg

SEQ ID NO: 4139148 - RNA, 55 nt, Human
cggggaggaacuggauuuggagccagaagaacugguucuaauaucuacuucccug

SEQ ID NO: 4139149 - RNA, 73 nt, Human
cggggcccagcacuggcugggauccugucccugggcuugcuuggggccacccugauccccgccguggguccug

SEQ ID NO: 4139150 - RNA, 65 nt, Human
cggggcgagcgggcuguggcugggugcuggugggcagacaccaucagagcacaguccgugcccug

SEQ ID NO: 4139151 - RNA, 73 nt, Human
cggggcucaagcuggaguacaucuuuggcggcacuuggcaaccccagccccaggagaucugcgcagugccccg

SEQ ID NO: 4139152 - RNA, 103 nt, Human
cggggcugcggccauggcagccacccuccagcucccgggggcuggggaagacgcugggguccccguggaggcuggagcggcguucagguccugcggucacucg

SEQ ID NO: 4139153 - RNA, 104 nt, Human
cggggcugcuaauaugauugugcugccuggaaaugcaaaagccaugagucgguuaaacaucaaggugaaguuauuuccagcggaucgauugcagcaucuccccg

SEQ ID NO: 4139154 - RNA, 129 nt, Human
cgggggagcuuagugagcagcggcagggcccugcagcccgucacacgcuagcauccaccggguugaguggcugcgcacgaccgcggcgggcgggcgggcgcgcugccggaacgcucuaggccuccugcg

SEQ ID NO: 4139155 - RNA, 74 nt, Human
cgggggcagggcugaugcugcuggccagacauaccggcccccacccugccccagcagcuguggcuuugccucug

SEQ ID NO: 4139156 - RNA, 72 nt, Human
cgggggcggcgucggacuggagccgagcggcagcgcgagcugcccagggcgcugucgugagcucgcccgccg

SEQ ID NO: 4139157 - RNA, 104 nt, Human
cggggugggaggcgguguugaaagacccuuuucagacucagguacccagacuccagggauuuacagaucuaagggucacauucauugcacagacauacaccccg

SEQ ID NO: 4139158 - RNA, 60 nt, Human
cgggguuuggagaaaggggaagacgggauaggaaccaugcauucucugugcuagacucug

SEQ ID NO: 4139159 - RNA, 67 nt, Human
cggguaaaggucgcccucaaggugacccgccuacuuugcgggaugccugggaguugcgaucugcccg

SEQ ID NO: 4139160 - RNA, 90 nt, Human
cgggucagggcugagaacaggcccagccucuguccagggugaaucugggcccagcgggguacugggacaucuguuuuccauccugauucg

SEQ ID NO: 4139161 - RNA, 64 nt, Human
cgggugcagggucuccagcagcugagcucccggagugucaaguugccggaggcuucugugccug

SEQ ID NO: 4139162 - RNA, 71 nt, Human
cgggugcuggaggagaagguugcucauaaguagauugcauaccuauaagccccaaguccuuucagcaccug

SEQ ID NO: 4139163 - RNA, 80 nt, Human
cggguuugcgucuguuacggucugcugguggguugcuuccuccucugccuguauuucuuggacaguugcucuaaagcucg

SEQ ID NO: 4139164 - RNA, 59 nt, Human
cgguagaggcaguauacaauccgagcuauuuggcucuccauccugugcucuucacacug

SEQ ID NO: 4139165 - RNA, 98 nt, Human
cgguagcauucaaccagcccauuagccagucuucugauuacaaaguaguuggagccuguuuuguuuagaaagagauuggugcuuuucagaaugcacug

SEQ ID NO: 4139166 - RNA, 89 nt, Human
cgguagccucuuggagguuucuaugcuguuuaucuuuuuucaagcaaagggaaguaaaaagcaauaggagaacuuucuuuaggccacug

SEQ ID NO: 4139167 - RNA, 93 nt, Human
cgguauguaauaagauuuaaguuguuugccacagggcauuugaaaaaugcaguugggcaggaacagaugcuugaagaguuauuaauuaugcug

SEQ ID NO: 4139168 - RNA, 75 nt, Human
cggugacgacugccaaagauugccuucccaugccauacaaaacagguaaaggucuuuauuggucagccacuacug

SEQ ID NO: 4139169 - RNA, 79 nt, Human
cggugagugggccagugggaacugggucuccggaccaagaagccgugagccugcccuguucacaguggauaacuuucug

SEQ ID NO: 4139170 - RNA, 81 nt, Human
cggugcaguacgcagucuaucaacagcaauaaguguggaugagaaaacuuguguggagagaagaggcagugugcuguguug

SEQ ID NO: 4139171 - RNA, 67 nt, Human
cggugguguaagaaccuucuagagcccucuagcucagcgugggguuucaugguucucacaaugacug

SEQ ID NO: 4139172 - RNA, 75 nt, Human
cgguguaguccaacuguucacuagugaggguugauuagaaauaaucacccuucaugagagaauaguggugaccug

SEQ ID NO: 4139173 - RNA, 58 nt, Human
cgguguuacugggaggacggagguugcgacagcagccgagcccacccaguugcagccg

SEQ ID NO: 4139174 - RNA, 61 nt, Human
cgguuccuccuguuagugccauauuccagcaaaugcaauaggcagcuuagcaggggcucug

SEQ ID NO: 4139175 - RNA, 68 nt, Human
cgguuuccagcuugggccuggggauuggagauguccccacugagaguagggcacaagugaggaaauug

SEQ ID NO: 4139176 - RNA, 81 nt, Human
cgguuuuaggcagaacauggacuuugagaaguuuuaaaaauucuauuauucccacccauguuucccucugucuuuaagcug

SEQ ID NO: 4139177 - RNA, 77 nt, Human
cgguuuucacacauguuuacagucuucagucucuaaauuuucauuuacacuaaggccuugguaggcagugugaacug

SEQ ID NO: 4139178 - RNA, 67 nt, Human
cgguuuuuaaaagauauuguuuuccucagccuuuggcuuucuaacaauguucuuuuagcuugaauug

SEQ ID NO: 4139179 - RNA, 62 nt, Human
cguagaggcaggauggggucauuagggcuuuuccagcccagugccucaggccagccugcacg

SEQ ID NO: 4139180 - RNA, 65 nt, Human
cguagaugaggguacugagguucaguuggugauagggaaagaaaccagcccuuuauccuccuaug

SEQ ID NO: 4139181 - RNA, 69 nt, Human
cguaggauacucagugcucauuauguugaagucagcucuuaagccaguaugagucacugaauccucacg

SEQ ID NO: 4139182 - RNA, 82 nt, Human
cguagggcgacgccgugucccggcacucuucuaugucaaagaaagaggcgccggguacguggcgcucgagguacuccuugcg

SEQ ID NO: 4139183 - RNA, 67 nt, Human
cgucaguuuacuguugccauggcaacacugggacguuacagucccuuuccauggcaaugaucugaug

SEQ ID NO: 4139184 - RNA, 57 nt, Human
cguccauuccuuaaugaaucaggccauuccauuccuggaggcuguuagggagggacg

SEQ ID NO: 4139185 - RNA, 119 nt, Human
cgucgggacgcggcccugggccgggagcgcaggggagucgggcugcagccgagcgagcgcgggccccugccugggucuccuccgcuuccccgcugguaccaggaagaguuugagcgacg

SEQ ID NO: 4139186 - RNA, 67 nt, Human
cgucguccgguacucguauugcgccucgauggccucggggccguagaccacguccgggcucucgacg

SEQ ID NO: 4139187 - RNA, 75 nt, Human
cgucugggaggugaggggcgccucugcccggcugccccuacugggaagugaggagccccucugcccggccagccg

SEQ ID NO: 4139188 - RNA, 89 nt, Human
cgucugugucccacaggagccugagucccacagcacagcagcuagagcauaggcuuuggggucaggcugaccagggcugaacacaggcg

SEQ ID NO: 4139189 - RNA, 64 nt, Human
cuagcuuugccuguuaaucacaaaaggacaaaccuuucaccugcuuguagauaugcgaagcugg

SEQ ID NO: 4139190 - RNA, 60 nt, Human
cuaggaagagaaggaauuccccuucaaaagugacugaaauggaauccuucuuguuuguag

SEQ ID NO: 4139191 - RNA, 129 nt, Human
cuaggaaggugcccaggaugcauguuuuaaggaagcacucacucuuggggcuuugcaaguacaaggcuagcaaugggagaugagugccuccuuaaaguuggcuucuugggccuuguuugccugaccuag

SEQ ID NO: 4139192 - RNA, 58 nt, Human
cuaggaggcccgugcaccagggcuuagcugucugcaagcuuccuugacuggccccuag

SEQ ID NO: 4139193 - RNA, 81 nt, Human
cuaggauucucugcuaucuaucaccugacuaaaaaugccugaacaucagcacaggugcaguuauguacagugaaaaccuag

SEQ ID NO: 4139194 - RNA, 68 nt, Human
cuaggccauauuuugagaacugcuaacagggaauguaaccuuaaaauagauuuuaagaaugugccugg

SEQ ID NO: 4139195 - RNA, 58 nt, Human
cuaggccaucagcauuuaacuugauguuccacugggaauugcagggcugucugccuag

SEQ ID NO: 4139196 - RNA, 66 nt, Human
cuaggcugcauuugaaccaaugucggccuucccuuaggaccagcagagacgguaagcagaacuuag

SEQ ID NO: 4139197 - RNA, 64 nt, Human
cuagggaagaauuugcuuccaagaucccuuauaugguucuuggccagaugcacuuccuccuugg

SEQ ID NO: 4139198 - RNA, 74 nt, Human
cuagggacuucaagacucaaggaacaacacagugcugaguucacuagguuuucuuucagucucauauauucuag

SEQ ID NO: 4139199 - RNA, 80 nt, Human
cuagggauugauuuucaauucauugacaauuuaacaaguucuugcuguugucuuagaauuggaagggacauuccaacugg

SEQ ID NO: 4139200 - RNA, 58 nt, Human
cuagggcagggaguguuugcgccgccagccaucggcagcugggacucgauguugcugg

SEQ ID NO: 4139201 - RNA, 98 nt, Human
cuagggcucaucuacugaaaguaaugucauauuuuagcguuggagcuaucgugaaguauaugcuaaaaacuugaucauuauaguaggguuggcuuugg

SEQ ID NO: 4139202 - RNA, 66 nt, Human
cuaggguaugaauuugguguacagguugaacagucuguguauaaaauugccaaauccaugcccagg

SEQ ID NO: 4139203 - RNA, 78 nt, Human
cuagguccccaaaggaaauacuaaucuggaaucauuuaaaauuaaauucaagguuugagguuuucuuuuacuaccuag

SEQ ID NO: 4139204 - RNA, 57 nt, Human
cuaggucccugggggcuaaugugggucuuggagccacagggccagccugggaccugg

SEQ ID NO: 4139205 - RNA, 76 nt, Human
cuagguccucccuuuggcugucacuuguccaucugcagcaggcgaggacuguggccuuggaccaugggagaccugg

SEQ ID NO: 4139206 - RNA, 88 nt, Human
cuaggugaauauauuggugaaaauaguucagauaaacauacaaccauguauguaaaaguauuuaucaucaaugcauuauuuguaguag

SEQ ID NO: 4139207 - RNA, 56 nt, Human
cuagguggugggaagcguauuguguuugaacuuagcaaucugaaucccaguccuag

SEQ ID NO: 4139208 - RNA, 83 nt, Human
cuaguacuuugaguggcaauugacaacaaaggaguguaagaucagaaguuuccuuccaaaguuaaaugucacccugaagcuag

SEQ ID NO: 4139209 - RNA, 55 nt, Human
cuaguagguuaguaaugguggagcuccagggcucuauacauacugcagccucugg

SEQ ID NO: 4139210 - RNA, 83 nt, Human
cuaguagguuggugcaaauguaauugugauuuuugccauugaaaguaauaacaaaaacaauuauuuuuguaccaaccuaauag

SEQ ID NO: 4139211 - RNA, 58 nt, Human
cuagucagagucuauugcugugguuacacagaaaugaccaaguggugggcuguggugg

SEQ ID NO: 4139212 - RNA, 56 nt, Human
cuagugaccacacgucuggaauugugcaaugggccaguacuugguugugguuauag

SEQ ID NO: 4139213 - RNA, 58 nt, Human
cuagugaccuuggaaaauuuuuuaccucagauaauuuaaaaucaccuuaggucacugg

SEQ ID NO: 4139214 - RNA, 70 nt, Human
cuagugagagguguggccaggacucaagcuggaucugucccugcauuggcugugcuauaccaccuccugg

SEQ ID NO: 4139215 - RNA, 97 nt, Human
cuagugccaauuuggggagccguggugaguucugucuaagauauguuuacaaaaagaaucuaaaagauaacacacaugagucuccccauuggccuag

SEQ ID NO: 4139216 - RNA, 58 nt, Human
cuagugcucuaggggcugaaggugggcucaagcccuaacuucagccccagugcucuag

SEQ ID NO: 4139217 - RNA, 130 nt, Human
cuaguggaauaacaugaagaaacaucaaugcuauggcauuugaaucugucuuuugaacacgaucagugcaguagaaguaucaggaagauucucagugugcucagaugugccuccaucucuauuugccuag

SEQ ID NO: 4139218 - RNA, 70 nt, Human
cuagugucaaaguuaugaaugauaagauuugcuucaauagguaaauucucuucuccuguaaugucacugg

SEQ ID NO: 4139219 - RNA, 61 nt, Human
cuacuuugugcugacauuugggucauaaugaaaaugugauaagacaguaggcacaaggcag

SEQ ID NO: 4139220 - RNA, 71 nt, Human
cuacuuuuccuggaaacaaggacuuugaacaugagccccguguucaauagagccuucuuucagguggaugg

SEQ ID NO: 4139221 - RNA, 86 nt, Human
cuagaaagaagcuuucugagaaacugcuuugugauguguguauucacuucacagaguuaaaaguuucuuuugaaucagcacuuugg

SEQ ID NO: 4139222 - RNA, 62 nt, Human
cuagaaagcagcuucccuggcuccuggugcaucgcaugaggaguggcagggcugcucccuag

SEQ ID NO: 4139223 - RNA, 55 nt, Human
cuagaagguaggcagggaucagugacaacgcugcugcuguaucaugccuucaugg

SEQ ID NO: 4139224 - RNA, 57 nt, Human
cuagaauucauaggaaguuuccuagggauagcucaauccuuuaggaaggugaacuag

SEQ ID NO: 4139225 - RNA, 66 nt, Human
cuagaauuggggcaaggacagguauggcagggauccagccuccagggccaguccuugucugucugg

SEQ ID NO: 4139226 - RNA, 80 nt, Human
cuagacuccuuauguaaguggagucauauagcacuuacuuccugugacuggcuuauuucacuuagcauaauaucuucaag

SEQ ID NO: 4139227 - RNA, 76 nt, Human
cuagacugaauuuuaaagguuugcaaaucauacaucuaagaauuagaaguaguaaaucauaaaauuugagcucugg

SEQ ID NO: 4139228 - RNA, 63 nt, Human
cuagacuugggaccuaggaauggaggguaucauugaucaucccccuaaagccccaggauuuag

SEQ ID NO: 4139229 - RNA, 77 nt, Human
cuagacuuucagugucgggcuacucucagcagcugagcccugggacaagggacggggguggucaucugaaggucugg

SEQ ID NO: 4139230 - RNA, 84 nt, Human
cuagagagagcuuagauccugcgacucacccagcgaggaaaaccagcugggaagaggaugaggcauaugagccccacucucuag

SEQ ID NO: 4139231 - RNA, 65 nt, Human
cuagagaugugggcaauggaauggagaaguagggccacaucaccacacaaugucccacaucauag

SEQ ID NO: 4139232 - RNA, 73 nt, Human
cuagaggaguggguuagugcuuauuuucacagauuguauaaauaacaggccugcuauugcuucuuucuucuag

SEQ ID NO: 4139233 - RNA, 81 nt, Human
cuagaggaugauauaauagaaagaaguuuuggauccaggcagacaguccuggacuugauauucucuuuccccauuuucuag

SEQ ID NO: 4139234 - RNA, 59 nt, Human
cuagagggcagcagcaacaacucuuuacaaagggcucugaagccugcaugccacuccgg

SEQ ID NO: 4139235 - RNA, 72 nt, Human
cuagaguacuguuauguuauuacccauguggcguuuugaccacaggauuauuagucugacagguugucuugg

SEQ ID NO: 4139236 - RNA, 68 nt, Human
cuagagugugagggauuaaaugagcagggauuuuguuuauuuuguucacuauaucccucagugucuag

SEQ ID NO: 4139237 - RNA, 102 nt, Human
cuagauauuuuacuguucauucccugucucuucaauccuguggcccuuauucagccucccagguaucaggguagaagaguauaagaaauacaaauuauuuag

SEQ ID NO: 4139238 - RNA, 62 nt, Human
cuagaugccaauuuuuauggaugucagcccaacgauauuccauaaaguauuuggcaaucugg

SEQ ID NO: 4139239 - RNA, 79 nt, Human
cuagccuauagaguugaguuuuagaagaagccuuucggauacugaaaacaaggcacugaacuuaaauucugcagacugg

SEQ ID NO: 4139240 - RNA, 77 nt, Human
ccugcagcaugccaugcagcccuccugaggcccuacagagcaggcagccaugggaggucugcaaggugcugugcagg

SEQ ID NO: 4139241 - RNA, 79 nt, Human
ccugcaggaguuuuguguuuucuguuuucucuuuaucuuuuuaggguaucuuuggaaagccaagcacagcuuguuuagg

SEQ ID NO: 4139242 - RNA, 79 nt, Human
ccugcaggccccugugucuucguggagggguuuggggugguggacccacagccuugagcgaggacaaggccuggcuagg

SEQ ID NO: 4139243 - RNA, 61 nt, Human
ccugcaggccuguggggagagaucucuuagggccagcugcccugagcccccagccugcagg

SEQ ID NO: 4139244 - RNA, 61 nt, Human
ccugcagucuuccuuccuuaggcuccccagggagggccugagagcacagaaagacaguagg

SEQ ID NO: 4139245 - RNA, 82 nt, Human
ccugcauggauuugauagcuccuuccuuccuguaaggcacuuaggcucuuaagggagguaaagcuauuuaaauaaugaaugg

SEQ ID NO: 4139246 - RNA, 91 nt, Human
ccugcaugggaguggcggggaggccgagggccacuccccagggaaagggcuccucagggcuuucggcacucugagggcuccauaaugcagg

SEQ ID NO: 4139247 - RNA, 72 nt, Human
ccugcauguauaugcauauagaugcacacacauauggaugagugugcuaacuaaauguauuagcuaaauagg

SEQ ID NO: 4139248 - RNA, 62 nt, Human
ccugccaacgucccaaaugagaaucugcauuuaauaauguaguucacaauugguacugaagg

SEQ ID NO: 4139249 - RNA, 80 nt, Human
ccugccacacccacucggcagccuauagucacauggcuacaaguagcugugggaauacugcgaguguaguuuuuggcagg

SEQ ID NO: 4139250 - RNA, 58 nt, Human
ccugccagcgcuuaucucucggcauggucugaugggccgaaugggagugggagucagg

SEQ ID NO: 4139251 - RNA, 56 nt, Human
ccugccagcuggguaccuucaucucuaaccuucugauaaagcugcccucaggcagg

SEQ ID NO: 4139252 - RNA, 76 nt, Human
ccugccaggggcuccuagacugucagaguguggagugguugcugcaucugcuggcaucucuagcccaccugucagg

SEQ ID NO: 4139253 - RNA, 72 nt, Human
ccugccaugugauuugaugcugucuuucagaaucacuaucaguggccccugaggagcgucagccaugguagg

SEQ ID NO: 4139254 - RNA, 111 nt, Human
ccugccccgucaccuggugcgcgucuucccgcagcccagcagggcccggagcggcggggacggugccucugucagcagggccugugggagggaggcugggggcuggguggg

SEQ ID NO: 4139255 - RNA, 55 nt, Human
ccugcccggcggggacccggacgacggcgacgugccccuggcccugcugcgcggg

SEQ ID NO: 4139256 - RNA, 83 nt, Human
ccugcccuccucacaggcugaaaggagcugcugacgucauuaaaucaauaacuuuguuuagcauuguguuuucugggggcagg

SEQ ID NO: 4139257 - RNA, 99 nt, Human
ccugcccuucucccucagggcaccccagggcaguaccgcccucuggcccagcugaugggccgggccaggcuccccuggcuucccaaguggaggaggagg

SEQ ID NO: 4139258 - RNA, 89 nt, Human
ccugccuaugcugggaagggagucucugcucucauucccuguuaaacacagagaagagagccgcgggacaucagccuccagaagguagg

SEQ ID NO: 4139259 - RNA, 103 nt, Human
ccugccuccagcuccccuggcagcccaaccuagagucucucgggguaaacucagaguccaggaggcucaggaggagcugccggaggcugugcggaggccuagg

SEQ ID NO: 4139260 - RNA, 81 nt, Human
ccugccugaugagauauacucugaacuccaggaggcucauccaggugagccccaggaggacaggggcaucucaauggaagg

SEQ ID NO: 4139261 - RNA, 60 nt, Human
ccugccugcucaccagugugccuuuauuaguucgguggagaaaccucgguaagcaggagg

SEQ ID NO: 4139262 - RNA, 69 nt, Human
ccugccuggcacuguagccacuacugccuugagccaaggccagaggaggccugcaggggcuggagcagg

SEQ ID NO: 4139263 - RNA, 77 nt, Human
ccugccugguccccaucggcccagcgcccacccagccuuggcuuuugcccgugggccguugggagcgccagcgcggg

SEQ ID NO: 4139264 - RNA, 57 nt, Human
ccugccugguguaagucuaagguugcaagaaaggugaggagucuggcaccagguagg

SEQ ID NO: 4139265 - RNA, 62 nt, Human
ccugccugucuuuauccccuguagauacccacugucuauccaagggccuggaguacagcagg

SEQ ID NO: 4139266 - RNA, 78 nt, Human
ccugccuuauaagaccccagggaccuggcaccugcaaccauagcaggaggcaggagccagcguuccucaggauucagg

SEQ ID NO: 4139267 - RNA, 85 nt, Human
ccugccuucucucuggauguaacuuuccuaguccauauccuggcccaugaggacauggaaaucagguucauccaagaggcucagg

SEQ ID NO: 4139268 - RNA, 61 nt, Human
ccugccuuuccugccccaucugcccagucugccuugcagaugagggcuggaggugagcagg

SEQ ID NO: 4139269 - RNA, 81 nt, Human
ccugcggccucacuucuucccugaagaccucaugugacaggaguacugcccuauaccaggagggaaggaaugucacucagg

SEQ ID NO: 4139270 - RNA, 74 nt, Human
ccugcucccagggaggcccaggcucugcuccgagggcagauggcgcaggggcuggguuggcccuaggaggaagg

SEQ ID NO: 4139271 - RNA, 64 nt, Human
ccugcucuccggcuuccguggccugcccuguaagugaggcaggaaaaucgagucuggaggcagg

SEQ ID NO: 4139272 - RNA, 78 nt, Human
ccugcucuggcuuucucagcauggcauucacuuuccuucccuugccuaugaaaucugugauuugaaauguuagacagg

SEQ ID NO: 4139273 - RNA, 67 nt, Human
ccugcucuuguauccaaaagugaucauggguugccugugucccgaucauuaacagugcagggguagg

SEQ ID NO: 4139274 - RNA, 57 nt, Human
ccugcugcuaugaaggugacaguccuccccacugcucacauauugcauagcugcagg

SEQ ID NO: 4139275 - RNA, 82 nt, Human
ccugcugcuguaagaauauguuugacauuuaguugguuccuaauuaaacaacccaauaucaaacauaucacacagaagcagg

SEQ ID NO: 4139276 - RNA, 72 nt, Human
ccugcuggccaggcccagcccuuagccaggugcuuuuucagggaccaaguagagcuggggccugaccacagg

SEQ ID NO: 4139277 - RNA, 66 nt, Human
ccugcuggccaguggagggcuguggaagagguuugcacaggccucgcuguccccgaggucaccagg

SEQ ID NO: 4139278 - RNA, 58 nt, Human
ccugcugguuuuuacaaagaugugggucucucuuuccccgagugucagagcuugcagg

SEQ ID NO: 4139279 - RNA, 110 nt, Human
ccugcugucagaccggcgcuuguguggagccaggggcuguagguaccccggcugaguagccucucagauguccaugguccuggcugcacgccagcgugggggcaggcagg

SEQ ID NO: 4139280 - RNA, 64 nt, Human
ccugcugucaguggggcaggcacaggcuuuuuccagucccaggcugcccccuacuggcagcagg

SEQ ID NO: 4139281 - RNA, 72 nt, Human
ccugcugugcacccaggaaggcugacuuauaugauuuguuucauuuaagcauucuugggcguuuagucaagg

SEQ ID NO: 4139282 - RNA, 72 nt, Human
ccugcuucuagcaccaagucccuugugacccuccccaggcacccucccaggcacugugcagucccaagcagg

SEQ ID NO: 4139283 - RNA, 57 nt, Human
ccugcuucucuaaaugaagggcucugggccuugccaggaaccuggggaaggaguagg

SEQ ID NO: 4139284 - RNA, 64 nt, Human
ccugcuuugcugguaccaucagcuuaaacuuagucugacuucugggugagccagcauugguagg

SEQ ID NO: 4139285 - RNA, 81 nt, Human
ccuggaacucaggguggcagacaaaaugacuguugacauugucacacugucaugacguuugucaccccaccugucuccagg

SEQ ID NO: 4139286 - RNA, 63 nt, Human
ccuggaauucccagauguucugcuggucugugggacaguuggcgggacauguggaaagcuggg

SEQ ID NO: 4139287 - RNA, 59 nt, Human
ccuggagaccagaggauacuucaucuucaguccaagaguaguuccuuuggucuucaagg

SEQ ID NO: 4139288 - RNA, 60 nt, Human
ccuggagcaugagggaaggcagcagauggcagacccgucagucaccccucugcucucugg

SEQ ID NO: 4139289 - RNA, 61 nt, Human
ccuggagcccaaggcagugagaggcaggagguaaacugagucccagcucugaggcucgagg

SEQ ID NO: 4139290 - RNA, 60 nt, Human
ccuggagcgcgggucaagcugggcacguggccgggcaccagcgggcgcucgcgcgccagg

SEQ ID NO: 4139291 - RNA, 65 nt, Human
ccuggagcuggcuuccuuccacuccaugcugaaaguaggccaguggagcagaagucugcuggggg

SEQ ID NO: 4139292 - RNA, 80 nt, Human
ccuggaggaggagguuggagggcuggccugcagggucacugcaccucugcccagagccucuuaccuccagauccuucagg

SEQ ID NO: 4139293 - RNA, 86 nt, Human
ccuggagggauuaguaguuuuuggacuguucuaaaguuagugauguaggcuaggauggucacagagauggacaugauguugccagg

SEQ ID NO: 4139294 - RNA, 61 nt, Human
ccuggagugggagcgugcugggcuuucgggggcugguuagguucagcuuucuuacucuggg

SEQ ID NO: 4139295 - RNA, 55 nt, Human
gagaaggaugaggaaaugguaugagggaaacuguggaaucacgcuuuaccuucuc

SEQ ID NO: 4139296 - RNA, 84 nt, Human
gagaaggcaggauggcaggaguggagaccauggggauuugagccacuuccucacguaacuuacuugugccuucacgaccuucuc

SEQ ID NO: 4139297 - RNA, 67 nt, Human
gagaagggacuggaaagaucaccuuaccuggacugacauucaguggagggaaauccagucacuuuuc

SEQ ID NO: 4139298 - RNA, 67 nt, Human
gagaagggcauggugacaucaugugaaugccuggacugggccuuauuuaaaacuagugccucuucuu

SEQ ID NO: 4139299 - RNA, 68 nt, Human
gagaagggcuggucuagaaagggagaggggaaauuccgucucucaucccugucugccacucugaaauc

SEQ ID NO: 4139300 - RNA, 63 nt, Human
gagaagggcuuagauuuagaacaugcugauaaacaggccaguucuaaacauaaagcuaauuuu

SEQ ID NO: 4139301 - RNA, 87 nt, Human
gagaagguaccaucugcucgggcucaggaggaaacaggagccuugauggaguggggcccuauccugcaggccugggcugggcagcuc

SEQ ID NO: 4139302 - RNA, 59 nt, Human
gagaagguggaccugaaggagcgaguggagaaacuggagcuucaauucauccaccucuc

SEQ ID NO: 4139303 - RNA, 72 nt, Human
gagaagguuuaaugagacagcuugucagugaccagcaccggguagguccccagcaguggcugcuuccuucuc

SEQ ID NO: 4139304 - RNA, 63 nt, Human
gagaagucuggaauggauccuccccucacagcccucagaaggaaccaagccagccagccucuc

SEQ ID NO: 4139305 - RNA, 56 nt, Human
gagaaguggaaacugcccgagcuucaaaaaguuacuacaguccuuuccgcuuucuc

SEQ ID NO: 4139306 - RNA, 74 nt, Human
gagaagugguagcuccaggcugucugaacccagaacacugaaguucagaauauggcuaggagugcuaugcacuc

SEQ ID NO: 4139307 - RNA, 58 nt, Human
gagaaguuguguggauuuaaaggugccccuucuccuaaaggccacacugcucuuucuc

SEQ ID NO: 4139308 - RNA, 73 nt, Human
gagaauacagaggaaacauuuaauacaagauauucugauuuuuuuccauuguauuugcuuucuucugguuuuc

SEQ ID NO: 4139309 - RNA, 77 nt, Human
gagaauacuaggcuucagaaagguuuucuaaauuuaauugaaaaaaacccucuauuuugauaccugguaauaugcuc

SEQ ID NO: 4139310 - RNA, 80 nt, Human
gagaauaguucccuuagcgaccuuucccuucaaauacuuugcagccagguagagaaguuuggagugaagguuuuguucuu

SEQ ID NO: 4139311 - RNA, 76 nt, Human
gagaauauacacuuucuggagcucuucucuccugaacaaagguaagcagcagauccaaaaaaugugaauguuucuc

SEQ ID NO: 4139312 - RNA, 65 nt, Human
gagaauaucuuggcagucucugucaaucacauuuggaccaucacaggaacugccaagauauucuc

SEQ ID NO: 4139313 - RNA, 64 nt, Human
gagaaucaaggugaagcccacagguccauacaucugauagggcugaauuuugagaggguuucuc

SEQ ID NO: 4139314 - RNA, 85 nt, Human
gagaaucacuugaaccuggaggcagagguugcagugagccgagauugugccacugcacuccagccugggugacagagugagucuc

SEQ ID NO: 4139315 - RNA, 77 nt, Human
gagaucugggaauguuuuuagcuuucuaaugucuucaacuugaauggaguuagaauggauguugagagccaguucuc

SEQ ID NO: 4139316 - RNA, 56 nt, Human
gagaucuguguuugcugaagcuacaauuacauggcuucagagugacucagcaucuu

SEQ ID NO: 4139317 - RNA, 80 nt, Human
gagaucuuugagaauuacuggauaaaugcaggauacaauguaugacagcaaauauccaugagcucauucaaaagauacuu

SEQ ID NO: 4139318 - RNA, 68 nt, Human
gagaugaauauguacacaucugucaacgucuaccuaaguguagaccugaaauguguccauguuauuuc

SEQ ID NO: 4139319 - RNA, 67 nt, Human
gagaugaauguaaacaaaggcagauguccauaaucauaacgucaagauguuuucguuaguucaucuc

SEQ ID NO: 4139320 - RNA, 57 nt, Human
gagaugagaaauggacaggaguggagccugaguccaaguacugugauuucuuaucuc

SEQ ID NO: 4139321 - RNA, 60 nt, Human
gagaugagaguccaacuggggcuuauuuuuaaaaaguccugccuguucuaacuccauuuc

SEQ ID NO: 4139322 - RNA, 65 nt, Human
gagaugaucucugaggacagucaguggguggcuucuauucacaguguuggaaucagagcuguuuu

SEQ ID NO: 4139323 - RNA, 63 nt, Human
gagaugcacagugacccugccagucccuuugguaaugccaaaaugcugacguuacuugcucuu

SEQ ID NO: 4139324 - RNA, 56 nt, Human
gagaugcaggccuggaaugguggaucuggggccagugucagccaggcucugcacuc

SEQ ID NO: 4139325 - RNA, 70 nt, Human
gagaugcauguguguguauguggcauuuuuugaguccuugcuauguucaacaguuugcacacauuaucuc

SEQ ID NO: 4139326 - RNA, 91 nt, Human
gagauggaaucucguucugucgcccaagcuggagugcaguggcacgaucucggcucacugcaagcuccgccucuggguucaugccauucuc

SEQ ID NO: 4139327 - RNA, 65 nt, Human
gagauggaguuccgcuauguuggucaggcuggucuccaaauccuggccucaagugguccacccuc

SEQ ID NO: 4139328 - RNA, 96 nt, Human
gagaugggauagcuugaacccgggaggcagaagcugcagugagccgagauugugccacugcacucuagccuaggugacagagcaaggcccugucuc

SEQ ID NO: 4139329 - RNA, 95 nt, Human
gagauggggccaggaagggguuaaagcaggaagcaucuugcagggcuguuaggaaaaugauauucugcuguuugacgucauuuuaauuccauuuc

SEQ ID NO: 4139330 - RNA, 89 nt, Human
gagauguaagaggaaguuauuguugggggggcuucaggaaaucuuuuuaaaagggucugacuccucuggcaagcucuuccuuucuuuuc

SEQ ID NO: 4139331 - RNA, 61 nt, Human
gagauguagggagaagagaggcaccuugggaagguaccuuaccuccuuuacaaguuuucuc

SEQ ID NO: 4139332 - RNA, 78 nt, Human
gagauguuagagcuucuuuggcaacccugacauccccacagaugaugacccaggcccagggagaagaaggacguucuc

SEQ ID NO: 4139333 - RNA, 72 nt, Human
gagauguucauguggcugcuggcagccucaaacucauauccucuugaaacuucagcagaaacauaaauucuc

SEQ ID NO: 4139334 - RNA, 67 nt, Human
gagauguuguggguaguuuuggugagcuaauaaugaauccguucucuauaacacacuucagcuucuc

SEQ ID NO: 4139335 - RNA, 55 nt, Human
gagauguuuugcugagaaugggagcuuuggccuuaaacuucagugcagaacacuc

SEQ ID NO: 4139336 - RNA, 75 nt, Human
gagauuaaaugugcuaaguguugcuuucagaguggacuuuguguucacaggugagcauuaggccgugcaaaucuc

SEQ ID NO: 4139337 - RNA, 69 nt, Human
gagauuacaacaugggacgcauauuuaagaagagauaaaauaugacacugcuuguccuuauguaaucuc

SEQ ID NO: 4139338 - RNA, 75 nt, Human
gagauuacaguuguccuaucuaauccaguccuguuuuguucccucgacccagauugagaaggauacauuguucuc

SEQ ID NO: 4139339 - RNA, 64 nt, Human
gagauuaguguguguggguuuguaugugagagagaaacacacacaugcacccaguuacacucuc

SEQ ID NO: 4139340 - RNA, 69 nt, Human
gagauucucugcaagauggucuuagagguuauuaaagaauaucucagaaaacccuugcuagugaguuuu

SEQ ID NO: 4139341 - RNA, 63 nt, Human
gagauugagaguguauagcugaucucacuccuuugagcugaugauagaaacucuuguagucuc

SEQ ID NO: 4139342 - RNA, 130 nt, Human
gagauuggaaaaguaaaucugauaaauaggggcaauaacucaaacauguaaaaauuaagguaagagcugcucuucuccccugcaguuuuauauaugcuugaucccguucuuuuuuccuuuccaaauuuuc

SEQ ID NO: 4139343 - RNA, 77 nt, Human
gagauuuaaguggaaguguuguauucgauuucugggaaggcuccuuaaaauggauagugcgucuucucuucuguuuc

SEQ ID NO: 4139344 - RNA, 78 nt, Human
gagauuuacaauguguaauuauauaaagaucuacagcuaacacuguguggaacugccaauugucacuuuguggauuuu

SEQ ID NO: 4139345 - RNA, 67 nt, Human
gagauuuaguagugacagauucuggguucagaauccugauuuugucacuuacuaacuaagugaucuu

SEQ ID NO: 4139346 - RNA, 105 nt, Human
gagauuuauuuucuuacaguucuggaagcuagaaguccuagauaaaggugcugacaaauuuaguucuuggugagggcuuccuggcuggcagacagacaucaucuc

SEQ ID NO: 4139347 - RNA, 85 nt, Human
gagauuucauauauacauuuuucaauccuuauauaaugccuuccauauaauugguggcuuauaaaggaugauggcuuauggucuu

SEQ ID NO: 4139348 - RNA, 60 nt, Human
gagauuuggggggagguaggggcagaauaugguuuggcucugcgucuucacccaaaucuc

SEQ ID NO: 4139349 - RNA, 88 nt, Human
gagauuuguuaaauugaucguuugggaugaaaucaagcaaagagaauacuaggcaaacuuuuaagauuucuuccuaaauacagaucuc

SEQ ID NO: 4139350 - RNA, 64 nt, Human
gagauuuugugggauuuaaauugaggucaaccuguuguuuugguuucuuaaguuacaaaaucuu

SEQ ID NO: 4139351 - RNA, 81 nt, Human
gagauuuuguuggcuuuacaucaaauugaguauaguacuucaaacugaguauuugaugaagguaaagucuuaucaaguuuc

SEQ ID NO: 4139352 - RNA, 69 nt, Human
gagcaaaaguuauuacagaaguugcaaacauaucacugaagaaacugcuuguagugacuugccuugcuc

SEQ ID NO: 4139353 - RNA, 62 nt, Human
gagcaaaggcagcaacuaauggaucucagaugccugggaccauuuauaugacugcuguuguc

SEQ ID NO: 4139354 - RNA, 110 nt, Human
gagcaaaucagcucagcugcagggcccccagucuauggaaaucuagguggcugcuagagaaagccagcuguaggcaggggguuuagcagagacuguggcuucuauugcuc

SEQ ID NO: 4139355 - RNA, 92 nt, Human
gagcaacuacuguaagucagaccuuguugauagcuuauuucaaauagagcugacuuuugaacaauauggguuugagcuguguggacaugcuu

SEQ ID NO: 4139356 - RNA, 62 nt, Human
gagcaacuaggcuugcaggguggacauguuaugucuaaauaacuaucuauugagccuugcuc

SEQ ID NO: 4139357 - RNA, 57 nt, Human
gagcaacugcccacagugaaugguuggcuggcaggcagcaccaccugggggcagcuc

SEQ ID NO: 4139358 - RNA, 95 nt, Human
gagcaacuugaccaagauggcccaguuaguuccagcugcagccaagacaauuuggcagcuguuggaccuugacccuccuugccuucuucaagcuc

SEQ ID NO: 4139359 - RNA, 56 nt, Human
gagcaagauucuaucucaggcaaaauccaguguuggccuggcagguggaagggcuc

SEQ ID NO: 4139360 - RNA, 84 nt, Human
gagcaagcaggagagccagcaggcuucccucggcuagccccccgccuggguggccuggaagcccagcugucuccuguccaucuc

SEQ ID NO: 4139361 - RNA, 75 nt, Human
gagcaagggaggguggugagcaguagcacuuuguacauuugaaauggucauuagcauugucgacauuuuccccuc

SEQ ID NO: 4139362 - RNA, 69 nt, Human
gagcaaugaauaccguuucacucaguugaaggagguaacauuuaaauaugugagguauguucagugcuu

SEQ ID NO: 4139363 - RNA, 68 nt, Human
gagcacagaggauuuuuagggcagugaaacuacuuuguaggauacuguaaugguggauccaugucauc

SEQ ID NO: 4139364 - RNA, 75 nt, Human
gagcacagauccuggagccacacuuccuggauuugaaucccaaaucugauacuugcugguuauaugaucuugcuc

SEQ ID NO: 4139365 - RNA, 56 nt, Human
gagcacagcgcaguuuguaauuuugauucuguuucaugcugaaucuuguugugcuc

SEQ ID NO: 4139366 - RNA, 115 nt, Human
gagcacaggaaaggaaauagcuguacugcuggguuuguucaaaaauuauaagauauugaaauuaguaucuccuguuuugacaaauucuaaaagacagcaaucauuucucuugcuc

SEQ ID NO: 4139367 - RNA, 60 nt, Human
gagcacauacuuguguguacauauguaugcaugcacgcauguguguuugagugugugguc

SEQ ID NO: 4139368 - RNA, 67 nt, Human
gagcacccugcugguuucuccugugauacaugacaccuucaacaaaugggccagccaggcguugcuc

SEQ ID NO: 4139369 - RNA, 55 nt, Human
gagcaccgccuccacgaugcccgccgugaagcuggcgcaguugagcgugcuguuc

SEQ ID NO: 4139370 - RNA, 76 nt, Human
gagcacuauguaugguguuuuacaaaaauguaguuuucauuacaaucuuauauagaucauaaauacuauggugcuu

SEQ ID NO: 4139371 - RNA, 56 nt, Human
gagcacucacuuuuugccugggggagcacucacuuggcaaagccuaugaaguccuc

SEQ ID NO: 4139372 - RNA, 60 nt, Human
gagcacucuggcauguaaccuuuaagccugucagguuuucaaguucuugccagauuguuc

SEQ ID NO: 4139373 - RNA, 58 nt, Human
gagcacuguacucauuugcacuguguugugagaaguaagugaaaugaaguguaugcuc

SEQ ID NO: 4139374 - RNA, 65 nt, Human
gagcacuugaaguuugggggacucugguacaaaaucccaauccauuuaccuuugcuugaaggcuu

SEQ ID NO: 4139375 - RNA, 67 nt, Human
gagcagaugccggccagggcaccaugcugaugugugucagcagcugcgugcccaggccggagagcuc

SEQ ID NO: 4139376 - RNA, 60 nt, Human
gagcagauuuucccuuuagugaguuuuaguuaaacucauugaaacuuaagaucuaggcuc

SEQ ID NO: 4139377 - RNA, 63 nt, Human
gagcagcacuugaggcaugucaccagggcuagggcaccaauguggugguuggaguagcugcuu

SEQ ID NO: 4139378 - RNA, 65 nt, Human
gagcagcaggcugggaugagucuggguggagaccucuagaaggcacagaauccagucugcugcuc

SEQ ID NO: 4139379 - RNA, 57 nt, Human
gagcagccagaaugggacucugaagugaguuguaaacagaggcccaugagggugcuc

SEQ ID NO: 4139380 - RNA, 80 nt, Human
gagcaggacuuucucccacccacccgucuuccccuaugcagguguccagacaggcuguggguagggggcgaugccugcuc

SEQ ID NO: 4139381 - RNA, 78 nt, Human
gagcaggagaggaaaggggccaagagaugagacugaggucccuuccugggcucugucuggcugcuccuuucaaugcuc

SEQ ID NO: 4139382 - RNA, 57 nt, Human
gagcaggauggcacuucugugaagugggcugaugcucacacagugcugucacugcuu

SEQ ID NO: 4139383 - RNA, 63 nt, Human
gagcaggcaggaaggcagcacugacauaaaaucaaaggcaccagagcugagcaucuccugcuc

SEQ ID NO: 4139384 - RNA, 66 nt, Human
gagcagggaggcggugugcuggcgcugcggcugagccucgccgggaacugugcgcuucucauguuu

SEQ ID NO: 4139385 - RNA, 76 nt, Human
gagcagggagggcaagaguuggaaacgguaaaggguaccccucuccccugcccccaaaggcucugcuuuccuucuc

SEQ ID NO: 4139386 - RNA, 85 nt, Human
gagaaucagcauagaagguuuugguaucaacucucuuguauauuuaaauaauuugauuucagaauuuuggugcuuuuuuauucuu

SEQ ID NO: 4139387 - RNA, 89 nt, Human
gagaaugaacgacuggaugcuggaagugcugaucuugucacucuagguuuucccauggcgucaggaccacuaguaucccauucauuuuc

SEQ ID NO: 4139388 - RNA, 78 nt, Human
gagaaugccagcaggcuacuccuguguucguuaaccacuacuggacagggaauauuugaguagaaugcuuacagccuc

SEQ ID NO: 4139389 - RNA, 66 nt, Human
gagaauguggagccugugguugccaauccaaguucaacagcuucaaagcccaguuuccaaauuuuc

SEQ ID NO: 4139390 - RNA, 63 nt, Human
gagaauuagaaaccaagaggcaggcugggcagacagcaagacuuuuuggcuuuuugacugcuu

SEQ ID NO: 4139391 - RNA, 103 nt, Human
gagaauuagaccguguaguacaugaagcacuuggcaaaacagcuggcacaaaggagccacucacaugcugauuguuaucauuacucacucagucuuucuucuc

SEQ ID NO: 4139392 - RNA, 77 nt, Human
gagaauuagggguuucagggugaaauuguaugccucauucacaggcauagaaugugcugugacaaccaacuaagcuc

SEQ ID NO: 4139393 - RNA, 58 nt, Human
gagaauucuuuuuuaaggaauagaacagacuuuguucaaauccaaagaaagaaaucuu

SEQ ID NO: 4139394 - RNA, 63 nt, Human
gagaauugaaugcuuaauuugaugaaaucugaggaaaagcauuagaaggcauuccucauucuu

SEQ ID NO: 4139395 - RNA, 86 nt, Human
gagaauugcuugaaccugagagguggagguugcagugagccaagaucuugccacugcacuucagccugggcgacagagcaagacuc

SEQ ID NO: 4139396 - RNA, 72 nt, Human
gagaauuuuaacacauagaggaaguuugcuauuggcucacauguagaaaucuuguuacuauguguuuuucuu

SEQ ID NO: 4139397 - RNA, 56 nt, Human
gagacaaaaguuggagugcaagucucaccaaagaggagaaacucagcuuuugauuc

SEQ ID NO: 4139398 - RNA, 82 nt, Human
gagacaacagagcacugcccugugccgcuguugagcacguuauauagacagaagugggggguaguaguucugguaauaaauc

SEQ ID NO: 4139399 - RNA, 64 nt, Human
gagacaagagaccaagggaauagucucauuuccugaugguuuucuauuuccugguuuccaucuc

SEQ ID NO: 4139400 - RNA, 68 nt, Human
gagacaaugacaccgcuucagugugaacucucaugaauugagucuagauccccagugcuguccgucuc

SEQ ID NO: 4139401 - RNA, 106 nt, Human
gagacaaugaggaauucaggagcugcuuuagguugagcucagcuccugucucacuuuagguguugagccgaaggcacugaacaccuccugcaccuucccagaucuu

SEQ ID NO: 4139402 - RNA, 82 nt, Human
gagacaauuucuccuggcuuugcgucuuugccacaguuugaguucuggaacaagacagcauagagcucacagauauugucuc

SEQ ID NO: 4139403 - RNA, 67 nt, Human
gagacacaagacgcaacucugucuucauugcucaacaaaugcuaacagggugugugcuucuguucuc

SEQ ID NO: 4139404 - RNA, 55 nt, Human
gagacacagagaggcugugugaucagccaaaaaucacacagccucuccgugucuc

SEQ ID NO: 4139405 - RNA, 91 nt, Human
gagacacaguuucacucugucgcucaggcuugaguguaguggugcgaucucggccccuccacuuccuggguucaagcgauucucgugucuc

SEQ ID NO: 4139406 - RNA, 72 nt, Human
gagacaccaucagagaaguuucacuggcaucuuucuagaggccucugggucucucuguuuggccaaaguuuc

SEQ ID NO: 4139407 - RNA, 104 nt, Human
gagacaccugauaauauguuaaccuuuugucauugggguuauuuguuaaaaucuaaagagcuaagaaacaugauuaauggcagaggguuugcauuccuugucuc

SEQ ID NO: 4139408 - RNA, 123 nt, Human
gagacacuggcguuuugugaugccaccauagaaacagcagcuuucaggaucaucuuggcaaggaagagacaggggauagaacugacagcugccuguaaaugccaggcuaggaaugugugucuc

SEQ ID NO: 4139409 - RNA, 80 nt, Human
gagacagaacauuccagcaggcagacaggagaugaggaugcuucaucacuucagcacugauggacugaaugcuucuucuc

SEQ ID NO: 4139410 - RNA, 95 nt, Human
gagacagaacugcuugaacccaggaggcugagguugcagugagccaggaucuuggccacugcucuccagccugggugacagagugagccugucuc

SEQ ID NO: 4139411 - RNA, 60 nt, Human
gagacagagaucuugcugaguccugguccucgacuuggucuuccuugucauuucuguuuc

SEQ ID NO: 4139412 - RNA, 58 nt, Human
gagacagcagagcagacuaauggaggaaauagagcuuguccauguggcucuguuucuc

SEQ ID NO: 4139413 - RNA, 82 nt, Human
gagacagcucuuuuuguaaagggucauuucuguccggcagcugagcucugggacagaaaugauguuuggcaauaccagccuc

SEQ ID NO: 4139414 - RNA, 99 nt, Human
gagacaggagaauugcuugaaaccuggaggcagagguugcagugagccgagauagggccacugcacuccagccuggguaacagagcaagacucugucuc

SEQ ID NO: 4139415 - RNA, 63 nt, Human
gagacaggccaggugguacuuaacugacuaaguccaguucaaguucaagucacagccugucuu

SEQ ID NO: 4139416 - RNA, 62 nt, Human
gagacaggguuucaccauguuggccaccauguuggccaggcuggucuugaacuccugaccuc

SEQ ID NO: 4139417 - RNA, 67 nt, Human
gagacaguggagccacguugggagccuguauuuuuugcugcuucccuacuucagugcucccugccuc

SEQ ID NO: 4139418 - RNA, 61 nt, Human
gagacaguguccauccaggggcgcuggcauugugccuccuuuucucuccugggccugucuc

SEQ ID NO: 4139419 - RNA, 56 nt, Human
gagacauuagaucagggaccauaaugaagugaaguuaugauucaugaugaugucuc

SEQ ID NO: 4139420 - RNA, 58 nt, Human
gagaccaaugagcaagugaaagcagauugguuugaaucuugcauuugcugguuggcuc

SEQ ID NO: 4139421 - RNA, 106 nt, Human
gagaccacccgugggcacguggcuuuugggauuggagaccugcugccacagaucucugaagagucuggaccugcugggucuccccaagugacucucugggggucuc

SEQ ID NO: 4139422 - RNA, 87 nt, Human
gagaccaccucuuucuucccucugcuccccagcaaacuccucauccuuccauggggcagaagaccaugguggaaagagugugugcuc

SEQ ID NO: 4139423 - RNA, 82 nt, Human
gagaccagaugcugucgaaaccaaacaucuuuuccuuugcucuaugggaacauuuuaggguuuguuuugcacagcugguuuc

SEQ ID NO: 4139424 - RNA, 129 nt, Human
gagaccagcccaguucuuggcuccccgcccaaugcucuguccaagacaccauaguggaaaccugggucugcugaauaggggcccugugguugcuagggcacaggaugaagccaaaguuggaaaacucuu

SEQ ID NO: 4139425 - RNA, 62 nt, Human
gagaccagcuucuugaaauagcuugaacaaccucucagcucucagguacaaagcugugucuc

SEQ ID NO: 4139426 - RNA, 60 nt, Human
gagacccacagcugggacacgaaggaugcuuucgauagaauauacuagcuguguggucuu

SEQ ID NO: 4139427 - RNA, 85 nt, Human
gagaccuagaaaguuaaugcuugucuagaucuucuuuucccaaaaagagauagaauucagugacugcauuuuaauuuuagggcuc

SEQ ID NO: 4139428 - RNA, 87 nt, Human
gagaccuauuaaagcuggaaucuucuuugguuacuaugcucauuaaacuaaagauacauauuuguucuagugcaauugaugcuucuc

SEQ ID NO: 4139429 - RNA, 73 nt, Human
gagaccucucuauuaagacucauuugcgauuugguaccauauugcaaaugagucuuaauauaaaagauguguc

SEQ ID NO: 4139430 - RNA, 55 nt, Human
gagaccugcucccucuuuguuaaaaggagacauuagcaaaggcaggagagguuuc

SEQ ID NO: 4139431 - RNA, 64 nt, Human
gagaccuggaugugagggaaguaaugccccucuagggccugucucccggguuuguccaggccuc

SEQ ID NO: 4139432 - RNA, 81 nt, Human
gagacgagagcuucacuuuguacuuugucaggacugccauuggccugugggagaugggguggagauaguaacacucgucuu

SEQ ID NO: 4139433 - RNA, 106 nt, Human
gagacggagugucgcuuuaucacccaggcuggagugcaguggugcaaucuuggcucaccguucauggcaaccuccgccucccggguucaagcgauucuccugccuc

SEQ ID NO: 4139434 - RNA, 102 nt, Human
gagacgggguuucacuguguuagccaggauggucucgaucuccaggauggucucgaucuccaggauggucucgaucuccugacgucgugauccacccgccuc

SEQ ID NO: 4139435 - RNA, 67 nt, Human
gagacgguggaucaccugaggucaggaguucgagaccagacuggccaacauggugaaaccccgucuc

SEQ ID NO: 4139436 - RNA, 89 nt, Human
gagacgugggauuuauccccucauaggucagacacgcauaauucuugugugugucugacaccugugaguuauuuaucauccccgugcuc

SEQ ID NO: 4139437 - RNA, 57 nt, Human
gagacuacagccuuuuuugaacuuggauggugacuucauaaagagugcuguuguuuu

SEQ ID NO: 4139438 - RNA, 81 nt, Human
gagacuaccuuuuguuccaaacaagucauaaaguacacugacuugaugcuuuaaccaucuuguuuggaagggagguguuuc

SEQ ID NO: 4139439 - RNA, 91 nt, Human
gagacuauuuuuagauaaaugaaugauuaaagaguacaguguuauugcacaauguguuuuuauacauuugguauuuuuaaaaaaugauuuc

SEQ ID NO: 4139440 - RNA, 94 nt, Human
gagacuggucuugaagagcugcugaaugacacugcaaguccuauuaugggauuuucauuguaaaucaggaaaccuagucuagaagaccucucuc

SEQ ID NO: 4139441 - RNA, 60 nt, Human
gagacuguaagcuccuugaggacaggaaccauagguuugucuaccguagagcacauucuc

SEQ ID NO: 4139442 - RNA, 124 nt, Human
gagagaaagacagagggagaccaagggacagagagugaauaugacauugcagacccuacaagaaggauaguuguguucuuuccuguugacuuuugucuucccauuccaauauguacguucucuu

SEQ ID NO: 4139443 - RNA, 64 nt, Human
gagagaaaguuuauuccuaucuagcuugugugaaaucaaauuggcagagaaugaacuuuggcuu

SEQ ID NO: 4139444 - RNA, 84 nt, Human
gagagaaaugcagccagccacuucagcuauggcuucagcugaggcaaaagcugugcugccaaguugcugaaccugcucuuucuc

SEQ ID NO: 4139445 - RNA, 72 nt, Human
gagagaagagaggaauagauaugacuccaguaaggucauuaagaguuauaccuauuucuaacuggaauuuuc

SEQ ID NO: 4139446 - RNA, 62 nt, Human
gagagaaggaagugaauuucccaaccagaagcguagggaaauucagauggcuuucuuuucuc

SEQ ID NO: 4139447 - RNA, 57 nt, Human
gagagaagggacuucuacacuuucuugccaugugggaaugugcuagugucuucucuc

SEQ ID NO: 4139448 - RNA, 62 nt, Human
gagagaagguauuuuugagaaugucauuucgucacagaugacacuuggugauacuuuguuuc

SEQ ID NO: 4139449 - RNA, 59 nt, Human
gagagaauguacaugcuaggggaauugcuuuucuucccugcuuuugcaacacuucucuc

SEQ ID NO: 4139450 - RNA, 81 nt, Human
gagagacaaagcacauuugagaggcugccugaagaaacagcuugacacaggcuacagccucaagagugcaaugcuucucuc

SEQ ID NO: 4139451 - RNA, 107 nt, Human
gagagacagauauaagaugugggacagauuuaauuuauuucaacugccaagggaaaggugauuguggcagauuuuauaaauugcuguacauacuuuuguuaguucuc

SEQ ID NO: 4139452 - RNA, 56 nt, Human
gagagacagcagaacgugcagcaaacuguugcugugccuccagucucgcuucucuc

SEQ ID NO: 4139453 - RNA, 81 nt, Human
gagagacaguaaauauaacagcauauuuacaauuguugaaucuagauaaagaguagauauguguuuauuaugcuguaauuc

SEQ ID NO: 4139454 - RNA, 93 nt, Human
gaaaaucuggcagauuguuuucagauccuggcucggcuacucacuaacauguagucuuggcaaauuuuugaggcucuuuuugccuggguuuuc

SEQ ID NO: 4139455 - RNA, 57 nt, Human
gaaaaugaggaacggaucauggcucccuccaccuggcuuuuuccagucuucauuguc

SEQ ID NO: 4139456 - RNA, 83 nt, Human
gaaaaugauugcuucacugaguagucuagacucaaagccaccguuggucuagauaguaacuucagugacgcacuucuuuuuuc

SEQ ID NO: 4139457 - RNA, 80 nt, Human
gaaaaugcagacucuuaggcaagucaacaguaugccaacucucagggcugaugauuuacacaccuaugauuuauauuuuc

SEQ ID NO: 4139458 - RNA, 59 nt, Human
gaaaaugccucuggcauuaaacaaagccuuuuuauauuuaaugccagcccgggauuuuc

SEQ ID NO: 4139459 - RNA, 57 nt, Human
gaaaauguuuucuuucuggggcaaucaggcaaaaucuuggaaagaugaacuuuuuuc

SEQ ID NO: 4139460 - RNA, 58 nt, Human
gaaacaaauucagguugcucuaggccggccuagaucuggcacaucugcuuuggauuuc

SEQ ID NO: 4139461 - RNA, 122 nt, Human
gaaacaacugcuuccuuggcuucugagaguggucaucuauuuauguagaacaaggguucucucgagaaaauuuguuuuuaaagagacauccccuccucaaaagacaagagguuuguuguuuu

SEQ ID NO: 4139462 - RNA, 58 nt, Human
gaaacaaugggaaagcaauauuggaagauaacugucuccaaauacucccaauuguuuu

SEQ ID NO: 4139463 - RNA, 77 nt, Human
gaaacacaaauugcagagcuucacucuggacuuucugauuuuggaaaucugcggugaggccugagaauuuguauuuc

SEQ ID NO: 4139464 - RNA, 71 nt, Human
gaaacagaaaacaggaguauguaagcuuacuucuagugaaguguuaaaagauuaaaugcuccugcuguuuc

SEQ ID NO: 4139465 - RNA, 67 nt, Human
gaaacaggcacugcacuaccacuuuuagagacauauucaaaaguaguuccugcaguccagaaguuuc

SEQ ID NO: 4139466 - RNA, 130 nt, Human
gaaacauaagaggcuucuuauuucuugcaugcucacuuuuauacuguaacuagaagauuccaaacaaauacugauugcaaauuauauaagggaugcugcauuuugaaauaaguuauaaccucaacucuuu

SEQ ID NO: 4139467 - RNA, 60 nt, Human
gaaaccagaaagaccugggcucaagagggggcuucuucugcucuuggcuuugcugguuuu

SEQ ID NO: 4139468 - RNA, 60 nt, Human
gaaaccaggaggcuacacugucccagugauaugacauuggguagauugccugcugguuuc

SEQ ID NO: 4139469 - RNA, 69 nt, Human
gaaaccauuuguuucuaaaauucugugaaaaacuuuuuaaaaagaaggcuaaagaaacagauugguuuc

SEQ ID NO: 4139470 - RNA, 95 nt, Human
gaaaccccgggcggagcagagcugggcuuggcugguccaugugauucccccuugcugaccagcacaggccccucucucccagggcccaggguuuu

SEQ ID NO: 4139471 - RNA, 62 nt, Human
gaaacccugugagauuggauuccccauuuuacagauggggaaacugcaacucagagagguuc

SEQ ID NO: 4139472 - RNA, 64 nt, Human
gaaaccugggauauauaaguuucagccuucaacacuccacugacauuaaguuucccaggguuuc

SEQ ID NO: 4139473 - RNA, 80 nt, Human
gaaaccuuguuccaaauuuucacaguuguugaguaugagcaaaugccacacagucugguagaauagaggaacauuuguuc

SEQ ID NO: 4139474 - RNA, 69 nt, Human
gaaacgcaccagaaucugagucgugauuguauuuagguaaugcaauuaugggcaauuuuuaacuguuuu

SEQ ID NO: 4139475 - RNA, 81 nt, Human
gaaacuaugaaaguaccaaagacaugacccuaauucuccaaggagcacaguuguagggcugcuuugggucucucuaguuuc

SEQ ID NO: 4139476 - RNA, 78 nt, Human
gaaacugaggcuuggagaggucagggacuugccuaagauuauaaaccugaguccaaaccugaaugcgggucucacuuc

SEQ ID NO: 4139477 - RNA, 55 nt, Human
gaaacugaguaggcuagagcacugugaaccuuagugcuuggcucaugcagucuuc

SEQ ID NO: 4139478 - RNA, 100 nt, Human
gaaacugcagugggcucaggcuguggcuuugaccgcaugucauaaccauuuaaacugugguuaguuguucaaagcucaaagcuucuccaagcuggguuuc

SEQ ID NO: 4139479 - RNA, 58 nt, Human
gaaacugccuccugggcaacuaagcuaagaaagcuguugcucucaucuggcugguuuc

SEQ ID NO: 4139480 - RNA, 62 nt, Human
gaaacugugaucguguucuggggaaugucccuuuucccauucaaguguaugaucauauuuuc

SEQ ID NO: 4139481 - RNA, 88 nt, Human
gaaagaaaaagagugaucugggagucccugauccugcuaaugaaaucaugcggcaggaaaaccuucccauguuucugauuuuuuuuuc

SEQ ID NO: 4139482 - RNA, 77 nt, Human
gaaagaacgucuuugaaaauucaucucauagcagagucaauauugcuucugcauguggauuuuuauuaucaucuauc

SEQ ID NO: 4139483 - RNA, 58 nt, Human
gaaagaaucagaagucucaaacagccucuuuugaguccuguuuguacuugauuuuuuu

SEQ ID NO: 4139484 - RNA, 66 nt, Human
gaaagaaugcugggagccaucuugaauaaauggaaaguuagacaaaauggcauucagcaaccuuuc

SEQ ID NO: 4139485 - RNA, 78 nt, Human
gaaagaccguuugggcucuaaaaugguuacauaugucuugguuaauguccucagucauggugccuucagcugucuuuu

SEQ ID NO: 4139486 - RNA, 77 nt, Human
gaaagacucaaagaaacaucugaggagaauaugaucuaauccuauugucuuaaacaaauguguuuucugaguucuuc

SEQ ID NO: 4139487 - RNA, 80 nt, Human
gaaagagcagaacugaggggagcagggucagcaugugccucuugcugcagcugccagcuucucuccauccugccuuuuuc

SEQ ID NO: 4139488 - RNA, 58 nt, Human
gaaagagccuuaggagugagccacauggcuuugucaaacacucugagcuugcucuauc

SEQ ID NO: 4139489 - RNA, 68 nt, Human
gaaagaguguacaaaagucuguuacuugguacacuaucccaccaacaguauagcuuuugacugcuuuc

SEQ ID NO: 4139490 - RNA, 82 nt, Human
gaaagaguugauguauaaauaccucaguucccucacccucagauggguugagauaacucugauuuauguuuuacacucuuuc

SEQ ID NO: 4139491 - RNA, 99 nt, Human
gaaagaugaaggcauaggacauugaguaagagcagagaagcccuuaaaaaaaaggcaaggcuuauauugcucuauucacaacucucaugucugucuuuc

SEQ ID NO: 4139492 - RNA, 129 nt, Human
gaaagauuucuuuuggaauaaaagaaaaugccuggcaaagaagguggugauuccaaggugcuuacuauuuuuggccauuuucugucuuguuuauucauagcuuuuuucuccagcccaucucugucuugc

SEQ ID NO: 4139493 - RNA, 82 nt, Human
gaaagauuuuucaugaaagcaaaaauggguggagucaugggacucuaugcacagaaguuugcugaaucaugauuuauuuuuu

SEQ ID NO: 4139494 - RNA, 63 nt, Human
gaaagcaagaguuggagugauguuagccagauggcagaauaggaagcaccaaauucuccuuuc

SEQ ID NO: 4139495 - RNA, 89 nt, Human
gaaagcacuuugggauaaacauuuguguuugcuaaaaaugucucuaaagaauuggaaguauuucaucaaaagauuuaucugugcauuuc

SEQ ID NO: 4139496 - RNA, 66 nt, Human
gaaagcagccacuggccaguuauaggggaaguuuuguuauuuguaaaagaaacagugguuguguuu

SEQ ID NO: 4139497 - RNA, 70 nt, Human
gaaagcaguucucuggggaucucuagcugacuccauucuaugcacggcuagcccaggagaauugucuuuc

SEQ ID NO: 4139498 - RNA, 110 nt, Human
gaaagccaaggguuugauuaagguuugggccagaggcauggagcuauuuuggcagguaggagaagcauguuuccauguaucuggucuucaccgaagagccucacuuuuuc

SEQ ID NO: 4139499 - RNA, 85 nt, Human
gaaagccaggccucuuggcaaugaaagcugcccggggcagcccucucccucuuccuggugcagguguguugccagcguggauguc

SEQ ID NO: 4139500 - RNA, 112 nt, Human
gaaagccgacuccaccgccauauguguuagagcuggccgggacagcuggaagaaauaucgcccagcccgaaucccuggccaggauugugauccaugucugcauacggcuauc

SEQ ID NO: 4139501 - RNA, 95 nt, Human
gaaagccugaaauaacagaacuguacuuuggauaaugaauucuucaucuguggagaacuuuaaaacaaaguacaguguuggcauuuuuuucuuuu

SEQ ID NO: 4139502 - RNA, 129 nt, Human
gaaagcuacaauaaauuuggcuuugaugcaaauuagauugguuuuauccuacccacacagcccuccaaaauuaggaagagggggauaagagaguauuuaugcauuaaugaccuauugcuugugacuuuu

SEQ ID NO: 4139503 - RNA, 104 nt, Human
gaaaggagaggagaaaguagagcuacuuccucuguaugcuuugcugcuuggaaaggagacagaaaaacagcaggaaaugcucacuucuucucuugggaucuuuc

SEQ ID NO: 4139504 - RNA, 69 nt, Human
gaaaggagugcuuuccaggucucucaguuuuaaccaugggaaucuuuuucacaagaaagcacuuguuuc

SEQ ID NO: 4139505 - RNA, 78 nt, Human
gaaaggccgauaaugaaucagcauagggugaggcauccuuuuuguaaaagucuuauauuugcuuguuucauuucuuuc

SEQ ID NO: 4139506 - RNA, 60 nt, Human
gaaaggccugaggggguuagacugaccuuugucuguccuguagcuccaucagucucacuc

SEQ ID NO: 4139507 - RNA, 73 nt, Human
gaaagggcgauggcugugggauaugugacugacaggggcugcacgacucgucugucaccuauggcugcucuuc

SEQ ID NO: 4139508 - RNA, 123 nt, Human
gaaaggggaaugaucguguacauuuuuauaaaagcaagcaguguggaauuuuagaauaccacuuuuaaucuuuaaacuuuuccauaacucuugagugaacaaugucauaacucaaauucuuuc

SEQ ID NO: 4139509 - RNA, 58 nt, Human
gaaaggucaaaaucgugacauugggaguuagcuuaaugcacccagaguuugaacuuuu

SEQ ID NO: 4139510 - RNA, 98 nt, Human
gaaaggugcuguuuucagaaucugggauaagaccacagauuuccucuuacuagcuggcugauauuugggucugucccugagccucaauuuaaucuuuc

SEQ ID NO: 4139511 - RNA, 96 nt, Human
gaaaggugugguugggccagaugugccugcucagaaagccaccagagcgcuuuccaagucuuuggggcaucugggagauugugcccggccccuuuc

SEQ ID NO: 4139512 - RNA, 81 nt, Human
gaaaguaaguagguuaucuaagguaacuccagaggauuaugaacaauauccugcuuguuacuuauagagaucucuucauuc

SEQ ID NO: 4139513 - RNA, 77 nt, Human
gaaaguacagaauuaugccaugaggguaucuaggauugcacugugcuaauucuucacugaguauuuuuuguauuuuu

SEQ ID NO: 4139514 - RNA, 86 nt, Human
gaaaguauuuuagcaucuugauuaugacaugacuucucuggucccaaggcuucauguagaugguucccucugccuagaaucuguuc

SEQ ID NO: 4139515 - RNA, 122 nt, Human
gaaagucaaguucauacauauuugccuauuaagacaggacccuuaaaucuccaagcuggggggaaaggaaguuaagucuuagaaugcacauguacaaacuucccuguauaacugagauuuuc

SEQ ID NO: 4139516 - RNA, 77 nt, Human
gaaagucugccucuuggccaucuaccaucucugaaagcucuggcuucaaaaauggucuuugagcugcaagaacuuuc

SEQ ID NO: 4139517 - RNA, 73 nt, Human
gaaagugggugcaagcuuggcugauguugauccaaugaacauugauaaaucaguaaguuuuguaaauguuuuu

SEQ ID NO: 4139518 - RNA, 61 nt, Human
gaaaguggugggggauggggagguucuuaacguaugcaucuuugccagcccucgcgcuuuu

SEQ ID NO: 4139519 - RNA, 97 nt, Human
gaaauaaaguuguggcaauacuuuaguaaaauggcccuagauuuauagcaagguuaccuggguucuuuuccuggauaguugacugugauuuuguuuc

SEQ ID NO: 4139520 - RNA, 78 nt, Human
gaaauacaaacaguaaauaaugcauguugauugguuacuaugugccaggaauaugcuaaguauuuacaugauuauuuc

SEQ ID NO: 4139521 - RNA, 71 nt, Human
gaaauacaaucuagucugucagcaaagagaagugucaggaugaaagcuuuguaccaggcuuagaguauuuc

SEQ ID NO: 4139522 - RNA, 61 nt, Human
gaaauacguguuauacaggcucagggacuauucccuguuccugguuccugcaugauguuuc

SEQ ID NO: 4139523 - RNA, 75 nt, Human
gaaauacugagaacagaguuucaaauaacaucucauaaaggagaguuuacaaagcuuuguuuuguuuuguauuuc

SEQ ID NO: 4139524 - RNA, 58 nt, Human
gaaauagauacuagagauagaacuggacuaaaaccuagguuuucugaaugucuauuuc

SEQ ID NO: 4139525 - RNA, 62 nt, Human
gaaauagcuuauugacagugaauuuggcccucacacaaguucaguggaaaaagagcuucuuc

SEQ ID NO: 4139526 - RNA, 77 nt, Human
gaaauauacauugcaggaagagaauggauuaccacauacuguuaauuucguccauaauucugaccaauguauauuuu

SEQ ID NO: 4139527 - RNA, 55 nt, Human
gaaauauccauacugauuuuccguuacuuguucugagaaaaaguguggaaauuuc

SEQ ID NO: 4139528 - RNA, 55 nt, Human
gaaauauuucucuugagccccucauuuauuaggguagguagaagggaaguguuuu

SEQ ID NO: 4139529 - RNA, 75 nt, Human
gaaaucaucggugauauccucacaaagaagcuuuuguuguuuacucugugucagaagauaucauggcaugguuuc

SEQ ID NO: 4139530 - RNA, 128 nt, Human
gaaauccuaacacaaccacauuaguugagauuuauuuagcugcauuaucaaaguuaugucaauugauguguacagugauuugaguucacaucuuaauuucugugauguuagguaaauaauuucauuuc

SEQ ID NO: 4139531 - RNA, 73 nt, Human
gaaaucuaugauguacagaaaguuggcggcuaguccuaaaagcuuccccacacucuuuacauucauagguuuu

SEQ ID NO: 4139532 - RNA, 71 nt, Human
gaaaucucagcccuuauuuuagaauuuaacccacaagauguugggguauuaucuggaauugcugagauuuu

SEQ ID NO: 4139533 - RNA, 66 nt, Human
gaaaucugaaucuucuguuggucacucuugggcugaaaugauguucaagucagaggucagcguuuc

SEQ ID NO: 4139534 - RNA, 104 nt, Human
gaaaucuguuuuccuucccugucugucuccaucucugcugugucucuguggcuucugugucucuuucacaguggauccucugacucccucuuauucuggcuuuc

SEQ ID NO: 4139535 - RNA, 57 nt, Human
gaaaucuuuuaaccauucauuuccucuugccuggagaugauugugcaguaagguuuc

SEQ ID NO: 4139536 - RNA, 81 nt, Human
gaaaugaaaagcaaaagguggcagaaaugggacuuugaguuuaaaauacugaguuuauuuuucuccauauaguuuuauuuc

SEQ ID NO: 4139537 - RNA, 110 nt, Human
gaaaugaaauguguuuacaugagaauuagggggcucagcauggauggagagaggcugaaacuccuucauagccuggguccuacaggucuaauguauuauagcuuuuaguc

SEQ ID NO: 4139538 - RNA, 67 nt, Human
gaaaugauagauuauuguaaugacugccagaauggccuuuuggcauguuuaaauggcaauaaauuuc

SEQ ID NO: 4139539 - RNA, 57 nt, Human
gaaaugaugucugugcugccacugucucucugugguaauagcaucaucaaucauuuc

SEQ ID NO: 4139540 - RNA, 78 nt, Human
gaaaugcaaauuauguggucccuccucagaucuacugaaucagaaacucuggggacagggcucagcaauuuguguuuu

SEQ ID NO: 4139541 - RNA, 60 nt, Human
gaaaugcucuggugugucucauccauauucccuagaguauagaugaaaucagaguauuuc

SEQ ID NO: 4139542 - RNA, 116 nt, Human
gaaaugcugcuucuccaacuugcugauucaugucuuccuggagcagauggguuggcuauuuuugcccaaggucuaggagacauugaucccaagaaaacaugcacuuaaggcauuuu

SEQ ID NO: 4139543 - RNA, 56 nt, Human
gaaauggaagagaccugucucacaccuaaugaguggcucagcuaguuuuccauuuc

SEQ ID NO: 4139544 - RNA, 61 nt, Human
gaaauggauuucaaaugcggcagcaacuccuuaaugcugcccugcuaaugaguuccaauuc

SEQ ID NO: 4139545 - RNA, 88 nt, Human
gaaaugguaaaguugacuguuuuacuuauguuuuugcaguaagaagcuaaacauccaguaucagaagcaucaguacuuuuacucuuuc

SEQ ID NO: 4139546 - RNA, 83 nt, Human
gaaaugucaaguugaacggcuggaauuagauaacauuuugaaauaauagcaagaugugccuaaucagaccuagcuaucauuuc

SEQ ID NO: 4139547 - RNA, 74 nt, Human
gaaaugugucaaaguguggaguauuuauaugacaauuucauuuaagcuuucagggcacuauugaaacacauuuc

SEQ ID NO: 4139548 - RNA, 57 nt, Human
gaaauuacugggcccugauugcaacaaacuuccuugaagauccugggccagucuuuc

SEQ ID NO: 4139549 - RNA, 80 nt, Human
gaaauuagugaaacugcuuuguaaacuguccucuaccauuaugaagacguuaauacuaaaggucaguuucgaaaaauuuu

SEQ ID NO: 4139550 - RNA, 83 nt, Human
gaaauuauauguguguuaucuguuguuuuggauucucuacaaggcuauucuccaaugacauggauaaucauauuuuuaauuuc

SEQ ID NO: 4139551 - RNA, 79 nt, Human
gaaauucaaguaugacaucaaguuucucagauauuauccaaaacauuugaugaagggcguuggugcauauucuguuuuc

SEQ ID NO: 4139552 - RNA, 57 nt, Human
gaaauugugggguuaaaaggcugugggaccacauucguucauucauuccacaacuuc

SEQ ID NO: 4139553 - RNA, 70 nt, Human
gaaauuuaaaauuuucagcuugacuugaucaaacauugaucauagggucucuugaaaaugauuaaguuuu

SEQ ID NO: 4139554 - RNA, 99 nt, Human
gaaauuuauuucuggcuacauauuccagauuguuaguuggauaacuucuauuugacaauauaagaaucuauuaggaauauguagccccucauuaauuuc

SEQ ID NO: 4139555 - RNA, 62 nt, Human
gaacaaagaucagaggauagcugagucugaaagcaguuagagaagcaagaugaucuuuguuc

SEQ ID NO: 4139556 - RNA, 61 nt, Human
gaacaaaguguacuuccauacuguuugccugaaggccucagucaugggaguuacuuugguc

SEQ ID NO: 4139557 - RNA, 56 nt, Human
gaacaaaguuucaggaagauagacacagcuuacaguuuaugacuggaccuuuguuu

SEQ ID NO: 4139558 - RNA, 68 nt, Human
gaacaaauaaauauuaagcauuuggcccugugccuggcacagaguaggugcucaguaaauaucaguuc

SEQ ID NO: 4139559 - RNA, 118 nt, Human
gaacaaauaaggcuggagcugucacagguaagggaacagcagucacucauguuauucagagaaggagaacguuuaguuauuuuugugauuacuggguggcuuuaucuuuaucuuguuc

SEQ ID NO: 4139560 - RNA, 77 nt, Human
gaacaaauuccagcaacaccuuuuuacaugugccaaauaguacuucaagagcauugaaaaggauauuguauuuguuc

SEQ ID NO: 4139561 - RNA, 87 nt, Human
gaacaagagagcagggacugagccagugggacugacuaucaacaugacaaaucucauuuggcuuuguuuuaaauugcucuccaguuc

SEQ ID NO: 4139562 - RNA, 55 nt, Human
gaacacaaggucauaccauuuaugacguuucaauuaugugucugccucuguguuc

SEQ ID NO: 4139563 - RNA, 81 nt, Human
gaacacagaaaaggauugauggaucagaucacaaguuacuucgaugcuuaauuuucuggcuuuauuccuucacugauguuu

SEQ ID NO: 4139564 - RNA, 88 nt, Human
gaacacagacccuggcagccccuugguuugguuucuuggaggaacaagucuucuuuagaaacuaaagccaagggcucuaaauguguuu

SEQ ID NO: 4139565 - RNA, 111 nt, Human
gaacaccgaguuucuauugguuuuacaccuguuaacucuaagacagaaaugauuuagcuuugacaugguugugcuucuuucuuaaacuguaggguacuuggucauauguuc

SEQ ID NO: 4139566 - RNA, 57 nt, Human
gaacacugagagagaugggcagggcgccagugccugccacacucugccggucuguuc

SEQ ID NO: 4139567 - RNA, 73 nt, Human
gaacacuggacaggaggcuagguccacuuaguaaguagucacucuugcauaccagccuccuggucuucaguuc

SEQ ID NO: 4139568 - RNA, 99 nt, Human
gaacagagagacucauuuugucuuauguucauuuuaugaauccuuuuuuuuggaucaaggaaugacuauaugaggaaauuuugccagagucucuuguuc

SEQ ID NO: 4139569 - RNA, 88 nt, Human
gaacagauugcuggcauuauggcagccaggauauugucaggaggaacuuggcagugcucguagguguuaugaugcuggcucuuugcuc

SEQ ID NO: 4139570 - RNA, 68 nt, Human
gaacagcuggggcagccacgugcggguucuuaaagcaccgccccacugggaccucuggcccagauuuc

SEQ ID NO: 4139571 - RNA, 65 nt, Human
gaacaggaucauaauuauucuguaaccagcagucuguguugguuacagaaaguaugcuuuuguuu

SEQ ID NO: 4139572 - RNA, 61 nt, Human
gaacagggaaccacagcggugcuaccucaccaauuuuuacagcugugguuuguuucuguuc

SEQ ID NO: 4139573 - RNA, 79 nt, Human
gaacaguguuuguugaaguaaacacuuuauaaccuggggcagguuauaguauuagguacucaacaagcuucguuuguuc

SEQ ID NO: 4139574 - RNA, 61 nt, Human
gaacaguuuggguagguauguaguuggaaaaauaaucccaaccuauuuugcucagacucuc

SEQ ID NO: 4139575 - RNA, 62 nt, Human
gaacaguuuuuguauacaggaauauugaacagaaacagagaguuccuguauacaaagaguuc

SEQ ID NO: 4139576 - RNA, 83 nt, Human
gaacauagcuuuaaaaaucaucaaagcauauuagaagaaauugcuaauuuugguuuagaugagauuuuagaacagcugucuuc

SEQ ID NO: 4139577 - RNA, 55 nt, Human
gaacaucaugaagaaaacauauuucaggacucaggacuauguuaucuugauguuu

SEQ ID NO: 4139578 - RNA, 64 nt, Human
gaacaugcauauagguaaauggaccaguauacaugcuauucuguucuguuuuguaagcauguuu

SEQ ID NO: 4139579 - RNA, 57 nt, Human
gaacaugccugauccaugcccuccgcagaagcugcgguggcugggucuggcagguuc

SEQ ID NO: 4139580 - RNA, 105 nt, Human
gaacauuguauuaagaaauuuacugggaauuccaaggcuaaauagucucugcccagagauccuuagggauuuuuccagucaguuccacucauuaaauauauacuc

SEQ ID NO: 4139581 - RNA, 75 nt, Human
gaacauuugagaaaaauacucuuaagcaagucuucuuaugaagauguagacaaagauguauuuuuaccaaauguc

SEQ ID NO: 4139582 - RNA, 76 nt, Human
gaacauuuguauuugaacaagauccuugguguguaguucagucuugcaguauacaagcuuuuguguauaaauguuu

SEQ ID NO: 4139583 - RNA, 68 nt, Human
gaacauuuuuggcugagaaaaugguuuuagguuuuguagaggccuacuaguaugucucaguuauguuc

SEQ ID NO: 4139584 - RNA, 63 nt, Human
gaagcaagaagggcaaggaaguuugagcagggcacccaugacgcacaccacccuucaugcuuc

SEQ ID NO: 4139585 - RNA, 71 nt, Human
gaagcaagcuggugaaucguaaugaggcaugugcugccaauaugcacuguacauuccacaagcauugcuuu

SEQ ID NO: 4139586 - RNA, 94 nt, Human
gaagcaccccaauuuuccagaagcuuuuccaccuguguagcaugagcuuggcuaugagcagcugcacauggcagaggccuuuggaaagugcuuc

SEQ ID NO: 4139587 - RNA, 63 nt, Human
gaagcagcacgagaucgaugugccuuugcucgugguaagagcagugggcucgugcauauuuuc

SEQ ID NO: 4139588 - RNA, 60 nt, Human
gaagcagcagaauuccauggcagauuguucaaaacuagucucuuuguggacucugccuuc

SEQ ID NO: 4139589 - RNA, 126 nt, Human
gaagcaggagcucuuugcuucauugagcugaacacuacagggguccacagcugauugucaagagucugauguaggcuuuucugggagaaaauacuucagcucaaugaagcaaagagcuccuggguu

SEQ ID NO: 4139590 - RNA, 77 nt, Human
gaagcagguaucaugaaagcguaaagcccauaacccuaauucauagcacacacuucucauuugauacuaacugcuuu

SEQ ID NO: 4139591 - RNA, 81 nt, Human
gaagguaagcaagaugcauuauuucuuaucugaauuacauuuaguaaaugaaagugauauuugcauauuguuuuuaccuuu

SEQ ID NO: 4139592 - RNA, 71 nt, Human
gaagguagcugcugagaugacacccaaugauccauaccuccugguagucacacccucauguacuuaucuuc

SEQ ID NO: 4139593 - RNA, 57 nt, Human
gaagguaggcccacaguuagugagagaguugccuugucuaucuccuggcgugccuuc

SEQ ID NO: 4139594 - RNA, 66 nt, Human
gaaggucaccuccccucucuggcucucagagccauauaauacaaggagaagguggacuugaucuuu

SEQ ID NO: 4139595 - RNA, 66 nt, Human
gaaggucagaagucugcuauuaaucucaugaggcuaaaaucaagguguuagcagggcuuguccuuu

SEQ ID NO: 4139596 - RNA, 85 nt, Human
gaaggugcccaggacagcuaaacaaguguguagccauuuuggacaauacagaaugccuuuuguuagggcugccagauccauuuuc

SEQ ID NO: 4139597 - RNA, 62 nt, Human
gaagguucuguguacacuacuucccaaggagcugagggauguccuuguacaacaguaccuuc

SEQ ID NO: 4139598 - RNA, 86 nt, Human
gaagguuguaggaaauaauucuggaaaagaaaguuaagaucaggaccugaaaauccucuaauucuagaauaaguuuucuuaaucuc

SEQ ID NO: 4139599 - RNA, 98 nt, Human
gaagguuuccucacacuggcugcacucauaaggacugggucucuggugaacauuuauuccagugcugaaugaggaggucucugugguagaaggccuuc

SEQ ID NO: 4139600 - RNA, 78 nt, Human
gaagguuugucugagucaauaccucuacugcaugccugggcccagcagagcuuauguugggucaguaguccaaccuuc

SEQ ID NO: 4139601 - RNA, 82 nt, Human
gaaguaaugagaacaugcauauaggacacaaagaaauauccaccucaucacucuuuggucacacauguaucucaauggcuuc

SEQ ID NO: 4139602 - RNA, 80 nt, Human
gaaguacaugcuauauaggaagagcacuuugaaauuuugggguguucuuuuucuuauggugcacuucuuucauguacuuc

SEQ ID NO: 4139603 - RNA, 93 nt, Human
gaaguacuuagugaaagaaaccacaugccuucaaaugcucauauauauguauguaaagcauacauugguaugugguuuugguucauuuucuuc

SEQ ID NO: 4139604 - RNA, 64 nt, Human
gaaguaggugagcuugugcuucugugcugucccacccagccggucugccaggucucucugcuuc

SEQ ID NO: 4139605 - RNA, 58 nt, Human
gaaguaugacauuuaagacaauugugccuugagcuaauuggacuugcugucaaacuuc

SEQ ID NO: 4139606 - RNA, 66 nt, Human
gaaguccauguucucuucaagucuuacacugauguacgcguaggcacuguggaagacaugguuguc

SEQ ID NO: 4139607 - RNA, 107 nt, Human
gaagucuaugaaagccaacauuuguggugagcagggaacgucaguuaaucacauauuagggaugauuccuuuguucauugugcaaaagugguuucuagcagacauuc

SEQ ID NO: 4139608 - RNA, 65 nt, Human
gaagucucauuuggugucaguuguggaauaacacagucagcuaccacucgcaucccuugagguuc

SEQ ID NO: 4139609 - RNA, 57 nt, Human
gaagucucuuuguauaaauaggcaucacaauagaugccuuuaugauaaagugauuuu

SEQ ID NO: 4139610 - RNA, 73 nt, Human
gaagucugaagauaaguggagauauuuuugccacagugaaauucuggcauuuguagccacuugccuugauuuc

SEQ ID NO: 4139611 - RNA, 60 nt, Human
gaagucuuuuagcaaaacgaacguggcugcagccuuuuucgucuuucuaaaagaaucuuu

SEQ ID NO: 4139612 - RNA, 77 nt, Human
gaagugaaaauugcauucuugucuugauagagaugaaaauggauuucuggucaugaaauagauguaguugucacuuu

SEQ ID NO: 4139613 - RNA, 69 nt, Human
gaagugaacucagcauccugcacagagaagccacugcugucucugagcucaggagcugcaggaagcuuc

SEQ ID NO: 4139614 - RNA, 76 nt, Human
gaagugagauuacugggucaaaagguccuucugcuaguguguaaccugggccagcugcucagugucucugugcuuc

SEQ ID NO: 4139615 - RNA, 87 nt, Human
gaagugagucauuagucauugcauuuucuggaaaagucgguagagaaaaguuuaagugaaauguaauacaguguuauaauucacuuu

SEQ ID NO: 4139616 - RNA, 79 nt, Human
gaaguggaacacacacagaaaaaugaucccuacgugguuuaauuaaggggaaagugaauuguguaguguuuuaccauuc

SEQ ID NO: 4139617 - RNA, 64 nt, Human
gaaguggaacaggacacaaauuuaguggaauuucuuuacaaugugugcuucuugucaccaguuc

SEQ ID NO: 4139618 - RNA, 69 nt, Human
gaaguggcagugugcaucuguguggcccagaaauggauggcuagugcuaauguacauguugguuauuuu

SEQ ID NO: 4139619 - RNA, 66 nt, Human
gaaguguauugucucacaguucuugaggcuacaagcccaagaucaagguguuggcagggucacuuc

SEQ ID NO: 4139620 - RNA, 60 nt, Human
gaagugucuuuuauaaaucuccaggaaaucuccuaggaagcauuuaaagagauggauuuc

SEQ ID NO: 4139621 - RNA, 67 nt, Human
gaagugugcauggaucuagauggguugagaaucuuugcuuguccugcucuagguuccugcauauguc

SEQ ID NO: 4139622 - RNA, 72 nt, Human
gaaguguuaaggacaaucagguuaguagcuaacucagcucugaccuccugcuuguuaauuacuuggugcuuc

SEQ ID NO: 4139623 - RNA, 97 nt, Human
gaaguguucaauaaaaaacaguuguuauuggaacugauugaugauaaugaugauuaaaauuauuuccuugcaaguuucuguaacaacuuggcacuuu

SEQ ID NO: 4139624 - RNA, 62 nt, Human
gaaguguuuaaguuacacacauaucagcguacaccgcuauauggggcggaauuugacacuuu

SEQ ID NO: 4139625 - RNA, 99 nt, Human
gaaguuaugggaggaaggaugacccgagucuggggaacaagugccguucacuagguucccauuggggaucuugggcuguuucuccuccaaucugccuuc

SEQ ID NO: 4139626 - RNA, 76 nt, Human
gaaguuauguuuuauaugucucugcugacauuuacaaguccagugucuguugaacaguaagacaaugaguaacuuc

SEQ ID NO: 4139627 - RNA, 90 nt, Human
gaaguucaaagagcucaugugucaauuuucauuccuacugucaucagggaagcaauauuagauaucagugaauaugcuuugcugaacuuc

SEQ ID NO: 4139628 - RNA, 57 nt, Human
gaaguucaacugccaugcuugggaguaagcaauugucaugcuuggcagugagcauuc

SEQ ID NO: 4139629 - RNA, 67 nt, Human
gaaguucacaccaaaguuagguagggucagggacacccuuccaccaccugcuuguggggugagguuc

SEQ ID NO: 4139630 - RNA, 85 nt, Human
gaaguucacuaccuuuugcuucugcuugcuguucuacauaauggcacauugugaaaagccgcaaguauagagcgggcacgacuuc

SEQ ID NO: 4139631 - RNA, 101 nt, Human
gaaguucaucaggcaggugggcuccuggcauggguggagagagcacaagauccauuucucugugacuccuuugcucuugcccuuuccugcguguuggcuuc

SEQ ID NO: 4139632 - RNA, 91 nt, Human
gaaguuccaguuguuuuacaucucaccagauucauaugccccuccuuugccuuuguaucauucugguggguguguagcugcuggcaauuuu

SEQ ID NO: 4139633 - RNA, 76 nt, Human
gaaguucuucaauguuuguucaugaaaauaguguguuccuuauuauuaauguuaaaguggauaagcugaaugcuuc

SEQ ID NO: 4139634 - RNA, 58 nt, Human
gaaguucuucaucauuaacacucugaauggcacagaggauggcagugugaggaaaauc

SEQ ID NO: 4139635 - RNA, 72 nt, Human
gaaguugaaaaguuuauuuucccugguuagugcuaaauguauaucaucaaggaaaaauaaaugagcaacuuc

SEQ ID NO: 4139636 - RNA, 83 nt, Human
gaaguugauuugauguucauaaaugauacaggcuauaguguuaagcagaccugguuguuaauucuggcgucagcauuggcuuu

SEQ ID NO: 4139637 - RNA, 57 nt, Human
gaaguuguaagccugggaagguaaucacagaaucucuggccagggcaaagcaauuuc

SEQ ID NO: 4139638 - RNA, 129 nt, Human
gaaguuguggggauuaaauaugauaaauggaaagauacacggucaacucucaagcauuguagagauguuagauuguauuaugacugugacuguuauuccucaagugucagcuuacuuuuaaacagcuuu

SEQ ID NO: 4139639 - RNA, 62 nt, Human
gaaguuuacagugacuggacuuugucaucauaucugagaugaguacagagcuguacucuauc

SEQ ID NO: 4139640 - RNA, 55 nt, Human
gaaguuuagguucuuauguuuaaauuacauuuaaauuaguaaggauguaaauuuu

SEQ ID NO: 4139641 - RNA, 83 nt, Human
gaaguuuaguuucauuagacugauuuagaagcagucuuuagaugguaaagauacagcuuuuuugucagucacauauaggcuuc

SEQ ID NO: 4139642 - RNA, 71 nt, Human
gaauaacucaagucuauugauaagugcagguuuuuacucacggccugccaagcuuucagauaugaggauuc

SEQ ID NO: 4139643 - RNA, 110 nt, Human
gaauaagauucacugaugagcugcugagaguggcuuggcugcacuacagggcuagccaguugccauguggccuguggucaagucagagggagcagcugugaauccuauuu

SEQ ID NO: 4139644 - RNA, 100 nt, Human
gaauaaugaucacaguaaaucagaccucauuaugugcaggagagccgggcagcccaacuggcuagguaaugaggucuaauuuaaugcccugguauuauuc

SEQ ID NO: 4139645 - RNA, 77 nt, Human
gaauacaaaaguaaugguuaaauaauucuaggucauucauggaauagaacagcauuuggcuauuaacaaugguauuu

SEQ ID NO: 4139646 - RNA, 56 nt, Human
gaauacacgaaggcaagagucccuuauucauggacaucuguguauguguguguguc

SEQ ID NO: 4139647 - RNA, 60 nt, Human
gaauacacgaauagagcauggugauaguauggucauugcuaugucugaauguguguguuc

SEQ ID NO: 4139648 - RNA, 67 nt, Human
gaaccaaagucugggggcugaguaagaugagaucagggagcucauuuauccagccccuucacuguuc

SEQ ID NO: 4139649 - RNA, 92 nt, Human
gaaccaaguaccuagcuugugucuuuagaaacuuuucuucaugaaaaaaaaucauuaauaaacauuucagaagacuugcaggaacaggauuc

SEQ ID NO: 4139650 - RNA, 129 nt, Human
gaaccagcaucaggaagggaaagggagaauucagggaucaaacuguaaagaguucuuguagcuuugagauucagacucguuugcacacaaggcuuuuaugauuuuucuccuauuuuucuuucuagcuuu

SEQ ID NO: 4139651 - RNA, 80 nt, Human
gaaccaguugaggugggccagcauuuugaagaguuggcaucucccuauccuuacuucuucacugauucuggcucagguuc

SEQ ID NO: 4139652 - RNA, 66 nt, Human
gaacccagaggccacuuugccugugauguuuaucugaauauucaggucacaguggcuucucuuuuc

SEQ ID NO: 4139653 - RNA, 60 nt, Human
gaacccuggggguggccagugccagcuuuguuaggucacgaauggcuucucccaggcuuc

SEQ ID NO: 4139654 - RNA, 113 nt, Human
gaaccguucaaaggaaaacuccuggcuuggccuuguuaaggaggcccucucaguccaggagguggggccucucaggauuaaggccacagauccagguaccuucgaugauguuc

SEQ ID NO: 4139655 - RNA, 111 nt, Human
gaaccuacucaaaucuuucccaggaacccaguccaggugcagccucgccugcagaaggccgccaugcuggguguggugccuggggaaggugaaagguccaggagcagguuc

SEQ ID NO: 4139656 - RNA, 55 nt, Human
gaaccucucagcagccaugauccuuauaggacuuagugagcuauuuagagguauc

SEQ ID NO: 4139657 - RNA, 58 nt, Human
gaaccucuuuagugcauccuucacguucuuguuccugaggcuguagauuagaggguuc

SEQ ID NO: 4139658 - RNA, 56 nt, Human
gaaccuggaauguggcgcccaacaauguaaugaauggcgcuuaauuuuccagguuc

SEQ ID NO: 4139659 - RNA, 82 nt, Human
gaaccuguugggggcagcugucuugguucucaaaagacugaauuauaaaaguccuugaucuagacuggcggcccacagucuc

SEQ ID NO: 4139660 - RNA, 60 nt, Human
gaaccuuaugguaaaucuagaggaaguuugucucucaugauagaugcugccauaagauuc

SEQ ID NO: 4139661 - RNA, 71 nt, Human
gaacgcaguccaucccucgaguuagggugcagucagccacugcccuaagcuuucgggcugagagugaaguc

SEQ ID NO: 4139662 - RNA, 82 nt, Human
gaacggggccuuucuggagcagauuggaaaaucccccggagcgggugggggccuugccagcugcuugggaaaaugucuuuuc

SEQ ID NO: 4139663 - RNA, 60 nt, Human
gaacguaaauguucauguuugagagggaacaauggcacugggaaugugaauauuuacuuc

SEQ ID NO: 4139664 - RNA, 94 nt, Human
gaacuaaaaguguggucucaagaugucagggcaccugcuuacucaguccuagaaauggcaugcuuaucuggcauuuugagucucacugacuuuc

SEQ ID NO: 4139665 - RNA, 77 nt, Human
gaagugcagaaggguagggcaagaggugcccagcaaggcuuugggcaagcacaaggcccugaccuucacugacucuc

SEQ ID NO: 4139666 - RNA, 59 nt, Human
gaaguggcuguuugguucuguuuggguuucccagccaguauauuccaaagccuuuuuuc

SEQ ID NO: 4139667 - RNA, 60 nt, Human
gaagugguagucacagggacaguaaggcaagcccagucugugucuaaugacuauuucuuc

SEQ ID NO: 4139668 - RNA, 76 nt, Human
gaagugucugauuagcauguuccugauccucguucuauuuguagcaaagaugggaggucagggacugucacauuuc

SEQ ID NO: 4139669 - RNA, 59 nt, Human
gaaguguuuugugguugugaaucacuuuuaauggaagugacaacuuuacaaaauucuuc

SEQ ID NO: 4139670 - RNA, 59 nt, Human
gaaguuacaccuuugccccaagucauagauaauuuucuggacgggcauaagguggcuuc

SEQ ID NO: 4139671 - RNA, 92 nt, Human
gagcaggacguguuauuggguugacuuuguaaagauuguuuuacuguaacuguagucauuuugaaaagcauuugaguaacuacauuaugcuc

SEQ ID NO: 4139672 - RNA, 69 nt, Human
gagcaggaguaaaccuagcaauaaaaaccaaaccucugccuucagagguauaugcuauuacuucugcuu

SEQ ID NO: 4139673 - RNA, 65 nt, Human
gagcaggauuuugaagacagcgaaagcagcauuguucucuggcuggcugucugcggggccuguuc

SEQ ID NO: 4139674 - RNA, 73 nt, Human
gagcaggcacccagggaugucucuggaagggaggauggggcccacuucaccaacugccacaucccuccugcuc

SEQ ID NO: 4139675 - RNA, 68 nt, Human
gagcaggggcugggaaugccaggcaauacuacacaaugaagaauuguccagcagcucagucuacguuc

SEQ ID NO: 4139676 - RNA, 60 nt, Human
gagcagguacuccugugugggccuccacccaccuuggaguagcacauacaguacuuguuc

SEQ ID NO: 4139677 - RNA, 68 nt, Human
gagcaggugcccaggggacaguggcuguuuguucugcaugggccaugcgguguccugagcaccuguuc

SEQ ID NO: 4139678 - RNA, 65 nt, Human
gagcaguaauccaucauggccuggcguuggcgggugcugccagcugaagcccugguggaacuguc

SEQ ID NO: 4139679 - RNA, 75 nt, Human
gagcaguauucacaguggaaacagcuaagccuugaggcaaacauaucagggcuuaaaaucuuguuccacuugcuc

SEQ ID NO: 4139680 - RNA, 62 nt, Human
gagcaguggucugaucuucuaaguguucacucccaccacuuccugaagaggcuacacugcuu

SEQ ID NO: 4139681 - RNA, 70 nt, Human
gagcaucaucaagagaaggggaagaugaagcugacucccugcaccugcuuccuccccauucuguuggcuc

SEQ ID NO: 4139682 - RNA, 85 nt, Human
gagcauccugcagugggcugggccaucuccuuuguguggcccuuugccaggccacucugagaucuggcuuauccuugaagggcuc

SEQ ID NO: 4139683 - RNA, 55 nt, Human
gagcaugacaggagccgaauugcacggccagcaagggcgggcucaucacaugcuc

SEQ ID NO: 4139684 - RNA, 62 nt, Human
gagcaugagacuagcucaugagcagggaaaacccugccuauucgauuguugucuuaaaacuc

SEQ ID NO: 4139685 - RNA, 79 nt, Human
gagcaugggugccaggaagggggauccuuggaagccauucuggaaggcugcccaccacaccugcuccugcacccaccuc

SEQ ID NO: 4139686 - RNA, 58 nt, Human
gagcaugguacucacacugaucucuauccacuuugacauccuggaguauuccaugcuu

SEQ ID NO: 4139687 - RNA, 67 nt, Human
gagcauguuuacucuuuuaaaaaugaauugaaaugaucgauuguacuuuugucagguggacauguuu

SEQ ID NO: 4139688 - RNA, 88 nt, Human
gagcauuuucuugguauuuuguuugaugguguuuuggaguuuuuaguucacugagauauuuaaaucagacaaagaauggagaaugucc

SEQ ID NO: 4139689 - RNA, 77 nt, Human
gagccaaauccagcagcuggcuuacuugagaugcaucuggcaaauuccagggcaaagccagugacucccagcggcuc

SEQ ID NO: 4139690 - RNA, 56 nt, Human
gagccaacaggcaaccugcuccaaugauuuagugaggggguuguguggaagguauc

SEQ ID NO: 4139691 - RNA, 81 nt, Human
gagccaagacaaugaguggaaucaggccgugcguggggccaagauaaacugugcuaauguccugaccguucuggauggcuu

SEQ ID NO: 4139692 - RNA, 83 nt, Human
gagccacucuaguauauucucauuuuggcccagaggcauaaaaucgcaagggcagcaucguguggaaagugguagaaaggcuc

SEQ ID NO: 4139693 - RNA, 78 nt, Human
gagccacuuugaauagcacuuuauucaggaacuccaaaugccaauuuguuuucuacugugagguguguguucaagcuu

SEQ ID NO: 4139694 - RNA, 60 nt, Human
gagccagaaagugacuuuaaacucaggcaaccugacucuaaagccaacacuuuacugcuc

SEQ ID NO: 4139695 - RNA, 80 nt, Human
gagccaggaacccaacaacauagggcuaguuggaggugguuauucaugccagcagcugcuaugugguuuuucuaugguuc

SEQ ID NO: 4139696 - RNA, 61 nt, Human
gagccagggcucuccuucgcgugcugguuucuuucccagcaccuggacuguggccuggcuc

SEQ ID NO: 4139697 - RNA, 59 nt, Human
gagccaggguuugaaacuagacagaucagcucuagagacugcucuuucagccuuggcuc

SEQ ID NO: 4139698 - RNA, 56 nt, Human
gagccaugagauaguugguucgucgaaaacaauaacaaccaacagaaucaugucuc

SEQ ID NO: 4139699 - RNA, 73 nt, Human
gagccaugggguuuucggucauuuggccuggcuuauucucugccccaucaccagcuccgugagccucgggcuc

SEQ ID NO: 4139700 - RNA, 67 nt, Human
gagccauuguccaagccuguuucucuagucagccuggcaaugcagugugagcuugggcaacuugcuu

SEQ ID NO: 4139701 - RNA, 85 nt, Human
gagcccaaguuucuucaucuguaagauaagcaaauuuacuaaggucauggguaucuaguacaugauggacagagauuugaagcuc

SEQ ID NO: 4139702 - RNA, 77 nt, Human
gagcccaccaccugugcaaagacuggucaggacuugaacccugaaaggcccucugcaugggaggcugguggacguuc

SEQ ID NO: 4139703 - RNA, 59 nt, Human
gagcccagcccagagccauauguggccuccccaagagggcucacuggugggcugggcuc

SEQ ID NO: 4139704 - RNA, 86 nt, Human
gagcccaguguggauggccuuuccguguucugugaaggcgcuggcaacuccacagagcuggaaaggcugggccaugaacagggcuc

SEQ ID NO: 4139705 - RNA, 61 nt, Human
gagccccuccaguggcauaaaauuagguuuuaugacagauuuucaggcuccuagagggauc

SEQ ID NO: 4139706 - RNA, 61 nt, Human
gagcccgagcgcguacccggcggagcgcgcgcccgcccccgagugcgccugcgcggagcuc

SEQ ID NO: 4139707 - RNA, 56 nt, Human
gagcccucaaugaaucugcauuuuauagcauguacugugcaaguuucggggguauc

SEQ ID NO: 4139708 - RNA, 77 nt, Human
gagcccucagcccgguucccggcuggccuuggcccacacggucuggcccuggcuggagcccaggcuacacucggcuc

SEQ ID NO: 4139709 - RNA, 60 nt, Human
gagcccucagggcuggaaagccaggaagacucuuccuugggagcccagccuuaaggguuu

SEQ ID NO: 4139710 - RNA, 59 nt, Human
gagcccugcuuccaagggggcagaaggcaccuugccuuaugccucccugagagcagcuc

SEQ ID NO: 4139711 - RNA, 56 nt, Human
gagcccuggacuuuccuaaaaccgggaaaucccaggacaggacuagaccagagcuc

SEQ ID NO: 4139712 - RNA, 79 nt, Human
gagcccuggagauuggcaguagucucggcuaccccucauggugccgggguccgaauuacucgccucucugggacagcuc

SEQ ID NO: 4139713 - RNA, 75 nt, Human
gagcccuggggugucggggaggccacauguagcuugucuaagcaucugaggcccuacccugagccuugcaugcuc

SEQ ID NO: 4139714 - RNA, 59 nt, Human
gagccgaggcgcacagcucgggccccacgaugggccgcgagcgccgccgccucgggcuc

SEQ ID NO: 4139715 - RNA, 55 nt, Human
gagccgugccagcccugucucgccaucccagccgaggagggcagcgcgauggcuc

SEQ ID NO: 4139716 - RNA, 69 nt, Human
gagccuagcaugggucgcgucucuggauggaaggggucaguuccaguuuggacagacccugcuucacuu

SEQ ID NO: 4139717 - RNA, 57 nt, Human
gagccuagugagauggcgguagcuguggacacaguggcagccuuguucauuaugcuc

SEQ ID NO: 4139718 - RNA, 67 nt, Human
gagccuccagguggacaaaauggcuccagaaauuagggaucuggcaggccuugucaaucugagguuu

SEQ ID NO: 4139719 - RNA, 61 nt, Human
gagccucugaggaucugaagggaacaguggauacuguucagaaaaaaucuucauggugcuc

SEQ ID NO: 4139720 - RNA, 60 nt, Human
gagccucuggaucugaguuucuuguuuuucuuucaugccgagguggcucuuccugggcuu

SEQ ID NO: 4139721 - RNA, 79 nt, Human
gagccucuuacucaucccgaagucaucagucauguuuccaagagugugaguaauucagggagggagggagagagggcuc

SEQ ID NO: 4139722 - RNA, 61 nt, Human
gagccugagcaaugugauguuuucaauugauuucuaaauacacacagcucaguuuuugcuc

SEQ ID NO: 4139723 - RNA, 111 nt, Human
gagccugccugaucaucuucacugucaccuugcucauccucggaggaugaggacuuuucaucugaggaacuggcaaagauggcccugaauaaguccauggaugggcggcuc

SEQ ID NO: 4139724 - RNA, 92 nt, Human
gagccugcuggcucucaggcugguccccagggucacagucacuuuccaugggcaaggcuggagccugcagagccacauccugaggcagguuc

SEQ ID NO: 4139725 - RNA, 64 nt, Human
gagccuggggucucugacucacaguccagggcaccugugcugucucucuaggacacuggggcuu

SEQ ID NO: 4139726 - RNA, 76 nt, Human
gagccuguuauaugucagguguuaugcuaaguauucuuacauagaugacuucauuucauuugcacagugacagcuc

SEQ ID NO: 4139727 - RNA, 65 nt, Human
gagccuguucaguaaccuauaaaacacauuuaauauugauguuuuuccaugugcagaacaagcuc

SEQ ID NO: 4139728 - RNA, 130 nt, Human
gagccuucagaaaugaagacccauuaucccccaaagcaaggcgccacagugauugcaaagcgguagugauuuguaguuguggaugcugaaguugugugagauguugauucugaaccucuguuuggcaauc

SEQ ID NO: 4139729 - RNA, 70 nt, Human
gagccuucuaggaugucaucugcuacugguguccauuccaguugugucugucugcaucccuaugaggacc

SEQ ID NO: 4139730 - RNA, 88 nt, Human
gagccuugaauguguccucucuuaaucucaucuuuuacagggaagggcauugaggcugagagacauuaagagacacuugcucaaguuc

SEQ ID NO: 4139731 - RNA, 76 nt, Human
gagccuugcuggaauuuuucuaggauuuuuaugccaacuuaaacauuggagguucaagagaguauuccaugggcuu

SEQ ID NO: 4139732 - RNA, 80 nt, Human
gagccuuuuaaaguuucagaaacuuggucuaugggccuuuguucucuucugauuaaguaacugaacacuuuguauagcuu

SEQ ID NO: 4139733 - RNA, 97 nt, Human
gagcgaaauuuuggcccaugguuuuauuucucuauagcuagaaaacaagcccauuuuccagcuguagaugagaaaggaaggaagggcauguuugcuu

SEQ ID NO: 4139734 - RNA, 82 nt, Human
gagcgacgauggcuccuggaccgccuaugaagccggcgucugugacgaucuggagcagcagguggccaggggcaaccagcuc

SEQ ID NO: 4139735 - RNA, 74 nt, Human
gagcgagagagacaggaauggcauuaagaucugcuuuaaguacaguuaucugaaauguucucuuguuuugacuu

SEQ ID NO: 4139736 - RNA, 70 nt, Human
gagcgcagcggcuggaccagcguucaagcccaagcacaggccugcgagaaccuuguuccagccgccguuu

SEQ ID NO: 4139737 - RNA, 58 nt, Human
gagcgccagguagagcagcaaguugaguucccacuccaugcuggaggcgccggcgcuc

SEQ ID NO: 4139738 - RNA, 62 nt, Human
gagcggaagaaggguguucuugggacaucaaccccaagguauuucaaagcccacuuccucuc

SEQ ID NO: 4139739 - RNA, 75 nt, Human
gagcuaaacugcaaacagaaaagcuacuuugucugcuucuugcggccagagagcgaaccugugugcuaguugguc

SEQ ID NO: 4139740 - RNA, 73 nt, Human
gagcuaaggucacaagaagcaggaucuucauuugcucugcuaugaaaaacucugugaccuuaaacaaacgcuu

SEQ ID NO: 4139741 - RNA, 82 nt, Human
gagcuaauuuuuagcauauuuccaugaaggcagauuuuaucuuccauaaaugcuuagauucauagaaauggugaguuggcuc

SEQ ID NO: 4139742 - RNA, 112 nt, Human
gaauguagaagaaugugaaaauguauguaauuagucacuucugccuguuugguagaauauuggggccagaugggaagaagcaugacuucuccaugcuuugcugacuacaauc

SEQ ID NO: 4139743 - RNA, 83 nt, Human
gaaugucaugguaguuacucaaggcugauauaaggcagcucuuguugguuuaauuguugggagccuugaaguaccuuccauuc

SEQ ID NO: 4139744 - RNA, 77 nt, Human
gaaugucccuaucccugcccuccagaagcucccaguguugugggacucugauggauggacagggguagugaagacuc

SEQ ID NO: 4139745 - RNA, 70 nt, Human
gaaugucccugcaguugcugccuaaccagauugcaguucugcugggcugcagcuacuggagggaacauuu

SEQ ID NO: 4139746 - RNA, 93 nt, Human
gaaugucugaguuuccacagaauuuaaagcucuagacugaucuauuuuaguuuccaggcaggagcuaauucuuauggcuacuauagggcuuuc

SEQ ID NO: 4139747 - RNA, 60 nt, Human
gaaugugggcugugaagaggagggccucugcucugccccucuuaguagccuguuauguuc

SEQ ID NO: 4139748 - RNA, 67 nt, Human
gaauguuacuuugauuuuguccacacuuucuuuucuuucccaauggauagagucauagaaaucauuc

SEQ ID NO: 4139749 - RNA, 118 nt, Human
gaauguuagcacuagaguuguuaguacacaugcuaagucauaaaagaguaucacucuucagcagaggacuuuaaauuauaugacugugguggauuguauuaaaguucagcaaacauuc

SEQ ID NO: 4139750 - RNA, 82 nt, Human
gaauguuauuuuuuccuacaguuauauucuugauuggaccacaaaguuuuucauaauacuguacaugaaaaauaggacauuc

SEQ ID NO: 4139751 - RNA, 94 nt, Human
gaauguucauaaaauguaacuguucaucucuuagaaaguacaccaauuuucaacugguaugcuugcaagagaugcaaugacuauguucacauuc

SEQ ID NO: 4139752 - RNA, 84 nt, Human
gaauguuuuauguacucagaagauguggguagauagaagagaaaaugcagccuucugucuggcugucucugaguauagacauuc

SEQ ID NO: 4139753 - RNA, 100 nt, Human
gaauguuuuggcagaaauuuuucagauaucauuaauuuaguagcaaaaaugcuaugaaaugugaugauauuaugaaaguauaguucuacucauaacauuu

SEQ ID NO: 4139754 - RNA, 55 nt, Human
gaauguuuuucaaaccuguggcaugcaucauuucagcuaagggagaaaaacauuu

SEQ ID NO: 4139755 - RNA, 102 nt, Human
gaauuaauguuguagaggaaugucagcuucucagggaaaaguuuaaauaaagucaaaauaguguuuuuccuuagggguuacucaccuuuguacuaauaauuc

SEQ ID NO: 4139756 - RNA, 62 nt, Human
gaauuaauuugccaagguuaucuuguuauugaacaacaaugugaggccuugguaguuaucuc

SEQ ID NO: 4139757 - RNA, 85 nt, Human
gaauuacacaaucuguuuuuccauuugaaugaaacaucaugaacauugcgauuuuguuaaaugguaaaacuguguugugugguuu

SEQ ID NO: 4139758 - RNA, 67 nt, Human
gaauuacagccagaagaaugaaauguuuugaaccugaacagcccauguaauuucucuggggugauuc

SEQ ID NO: 4139759 - RNA, 61 nt, Human
gaauuagcuguuuugccauaagcgcuaagcugugcuguaagugcuaaguugacagcaguuu

SEQ ID NO: 4139760 - RNA, 88 nt, Human
gaauuaggcagguauucuccaguggucacguuauuuuuagaucuccaaaugauggagcuggaaugggccauuugaggccugcugguuu

SEQ ID NO: 4139761 - RNA, 57 nt, Human
gaauuagucaccuguggacuacucugucacgcauuggcaggucuucauguggcuguc

SEQ ID NO: 4139762 - RNA, 58 nt, Human
gaauuauagguuugcaugcuaacuaagcagaguugauguaugacccgaaccuuaauuu

SEQ ID NO: 4139763 - RNA, 77 nt, Human
gaauuaugucuugccuggcagucuuuauuaauauuggauccugcaguuauaaagauuguuauguaucuuuauaguuc

SEQ ID NO: 4139764 - RNA, 60 nt, Human
gaauucaagugcaaugguauaucuggauuuuccugccccaguuauuuuugccuugauuuc

SEQ ID NO: 4139765 - RNA, 82 nt, Human
gaauucacugugcuuguaguaaacacuauucugaucuucuacgugaagcuugggcaacauuuuacuucacagguaaguauuc

SEQ ID NO: 4139766 - RNA, 56 nt, Human
gaauucauuagggaagcuaucuaaauugguuagauuuuaugcuuucaaaugaguuc

SEQ ID NO: 4139767 - RNA, 68 nt, Human
gaauuccagcaggguagggguggaagggagugcaaaaacaugcagucuggccuugccuugucgaguuu

SEQ ID NO: 4139768 - RNA, 120 nt, Human
gaauucccaaugccaaguugcaauaauacauuuaaugcuuuuccuucaaauaagaaaucaauaguauuuauauaugagguuggggcaccagugucuuugcaauuuuccaggagggaauuu

SEQ ID NO: 4139769 - RNA, 64 nt, Human
gaauuccucugagcuaggagauuuaggagaucaugagcaaccacauuucuuuuucagagaauuc

SEQ ID NO: 4139770 - RNA, 62 nt, Human
gaauucuaccagggcaagaggggaaccagacagcugucaccucuaaugcccuuguucaguuu

SEQ ID NO: 4139771 - RNA, 71 nt, Human
gaauucucuguaggugccucugucuacaauugauaauguuauugauugguucagaugggaucugcgaacuc

SEQ ID NO: 4139772 - RNA, 77 nt, Human
gaauucugguuuugaaaugaaugguuggaaugcauuuucuuugauaaaauaugcacaaaauuuuagagcuagaguuu

SEQ ID NO: 4139773 - RNA, 101 nt, Human
gaauucugucuaguugauguaccaguccuuagauuuuacugccaaguugcuaaaaccauaugggguaaaauguaggagauacguacacacagacuuaguuc

SEQ ID NO: 4139774 - RNA, 84 nt, Human
gaauugauucaauggauguaugguuucuucugcacaacauuauguguugaagucaguucauauuuuuauaaggaguuauaguuc

SEQ ID NO: 4139775 - RNA, 55 nt, Human
gaauugcagaugauccccaaguuaggagcuccugcauggggcuauacugcuguuc

SEQ ID NO: 4139776 - RNA, 60 nt, Human
gaauugcucugccuggccagccugcauuccagcguuuacucugguggccuagggcaccuc

SEQ ID NO: 4139777 - RNA, 120 nt, Human
gaauugggaaugugcauagacuuuggauggaaguauggaauuuggaacuagauuuuuaaauuccaaucucacugguucuacaguuccuauuacuuacaaacucucuguuaugucuaauuc

SEQ ID NO: 4139778 - RNA, 83 nt, Human
gaauugugaagcauuuaauaugcuugauuaggaaaacacaagccacacccuauucagcauaaucaguagcuugaccacaaguc

SEQ ID NO: 4139779 - RNA, 80 nt, Human
gaauugugggcaaugucugucuauagccaugagaucagaacaacucuguuucauggggauaguauuuuucuccacaguuu

SEQ ID NO: 4139780 - RNA, 91 nt, Human
gaauugugggguguuagaaaggcuauuggaccaguuauuagaagaccugaaauaugguuucuagaccuuuugaugaauaccugaaugacuc

SEQ ID NO: 4139781 - RNA, 77 nt, Human
gaauuguguuuuuccuuuccuacuuguuggucagguucuuuuuaaucauaagaaggaaaauauuuaaaauauaauuu

SEQ ID NO: 4139782 - RNA, 58 nt, Human
gaauuguuagcugaucuugagugcauauuuucuauguacuguugcacacuaauaguuu

SEQ ID NO: 4139783 - RNA, 67 nt, Human
gaauuguugaggagacucuucaauguggaaaucaaaaccagcaauugaggguaaauuucaauaauuu

SEQ ID NO: 4139784 - RNA, 103 nt, Human
gaauuuaggauauuuauugggauagaaugguaccuugagaauugaaaaccaagccucaaaaucucagagcaucauuuucuuaguagaauuagacccuucuuuc

SEQ ID NO: 4139785 - RNA, 68 nt, Human
gaauuuaucuacguuaaguauggcaugcuuacaguacauuauugccugugauacuggaggauaaauuu

SEQ ID NO: 4139786 - RNA, 56 nt, Human
gaauuucaacaguccucaaaugguggguauuaccuuauuugugguaguugagauuu

SEQ ID NO: 4139787 - RNA, 73 nt, Human
gaauuucagugugucaguuucagcagggaaaucacaucuccagccucccuugaccucaagauccacugaauuc

SEQ ID NO: 4139788 - RNA, 91 nt, Human
gaauuuccuagauacucagagucauugcccuucuaucaguucaccaugcuagaaggccuagaguaagacauuuggccguaucuggaaguuc

SEQ ID NO: 4139789 - RNA, 82 nt, Human
gaauuuggucuucagugauuucuguugccagcaauaucuuauuuuuucaacuaggucaugagaaaucuuugaagguuguuuc

SEQ ID NO: 4139790 - RNA, 130 nt, Human
gaauuuggugagggagccagcagcucugauggcuaugucguugguguggaaguugguaucaaucacaagucgacugucauacacaagacaugcaucauugagggcuuuaaacguuucauaauccacauuc

SEQ ID NO: 4139791 - RNA, 57 nt, Human
gaauuuuaauaaagguuuaucaggcgcuuguuauggugcagaacuuuuauuaaauuc

SEQ ID NO: 4139792 - RNA, 65 nt, Human
gaauuuuagaauaugugggcuuuugugauuagcuucuuucacuuagcauaacguuuccaagguuc

SEQ ID NO: 4139793 - RNA, 94 nt, Human
gaauuuuuacagagugugagauguuugcagaccaggaggcuuucuugcauuuaugccucaggaaaugggucguuuuauaauucuugugggguuc

SEQ ID NO: 4139794 - RNA, 87 nt, Human
gaauuuuugagcggguaaaggucgcccucaaggugacccgccuacuuugcgggaugccugggaguugcgaucugcccgaccuuauuc

SEQ ID NO: 4139795 - RNA, 64 nt, Human
gacaaaacauuugcugcuaucugaagaguauauuccacacuucguuuuuaguagcaauguuguu

SEQ ID NO: 4139796 - RNA, 61 nt, Human
gacaaaacugagaucacacuguuagaauauagcugauugaggguuuggucccagguuuguc

SEQ ID NO: 4139797 - RNA, 86 nt, Human
gaccgggcgcgcggcgcccccggccgguccccgcccgaccccgcgcagggcacagaucggggcgcacgcguuacucguauccgguc

SEQ ID NO: 4139798 - RNA, 87 nt, Human
gaccguaucucuucucuuuugaugaccagcaugcucuagguucucuccugcuggcacguggaccaggagaaguuagcagauacgguc

SEQ ID NO: 4139799 - RNA, 69 nt, Human
gaccgucuucccauggggucuccuggaguuucuaggaggcucuggagagguucccaugggaggcugguu

SEQ ID NO: 4139800 - RNA, 69 nt, Human
gaccuaggcugcaccuaggauggcuucuggaacucgacccaccagcaguccuguguccagucauugguc

SEQ ID NO: 4139801 - RNA, 85 nt, Human
gaccuauauaauuaaguccuucaccuaauccucaauauuuucugcccuugagaugcaggagaugggacuguuuuuauaugcuguc

SEQ ID NO: 4139802 - RNA, 59 nt, Human
gaccucagauuuucccaggccaggucuaccacgaaggggccugaaauagcucugagguu

SEQ ID NO: 4139803 - RNA, 60 nt, Human
gaccucaguauuguucaggaugcagccaaaauccagcuccaucaucucaaagcugagguu

SEQ ID NO: 4139804 - RNA, 104 nt, Human
gaccucauccuccaguggccauuucuguaggaccuguuccuugccacuguuugcugauugauacaggcuucucacagaaaagggaucuccagaggauggugguc

SEQ ID NO: 4139805 - RNA, 84 nt, Human
gaccucaugccaccugcuguagccacugggcucagcccuggagcugagagcaucgcuggagauagacguggcagagaagagguu

SEQ ID NO: 4139806 - RNA, 64 nt, Human
gaccucgucccugucggaagggucaggccugggugccugggcuucuggaguggggcagaugguu

SEQ ID NO: 4139807 - RNA, 89 nt, Human
gaccugaacauauuuaauuugcucauugugauaggcuuggccaaaccacaagacugaaucucauaugaauaaauuagucuuuguuaguc

SEQ ID NO: 4139808 - RNA, 90 nt, Human
gaccugagaaaaaacaacuuugacccuuguucuuaaaaugcuuuaaccuugaaguugcuugagacuuaagaggucauguugcuuuagguu

SEQ ID NO: 4139809 - RNA, 77 nt, Human
gaccugcuggaccugccacccucucaaugcauuccucaaaucugucugcucagugggugagcuuggucuagauaguc

SEQ ID NO: 4139810 - RNA, 56 nt, Human
gaccuggauucaaauucagacucugccacuuaguugcuuuugaauuugggccaguc

SEQ ID NO: 4139811 - RNA, 73 nt, Human
gaccuggcccagcaacuucacugauuuaagccugcaaagcugaaugcugagaauggaguuguucugcuagguc

SEQ ID NO: 4139812 - RNA, 59 nt, Human
gaccugggguaagcuuggcaacaaugaaacaucuuuuccaggcuauucccuuuggaguc

SEQ ID NO: 4139813 - RNA, 78 nt, Human
gaccuguggcuccagcugcugccagccaagcugcugugaaacuagcugcugccagccaagcugcugccagaccagcuc

SEQ ID NO: 4139814 - RNA, 64 nt, Human
gaggaccuuuaguagaagugcaaaaauaagagucgcuuucaauguaucuucgcugcaggugcuc

SEQ ID NO: 4139815 - RNA, 70 nt, Human
gaggacgggggcacccacaaaugaggaaauggcagggucaaguugggcguuauggagugccccucccuuc

SEQ ID NO: 4139816 - RNA, 59 nt, Human
gaggacuguggcacauugguagggucugugccgucuacagggcuuaucugucacucauc

SEQ ID NO: 4139817 - RNA, 92 nt, Human
gaggacuuacugcucaauauuuagaaacuugguauggauggguuucugcggcaacacagcaaagcagauuucauuuaaaccuuucuguccuc

SEQ ID NO: 4139818 - RNA, 73 nt, Human
gaggacuucgggugcuuuuagauauguagcuucuagccauauuaucuauuuaaaagcauacauacccuuccuc

SEQ ID NO: 4139819 - RNA, 90 nt, Human
gaggacuugaggaccugucuggacaaaggacucacaggauguuagauuuagauucguauauuaggauuuuguccaaguagcucaugccuc

SEQ ID NO: 4139820 - RNA, 91 nt, Human
gaggagaaacacacaagaucugugaauagauugaagcuuuggucaagaaauggagguuguauguuugauuugaaggucuugaguucuccuc

SEQ ID NO: 4139821 - RNA, 85 nt, Human
gaggagaaacccauauacuucccugcagaguaaagagaaugcgcaauugcuuuugcuaaagggggaaauagauuugggucucuuc

SEQ ID NO: 4139822 - RNA, 63 nt, Human
gaggagaauuuggugaaagcuuugccuggcuagaucucaggcuggaaaucacuagauuccuuu

SEQ ID NO: 4139823 - RNA, 86 nt, Human
gaggagagaaaaagcuggcaaggcaauuuggauuaugcuucagaggagaaaaaguugaucuuucuguacccuugucaucucuccuu

SEQ ID NO: 4139824 - RNA, 78 nt, Human
gaggagaguaccauugggccgcaccagaacuaauauuaaugaaugccuuacacuacgcccaaaugcagugcuuucuuc

SEQ ID NO: 4139825 - RNA, 74 nt, Human
gaggagaugacucugugggaggaggcucagccguagucuggauggugaugcucuguucuacgcacaguagccuc

SEQ ID NO: 4139826 - RNA, 60 nt, Human
gaggagauggguagguaagaggguuagaacaaauugcuuccuuuaguuacacguuuccuc

SEQ ID NO: 4139827 - RNA, 68 nt, Human
gaggagcagggcuuugcagacuugggcgauuccaucaauuuauuguccuuuuguaaacccugcugcuu

SEQ ID NO: 4139828 - RNA, 80 nt, Human
gaggagccaagguauguguguugugguuugaccuccugaauccuacugagccugaaaacuuuacaucccuuggcauuuuc

SEQ ID NO: 4139829 - RNA, 59 nt, Human
gaggagccaggaggucucccugcuccaaucugccuaaggcuuccucuuccugccuccuc

SEQ ID NO: 4139830 - RNA, 73 nt, Human
gaggagcuagguguggggcugugguguucuucugcugggagugugggggacgcagggccccgcguagcgguuc

SEQ ID NO: 4139831 - RNA, 58 nt, Human
gaggagcucuucuaaagauggcaaugaggcaacuuaagugcuaccaaaagaauuccuc

SEQ ID NO: 4139832 - RNA, 72 nt, Human
gaggagcuggcugucgggaggcagggaucagaccccucaagggcauccacaggccuccgacccuggcuccuu

SEQ ID NO: 4139833 - RNA, 61 nt, Human
gaggaggaaguucucuguaggcugcuauuuuucaucagccugagagaugugcuuuuuccuc

SEQ ID NO: 4139834 - RNA, 61 nt, Human
gaggaggaccugaaauucuugcuuuucacagugcuaugauaagcauuauuagauccuguuc

SEQ ID NO: 4139835 - RNA, 83 nt, Human
gaggaggacgugaacugaugggaauuuccacuaucuggguuuaaauccuggcuggaauuucucacucuuuccauuuccauuuc

SEQ ID NO: 4139836 - RNA, 74 nt, Human
gaggaggagguggaugccuaggcugggcaucucucaaaacccugccccggagcacacagucuuccuuccuccuc

SEQ ID NO: 4139837 - RNA, 57 nt, Human
gaggaggcacuugagcagauguuagcuauucucccuagccugugcacauguguccuu

SEQ ID NO: 4139838 - RNA, 58 nt, Human
gaggaggccugucugggaggccuccaagggaggagguacaccucagcagggcucacuu

SEQ ID NO: 4139839 - RNA, 58 nt, Human
gaggaggcuaucagcaaucagguacacaucaaccauauggcugucauguagucucuuc

SEQ ID NO: 4139840 - RNA, 99 nt, Human
gaggaggcuuucuggaggaggugacaaugcucagagucccuucccucgugguggcgcguuuccccgcggggcgugggcucuuaccugcuccuccuccuc

SEQ ID NO: 4139841 - RNA, 67 nt, Human
gaggagggcaggggaccuuccucagcucagcaccaacagccgcccugcagagagcccugccuuccuc

SEQ ID NO: 4139842 - RNA, 58 nt, Human
gaggaggggcacuugucuccuaguccgccaggaugaaggaacaagggagccuuuucuc

SEQ ID NO: 4139843 - RNA, 56 nt, Human
gaggaggggccggcacgcaguccuugaaagugggggcuguugcccgccgccucuuc

SEQ ID NO: 4139844 - RNA, 124 nt, Human
gaggagggucuaguucugggaggcggggcuauggguggagcuccacaaccuguuccugaggcuccuacaguugucaaagagcaccggcuaccccaaggccuccugacaaaagcucgacuucuuc

SEQ ID NO: 4139845 - RNA, 66 nt, Human
gaggagggugacaggacagagaaaugaccugcucugcagguaaauuuucaccugucgguucucauc

SEQ ID NO: 4139846 - RNA, 71 nt, Human
gaggaggguuagccuaaguggagaaaugaauggcuuacaacaacgauuucuagacuucaggcauucuccuc

SEQ ID NO: 4139847 - RNA, 61 nt, Human
gaggagguuccggguggagaagugcugugccacuggcagcugccacccugggagcucacuc

SEQ ID NO: 4139848 - RNA, 102 nt, Human
gaggaguaaagacacuucgguuuccuccuagccuccagccgcggacccucgcgggcgucccugcggcuuggugguugggagagacggaggcacuuuucccuc

SEQ ID NO: 4139849 - RNA, 60 nt, Human
gaggaguagaagggcaggaggggggacuccgugugccccagaacugucugcugcuuccuc

SEQ ID NO: 4139850 - RNA, 57 nt, Human
gaggagugacauuaagguauuacauccuauguguauacaugcuuuauguuauuucuu

SEQ ID NO: 4139851 - RNA, 62 nt, Human
gaggagugugggaauucaguccauaaacccuugguuucuucucgcaggacucccagcuccuc

SEQ ID NO: 4139852 - RNA, 78 nt, Human
gaggaguuucuggcucagugcugaggaaaguugaaacccauuuggccuucagcuuuucagcacugcuaguguauccuu

SEQ ID NO: 4139853 - RNA, 65 nt, Human
gaggaucaggcauugagaaggauggcuaaagaacuugaaaacuagucaccauuuucaccugccuc

SEQ ID NO: 4139854 - RNA, 86 nt, Human
gaggauggcuugaggccaggaguucaagguugcagugagcuaagauggugucacugcacuucagcuugggcaacaaagcgagacuc

SEQ ID NO: 4139855 - RNA, 81 nt, Human
gaggauucaagaggagaaaggcuggcuuugaagauggagaaagugccacaaagcaagaugcaguuucuccucuagagccuc

SEQ ID NO: 4139856 - RNA, 87 nt, Human
gaggauugcuugagcccaggaguuggaggcugcagugagcuaugacugugccacugcacuccagcccgggcaauaaagugaggucuc

SEQ ID NO: 4139857 - RNA, 67 nt, Human
gaggauuuaucuuuccgccgcuuuucuaccugccuaacaagcuggaaguggcagaaaaugaacacuu

SEQ ID NO: 4139858 - RNA, 72 nt, Human
gacuccagagugcauucguaugaacuguauguucggggcugauguuacaguauuaugagugauugaaaaguc

SEQ ID NO: 4139859 - RNA, 56 nt, Human
gacuccagccagagugccucuguucaguaguuuuaacagucguaucugucuggguu

SEQ ID NO: 4139860 - RNA, 59 nt, Human
gacuccccauccaggcagcaggugcucccugggcacuuacccugccaggcaugggguuc

SEQ ID NO: 4139861 - RNA, 87 nt, Human
gacucccucagcccaguuaagaaccuguuacucuuguuuauuagagucccaugaacagugguuuuuaguacagggaaagaggaaguu

SEQ ID NO: 4139862 - RNA, 92 nt, Human
gacuccuagaccaucuugccacuugguccucacucccugugccuuucccagccagaggccagcagacgugggacugaaggcaggaaggaguu

SEQ ID NO: 4139863 - RNA, 89 nt, Human
gacuccuauggcaggugugucucccaagaaggcccaccccugugagauguguggcccgaucuugggagacauuuugcauguggcagauc

SEQ ID NO: 4139864 - RNA, 73 nt, Human
gacuccucagagagaaucuuggcagcugagccugcccaagguucagugcacccaauucucuccaucuggaauc

SEQ ID NO: 4139865 - RNA, 123 nt, Human
gacucggguaaguuccaaaagagcuauguauuugcuaaaaggccauugauuuauauugaaacucaaugaaaauaauguuauuuuuagacaagggaguaauauugcccuuaacuuaccuguuuc

SEQ ID NO: 4139866 - RNA, 60 nt, Human
gacucuaggcugcccaggagcugagcgguauagagguugagagccuggcagccuggguuc

SEQ ID NO: 4139867 - RNA, 71 nt, Human
gacucucaaaagugcugggauuacaggugugagccaccacgccuggccuaaauuaguaauuuucaagaguu

SEQ ID NO: 4139868 - RNA, 97 nt, Human
gacucuccguaggauuuucugggaacugagcuccccuaggacaaucagguucuugcucuugggaauuagggagcucaguccucagauuuucucuguc

SEQ ID NO: 4139869 - RNA, 78 nt, Human
gacucugaggaagauacuguuccucuguguuucagaugaaggcauugaggcucagagaacagugacuugcccaagguc

SEQ ID NO: 4139870 - RNA, 80 nt, Human
gacucugcucucacuguucacccagcacuagcaguaccagaugguucuguggaguccuggggaauggagagagcacaguc

SEQ ID NO: 4139871 - RNA, 76 nt, Human
gacucugcuguucauuauuguuguguagugcaguggcuuacagauagcaacauaacaaucauaggacauagcaguc

SEQ ID NO: 4139872 - RNA, 77 nt, Human
gacucuuauguucagaaguagcuccccuucauuagaacagaaauuacugaguggauaggaauugcuuuagaugaguc

SEQ ID NO: 4139873 - RNA, 71 nt, Human
gacucuugauuaugggauggaagaaauuagcauuaugaauuuucucugugccauuuccauaauuaauuguu

SEQ ID NO: 4139874 - RNA, 67 nt, Human
gacucuugugaaacauggcaaguuugggcucuguggcuuaagaaaugucuaguuuuugucaaaaguu

SEQ ID NO: 4139875 - RNA, 62 nt, Human
gacugaacaguaagaggcuuuaugaauauauccaggugaaagccuuauuugucucaucaguc

SEQ ID NO: 4139876 - RNA, 61 nt, Human
gacugaaccucaaauuuggcucuaaacuucuuggcagcccaaaaaagagguagauucaguu

SEQ ID NO: 4139877 - RNA, 78 nt, Human
gacugaagggaaguuaaucguucacuuuuguuggguauuaaacuauugauaacaguaccauuaacuuugauuacaguc

SEQ ID NO: 4139878 - RNA, 58 nt, Human
gacugaagugauguggcuaaggggccaguuuggaucccggcuucauuuucuucugguu

SEQ ID NO: 4139879 - RNA, 65 nt, Human
gacugaaugcaugagcaggaagagcacaaagaggaugccucugagcuccuccugcucuguaaguc

SEQ ID NO: 4139880 - RNA, 67 nt, Human
gacugagagcguguacaaacuuauuuugaaucugaagccuaauggguuguauuuaugccucuuuguc

SEQ ID NO: 4139881 - RNA, 56 nt, Human
gacugagccugagguuuuggagcuggacaggcucagcuuugaauccuggcucuguc

SEQ ID NO: 4139882 - RNA, 72 nt, Human
gacugaggagguggagucaugcagaggggcugaaaguuuuacagcagcugcugaugaggccaccccacgguu

SEQ ID NO: 4139883 - RNA, 91 nt, Human
gacugagguccaggcugaccccuagaggacaugccccagcacaguuugggccaaaccuuucccuagggucucaacgucggacaaaccaguc

SEQ ID NO: 4139884 - RNA, 87 nt, Human
gacugauggguggcaccaggcgggguggcuguccaaagccaucacauggacagucuuugcaaaguccuggugcagauccuaaacguc

SEQ ID NO: 4139885 - RNA, 93 nt, Human
gacugauuucugccuugccucguuucuauguuuucuccuuuauuucagaaauacagagaagggguagaggauggaggaaagggaaaaucaguu

SEQ ID NO: 4139886 - RNA, 83 nt, Human
gacugcaagcaggcuagauugaagggcuggucauacuuucaucaccccaugucccgcagccuggccaguuucaccccauaguu

SEQ ID NO: 4139887 - RNA, 78 nt, Human
gacugcaaggaggugggguaucacuuaauguaauaauccauccuauaaaaacauuuauugacccccuccuugucauuc

SEQ ID NO: 4139888 - RNA, 59 nt, Human
gacugcauccuggaaauagcuaagaucagauuaccucuuggcagaauccaaugcacguu

SEQ ID NO: 4139889 - RNA, 58 nt, Human
gagauggauuauauguggaccauggaaaaugagguucguggcugugggcaucuguuuc

SEQ ID NO: 4139890 - RNA, 63 nt, Human
gagaugggaaaucgccaugggguaacggcagccgccucaaagucauucgauuuccucuaucuc

SEQ ID NO: 4139891 - RNA, 99 nt, Human
gagaugggaggauugcuugaacccaggaggcagaggcugcagugagccgagauugcacugcugcacuccagccugggugaaggagcaagacuccaucuc

SEQ ID NO: 4139892 - RNA, 96 nt, Human
gagaugggaggauuucuugagcccaggagguggaggcuaaagugagccauaaucacaccauugcacuccacccugggcaacaagaguuuuuaucuc

SEQ ID NO: 4139893 - RNA, 69 nt, Human
gagaugggcagaucacuugaagccaggaguucaagaccagccuggccaacauggugaaacccccaucuc

SEQ ID NO: 4139894 - RNA, 57 nt, Human
gagauggggggcaagggcuggccgaggaguccugaggcagucacccccuccugcuuc

SEQ ID NO: 4139895 - RNA, 68 nt, Human
gagauggggucuugccauguugcccagcuuugucucaaacuucuggccucgagcaauacucccaucuu

SEQ ID NO: 4139896 - RNA, 61 nt, Human
gagaugguugcaauaguuuaaacgucaguuugucugcguuuauccaacucuguaaucucuc

SEQ ID NO: 4139897 - RNA, 59 nt, Human
gagauguaagaggacuucaggaugcacagugcccuuugaggucccugccuugccuucuc

SEQ ID NO: 4139898 - RNA, 98 nt, Human
gagauguagauauggacauagauauagauaaaugaagauggugggcuauuuuagucaggaugcuauuguuauuaaucucugcuccauacugcaagcuc

SEQ ID NO: 4139899 - RNA, 125 nt, Human
gagauguauccauaauaagcccuguaacauuuaaaccaacuuguaaaugccuuuccaaaggcagugcuaccccggaaguugguuggagaauugcugaauuugcuacuauuggggaaaaacauguu

SEQ ID NO: 4139900 - RNA, 104 nt, Human
gagaugucaggugguggugauacucagccgaggcagaggcugaaacggcugcgccacaggcagccaaaaguuuuugcuuuguguauuuucaccucauugcucuc

SEQ ID NO: 4139901 - RNA, 95 nt, Human
gagaugucauuguuugcugcuguagcuaggcuuucuguuaaaaaucacagcaugaggcuuaaacugcugcaaccauuauccagugcuaacauguc

SEQ ID NO: 4139902 - RNA, 56 nt, Human
gagaugucuuaucgugaggaaaaagaaacuuccuuuuguucacauuuaggacucuc

SEQ ID NO: 4139903 - RNA, 88 nt, Human
gagauguuuaauuggguuuccuggcauuuuuuuaaugaaauuuuuuguggcuuaaaaaugcugugguagcuguguucauaaauaucuc

SEQ ID NO: 4139904 - RNA, 125 nt, Human
gagauuaagaaaaaaaaauucuauuuuuguuguaauguccucgcggcucuggggacgcuaaaagaaccgggccugccccgcccugcgcggggauaacgaaagcugaguguuuuucccuuuuuuuu

SEQ ID NO: 4139905 - RNA, 100 nt, Human
gagauuaguuaggacucuauuggaauaguuuagaagaagcuaaauauuuacugagcuuuguuauggcuuugcuuuggcuguuucaguccugcuuaguuuu

SEQ ID NO: 4139906 - RNA, 98 nt, Human
gagauuaguuuauuuuacagacuaaacagccuaaaacuuucuuucuucccacuauuauuccuugaggaaauaggcugcaagcuguauuuucuggucuc

SEQ ID NO: 4139907 - RNA, 60 nt, Human
gagauuauucugcacuuuuaaaauaugcucagcuaugcaguauauaugcagguuaaucuu

SEQ ID NO: 4139908 - RNA, 68 nt, Human
gagauucuuuuggggaucucauuaacaguuucuucuguuugugggauggcucuucccaaaggggucuu

SEQ ID NO: 4139909 - RNA, 68 nt, Human
gagauugcaugcuuuuucaaaugugcauuucuaugguggugugcauuuggaacugggcaugcaaacuu

SEQ ID NO: 4139910 - RNA, 76 nt, Human
gagauugucuccuagagccuccagagggagagugacccugcugucaccuugaugauggccuagcaaaacugauuuu

SEQ ID NO: 4139911 - RNA, 83 nt, Human
gagauuuaaggaacuggcuuacaugauuguugugugucuaucaaguucaaacucuguaggacaguucaacagacuugaaacuc

SEQ ID NO: 4139912 - RNA, 82 nt, Human
gagauuuauccauaucauuaaaaucuauccauagaauagcaccuaaaugcuggcaggauuuuuuugguggggauggaugcuu

SEQ ID NO: 4139913 - RNA, 67 nt, Human
gagauuucaaggcaaaagugacaauuagugguagcaacaccuuugggaauuuacugccuaaaaucuc

SEQ ID NO: 4139914 - RNA, 82 nt, Human
gagauuucauugaaguuaauucuucgucacuauuguugguaaauuaagaguuuuuaggaagcaguuucuguaaugaaauuuc

SEQ ID NO: 4139915 - RNA, 83 nt, Human
gagauuuccuuaauuuaagccuagaaugcagcuuugaguuacaagcugcauucuaggcuuaaauuuacuuugaaggaguaauc

SEQ ID NO: 4139916 - RNA, 88 nt, Human
gagauuucucagaccacugaugccaucucaccuuugagaugcuuacaagaucauucuagcucagcaggugggacagguucugagucuu

SEQ ID NO: 4139917 - RNA, 69 nt, Human
gagauuuuuaggaaaugacuuggugcuucguuucuuugggggaagugagugauuagguuuuuccuucuu

SEQ ID NO: 4139918 - RNA, 71 nt, Human
gagcaaacauccugacuguaacuaagagacuuuugcuacaaauucucucuugggagucagugauaagguuc

SEQ ID NO: 4139919 - RNA, 106 nt, Human
gagcaaacuguccagaugccuguguggucugcgcauuaagguauuuuguaauucucuaugauccaagcugaccacauaugguuucugauacuuacagggaguguuc

SEQ ID NO: 4139920 - RNA, 92 nt, Human
gagcaaagaguuagcagaugaaaccacagguguuuuuacucagaagaacaugaggggaagacuuagucgguucaaugcuucauuucuuccuc

SEQ ID NO: 4139921 - RNA, 62 nt, Human
gagcaaagcaaggccggaaggaaacucuccagaagaugaguaagagcuggcuuuggugucuu

SEQ ID NO: 4139922 - RNA, 64 nt, Human
gagcaacacugugaucuugagaaagguuuuuaaaauccaccucacuuucgcugugugaaugcuu

SEQ ID NO: 4139923 - RNA, 60 nt, Human
gagcaagauuaaaaggcuggguugugaucacacucacucucauuuuuucagucauuguuc

SEQ ID NO: 4139924 - RNA, 69 nt, Human
gagcaagguccugacuccacguucuagaggccacuuggccgauuggagacccuuggagucaaccuguuc

SEQ ID NO: 4139925 - RNA, 71 nt, Human
gagcaaugauuuggauaggccugaacuuaaaccaaguugucaccucuauucaaaucucauucagauugcuc

SEQ ID NO: 4139926 - RNA, 77 nt, Human
gagcaauucaauucaccuaguagaacccagcagcucccagccuguguggggauuaugagguagaaguugggcugcuu

SEQ ID NO: 4139927 - RNA, 126 nt, Human
gagcacacaucaagcgagucuuuuucuuuaggauacugaaaaaugaaccaacagugcgaauuucaauguuuuaguucacaguuuuauaccugagaggacaaaugccugaaagacaguguaguguuu

SEQ ID NO: 4139928 - RNA, 64 nt, Human
gagcacaggaagucuuugcccaggccagagaucucugugccugggaucagaauucccucagcuc

SEQ ID NO: 4139929 - RNA, 71 nt, Human
gagcacaguccuuuuguuaaaauuauuuuuugcuuuaaaaugcuugaguuagggauagagggauaguguuc

SEQ ID NO: 4139930 - RNA, 65 nt, Human
gagcacauguggagagucugggcccaguccuugcucugggaucugccucauucucgcguguguuu

SEQ ID NO: 4139931 - RNA, 89 nt, Human
gagcaccugccagacacugugcaaaggccucuacccccgacuucaggugguacacaggcagcccagugcugggaaaacagucugugcuc

SEQ ID NO: 4139932 - RNA, 59 nt, Human
gagcacgcucuauuuaggagaauucuauuuaauuugaucuccuaacuauaaaguggcuc

SEQ ID NO: 4139933 - RNA, 56 nt, Human
gagcacggaguaaggaauuccuucugaagacuggauuuggauucugcugccugcuc

SEQ ID NO: 4139934 - RNA, 86 nt, Human
gagcacucucauaguuccuuaagaucagaacuuuauacaggaaaaaguucccuuuacauaaaguuugauuuggcuggagaaagcuu

SEQ ID NO: 4139935 - RNA, 68 nt, Human
gagcacuuagaugcuaugaaugguauuucacugccauuaaaaggaagcauucuuugaaaaaaguguuu

SEQ ID NO: 4139936 - RNA, 63 nt, Human
gagcagaaacagcccuaguacagccugugacauuuacaacaugagguuuaucuguuucuucuc

SEQ ID NO: 4139937 - RNA, 69 nt, Human
gagcagacacugagcauuuuccuagcucucugcugacacagagcagucgcugaugcuaguguucuuuuc

SEQ ID NO: 4139938 - RNA, 77 nt, Human
gagcagacagacacuauuguguauaaaucaacuguaucuaagaugauguguagauaaauagguuaaauagaaugcuc

SEQ ID NO: 4139939 - RNA, 77 nt, Human
gagcagaggcaagcaaaggcaggacugcagcauaggccuaugggcuuggccucuguggcccugacucucuucugcuu

SEQ ID NO: 4139940 - RNA, 61 nt, Human
gagcagagucuuggcaggcccaugacagugccuugcaaaguccggcagccuggacaugcuc

SEQ ID NO: 4139941 - RNA, 72 nt, Human
gagcagaucacagagccuccaggagugcuggcuccucccuggcaucccagccucccugaggcucauaggcuc

SEQ ID NO: 4139942 - RNA, 103 nt, Human
gagcagauggaaauucuaucuagagcucaggguggaucagagucagcccacagcuuggcucccaccuccagccugaguuccaggugcuuguguccagcugcuc

SEQ ID NO: 4139943 - RNA, 73 nt, Human
gagcagauggguugggggugggaguggugagaaaguggagcccaucaaauccaggccccagaccguacugcuc

SEQ ID NO: 4139944 - RNA, 61 nt, Human
gagcagcacacaaagcccucaaugagcaagaaagaacagcucguaaggcaagugcugcauc

SEQ ID NO: 4139945 - RNA, 61 nt, Human
gagcagcaucuccggcuuaaagggaaacucucuaaguuccgggcagccgggagagucguuc

SEQ ID NO: 4139946 - RNA, 71 nt, Human
gaguauagggauaagaauuaaauucuuguuuucaaaggugagaagcaagaaaaucucuguccaaugggcuc

SEQ ID NO: 4139947 - RNA, 82 nt, Human
gaguaucucuguucuuacggaacuuaucuuuuaagguauugaauuuaauuugcuuuuuagaaaguuguucaguaagaaacuc

SEQ ID NO: 4139948 - RNA, 82 nt, Human
gaguaucugcuucacguugugccuuguuggcugacagacauaucuuagcaucucacaaaacgaugaggccaucaagaaacuc

SEQ ID NO: 4139949 - RNA, 81 nt, Human
gaguaugacaugcuuaagggaaguagagaagagucugcauuucuguagucuccuuaaauauuucccagagcaaacuuacuc

SEQ ID NO: 4139950 - RNA, 69 nt, Human
gaguauggagcaggagcccaggagcccacaaccaaacccacagggauucuggcuccgagcuccaucuuc

SEQ ID NO: 4139951 - RNA, 87 nt, Human
gaguauuaaaugagugaguccauagaaagcauauaucugccagguucuaugcugaaaauuggauuugaauagucucauuuaaucuuc

SEQ ID NO: 4139952 - RNA, 87 nt, Human
gaguauugcauagaggaaccagacugccuggguucagaucucagcucugccacuauuaauagcuguguguccuugggcaaauuacuc

SEQ ID NO: 4139953 - RNA, 83 nt, Human
gagucaaagguugcaugguauaugaccauguuauuugcaguguauguuaauaauguacauacauauuucgugcaaccuggcuc

SEQ ID NO: 4139954 - RNA, 129 nt, Human
gagucaaagugaaauuguguugagaagcugguaaugaaaguggcuguucuugccccaugcugugcaggugcccccaguugcagggacacccacuuccacguuucucagcuguccuucuuuucuuuauuc

SEQ ID NO: 4139955 - RNA, 66 nt, Human
gagucaacaagucagaucucacaggaaauucugagagcccagcacaucuggccuugaaaauggcuc

SEQ ID NO: 4139956 - RNA, 59 nt, Human
gagucacaaaagaugcccagggucaguuucuaguccuuccuuuugcaucugugugacuu

SEQ ID NO: 4139957 - RNA, 71 nt, Human
gagucacagaauaaauugguaucagagucuaauucagaaauaaugucuguucugauaccauacucugucuc

SEQ ID NO: 4139958 - RNA, 78 nt, Human
gagucacguuaauucucuugguuuugcugcaauguauuaugacucugucaggaggguccagagaaaacaaugugauuu

SEQ ID NO: 4139959 - RNA, 113 nt, Human
gagucacucugccaccuuuuggcuguacguaggaauugcaccuuuucuggcauuccccucauccggagaggaccugcaacucgcucuacagaccuagggcagcagcaucauuc

SEQ ID NO: 4139960 - RNA, 72 nt, Human
gagucacugccugauguggugaauauuuugaggccaaaaauuucccccaaauauuccugccauuaaugacuc

SEQ ID NO: 4139961 - RNA, 62 nt, Human
gagccacagccugacuuaacuguccuuuuccucuccagaguacagucagugcucuguggcuc

SEQ ID NO: 4139962 - RNA, 76 nt, Human
gagccacaggugggcucugggaaauaggaguagcuugguucugucauuuaccuuucccugagccacaggugggcuc

SEQ ID NO: 4139963 - RNA, 72 nt, Human
gagccaccacagagagcuguaauagucaugucuggggaauucuaggcauucuguagcuguuugcuggaguuc

SEQ ID NO: 4139964 - RNA, 76 nt, Human
gagccaccgaaucagaaacuugggggaagggggcccagcaauuuguuuuagccgcccuccaggugauuccgugcuc

SEQ ID NO: 4139965 - RNA, 66 nt, Human
gagccacgagcuguaauugcugcuguccuucuaagcaggggaaaagcagaccacgcuuuguggcuu

SEQ ID NO: 4139966 - RNA, 75 nt, Human
gagccagaaacuguggauucauuaaauucaguuuuauucucuucagaguuuaauguuuauaguuucauucaguuc

SEQ ID NO: 4139967 - RNA, 59 nt, Human
gagccagaaugacccaucaggcugcaccucucuggccuguaaauaguuucuucugacuc

SEQ ID NO: 4139968 - RNA, 97 nt, Human
gagccagcagcccacaguuaauucucacuuggauaucacucagaaagauacucugaauaacuuucugguaugucuagcaacugggggcuaauaacuc

SEQ ID NO: 4139969 - RNA, 85 nt, Human
gagccagccaggcagccuuacauggacaucucagggacaugguauuuaugagaugagguauccagugaagcagccaugcaagcuc

SEQ ID NO: 4139970 - RNA, 104 nt, Human
gagccagcgugcagugucuggaaaaucacccgcagcccaggcccuucugcaaaggauggggccuggaagggccucgggcgugggaccgcacuccgcucgggcuc

SEQ ID NO: 4139971 - RNA, 63 nt, Human
gagccagcuggagacuggcagggguacugacacuucuccagccucaucuccuggcugucccuc

SEQ ID NO: 4139972 - RNA, 62 nt, Human
gagccaggagauaccuaaggggcuugucaacaccuaaugcugucucuccuucuccuuggcuc

SEQ ID NO: 4139973 - RNA, 55 nt, Human
gagccaggagcagagagcccugcaucuugccuggggccccuuguaucucuggcuc

SEQ ID NO: 4139974 - RNA, 57 nt, Human
gagccaggcaguuugaaggcuuccuucggguagaaaaaauuacacuagccuugguuc

SEQ ID NO: 4139975 - RNA, 70 nt, Human
gagccagggcaugucugcggcccaggccagggcgcagugugugcccugggggcccaggccugcauggcuc

SEQ ID NO: 4139976 - RNA, 91 nt, Human
gagccagggccccgaucccaggcugggcggggaaccuggaugcugccugcccaccaccgcccacaccugaccucggcguccuccugagcuc

SEQ ID NO: 4139977 - RNA, 96 nt, Human
gagccagguguauuucacagcuuguuuuguugaauacuuaagaaaccucuuacaucuauuugacagauacaguaaugaagauuuagagacuuguuc

SEQ ID NO: 4139978 - RNA, 95 nt, Human
gagccagugaaauuauagucaaacugcaugaagcugauuuuagaaccacauuuucuuaaaauggagguuauguagguuacauguuuuacuggcuc

SEQ ID NO: 4139979 - RNA, 55 nt, Human
gagccauuauguaugguauaugcuaaaauccuagaauauagagucaaaauggcuu

SEQ ID NO: 4139980 - RNA, 74 nt, Human
gagccauuauuugauaguaugacagggcagcauuucauggacuuaaguguuguuugcucuucaaauauaugcuu

SEQ ID NO: 4139981 - RNA, 91 nt, Human
gagccauuccauacaugguuguauuuuguuaugcuacugcacagaguuucuguuguauguaguuucacaaaauauagcuuuuguuaaucuc

SEQ ID NO: 4139982 - RNA, 107 nt, Human
gagccauuuugaauucuuuaaagaagaaacguuggcauaaguuuaugcucugguguauaaaguuucugcuuguuuuucccccagucuuuguugaauuuaaauggcuu

SEQ ID NO: 4139983 - RNA, 76 nt, Human
gagcccacagugugacugaccuucagccaggguccuccugucaccugcggaagguacaguacaccuguggagucuc

SEQ ID NO: 4139984 - RNA, 61 nt, Human
gagcccagcaaggaccaagggccgggaugcccaggcucuuccauccugcugaggaacccuc

SEQ ID NO: 4139985 - RNA, 80 nt, Human
gagcccagccucagcugccaccucugccuuuggggaacccaaguccucaggcugcccugacagcccccgaugcugggcuc

SEQ ID NO: 4139986 - RNA, 55 nt, Human
gagcccagcuguccuuggcaaacaccccacagaggaggcgagggcuugcuggcuc

SEQ ID NO: 4139987 - RNA, 73 nt, Human
gagcccaggaaaugccccguggugggagggcaggcucaucaggagcuccuggcacagcaggguuccugggcuc

SEQ ID NO: 4139988 - RNA, 118 nt, Human
gagcccaggagcagcaucugacucuaugcucccuuagugugccugaggcagauaucacuaaucgaugacugcagucuucuacauugagcuuagaagcagcaucugacucuguaugcuc

SEQ ID NO: 4139989 - RNA, 79 nt, Human
gagcccaggcaguuccgagccucgugugucagccacggagagaaugcggccagccaggguuuagcaagccuacaagcuc

SEQ ID NO: 4139990 - RNA, 74 nt, Human
gagcccaguauguuugaaauguaauaaaggcuaaacagacagcuguuauguauugcacaaacuuucuguggcuu

SEQ ID NO: 4139991 - RNA, 68 nt, Human
gagcccagugguggcugugcuuugcugucaggacugacaguagaagaugcuguuacagaacugagcuc

SEQ ID NO: 4139992 - RNA, 55 nt, Human
gagccccaauaacagcugagaugaauuuccaaucagcucagcaagauggaggcuc

SEQ ID NO: 4139993 - RNA, 61 nt, Human
gagcccugcgaucgugauuucuucucucacaaggggaugagaaaucuucucuuagcggcuc

SEQ ID NO: 4139994 - RNA, 55 nt, Human
gagcccugcugggccuugucucugcccuugcacaggccggguuuggcagaggcuc

SEQ ID NO: 4139995 - RNA, 56 nt, Human
gagcccuggggcuuuagguccccucuccacugcuggggacaccaacuccagggcuu

SEQ ID NO: 4139996 - RNA, 92 nt, Human
gagcccuucugcugaguaaaguuauaaauuaccugucacugucaucguacaaugauucugugcuggcuuugccaucaugcagaccuggguuc

SEQ ID NO: 4139997 - RNA, 74 nt, Human
gagccgcccgcgccagccucuccaucucgcaaguuuuaauuaacgcugagggggaggcggcugacgggcggguc

SEQ ID NO: 4139998 - RNA, 55 nt, Human
gagccgccugggggcccuagggaggcugaacgcccgguggcucccgggauggcuc

SEQ ID NO: 4139999 - RNA, 82 nt, Human
gagccgcugcacaggguuuaccauugauuacgggcucaacaaaggcuguuguuaucauuggaggcacugugcaguauuucuc

SEQ ID NO: 4140000 - RNA, 75 nt, Human
gagccggaggaggacgagcccgcggcggcgcagcgcucaugcuccaaggcgacgggcucgguccgcuuccucauc

SEQ ID NO: 4140001 - RNA, 81 nt, Human
gagccggggguccgcggggagugguugccugugauccccauugcccgggcaggcauggccacucccuaggccccaggucuc

SEQ ID NO: 4140002 - RNA, 93 nt, Human
gagccgucccuucugcagguagaggcugccaucagcugccauggagacccgguaguggcagaccuuggccugggcccggacuaggaaggguuc

SEQ ID NO: 4140003 - RNA, 74 nt, Human
gagccguccgcgccagccucuccaucucgcaaguuuuaauuaacgcugagugggaggcggcugacgggcggguc

SEQ ID NO: 4140004 - RNA, 61 nt, Human
gauaagagcuagucuuuuccuugcacaaaaaucugcacgaggaaaggcgauggcucucguu

SEQ ID NO: 4140005 - RNA, 74 nt, Human
gauaagccaggucacaggguugaaguacuucuuaacucuaaagggaaguuuaaaacuuugggacauugauuauu

SEQ ID NO: 4140006 - RNA, 69 nt, Human
gauaaggcagugacuucaucuauuuuuccauaugugcugacucugcaauagaugaauucugccucuguc

SEQ ID NO: 4140007 - RNA, 101 nt, Human
gauaagggccuguuggugggccuggcucagagaugucugcugccuugcuacagagcagaaagcacccugcacuuucuggacaggacacccagguuuuuauc

SEQ ID NO: 4140008 - RNA, 58 nt, Human
gauaagugcccaaaaugaaaggaaauauggguuccuuggcagcagggagcaugauauc

SEQ ID NO: 4140009 - RNA, 70 nt, Human
gauaaguuaugggggcuucuguagagauuucuaugagaacaucucuaaggaacucccccaaacugaauuc

SEQ ID NO: 4140010 - RNA, 72 nt, Human
gauaauaggauaugagcaaugaacccuugggugggguuccagggcacuuaaauugccucgugucuugaguuc

SEQ ID NO: 4140011 - RNA, 87 nt, Human
gauaauaggauucauguuccauacaucaccagucuaaguugccaaaauaugcaaguuucagacugcugugugaaacugaaacucauc

SEQ ID NO: 4140012 - RNA, 62 nt, Human
gauaauauuugacuuggagggucucugucucucugauggaaauaccugaauuagauauuauc

SEQ ID NO: 4140013 - RNA, 75 nt, Human
gauaaucuaaacaaugaacaaagcacugauugaucauugaacagagcuugaauguccaugguuuuagugguuguc

SEQ ID NO: 4140014 - RNA, 86 nt, Human
gauaauuggauucucauaauugcuccuguauucaagcuguugcaauauguuguuuugguuuaaguauaugaagaaaauccauuauc

SEQ ID NO: 4140015 - RNA, 95 nt, Human
gauaauugucugauuauuuauuuuucaauuguaaugauaguaauuuugcuauuaauuuugggacgauugaagaauagucuuaaccaccaauuuuc

SEQ ID NO: 4140016 - RNA, 129 nt, Human
gauaauuucaaaguaugccaaaguuugaaacccgcuuagguuagggacaggucaauaugagagaaaauagucaucuugauuuacucuaauagcuuuaucauuuagauuaaaacauacacccaauccguu

SEQ ID NO: 4140017 - RNA, 66 nt, Human
gauacaaagaagaggucaaggcugagaaagacccccugauucagcccugggcuuccucaugguguu

SEQ ID NO: 4140018 - RNA, 55 nt, Human
gauacaaguggaguuaggaaguuuugauugggucaaagcuucacuucauuugauc

SEQ ID NO: 4140019 - RNA, 60 nt, Human
gauacacauuugcuagagaugggcuguaggauuuauuagccaacucagacuaauguguuc

SEQ ID NO: 4140020 - RNA, 76 nt, Human
gauacacguucugaagaauaggauguugugugguggucacucauucauucauucauucauucagcaggcauguauc

SEQ ID NO: 4140021 - RNA, 81 nt, Human
gauacacugguacucuguggguuggggauggaguaaaaugagaauucuguaugcccagguuugagugcccaaggauguguc

SEQ ID NO: 4140022 - RNA, 65 nt, Human
gauacaggaugcugaacaucucuggguugucuuuccaaggggauggucuccagguccacuguauc

SEQ ID NO: 4140023 - RNA, 59 nt, Human
gauacaguuuguuacauuguuagugggcuaguccaccuagaaugaagcaaugcugucuc

SEQ ID NO: 4140024 - RNA, 84 nt, Human
gauacaucuguggccucaugucuauaaagagcacacuagauuguacccagcacuuuuggacaugacaugcuaauuauauguauu

SEQ ID NO: 4140025 - RNA, 66 nt, Human
gauacauugaggguggaggaccaccuguuagagaugcuauuaaggguccucuagcuucagaguguc

SEQ ID NO: 4140026 - RNA, 66 nt, Human
gauacccagcaaaaugcaggagaguugccuuccacuuucugauacccauauuuugcugggauuauc

SEQ ID NO: 4140027 - RNA, 129 nt, Human
gauacccaguuaaaugggaauuucagauaauagacaaugguuuuuuaguauaaguacaucccaaguauuguacaagauguacuaaaaauuauucuguguuuaugugaaauucaaauuuaacuggguguc

SEQ ID NO: 4140028 - RNA, 79 nt, Human
gauacccgucucucugcugcuacagacucucuagggaugggcucuggggaaggcugcuggcaugcagcuggacccuguc

SEQ ID NO: 4140029 - RNA, 96 nt, Human
gauacccugaaggucuuguugagaugcagauuuggauucaggaggucacagguggguccugagauucugcauuucuaacaagguccaggugauguc

SEQ ID NO: 4140030 - RNA, 70 nt, Human
gauaccgucacauuuaaugauccuacugugaauucaagaauucacgaugaaaguuggauugagcgguauu

SEQ ID NO: 4140031 - RNA, 124 nt, Human
gauacuccaaacuauuucugguaaaacuguaagauuuacgagguggauagguacauggacuuuagagcuagagccagagaccuggguucacaguguaaacucugccacucaguagcaagguguc

SEQ ID NO: 4140032 - RNA, 81 nt, Human
gauacucgaaggagagguuguccguguugucuucucuuuauuuaugaugaaacauacacgggaaaccucuuuuuuaguauc

SEQ ID NO: 4140033 - RNA, 76 nt, Human
gauacugaaguuuuucaauuuauguuauuugguguaaaucuaggcagucuuuaacaaaauuggugcuucauguguu

SEQ ID NO: 4140034 - RNA, 86 nt, Human
gagucuugcucuguugcccaggcuggagugcagaggcacgaucucggcucacugcaaccuccaccucccggguucaagcgauucuc

SEQ ID NO: 4140035 - RNA, 86 nt, Human
gagucuugcucuguugccuaggcuggaaugcaguggcgcaaucuuggcucacugcaaccuccgccucauggguucaagcaauucuc

SEQ ID NO: 4140036 - RNA, 59 nt, Human
gagucuuguuaagauuuuggaauaauaauauuaauauuucaguuuuuauaauagggcuc

SEQ ID NO: 4140037 - RNA, 84 nt, Human
gagucuuugauuccuaagucuuucucuaccucuuuuguccaacuuggaagucuugguagagaaggacuuaggaaucagagacuc

SEQ ID NO: 4140038 - RNA, 112 nt, Human
gagugaaaaaggcaacaugaaacaagcaugugacaugugucaucuuuucuacaaaauuggagggaaagagaaauguaugcacauauuugcuugaaugugcagaaaauagcuc

SEQ ID NO: 4140039 - RNA, 63 nt, Human
gagugaaaaguggagugagauagugaacuuuaaaaauccuauugucugccugcuucuucacuc

SEQ ID NO: 4140040 - RNA, 81 nt, Human
gagugaaauaccagaaaauaaagugccacaggaaagcucaaaaagguuuccaaaugagcucugccuuccaguguucaacuu

SEQ ID NO: 4140041 - RNA, 81 nt, Human
gagugaacagcuagacuuugauauuguacacccuugaucuucaggggaugauaaugccagaguuaaauaagcuucccauuc

SEQ ID NO: 4140042 - RNA, 84 nt, Human
gagugaagacagggucauggaucccaaauaccacugccaggaggcagguggccuuggcuucuacccugaccuggucaugaacuc

SEQ ID NO: 4140043 - RNA, 108 nt, Human
gagugaagagggaaagagagaaacaagcacauuauagcuaucuaggucaaaauuuuaaacaaccuuuugguuuaaaugugugugugugcucuuugcaaagcuucacuc

SEQ ID NO: 4140044 - RNA, 89 nt, Human
gagugaauacagagucaugaggcagucauaugggaagggaacauaaguagugagcugccuuauggaguaugaaaacucauguuuuacuc

SEQ ID NO: 4140045 - RNA, 78 nt, Human
gagugaaugagggagggagagagcaagcaagugggucuucccauugcugaccuuugcucuccguuccccaggcuacuc

SEQ ID NO: 4140046 - RNA, 70 nt, Human
gagugacaggccuugucaagaaaaugccacuucugaccaaaaaagauuuggcaaacugcaagcuucauuc

SEQ ID NO: 4140047 - RNA, 67 nt, Human
gagugagagcugguucauggacugccuggcaggcacaccuaugcucaguccagggaccggccuccuu

SEQ ID NO: 4140048 - RNA, 80 nt, Human
gagugaggugacuagcaggugggggugguguaggggagagagagcaauguccccaucugcugugugaccucuguccacuc

SEQ ID NO: 4140049 - RNA, 67 nt, Human
gagugaguagcuacaguuuuuaacauguuuaacuuacggccuucaaaaauuguuagcggacuuucuc

SEQ ID NO: 4140050 - RNA, 65 nt, Human
gagugaugggucuggggugacuuuguaugcucuucaugaagguguuuauaccucagauccuccuu

SEQ ID NO: 4140051 - RNA, 59 nt, Human
gagugaugugguccagaaugguccucagcauguucuaggugguccugucccacccacuc

SEQ ID NO: 4140052 - RNA, 67 nt, Human
gagugauuuccagagagacguuuccuuagagguccagauuuaucagagagcaucucccugaucauuc

SEQ ID NO: 4140053 - RNA, 55 nt, Human
gagugauuuugucagcuucugcagacuggauggaucugcagacuacaaaaaacuc

SEQ ID NO: 4140054 - RNA, 76 nt, Human
gagugcaaagugcuuuaggauauuuggaaaugguuuguuccuuuaaguauuucaaguauucccuuuccuuguacuc

SEQ ID NO: 4140055 - RNA, 64 nt, Human
gagugcagggcuuuuccacuccagugcuugcuuuugagccugggacccuuagcucuuggcauuc

SEQ ID NO: 4140056 - RNA, 56 nt, Human
gagugccagggggcacugaacagaugugugauguuuguuagguccuuucggcaauc

SEQ ID NO: 4140057 - RNA, 57 nt, Human
gagugccuggacccucuuuccggaggaaacaguccccucuggaccucguucggccuc

SEQ ID NO: 4140058 - RNA, 106 nt, Human
gagugcuacuggguggcagccuagggggcccagcugccugccuugggccacccugcagaagagaccaggcaggcuugggacugcuuaggagcacccagugugucuc

SEQ ID NO: 4140059 - RNA, 70 nt, Human
gagugcuuacaaugacagguguaucauuaugacuuuacauauaucaccucauuuauuguuuugagcaauc

SEQ ID NO: 4140060 - RNA, 97 nt, Human
gagugcuuuagaagagagcuguuucauucguguuauggggugccuagcacuuugcaauacuuaauacaaaugaaacuauaauagcuuuuuuguacuc

SEQ ID NO: 4140061 - RNA, 81 nt, Human
gaguggaaagagcgggaggaacggcucgggcaggcagguccugugcuguggucuaagucacuucccacguccgucccacuc

SEQ ID NO: 4140062 - RNA, 81 nt, Human
gaguggaauuagguuagugugcaagagaacaaaaggaaguaauggauauucauuuuucuucguauucugauugguccacuc

SEQ ID NO: 4140063 - RNA, 70 nt, Human
gaguggacuuucugucaucuagacaaguaacuuccaagggugacuucgagaggacggaagguucuggauc

SEQ ID NO: 4140064 - RNA, 81 nt, Human
gaguggauaguguaggacaggguaaguacuaguguggucccagaccaccugugaugauaguuuguccuauuaacuucccuu

SEQ ID NO: 4140065 - RNA, 70 nt, Human
gaguggcaucucgcauucuuguuucuacagugccuugaggcaucagccaagaugcugagguugccuucuc

SEQ ID NO: 4140066 - RNA, 81 nt, Human
gaguggcauuacagagcuggguggagagaggggcuagccaucuuuugugucgcccaccgggcucaugugucaucgccucuc

SEQ ID NO: 4140067 - RNA, 104 nt, Human
gaguggcccggguaccggggguguggccagcgccaaagcugugaaggauuugcucacaggcuggugguccuggccauggccaugcugcaggccugaggucccuc

SEQ ID NO: 4140068 - RNA, 117 nt, Human
gaguggcucagggcugagguauuucugccuaggguucaugccuggauacuggaaucacagcaagauagucauccaagagccugggcagugccuuccuaacagauagccccuucacuc

SEQ ID NO: 4140069 - RNA, 67 nt, Human
gaguggcugggggugaaagucuggacaguagugggacuugcucccagcuuuguaccuucacccacuc

SEQ ID NO: 4140070 - RNA, 68 nt, Human
gaguggcuguuuauagguggguaugggguucuuaucauugggugaaaguaucuccuaggcagcugauc

SEQ ID NO: 4140071 - RNA, 69 nt, Human
gagugggaggaucgcuugagcccaggaguucaagaccaaccugggcaacauaggaagauucugucucuu

SEQ ID NO: 4140072 - RNA, 84 nt, Human
gagugggaugcuggccagaggugagggggauucuuguccugugcaacccugggcaagucacuuugacucucugggccuccauuu

SEQ ID NO: 4140073 - RNA, 58 nt, Human
gagugggcaaaagaaaguaggcaucugguacauaaugcugccuuuuaaagccucgcuu

SEQ ID NO: 4140074 - RNA, 63 nt, Human
gagugggcagucucuauguuccugcaauauguagauacaugggcuuggaaagagacuggacuc

SEQ ID NO: 4140075 - RNA, 65 nt, Human
gagugggccuggggggagcaggcuggcagaugugcagccuugccuccucccagcagcaacaauuc

SEQ ID NO: 4140076 - RNA, 55 nt, Human
gagugggcuuggggagaguuuguuggaguccagcccaccucguccaacccaccuc

SEQ ID NO: 4140077 - RNA, 66 nt, Human
gaguggggcagguggcaaagccagaggggagcagugauuugucuuugcuuggccccugccaccuuc

SEQ ID NO: 4140078 - RNA, 58 nt, Human
gaguggguaaaggugcuuggcuuugguguaagaaaggccucacuuugaaucccggcuc

SEQ ID NO: 4140079 - RNA, 61 nt, Human
gagugguggagcgcaggcuuggaugcagauggccuggguucacauccuggcugugccacuu

SEQ ID NO: 4140080 - RNA, 65 nt, Human
gagugguuagaaguaguguggcuggaaauaucuaguucgcccagacauuucugcuucaaucauuu

SEQ ID NO: 4140081 - RNA, 59 nt, Human
gagugguuuacuucaucucauuugugccuuuucauuuucaugucugaaguaauccauuu

SEQ ID NO: 4140082 - RNA, 66 nt, Human
gagugguuugcaggaugcaucaagaagugcacacaauaaccuuggcagcauccauggaggccgcuu

SEQ ID NO: 4140083 - RNA, 71 nt, Human
gaguguaaaaccccagccagcugguuggacgccuggccuagguuaacagcagcugcuggcguugaucacuc

SEQ ID NO: 4140084 - RNA, 62 nt, Human
gaguguacagacaaugcccugcagaaugagugacccgugaggucaggagccgucuuacauuc

SEQ ID NO: 4140085 - RNA, 55 nt, Human
gagauuuaauuccccugcucaggucaguguagggccucagggaaguucaaagcuc

SEQ ID NO: 4140086 - RNA, 102 nt, Human
gagauuugaguauaguacauauaguaauuuagccauuucaaacaguugaacaaauuguacaccugugguuagauugacaguaaugacagugauuuaauuuuc

SEQ ID NO: 4140087 - RNA, 113 nt, Human
gagauuuggugaaauugaaggagaaaauuuaagugagucuuuaaaauauauucugaaugaaaacuguauugaggauucauuuuuguuccuuuuuuuucuuuuucucuuuucuc

SEQ ID NO: 4140088 - RNA, 95 nt, Human
gagauuuugacauuuaaaugagauguguguaaagugcuacaguaggccccagcgccugccauuucucacauauguaugugaagugggcaugucuc

SEQ ID NO: 4140089 - RNA, 112 nt, Human
gagcaaaccugcaagaaccacagaugguuaugggaggauggggggauuaaagaaguggcaaauuuaguaguagcaaaacucaucucuuuggcucucuguggcaggaaagcuc

SEQ ID NO: 4140090 - RNA, 58 nt, Human
gagcaaagcaaugagaccgcaucauggguuagagaccacugcacaaguugcuuugcuu

SEQ ID NO: 4140091 - RNA, 64 nt, Human
gagcaaagcuuuuagggccuuucacaaggaaaaaggcccuuccaacccagagggcaacuugcuc

SEQ ID NO: 4140092 - RNA, 60 nt, Human
gagcaaauaucuuugggaagaguaaauaaugucaauuaacacuuuaauggauauuuguuu

SEQ ID NO: 4140093 - RNA, 82 nt, Human
gagcaaaugacuugcaguaccuggaguacuucagaccauaucaaucagaaucugacugucuucauaucugugucuccuguuc

SEQ ID NO: 4140094 - RNA, 78 nt, Human
gagcaaauucacauuuuauuucacuggaugacuagaaaucauaagcuguaguuuccagcauuagaugugaaauugcuu

SEQ ID NO: 4140095 - RNA, 106 nt, Human
gagcaaauucuacccuaaaaauguucuaguaguucacaggaagaagaugagguuuaauaacuuucaagguaauucuagauugacauuuugaggggaaaaugggcuc

SEQ ID NO: 4140096 - RNA, 66 nt, Human
gagcaacuuagcucuuucugugccauaggucaacaccucuggcaguuugagaaaggcuauaaacuc

SEQ ID NO: 4140097 - RNA, 93 nt, Human
gagcaagaagaauacaaauaauaccaagguguugagccaagaaaaccccgaugcuccugaaucauuuugguaauguucguuugcuccuuguuc

SEQ ID NO: 4140098 - RNA, 69 nt, Human
gagcaauagaaagaauacugcucugcacuuggaugucaaagaucuggguuugaauucuuucucugccuc

SEQ ID NO: 4140099 - RNA, 64 nt, Human
gagcaaucaaugagcgaaagcuuuuaccuauauuauuauuguuaucguuuauuugaaauugcuc

SEQ ID NO: 4140100 - RNA, 78 nt, Human
gagcaauggcaucgcuggugaucaaaggccuggccgagcuaccccaggcuccauaccaucuccggagaugccuggcuu

SEQ ID NO: 4140101 - RNA, 80 nt, Human
gagcaauguggccagugugugccucuguguucucauguggguacaugugucugaagcaguauacacugauacaugagcuu

SEQ ID NO: 4140102 - RNA, 65 nt, Human
gagcacacacuuugaaauuaggagaaccugugucugaauccugauuuuugccauuugugugacuu

SEQ ID NO: 4140103 - RNA, 83 nt, Human
gagcacaccauuuugagacaauauauaauuuuaguuggagugaaacaacauucaacaaguauagcuguuuugaagugguccuc

SEQ ID NO: 4140104 - RNA, 96 nt, Human
gagcacgguccuccccacccugugcuucagguugucgccacguguucuugugaguguggcaaggcagcuugaagcagcgggaaggaacucaggcuc

SEQ ID NO: 4140105 - RNA, 80 nt, Human
gagcacuagaccaagaaucagaccugucaggguuaacugguuguuugauccaagcaaauugucugacaucucugggccuc

SEQ ID NO: 4140106 - RNA, 79 nt, Human
gagcacuuacuguaugccaggugcacucaagaccugcugcuaagugggaagcuggguucagaggcacauggaacagcuc

SEQ ID NO: 4140107 - RNA, 59 nt, Human
gagcacuuauuuugugccaguugcuggagauguagcuguguacacaauagaugagguuu

SEQ ID NO: 4140108 - RNA, 93 nt, Human
gagcuauggcuggaguaucuggggaaggaggcuaacugacauacacggcacaugucuucuucucuaccugaacuuuaagaaccauuucagcuc

SEQ ID NO: 4140109 - RNA, 55 nt, Human
gagcuauugacaagccuuuuggccacagauguggaaggaggccugcagauaguuc

SEQ ID NO: 4140110 - RNA, 84 nt, Human
gagcuauuggaaaagauggaaagaaagugugaacaacuugggaauuucagugucuuacaguuuuuuuaaagcuuguuauaguuu

SEQ ID NO: 4140111 - RNA, 62 nt, Human
gagcucaaguagaagccucgggcugggcuccucuccugggguggaacccuucugcugggcuc

SEQ ID NO: 4140112 - RNA, 117 nt, Human
gagcucaguacauuugagauguuuaccaagauggucuugagauauuauaaagggcaaagagaaaugcaauuauguuuuucaagugcacacuaugaacuaggcauugugcugauacuc

SEQ ID NO: 4140113 - RNA, 73 nt, Human
gagcucagugccuuaccuuugcagggccaggguccccguucuggccaguguuggcuagggacacuugcagcuc

SEQ ID NO: 4140114 - RNA, 61 nt, Human
gagcucauucauucauugccuguuuagaaaaugcuuacuaugugcagugaagaaagagcuu

SEQ ID NO: 4140115 - RNA, 56 nt, Human
gagcucugauguuuaguggagauaauaccccccaccuccaugcaaauacagaguuu

SEQ ID NO: 4140116 - RNA, 107 nt, Human
gagcucugauuucaaguguaagguuuaaggucuauaaauguuugcuagaggggagaauaaggaaguaguuauaaaccuauauaccucucacaucuucugcagagcuc

SEQ ID NO: 4140117 - RNA, 69 nt, Human
gagcucugugcauggcagaggauagcauaugaaccucuggugaccagagggucuugcagguacggacuu

SEQ ID NO: 4140118 - RNA, 63 nt, Human
gagcugaaauaugaagccaauuacuaaggggaagauuuccagcaaauuggcuccugauagcuc

SEQ ID NO: 4140119 - RNA, 91 nt, Human
gagcugacaauaauaugguuguuugaagaaauauugccucugugacaaugauagaggacacaucuuuccucaaaugaguuucugucacuuc

SEQ ID NO: 4140120 - RNA, 102 nt, Human
gagcugaggaaaauggggcucguacucacugaugaggagcacgagaagcugcugaaaacucugccaauucgcagugaguauuuaccacauccuuugagacuu

SEQ ID NO: 4140121 - RNA, 67 nt, Human
gagcugcauuuucuuucuucuuucccagugaugggccauuggucaccauaaagaagaacaucagcuc

SEQ ID NO: 4140122 - RNA, 59 nt, Human
gagcugcccugagcuuugcauguucccuugagugucuuacacaaagcugugagcagcuu

SEQ ID NO: 4140123 - RNA, 60 nt, Human
gagcugcccugcucuccgggaucuuaggcccagguucaggagacagagggcaaggcauuc

SEQ ID NO: 4140124 - RNA, 61 nt, Human
gagcugcggggcccccaggugggcuccacauggagcagagcuugcuggugccugcaggcuc

SEQ ID NO: 4140125 - RNA, 71 nt, Human
gagcugcucagggcuuucugauucguggcuguggcacggguagcuuuggccucguuuagaaauggcaguuu

SEQ ID NO: 4140126 - RNA, 83 nt, Human
gagcugcugaaggacccugagcgggcaugccggaaugcggaguggguguugggauccuccucaggguagcacaguauggacuc

SEQ ID NO: 4140127 - RNA, 57 nt, Human
gagcugcuggauauguggccuggcuuuguuguuuucaguaugucacauccacaguuu

SEQ ID NO: 4140128 - RNA, 57 nt, Human
gagcugcuggccuccugcgggaagaaguucugcagccgagggagccggugcgugcuc

SEQ ID NO: 4140129 - RNA, 58 nt, Human
gagcuggacuuucagauacaucugucuaaguggcugauguguagggaaagucagacuc

SEQ ID NO: 4140130 - RNA, 68 nt, Human
gagcuggcauucucacucccaugucugcagggauuucucugguuucaugagaugagaauuuccuucuc

SEQ ID NO: 4140131 - RNA, 55 nt, Human
gagcugggacauggguccucuccugcccucagacuggaacucacgucaucagcuc

SEQ ID NO: 4140132 - RNA, 68 nt, Human
gagcugggcuuuuggcuacucuuuuugcaauaauuauguaaagagcuggucacagguccauuuuccuc

SEQ ID NO: 4140133 - RNA, 64 nt, Human
gagcuguccaagauggucguaauauauuguucauaauaaccgugcuuggcuagcuuggcagcuc

SEQ ID NO: 4140134 - RNA, 76 nt, Human
gagcugugaaucucaaauuaagaauuuuauugaaaaaguccauggaguuuuaagagcuuaaucuggaucguagcuc

SEQ ID NO: 4140135 - RNA, 77 nt, Human
gagcugugccaucuuuuugcuaccucaacauuacauuugcacugaaacuuggaaaggugggaacugugguauggcuc

SEQ ID NO: 4140136 - RNA, 79 nt, Human
gagcuguguggggacugaguggaggcuucugaggacucaccaggguuaagacggguguucauucaaugcuccccaguuc

SEQ ID NO: 4140137 - RNA, 59 nt, Human
gagcuguucaaggacaggcacgggucugauuuacuuccguguccccuagaucccagcuc

SEQ ID NO: 4140138 - RNA, 73 nt, Human
gagcuguucaaguuaaaucucagaaggcauuuccaagauuccuuuccuggcucuucugaguuuucugcaguuc

SEQ ID NO: 4140139 - RNA, 89 nt, Human
gagcuguuuuccagggcucuguagaagaagcuguccagcuccucacacugcuguguuucuucuucccuggagaccuggagcagaggcuu

SEQ ID NO: 4140140 - RNA, 100 nt, Human
gagcuuacucuauuuuucuuuacaugaguacucacuuaggaaaggccauaugagccuacauugagaagguggucauuugcaagccaggaagagagagcuc

SEQ ID NO: 4140141 - RNA, 97 nt, Human
gagcuuauuaagacagaaguuucugggccccacugccauaauuccugacucaccaguucuggaguaggaccugaaaauaugccuuuccagugagcuc

SEQ ID NO: 4140142 - RNA, 76 nt, Human
gagcuucaaauggacgaccuuuucccucugcaaucuguuaagggccaaacucagaggauaucuuuaucugaaguuc

SEQ ID NO: 4140143 - RNA, 56 nt, Human
gagcuucagaauuuaacagacuucuugagagggaagcuggaugauguuugagguuc

SEQ ID NO: 4140144 - RNA, 61 nt, Human
gaguguaugugugcacgcacuuguguauguguacaugugcaugugugcacacaugacauuc

SEQ ID NO: 4140145 - RNA, 104 nt, Human
gagugucuggcaccaaauauucaacauguaaccagcauucaucuggucacuggcuuccagaugagauguguugauguggagugguuugaugccuccaagaccuc

SEQ ID NO: 4140146 - RNA, 60 nt, Human
gagugucugugacagcucaugagcagguaaaagcaugccccaggagcuuuaaagacauuc

SEQ ID NO: 4140147 - RNA, 61 nt, Human
gagugugcaugucccggaaacacuggcaagacugacagugggauaugggggcagcauucuc

SEQ ID NO: 4140148 - RNA, 66 nt, Human
gagugugcgugcuacauacaguaaaguaaauuguccauacuuguuucuguagggugcagcaggcuc

SEQ ID NO: 4140149 - RNA, 60 nt, Human
gaguguggaacccgggcaugagcugcuugugugggcagcuggcagggguucacacugcuc

SEQ ID NO: 4140150 - RNA, 55 nt, Human
gaguguggaucccagaagcagaucuuuuccccucugcauuucgggaacucaccuc

SEQ ID NO: 4140151 - RNA, 64 nt, Human
gaguguggauggguucagugauucacuccuaauaaaaacggacaaugcagccccuaccacauuc

SEQ ID NO: 4140152 - RNA, 63 nt, Human
gagugugggucucagcuuuaagcugauggguuaaauucuauauguauaagcagauccacauuc

SEQ ID NO: 4140153 - RNA, 70 nt, Human
gagugugguuucucccuucgcagugagaugcucccgacguuuuuauuucagccaauuagaagccccacuc

SEQ ID NO: 4140154 - RNA, 78 nt, Human
gaguguuccuggucuuggucccuaugacuagguucucucacaauacuagugaagggcaaccccaggcccaggacauuc

SEQ ID NO: 4140155 - RNA, 61 nt, Human
gaguguugcuguguuagaauuacaugaacuaauuaaguaaacuuacacauaguaaauacuc

SEQ ID NO: 4140156 - RNA, 64 nt, Human
gaguguuggagcccagggugguugcagucggaggggccugccugccuuggccuccaggagacuc

SEQ ID NO: 4140157 - RNA, 68 nt, Human
gaguguuuaggggagcucgggugcaaucggagaguuagcucuuugaggccggcugcccuuaaauccuc

SEQ ID NO: 4140158 - RNA, 99 nt, Human
gaguguuuguguguguguguguguguguguauguguguguggggugugugcaugcauauaugugcaggcucacacauguucccaugaccacagacucuc

SEQ ID NO: 4140159 - RNA, 67 nt, Human
gaguuaaaugacuugguuaaggucaccaagugguaacacuaggauuugaaccacaguuauccaauuu

SEQ ID NO: 4140160 - RNA, 76 nt, Human
gaguuaauuaaucaaagacauggggaagcugaggugucuauccuucauuccugccagucauugguugagggcacuc

SEQ ID NO: 4140161 - RNA, 65 nt, Human
gaguuacaagcaucugaaaucugccuacaagcugaucgguguuguuggcgauaucagaaugacuc

SEQ ID NO: 4140162 - RNA, 114 nt, Human
gaguuacgguugcaggagaaaggcacauuacucaaacagagggccacugaggcucgggaugauguaacuggagagggaguccucugcuuggugccaguuuucuaaauugauuuc

SEQ ID NO: 4140163 - RNA, 59 nt, Human
gaguuagaagacagaauguaaaagugccuaauuauuuuuuauaaguuguaagcugacuc

SEQ ID NO: 4140164 - RNA, 78 nt, Human
gaguuaggagacuugaguuuuugucuuaguuuuguuaggaaguaguccuguaaguauaaaaauucaaguccuuuccuu

SEQ ID NO: 4140165 - RNA, 78 nt, Human
gaguuagggguguggagagaguguggagaguucagggucucacagcaacaucucacauuucucauucuccccuaacuc

SEQ ID NO: 4140166 - RNA, 62 nt, Human
gaguuaugguggccauggagagcacugugauacucaguugcucacccauaucuccaugacuc

SEQ ID NO: 4140167 - RNA, 62 nt, Human
gaguuauuucagaaggaaagaucuagugaacaugguccuuuaaauccuucugaaaagggcuu

SEQ ID NO: 4140168 - RNA, 71 nt, Human
gaguucaaguucucugcaugacccaaggcugaaucaucugcaguucggccucugcccaguagagugaacuu

SEQ ID NO: 4140169 - RNA, 62 nt, Human
gaguucaguaguuauagucuaggagauucccaggccauccucccugcuguaacucugugcuc

SEQ ID NO: 4140170 - RNA, 78 nt, Human
gaguucauauguuucugaaugaucauagcuuguuaauauaaacauuuuauuuacagagcuuaauucaggagcuugcuc

SEQ ID NO: 4140171 - RNA, 82 nt, Human
gaguucauuuauauguguuuguguguguauuucauaauaaauuucauaucucagguauacuugcagacauuuauauauacuu

SEQ ID NO: 4140172 - RNA, 123 nt, Human
gaguuccacagcaugucucacucagaaaaaccaauucuugacugcuggucucuaggaacaguugggauccaagaaccaguuuaagauuuggguuucaugccugacucauggaacugaugacuc

SEQ ID NO: 4140173 - RNA, 83 nt, Human
gaguucccauauaugcaaaaauguaaccgucagaaauggguguuaacagagugagaauuauauuuuuuuauacuugagaauuu

SEQ ID NO: 4140174 - RNA, 72 nt, Human
gaguucugagucugggcucuggguggccugagcaagaaaucugcuccugggcacccgcggcugugacggcuc

SEQ ID NO: 4140175 - RNA, 130 nt, Human
gaguucugcacaugcucucccgugacagcuggauagggauggccuccugagaagccacaggcuauggcccugccagccuggcacugaggcagggcgacacuuccagcugaagggaguguucuucaauacc

SEQ ID NO: 4140176 - RNA, 116 nt, Human
gaguucugggcaauaacacaaguccuaaaauauugauguggcuacuucuaaaguauagcaauauuacauaguuauaugcagugugucauucaagcuguuuucauugcccagaaauc

SEQ ID NO: 4140177 - RNA, 107 nt, Human
gaguugaaagaggcccauaucaacauaauucucaguuguguaauaucugagagaccaagaucugaagaaauacagcugggguuggaaaugggauuuuagacagucuc

SEQ ID NO: 4140178 - RNA, 66 nt, Human
gaguugacuacauagaugcagaccaggccaaacuagucaugaccugcccugcacuguggguagcuc

SEQ ID NO: 4140179 - RNA, 94 nt, Human
gaguugaugcucugugauuaugcuaaugaccaaaagaaucgaugaugcgagacuagaugaaaucagugguauaaucggggaaaguuaucaguuu

SEQ ID NO: 4140180 - RNA, 60 nt, Human
gaguugcaggguagacugagugagcugauaaaugauaagcucuagcuuagugccugccuc

SEQ ID NO: 4140181 - RNA, 68 nt, Human
gaguugccuuacugcauucaguaaacauacuugaagggugguuccguuuacuggaaacaaggcaauuu

SEQ ID NO: 4140182 - RNA, 94 nt, Human
gaggacuuagauucaaaugauacuguuuuuagucuuguuuguuauugaauccuuggauaaaacaguaugauuaccucuagaauuuaaagucuuc

SEQ ID NO: 4140183 - RNA, 84 nt, Human
gaggagacagaccaggcaggccugagaggcagggcuggcucacggcgagcaccugucaaguccaggcuguggaugccucuccuc

SEQ ID NO: 4140184 - RNA, 85 nt, Human
gaggagacagcacagacacugagacccccuugucuuccucaucugggggaaggaagguacucagugauucugucagaagcucuuc

SEQ ID NO: 4140185 - RNA, 70 nt, Human
gaggagaccuggagcgggaggaagaguaaaaggacaggcaccgauccuccaccucugcuccaguuuccuu

SEQ ID NO: 4140186 - RNA, 55 nt, Human
gaggagacuccucgugcagcuacuagauagaguagcagcagggcaugucuuacuc

SEQ ID NO: 4140187 - RNA, 75 nt, Human
gaggagacugacagcagauucuaccagcauuaccuuuauaaagucugugcuccccuuucugcuguugucucucuc

SEQ ID NO: 4140188 - RNA, 66 nt, Human
gaggagagagccugaguggcagcuaugcaggagacaguaaagccaguggcccaggcuuacuagauc

SEQ ID NO: 4140189 - RNA, 80 nt, Human
gaggagagccaaaaggacugaugcugaguaccuuccuuauucugauaugaaguauuuaugcacuuaauuuuuuaauccuc

SEQ ID NO: 4140190 - RNA, 69 nt, Human
gaggagaggccaucguuguuauuaaaaauaagaauauaaauuguuaccaaacacugaggccuacucuuc

SEQ ID NO: 4140191 - RNA, 57 nt, Human
gaggagagggcagagaaauguaguugagcuuccuguuuggcuagcugccuacuuuuu

SEQ ID NO: 4140192 - RNA, 64 nt, Human
gaggagcaagaaauagugcccauuaucuucugugauaacacagcaucugauuacuuguucucuc

SEQ ID NO: 4140193 - RNA, 61 nt, Human
gaggagcucugcuccauccuucaagaugacuuacguuggaggauggcgauucgagcaccuc

SEQ ID NO: 4140194 - RNA, 60 nt, Human
gaggagcugauuagagagggucauuggguucucacuggcuggcccucaggcagcuccauc

SEQ ID NO: 4140195 - RNA, 60 nt, Human
gaggagcugcacugggaguuuuuccauucuugguggaggaaagaugagggcaugcuucuc

SEQ ID NO: 4140196 - RNA, 60 nt, Human
gaggagcuggcagcgcaacccagauguccaggauuaucucauucagugcucuaguuuguc

SEQ ID NO: 4140197 - RNA, 55 nt, Human
gaggagcugggucagggagacaaaagucuucuauuagucuuauggauagcuccuc

SEQ ID NO: 4140198 - RNA, 57 nt, Human
gaggagcugucaccgugacucacuggagcagagcuuucuaaacggugucagcucuuc

SEQ ID NO: 4140199 - RNA, 55 nt, Human
gaggagcuugugagaagaugucauuaacucaaauacuuuuuaucagaagcucuuu

SEQ ID NO: 4140200 - RNA, 77 nt, Human
gaggaggaugaaaauugacagcggaaguacuuucaaacagaucuccaguuaaugugcucgcugauaauuuccucuuu

SEQ ID NO: 4140201 - RNA, 88 nt, Human
gaggaggccugaggcuucuggggcaccgagcgaccacaggccggggugcguggcucccccaggagcuccagaggcccuaugcccccuc

SEQ ID NO: 4140202 - RNA, 65 nt, Human
gaggaggccugcucuggccccaguggccccuuguaagcaggaaaggcagcuggcuagaccucuuc

SEQ ID NO: 4140203 - RNA, 83 nt, Human
gcaaauccuuauugaucaguuuucucuguacaggcccaguguagguggacaggggacacagagaaacuggagaaggauccugc

SEQ ID NO: 4140204 - RNA, 116 nt, Human
gcaaaucucaugauauagucuuucuuuuauuucuccuuccugguuagcaccuuauuuuucugaucucauaaaguguuuuuggagggaaguggaggggauugggauuagagguuugc

SEQ ID NO: 4140205 - RNA, 81 nt, Human
gcaaaugaucuaaucucucuaaguuuccauuucuccaucugugaaaaugagaaguggcuacccacuuaagagagcauuugc

SEQ ID NO: 4140206 - RNA, 55 nt, Human
gcaaauguauugcauaggauauuuuaauauaaaauaauuuauggaauacaugagu

SEQ ID NO: 4140207 - RNA, 96 nt, Human
gcaaaugugaugugagcagagacaugaaaagcucuugagcauuggcccucuugcugcuuuugagguccugcucagccaccauaucgauaagcuugc

SEQ ID NO: 4140208 - RNA, 111 nt, Human
gcaaauguucaguguaaugguuugaaacccagccguguagcugccgccgcccacacacagagcugccguggcacugagcuucagcaggcaaaccauaucaccagcgucggc

SEQ ID NO: 4140209 - RNA, 74 nt, Human
gcaaauucagguucccagguccagggcuucauuucacaauauuacuuaugaagauccuugggaaauugaccugc

SEQ ID NO: 4140210 - RNA, 91 nt, Human
gcaaauuuagggcuugggucuggcuuguuccccuccggcucgaaccaccucuucucugagccgagccagcuaccggggcuccuggaauugc

SEQ ID NO: 4140211 - RNA, 80 nt, Human
gcaaauuucuggauucuacccgccuccccgcacuccgacauuacgauguagcagcucugugguaggauccaggaaucugc

SEQ ID NO: 4140212 - RNA, 56 nt, Human
gcaacagagcaguugaucaggaacagacccugucugagaagcgugucucuguuugc

SEQ ID NO: 4140213 - RNA, 63 nt, Human
gcaacagcauucucauugacauuuggggccagauaauucuuuguugucaggggugugcugugc

SEQ ID NO: 4140214 - RNA, 87 nt, Human
gcaacagggaaugauuuaguguucaaggaauaucauucuucacauaaauugaugucacagauucuuugaauagauguucccaguggu

SEQ ID NO: 4140215 - RNA, 62 nt, Human
gcaacaguugagucagcagagcucagggccccugacgaacccugggagccgacugacugugc

SEQ ID NO: 4140216 - RNA, 86 nt, Human
gcaacauacugugugauuccauuuacgugacacuguggaaaaagguaaaacaacagaucagcacugaagaacgcaucagugguugc

SEQ ID NO: 4140217 - RNA, 58 nt, Human
gcaacauaguuuugggggcugagaaggccacuuaaggccuuguccagaaaggcauugc

SEQ ID NO: 4140218 - RNA, 60 nt, Human
gcaacaucgguauuggaggaguuaaaggauaauuccuuguuuuuucucgugcuugucugc

SEQ ID NO: 4140219 - RNA, 65 nt, Human
gcaaccaaucagauguugcauaggagcguaacuuuguaacuucacuucagccucugauugguugc

SEQ ID NO: 4140220 - RNA, 87 nt, Human
gcaaccauuucuauugcaucaagaagucuaaguuugcaaaggcaagcuuaaacuuugcaaacugauuuugauagcauuaagaauugc

SEQ ID NO: 4140221 - RNA, 55 nt, Human
gcaacccugggacacgcucauggcuccagccacuuuccuggcgcucccagggugc

SEQ ID NO: 4140222 - RNA, 63 nt, Human
gcaaccugugaugaagugggcagagcugacugugagcuucaugcccugcuaaauauagguagc

SEQ ID NO: 4140223 - RNA, 55 nt, Human
gcaacgucuucucuccaaguaaauucaccgacaggccgaagggaggagguguugc

SEQ ID NO: 4140224 - RNA, 59 nt, Human
gcaacuacuguguuuaagaaacagcaaaaaggcugugugcugaaaugcagugagaaagc

SEQ ID NO: 4140225 - RNA, 84 nt, Human
gcaacuagugcacgcuuggcuuauacagagaagacgcugaaaaaaaaguuuauugugugaaagcucaaguggucagccuggugc

SEQ ID NO: 4140226 - RNA, 57 nt, Human
gcaacugaaucauuuugcauucccagcaggaauguacaaggguuccaguuuuucugc

SEQ ID NO: 4140227 - RNA, 85 nt, Human
gcaacugcaucugcaaucucuagcagcagcccuuccuuacgagacuguguagggcauuuguggguguuguuauuguuguuguugc

SEQ ID NO: 4140228 - RNA, 73 nt, Human
gcaacuguagggugucuucuguuugcagguaacuuguaaucaaccuguccuugaauccuagcauccuaucugc

SEQ ID NO: 4140229 - RNA, 60 nt, Human
gcaacugugauuuguuaucuuguauuuccuaccucaagaugaugcacauuuaacaguugc

SEQ ID NO: 4140230 - RNA, 71 nt, Human
gcaacuucuacuuucaguguuaauguuaugucaaagaagugaggguauuaauaugagaaaguggcagaagc

SEQ ID NO: 4140231 - RNA, 82 nt, Human
gcaacuugcauggcuuccaaggcccuccgugauccgauccugcccaccuucacaggcuccggccuugcagcccuugcccugc

SEQ ID NO: 4140232 - RNA, 75 nt, Human
gcaacuuguacucauucuucaaaugccagugucuauaauguaauacuucaaagcaauagaaagagugacgggugc

SEQ ID NO: 4140233 - RNA, 55 nt, Human
gcaacuugugacuuucaaccugaaugcuggccuucaggaugagucaucaagcugc

SEQ ID NO: 4140234 - RNA, 78 nt, Human
gcaagaauacauucaaggccuucugacacaauuucuagauuagucuuuguuacagaaaguuuaugaaugguuauuugc

SEQ ID NO: 4140235 - RNA, 63 nt, Human
gcaagacagcaauaccugaaugagaagucugaacuacuuuucccuugguagaguugcuucagc

SEQ ID NO: 4140236 - RNA, 73 nt, Human
gcaagaccagagcugagcaccaagcauggucuggaaaccccggcuggcguagcaaguucagcccugguuuugc

SEQ ID NO: 4140237 - RNA, 57 nt, Human
gcaagagcacgugcccuccauaagggaugacccucuuacugggagggcugccuuagc

SEQ ID NO: 4140238 - RNA, 90 nt, Human
gcaagaggaacccaacuaaacuguagugcuuauagacucugccauucccuguggggaguuuauugcugaguugcuugcaguuccuuuugu

SEQ ID NO: 4140239 - RNA, 90 nt, Human
gcaagagggacagaggagcagguggacagaggaagaaagugaauccucuugagaagaguuucccccuuuguuacuuucacuguccugugc

SEQ ID NO: 4140240 - RNA, 65 nt, Human
gcaagauaaucuucaaagccaucauuucgaccugagguccccugaaaguucugaagagaucaugc

SEQ ID NO: 4140241 - RNA, 59 nt, Human
gcaagauguuaaaaccacccuuggauuauacacuagaccaacuugguuuuauauuuugc

SEQ ID NO: 4140242 - RNA, 64 nt, Human
gcaagauuccuugagccuaguuuggcuggcuggcccaucucucaggcccaaguagagucucugc

SEQ ID NO: 4140243 - RNA, 62 nt, Human
gcaagauugaggcuuccucagcuuuuggaucgacaaucgacagcugagaggcuauuuuuugc

SEQ ID NO: 4140244 - RNA, 74 nt, Human
gcaagauuucuuuuaggugaagcagaaacucucuagaguaagagaaugaguagauuuacuugaaaaaucuuugc

SEQ ID NO: 4140245 - RNA, 62 nt, Human
gcaagcaaguaucuggcagggaugccccaaggacccucaguucccucuggguacugccaugc

SEQ ID NO: 4140246 - RNA, 67 nt, Human
gcaagcaccgaaccuggcugcaaagaaggggaaccguuccccaaauuuugccaagucaggcugcugu

SEQ ID NO: 4140247 - RNA, 57 nt, Human
gcaagcaguuguggcuucugagaagaauguaucuugugggccauucagcugcucugc

SEQ ID NO: 4140248 - RNA, 70 nt, Human
gcaagcauguagacauccuaugggaagaacaccauggcagcaugguccuuuuugccuggaugcaguuugu

SEQ ID NO: 4140249 - RNA, 57 nt, Human
gcaagccccacagccuuggugucuuggcuccaaaaggcccaacucugugagggcugc

SEQ ID NO: 4140250 - RNA, 77 nt, Human
gcaagccuagcucuuugucacucauacagucacagugagaacagugaccccuccaggagcaagggguugggcugggc

SEQ ID NO: 4140251 - RNA, 83 nt, Human
gcaagccucaguuaucagcagcuucuuucacuccuggauaaauucugauaauucaggaaggacuguccauggcuguuguuugu

SEQ ID NO: 4140252 - RNA, 67 nt, Human
gcaagcugagacugcagccgggccaguuggugcaggcccagcauccuggcuguggauuugggccugc

SEQ ID NO: 4140253 - RNA, 59 nt, Human
gcaagcuggcuguuagaggaugauuacuucucuuaaauuaccucuuacccucaucuugc

SEQ ID NO: 4140254 - RNA, 61 nt, Human
gcaagcuguccuuuugcauggcugacugccuuuucaagaccaguguuggaggauggcuugc

SEQ ID NO: 4140255 - RNA, 55 nt, Human
gcaaggaaaucugaauaauuguguuucuggggcacaauaacuucuguuuccuugc

SEQ ID NO: 4140256 - RNA, 55 nt, Human
gcaaggaagcagcugucacucaaagugcucagcucaaugucagcagcuugcuugu

SEQ ID NO: 4140257 - RNA, 88 nt, Human
gcaaggagauaaggacaguauuuguuacagcauuagcugcuuccauguuuuggcuggcuuguaauaggaauuucacuuguuucuuugu

SEQ ID NO: 4140258 - RNA, 57 nt, Human
gcaaggagccuggaggugagugcauucccuggcccugcucagcugcuugguuccugu

SEQ ID NO: 4140259 - RNA, 79 nt, Human
gcaaggcagauauuucaguucacauugaaggccuaaauuauuggauuuuaaagaauguugaucugauauauuugauugc

SEQ ID NO: 4140260 - RNA, 56 nt, Human
cuuggugcccagcagguggcuggagcuggcgacaacaacacacugguggcaucagg

SEQ ID NO: 4140261 - RNA, 75 nt, Human
cuugguuaauuucuuucucuccacaaggcuugggaaauucaaggaccuugucaagagaaaauaauuugcaacaag

SEQ ID NO: 4140262 - RNA, 101 nt, Human
cuugguugaguauuuaugguauugcacuuacacaacccugaaaaaucuuuuaaucuucccaguuugacaaaguuuaguaauaaucguuuguacucaaagag

SEQ ID NO: 4140263 - RNA, 83 nt, Human
cuugguuucaacuugcagaaauaacucauauugcaauaaguuuauuguaaucuaguaguuuucuaaggguagaagaaacucgg

SEQ ID NO: 4140264 - RNA, 77 nt, Human
cuuguaaaguggcugcuaucaacuccuuccagcuuuaucuccaauggaaaagagucuuaggcagucauagucacaag

SEQ ID NO: 4140265 - RNA, 111 nt, Human
cuuguaaggcacauuuauucauaaaguaauuuuucuauguauaaaguugugcuuuguuuuacuggaugucuaacaacauuauacauagaaagcuuugauggaugguacaag

SEQ ID NO: 4140266 - RNA, 62 nt, Human
cuuguaauggcagagaccugucacuaaaagugacuuauuaaccagguuucuaacuauucaag

SEQ ID NO: 4140267 - RNA, 58 nt, Human
cuuguacuaggggcauagugucaaccuugagaggaggaaaugaaugugguagugcaag

SEQ ID NO: 4140268 - RNA, 65 nt, Human
cuuguacucaggaggccaccaggaccugucacgcagagggccugucagcgguguccuguugcaag

SEQ ID NO: 4140269 - RNA, 69 nt, Human
cuuguauaaacaugcucuggauugcugugaaggcaauauucuuucaugcaguuuaaagcaguuuuuaag

SEQ ID NO: 4140270 - RNA, 63 nt, Human
cuuguauacagagaaggcucaugucacucauuugacaaauauugagugucuacugcaugccag

SEQ ID NO: 4140271 - RNA, 84 nt, Human
cuuguauucuuccacuuaagauugaauauugacaacagcaucuucccaauuuuugauuaauuuuugagugggcagcaaagcaag

SEQ ID NO: 4140272 - RNA, 64 nt, Human
cuugucaagggugaccuucagcuuuuacguuaggugacuggugaauauuggaggcauugagaag

SEQ ID NO: 4140273 - RNA, 89 nt, Human
cuugucacuaugggaacauuuguuagaacugaagaagauuaaggccaaggaaacuggcagaucucccaguacagauuuccuaggcuaag

SEQ ID NO: 4140274 - RNA, 59 nt, Human
cuugucacucuggcuccagagcauaucuaaagcauuaugcuuugcugcuccaggacagg

SEQ ID NO: 4140275 - RNA, 89 nt, Human
cuugucagaaaugcaauuucuugggccccacccaguugagacuagaucagggacucagagugaggcccagcaaucuguguuuuagcaag

SEQ ID NO: 4140276 - RNA, 76 nt, Human
cuuguccaaaugacccgaugaaucacuuccuuccuuuuuggccagucuggucuguucaugggucaccgaagacaag

SEQ ID NO: 4140277 - RNA, 66 nt, Human
cuuguccacuucugacuuguucagauacaggcugguguaugaacacacuuuggaagugagggcaag

SEQ ID NO: 4140278 - RNA, 56 nt, Human
cuuguccaggugggugccauucauugaaaccccuugguggcaauguccuggagaag

SEQ ID NO: 4140279 - RNA, 77 nt, Human
cuuguccagugccugcugaugucucucuggguuguggggaaaggggugccugggguggcagaaguagcauggacggg

SEQ ID NO: 4140280 - RNA, 70 nt, Human
cuugucuaguuccuggugauguucuaauaauacaacauauuucugaugcauuugcaggaaacuggaaaag

SEQ ID NO: 4140281 - RNA, 63 nt, Human
cuugucugcuacuugguucuaccacggaaguuguccugguauuuggcugaguggcaugagagg

SEQ ID NO: 4140282 - RNA, 67 nt, Human
cuugucugggcagcuugggagucuuuucaccauuauaaauuggcauccacucugaggcugagacaag

SEQ ID NO: 4140283 - RNA, 114 nt, Human
cuugucuguuuugcaugaccuccacuacagccucaauaucauguugaauuucugagaagcuuuccaauguuagcuaagauaugaucguuggggcaccuagggagcauagauaag

SEQ ID NO: 4140284 - RNA, 61 nt, Human
cuugucuuggaguagagauuuagugaacuugaagaguagcaagaugucacuccaaguuaag

SEQ ID NO: 4140285 - RNA, 80 nt, Human
cuugugcuucuccugacaugucuggaggaaugcagcucccgcugagucuuccccagagcaugagcaggacugagcagagg

SEQ ID NO: 4140286 - RNA, 67 nt, Human
cuuguuaaaaugcagauuuugaugcagcaggucugguucucucagaagauucugcauuucuaacaag

SEQ ID NO: 4140287 - RNA, 90 nt, Human
cuuguuaaacauguaaaugcucagaccuuauuccagacauauuaaaucagaaccuuuuggggugggccugagaauuuguguuuuaccaag

SEQ ID NO: 4140288 - RNA, 72 nt, Human
cuuguuacagaauagagacugccugcucuggaaauucuuuugguuucaguuuaguuuuuaucuaucuacaag

SEQ ID NO: 4140289 - RNA, 92 nt, Human
cuuguuaugcaccauaagcuaacugauacaggagggaagagaauggcuauucuuuucaaacgcugaugucaguugcagccaugcauggcgag

SEQ ID NO: 4140290 - RNA, 61 nt, Human
cuuguuccuccagucauaugggcuuguuuggggcugccacagucaggacggggagagccag

SEQ ID NO: 4140291 - RNA, 58 nt, Human
cuuguucugugacuccagaaggcucauaaaugugagccucugaugaucacagggggag

SEQ ID NO: 4140292 - RNA, 81 nt, Human
cuuguugcucuacccagauuucuuauuuucuguuucuuuuacauuaaggaaccuaggacuauagauaucaugaggggcaag

SEQ ID NO: 4140293 - RNA, 76 nt, Human
cuuguuggugaaugauagcuucucuuuggggaacaugugugcucccucaacugagagguugucuuuauuaaguaag

SEQ ID NO: 4140294 - RNA, 82 nt, Human
cuuguuuuauucuugcuaucucagauuuauccuugaggccucagguucaaggcauacauuuagaagaggagaguguaccagg

SEQ ID NO: 4140295 - RNA, 56 nt, Human
cuuguuuugucuuguuucccuucuuugaagugagaauuuguaaaagauaagacaag

SEQ ID NO: 4140296 - RNA, 129 nt, Human
cuuuaaaaccaucuaaggagaccauguucuuuucuuuugcucauauuugcauguguuuacaaaauuacuguuauuaaacaaaggugcaagugugcaaagaaauggaagguucugaagaugacaguaaag

SEQ ID NO: 4140297 - RNA, 127 nt, Human
cuuuaaaaugguaauuguaaacccugccuugcggauguuucugaaguuuacagauaauguaaaacacauugcuuagcucauaggaaacacugaaugaaagguaacuauuaguauugccaauuugaag

SEQ ID NO: 4140298 - RNA, 63 nt, Human
cuuuaaagaauaacuuuaggaauagguaaucuugcaaaagcaagccuggaguauccuuugaag

SEQ ID NO: 4140299 - RNA, 58 nt, Human
cuuuaacaugggcucuuaagauauauguuuuaaucuacagagaggccugugcuugaag

SEQ ID NO: 4140300 - RNA, 77 nt, Human
cuuuaaccacuguguuaugcuuuccauggguaaagcaaccuaaaaaggccccuggaaucaguuacaugugguuggag

SEQ ID NO: 4140301 - RNA, 60 nt, Human
cuuuaaccugugcauuuuauaugcuuagggauuuagcaauagaagcacauagguucaaag

SEQ ID NO: 4140302 - RNA, 84 nt, Human
cuuuaacugcagccaaggcaugcugaguccuaaaagggagguuauuuccuugagggacucuaugacuuaguuuaacaguuggag

SEQ ID NO: 4140303 - RNA, 65 nt, Human
cuuuaagcccccaggaagguguuugaggaugaggacuagcagcaccagcgugggggccguugagg

SEQ ID NO: 4140304 - RNA, 67 nt, Human
cuuuaaguggucagagauaauuugggacacauggaucccaagauaaacaauuucuacuacuauaaag

SEQ ID NO: 4140305 - RNA, 55 nt, Human
cuuuaauaggacagcaggccaucuguuuggaugagggaagggcuggccuuuggag

SEQ ID NO: 4140306 - RNA, 92 nt, Human
cuuuaauccaguuaaagcaguuuaugaaauuuagggggaagggcaaaaaucaaucccuuucaaauuacaugacugcuauacauaggguaggg

SEQ ID NO: 4140307 - RNA, 93 nt, Human
cuuuacaggcauaggcuguuacacugugcacuaaauuugagaauucggaacagcuaucagaaugcauuuuguguagcuaugaugccuguggag

SEQ ID NO: 4140308 - RNA, 71 nt, Human
cuuuacagugaacuugcuugucaaaugccucuuuaaaaagaaagugaagauaacugcaagucagcuggaag

SEQ ID NO: 4140309 - RNA, 74 nt, Human
cuuuaccuaccacugucuuauuggguccaagguggccaguggaauacaaggccacuggacccagaaagggaaag

SEQ ID NO: 4140310 - RNA, 78 nt, Human
cuuuacucacaaauaagggcugcaggcaagauauggcugguuagcuguaguuuucuaagcccuggugagugggaggag

SEQ ID NO: 4140311 - RNA, 55 nt, Human
cuuuacugccaugcauuuauaacacuugugugucugucuguguaugugcagaaag

SEQ ID NO: 4140312 - RNA, 82 nt, Human
cuuuagacuaaagaagcauguguuaaugucaaccagaaaagauugcuuuuuucugcuugcaggcacauagcuuaguucgaag

SEQ ID NO: 4140313 - RNA, 94 nt, Human
cuuuagagccagaauuugguccgaauuuuguuuauuuccuucacauggcauggagauagcaccaugacuaaacaauuauacuucuggcuuuuag

SEQ ID NO: 4140314 - RNA, 92 nt, Human
cuuuagagccuuaaauacugaugcccaggcccauaccuagaugcugugguuuaguuggucugggauauggccugggcuuggggauuuuucag

SEQ ID NO: 4140315 - RNA, 127 nt, Human
cuuuagaguuagaaagcuuugaauucuuguccugggaacuggacagcuaaaacuuuccaagauaaccuagauaacuuuaguaugugcaggcuuuucccuguaggacaagaaagcuuacacuuuguag

SEQ ID NO: 4140316 - RNA, 57 nt, Human
cuuuagcaaaguuugccaucuaguggccaccaggacuaaauggggcuuugcuuaaag

SEQ ID NO: 4140317 - RNA, 63 nt, Human
cuuuagcccuguuccuagcuaggaguuucagcaagacucuggcuugaggaccaggucaaaaag

SEQ ID NO: 4140318 - RNA, 88 nt, Human
cuuuaggggcuuccaagugcugaggacaguagggaacaugacacuaugcuaacuccugacagguugguagcuuuggaagcagcaagag

SEQ ID NO: 4140319 - RNA, 55 nt, Human
cuuuaguccuuggcagguacccugacaccuccccaggagcucuccaaggacaaag

SEQ ID NO: 4140320 - RNA, 111 nt, Human
cuuuauaaaauguauucauaacucuuaaggcaauugauuauuuuuccucguaaaccgaaugaaagagaaucuguuuucagaaagaaccuguuggauacaugcagaagaaag

SEQ ID NO: 4140321 - RNA, 69 nt, Human
cuuuauacacaguaucaaauuucaucuucagaauaaccuuaugaggaagauauguuauuguguuugaag

SEQ ID NO: 4140322 - RNA, 130 nt, Human
cuuuauaccaaagucuguuacagguuagauugaaggcagugaaaggaaaaacugauauuuagcauaaauuccauaaugucuuuuuaacugucauucacacuaacuuuuacauauaauuuuaaaauaaaug

SEQ ID NO: 4140323 - RNA, 84 nt, Human
cuuuaucuucauucccagcagccauguaccacacucagugccuggacaugguagauggcugccuaaugaaugaaucugaugaag

SEQ ID NO: 4140324 - RNA, 57 nt, Human
cugcagcuccccugagaucaaguaacaucgcugguuggaggucuauggugcugacag

SEQ ID NO: 4140325 - RNA, 58 nt, Human
cugcagcuggagcaucuucucaucuugcauuugagcguggugggguccuccagugcgg

SEQ ID NO: 4140326 - RNA, 129 nt, Human
cugcagcugugacuccccuccucucauuaaugcauguccuggggucuucucuucagaagcugaggcagcauucuucaagacaguucuccuaauugauggaggagcacugggaggugcacguucaggcag

SEQ ID NO: 4140327 - RNA, 68 nt, Human
cugcagcuuuuugugcuuguaaagaaguccuagugaacuaaucugccaagcauggcauaaaaaggcag

SEQ ID NO: 4140328 - RNA, 65 nt, Human
cugcaggaaagggaaguaaauacucuguucuaauagaaaacaaucguuuugcuuuccuucuucag

SEQ ID NO: 4140329 - RNA, 65 nt, Human
cugcaggaauuguuuuaaagccucuucuuugaaauugagaagauuaugaauuagagcaguagcag

SEQ ID NO: 4140330 - RNA, 61 nt, Human
cugcaggacagggaggagcaagguuugacaaaacuacccugugugacuucccuaaccucag

SEQ ID NO: 4140331 - RNA, 58 nt, Human
cugcaggaggauccugagagugguguuaacucuuucuggucagcacgucuuccuucag

SEQ ID NO: 4140332 - RNA, 78 nt, Human
cugcaggaucuggagguaagaggcccugggccgaggugcagugacccugcaggccagcccuccaaccuccucccacag

SEQ ID NO: 4140333 - RNA, 70 nt, Human
cuucuauggcuuucuaugaacucaaaggcaggcagugguuuguaggucugagugcauagguggcaugagg

SEQ ID NO: 4140334 - RNA, 64 nt, Human
cuucuauucuugcaguauacaacuacugaugucaaaggcagugggcuguaauuuaggaaugaag

SEQ ID NO: 4140335 - RNA, 60 nt, Human
cuucuauugaauuuguuggucaaauaagucacuaaggccagcucaguuucaaaguagggg

SEQ ID NO: 4140336 - RNA, 55 nt, Human
cuucucagcuuagguaugguuucugguggaauagggcuggacuggaccugagaag

SEQ ID NO: 4140337 - RNA, 98 nt, Human
cuucucaguacucaaacagaugccccauguaucaugaaguuucuucauuuugcuauuaaaauggaagcuauuuaugauucugaaggagcucugagaag

SEQ ID NO: 4140338 - RNA, 61 nt, Human
cuucucccaaaaugcagaaggggguuuauagacacuauuuccuggauuuugacggggcaag

SEQ ID NO: 4140339 - RNA, 63 nt, Human
cuucuccugaaccacagaaacgugcucugccuuaagcaccuguaaccuggaaguuuagggaag

SEQ ID NO: 4140340 - RNA, 56 nt, Human
cuucuccuuauaugucccguucauugaguaucuggauggggaucuggagguggaag

SEQ ID NO: 4140341 - RNA, 68 nt, Human
cuucucuaggucgccgcccugguagaucauguccaguaucuggcucacccagguggugccuggagagg

SEQ ID NO: 4140342 - RNA, 75 nt, Human
cuucucucacccugcuaggccauggagaugcaaagauaaugaggugccuccaggaccucccaggcuagagagagg

SEQ ID NO: 4140343 - RNA, 85 nt, Human
cuucucuguguuucccaaguccucuccaggaggcucugaugaacgucugucuggucuugcugcccugggaggcugcacagaggag

SEQ ID NO: 4140344 - RNA, 73 nt, Human
cuucucuguuuuccaggaaucucauagagcacugcacccuaaaaauucuucuaugaccuuaggaagcaagaag

SEQ ID NO: 4140345 - RNA, 80 nt, Human
cuucucuugguaguucuuguuggaugaaacuauauugcuguugcuuuauuaaaguaaaacaagaauaugccaauggcaag

SEQ ID NO: 4140346 - RNA, 67 nt, Human
cuucucuuuuaaucucaguuucuagugugguauaauugacuuuggaauccugagaugagaauugaag

SEQ ID NO: 4140347 - RNA, 89 nt, Human
cuucugaaauuuuacaagcagugggacaugccagcagcucguggaacaugguccuggagaguguuccauaaagaguguaagcucagaag

SEQ ID NO: 4140348 - RNA, 81 nt, Human
cuucugagcugauuccaugguugcuagcauguucauaguauccccaccgucuguguccuggcucuguggaucccucaggag

SEQ ID NO: 4140349 - RNA, 118 nt, Human
cuucugaucugcuugucucugugcaaaucaaggaaguacugcggcguauucagagggaccaccugucuggaagaccagacuucccgaacugcaacacgaggaauacagaaucaagaag

SEQ ID NO: 4140350 - RNA, 86 nt, Human
cuucugcuccccucccgcaugccauuccgaguggcccugcugggggcagaggcucagauuccgaguggcccugcugggggcagagg

SEQ ID NO: 4140351 - RNA, 81 nt, Human
cuucugcugcucugagucuaguuugauuuaacuucuuguuagcaacuuccaguuuuaauuaaauugccagggguagagagg

SEQ ID NO: 4140352 - RNA, 129 nt, Human
cuucugcugguauccugauagaauaaugugagcuccauauggcccugggaccuguacagucuuucuuucugugccuuccuagcugaagggccuugugcacauuaaaauacaacaggugcacugcugagg

SEQ ID NO: 4140353 - RNA, 93 nt, Human
cuucuggaagcgggagggcugggucagccgugggaauauucaugagggguggggaagggucccuggggauguuggccugccggcuuccaggag

SEQ ID NO: 4140354 - RNA, 59 nt, Human
cuucuggagcucaccaacuuccuacuuacaucuggacugguggugguggcucucagagg

SEQ ID NO: 4140355 - RNA, 55 nt, Human
cuucuggaggcucuggaggagaauccacuuccuuggcuuuuucaccuucuagaag

SEQ ID NO: 4140356 - RNA, 55 nt, Human
cuucuggaggcuugaggggagaguacauuucuuugccuuuuccaguuucuagggg

SEQ ID NO: 4140357 - RNA, 60 nt, Human
cuucugggauuaauuuuuccugaggaaaacuaaugaaugaggaagguaagcucccagaag

SEQ ID NO: 4140358 - RNA, 77 nt, Human
cuucugggccuccagguccuuguuuguaaagcaggguggcccaccccucccuggagggcuugagaggccugcagaag

SEQ ID NO: 4140359 - RNA, 59 nt, Human
cuucugggugccugagagagagacagacagacagaacgguuucaaaggcaccuaugaag

SEQ ID NO: 4140360 - RNA, 96 nt, Human
cuucugguccuauugagguggccucuucuuggcuuccagguggaaguaauaauuuauauuagggagagaagccagcucuauaaaaagauucagaag

SEQ ID NO: 4140361 - RNA, 64 nt, Human
cuucuguggauauguucucucuucuuguaugguguuuaugagaagagaaauauuuccauggaag

SEQ ID NO: 4140362 - RNA, 60 nt, Human
cuucugugggugccuccagcagugacagaaagaauguacaggaggugugaccaauagagg

SEQ ID NO: 4140363 - RNA, 70 nt, Human
cuucuguuuuaaccugaauuucuugauccagucacuuuugguccagaagcucaaguugaacuugaagaag

SEQ ID NO: 4140364 - RNA, 61 nt, Human
cuucuuaaauuggauugcuauuggacaagauuuucaguauuuaucccauugauuuaaggag

SEQ ID NO: 4140365 - RNA, 130 nt, Human
cuucuuacagccuccagaaaggacuggguuuggaaguuuauuuuaauuagaguuuaagaguaaugaacauuaauuacagucaaacauauggacauucccagaagcauuucuacaagcacuauguucauug

SEQ ID NO: 4140366 - RNA, 62 nt, Human
cuucuucaaccugaaaguuucauauauaugaaaaugagggaaacuaucaaguguugggggag

SEQ ID NO: 4140367 - RNA, 55 nt, Human
cuucuucacacuggucugaagcccaagaggcugaacuacauagacuaugaggaag

SEQ ID NO: 4140368 - RNA, 55 nt, Human
cuucuucaguugcauguauugggauaauuaaugcaaggaagugcaacagaagaag

SEQ ID NO: 4140369 - RNA, 79 nt, Human
cuucuucccccgaggguucccagucuugcauagauaaagagagucugaggcagugcugggaagccugcagggcaggaag

SEQ ID NO: 4140370 - RNA, 58 nt, Human
cuucuucccccugccuccucccugguggaggagcacuaauuccugcagagggagggag

SEQ ID NO: 4140371 - RNA, 64 nt, Human
cuucuuccuuauugccuuuuguuacacaagcagugcugaauaugggcuggauauuggaaagagg

SEQ ID NO: 4140372 - RNA, 67 nt, Human
cuucuuccuucccucacuugccugcuuuucaaacccacuugaacagugcuuggggagcggagagaag

SEQ ID NO: 4140373 - RNA, 61 nt, Human
cuucuucugaggcagcuauucaguuauuacuaucaagagauaacugcuguugaagaagagg

SEQ ID NO: 4140374 - RNA, 70 nt, Human
cuucuugcaguuucacuggcauugcucuauguggaagacauaaggcauucucaugcugugaaaucagaag

SEQ ID NO: 4140375 - RNA, 61 nt, Human
cuucuugcuuauuuguucacuaucugccucugucaauagaaugugagcuucuuguaagagg

SEQ ID NO: 4140376 - RNA, 64 nt, Human
cuucuuucacucuuuaacuuccugccauuggccaaauccaccuggaagccagaggggaaaggag

SEQ ID NO: 4140377 - RNA, 74 nt, Human
cuucuuuguucuguugucucacguacucuaaggucaaaaucuuugucaccaguagaggcaguagagcagagugg

SEQ ID NO: 4140378 - RNA, 80 nt, Human
cuucuuuuagaaauggcuuuaaguagucucacauuauuuaaauuaaucgugaagucacaauaaagucugcuauugagaag

SEQ ID NO: 4140379 - RNA, 62 nt, Human
cuucuuuucuguuucuuucacccaguaaguuucauuuuaucaagggagaaacaggaggagag

SEQ ID NO: 4140380 - RNA, 59 nt, Human
cuugaaagcacuccuuugacugauuuccucccuugaugcggucaggaaguacuuuccgg

SEQ ID NO: 4140381 - RNA, 64 nt, Human
cuugaacaguagacccuggauaaacauuucuugagaaaauguugccugaucugcuguagccaag

SEQ ID NO: 4140382 - RNA, 68 nt, Human
cuugaacccggaggcgggggaugcagugagccgagauugugccauugcacuccagccugggugacaag

SEQ ID NO: 4140383 - RNA, 66 nt, Human
cuugaacccgggagguggagguuauggugaacugagauugcgccauuacacuccagccagggcaag

SEQ ID NO: 4140384 - RNA, 78 nt, Human
cuugaagaagucuuucccagaguaguugaugcuuuaagagagguauaggacucaccugggugaagaagauuuugaaag

SEQ ID NO: 4140385 - RNA, 78 nt, Human
cuugaaggaggugauggaguuagucaagugaauuuugagaacagauguauuacacuuucuucuucaagcuccaucaag

SEQ ID NO: 4140386 - RNA, 88 nt, Human
cuugaauggaauuuggaagcuaagauaauuuaaguaggucccagucucaaccuccucaaauauguuuuacuuguggguaacauuuugg

SEQ ID NO: 4140387 - RNA, 113 nt, Human
cuugaauugcaggugaauaucagccuuugguuugggcugugugccccagaugaugguggucccaaauuacauaggccaauauccagagcuggguuaaaaugaagcauuucgag

SEQ ID NO: 4140388 - RNA, 69 nt, Human
cuugacauuggucacauguuucaggccauauuugcuauuuuuuagcaagccuaaucauccagugugaag

SEQ ID NO: 4140389 - RNA, 60 nt, Human
cugccugcuccaguccuguccaccagggaggcaaaugguggcagggaaagggggaggugg

SEQ ID NO: 4140390 - RNA, 89 nt, Human
cugccugcucgcuuccccagggcaggccugacccuuagccccauucccccuacagagccaggaucuguuuuggggaaaugaacaggcag

SEQ ID NO: 4140391 - RNA, 85 nt, Human
cugccugcugaaagagccuccuguagcccucacccaggugcugcucucuggggcagagcuggaggggguuccacagucccaccag

SEQ ID NO: 4140392 - RNA, 63 nt, Human
cugccugcuuucuccucaacucaaaaaagcaaaucuauguucugagaaaaguaggaaaggcag

SEQ ID NO: 4140393 - RNA, 85 nt, Human
cugccuggaagacuuggaagacggaaaucuguagauagucugcaacuauuuauccacccauuucugcuuacauaggucauggcag

SEQ ID NO: 4140394 - RNA, 62 nt, Human
cugccuggcauagucuggucgaauuuucaugauaccaggugaucagcacuaagucaaggcag

SEQ ID NO: 4140395 - RNA, 63 nt, Human
cugccuggugcggugcccacccagccucaucuagguagccgcuggcacugcaccaguuaguag

SEQ ID NO: 4140396 - RNA, 98 nt, Human
cugccuguagggccucguuucugugcauggccaucagugcccuucuaggcauaagaagugguagcuauuccaggcugguaaggaggccgcuggggcag

SEQ ID NO: 4140397 - RNA, 57 nt, Human
cugccugugaacauacuggggguaacacacucuaaugccuucagguuggguaggcag

SEQ ID NO: 4140398 - RNA, 60 nt, Human
cugccuguuuguuaugucaugguaaaacauuuuuuguuaccacaaaauaucgaacagaag

SEQ ID NO: 4140399 - RNA, 68 nt, Human
cugccuuaugucaagacuuauuauaaagcuauagaaaugaagacaguauaguauuugcauaaggauag

SEQ ID NO: 4140400 - RNA, 62 nt, Human
cugccuucaucucugagcugggugaggcagacuggucugagccccuuugggacugagggcag

SEQ ID NO: 4140401 - RNA, 55 nt, Human
cugccuucucuggggagcugucuaugggguccccgcagcccuccaguggaggcag

SEQ ID NO: 4140402 - RNA, 55 nt, Human
cugccuucuuucaaggguaagcccuuggucacaaggggccugggacagaaggcag

SEQ ID NO: 4140403 - RNA, 59 nt, Human
cugccuugucuuguuuucaggggccucuucccucccuggggugcggccagacugggcag

SEQ ID NO: 4140404 - RNA, 77 nt, Human
cugccuuuccacaauuuggggugcccacuguaugcuucagguacugugcugggaucccaaagaugaaugaaacacag

SEQ ID NO: 4140405 - RNA, 97 nt, Human
cugcgaaucuggagaugcucaggguccuuggggagccugaacuucagggguugauugcagccauggugcaggcuuggaucacaucuccuuuuggcag

SEQ ID NO: 4140406 - RNA, 78 nt, Human
cugcguuuucaaggaaagcuuggcaaacuaaauggugggcaugccaucguuuauuuucacaagugcuccugaaugcag

SEQ ID NO: 4140407 - RNA, 80 nt, Human
cugcuaaaaagaggucagagcaggaaaggcagccaaauucaauagcaaagccugcugguuucuguucugcuuuggagcag

SEQ ID NO: 4140408 - RNA, 69 nt, Human
cugcuaaacgagucccggucccaaaagucagcuugucuccgcugcuuuucuucucacggcugucagcag

SEQ ID NO: 4140409 - RNA, 66 nt, Human
cuugccuguuuaucuaucaugaacugugaagauuuuuguacaugugauggaguauagacgugcaag

SEQ ID NO: 4140410 - RNA, 87 nt, Human
cuugccuucuggcucaggggacucugcccagcuguccccuuccccgacugcacccugcagguaccccugaucucaguggaaggcuag

SEQ ID NO: 4140411 - RNA, 67 nt, Human
cuugccuugggucaaccuuugaguguuugacacucacagucauuacaagggucugacuggagggaag

SEQ ID NO: 4140412 - RNA, 56 nt, Human
cuugcuaaaucuucuucaaaugccaggcacgugaggaaccuaugauuuagagcaag

SEQ ID NO: 4140413 - RNA, 87 nt, Human
cuugcuaacaagcauuuaguuaguaaauguuuguacaccuagcagaacuguaccugagacuugguuuaauuaaaauguguuaguaag

SEQ ID NO: 4140414 - RNA, 93 nt, Human
cuugcuaguggacuugcaaguccauaggcaguucauaacauagcagcuugcuucuauguuaugaacugccuauggagaagaccacauagcagg

SEQ ID NO: 4140415 - RNA, 90 nt, Human
cuugcuauaaacaaaugguuaaugucuuccuauucuacagagcauuugugcuauguagggagguuuauuauuuuguuguaauuauagagg

SEQ ID NO: 4140416 - RNA, 71 nt, Human
cuugcucuugugugcucuguggaucugagcaagcugcauuuaaguuugacacacacagacacacauacaag

SEQ ID NO: 4140417 - RNA, 67 nt, Human
cuugcugagaugaaauuugaaaauaguguugguucuuccacucacugaaauucauucaucccacaag

SEQ ID NO: 4140418 - RNA, 84 nt, Human
cuugcugagccuucggggcagcauucugugggcagguacuauuuuguacccauuguacaagcuaggaagcugaggcacagcaag

SEQ ID NO: 4140419 - RNA, 65 nt, Human
cuugcugaucuuugggccauuaauaaagcacauguccuguguuuugaauuccaaugauuuguaag

SEQ ID NO: 4140420 - RNA, 61 nt, Human
cuugcugcagguggucuugugcacuagccaggccagguaugagagccacucuguagcuaag

SEQ ID NO: 4140421 - RNA, 67 nt, Human
cuugcuggagucuggaaggagcugggggccaaucugaggccuccagagggucagacucugagacagg

SEQ ID NO: 4140422 - RNA, 93 nt, Human
cuugcuggcucaggagugaagcuacagaccuucgcggugaguguuacagcucuuaaugccgcgcgucuggaguuguucguuccucccgguggg

SEQ ID NO: 4140423 - RNA, 72 nt, Human
cuugcuuguauggcuuucuccauagggcaguucacaguguggcaguuugcuucaucagaguaaacaaguaag

SEQ ID NO: 4140424 - RNA, 59 nt, Human
cuugcuuucagucucggccucacucagcuucucuguggggcucugggauucagagcaag

SEQ ID NO: 4140425 - RNA, 92 nt, Human
cuugcuuuccauaguccucagaauaucaagagucaucuuuuccucuuaaaaguagcuuaguugauauuucaaaagaggaaagagaaagggag

SEQ ID NO: 4140426 - RNA, 78 nt, Human
cuugcuuuuuugugucauuuuguuagcauguuuguuacagagcuauaauuacaugcaggaaaaugcacagaucucaag

SEQ ID NO: 4140427 - RNA, 72 nt, Human
cuuggaaggcugguucucccucugaugcucugaaucccaucuaagggagcuucuggccucagccucuucaag

SEQ ID NO: 4140428 - RNA, 70 nt, Human
cuuggaauguggugguuggugguuauuuaaugaguauauauuuaguaaguaccuccacuugauugccaag

SEQ ID NO: 4140429 - RNA, 69 nt, Human
cuuggagagaacauuagcaaaaacagcucuguguguggacaugcguuuuauccuaguaguucugccaag

SEQ ID NO: 4140430 - RNA, 58 nt, Human
cuuggagccuuauucugccuuugaccuugguaugguugugggcagaauggcaucucag

SEQ ID NO: 4140431 - RNA, 61 nt, Human
cuuggaggaacacuuaugcaagaagauuuaagcaucuuaaugcagaaaugguuuuucuaag

SEQ ID NO: 4140432 - RNA, 70 nt, Human
cuuggaugaccuuuuaggauuugaguugcuggacugugaauuccaaggacuaaauucuagauucaacaag

SEQ ID NO: 4140433 - RNA, 55 nt, Human
cuuggcagcuacacagguaagaucaaguugaugucucacuagugagcaagcuagg

SEQ ID NO: 4140434 - RNA, 58 nt, Human
cuuggccacaggaccucuggggaacauugcuuuagcuuucugagcucuguggcacaag

SEQ ID NO: 4140435 - RNA, 75 nt, Human
cuuggcccggagccccaugaagcugccaucgcccagcccagcuugcaugaaacaagggccaugggaaacuccaag

SEQ ID NO: 4140436 - RNA, 58 nt, Human
cuuggcuaggaaagagccacuguuuuuaaaugagaaagcagggagauucuuagcugag

SEQ ID NO: 4140437 - RNA, 61 nt, Human
cuuggcucacuuccguggagagguggguuggcagccuacuuagacaucuuuagugguuagg

SEQ ID NO: 4140438 - RNA, 110 nt, Human
cuuggcuggguuauuaauagaauuugaaguuuauuucaaucuauucaucugaaaaaaggugagaggauggaaauuaauuagaauucucaguuuauaaaaccaguuccaag

SEQ ID NO: 4140439 - RNA, 72 nt, Human
cuuggcugugaaagcuucucaaacuuuccuugcuuuugauaacucugaaauguuugagguuuacuagucaag

SEQ ID NO: 4140440 - RNA, 72 nt, Human
cuugggacauugaagcuggaaagggaauuccaggccaggaagcccaaggucccuuguacagagugacccgag

SEQ ID NO: 4140441 - RNA, 64 nt, Human
cuugggagucaccuuagcugugagaaccguuuuucgaucuuaccagcaaaaaugacagcccagg

SEQ ID NO: 4140442 - RNA, 97 nt, Human
cuugggaugggugugggaagaagccugcaggugggcccaaccaguucagagacacucugggaggcccaggccuggcaggaacucaacccuucuuagg

SEQ ID NO: 4140443 - RNA, 67 nt, Human
cuuggggaaagauaguuuucucuagagcaauuccugagacuugcauaggaucucuauucucccuaag

SEQ ID NO: 4140444 - RNA, 64 nt, Human
cuuggggacacagagcccagggccugggaccuccugccaugugaggaagcuguggguccccagg

SEQ ID NO: 4140445 - RNA, 98 nt, Human
cuuggggacgucagcacacucaccuguggagagccagccagaagacaggcaguggcacaaguuuucugagguagagauugugacuguaggugaccaag

SEQ ID NO: 4140446 - RNA, 60 nt, Human
cuuggggcuuuguguguaggaugguuuauguccuuguucaacuugccacuguuucccaag

SEQ ID NO: 4140447 - RNA, 79 nt, Human
cuugggggcucugacucccucagcuccugcccagcuaguguguccugggugcaaguggcaguggggcagggcccuggag

SEQ ID NO: 4140448 - RNA, 75 nt, Human
cuugggguugggggacagucaggagaggccuugggagggaggggaggcccacugagugacucccucaggcccagg

SEQ ID NO: 4140449 - RNA, 81 nt, Human
cuugggucauugcaugaagagggucccugcugcccaggcugggaacagccaggcaucaggagcuucuucaggugacccagg

SEQ ID NO: 4140450 - RNA, 66 nt, Human
cuugguagcacggggaagagguacaaggaagagguacaaggaauguacccuuugccggaugccaag

SEQ ID NO: 4140451 - RNA, 130 nt, Human
cuuggucaaagucaaacucucaagaaauguggaggaacagggcuucaaacucagcuguguuugguucuaaagccuguacccuuuccacauauuacugcuucucaggguuuuccaucaaaaugaccccaag

SEQ ID NO: 4140452 - RNA, 73 nt, Human
cuuggucacauggugaaaagcagggcuuugguaaaauuccaucuaaacugugcuugccaaaccauugaguagg

SEQ ID NO: 4140453 - RNA, 71 nt, Human
cuuggucaugaagggcuagucacauaagacacgcacucugauuugacucaagcccucauguuagagcugag

SEQ ID NO: 4140454 - RNA, 101 nt, Human
cuuuaugaauggcaugugggugugggcuuagcccagagcccuggggaggagcaggaccugcugggcuggggccucagaccugcaagagccacuggguaaag

SEQ ID NO: 4140455 - RNA, 88 nt, Human
cuuuaugaguugcuaaauggaacaugaauuaauauggucuaucuuguucuagagugcauuauauguuucaaugggucaauuuauaaag

SEQ ID NO: 4140456 - RNA, 90 nt, Human
cuuuaugauauguuucaucucuccccagugucuuuauaguguauaauguuaaugaauaugugagggagggugagauggucuauugugaag

SEQ ID NO: 4140457 - RNA, 62 nt, Human
cuuuauuuccagcauaggcuuauugaaaccuaccaggugucaguacucugcuggguauagag

SEQ ID NO: 4140458 - RNA, 62 nt, Human
cuuuauuuccaugcuccuuucuaaucagaaucucucuggccaaaagcaguaugcaaguagag

SEQ ID NO: 4140459 - RNA, 90 nt, Human
cuuuauuuggcuucaguuuagaguuauuuaaucugagaagagcaacugaugcuuuaaagaggaaaagacccuagacaaguucaaggaaag

SEQ ID NO: 4140460 - RNA, 70 nt, Human
cuuuauuuuauucagucuguucagucuggcgucuccuuagcuauugacugccuuuuugagcaaaaugaag

SEQ ID NO: 4140461 - RNA, 55 nt, Human
cuuuauuuuguucuggcucuggggcuggcuuucccaggaagccaaagaaauauag

SEQ ID NO: 4140462 - RNA, 77 nt, Human
cuuucaacaacuccaugauguacgauuuuuuaugauuccuguuucacugagagucaagauagcauggugguugacag

SEQ ID NO: 4140463 - RNA, 74 nt, Human
cuuucacaaaacacuauuuucuggaaaauaaucuuaugcuugaacacuuucagaguugagcuguuuuguggugg

SEQ ID NO: 4140464 - RNA, 62 nt, Human
cuuucacacagaaucugaggagcuggcauuuauuuuugacagcaucucaaaucuugugaaag

SEQ ID NO: 4140465 - RNA, 69 nt, Human
cuuucacacagcagcaucauuuaucugguaguagcaagacagccguaugacuuuuuguuguuguuaaag

SEQ ID NO: 4140466 - RNA, 60 nt, Human
cuuucacagauucuguagaugcuccucagagacaagauucaggaggcauagucuggaaag

SEQ ID NO: 4140467 - RNA, 56 nt, Human
cuuucacagcacaagccugccuuuguugagaggcagcaacagguguguugugagag

SEQ ID NO: 4140468 - RNA, 58 nt, Human
cuuucacucuauccaacuucuugauuuggaaagcaaaucaggcaggcgcagagggaag

SEQ ID NO: 4140469 - RNA, 68 nt, Human
cuuucacugacugaugaucagaaauauuugccuggauggcacaguacagcuaaugucauuagugaaag

SEQ ID NO: 4140470 - RNA, 65 nt, Human
cuuucaguccuuaaggaaacauuuguuuucagcucuagagaccaauuuuuccugaagggcauagg

SEQ ID NO: 4140471 - RNA, 59 nt, Human
cuuucaguuuggugaaauacaagggcaaggucucuuugugcuugaaaugagacugaagg

SEQ ID NO: 4140472 - RNA, 61 nt, Human
cuuucauaagggguuuuauaauccuauuuuauaagggauuuuauagucccuuuuaugaagg

SEQ ID NO: 4140473 - RNA, 128 nt, Human
cuuucaucuucuuaaaggcucuucucugaacuuccucuguaggacuggggguggagguagcugagaaccaucaccuuugagucaucaggcuguagaucuagacauguaggcccaggaagaguagaaag

SEQ ID NO: 4140474 - RNA, 76 nt, Human
cuuucaugcuuuuuucuaguauaaauaagcaauaauagcaaagucagauuuaaaacuggaaggaagcuucagagag

SEQ ID NO: 4140475 - RNA, 79 nt, Human
cuuucaugguaucucuguaaaagaaaucacaacguaucuguuacuguugcauguuuauaacagaugaggacuaugaggg

SEQ ID NO: 4140476 - RNA, 60 nt, Human
cuuucaugucugaauucuuuagugaguaaauauguacauagacugauuuggaugugaaag

SEQ ID NO: 4140477 - RNA, 55 nt, Human
cuuucauucuuagauauuagugcaugccauauuugucacaucuaagaauguagag

SEQ ID NO: 4140478 - RNA, 61 nt, Human
cuuuccaagcucccuggagacacugguuugcagaggugugcucuuugggaucuuuggaaag

SEQ ID NO: 4140479 - RNA, 70 nt, Human
cuuuccaccgacaucuucuguguccuuaauuagucugacuaaugccacggagcccgugucaggugggaag

SEQ ID NO: 4140480 - RNA, 86 nt, Human
cuuuccacuaaggggugaccaacagcuguaauuuuaguggcaguaacugacaggaacagcuugauggcaucauguuuaaugggaag

SEQ ID NO: 4140481 - RNA, 63 nt, Human
cuuuccaggaauccucacagccuuccugaaaccugagcccugugcagcuggcuuccuggaagg

SEQ ID NO: 4140482 - RNA, 92 nt, Human
cuuuccauacacugucugucacagaugaagaaugaccuguguugauaaguauaauccauucauugauuucugaacccagauacacuggaaag

SEQ ID NO: 4140483 - RNA, 57 nt, Human
cuuuccccaagcaccacagugccuugucuauuggucacagggugaugcuugggagag

SEQ ID NO: 4140484 - RNA, 75 nt, Human
cuuuccccacuguugcuuuggaucauaaguggcagaugccacauauuuccaugcagcaugucauaaaggugaaag

SEQ ID NO: 4140485 - RNA, 68 nt, Human
cugggcguccucagaggccauccgaaaauaaagugguuuucggguggaaauucgagguuguaaauugg

SEQ ID NO: 4140486 - RNA, 72 nt, Human
cugggcgugaugguggaugccuauaaucccagcuacuuggggggcugaggcaggaaaaucgcuugaacccag

SEQ ID NO: 4140487 - RNA, 72 nt, Human
cugggcgugguggcaggugccuguaaucucagcuacucgggaggcugaggcaggagaauugcuggaccccag

SEQ ID NO: 4140488 - RNA, 66 nt, Human
cugggcuaguauuucagcauguggggcagggaaacccugguucaaugccuagaacuuagcauccag

SEQ ID NO: 4140489 - RNA, 107 nt, Human
cugggcucagagagguggagugaccaucccccgagaguuagcuaggagucacagcagggcccgggcugugacuaggccugagcucuuguccacccuuagaacccuag

SEQ ID NO: 4140490 - RNA, 58 nt, Human
cugggcucagaugagaggaaggguugguggugggcgccccuggggcagcugggcucag

SEQ ID NO: 4140491 - RNA, 55 nt, Human
cugggcucagcaggccaaggccaggacuaaggaugaggccuagcugugggcucag

SEQ ID NO: 4140492 - RNA, 64 nt, Human
cugggcucaguggcucauggcuguaaucccaggaggccguagugggagagucgcuugagcccag

SEQ ID NO: 4140493 - RNA, 60 nt, Human
cugggcucaugcuggagaugagacaaaaacagacauggucuuccucccuacagagcucag

SEQ ID NO: 4140494 - RNA, 58 nt, Human
cugggcuccacaaauuacguagcugggccugcucagcagcucugguuccugggcccag

SEQ ID NO: 4140495 - RNA, 65 nt, Human
cugggcucucuuuccugcugggaaaguaggaggcagcucuuaacacagcaggaaaagugccucag

SEQ ID NO: 4140496 - RNA, 69 nt, Human
cugggcugcaucaaagaggcauuuccaaguucuuugcaaaacuuuucuugacuuuauuugacagcccag

SEQ ID NO: 4140497 - RNA, 98 nt, Human
cugggcugccggccacccuucaggcagagcugauguucugugaugaccuucacaucaagcaugaggucgugccccaagaaggguuucacugugcccag

SEQ ID NO: 4140498 - RNA, 61 nt, Human
cugggcugggaggucacaaugagguacuugcuuacucucuuuggugcaccuugcagucaag

SEQ ID NO: 4140499 - RNA, 67 nt, Human
cugggcuggggcagcugcccaguggccacagugagcuacaggcagcugagcccugauacagacccag

SEQ ID NO: 4140500 - RNA, 72 nt, Human
cugggcugucccagggcggcagguccuuugccucaugaugcaccccguucugccgugcugggcucagccuag

SEQ ID NO: 4140501 - RNA, 66 nt, Human
cugggcuucagccucacacugauaucuuccaaccagggugguaccauggggaggcagaggugccgg

SEQ ID NO: 4140502 - RNA, 64 nt, Human
cugggcuucucagagaggcuuuaggguagguaauuauuuuaaggucuuggcugauugagucaag

SEQ ID NO: 4140503 - RNA, 63 nt, Human
cuggggaaccggaaucccccaccggcccaaucauguugcugcuggggucucuccggugcccag

SEQ ID NO: 4140504 - RNA, 68 nt, Human
cuggggagucugaucugguagcccugagguugcuuccugcucagaugcuuagagauuagacugccugg

SEQ ID NO: 4140505 - RNA, 83 nt, Human
cuggggaugccaacagagauauggaugucagaaacuuuuuuucaauuuucugaguccagaauuuacaaaaggcauuuacuuag

SEQ ID NO: 4140506 - RNA, 71 nt, Human
cuggggcaacccugggaaggugaggcccuggauuuccuggucuggccucugagaaccuccuagcaccccag

SEQ ID NO: 4140507 - RNA, 57 nt, Human
cuggggccccaccuuaggcuuggaaauuagaaucuacaguuuaagaaaaagcuccag

SEQ ID NO: 4140508 - RNA, 70 nt, Human
cuggggcucccggcugcuccggcucccggcccccugagcuggagccagagcgcagccugggccgcuucag

SEQ ID NO: 4140509 - RNA, 130 nt, Human
cuggggcugcggcacgucucugagccggggcucaccagguguggggaggacucacagaacaggcagcacugaguguggccuccccacuucuggggacgccugggguuggugguggcgcccagagucccug

SEQ ID NO: 4140510 - RNA, 79 nt, Human
cuggggcuggggcugcggacgggagcccagcccccagaugacauccuggggcucagucggcaagccccuucagucccag

SEQ ID NO: 4140511 - RNA, 55 nt, Human
cugggggcagcaagaagccauguuaggugaaggaacaaggcuguuucucccucag

SEQ ID NO: 4140512 - RNA, 103 nt, Human
cugggggcuauagagugugcugaggacagucugaaaagccuagguucaaauccugauuuggccacuacccagcugucuuugcacaguuuagcaccucccucag

SEQ ID NO: 4140513 - RNA, 107 nt, Human
cugggggcucaggauccagcaaggggcggcaggaguaaaggaggaaggaaugacaggugcaaauaccuucccaccaaagcccuuguugcccucugucuccuccccag

SEQ ID NO: 4140514 - RNA, 103 nt, Human
cugggggcuguagaggaaauggagcacucggcaauggaaggaagauggaugucuccuuccaugguggggcugcuucuauuucacaggcuucuacuaaaccuag

SEQ ID NO: 4140515 - RNA, 66 nt, Human
cugggggcuucgcgggcagcccacccccuucuacaaguggccuccagcugcucagagcagcuccag

SEQ ID NO: 4140516 - RNA, 76 nt, Human
cuggggggugagggugggguuauggagggucuuaugcauugggagaggggcugggacuuuacccuguggcccaagg

SEQ ID NO: 4140517 - RNA, 95 nt, Human
cuggggguaggugaaggcacugagccagccgucucugcuagacugugagcagugagcucggugaugcucacaccugucugccacucgauccccag

SEQ ID NO: 4140518 - RNA, 66 nt, Human
cuggggguucauccagaagagugcugccccaaaacugagggcauggcgugugcuggauucccccag

SEQ ID NO: 4140519 - RNA, 80 nt, Human
cuggggucacuccaccuucuccaccucccccugcgccaacuucgaggaccgagcguuccagguggcgagguggaccucag

SEQ ID NO: 4140520 - RNA, 82 nt, Human
cuuugcacaucuggaugaagacccagaggcuggggugacacuaaaacuccacagccugagccccauccagcugauggcaaag

SEQ ID NO: 4140521 - RNA, 59 nt, Human
cuuugcagcaauuucuguuaaaguguaugacaugugcaacauaggagggugcuuuagag

SEQ ID NO: 4140522 - RNA, 59 nt, Human
cuuugcauuacuugacuuuaguuuucaccaaaguaagagagcaaagaagugauggggag

SEQ ID NO: 4140523 - RNA, 58 nt, Human
cuuugcauucacuguaugcaugacauacuacugucuuauagugcaaugaauagcagag

SEQ ID NO: 4140524 - RNA, 66 nt, Human
cuuugcauuguuucaaaagugaauuacugcagugguucagcagaauacguugagaaaaaugcaaag

SEQ ID NO: 4140525 - RNA, 72 nt, Human
cuuugccaagcacuuuacauauguaugcucauuugguuaaaugagguaaugcauauaaagugcuuagcacag

SEQ ID NO: 4140526 - RNA, 61 nt, Human
cuuugccagccuccugauaucauccccagcuacaaacucagggaugaagaggcaggcauag

SEQ ID NO: 4140527 - RNA, 125 nt, Human
cuuugccauuuucauucaauguuguauuccuggaagagcugaaucaggcaggaaggcccagccgucaaaccugcggccuaguuacagcucuccauguaucaagaucuaggaagaaaaaaguaaag

SEQ ID NO: 4140528 - RNA, 78 nt, Human
cuuugcuauugugaauagugccgcaauaaacauacgugugcaugugucuuuauagcagcaugauuuauaaugcuuugg

SEQ ID NO: 4140529 - RNA, 89 nt, Human
cuuugcucucagauacuugaggagaucaccacauaaauucuuagaguucuggguuuagcuguaguguuuagucuagugucgaagcagag

SEQ ID NO: 4140530 - RNA, 76 nt, Human
cuuugcugauggcauucugcaucaguggcucauugacagagucauacauuacauguauaaugcuaauuagcuagag

SEQ ID NO: 4140531 - RNA, 55 nt, Human
cuuugcugccagaacccagcaggacccaccucggugcugaccuggcucagcaaag

SEQ ID NO: 4140532 - RNA, 119 nt, Human
cuuugcuugaggucacauagcuaggaaaugguggaggaaggcuuaaagacaaggcagucuaguccagagguggggcuucuagccaccauccuaugcugaaagcaugauaagggguagag

SEQ ID NO: 4140533 - RNA, 58 nt, Human
cuuugcuuuugugcucuagugguggguaauaugcugacaccacagcucagauguagag

SEQ ID NO: 4140534 - RNA, 58 nt, Human
cuuuggaaauggaucugaugagucuuuuaauagaagaaaaucaucauuauuucccaag

SEQ ID NO: 4140535 - RNA, 79 nt, Human
cuuuggaccuggaaaaugaugucuugauuuugugcauuggcaucauggcaaaauuaaacuuagcaucauguagccaaag

SEQ ID NO: 4140536 - RNA, 98 nt, Human
cuuuggagcucucagguggcugcucuccaucccaggccuggcuguaggaggcuaccuggguggggugcaggcccaugccugggguccuggcuccagag

SEQ ID NO: 4140537 - RNA, 73 nt, Human
cuuuggcuggcuucucgacuuguuuccuaugcauuacuucaugugacgaguccaguaaggcacaagccauaag

SEQ ID NO: 4140538 - RNA, 58 nt, Human
cuuugggggucccuuccugcucugacuuugggugguuuugcaagguucacucccagag

SEQ ID NO: 4140539 - RNA, 71 nt, Human
cuuugguaauguaauuuuucaauggaugaucuuuuucaaaggaaguucaaucagaugaaaaagcaccaaag

SEQ ID NO: 4140540 - RNA, 79 nt, Human
cuuuggucaagcacuuguagacuagaauuuuaaaaacagaaaacugguagaguuaggucacaagguguaugaagaagag

SEQ ID NO: 4140541 - RNA, 69 nt, Human
cuuuggucagagggauggaguucuaucaucagcccagucuuagauaccugcucaucccugugaccaagg

SEQ ID NO: 4140542 - RNA, 94 nt, Human
cuuugguugauucugauguacacagaugcuugagaaucuuugcaguagggaaacugaaucagagguuaaguaacuugcucaaagucauuuagag

SEQ ID NO: 4140543 - RNA, 92 nt, Human
cuuugguuuaauauucauggcuuauccaaaagaucuugucaccauagcuagaugaaaaaaaugacaaggcucuggagaagcagaaccacaag

SEQ ID NO: 4140544 - RNA, 76 nt, Human
cuuugguuuuauuuucaaucauugcaaaguaauggaaagguuuuaugcaaggcaauagauugaauuugugccuuag

SEQ ID NO: 4140545 - RNA, 70 nt, Human
cuuugguuuucaguagguaucauaugaagucaguggcucuccugcaucuaaugccugcuguauuccagag

SEQ ID NO: 4140546 - RNA, 79 nt, Human
cuuuguaaacagggcccagcucuauugaauuacaggucgcaggucugugaucaaccugcagggcuggaccuguacagag

SEQ ID NO: 4140547 - RNA, 82 nt, Human
cuuuguagcugcuucugauuuauagagaaacccaauuaaacuaguauuggcagaauugcuaagucagcuuucaguuacaaag

SEQ ID NO: 4140548 - RNA, 83 nt, Human
cuuugugccaagcugggaggcacugagguuucaaauggcuaugcauuaucaauaucucagugugcuucugacagggcauaaag

SEQ ID NO: 4140549 - RNA, 58 nt, Human
cuuugugcuugacccaugggucuuuacuguuucauugaccuuuaauucaagcaucagg

SEQ ID NO: 4140550 - RNA, 57 nt, Human
cuuuguggggguuucuuaucuucuuguagaggcuugagguaugaaaccugcauuuag

SEQ ID NO: 4140551 - RNA, 123 nt, Human
cuuugugugccaaggacccuguuagucucugugaagcucccguuaggccugucugcuaacuaagugccuacaacuuucagagcuaggauuuacagaguaacagaauacuaccuucuuacaaag

SEQ ID NO: 4140552 - RNA, 60 nt, Human
cuuuguucaugacaucugcuuccugugguauggaaagugaggacagauguaggaauaaag

SEQ ID NO: 4140553 - RNA, 66 nt, Human
cuuuguucucuggacucucacuucuauagggaagcucccaaaaugggaaugacaucuagagcagag

SEQ ID NO: 4140554 - RNA, 68 nt, Human
cuuuguugugccugagugcaccauagauuacaaaaaugcaaagugcuguagucaggauacaaacaaag

SEQ ID NO: 4140555 - RNA, 75 nt, Human
cuuuuaaauacucugggugaugguuaaaagcaagaugacugcugguuuauucgucacaccggaagcaagaaaaag

SEQ ID NO: 4140556 - RNA, 114 nt, Human
cuuuuaaauguuuagcuguuguaauggaugagauaugguugcuuaguuguuuuuuaaggacauuuuaaagaauuuuccagcaugucagucaaugccagcucagacacugaaaag

SEQ ID NO: 4140557 - RNA, 81 nt, Human
cuuuuaaccauuguguguguguguguguguguguagugaauuagauaaugcauauaaagagcuuaguauagugcuugaaag

SEQ ID NO: 4140558 - RNA, 67 nt, Human
cuuuuaagcuugauuguagucuagacauaauauguguuauguuuuuuuaaaaucaggcuuguauuag

SEQ ID NO: 4140559 - RNA, 83 nt, Human
cuguauccauugaaaacagcguagauucacagcuaaaacuaaauaaaaauguguuguuguuguuguuguuauucagggucuag

SEQ ID NO: 4140560 - RNA, 58 nt, Human
cuguaucugucagcuggucucgagacgucuguguuuuuccugcucagcauaguuacag

SEQ ID NO: 4140561 - RNA, 57 nt, Human
cuguaugaguugggaauagaaucaaaagauagugguuucuauucuuaauuuacauag

SEQ ID NO: 4140562 - RNA, 83 nt, Human
cuguauggguaugaugguauuaagaacaauuccaaagacaaauuacacuuuuaaauguucaugauacugaauuuaucccucag

SEQ ID NO: 4140563 - RNA, 62 nt, Human
cuguauuagcuucuacugcuacuguaccacaaauuuaguagcuuggaacaaugcaaauacag

SEQ ID NO: 4140564 - RNA, 98 nt, Human
cugucaaaugaccugguaucauggagauuuucccagauugauuuuugaaagauguccaacucugaagaagacuuccagacuucagggcaucugaacag

SEQ ID NO: 4140565 - RNA, 62 nt, Human
cugucaacauuggugucugucagcuggugguuagacacuugaacagacuuugccaauuacag

SEQ ID NO: 4140566 - RNA, 68 nt, Human
cugucaauacugcauacaguuucucauagaauguucugagaagaaacugaauaagcagucacaaauag

SEQ ID NO: 4140567 - RNA, 57 nt, Human
cugucaauuuauguugacaugcaguaaaauugaaaaucaggucaauauuguugacag

SEQ ID NO: 4140568 - RNA, 129 nt, Human
cugucacacaagaugucucaaaggcuagaaguugagugauucacaccuccguguuugaacaacugugacucacagcucugggugcaggaggugggcuguguugacucaacucuuccggcaggcagguag

SEQ ID NO: 4140569 - RNA, 72 nt, Human
cugucacagaacacacccuucgucaugaccugccaugucacacauguacaggucuuggcaaaggggagacag

SEQ ID NO: 4140570 - RNA, 125 nt, Human
cugucacaugggcuguaauuauauuuaagacuucuggugacaugacagauggugagaaugaagcucucauguucugaacaugaugucaucuggaagcugcaaaaugcacguauagcuuuggacag

SEQ ID NO: 4140571 - RNA, 61 nt, Human
cugucaccagcuacagacuacuguguagaagauacagaagccuguauuucuggcaggacag

SEQ ID NO: 4140572 - RNA, 57 nt, Human
cugucaccucugcccuuugcccacccucccugcugcagccauggggcagagagacag

SEQ ID NO: 4140573 - RNA, 80 nt, Human
cugucacuuugccugugucagcagguggaagugcucaccagacauuaaauauucagcuugcugacugcggcagaggggag

SEQ ID NO: 4140574 - RNA, 67 nt, Human
cugucagccugacuggcucuuuccuagcuaggcuagucagcucggcugaggagucaagggaggacag

SEQ ID NO: 4140575 - RNA, 65 nt, Human
cugucagccuuuagaugagcuggcuaccccuguggacauugccaggucugcaggcauccugacag

SEQ ID NO: 4140576 - RNA, 55 nt, Human
cugucagcugcuuuccuccguuaccaaggccgaggcuggccucagggcugugcag

SEQ ID NO: 4140577 - RNA, 88 nt, Human
cugucagguuugggcucccuguccuuggcugugaggcugcugcugcaggccaggauagcauggaucagaagagguguaaaucugacag

SEQ ID NO: 4140578 - RNA, 111 nt, Human
cugucagugugugggacagugacauccauggggcccaggaugagagccaagacccccuccuuuaguuucccaggcuccugcuugaucucuguccugucuauacaaaaacag

SEQ ID NO: 4140579 - RNA, 67 nt, Human
cugucaugaagccugcuggaucaagcuuaugcuguuuucagugaaagugaauccagaggcuuugcag

SEQ ID NO: 4140580 - RNA, 59 nt, Human
cugucauugagucgucagagucuuccgcauaccuguuggaggccucucauucaugucag

SEQ ID NO: 4140581 - RNA, 57 nt, Human
cugucauuuacuccauacccucaccuuaauucugguacagggaaaagagugugacag

SEQ ID NO: 4140582 - RNA, 74 nt, Human
cugucauuuccuuccugcugcuccucuccccagagucuaauggagucuccuugaggcagcugaaggagugacag

SEQ ID NO: 4140583 - RNA, 58 nt, Human
cuguccaguccaucuauccucauuguguagcugcagugcagguuaaggaacuggccag

SEQ ID NO: 4140584 - RNA, 66 nt, Human
cugucccagguccuagaugaccaggggccaaggacaugguacuuggugucagagagcugggaugag

SEQ ID NO: 4140585 - RNA, 77 nt, Human
cugucccgccacagcuucgcagucugcugccucuuugaggagcaguaggggcuggagggcugugagaggugggacag

SEQ ID NO: 4140586 - RNA, 96 nt, Human
cugucccuguguggguggggccucuuccauuucccugacuuagaaaccacaguccaccuagaacaggguuugagaggcuuagucagcacuggguag

SEQ ID NO: 4140587 - RNA, 68 nt, Human
cuguccguggcugccugccuccaagccgggcuccucugcagccugagcuccaguagcagccaggccag

SEQ ID NO: 4140588 - RNA, 59 nt, Human
cuguccuagagacaucagauguucuauguuagaauggguuucauguuucuauuggaugg

SEQ ID NO: 4140589 - RNA, 77 nt, Human
cuguccucagcccagcccuuccguacccagcauccacuguccuggugggaguccgcugugcugcuccaagaagacag

SEQ ID NO: 4140590 - RNA, 68 nt, Human
cuguccucagccucuugcacuuugaaggcccaggguuucuuccgccuccagggacaggagugugucag

SEQ ID NO: 4140591 - RNA, 57 nt, Human
cuguccuccagacgacaguccccgcagcguguggcaggggcuggcgcauggggaaag

SEQ ID NO: 4140592 - RNA, 69 nt, Human
cuguccuugcugaucugaaacguuacugugcacaacaacuauagagcagccuucagagcaguuggagag

SEQ ID NO: 4140593 - RNA, 63 nt, Human
cugucgccgucaccguuccugggaagcucuccucgcggugcccagguguggaggcgguggcag

SEQ ID NO: 4140594 - RNA, 76 nt, Human
cugucuagaauuuauuuuuguguguggaauaaaaaugugaucacauguauuucuuuuacauuaagauuucagacag

SEQ ID NO: 4140595 - RNA, 65 nt, Human
cugucuaguuaggaugccagcagaguggaacaauaugcuacaggcgauccucaacuauucuccag

SEQ ID NO: 4140596 - RNA, 63 nt, Human
cugucuaguuucugcaaaucuaguuucugcaaaaauuagcagaauaauagcagaaauuagcag

SEQ ID NO: 4140597 - RNA, 71 nt, Human
cugucuauugcccucuuaggucugcgcagcucugcugugagaggcugagcagguguaaggaaggcuagcag

SEQ ID NO: 4140598 - RNA, 58 nt, Human
cugucucauguagauggacuaugagcaauguaggccauugcuucauuaugugagauag

SEQ ID NO: 4140599 - RNA, 64 nt, Human
cugucuccgcccucuugguaggcccugugggaucaagugucuccgaggcggcgggcugagacgg

SEQ ID NO: 4140600 - RNA, 74 nt, Human
cugucuccguuguacaggcagggaaacugaggcucugguagcuucacuuccccagugccuuacagcuggaaagg

SEQ ID NO: 4140601 - RNA, 129 nt, Human
cugucucugacacugcaguagccacagucgagcuugagcuggcugguccagcaggggcugcuccgcagcccuggggcucagaccagagcaaugcugugagaguccugguacuggccagugcagagacug

SEQ ID NO: 4140602 - RNA, 55 nt, Human
cugucucuguugccuguaggugaaaugaucccaacagaagaacaucggagaccag

SEQ ID NO: 4140603 - RNA, 55 nt, Human
cugucucuugguguccagaggaggcucugccucccgcugggcagagaggagaggg

SEQ ID NO: 4140604 - RNA, 90 nt, Human
cugucugccuugccugugaauacaagccaggcacaaggcaucgaaucccguggugcgagcuucugguuugguauucaccaugacagacag

SEQ ID NO: 4140605 - RNA, 100 nt, Human
cugucugcucugcccugcccagccuggccuuggagaggcacggcccuuuccuuagggguuuggaggcuuccuaggaccaggucaaugggucagagcccag

SEQ ID NO: 4140606 - RNA, 69 nt, Human
cugucugucccgucaccgccccauguucguucaucucacuguugggcaguuuggugacgccaguugcag

SEQ ID NO: 4140607 - RNA, 60 nt, Human
cugucuguggucucaguaggccucuuucagcccagcggccuccaugccaccaucagacag

SEQ ID NO: 4140608 - RNA, 58 nt, Human
cugucuguucagauucauuacucuauaccuggccucuagagcagggucuggcagacag

SEQ ID NO: 4140609 - RNA, 55 nt, Human
cugucuguuucaaaagugguuauccuucauugagcaccaaaugugcaacaggcag

SEQ ID NO: 4140610 - RNA, 65 nt, Human
cugucuguuuuaccuucuccagagaacacacuuucagucuuuuacccgggaagaaaaagggacag

SEQ ID NO: 4140611 - RNA, 55 nt, Human
cugucuucugcaaggugcguggggguguggccaugcacaagccagcaggggacag

SEQ ID NO: 4140612 - RNA, 80 nt, Human
cugucuucuucugugguuguggaggguaagauucuggaagcuucuuaggaucaggcccucuaggguagcagagguggcag

SEQ ID NO: 4140613 - RNA, 58 nt, Human
cugucuuucaugaggcccugaggucuaggagggccugagucacaucaggagaguacag

SEQ ID NO: 4140614 - RNA, 64 nt, Human
cugucuuuguugguuuaugguguuuuguuucacuacugaauuuuaauuagaucugcaaggagag

SEQ ID NO: 4140615 - RNA, 70 nt, Human
cugugaaaggggucacagggaaagcguuaacagaucaaugccuuuggcugugugcucccuuuucccacag

SEQ ID NO: 4140616 - RNA, 76 nt, Human
cugugaacucacaaggcgcuggucacagaaagcagacagccuccgugaacuucaucagcuuccucugugguuccag

SEQ ID NO: 4140617 - RNA, 68 nt, Human
cugugaaggcaaugauaagagugacagccagaauggggaccaccuaguuuacucuucucguuuuacag

SEQ ID NO: 4140618 - RNA, 65 nt, Human
cugugaaggcagcagcucuguccauguuguuuacuguagggcugaacacugaccuugagacauag

SEQ ID NO: 4140619 - RNA, 66 nt, Human
cugugacuuuagacuuagucaaguugaauggaaacaaagaaacuugaauaggucagagaauuauag

SEQ ID NO: 4140620 - RNA, 63 nt, Human
cugugagaaaggugauggagguucugacaucagagcugugccagauucauccucuuuccacag

SEQ ID NO: 4140621 - RNA, 64 nt, Human
cugugagacacccaagagucagauggggaaacugagucccagggcucaagggcaugcuacgugg

SEQ ID NO: 4140622 - RNA, 91 nt, Human
cugugagaucccaggccccaccaggaacaagccauggaggaacagccaaccugcucauuucaguuuguugccucagccugcaucuccacag

SEQ ID NO: 4140623 - RNA, 95 nt, Human
cugugagugugccuggcgcugguugcugaucugggggcccccaccucuggugggucccucaugagaggcauuuccugccagccagguauucgcag

SEQ ID NO: 4140624 - RNA, 93 nt, Human
cugugcaccauuucuagaaauccguugcaaauguuucauaacaguagcagcuuguucacccuuuauggaauauuuguaggaaagaagguacag

SEQ ID NO: 4140625 - RNA, 86 nt, Human
cugugcagguuaaauauugauccacagagguacuuaguuuuagaguaugguacuccagacauucuguccucguuagaccugcagag

SEQ ID NO: 4140626 - RNA, 58 nt, Human
cugugccucccuuuacuuugaguucgcaucugcccucacaguaucucuggagccauag

SEQ ID NO: 4140627 - RNA, 76 nt, Human
cugugccuccuuccuccuccucacagucaccugcagcugcccgacuucagguucugagagcaggagaggucugcag

SEQ ID NO: 4140628 - RNA, 126 nt, Human
cugugcugccgggaaacugggcgcauugucguucagguccuugaucuccaccuuuaucacgcagauuuccauugagcuggacaugaccucgagcgagaugaugcacuuggggcucuggcggcacag

SEQ ID NO: 4140629 - RNA, 83 nt, Human
cugugcuggagagggagcuguuggaagugcugggugcacugauaaagaagcauguguuccucugcuuccuccccauugcccag

SEQ ID NO: 4140630 - RNA, 57 nt, Human
cugugcuggagaugggccagagggggcugguuccuagggcccagugaaccaggacgg

SEQ ID NO: 4140631 - RNA, 63 nt, Human
cugugcugucuuuucuugcuguggucaugguuaccagaugugguaguugaagggaagguacgg

SEQ ID NO: 4140632 - RNA, 61 nt, Human
cugugcuuuauugucauauacauggaaaccauuuccaauguguuuguggcauggaucauag

SEQ ID NO: 4140633 - RNA, 127 nt, Human
cuguggacuccagucugagaaaugguucucuuguuagugugcauggaugccucaacuggguucaggcaugaagacuauguuugaggccccugaaugcacagcagagaaagcucaacugcagacacag

SEQ ID NO: 4140634 - RNA, 56 nt, Human
cuguggagcagggcagggucaccggccagacugagcuguccuccccugcucuacag

SEQ ID NO: 4140635 - RNA, 71 nt, Human
cuggggguccagggacguuucugcagugcguaauccaucauagacagcauagacucucugggcuuguccag

SEQ ID NO: 4140636 - RNA, 89 nt, Human
cugggguaguuuacacacaauuagcauaguaaaaaggaaauguuguuguuguuauuguuguuauuguuguuuacuucacuuuaacucag

SEQ ID NO: 4140637 - RNA, 87 nt, Human
cuggggucccucgguccagccugguugcgggcauccuccucacggacuggggcaggcguccagcgcggaaugugcgagguacccugg

SEQ ID NO: 4140638 - RNA, 57 nt, Human
cuggggucuaaucuuccauuucuauaccuaauagcuaggguaagacuuggaccuugg

SEQ ID NO: 4140639 - RNA, 124 nt, Human
cuggggucuguucugaacaagaugaacaguaugcaacaugauuaugaugcaauaugcuccuaguuuuucccaauguggauacaaucucauuuaaaucaacaaugccaucaggagcagauuucag

SEQ ID NO: 4140640 - RNA, 74 nt, Human
cuggggugaggucaaggucaagagacagaguagaaagacaauuuuagcuuuggcuauuuuaauuucauacucag

SEQ ID NO: 4140641 - RNA, 62 nt, Human
cuggggugcuuucugaagcacacggaagaaccaccugcugcuucugaugugagcagccccag

SEQ ID NO: 4140642 - RNA, 55 nt, Human
cugggguggggagaacaugggcacgggagguggaaaaccuaagcuccagccccag

SEQ ID NO: 4140643 - RNA, 58 nt, Human
cuggguccugcacugcaagcaccucucgagcacaaggccuaacagaggcagggcugag

SEQ ID NO: 4140644 - RNA, 75 nt, Human
cugggugaggugggcuggccagagacaacacugggagccugcagugguggucuagccauagccccccucagccag

SEQ ID NO: 4140645 - RNA, 66 nt, Human
cugggugucaggagacaugauggagaggaaagcaucaucauggucauucucugucucacuguccag

SEQ ID NO: 4140646 - RNA, 82 nt, Human
cuggguugcuuauuuaaaauguagguugggacuuagagggugcagcaguucccauccuagaccuacugaaucagacucucag

SEQ ID NO: 4140647 - RNA, 73 nt, Human
cuggguuggugggcgggcaggagcgcaccuggguccguccucucagggcucgcucgcucgcucgcucgcucag

SEQ ID NO: 4140648 - RNA, 107 nt, Human
cuggguugguuccaagucuuugcuauugugaauagugccgcaauaaacauaugugugcaugugucuuuauagcagcaugauuuauaguccauuggguauauacccag

SEQ ID NO: 4140649 - RNA, 68 nt, Human
cuggguuucacaucccuggaguuacccaguggggaaaguuuaucuuaagggaggggauguaagccugg

SEQ ID NO: 4140650 - RNA, 120 nt, Human
cugguaaaaugacaucauucagaaagaaucaaucaggagacagcaggcacacaaggauagaaguucucacuuugggccgcuguuuucaggcuuuucaguuugaaggugagguuuugccag

SEQ ID NO: 4140651 - RNA, 55 nt, Human
cugguaagaaggucuaagucaauccauuaguugauucacagaauaguuuuaccag

SEQ ID NO: 4140652 - RNA, 66 nt, Human
cugguaaguauccuuccacacugucauaauucccaggaaacagcuugagacuggauaugcacacag

SEQ ID NO: 4140653 - RNA, 94 nt, Human
cugguaccucuucaccccuuugcucaccaguuugguuauucccuccagguaaguuccuagaggagaguugcuggauggaagguggagaugccag

SEQ ID NO: 4140654 - RNA, 56 nt, Human
cugguagggaauccauagggccuauuuuggguaggcuggaaguaaaaacuuacuag

SEQ ID NO: 4140655 - RNA, 69 nt, Human
cugguaggugaugucccuuuaaggcucuuuaacauaagagcaaugaaaugaaaucagucuuaaaaucag

SEQ ID NO: 4140656 - RNA, 86 nt, Human
cugguaucucccgaguguguuuguaaccauaugcggggugauaugccccagccugugugugaggacuggcugugugggaguacugg

SEQ ID NO: 4140657 - RNA, 80 nt, Human
cugguaugaaguaaaauugauuuggaauccuagcucuuuauggaaggaguuuagaguucaaauuaguucagcuuccucag

SEQ ID NO: 4140658 - RNA, 64 nt, Human
cugguauugaggagucaggggcacggaauagaagacauuuccggucacaugacaucucggcugg

SEQ ID NO: 4140659 - RNA, 92 nt, Human
cuggucacaggaauuaugaaggauccaaagggucucucuugacacuuacagagcaagacccuggguucucucuccgcuuucuugcucaccag

SEQ ID NO: 4140660 - RNA, 60 nt, Human
cuggucagggcucuuugggagccaucuggcccuccaucccauagagcugugcugagccag

SEQ ID NO: 4140661 - RNA, 60 nt, Human
cugguccccagacugggcuuagcuuuagucugaauucugggcucugggucugugggcuag

SEQ ID NO: 4140662 - RNA, 70 nt, Human
cugguccuuugccaucucuccaccucgcuccuggccuuccuugccgggggagcagagggcagaggcucag

SEQ ID NO: 4140663 - RNA, 56 nt, Human
cuggucuaguucccagcacgcuggacccgcagagugauuucagggaacagaaucag

SEQ ID NO: 4140664 - RNA, 74 nt, Human
cuggucuauaaaugcagauaugugugugcgcuucuauguauggaugcuuacauguacaugcauagguagagagg

SEQ ID NO: 4140665 - RNA, 58 nt, Human
cuggucugaaaaggaggcaugccagcaccucccacugagcguuucuauugaggaucag

SEQ ID NO: 4140666 - RNA, 60 nt, Human
cuggucugaaaugugacuuuugaaccauuccuuugguuaaaguaaguguuucagaaucag

SEQ ID NO: 4140667 - RNA, 70 nt, Human
cuggugaaguuuuauuaaauccacagaaguaaaaaccauguuaugaggaacugggagauggggccaccag

SEQ ID NO: 4140668 - RNA, 76 nt, Human
cuggugaauugucccgugcccuguguaucuaugaguccugcagagaugacaaaucaggggacggggucaugucuag

SEQ ID NO: 4140669 - RNA, 80 nt, Human
cuggugagacccuggaaggagcccgggcggaucagguccagccgguugcccgacagcuccagcuccuccaggcgcaccag

SEQ ID NO: 4140670 - RNA, 62 nt, Human
cuggugaggccaguggucugagauaaguaauguaacuugcaaauagcccuggccaucaugag

SEQ ID NO: 4140671 - RNA, 77 nt, Human
cuggugcccuuucuuucagaacacaagugauuauuacugcugauaugaaucaaggugauuuggagcugggcaugcag

SEQ ID NO: 4140672 - RNA, 90 nt, Human
cugguggaaauauuuugagugaaauccagggggacugagguauagaaacuguacucaauuucuuauggguuuccuuacuuccuccucuag

SEQ ID NO: 4140673 - RNA, 57 nt, Human
cugguggcaaagcuaauuaggcccaauuauuacccaccugaccuaauuugccaucag

SEQ ID NO: 4140674 - RNA, 130 nt, Human
cuggugggcgccgcccuucuccgcggccugcugcugagccuuccggucgcucggggccuggggcaguggucgggucuggaggagggcucugcggcucugccagggucgcggacggaggaacgccuaccgg

SEQ ID NO: 4140675 - RNA, 78 nt, Human
cuggugggcgccugggcaggaugggcccggugcauuggaggcagccucccgcugggcgccgaccugcuggcccugcag

SEQ ID NO: 4140676 - RNA, 72 nt, Human
gaacgucagaggugagcuucuugcuaagguuuugcuguccuuaaccuucagcagagcucauuuuucacaguc

SEQ ID NO: 4140677 - RNA, 81 nt, Human
gaacuaaaggcaguaggcuggugauuagaagcagcccaaguggguuugcuugaaauucagucaagaauaucugucugguuc

SEQ ID NO: 4140678 - RNA, 58 nt, Human
gaacuacauguguguugccaugauguuucucuuguccaggccuuugcacauguuguuc

SEQ ID NO: 4140679 - RNA, 91 nt, Human
gaacuauagagcaaccugcauauaaagucguucagccaagagcaugggcagaaugaagcccugcugagcauuugugcagcuucucaaguuc

SEQ ID NO: 4140680 - RNA, 63 nt, Human
gaacuauggauguucuagggaugugaugauggaaaauauuacaaaugcccauacaucuaguuc

SEQ ID NO: 4140681 - RNA, 117 nt, Human
gaacuauuuagcuuuuguggauucuagcgcagaauacaugauuaaaguuugauuugucuggacaaacuuccaucaugaauuuuaauacaguuaugaggaaaaauacuaaauaaguuu

SEQ ID NO: 4140682 - RNA, 91 nt, Human
gaacuccacaguuauccaccuuuuugccugugaauacuaucuugccucacacuggaagauggagcacgagcagaagcagaaauuggaguuc

SEQ ID NO: 4140683 - RNA, 77 nt, Human
gaacucccccuaacacugguucugacuacacagcuuuucuaggagggcugagguugccgguguaagagaaggaguuc

SEQ ID NO: 4140684 - RNA, 64 nt, Human
gaacucguugcugaagccaaagucagcaaucuugauguuggccucggcauccagcaagagguuc

SEQ ID NO: 4140685 - RNA, 59 nt, Human
gaacucugagaggagcacaggcucuacugcagugccuggacggcuuccucaugcaguuc

SEQ ID NO: 4140686 - RNA, 55 nt, Human
gaacucugaggagaaagagcuuggugccagaugcaaucccaggaacucaggguuu

SEQ ID NO: 4140687 - RNA, 61 nt, Human
gaacucugaugguaggguagagguagcgagauagucagcuucuggcucuauaucagaauuc

SEQ ID NO: 4140688 - RNA, 61 nt, Human
gaacugagccucagcucaugcuucuguaacaggaagaagccauucccuguaggcucuguuc

SEQ ID NO: 4140689 - RNA, 77 nt, Human
gaacuggcccauccagagugauggcaccugcugggugcgccgggcgcccgcgguaccacucauucccugggccguuc

SEQ ID NO: 4140690 - RNA, 88 nt, Human
gaacuggccuugagccaccuccugccucagccuccccacgugcugggagugaggcugagccacggggcuggcugcugugggcgaguuu

SEQ ID NO: 4140691 - RNA, 97 nt, Human
gaacuggggcccaucuugcuguacguuagacucuccacucugcugcuugucagcaguggggacuuaugccagcauuuaccuauaugagccucaguuu

SEQ ID NO: 4140692 - RNA, 56 nt, Human
gaacuguuuuguaaaggaacucaucuagccuuugcuggcuccuuggcaaccaguuc

SEQ ID NO: 4140693 - RNA, 78 nt, Human
gaacuuaaccguuguuuuccugggauaccaaccuggagguguuuuugagguggcccaaagaaauacaaagagaaguuc

SEQ ID NO: 4140694 - RNA, 78 nt, Human
gaacuuccuuucagaggggcguacacagcaccgcggccgugugccugugaucuccuucugaguuugaaaaagaagauc

SEQ ID NO: 4140695 - RNA, 78 nt, Human
gaacuucucuuuguauuucuuugggccaccucaaaaacaccuccagguugguaucccaggaaaacaacgguuaaguuc

SEQ ID NO: 4140696 - RNA, 78 nt, Human
gaacuugaugaguagguaugaggcccacaggagcccuucuggagcucuuuggucgcaucauccauuucuuccgaguuc

SEQ ID NO: 4140697 - RNA, 57 nt, Human
gaacuugggagaagggagugugucgaugagccggccuugcucccuauaccacaguuc

SEQ ID NO: 4140698 - RNA, 99 nt, Human
gaacuuuaaaaaauacagugccugggucccagucccuagcuuuugaucuaauucauguaggggugggauccaggaauuaccauguauuuuaaaagcuuc

SEQ ID NO: 4140699 - RNA, 66 nt, Human
gaagaaaaccugaguacugcugggaaugccacguccgggucucucucugugugccucaguuucuuc

SEQ ID NO: 4140700 - RNA, 79 nt, Human
gaagaaaauuuggcuuaguaggaaaguguuuuuguacugggcagaaacacugugucaaacuggggcaaacaaccucuuc

SEQ ID NO: 4140701 - RNA, 85 nt, Human
gaagaaaguaucagugguacucucagauguuuaauuggccugccuaagagcuucuaggccuaagagauacuacugugaucucuuc

SEQ ID NO: 4140702 - RNA, 77 nt, Human
gaagaaaugcuccuucaaaagucauaguaaaacagaucauguagauuuuuacuuuugcuguugaaguuguggguuuc

SEQ ID NO: 4140703 - RNA, 84 nt, Human
gaagaaauuaaaugacaggggaagaugauaauaauggagaccagacugcaaugauggcuguuuguuccuucauuuaauuccuuc

SEQ ID NO: 4140704 - RNA, 122 nt, Human
gaagaacauagcauguuugcuugucugcauacagaauuucagugauguuuucucaaaugaauugagaauaauacugaaaugcugaaaucuugugauauauaaguggaaugucuaugggcuuu

SEQ ID NO: 4140705 - RNA, 68 nt, Human
gaagaacuuaacauaauaaggagagagcaggaaccuuauuccaguuucuuguuguuuuggguggcuuu

SEQ ID NO: 4140706 - RNA, 73 nt, Human
gaagaacuugcagcugguuaaugggagaauuagaauuaaaaucagccuccuaacucccaggccagugcucuuu

SEQ ID NO: 4140707 - RNA, 70 nt, Human
gaagaagaugcugcuuguucacgggcauuuuuauuacauuaggaucucugagcucgugcaguacuucuuc

SEQ ID NO: 4140708 - RNA, 74 nt, Human
gaagaagcauggcugcucccuggcugcaccugcugaguugacagguagucccagagagcuggucgugggucuuc

SEQ ID NO: 4140709 - RNA, 74 nt, Human
cuuaaagaacuacugucuuauuuuagauaaauguauccucaauaaauuuguauauuuaagaggguagguuuaag

SEQ ID NO: 4140710 - RNA, 61 nt, Human
cuuaaagggagaagagugaccuccaccccuccugcacuggaguauauuucucucucuuaag

SEQ ID NO: 4140711 - RNA, 80 nt, Human
cuuaaauccugagcuacaccugcuccuuggcaucucaauggaaugauggaagaguagugaaaguguggcuaguguuaaag

SEQ ID NO: 4140712 - RNA, 75 nt, Human
cuuaaaugucuccaggggccagguaagucacccucaugacugagguggcugagcugugccccuggcuacacggag

SEQ ID NO: 4140713 - RNA, 89 nt, Human
cuuaaauuguacuuuuauuugguguaggccuggaguugcauuugaccagcaaagaagcuguuuguacuuagauaguaaguucauuugag

SEQ ID NO: 4140714 - RNA, 62 nt, Human
cuuaacagaaguuguucauugugggcucagaaggagcccacggauuuaaucuucuuguuaag

SEQ ID NO: 4140715 - RNA, 105 nt, Human
cuuaagaaguaaguuuaaaucuacuuaggguggcuuuagacuagauagcuuccugaaagcuuucugucauaguuaucuuugugcuuuuauugccuaucacauaag

SEQ ID NO: 4140716 - RNA, 65 nt, Human
cuuaagcuggggcuaugcuaaauagccaaugauaaucuaggcuaguuuauguaguccuguugaag

SEQ ID NO: 4140717 - RNA, 69 nt, Human
cuuaaggaaguacccauucuuagggucaugcuugugcagucagccccugagagugagugccaccuuaag

SEQ ID NO: 4140718 - RNA, 78 nt, Human
cuuaagucuuccuggaaaugucgcguguagaaaugccaacauacauuuccauacuacugguuccauauaagaucuaag

SEQ ID NO: 4140719 - RNA, 66 nt, Human
cuuaauacacuauuuugugcucagugauagaaaauaguguuucagugaguaugugauaguguugag

SEQ ID NO: 4140720 - RNA, 76 nt, Human
cuuaauauauucuugccugauagcaaggaagaagaauaauucccuuccugggcugcagggaagagcauggagaaag

SEQ ID NO: 4140721 - RNA, 70 nt, Human
cuuaaucaagaguggggacugugccuuugcagaaaaauaagucacagaacauccuuagcucaugauucag

SEQ ID NO: 4140722 - RNA, 86 nt, Human
cuuaauucugcucucaauuuaggcauugaauuagaauagcgacauacacuauuuuauauaaugaauaggaaggggagagaauuaag

SEQ ID NO: 4140723 - RNA, 73 nt, Human
cuuacaaauuccuauaggguaggucuugcuacugucauuucauguaugaagaaaccuauccucuagugguaag

SEQ ID NO: 4140724 - RNA, 91 nt, Human
cuuacagaaaaucauuaucauagggagagauuugaauucuggguggaauaaauuagaacaucaauuuccccuauugauagacccuuguagg

SEQ ID NO: 4140725 - RNA, 69 nt, Human
cuuacagauguuucaggaauacuauuuugaacccaaagggagaguuuagugugucugaucacuugugag

SEQ ID NO: 4140726 - RNA, 75 nt, Human
cuuacagcauucagagucugcacaacagcacugacaucccugcuucaugugcaacugugaguacccaucuguaag

SEQ ID NO: 4140727 - RNA, 73 nt, Human
cuuacaguaacauuuucagucugcagccgcgacgucugauguuagggacuagaacugagaucucugcugugag

SEQ ID NO: 4140728 - RNA, 55 nt, Human
cuuacauaugcaagacaaagggaugugaaaaacccucuguguugaggguguugag

SEQ ID NO: 4140729 - RNA, 72 nt, Human
cuuacccuuccuuauguuuaaagugcuuaaaagcuaaguuuagaacuucaugaacuaagggaucggguacag

SEQ ID NO: 4140730 - RNA, 81 nt, Human
cuuaccuaccuacuuaucuaucuguuuuuaugucuaucugucaugcuuagcauaguaacuggcagauuguaggcaguuagg

SEQ ID NO: 4140731 - RNA, 73 nt, Human
cuuaccugccugguggaguuaggcaucacaauagagguaacauuuaagcugaggaacucaccaggcagagaag

SEQ ID NO: 4140732 - RNA, 66 nt, Human
cuuacgccugccaccuaagacugauugcuuuguguucacgguccucaguccauaggugggccugag

SEQ ID NO: 4140733 - RNA, 62 nt, Human
cuuacuagaaauuaccuucucacugccaucuaaaagugguagacuucagauuuucugguaag

SEQ ID NO: 4140734 - RNA, 62 nt, Human
cuuacuagcuacuuugacuaaagcacccauuuacagcuauuuagcaaacccuugcuggugag

SEQ ID NO: 4140735 - RNA, 94 nt, Human
cuuacucauucauguaccuuacaguaguguaugucaacuacauaucaagaauuguauggauguacaagauuguaggaaugcuggaaugaauaag

SEQ ID NO: 4140736 - RNA, 64 nt, Human
cuuacuggauacucaagacauguccagaaaccaauuggauaaaggugucuggaguacuagagag

SEQ ID NO: 4140737 - RNA, 127 nt, Human
cuuacuuaaacucaggacuuacgguuacucauauggcuuuaaacuuuucauuucaucauaaguccuuugaaaugugagacguagaguuaauggaaaaugauaaggaaaacugcugcauuuaaguaag

SEQ ID NO: 4140738 - RNA, 76 nt, Human
cuuacuuuaauagcuuaguccugauucuguugagaguggcuguuaauggaacacaugauuaauggcuauuaaugag

SEQ ID NO: 4140739 - RNA, 129 nt, Human
gaaaagacgagagcuguauaaaguaagaauggccugagagaacugaccaagagcaggcucauuuucuuuucugcucguugguuccuuuucuuucaucaccgaucuugauccauccccuccucccuuuuc

SEQ ID NO: 4140740 - RNA, 63 nt, Human
gaaaagagguuuaacugacucacaguucugcauggcuggggaggccucaggaaaccuacaauc

SEQ ID NO: 4140741 - RNA, 59 nt, Human
gaaaagcuuacugccacuuggcucuguccaugauacgucauuugggagagaguuuauuc

SEQ ID NO: 4140742 - RNA, 60 nt, Human
gaaaaggcacuggauagcuggggaugcaccacaugcccuuguccuucagaugucuaacuc

SEQ ID NO: 4140743 - RNA, 59 nt, Human
gaaaaggcugcccacuuauugagucuugaguccaaaaaucaaugugagguagucaguuc

SEQ ID NO: 4140744 - RNA, 60 nt, Human
gaaaagggagagcaggucuaccauuucuaaagguacauaguggagacaauugcccuuuuu

SEQ ID NO: 4140745 - RNA, 77 nt, Human
gaaaagggggacauguaaacauuuacaguauuaucuccugauuaaaugcuguucuuuauguuauuuuuaucuuuuuc

SEQ ID NO: 4140746 - RNA, 76 nt, Human
gaaaagguuacucugcaaguugaagguggcuuagaggaccaaaagcacuuucaaaaaacaugcagacugcugauuc

SEQ ID NO: 4140747 - RNA, 59 nt, Human
gaaaauagcagauagaccaaugagauccugaguuucuuguugaaauaggugcuguuuuc

SEQ ID NO: 4140748 - RNA, 86 nt, Human
gaaaaucaaucuaguugaauggauuuguuauauuauauuuaauugaugauaauaauagauauggccgucuguuuuaauugauuuuu

SEQ ID NO: 4140749 - RNA, 58 nt, Human
gaaaaucaggccauggagaagagauucagaugagauuucacaaaccauccugauuuuc

SEQ ID NO: 4140750 - RNA, 86 nt, Human
gaaaaucuucccagaguugguagaccauuaugugagcuuucaaagagacaaggcggaaauuggguuuccugcauugggaaauuuuc

SEQ ID NO: 4140751 - RNA, 86 nt, Human
gaaaaugaugugauaaugaagauuuauaauugccuuuucucuguuggagaggcugucucauauuuuguaauauuauaugcauuuuc

SEQ ID NO: 4140752 - RNA, 69 nt, Human
gaaaaugcggcuuuuguccggcgcuguuaaugcaaguuguaacaguguaauaugggagucaguguuuac

SEQ ID NO: 4140753 - RNA, 57 nt, Human
gaaaaugugucagcuugucgaucuucucugcagcaggauccaauagcuacacauguc

SEQ ID NO: 4140754 - RNA, 73 nt, Human
gaaaauguuggaagcugacagcuggguucagauguagggacgcuuucagauuuuaucagcuuccagcauguuu

SEQ ID NO: 4140755 - RNA, 105 nt, Human
gaaaauugcagcuuuggguuaggucacuggaguugggucaagauucucuuugagagcaauggaguaugaaacccacuccaauuuggucagacccagguaauuuuu

SEQ ID NO: 4140756 - RNA, 58 nt, Human
gaaaauuucugccacauguguguauacaugcaagugaaauuagcagaaucauguuuuc

SEQ ID NO: 4140757 - RNA, 60 nt, Human
gaaacaaagugaucaaagugcugugggagcaguuuggcaacaguuugagcuuugaauuuc

SEQ ID NO: 4140758 - RNA, 67 nt, Human
gaaacaaauuuggagagaaacaaguaggaggugacuggccuauuguuucucucuaauuucguguuuc

SEQ ID NO: 4140759 - RNA, 102 nt, Human
gaaacaauaccuaggaaauauuugaacauaggaaguccuuuggccuacuuugcuuuuggugcuugucuuuuccuguuuucuguuucuuaucuuuauuuuuuc

SEQ ID NO: 4140760 - RNA, 67 nt, Human
gaaacaauacuuguccucacuaccacugauaaaaggcaugacugauggugaggguaaguauuguuuc

SEQ ID NO: 4140761 - RNA, 77 nt, Human
gaaacacaaauagaauucuuugaaauuuaugcuuuguuagcuguaaagacauguauuugcuagauucuguggguuuc

SEQ ID NO: 4140762 - RNA, 97 nt, Human
gaaacacuuucauccauucagagacuuuaacaauggguaugaaagcaauguucaugauuucauauuucuuuaaggacuuugucauugaaaguguuuc

SEQ ID NO: 4140763 - RNA, 57 nt, Human
gaaacagauuaacagcauauuuuagugaaaccaaagcaaguguguuuuaucuguuuc

SEQ ID NO: 4140764 - RNA, 75 nt, Human
gaaacagauugcuugaauuaccauguaauaaacccagcuacauuuuauuaugugugcuuuuggcaaacuguguuc

SEQ ID NO: 4140765 - RNA, 83 nt, Human
gaaacaggccauaagcagugacaagucugguaaugccagaguaguuuuucugcaguaaagauuucccuuccugcuugccuuuc

SEQ ID NO: 4140766 - RNA, 77 nt, Human
gaaacauacagauaauuagcauaaaugcugcuggcccuuguguucugagcauugaugcuaauuuuuugguuuguuuc

SEQ ID NO: 4140767 - RNA, 129 nt, Human
gaaacaucagcaucaccugagaacuuuauauuagagaugcagauucucugcccuacuccaucugcugaaucaggaacucugggguuggggcccagcagucugcguuuucacaggaacccugggugauuc

SEQ ID NO: 4140768 - RNA, 121 nt, Human
gaaacaugugauuuugcaacauguguccacaugugguucaaguacuccacaugugcucuuucaauggguccugugaccuugcuguggaucacauguguuucacauaugguuuauaugguuc

SEQ ID NO: 4140769 - RNA, 66 nt, Human
gaaacauuggucugccccuuauuguacagagcaacaagacaauaaggcuuuauuagcuauuguuuc

SEQ ID NO: 4140770 - RNA, 67 nt, Human
gaaacauuuguugaguacuugcuuuggacucaugaaaaaaguaaugaugaguacuuuacaaguuuuc

SEQ ID NO: 4140771 - RNA, 64 nt, Human
gaaaccaacucucaaaacuccagcagaaggcaaugaagcuguuaauauuuuggugaguuguuuc

SEQ ID NO: 4140772 - RNA, 82 nt, Human
gaaaccaagcagucuaacuucacagccuggaaccacaaaccacuguguagcauccggcuucuggagugagguugaugguuuc

SEQ ID NO: 4140773 - RNA, 63 nt, Human
gaaaccgcaauuucagugcugagaacuuuguguguuuacaaaggcugaggucccugugguuuu

SEQ ID NO: 4140774 - RNA, 84 nt, Human
gaaaccgggguuguuguuggauguuaccguugaaaaucagucuggaugcaaaugggcaucuccaagugugcagcuuugguucuc

SEQ ID NO: 4140775 - RNA, 55 nt, Human
gaaaccuguccccucuuccucagugcuugccugaaagguuaauggacaguguuuu

SEQ ID NO: 4140776 - RNA, 60 nt, Human
gaaacgggccggcggauauuggcucggcgacacgccgaggcuccuccccgagucuggauc

SEQ ID NO: 4140777 - RNA, 64 nt, Human
gaaacgguguuaaauguguuaguugacugaaucuggcauuuauaaugcaauuuagcaaaguuuu

SEQ ID NO: 4140778 - RNA, 73 nt, Human
gaaacguagucaaaagugcacucucagugcugcugccgaccgggcacggcgcugggccugcauuugcgcuuuc

SEQ ID NO: 4140779 - RNA, 129 nt, Human
gaaacguggggaggggauccacaggccaaggcgccgcacagugaugcccugcuccaucccaugacagggccuggaaggggacuggcagcugcagaaaugguuuccggccuucccacaucccccacgcac

SEQ ID NO: 4140780 - RNA, 99 nt, Human
gaaacuauuuuuaacaccugcauaugacaguugaaaguaacuguuucaaguaauuaacauaauuugaaaguagcagcugcauauguguuaaacaguuuc

SEQ ID NO: 4140781 - RNA, 66 nt, Human
gaaacucagucuggaaauauugacuucagagaagaauuuugcauaagucauguccagugggguuuc

SEQ ID NO: 4140782 - RNA, 89 nt, Human
gaaacugagacccacaggaguuagucaguuguggagauuuaacugaaacccagauucucagaucccacauugaauucuauuucaguuuu

SEQ ID NO: 4140783 - RNA, 122 nt, Human
cuucacagagcuggugcugucaaggaucaaaugagauuauguaugugaaaucaccuugaaaaggauuucacagauauaagauuucaccacagauauaagacauuauugcagcugcugugaag

SEQ ID NO: 4140784 - RNA, 92 nt, Human
cuucacagggugaggacaaaaugagacacaugugacuucuuuguaaacugugacaaaaugagacacaugugacuccuuuguaaacugugaag

SEQ ID NO: 4140785 - RNA, 71 nt, Human
cuucacaugaguuucccugcacuguuguucuuacuauugugucuaguggaacacaucuaaggaagcagaag

SEQ ID NO: 4140786 - RNA, 60 nt, Human
cuucacauuugcgaaggccaaagccuguuaggucaggccuccuguuggcuagugugauag

SEQ ID NO: 4140787 - RNA, 74 nt, Human
cuucaccucuuugcauugcauacaaggaacugaguaauaagaaccucagccuuguuuguaguuaauaguggaag

SEQ ID NO: 4140788 - RNA, 129 nt, Human
cuucacuacauucuggaagcauaugguguuugguaacaguuacaguaacaguaaugguaguucuguauauauguagcuguauauacauuauuuuguguuacuuugaugugggguaauuggaauaaguag

SEQ ID NO: 4140789 - RNA, 81 nt, Human
cuucacuucaauacagcagauuucccugggcuccuggcugggcacagaguggcuggcagaggggagucuguggacguggag

SEQ ID NO: 4140790 - RNA, 59 nt, Human
cuucacuuucauuuguaauaaacuucccaugcuggcugggaaguuaauugaaaguuagg

SEQ ID NO: 4140791 - RNA, 58 nt, Human
cuucagagaguccagggacugcacugcauagguucccuuagcccugcacuccugguag

SEQ ID NO: 4140792 - RNA, 65 nt, Human
cuucagagugcagaagauugggauaauuuguaauggcuuuugaguuuucuguuuuagcucuggag

SEQ ID NO: 4140793 - RNA, 73 nt, Human
cuucagcuguggucuccaaggcucgggacugggcccagggcaguguagaaggucauggagauuguagcugagg

SEQ ID NO: 4140794 - RNA, 59 nt, Human
cuucagcuucuccuaaaugucccauaaacugugauaaucauuagggcagaagcaggaag

SEQ ID NO: 4140795 - RNA, 58 nt, Human
cuucagcuuuuuaacauaggaugcguuagauuuuucuauucuuauugagcagcugagg

SEQ ID NO: 4140796 - RNA, 88 nt, Human
cuucaggaaucauuuauucauagauuuaggaagcuuuuuggcagagauagcuaguuaaacuaugaauacaccaggcccuucucugaag

SEQ ID NO: 4140797 - RNA, 82 nt, Human
cuucaggccggcucuguuuacuuucagaggcuccuuuauaucccaggcaggcugccuccaagaagagcagaguccccagggg

SEQ ID NO: 4140798 - RNA, 55 nt, Human
cuucaguggucauuugugauaaagcuauuguuuuugucauuaaucgcuauagaag

SEQ ID NO: 4140799 - RNA, 96 nt, Human
cuucauacuuagcacauuuauuguuguauaagaaguuggcagauaaagcaaaacuuugguuagagucuugacacaaaaggaguuucuuagaugaag

SEQ ID NO: 4140800 - RNA, 69 nt, Human
cuucauauuguaaguagaaauguuauggucucaaccuucagcccaugauuugagcuacuuacuguggag

SEQ ID NO: 4140801 - RNA, 76 nt, Human
gaaagcuaaaaaguuacauaaauguccucuagcaagcagguuccuuguucugagggcuaauguacuguagcaauuc

SEQ ID NO: 4140802 - RNA, 56 nt, Human
gaaagcugugaaauagugcucuaagaguugucaagagcugugguuuuacaucuuuu

SEQ ID NO: 4140803 - RNA, 59 nt, Human
gaaagcuuggaaacgacuuuaucaugaugcaagaacuugauacuuguuuucaggcuuuu

SEQ ID NO: 4140804 - RNA, 76 nt, Human
gaaaggaaaggagaaaauaaauguucuguaaguaaaaauauacgcaugaaacaaggguauuuucucuauuucauuc

SEQ ID NO: 4140805 - RNA, 69 nt, Human
gaaaggaaauauucuaagcacuaaucugaguuucaucugccggauggaaaugcuaguauauuaccuuuc

SEQ ID NO: 4140806 - RNA, 74 nt, Human
gaaaggaaucaacuugcucauuggauuguucuuacccuugaggaagaaaauuacuccagagacaaguucuuuuc

SEQ ID NO: 4140807 - RNA, 71 nt, Human
gaaaggagaggguuaaggagcuggcagccacacaaacaccuuccacauugcacuccuugccauuucuuuuc

SEQ ID NO: 4140808 - RNA, 57 nt, Human
gaaaggagucagucuuacugaacugagaucaaggugucacagugcugcauuccuuuc

SEQ ID NO: 4140809 - RNA, 94 nt, Human
gaaaggcagccuccccacuaccagacuugccuuuagguuuuguuuaauucugccacuugcaaagcaaaugccugaaggcgggcaccugccuuuu

SEQ ID NO: 4140810 - RNA, 66 nt, Human
gaaaggcauuggacuaguaucagaucauauguauuuucauccugucauacuaguuuaaugaucuuc

SEQ ID NO: 4140811 - RNA, 76 nt, Human
gaaagggaaaaguaagauuuaugcuauaaacucuaggucauuaugagcuaaugauuuaauguaguauuucccaugc

SEQ ID NO: 4140812 - RNA, 130 nt, Human
gaaagggaugggauuucuaugcucaggauaauggagaauaggggccacuggugaggcuucacuuccuuccaugcuuggccagggcccugcucaauuucuccacgccuugccaagucaguccuaggacuuc

SEQ ID NO: 4140813 - RNA, 82 nt, Human
gaaaggguaaucggcuggcaugaacuuuggcagggaagaugucaugcaaaauccaguugguuucuguagcuguuagcuuuuc

SEQ ID NO: 4140814 - RNA, 64 nt, Human
gaaagggugaagaguagaugaaugcagugaacaguugauuccucaacauccauucuugcccuuc

SEQ ID NO: 4140815 - RNA, 78 nt, Human
gaaagguugccucagaaaguggcagguagggauagauggaaacauguaagguuuaccucacuauucugugucccuuuc

SEQ ID NO: 4140816 - RNA, 66 nt, Human
gaaaguaaaggcucacuggcuugggguggcacuccacgccaccucugguccugcugccuggcuuuu

SEQ ID NO: 4140817 - RNA, 90 nt, Human
gaaaguacuagaaccugacagguuuguccuugaaucaauucacaaccuucaaagaauguuguuucgaagggcacugucaccaucacuuuc

SEQ ID NO: 4140818 - RNA, 70 nt, Human
gaaagucagagaucuggaguacaacugcgcccauuuggcugcagaaagcaaaauggaucucuguauuuuc

SEQ ID NO: 4140819 - RNA, 65 nt, Human
gaaagucugcauacaggacaugcacaccaguaacuugauaguguguuaaaugucauguaggaguc

SEQ ID NO: 4140820 - RNA, 98 nt, Human
gaaagucuucagcaaauuacaguauaauuagauaucaaaagucugguuucaauuuucucuagacuaucugaauguuauuguuguugucauuauuuuuc

SEQ ID NO: 4140821 - RNA, 71 nt, Human
gaaagugcaugucaccuucgguggcacggucugcagugggugggccucucuacuggaaggugaccaccuuu

SEQ ID NO: 4140822 - RNA, 62 nt, Human
gaaagugcugagacagacugggaagccuuuggcuaccggcuuccacugucccuggcacuuuu

SEQ ID NO: 4140823 - RNA, 66 nt, Human
gaaagugcuuuugagugugugcaugcaugcucauacauucacgugcuuaacuuaggaggcaauuuc

SEQ ID NO: 4140824 - RNA, 103 nt, Human
gaaaguggaaaguaaauagauggaaagucgugaaggcccggaaccaggaaauggaaggucaaggucaccaggcaacuauguacuccaucuugcucuucuuuuc

SEQ ID NO: 4140825 - RNA, 80 nt, Human
gaaaguggcaugcagugacucagacacaggccagucaccuccacagccugucacucugagccgcuccgugaacgcucuuc

SEQ ID NO: 4140826 - RNA, 62 nt, Human
gaaaguggcuguauagccaagucagauauaagucuuuuaucuguaggcagcaugccacucuc

SEQ ID NO: 4140827 - RNA, 76 nt, Human
gaaagugguauacaauucuuaggaacuccuuacauugcaaaguacuuuggguuucaaagaguuguaaauuacuguc

SEQ ID NO: 4140828 - RNA, 85 nt, Human
gaaaguguagcauaauaguauuuauuuggaaaaagauccauuugaucauuuuauccucugggaagcuacaaugucuacaucuuuc

SEQ ID NO: 4140829 - RNA, 60 nt, Human
gaaagugugugugugugcacgugugugugugugcacgugcgugugcgcacacauacuuuc

SEQ ID NO: 4140830 - RNA, 68 nt, Human
gaaaguucuggaaagauuugcguguaagaaaucugauuuuguuuaacuaaaauuuuccagacacuuuu

SEQ ID NO: 4140831 - RNA, 70 nt, Human
gaaaguuugguuaaacgagagaacauaugccagauagaagguauuaaauguuuaaucuaacuugauuuuu

SEQ ID NO: 4140832 - RNA, 101 nt, Human
gaaaguuuuuugugggggugcuucugggagagcuuuugcuucuuaacaaaagggaagggugugaaaggagaguucucuuagguccacccucacuuucuuuc

SEQ ID NO: 4140833 - RNA, 88 nt, Human
gaaauaaaccuuuguggucuuaagccacugugauuuggcauuuaccacagcagagccuagcuuaaucugacugauagagguuaauuuc

SEQ ID NO: 4140834 - RNA, 83 nt, Human
gaaauaaauugggaaguaucucucugucuagcuuuggcaguuuuaccaggaugggccugggauaugcuuuaguaauuuguuuc

SEQ ID NO: 4140835 - RNA, 66 nt, Human
gaaauaagcaucuuuggauuguucuucuaggguguucuuucugccauucaacuagaugauuauuuc

SEQ ID NO: 4140836 - RNA, 92 nt, Human
gaaauacacuuaaaauauauacacuauuuuuauccuauuaaugaacaugauaaugggguggauagaaagugaugugguugggguuguauuuu

SEQ ID NO: 4140837 - RNA, 78 nt, Human
gaaauacagauucucaggcuucacccaggaccugcugaaucugaaacucucuggguggggcucagcaaucuguguuuc

SEQ ID NO: 4140838 - RNA, 125 nt, Human
gaaauagaaaauagcauuaacgggguuuuaaagcuuguauugcaauauuugaaacauuagaaaaaaaugaauauguggaagauaucugcaauauaauuuaaaggcucauuaguucaauuuauuuc

SEQ ID NO: 4140839 - RNA, 59 nt, Human
gaaauagaagcugccaauuucuucaggucugagcccaggaauugucacagcaucauuuc

SEQ ID NO: 4140840 - RNA, 95 nt, Human
gaaauagccuacuggacuaacagaauucucagcugaaauucccagcccuagagagucaugcugaggaugcugugaagccaaucugggcugcuuuc

SEQ ID NO: 4140841 - RNA, 76 nt, Human
gaaauaucaguuuguguguguacgugugguuuauaucagaaggaugucucccauacacacaccaaauuuguauuuc

SEQ ID NO: 4140842 - RNA, 92 nt, Human
gaaauaucccuuuuccuggggaaguucguaggugagcugcugcuaucagcuagcauuuacucccuaggcuguuuugggagaaagggguuuuc

SEQ ID NO: 4140843 - RNA, 63 nt, Human
gaaauaugcaauuuagaacagacuuaggaaaucccuaaggcuuucuaaauaugcagaaauuuc

SEQ ID NO: 4140844 - RNA, 96 nt, Human
gaaauauguuguucucucaaauuacuauguaugugugugugcauguguguaugugcaugaacacaugugcauguauauaauuuauaagaugauuuc

SEQ ID NO: 4140845 - RNA, 70 nt, Human
gaaaucaucuuucaguuuauaagucugcuauagcuaauuuuauaguauuggauuucugaaagaugagguc

SEQ ID NO: 4140846 - RNA, 68 nt, Human
gaaauccaugugagcucagaauugcuaauaaaauucaauauaggccauucuuggagcuuacugauuuu

SEQ ID NO: 4140847 - RNA, 63 nt, Human
gaaaucucacuguagucaaagugcccaggcaaaacauauugggcagcucacagaaagaguuuc

SEQ ID NO: 4140848 - RNA, 66 nt, Human
gaaaucugagcucuaaugucagccuugccccugguaauacaguacugcugauuagagcugagguuc

SEQ ID NO: 4140849 - RNA, 76 nt, Human
gaaaucugauccacaauguguuggguuaaguuugggcucauuccaauaugacccauuuaacauauucuuugauuuu

SEQ ID NO: 4140850 - RNA, 64 nt, Human
gaaaucugggaaccaaagggugcuuaagacuuguuuuaagucuaaguacagugguauggauuuu

SEQ ID NO: 4140851 - RNA, 130 nt, Human
gaaaucuguuacuagaguggaaguugcuucugccuguaauauuuggagaagcugcaaaauagauuuacaaauuuaaagcuucuccaaauacuacaggcagaagcaacuuccacucuaguaacaagguagc

SEQ ID NO: 4140852 - RNA, 121 nt, Human
gaaaugaaaguguacauccuuuaauaaauggaaauacuugccauaaaacuuuagcaacaacugccaguuaguggcaaagugguuugauuaauuguaacuuguaaaacuaugauaaaauuuc

SEQ ID NO: 4140853 - RNA, 60 nt, Human
gaaaugaauucugaagucuuccaauguuugcauuuauuggaggggcucccgaguucuauc

SEQ ID NO: 4140854 - RNA, 89 nt, Human
gaaaugacauuuucaggacagcauuccaaauacauaguuagggacaguuguucguagcuucuggaguguuugaaaauggcccucauauc

SEQ ID NO: 4140855 - RNA, 97 nt, Human
gaauugucauaauuuacuguuucagaacuucuuaaaaacguguuuuaauuaauuuugcuguauuuaaggcccuggagcaagcuuuuugugaugcuuc

SEQ ID NO: 4140856 - RNA, 99 nt, Human
gaauuuaacuugauauauauauauggguaucuguacugauuguuauaauaauaauaaacaauuucuaauauagaucuuaccagguaucugguuuuuuuu

SEQ ID NO: 4140857 - RNA, 85 nt, Human
gaauuuaauuuugaaaagucuacuugcaauugaguauccuauccuuuguagcuauuguugccaaguacuuugaaaaguugaauuu

SEQ ID NO: 4140858 - RNA, 77 nt, Human
gaauuuacugacuccuuucugauucaugauccaguucuuauaugaggaaugauucauggaucaggagaggaaaauuc

SEQ ID NO: 4140859 - RNA, 70 nt, Human
gaauuuagacuucuugcagguaauucuuagagaaacauaaaaagaaauugguuguuugaaguguagguuu

SEQ ID NO: 4140860 - RNA, 77 nt, Human
gaauuuauauuuuauucucaagacaaugggaagccaugaggguuuuacagauugcucuggggauggacagauagauc

SEQ ID NO: 4140861 - RNA, 55 nt, Human
gaauuucacaaggugaggauaaagagaacauuccuuauccucuccugauuaauuc

SEQ ID NO: 4140862 - RNA, 87 nt, Human
gaauuucacauuaauaaaggccaguaucagauauacuuuuaaugccuuuagaaaaugucugcuguugguuuauuaugacagagauuc

SEQ ID NO: 4140863 - RNA, 67 nt, Human
gaauuucaggacaacuggaaggacagaaguggaaauaucacaauggauuucaguuaucuugaccuuc

SEQ ID NO: 4140864 - RNA, 103 nt, Human
gaauuucauugguuugcuuucuccgagagucaauuuuauugguccaaauacauaguaaggcagcuguggcuaaugaaacaggagauggugccaaaaagcauuc

SEQ ID NO: 4140865 - RNA, 82 nt, Human
gaauuucucagcuggguuccuugaggggauucacuauaacugugcaucucuucauagugacacccaucuccucugggauguc

SEQ ID NO: 4140866 - RNA, 62 nt, Human
gaauuugagguguguauguuggggaaggagguauccuuucucuaucgacccaucgcgaauuc

SEQ ID NO: 4140867 - RNA, 72 nt, Human
gaauuugcuuggcaggcuuccagucuaugccaaugugagagcaagaucuuccagcccugccuaagcccuuuc

SEQ ID NO: 4140868 - RNA, 65 nt, Human
gaauuugucccuugauauaaaaagaauuuacuaccucacauaaguaaaauuaggggacucaauuc

SEQ ID NO: 4140869 - RNA, 85 nt, Human
gaauuuucuccuuacacuggggaagguguaggaaucauguaauugccgccuacuccggcauuugucaguaguggggagaagucuc

SEQ ID NO: 4140870 - RNA, 123 nt, Human
gaauuuugaaaucuaguuuucuuuaaagcaagacacacccauagcauuaguuucuccacuacaugugucaucuaagcuuugggugcucaguuuucuuucggggaauacuaggggaugagauuc

SEQ ID NO: 4140871 - RNA, 96 nt, Human
gaauuuuuggaguuuccaggcuuugguaugguuuugguguuuacuuacuuacuauuuuuuuaagccaugcuguuuugccugggauuuccuuaauuc

SEQ ID NO: 4140872 - RNA, 100 nt, Human
gacaaaaacaauaacuacagguugcaagauguuuaaaaagaugacucuuugguaaaugaauuaaaaaguuucuaaauaaaggccaugcauaccuuuuguc

SEQ ID NO: 4140873 - RNA, 64 nt, Human
gacaaaacaagucugacagcccgaagaucuucgucaugauuagaacgcucagaguugcuuuguc

SEQ ID NO: 4140874 - RNA, 57 nt, Human
gacaaagaaagacaaggggguguugagagucacaaacaugcccuguccucuucuguu

SEQ ID NO: 4140875 - RNA, 102 nt, Human
gacaaauaauuacccucuuuuuccugguagaaacuucuguuuacacggaaaauuuucucuaagauggauuucuuccagugagaauuugagcaauuuauuuuc

SEQ ID NO: 4140876 - RNA, 126 nt, Human
gacaaauagggaaauggugaaaguucuggucauggcuauaaaagaaguuuugguacuugggacauuagcaaccacgaauucuacuauuccuuuuaucucucuagauuucaauaaagcccauuuguc

SEQ ID NO: 4140877 - RNA, 129 nt, Human
gacaaaugacuagaauucuggagccugcaccuucauuuuaggcagcuauugcuucagaagucacagucuguuccaccagccuuugccaaggaugcaggugccacagcaucucaagagaagucaccaauc

SEQ ID NO: 4140878 - RNA, 97 nt, Human
gacaaauuauuuauuacaaauuauuaagcuacuuuuuuuauccuaggcauuaccugaaguacaugcuguaaugauuggugacaaaugguuuuuaguc

SEQ ID NO: 4140879 - RNA, 77 nt, Human
gacaaauugaagaacauaauagcuacuuguaguauauugacauaagugauucugauguguuucuuuaauaauauguc

SEQ ID NO: 4140880 - RNA, 116 nt, Human
gacaacagaacauugaccagaucuaugcagucauuugacaugcacacauggccuuacccuuucauguuuguagguaagugacacugcagaccuggugagacuguuucauguauguc

SEQ ID NO: 4140881 - RNA, 96 nt, Human
gacaacauuuuuauuugauauucccgauuuaagguaaaagcugcgugagauuaacacaaguuacagaauuagauuauuagagauagaauguacauc

SEQ ID NO: 4140882 - RNA, 80 nt, Human
gacaaccacaguguuuugcauuucuuuaucagugaaaaacaaacugauaucugaaguguauaaacaguucccuaguaguc

SEQ ID NO: 4140883 - RNA, 61 nt, Human
gacaaccucaggacucagcuugugggggcccuccucugcaaagcuuuuccugagaguuguc

SEQ ID NO: 4140884 - RNA, 126 nt, Human
gacaacgaagaaggguagaaaaaacccagauuauagcuuaaggccagugagugugggggcaaacagcucugcauggcuucaaagccuuuggcaccuugauugugugguucuaucuguaggguuguc

SEQ ID NO: 4140885 - RNA, 88 nt, Human
gacaacuucauuuccggugagcugcgggcgaggacuggggugcggcuccuuagccagggcagcucaaaauccaggagugcccaagguc

SEQ ID NO: 4140886 - RNA, 119 nt, Human
gacaacuugucauguguaaucagcaucacauuagucucaagagaauaagcucuccuuuaaucagcugcuuuucuuuaaucugguggggugaggcauaugguaaccaugacauuuuuguc

SEQ ID NO: 4140887 - RNA, 71 nt, Human
gaagcagaagaccuggguucgaguccuaacuggguuaucuguuagcugugugaccuuggucaaguugcuuc

SEQ ID NO: 4140888 - RNA, 105 nt, Human
gaagcagcgugauagagccaguggaacagagccguggggaugaaacugaguuuugugcccauguuucucuguaucccuacugaaaauuuaacacucagccguuuc

SEQ ID NO: 4140889 - RNA, 77 nt, Human
gaagcagucuuggagaacugggccuuaagccccugcauucuuucgggcuugacucuugcuucccauggaucagcuuc

SEQ ID NO: 4140890 - RNA, 56 nt, Human
gaagcauaggauacucaaaguuuggcaaaagcucaggaauugagauccuagguuuu

SEQ ID NO: 4140891 - RNA, 92 nt, Human
gaagcauuggcuacuuuuaaauguagauauagaaaaagacugacccacucaggauuggguuauauguuucuguuuggaggcaucccugcuuc

SEQ ID NO: 4140892 - RNA, 59 nt, Human
gaagccaaguccucgaguuucagguagacuucaguugauuucugcgaggucuuugcuuu

SEQ ID NO: 4140893 - RNA, 110 nt, Human
gaagccaauuugcaucucuugcucauuaaguagcucacaguggcuggaaauuugacagccuuaauguuugaacuucuugaacagcagguuuagaacugccagugauuuuc

SEQ ID NO: 4140894 - RNA, 55 nt, Human
gaagccagacucagcuuuggagacucggggaagaauuuccaaagcugcugguuuu

SEQ ID NO: 4140895 - RNA, 92 nt, Human
gaagccaggaacuuucuguuacaagugaaaaaaugguuuguuucauaauuugaucacuguuaacacccugggggcuccucagaauugguuuc

SEQ ID NO: 4140896 - RNA, 58 nt, Human
gaagccaggggccugacaggcaccuaugcccuggaagccugauucaccucuggacuuu

SEQ ID NO: 4140897 - RNA, 73 nt, Human
gaagccauuuauucucugucuuuuugaaaacaggcagaaacaugccuuggaagacauuaaagagagugacuuc

SEQ ID NO: 4140898 - RNA, 55 nt, Human
gaagcccuguaggugcaaagguaaacagucuaggccccagccuacgggaaguuuc

SEQ ID NO: 4140899 - RNA, 72 nt, Human
gaagccuacuagauauuuaauguaaucaccaugauaauggcuaagauuuauuaagcaucugcuaugugcuuu

SEQ ID NO: 4140900 - RNA, 56 nt, Human
gaagccugcuggaucaagcuuaugcuguuuucagugaaagugaauccagaggcuuu

SEQ ID NO: 4140901 - RNA, 66 nt, Human
gaagccugguccagagcucccaucaagccucccauggggaugucacugggguucagggaaagcuuc

SEQ ID NO: 4140902 - RNA, 57 nt, Human
gaagccugguucgcuggccaccucccgcuggggcguuggcccaggcugccagguuuc

SEQ ID NO: 4140903 - RNA, 82 nt, Human
gaagccuuguuuucaugucugagucuuggccuuauaacauuucuuugggacuugaaagaagacauggcaggaauacagcuuc

SEQ ID NO: 4140904 - RNA, 61 nt, Human
gaagcgcaggcaggacaagggguguagaagaugcagucagcuuugguuuccuccugccuuc

SEQ ID NO: 4140905 - RNA, 58 nt, Human
gaagcggguucacuggauggcuuugaggaauuaucuguacuguccacacacucgcuuc

SEQ ID NO: 4140906 - RNA, 79 nt, Human
gaagcuaacagagcuauuggauugucggauaucauuggaccaaaccaccucaauguauuguccaugugucuguuagcuc

SEQ ID NO: 4140907 - RNA, 79 nt, Human
gaagcuaaugaagucagggauuccaugaagccauccaagcauauagagcucauuucccugggucccuuuuccuuagcuc

SEQ ID NO: 4140908 - RNA, 86 nt, Human
gaagcuaauggguuuugcuuuuguaacacagugugcacuaaggaguuugugcauucuuuguggcugaagcagguuacuuagucuuc

SEQ ID NO: 4140909 - RNA, 78 nt, Human
gaagcuagaaaugaaaccccguucccuaaaugaaaaacuucuucucaaauggcaaaugugggucccauacuuggcguc

SEQ ID NO: 4140910 - RNA, 80 nt, Human
gaagcucaacucagacuucuacuuugcagagcgagaaucccaggacacguucuauaguggagucuacccuguuuagcuuc

SEQ ID NO: 4140911 - RNA, 88 nt, Human
gaagcucaggcuagaagugguaauggaguaaggaccugaagaauuagaugacaaauuuuucauauuccccucucuggaccagggcuuu

SEQ ID NO: 4140912 - RNA, 61 nt, Human
gaagcugaagcuacacacuuaaacagguuuaauacuucucaccaguaguggguuuagcuuc

SEQ ID NO: 4140913 - RNA, 57 nt, Human
gaagcugacggcccggcagcgccgccuuccaucugguccacccgagccugcagcuuc

SEQ ID NO: 4140914 - RNA, 98 nt, Human
gaagcugacuuugguuuucaaauucugucaccagcaccugaaaaaguauuuugacaguugcaauggugaucucgauccugagauuguaaagucauuuc

SEQ ID NO: 4140915 - RNA, 58 nt, Human
gaagcuggggugcugagggcaaaguuaguuuggcccauauggaguacaccugagcuuc

SEQ ID NO: 4140916 - RNA, 77 nt, Human
gaagcuuaauaucuucuuaucugaaaguaauauuuuguaguuuuaauagaauuuaugaggaagggaguuugaguuuc

SEQ ID NO: 4140917 - RNA, 84 nt, Human
gaagcuuacuuggaagacucaacauuauucauaaaacuauuaguauugagaagaauguguugaguuucaaacucuaaguuuauc

SEQ ID NO: 4140918 - RNA, 81 nt, Human
gaagcuugggcugggcuuucagugcaguguagggugcuucccucugucccuguggcacucaagaagccuccagucagcuuc

SEQ ID NO: 4140919 - RNA, 77 nt, Human
gaaggaaauaaugaucaacagcaucuugcccugcagagaucaugaggcaugggacaggaaaggggucuguuuucuuc

SEQ ID NO: 4140920 - RNA, 64 nt, Human
gaaggaaggaaaaauauauuuacuccaaaauucauuuacugggaguuuuaagugcccuuucuuc

SEQ ID NO: 4140921 - RNA, 65 nt, Human
gaaggaagugcucauacuaguuaaucugaguuguucucugccugaaacuguaaggcauuuuuuuc

SEQ ID NO: 4140922 - RNA, 95 nt, Human
gaaggaauacucacggcaguggugauaaccucuaucauagcuaccauuaaauuacuuguugugacugguugucccgcuuuccucagguuuucuuc

SEQ ID NO: 4140923 - RNA, 82 nt, Human
gaaggacuugauuggaagaaggcagagaggcauuuaaggaaggcauuuagauacccugacuucuccaggucuuaacuccuuc

SEQ ID NO: 4140924 - RNA, 63 nt, Human
gaaggaggcugcugccaucauuaggugucugccacgccuaugagucaguggagccugcacuuc

SEQ ID NO: 4140925 - RNA, 70 nt, Human
gaaggagggcuucaguuccuuaucauaggguugcuugaguguccuugcgacaugggagcuggcuuccuuu

SEQ ID NO: 4140926 - RNA, 57 nt, Human
gaaguugaaucaguaacacaguuuucaggaaucucuuguugaccugauuuacacuuc

SEQ ID NO: 4140927 - RNA, 69 nt, Human
gaaguugucuuugccuucuccuguacccuuaaccuuucuucuagagguagaagagcaaggaauaaccuc

SEQ ID NO: 4140928 - RNA, 76 nt, Human
gaaguuguggaguacaguauuaagauuagugacaacacaugaagugaauugacugauuaugcguacucucuacuuu

SEQ ID NO: 4140929 - RNA, 67 nt, Human
gaaguuucacguaugcucuagagcucuuuucacuguuucuaguguuuguucucagagcaugagcuuc

SEQ ID NO: 4140930 - RNA, 95 nt, Human
gaaguuucauagcuuuaaugagauucuugcuguggucuuugaucuguagaucaaaggcaaaauucuuagcaggauccagaggcucaagaaacuuu

SEQ ID NO: 4140931 - RNA, 125 nt, Human
gaaguuucccuuggggaauggggcucuaacggugggauuccuggcauguggcagguccacggagaagcuacagcagugcacagagaacccuguuccaguccuggcucucaacaaauggaaacuuc

SEQ ID NO: 4140932 - RNA, 81 nt, Human
gaaguuugaguuugaggugacugcaggauauaucuaagugaaaauauucuauaagcaguuggaaguucaaauccaaauuuc

SEQ ID NO: 4140933 - RNA, 73 nt, Human
gaauaaagacucaugugcuaaacucaacaaaucugguguccuaucuaggauuuugagucuggcaugaauauuc

SEQ ID NO: 4140934 - RNA, 61 nt, Human
gaauaagugaaguuggcagcuuccucaugaauagagugacuuuguuaagcaucacuuuuuc

SEQ ID NO: 4140935 - RNA, 83 nt, Human
gaauaauaaaacugaauguguugcauagaacuauuauuuagcaauugaguuuuauaaaggcaccucagucuagauuguuauuc

SEQ ID NO: 4140936 - RNA, 80 nt, Human
gaauaauauuuauauguuuauuuguaauauguguauauauguauauguauuugcguauggacauacaugguaaauuauuu

SEQ ID NO: 4140937 - RNA, 60 nt, Human
gaauaauuacccaucuuuuuguaugcuuuggaagaguuuacauaagaugguaauuuguuu

SEQ ID NO: 4140938 - RNA, 81 nt, Human
gaauaauucuuuaucuagguauaggauucuagguuggaaaucauauucccuuagaauuuuguaguuauugaucuauuguuu

SEQ ID NO: 4140939 - RNA, 84 nt, Human
gaauaauugccauuuauacugcaagucacugccucuuuacaaugcagugaccaaaaaaaggcagguagacucugguacuuauuc

SEQ ID NO: 4140940 - RNA, 77 nt, Human
gaauaauugugaugcuugaaguugcuaaucugcuuuaaguggauuuuaaaugucaggcaauucuagacaguuuuuuc

SEQ ID NO: 4140941 - RNA, 79 nt, Human
gaauacaauugaggagcagagaugggguauacagcaagcacucuguguauuaagugauuguuguuccucgucugucuuu

SEQ ID NO: 4140942 - RNA, 56 nt, Human
gaauacauccagagcagggcuguccaauagaagugcccaugaugauggagguguuu

SEQ ID NO: 4140943 - RNA, 55 nt, Human
gaauacauuugccgugguucuccuggagagccaacacauguaaaugcaccuauuc

SEQ ID NO: 4140944 - RNA, 72 nt, Human
gaauacugagaucccacaaagcaaaaugccauccuacaucuugaagcuaugcuuagugggauucagugauuc

SEQ ID NO: 4140945 - RNA, 73 nt, Human
gaauacuguuguuuaacugauuagagauauuuuuaaaccugagauaaugucuuucuaguuaagagcuauauuc

SEQ ID NO: 4140946 - RNA, 59 nt, Human
gaauagauauccuugagggucuguuugagcucucagaucccaaggaaaacugucucuuc

SEQ ID NO: 4140947 - RNA, 64 nt, Human
gaauagcauaguuugggugaaauuaucaggcaauugcaugccuuuuaugcagauaaugcuauuu

SEQ ID NO: 4140948 - RNA, 85 nt, Human
cuugcaugauacuugaauuuggaagguuccugguagacguagaaacggcccagacugccuguucagagcuaagcaucaugguaag

SEQ ID NO: 4140949 - RNA, 75 nt, Human
cuugcauuauacuacugucucaucaguguuauuuggaaaccagggaauagcagaagacuaguagacaaaagcaag

SEQ ID NO: 4140950 - RNA, 91 nt, Human
cuugccaagcauauaaagaacaacuuucuuggaucuucucuaagauugcuggagaaagaaagggaaguuuguuuuuagucaguaauguaag

SEQ ID NO: 4140951 - RNA, 74 nt, Human
cuugcccaaguugcuucaccacucugacccugggauccucuuuccucauagggugguuagaaggaguaugcgag

SEQ ID NO: 4140952 - RNA, 59 nt, Human
cuugcccccuuccugcacgcuggcacacaccauggugucugugauguugccgggguagg

SEQ ID NO: 4140953 - RNA, 129 nt, Human
cuugccucaccucaccuuccccucucuucucaacccucuucaggauggcuugugaugccaacauucucccuuaaauuacucuugcuuggcucacgagucaccuugaggacaguagguucaaugggcaag

SEQ ID NO: 4140954 - RNA, 62 nt, Human
cuugccuggaccauaugguggccugaguugacuuguaggcagacucaauggcuagauacaag

SEQ ID NO: 4140955 - RNA, 74 nt, Human
cuugccugggauucccagaggggcaggggcuuccuaaagaccugugucuggugcucugugaugucccagccaag

SEQ ID NO: 4140956 - RNA, 56 nt, Human
cuugccuucucugggguggcaguggaaaccgauacuguuuuccaccuugaggcaag

SEQ ID NO: 4140957 - RNA, 78 nt, Human
cuugcgauaguucuuaagccauguugcuggaaccuuccuuucuucccuaagcaacagcccugagguucaugucgugag

SEQ ID NO: 4140958 - RNA, 55 nt, Human
cuugcgggccucagccgugccgcuccacacgaagcacugguagauggcccgcagg

SEQ ID NO: 4140959 - RNA, 109 nt, Human
cuugcgggcuggggcugcgguaggcgccugcgggauccuugcccuccgaguuuggugggccuacgccaguauccccaggcgccgggggcagcggcuccagagccccgag

SEQ ID NO: 4140960 - RNA, 92 nt, Human
cuugcuaaugucugaagcuaacugaacugggccagaucagagcaacuguagucacacagggcucuguccccagaggccccggauauggugag

SEQ ID NO: 4140961 - RNA, 84 nt, Human
cuugcuacagagaauugugugauuuuuagaucuauuaauuugaaauggaaagucaugcaguugaacuuuugaaaugcuagcaag

SEQ ID NO: 4140962 - RNA, 57 nt, Human
cuugcuagguauaugcaggucuauguuucuguaggucuucagcaaauacuuggcagg

SEQ ID NO: 4140963 - RNA, 91 nt, Human
cuugcuccucugcucccacagcuucgugcuuccccugccuggucauccuuuaacuugccacuggggaggcugaugugggcaaaggagugag

SEQ ID NO: 4140964 - RNA, 130 nt, Human
cuugcugcucguaauggaucaacaaguguagucuaccagcuucuucagcacaauauugaugucuuuugccaagauauaucuggauggacugcagaagacuacgcuguugcuucuaaguuucaagcguaag

SEQ ID NO: 4140965 - RNA, 55 nt, Human
cuugcugucccuugguaugaacuagccuguaugguuugccucuggggcaugcagg

SEQ ID NO: 4140966 - RNA, 105 nt, Human
cuugcuuaccgaccucugcccucugccguguguccuccaccuuggccaugcacagcgggggcuaggcgggcacaugguggaggcugccaauggugcccuggcaag

SEQ ID NO: 4140967 - RNA, 109 nt, Human
cuugcuucaaugucugugacaagaguagaauagcgagcagcaagaggccucaaauuuucaaugccucgucaaagucuggcuguuccugccugugauaauauggaaaugg

SEQ ID NO: 4140968 - RNA, 90 nt, Human
cuugcuugcuuuuuguuucucucaaaguuucucaugguauguuuuuacccagaccacauagacugugagggagauacagggggaaggaag

SEQ ID NO: 4140969 - RNA, 59 nt, Human
cuugcuuucagucucggccucacucagcuccucuguugggcccugggauucagagcaag

SEQ ID NO: 4140970 - RNA, 64 nt, Human
cuugcuuuugugugcucucuggagcucacccaugcaugauguuccaguggacuucaaaggcaag

SEQ ID NO: 4140971 - RNA, 79 nt, Human
cuuggaaacuuuggcuuuucugcugauucuggugggaagccccacucugcuaucuuagcaaaaggccaagagagccagg

SEQ ID NO: 4140972 - RNA, 63 nt, Human
cuuggaagcagagagcuaucaccagacaccaagccuguuggugccuuaauuucuacuuccaag

SEQ ID NO: 4140973 - RNA, 65 nt, Human
cuuggaagcugggucgcugggauccuccugcucacuguuuaaggaggggacagaguagcuccagg

SEQ ID NO: 4140974 - RNA, 60 nt, Human
cuuggaaggcccugccuagcaggcccugagcccacuugcaggguuugagggccucccgag

SEQ ID NO: 4140975 - RNA, 64 nt, Human
cuuggagaccagugacauugcucacccuucccacugagcagccugcagauauuggucucucugg

SEQ ID NO: 4140976 - RNA, 76 nt, Human
cuuggagauucauugccugaaacucuaauuuuacacauaaacaucuagagguucaaagggcaacugauuuuccugg

SEQ ID NO: 4140977 - RNA, 57 nt, Human
cuuggagccaugcccagcucucugcaccuggagauugcagguggaaauagcaccaag

SEQ ID NO: 4140978 - RNA, 62 nt, Human
cuuggagccuggcuauggccucccccaugcuaugcggggagggaggcugccaggaggacaag

SEQ ID NO: 4140979 - RNA, 58 nt, Human
cuuggagcgggccuugagugcccggcggcgugcgcugcgggcugucaggcgugccagg

SEQ ID NO: 4140980 - RNA, 60 nt, Human
cuuggagggcuguaguggcugagccgggaggggcuccugccagcaucuucagccccugag

SEQ ID NO: 4140981 - RNA, 63 nt, Human
cuuggaguuguuuaugucccugucugucuucuuuaccaggggguggauuccuacagguccaag

SEQ ID NO: 4140982 - RNA, 76 nt, Human
cuuggcaagaauaaugucccuggcuagaugugggcagaaacacauuacagcaaguuuacguuaaagagugacuagg

SEQ ID NO: 4140983 - RNA, 79 nt, Human
cuuggcaaggccacuguccuuuacugguagauguuggucacucagaccugugacccuuugccuagaggggcuuugagag

SEQ ID NO: 4140984 - RNA, 71 nt, Human
cuuggcacacaggagguacucgaugcauauuuagugaauaaaugaacaucaaaugccuaccaugugcuagg

SEQ ID NO: 4140985 - RNA, 100 nt, Human
cuuggcacuccaggaggucacuuucaauuggucaggacuggcauguggaaugaagcccacuuuccauaccuguaucagaugagccuuucuagagucuaag

SEQ ID NO: 4140986 - RNA, 80 nt, Human
cuuggcaggcagguuucuggaaagguuuugcuuucaaaaucauauauaaguagcugggccaggcaaccugaccuguugag

SEQ ID NO: 4140987 - RNA, 78 nt, Human
cuuggcaggcaucucuguagccaggguccugaugccacaacaccaugcuaguccccugggcauagagccuacaccaag

SEQ ID NO: 4140988 - RNA, 59 nt, Human
cuuggcaucucuuggucaaaucaauucccagggcuuuuauaggaccaggagaaaccagg

SEQ ID NO: 4140989 - RNA, 65 nt, Human
cuuggcauguguguguaggauacaggcaauuguaaaucuguaucaaaaaucaagcacagcaggag

SEQ ID NO: 4140990 - RNA, 130 nt, Human
cuuggccaaguugcuugaacucucuguggcucaguauccucaccuauacaauggaggugauaauaguacucaucucucaugguuauuguggggauuagcugaaauagugaguggcaagcucuugcacagg

SEQ ID NO: 4140991 - RNA, 75 nt, Human
cuuggccaccagccaugcacaaaccaugagaguagaagagaugucuuauggcaauucaggcuuaaagugguuagg

SEQ ID NO: 4140992 - RNA, 62 nt, Human
cuuggccagcugagauuuagcacacaggagaggaggucuguguggggaugagguugggcagg

SEQ ID NO: 4140993 - RNA, 73 nt, Human
cuuggccuauuccagcagcuguggacuccuaacaguuuuccccacucacuuacagcugcagaaucaggcuaag

SEQ ID NO: 4140994 - RNA, 76 nt, Human
cuuggccuccuuuuguagggccauuucccaggcagcuucuuguuaaagccaagaaaugccccucacagaacccaag

SEQ ID NO: 4140995 - RNA, 67 nt, Human
cuuggccugacauguggcaggguuagaacacaccuccuauccccugccagcccgcguucaugccaag

SEQ ID NO: 4140996 - RNA, 91 nt, Human
cuuggcuccuugcccugugccuucucagccucgaggcagacagucugugucagagguagagauggcaccuacagaagguaccagagcugag

SEQ ID NO: 4140997 - RNA, 81 nt, Human
cuuggcucucuauaacguuaggcacaacagcaccuugaaauaauaggggccagggugcagagcuuaacuguagguagcaag

SEQ ID NO: 4140998 - RNA, 72 nt, Human
cuuggcugaccagaaccugccccaguuuugacacacuccucugugcacagggugaggcucuggguagccaag

SEQ ID NO: 4140999 - RNA, 91 nt, Human
cuuggcugaggauaaucgcaggaucacaaauugccuuguuagagcaucagggcucuaaaaggcacuuggaugcugaguccauuagccauag

SEQ ID NO: 4141000 - RNA, 63 nt, Human
cuuauacaguaaugugucccugcagguagaacaaugccugucacauauuugcuguucagugag

SEQ ID NO: 4141001 - RNA, 64 nt, Human
cuuauagaaucuccagcauugguugucguaucuguaaaagacaggcagccguggagacuaggag

SEQ ID NO: 4141002 - RNA, 80 nt, Human
cuuauaggagacaucuaacuguagguuuuaugugaaucaaaaauugaaguugcuaaugugcagggaugucucucuauagg

SEQ ID NO: 4141003 - RNA, 91 nt, Human
cuuauagugaagauuaauuaagaaaaugaauguauagugcgccaggcauggcaaauuguagcaauuucucuuaauugccuuuuuauauagg

SEQ ID NO: 4141004 - RNA, 62 nt, Human
cuuauaugcauagguaucuauacucaaagcaaauugcagcaugugauacacugugcagggag

SEQ ID NO: 4141005 - RNA, 74 nt, Human
cuuauccuucaucuuuuaggagaggguccaaaauucucuuuaggaaucuauucccuuucuguaaaaaggaucag

SEQ ID NO: 4141006 - RNA, 62 nt, Human
cuuaucugagaaagaugcuacaugacuacaaagagguuauuuaguuucuuaguucagauaag

SEQ ID NO: 4141007 - RNA, 60 nt, Human
cuuaucuuacuuccauugugaugacccacccucaccaucgccugggaagagaaagguaag

SEQ ID NO: 4141008 - RNA, 60 nt, Human
cuuaucuuacuuccguugugaugacccacccucaccaucgccugggaagagaaagguaag

SEQ ID NO: 4141009 - RNA, 100 nt, Human
cuuaugacaaaguuuaaucaucuugcuuauaacucagggcuuagaggauauaacaaauuucagaguguuuagugaugaaagagaagauauacuacauaag

SEQ ID NO: 4141010 - RNA, 77 nt, Human
cuuauggcucuggcaggucaaucauucuuugugugaucaucacugaaaaaagaaucugauuugucuggaagcauaag

SEQ ID NO: 4141011 - RNA, 83 nt, Human
gacaagaaauguaugguaagauggcauacggaguauuaauuuguucaaaaugcuaacugaugugaacuuaccauuuuccuguu

SEQ ID NO: 4141012 - RNA, 58 nt, Human
gacaagagaauuccuaugccgcuguaauggccuacauaggaaaagcauucuucuuguu

SEQ ID NO: 4141013 - RNA, 79 nt, Human
gacaagcagugggucuggucuagguggccaggucagauuuaggugagguggcuucagagacagaaucuaucuguuuguu

SEQ ID NO: 4141014 - RNA, 59 nt, Human
gacaaggagccaccagucacgucccgcuuaaaggacgaacaaccaggaagcuucuuguc

SEQ ID NO: 4141015 - RNA, 79 nt, Human
gacaagugaaaagaguguuucaacuuuggcugauuuauucagccagcuguucagacauucuuuuuaagugaugcuuguc

SEQ ID NO: 4141016 - RNA, 72 nt, Human
gacaaguguuuaugguuauuguuaaaccuugagauuuuaccuaaugguucagcuaauaauagacacuauuuc

SEQ ID NO: 4141017 - RNA, 81 nt, Human
gacaaguuguuaauaugcaaaacggaugcgugauauuucuugcuucucaugaugcauguuucuguauguuaaugacuuguu

SEQ ID NO: 4141018 - RNA, 69 nt, Human
gacaauaagaacagauacuguguuuucuugagaucaaauugagaucaacuguauuuuuucuucuuuguc

SEQ ID NO: 4141019 - RNA, 99 nt, Human
gacaauagauuugcauguucuagcaggcaaaagcucggcauuugcauugaaauccagcucaccguuugccuucugggcauuaugcuaaauuauaguguu

SEQ ID NO: 4141020 - RNA, 68 nt, Human
gacaaugguacuagauaucuucagaguucacacuacacuuuuaccuugaaaaauauagucccauuguc

SEQ ID NO: 4141021 - RNA, 67 nt, Human
gacaauugcuuuugccgaauaacugcuucugacccagaaguccuugccuauuugcagcagaguuguu

SEQ ID NO: 4141022 - RNA, 72 nt, Human
gacacacaaagcucuucauuuucaauuuuguaaaguaagaauuacacagaggaaagugugaagggaaguguc

SEQ ID NO: 4141023 - RNA, 64 nt, Human
gacacagagacuugcaguuguagagcuagaaauccuuacagauuauauaaccaggucuccuguc

SEQ ID NO: 4141024 - RNA, 56 nt, Human
gacacagucauacuggcauagggcccacucugagggccuuguuuuaagacucuguc

SEQ ID NO: 4141025 - RNA, 60 nt, Human
gacacaguguaauucauggcugaaaaacagauuuguuuuucuguuauuauuaccuguauc

SEQ ID NO: 4141026 - RNA, 78 nt, Human
gacacaguucucgcgcccccaagcgucauugggcucucccugguuccaguggcuacagggggguugaguggggguguu

SEQ ID NO: 4141027 - RNA, 65 nt, Human
gacacauaucaaaaccagaccgaacuuuccgccccuccuggcagaaacaucucugcuuuuguguc

SEQ ID NO: 4141028 - RNA, 62 nt, Human
gacacauggagcucaaacaugagugccacccaccccugggcagcaccaagauggcucuaguc

SEQ ID NO: 4141029 - RNA, 96 nt, Human
gacacauugacggguucuacuuuuuuucaacuuccuuuuguucuacuuaagaacaaauucucuaggcaaggaagaauagaaauugucacuuggauc

SEQ ID NO: 4141030 - RNA, 79 nt, Human
gacaccaccuugucagccuugcuuuagcgguuacauguaaacuagcuuagacaggacugauguaauucaggguggaguc

SEQ ID NO: 4141031 - RNA, 57 nt, Human
gacaccaggaaggaagagcuuccaccuuaucugguggcucugucccugcuguguguc

SEQ ID NO: 4141032 - RNA, 59 nt, Human
gacaccaggaauaguucugucuuuuuaaccuucuccagagauaagauuauuccugguuc

SEQ ID NO: 4141033 - RNA, 123 nt, Human
gacaccuuguaccacccuagcaccagcuugagccacccauucccgagcccuaugaaccacaacauggaagggaacagguggguguuugagaggcugugcuggcauccaagggugcaagguguc

SEQ ID NO: 4141034 - RNA, 88 nt, Human
gacacgagagguaugcuacaguagaguaggccucugaccaaacucuuugucacauccuuacuuuauaugugguucuauuucaaguguc

SEQ ID NO: 4141035 - RNA, 58 nt, Human
gacacgcaggacccugggccagugaccuaaccccucugcaccucggagccuccguguc

SEQ ID NO: 4141036 - RNA, 84 nt, Human
gacacgccgcgcgagcaggagcucggauaggucgcuuuggccggccuggccgcuccgagcuccgccccucuucgguggcgcguc

SEQ ID NO: 4141037 - RNA, 129 nt, Human
gacacgggauuucaccauguuggucaggcuggucucgaacucccgaccucaggggaucugccugccuaggccuccugaagugcugggauuacaagugugaaccaccgugcccagcugguuuucuguuuc

SEQ ID NO: 4141038 - RNA, 78 nt, Human
gacacggucaaggcuauaauguugcuggaaacaugacuaaacccuuacuucugagcaugaauuauuuuuacccguguc

SEQ ID NO: 4141039 - RNA, 75 nt, Human
gacacucagagauauggugguugaugacaagacacugcuucacagauguaucaaaccaccuuaucucuugugauc

SEQ ID NO: 4141040 - RNA, 70 nt, Human
gacacucaguaaaugagaagcuaguaauagucaucacuguucuuuaaccuagucucauuugccacuuguc

SEQ ID NO: 4141041 - RNA, 71 nt, Human
gacacuccugcaagcccuugauggugagagcugcagagcuguuucuucagcugccaucaaggcaggaccuc

SEQ ID NO: 4141042 - RNA, 63 nt, Human
gacacucuguauaaucucuccucuacucaagugugggugggacugagaauaugaugggguguc

SEQ ID NO: 4141043 - RNA, 110 nt, Human
gacacugauucucugugaagcagggcagugcuucagcucucaugcaguggggggugugacugcuuagacuggccaagacacugauucccuggaaagcagggcaccaaguc

SEQ ID NO: 4141044 - RNA, 59 nt, Human
gacacuggggacucuggccuuuugacaggacaugugucaaaaugccgagugcccagguc

SEQ ID NO: 4141045 - RNA, 70 nt, Human
gacacuugagucugggcuccgaguggugcacguuuagccaagccaccucccagcucugagcuuggguuuc

SEQ ID NO: 4141046 - RNA, 62 nt, Human
gacacuuuaucucaucucagacagggcucuauggaggaaugggcuggaaaagaaugaagguc

SEQ ID NO: 4141047 - RNA, 58 nt, Human
gacacuuucugaggagacgggcuuugugaggagaccgcgaaguuugggcagagggguc

SEQ ID NO: 4141048 - RNA, 57 nt, Human
gacacuuuugacccuuaccuggacaucgcccuggauauccaggcagcucagaguguc

SEQ ID NO: 4141049 - RNA, 58 nt, Human
gacacuuuuuuaaagcucauuaagauuguuaaacauugauggguuuguuggagagguc

SEQ ID NO: 4141050 - RNA, 88 nt, Human
gacagaaaauuuuauauaauuaaaugcugauuuaccuguaaaaagugacaugggugugcucagauaauuaaucaugaaauuauuuguc

SEQ ID NO: 4141051 - RNA, 80 nt, Human
gacagaaagcagccagaaccuaggaugagcuggaagagguuguccccacacagcucaggcuucugcuccuucuuugacuc

SEQ ID NO: 4141052 - RNA, 70 nt, Human
gacagaaggcauagaugaaggccuuagucuaggagaauggauaguuaggcugaacauuuauccugcuguu

SEQ ID NO: 4141053 - RNA, 74 nt, Human
gacagauaaaguaggcauuugauaaauugaaacagguuuugaauuauuuugagagaaugugugcuacaucuguc

SEQ ID NO: 4141054 - RNA, 96 nt, Human
gacagcauaaaguuuugggagaaugaauuauaugcuuuauaaacuaagacaugcuaauuacugguucaaucuuccaauuuaaguuuuucugcuguu

SEQ ID NO: 4141055 - RNA, 68 nt, Human
gacagccaacuucucccacccacucccuaucuaauaaaggaagggaugauggaaagaagcaggccuuc

SEQ ID NO: 4141056 - RNA, 78 nt, Human
gacagcccagcccauggccuuccuggcggcucaggguuaggaaaagcugugccuucagggaggcagggaguggggguc

SEQ ID NO: 4141057 - RNA, 80 nt, Human
gacagccccuugucuugguuuccacuugcugaagaaaggaguccuguuguccuugugagaguggagagagcacgguuguc

SEQ ID NO: 4141058 - RNA, 68 nt, Human
gacagcuggguguguaucagauaaaguuaguacacaauuugguuuuaucugccuuuuauucagcuguc

SEQ ID NO: 4141059 - RNA, 59 nt, Human
gacagcuuggaaaguguguguguguguguguguaucaacacauauaugucgaaguccuc

SEQ ID NO: 4141060 - RNA, 67 nt, Human
gacaggaauaggagggcuagcuuguauagaccccugaucugugcuggcauaccaccuaguucauguc

SEQ ID NO: 4141061 - RNA, 56 nt, Human
gacaggcccgaguagcugaugaaauucuacgugggaaaagcuuuugagugccuguc

SEQ ID NO: 4141062 - RNA, 90 nt, Human
gacaggcugcuuugggagcuuuuccuuucccagaacuuuguaguagcccgauugcaccacaucaaugaggggagcagccccaggcuuguu

SEQ ID NO: 4141063 - RNA, 62 nt, Human
gacaggcuuucucaggaugagcuauaaaaagaagcaccuguagauagaagccaacauauguc

SEQ ID NO: 4141064 - RNA, 117 nt, Human
gacagggauuaugcaacaggugagacuucauggccagauugacauguagguaaaguuguuaccacauaugagguguuauucuauggggccugacuuaccuuaacuugcuuccccguc

SEQ ID NO: 4141065 - RNA, 56 nt, Human
gacagggcgcccagccuguuucuggugcugccagccugccauguucccgcccuguc

SEQ ID NO: 4141066 - RNA, 55 nt, Human
gacaggucacugagggagggugacugaggucccaaaacuuucuccaggaccuguu

SEQ ID NO: 4141067 - RNA, 57 nt, Human
gacaggugucucagcugcuggcagggcagaggcacugcugugguuguggcacagguc

SEQ ID NO: 4141068 - RNA, 57 nt, Human
gacagguguguguauauuagggcaaauguguguacccuaggaaacuuugcaccuguc

SEQ ID NO: 4141069 - RNA, 74 nt, Human
gacaguaagagaagagucuugucaaauuagccuugacaauuaagcaagccuuaauuugacaaggcuuuccuguc

SEQ ID NO: 4141070 - RNA, 79 nt, Human
gacaguacuuuuucgguguuaacauucugaugucuauuauuaaacuacaccagaguuugaauuuugaaaagauacuguu

SEQ ID NO: 4141071 - RNA, 57 nt, Human
gacaguaguaaagcuaggaccagaacucaggcuguuuuauaccugcaagcugcuguc

SEQ ID NO: 4141072 - RNA, 89 nt, Human
gacagucacgggacagucuuuagaguauuguccucuuggaguuccugagcaggacaucaagcugaggccugucaagcccugggccuguu

SEQ ID NO: 4141073 - RNA, 57 nt, Human
gacagugaguaccucaaaggccuuaaacaugucgaaggucucaaguaucucacaguc

SEQ ID NO: 4141074 - RNA, 60 nt, Human
gacagugcagaaagcucuaccagcuucuguugguggcagcgucuaucugacaucacuguc

SEQ ID NO: 4141075 - RNA, 63 nt, Human
gacagugcucuaggugauuccaaaaugcagacaaaguaagacccacugguuagagccacuguu

SEQ ID NO: 4141076 - RNA, 75 nt, Human
cuugaaggccaguuuugagauagguaguacagagagagaaaucucauggcuuauuucuaggcacuggcuucggag

SEQ ID NO: 4141077 - RNA, 64 nt, Human
cuugaaguucuggcucagagaggaaauggcaggcugccacuuccuuccacuucaggauuuugag

SEQ ID NO: 4141078 - RNA, 58 nt, Human
cuugaauugggggaagaucacucuucaugcccauuugaggauguuuacugagaucaag

SEQ ID NO: 4141079 - RNA, 77 nt, Human
cuugacagagaaucuggguggcacaugucuguguccacuacaucagcagugucuaccucggugaaucucuguaguag

SEQ ID NO: 4141080 - RNA, 83 nt, Human
cuugaccccaggauuuuuggaaccaguaauuaauuaaauuaacuaaucaauuaacuaauuugguacaagagucuggaacagag

SEQ ID NO: 4141081 - RNA, 55 nt, Human
cuugacugacuucugaauugguuuguaaauuggaagaauuagggagucgguuaag

SEQ ID NO: 4141082 - RNA, 67 nt, Human
cuugacuggacacaggaaucaccuuggaugcuugucaacaaugcguauuccuguauuccagucuuag

SEQ ID NO: 4141083 - RNA, 55 nt, Human
cuugagcagcucuuugaggauggugauguuuaucuccuucuucuuggcagccaag

SEQ ID NO: 4141084 - RNA, 64 nt, Human
cuugagcauccacaaaguuugguguccuuggggauccuggagccaaucuccuguugaugccaag

SEQ ID NO: 4141085 - RNA, 71 nt, Human
cuugagcccaggagauggagguugcagugagccaagaucacaccacugcacuccagccugcuggauuuagg

SEQ ID NO: 4141086 - RNA, 79 nt, Human
cuugaggacguuaugcuaagugaaauaagccagacacaaaaaagcacugugugguucuacuuauaugaggucccuagag

SEQ ID NO: 4141087 - RNA, 61 nt, Human
cuugaggagcuucagaggaaucuuagcaaagccaaguucaguuccccaaagccuccuagag

SEQ ID NO: 4141088 - RNA, 96 nt, Human
cuugaguacagaagugaaaguggggagaguauuuuauucaagucacagcagaacuggaaaaaaacucuucuguuuuaccaacuucuuguguuucag

SEQ ID NO: 4141089 - RNA, 60 nt, Human
cuugagugaucaguaacucaaguggcagcaauuggccacuuagauacuagaucacaaagg

SEQ ID NO: 4141090 - RNA, 81 nt, Human
cuugaguguugucaucaccguuguuaucaucauugucaucauguauuuaguguggaaccuggugauguacaaguacucuag

SEQ ID NO: 4141091 - RNA, 58 nt, Human
cuugauacauucuguguucucagauccuccuggggucuguuuugcaacaugugacaag

SEQ ID NO: 4141092 - RNA, 91 nt, Human
cuugaucugauaggagaaaaugguaauauuucauaguuguuuuccaaagacaaauuuaaauguugucuguuaucuccuuacuuaguuuaag

SEQ ID NO: 4141093 - RNA, 76 nt, Human
cuugaugaugcagguugggcaagugugggguggcucugccuccuucuagcucugugaccuuuggcaaaucaucaag

SEQ ID NO: 4141094 - RNA, 58 nt, Human
cuugauggaaaacggaggagcuguaguaaagaaucuauuugcugccuucccagucaag

SEQ ID NO: 4141095 - RNA, 57 nt, Human
cuugaugugccuaagucugucuauaugcagcguagacuuuacuaaggcucauuuuag

SEQ ID NO: 4141096 - RNA, 58 nt, Human
cuugauuaccucuguaaagacccuauuccuaaauaaggucacauucugaggaaucagg

SEQ ID NO: 4141097 - RNA, 76 nt, Human
cuugauuucaguggugaugcuguccauguccagggagcggcuguuguccauggacagcaccacagauguguucgag

SEQ ID NO: 4141098 - RNA, 74 nt, Human
cuugauuuugggugcaaauuguuuguuuuuaggaguauagauuugauaggaaauaagggcacuucagauucaag

SEQ ID NO: 4141099 - RNA, 59 nt, Human
cuugcaguguggccuugaagagaugcuugaaucucucugaacuuaacguccgcagcaag

SEQ ID NO: 4141100 - RNA, 74 nt, Human
cuugcaugugugugccugugugugcguguuugugaaccaggacaagugaacacaggggcucggcugggugcagg

SEQ ID NO: 4141101 - RNA, 65 nt, Human
cuugcauuuguuugggcuaaucuuaaggugcacaguaacccuaaaguggcccagcaagugauuag

SEQ ID NO: 4141102 - RNA, 87 nt, Human
cuugcccaaauucugaauccuuucuuccacuguuuucucuugggcccugaaacccagagaggccuuggcaagacagaauuaaaaaag

SEQ ID NO: 4141103 - RNA, 71 nt, Human
cuugcccucaagaacaauccaccauuagaacuauucagagguuguaaucgcuuucuugucuugaggccagg

SEQ ID NO: 4141104 - RNA, 69 nt, Human
cuugcccugagagacacaguuaucaggcauacaaggugacagaccaguacccucuguuccucaggcaag

SEQ ID NO: 4141105 - RNA, 57 nt, Human
cuugcccuggcacacacacagcuggaaccugagcccagaggugguuugaagggucag

SEQ ID NO: 4141106 - RNA, 85 nt, Human
cuuugcugauuauauucccagagggaaguguucuggcaguugggcuaauccugaaacaugagcacuugcuucauagucaucagag

SEQ ID NO: 4141107 - RNA, 89 nt, Human
cuuugcugguggcagggggauggagggauccaagcaguagaaaaagcauuucucugcucugugccucaguuucccugucuauaacaagg

SEQ ID NO: 4141108 - RNA, 79 nt, Human
cuuugcuguugugaauagugcugcaauaaacauacaugugcaugugucuuuguagcagcaugauuuauaauacuuuggg

SEQ ID NO: 4141109 - RNA, 72 nt, Human
cuuugcuuucuugauucagauuauuuuucuauaaacugaacuauguagacuaagggaaucaggaaggcagag

SEQ ID NO: 4141110 - RNA, 77 nt, Human
cuuugcuuucuuucaguucaucugugaagauuaaauuagcuauuauuauucuaguuuuacagaugagaaaagugaag

SEQ ID NO: 4141111 - RNA, 90 nt, Human
cuuugcuuugcaaauaaaaguaguauuagaacauguauuugccaaaaauauguguguaaacaaguauaauuuugcaggcauaaagcagag

SEQ ID NO: 4141112 - RNA, 55 nt, Human
cuuuggaagccaggcaguucacacaguugaugguuguuucuuuaggcuucuaagg

SEQ ID NO: 4141113 - RNA, 87 nt, Human
cuuuggcacgaagguccucaauacuucuaccggggaaucuacccuccucuucucuccaagauguugcaagggacucuucuguuuggg

SEQ ID NO: 4141114 - RNA, 60 nt, Human
cuuuggguaguauuuauuuguuugaaauacugggauguuuugggcaaaugcaauucaaag

SEQ ID NO: 4141115 - RNA, 78 nt, Human
cuuugguaggggaggucuuuugauuggcugaguggagucaugacauuuggccagauggaaaugauguucucaccauag

SEQ ID NO: 4141116 - RNA, 65 nt, Human
cuuuggucaaauauuauccugagugcauccgggaggauguuucuggauaacauuugaaucaguag

SEQ ID NO: 4141117 - RNA, 60 nt, Human
cuuugguggggguauuucuggcaacauauucuuacacuagguauuuuaaguccaccagag

SEQ ID NO: 4141118 - RNA, 95 nt, Human
cuuugguucuuagcauuaauuuuacaugcauuuuucauucugaacuuuuaaacaguuuugagaaacauaugagagauuugugaacaggggcaagg

SEQ ID NO: 4141119 - RNA, 94 nt, Human
cuuuguaacuauagcaucucucauauuugaauggcaagcauguucaaucuguugcugcauguuaagaaaauauugaggauauauaugaauaaag

SEQ ID NO: 4141120 - RNA, 68 nt, Human
cuuuguagaaguuugcuaguguuuuuuaguugagaagccuugaacacagaagaauuucuaagacaaag

SEQ ID NO: 4141121 - RNA, 65 nt, Human
cuuuguauuccauaucaugccauaagucauuggccuuccaguucaugguaugguagauugcaaag

SEQ ID NO: 4141122 - RNA, 73 nt, Human
cuuugugccucauaaaagcuuuguuuacacuuuccaguaaaaagguguguacauauuuuuaaugggcucauag

SEQ ID NO: 4141123 - RNA, 58 nt, Human
cuuuguggcuccugcaggccauuuggauguauacgggcaggucacagggguuacaagg

SEQ ID NO: 4141124 - RNA, 84 nt, Human
cuuugugguuuuggaggggaagaccuuggagcaguugcgaagauccaucuaccauguucugguuuuuccuuggaagccuaaaag

SEQ ID NO: 4141125 - RNA, 67 nt, Human
cuuuguguacauuucaguuuccuuaagacuuaggaaguccaagagaauacuggagaguaccuuagag

SEQ ID NO: 4141126 - RNA, 55 nt, Human
cuuuguguuguuuuaagccacuaaauuguggcaauuuuuuacagcagcaauagag

SEQ ID NO: 4141127 - RNA, 81 nt, Human
cuuuguuaaaaaguaggggcuggaguucgagguuacagugagcuaugauugcggcacugaaguccagccugggugacagag

SEQ ID NO: 4141128 - RNA, 78 nt, Human
cuuuguucccaaauauaaugcaagagacaaguuggcuagaucagucuuaucuugcagauauuggucgggaguucaagg

SEQ ID NO: 4141129 - RNA, 86 nt, Human
cuuuguuuuguuuuccuuccacuuuagcgggaaccacaucuucaagggccgugcugccggcauagcagugaaugagaacggcaaag

SEQ ID NO: 4141130 - RNA, 58 nt, Human
cuuuuaaaaauggcaaacuucuuccuucuaaaaggaggaacugcuucauuuuugaaag

SEQ ID NO: 4141131 - RNA, 59 nt, Human
cuuuuaaagauggcgcccugugaguuaccaugacaaccuauagauaucaucuuuagaag

SEQ ID NO: 4141132 - RNA, 108 nt, Human
cuuuuaacagcaaugagagauuaaugacuuauauuuaaagcacgauauaauuuucuugcaaugaauaugguacauuaagauguuagccucucauucugcuugugaaag

SEQ ID NO: 4141133 - RNA, 79 nt, Human
cuuuuaacagugccccuaaacagguacaguuucccucugggcuccgcugagcuccuguacgugcuucacuguucaagag

SEQ ID NO: 4141134 - RNA, 127 nt, Human
cuuuuauaaggagcgguagacaagguauaguugagaugacuuaaauuugggauugauuuugcaaccaaggaacgucccugugagucaacuaaacaagaaauauuuaugugucuagcucguuuagagg

SEQ ID NO: 4141135 - RNA, 64 nt, Human
cuuuucagcagaaauuacucuugaugacaccagccccgcugucagaguaauuccugcuggaaag

SEQ ID NO: 4141136 - RNA, 62 nt, Human
cuuuucaguuuccagcuuugucauucuguggccuuugcugugacaaugcugggaaggguuag

SEQ ID NO: 4141137 - RNA, 56 nt, Human
cuuuucaucccacuggguuucuauucaagcauagugugacccaguuugaaggaaag

SEQ ID NO: 4141138 - RNA, 129 nt, Human
cuuuucaugguauuuaucauuuuaguauugaagaugcaguguucuuuugggaauuacguaugcuuagaagagaguacugaugcucaaaggugaaaugauuugaaucuagaguuggauaaaaagggaaag

SEQ ID NO: 4141139 - RNA, 58 nt, Human
cuuuucauuucucuuagugcuuucugcauugcaggcaggcacuccggaagugucugag

SEQ ID NO: 4141140 - RNA, 64 nt, Human
cuuuuccacacucacugcacucauagggcuucaccccugcaugaauuaucugguguuggaaaag

SEQ ID NO: 4141141 - RNA, 60 nt, Human
cuuuuccuuugaccaucaugcuagagaggacaaggauagacacagaugggacaggaaagg

SEQ ID NO: 4141142 - RNA, 67 nt, Human
cuuuucguggcuggauaauauucuguuguguggauauacagcauuuuguuuauugagucaugagggg

SEQ ID NO: 4141143 - RNA, 91 nt, Human
cuuuucuacagauccuugaauauaauaacaguagcuaauaucuguuuacuuauuaccugcuaggcaaugugaucaauuuucuguggaucag

SEQ ID NO: 4141144 - RNA, 57 nt, Human
cuuuucuacuaaugaguagcuagaggcaaugacuuugcagcucauauuagagagaag

SEQ ID NO: 4141145 - RNA, 69 nt, Human
cuuuucuauuugugcuuaaagucugcaugaaauugacauuaugcauaugcaaugcacaauuuggaaaag

SEQ ID NO: 4141146 - RNA, 111 nt, Human
cuuuucuccaaccucgauggauccuguuccuugaaugcugugcuuuuuucucugauggaauugcuaacauucugaaggccuaacuagaucuuaucagaauaggggggaagg

SEQ ID NO: 4141147 - RNA, 59 nt, Human
cuuuucuccuaugccaagauaugagcaaaacucucugcuuggcugucuauaggaaagag

SEQ ID NO: 4141148 - RNA, 61 nt, Human
cuuuucucugaauuucuaguuagugucuguggaauuucauaaacugagaguucaggaggag

SEQ ID NO: 4141149 - RNA, 92 nt, Human
cuuuucugaguagccuucccuggaugauuucuuaagcaccagauugcccgaaacauacgauuuaggagaaagagcacuacacaccagaaaag

SEQ ID NO: 4141150 - RNA, 92 nt, Human
cuuuucugucauauggggaaacuauuuccuuguccagaagaaagaugauucugggaagagaggaggugguuucgucuguaaugagcgaaaag

SEQ ID NO: 4141151 - RNA, 114 nt, Human
cuuuucuuuuuaaaaaucccccuuacuauagauuuguauagaugugguugaagucacagaugccauauucuucaucuuuauaaugcaaguuuucuuuccagguagaaggacaag

SEQ ID NO: 4141152 - RNA, 59 nt, Human
gacaggcugaucagggcugggaugguggacacgcauccucuuuacccugaucacugguu

SEQ ID NO: 4141153 - RNA, 75 nt, Human
gacaggcuuauuuuaggucucucuuuaccccaccagcccaaccuggcauuuuggaaggagggcaaguagccuguu

SEQ ID NO: 4141154 - RNA, 63 nt, Human
gacaggcuuccuaagugccagaugccaacugugccagucccggcccuuaugggaaggccuguu

SEQ ID NO: 4141155 - RNA, 62 nt, Human
gacaggcuuugagucccagaacagaucagcccauuuucauaugguuacugggagaagccguc

SEQ ID NO: 4141156 - RNA, 66 nt, Human
gacagggagcaaccucagccuguccucacaucugcagggccuacagccugcugccugcuucuuguc

SEQ ID NO: 4141157 - RNA, 76 nt, Human
gacaggguggugaugagggcaguucuuguugcugugggagugcaaagcagggagccuaccucaucccaacaauguc

SEQ ID NO: 4141158 - RNA, 93 nt, Human
gacaggguugccuugacuucccuucuagcucccagacgaugagcacgaccucucagacagggagcuggagcuggaagacucugcagcucuguc

SEQ ID NO: 4141159 - RNA, 59 nt, Human
gacagguaccggucagauuacgguggcacaggcggcgugggguuagacagguaccgguc

SEQ ID NO: 4141160 - RNA, 56 nt, Human
gacagguggguucucguaucugguucugcauucagucuguugugauaccaccuguu

SEQ ID NO: 4141161 - RNA, 68 nt, Human
gacagguuuuggacuccagauuugagaaguagaugacuaagaaauacuggcaagugcuaauuccuguc

SEQ ID NO: 4141162 - RNA, 86 nt, Human
gacaguaaugcuaauaguaguaauuauuuuauuaauggcaacuacuacuaaauggaaugauuacuauaugccagguguuaaguguc

SEQ ID NO: 4141163 - RNA, 55 nt, Human
gacaguaguccuugcuauucauaucaaucgaguugugaauggaaggggugcuguu

SEQ ID NO: 4141164 - RNA, 60 nt, Human
gacagucauuuguuuuacaggcaguugguaaaugucuacuuguaauuauaauguacuguu

SEQ ID NO: 4141165 - RNA, 60 nt, Human
gacagucccccagcagcaaaccauguuccagucauucccuuuccuacuuuggggauuguu

SEQ ID NO: 4141166 - RNA, 55 nt, Human
gacagugcuaugguaggacauucaagaaaaauguaugcuaccaauagucacuguc

SEQ ID NO: 4141167 - RNA, 97 nt, Human
gacagugcugcucugccaguagcaagccccagauggaggaagcugggcccauuucuggccacuuccacccauuuggagcuuugccagaggagucguc

SEQ ID NO: 4141168 - RNA, 59 nt, Human
gacagugcugcuugucaaagagcuccuuaccaguuccuguucucacaagcaacauuguu

SEQ ID NO: 4141169 - RNA, 93 nt, Human
gacaguggggugcucaucuucuguaacuguugggaaggcucggugguccauuuucaccaguuaaagaauaugaggccagcccagaaaucuguu

SEQ ID NO: 4141170 - RNA, 56 nt, Human
gacuuucaggaaaggcuuuuguuaggauacaauacuuaagcuaagaccugaagguu

SEQ ID NO: 4141171 - RNA, 128 nt, Human
gacuuuguguugaucuuuuggccuuuauguaauuuauguuuauguuucuggcaaugcccugaugguuaauguccuuaugguaauuaaaacauguauauuaauuaagugugcuacuaguaauaaaaguu

SEQ ID NO: 4141172 - RNA, 77 nt, Human
gacuuuuacagacagcaagugguuguuuuuggugggcucuuuaaauuacuaaauacacacauuuguucaauguuguc

SEQ ID NO: 4141173 - RNA, 67 nt, Human
gacuuuuccagggaggaaugugggguuggaguuuggucucaggccuggaguacuccuugaagugguu

SEQ ID NO: 4141174 - RNA, 55 nt, Human
gacuuuucuaaauaccgcucuggaggucaaagucauuuccaaagccagagaaguu

SEQ ID NO: 4141175 - RNA, 65 nt, Human
gacuuuuggaaaagauguaagcuaaccaagguugguaaauuauuuuuauaucccuuuccaguuuc

SEQ ID NO: 4141176 - RNA, 85 nt, Human
gagaaaaagaucagaagaaagcacuucaaaaagccagcauuugucucuggguucugggguuaugggugauucuuaucuucuucuu

SEQ ID NO: 4141177 - RNA, 87 nt, Human
gagaaaacuguuuuauacuguucaagcaaaugacauuggucugagacagaaaggccauguaauuuuuuugaacaggaacugugucuu

SEQ ID NO: 4141178 - RNA, 112 nt, Human
gagaaaagaguuaguuucugcaaacuggcaaaccugucugucauaguguuuuuauucaaguugaccuggugcacuuuauagauugcuaguuuuaaaauuaacaacgguucuc

SEQ ID NO: 4141179 - RNA, 101 nt, Human
gagaaaagcuuugcucuuuauaaaaagggccgugugagauucuuugaaacugaacgccggcggagucugacucugacccuggaugaagagaugcugcucuu

SEQ ID NO: 4141180 - RNA, 69 nt, Human
gagaaaagugauucuguguguaaauuuuaaguguacuuggugauauuaugcucagaauacucuauucuc

SEQ ID NO: 4141181 - RNA, 62 nt, Human
gagaaaauuguguucaccagauccuuuucaggaacacacuggcuuuggaaacaauuuaucuu

SEQ ID NO: 4141182 - RNA, 62 nt, Human
gagaaacacuguuaguuuauuaucuuaugaaucugugacuucugcaacugauuguguuucuc

SEQ ID NO: 4141183 - RNA, 96 nt, Human
gagaaacauuaaguucucuguguaaaaauaacgcuaucucuuuaggagaugcuuuccugauauuuaugcauaaaugaguagaacuuucacuuucuu

SEQ ID NO: 4141184 - RNA, 88 nt, Human
gagaaaccuauuaacaugcauuacuauaacggcauagauuauugucauuaaugaguauccuauaugguguaaguuccuugaaggucuc

SEQ ID NO: 4141185 - RNA, 75 nt, Human
gagaaacuugagcuugcuuucacaaaaauagauuuuuauguuugauuuuaugauugagcuggcuacaggcaacuc

SEQ ID NO: 4141186 - RNA, 59 nt, Human
gagaaagagacuuuuggcagaggucauguccuugccuccugccagaugacuccuuucuu

SEQ ID NO: 4141187 - RNA, 89 nt, Human
gagaaagauucccaaagagacuucugaucauuguuuauguauaaauuacauagauaauguguagcagugaucuugaaacuucuugacuc

SEQ ID NO: 4141188 - RNA, 90 nt, Human
gagaaagcaccauuuggagcagcacaagaaaggggauuucagaugccucuguccucacuucuguugcuucagacugagucuucacaucuc

SEQ ID NO: 4141189 - RNA, 71 nt, Human
gagaaagcagcaguggucuguagaaggagugggaacugucuuucuuauuagccauuguucuuuaacuucuc

SEQ ID NO: 4141190 - RNA, 91 nt, Human
gagaaaggaaccuucugccuuuuaaagccaguguuauuuuggucucuguuaaaguagcuaaaccaguaugugaaggcagggguucugacuc

SEQ ID NO: 4141191 - RNA, 78 nt, Human
gagaaaggcuaucuguuguaguacagaugauacaaugaguguguucauuuuacuguaaauagcagagagguuuaucuc

SEQ ID NO: 4141192 - RNA, 63 nt, Human
gagaaaggucaaaaucgugacauugggaguuagcuuaaugcacccagaguuugaacuuuuuuu

SEQ ID NO: 4141193 - RNA, 77 nt, Human
gagaaaguacuuuagaaggguaacggaauuacaccuugguguuuguuucucuuucuuuuaaaaauauuuuuauucuc

SEQ ID NO: 4141194 - RNA, 84 nt, Human
gagaaaguacuuuagaguaaaauagaccuauauuaagaucccgaucuacauuggcuggcuauuugaccuuggagaccuuauuuc

SEQ ID NO: 4141195 - RNA, 79 nt, Human
gagaaagugccuuuguuuccaaaguugccauaagcuucugggaaguuuauauacacuuggaagaaaguuacacuuuuuc

SEQ ID NO: 4141196 - RNA, 88 nt, Human
gagaaauagaacccuugcuuccuggagcuggucuugcugauacccuguaggccuaggauugucuucacaggaauguaggggucuucuc

SEQ ID NO: 4141197 - RNA, 69 nt, Human
gagaaauaggcaaugguaucuaaaagcggaaugagggguuuuggagaggauggcuaugcucugguucuu

SEQ ID NO: 4141198 - RNA, 83 nt, Human
gagaaauaugaugccaaauugcuacaacugccggugccaccaccaccaaugcauucgguguucaguuugcuaucauaauccuc

SEQ ID NO: 4141199 - RNA, 80 nt, Human
gagaaaucaugaaaugggauggaaauguuuucagguaaucuguugauuagaauuucacaucuucaugagcuugguuucuu

SEQ ID NO: 4141200 - RNA, 68 nt, Human
gagaaaucuugcacuccuuucuccuaguucaucagcuaacugaaugcagagaaaccaguggaggacuc

SEQ ID NO: 4141201 - RNA, 95 nt, Human
gagaaaugaaaaaagaccuaaauaaauggugauauauaacaaauuuauguauuaggagauuccauguuuuuaagguguuaauuuucccccaaauc

SEQ ID NO: 4141202 - RNA, 70 nt, Human
gagaaaugaaggugucagcagggcugguuccuuuuggaggcucugaaggagaaccuguuccaugcuucuc

SEQ ID NO: 4141203 - RNA, 64 nt, Human
gagaaauggcugggcuccaggcuugugugacagcccgagaguggacagggcgcagcuaugacuc

SEQ ID NO: 4141204 - RNA, 59 nt, Human
gagaaauggcuuggcuaagaucuaagcuuagaagcagugcuauggccaggcuaagucuc

SEQ ID NO: 4141205 - RNA, 87 nt, Human
gagaaauuauauaacuguguauucuaaugacuaaaguuugggaaauuauggucuuggagaguauugcaauaggaguaauaaggguuc

SEQ ID NO: 4141206 - RNA, 81 nt, Human
gagaaauuuuaggcaggcugaauguagauuucuaccucugcuggaggaggaaauuugcuugagccuuuuugggcgguucuc

SEQ ID NO: 4141207 - RNA, 67 nt, Human
gagaacaaggaagagucggcaguaguacccuggaaaugcuaaaugaaacacucuuccuuauguucuu

SEQ ID NO: 4141208 - RNA, 91 nt, Human
gagaacagaaguaaauagaauacaaacacagaggacauacauguuuaugucuucgucucuguggguauuuauauguauugaagugguucuu

SEQ ID NO: 4141209 - RNA, 61 nt, Human
gagaacagagcagguggaggaguauuaucaccgauggcccugcuaccacuuuucuaauuuu

SEQ ID NO: 4141210 - RNA, 84 nt, Human
gagaacagggcagcaacuuugugccuucacucacuucccuccaacccccgaugugcaccuaggucaaaguucucucucugucuc

SEQ ID NO: 4141211 - RNA, 107 nt, Human
gagaacauguuuggguuacauaagccuccuugauguugguggguucaggugggacauuugaaaugccuaugaagucaggagggaauugaauauccugauuuguuuuu

SEQ ID NO: 4141212 - RNA, 76 nt, Human
gagaaccagacaggcucaauuggcucaacuggguucuggaacuuggcugggagaguugaagaucguuugguuucuu

SEQ ID NO: 4141213 - RNA, 101 nt, Human
gagaacuaaaguuuuaacauguaaaguaacuuguccugguucaccugccuuaggaguggaaucaaaucaaguucuuuugaguguagauuuaauagacuuuc

SEQ ID NO: 4141214 - RNA, 104 nt, Human
gagaacucgaaugaagauucacuuuggaacacauuagucaauuagauauaugcaugccugacaaauguaccccuagagucuagaauacuuucauuucuuaucuu

SEQ ID NO: 4141215 - RNA, 88 nt, Human
gagaacucugaagucaguugagugaucaaaauggcaccuucuguuauuuauagcagaaacugcuuguggucaucugacauuccuucuc

SEQ ID NO: 4141216 - RNA, 77 nt, Human
gagaacugaauuuguacaaaauguuuauaaauaauucgaaagaggacuuuaaaaguacuuuuugcaaguuuguucuu

SEQ ID NO: 4141217 - RNA, 85 nt, Human
gagaacugcccccuagugguccuggcaaccauggugaucaugugacauggccauaggugacuggaccugagaggacgugugacuc

SEQ ID NO: 4141218 - RNA, 130 nt, Human
gagaacuucuggcggcuggugcgggagcagcagguccgcaucaucaucaugccgaccaucagcauggagaacgggagggugagugcgccuugcaggcuccuagaaaggccaccagguggcgcacguucuc

SEQ ID NO: 4141219 - RNA, 56 nt, Human
gagaagaacuugggcaaagucaaaucuccccacuugauuuuguuuauguuccucuc

SEQ ID NO: 4141220 - RNA, 106 nt, Human
gagaagacauuuuaccaaauguuuuaccuguggcaacucccuucuguuuguuaccucugaagaagcaaagugaauuuugccaagaagcaacgugaaauguguucuc

SEQ ID NO: 4141221 - RNA, 65 nt, Human
gagaagacgugauggccaagaaucagaaacaauucccaacggcuuccugguagucaagucuccuc

SEQ ID NO: 4141222 - RNA, 75 nt, Human
gagaagagccugggcuuuugagucacaagggccuugggcaagucccuuaagcucuuggaggcucaguuucuucuu

SEQ ID NO: 4141223 - RNA, 83 nt, Human
gagaagaggugggaaguucuuggaggaugaagaguagacaccuccuggagcucuugauuuccaggagcuaguggccucaucuu

SEQ ID NO: 4141224 - RNA, 82 nt, Human
cuugucuauuugcauuuguauguaaaggucuucauguuguuuucauuauggagcauuuucaugccccuguaacugagacaag

SEQ ID NO: 4141225 - RNA, 66 nt, Human
cuugucucugggacaugguauuagcaggauguacagaguuccuuuuuggugccaugcuaggaggag

SEQ ID NO: 4141226 - RNA, 92 nt, Human
cuugugaaguuccuuaaggaaggagggaguguggcccugcagcccucccaaacugcuccagccuaugcucuccggcaccaggaaguuccaag

SEQ ID NO: 4141227 - RNA, 64 nt, Human
cuugugacagugaauaagucucuuaagaucugaugguuuuauacagggaguuucccugcacaag

SEQ ID NO: 4141228 - RNA, 67 nt, Human
cuugugaggcacuuaaccuacuaacugaaaugccauucauucagccaguauuugagugcucagcaag

SEQ ID NO: 4141229 - RNA, 89 nt, Human
cuugugccacaauuucuucauagauaaaugcagguauugaaaauagcugcaucauauaaugucuauggaaguagaugcaauaguauaag

SEQ ID NO: 4141230 - RNA, 90 nt, Human
cuugugccagaaggauuucuucucccagagagcaggugggccgugucaagggacauacugcugugugcucugggacccucucuggacaag

SEQ ID NO: 4141231 - RNA, 69 nt, Human
cuuuuugucucuuaaagcccuuggcagaguuccccacaaagugccuugcucucccggggguucagaaag

SEQ ID NO: 4141232 - RNA, 79 nt, Human
cuuuuuuagcacauggcucauguagaggccauuuuaucugugauggauuuaccacagggccacagugcuuacaaagaag

SEQ ID NO: 4141233 - RNA, 71 nt, Human
cuuuuuuggguuauuaucucagugucucaucuuagccacaggccauugcacuggggucauagccuccagag

SEQ ID NO: 4141234 - RNA, 117 nt, Human
cuuuuuuuaaacaacccucaaauuauaugcuuugaauguggcagcuguuucuugcaaggacccugacugauaaaggaaacaaguuacucuuaaaguauauggcuuaagugaaaaaag

SEQ ID NO: 4141235 - RNA, 129 nt, Human
cuuuuuuuuuuuugagauggagucuuguugcuguguugcccaggguggagugcaguggcaugaucucugcucacugcaagcuccaccucuuggguucacgucguucuccugccucaaucuccugaguag

SEQ ID NO: 4141236 - RNA, 65 nt, Human
gaaaaaaauccacaguggggguggcggaagaucuaugacuucuaacaacccauucugugguuuuc

SEQ ID NO: 4141237 - RNA, 129 nt, Human
gaaaaaauacuuaauaaacugauaccaagggucuguuguaggggaagucauugcuuagguauccauuuguugagacuucugaauucaguauggucuuucucucucucuuuuucuguuuauguauguauc

SEQ ID NO: 4141238 - RNA, 61 nt, Human
gaaaaagagaaggaguucaguaauggugaugccaucaguccacagagauccucucuuuauc

SEQ ID NO: 4141239 - RNA, 68 nt, Human
gaaaaagugauuugcuguucccaacugaaaucacagcugggauguuuacacagaaauuaguuauuuuc

SEQ ID NO: 4141240 - RNA, 73 nt, Human
gaaaaaguucauuagugagcuucucuccugauguguuauuauuaacuggaagcuaaaauuaaugaauuuuguc

SEQ ID NO: 4141241 - RNA, 99 nt, Human
gaaaaauacaguugucuggucuuugucaagaaaaaccguuaaaguaaaagaaagcgauuuguuuggaaacuuuggcaaagauggcuagcugugaguuuc

SEQ ID NO: 4141242 - RNA, 125 nt, Human
gaaaaaugacuccagaaucuuuaaaucugcucuacuguauagauggaguugauuuuuaaaaguugaaaaauauuauaagaugauuuuauuuacaguaaguugacuuaggauuggacuuauuuuuu

SEQ ID NO: 4141243 - RNA, 80 nt, Human
gaaaaauguucaacagauggauauuucuaaagccuaccacccuuugcuuuuuugaagcuacacaucuguuggguaugauc

SEQ ID NO: 4141244 - RNA, 70 nt, Human
gaaaacaagcacuacuuucauaaguuggauugugaauuuuccaggcugagugaaaguuugcuguguguuc

SEQ ID NO: 4141245 - RNA, 55 nt, Human
gaaaacacagugcaauguaucugaccugcugcugggucagcagcacugugauuuc

SEQ ID NO: 4141246 - RNA, 75 nt, Human
gaaaacagcucuauaugccauuaaaauauguauguguuuauaaauguuaacagaggucauuuuggggugguuuuc

SEQ ID NO: 4141247 - RNA, 113 nt, Human
gaaaacagucaaauuuaaccauuuggaguuuauuugaauucuuggaaagagcaauauucaaaaccuuuucaaaaauaagauauucuggacuacuggauggauguuuuguuuuc

SEQ ID NO: 4141248 - RNA, 77 nt, Human
gaaaacauuugguggagucauuggcauaugguaggcuuccguagauuucauuguccuuuggcuuugcaaauguuuuc

SEQ ID NO: 4141249 - RNA, 119 nt, Human
gaaaaccuagcuacuauuugcauaauccuuauauuuuaggaacagacaauaaugguucuaaaguuguugcucuguguaugagacgauacaugguuauucacugcaauagcugggauuuc

SEQ ID NO: 4141250 - RNA, 77 nt, Human
gaaaacgccacgcacuccuucuccaagcagggcuugucguagggcucaaaggagguaaugggugugaggguccuuuc

SEQ ID NO: 4141251 - RNA, 84 nt, Human
gaaaacuucugaaugcuauauguaguacuugugcuucaaauuauaaauggauaagagugucucacaguagcauuuuguguuuuu

SEQ ID NO: 4141252 - RNA, 125 nt, Human
gaaaagaguuaaagcccaauuuuggcagaaagcagggcuggagccagcuguggcugcggugaucacgcagccgggucugucuuuagagcuucuuucugccuuuccuuugucggcauccucccuuc

SEQ ID NO: 4141253 - RNA, 81 nt, Human
gaaaagaguuccccuugaauuuucagagaggggauuugguuuuauguccccuacaucugaaguugaagugaaaauuguuuu

SEQ ID NO: 4141254 - RNA, 86 nt, Human
gaaaagcauggucagauaagcaaagucucagaaaauaugcuuuuugaaaacaaauaugcuuuuugaaggcugcucauaugcuuuuu

SEQ ID NO: 4141255 - RNA, 80 nt, Human
gaaaaggacaccaggaucugaaugguuagcauucuccauugacaagcauguuuuaguucugucuugcauguguuuucuuc

SEQ ID NO: 4141256 - RNA, 58 nt, Human
gaaaaggauugguaaaauaucuguuauuucacuuacagguggaaggccaccccuuuuu

SEQ ID NO: 4141257 - RNA, 55 nt, Human
gaaaaggcuaauuaaguuuuggaucauagugugugucuccuccuuuggccuuuuc

SEQ ID NO: 4141258 - RNA, 120 nt, Human
gaaaaggcuggauuugggaaggaggucagaucuaccagggucacagaggcccuuggcauggggaauauucugugauucugugguuauguaguacugucauucccagcuuguggcuuuuuu

SEQ ID NO: 4141259 - RNA, 86 nt, Human
gaaaaggugagauuaaugguucucagugaaucucuuguuauauuguuuuaauaauuuuuauuguggacuacuguucugguuuuuuu

SEQ ID NO: 4141260 - RNA, 71 nt, Human
gaaaaguaguauucaugguuuuaauuuggcagugcaaauguaucaaccaacuacucguguugcuucuuuuc

SEQ ID NO: 4141261 - RNA, 130 nt, Human
gaaaaguugcugguggguagccaggcccugccugaucucauaaauucuggugcugugagauuuccuccaucuucauagugaguuuaaugaugcaguagauuuccauguuaccacuuuuaauuuccaguuc

SEQ ID NO: 4141262 - RNA, 76 nt, Human
gaaaauacaaggacuacacccacauugagcaugggacauggaaaaaucugauguguguguguauguguguguuuuc

SEQ ID NO: 4141263 - RNA, 70 nt, Human
gaaaauacauauucaagaaguaggaguuguaugaauuaacuuaguuuagcuccuuugaaaguauguuuuu

SEQ ID NO: 4141264 - RNA, 96 nt, Human
gaaaaucugucucaucgacagucagugauaugguaagggaagaaaaagcacaguauauuuccauuacagagaggugauugugaagaucagguauuc

SEQ ID NO: 4141265 - RNA, 60 nt, Human
gaaaaugaacagaacaauggggagcuguuguucccaggcuuauuuauuuguucgucuguc

SEQ ID NO: 4141266 - RNA, 67 nt, Human
gaaaaugagguaguuugccauugagaggcuugaggagugccuaaaugugacaaaugaucugauuuuc

SEQ ID NO: 4141267 - RNA, 64 nt, Human
gaaaaugguuggggcauaagacauggguauguccaaaauucguagauuaugcaaaacuguuuuc

SEQ ID NO: 4141268 - RNA, 56 nt, Human
gaaaaugugccuuuggguauugcuaauucagauauaaugcccuuggcacauguuuc

SEQ ID NO: 4141269 - RNA, 55 nt, Human
gaaaauguuuccuguuauuugcuggacaagucccaaagaacaggcagauguucuu

SEQ ID NO: 4141270 - RNA, 56 nt, Human
gaaaauuauguggcauauucugggaaaguggcaacagcagcaaccacauaguuuuu

SEQ ID NO: 4141271 - RNA, 103 nt, Human
gaaacaagcugggaaccaggcauggcaaaacccugucucuacuaaaaauacaaaucuauuguauuaggagagugggugcuaagucuaguucccugcucuaauc

SEQ ID NO: 4141272 - RNA, 87 nt, Human
gaaacaagugagagaaggcuuccaaauucugugaaaguaauuguacaggugcauugaauggaugcucuguuucaugauuuguguuuc

SEQ ID NO: 4141273 - RNA, 77 nt, Human
gaaacaaucacaauagcugaaaguuaugguaggagccaugccuccugcuuugaaaauaaacuugucagcuuugcuuc

SEQ ID NO: 4141274 - RNA, 62 nt, Human
gaaacacacacaguguaauaaccaucuggccccuuuauuucucaguggagcugcguguguuc

SEQ ID NO: 4141275 - RNA, 94 nt, Human
gaaacaccagaaucccggggagugucccaggagaggagacaauggggugcuggcuaggaccccaacucccuccuuccccagggauucaaauuuc

SEQ ID NO: 4141276 - RNA, 56 nt, Human
gaaacagcacgguccacagucaguauugaacacugcacuggagaauggcuguauuc

SEQ ID NO: 4141277 - RNA, 56 nt, Human
gaaacagcuuuaagugauacugcugcugcuacuggugguuuuaguucagcuguuuc

SEQ ID NO: 4141278 - RNA, 97 nt, Human
gaaacagugccaggcauuggagugagaaucuucacagaaaaaugucugcccagaggcagaugagguccuucagcuccagugcugauugguuccuuuc

SEQ ID NO: 4141279 - RNA, 80 nt, Human
gaaacauccaugcaauaaagugcuauaaauccauaaaaaagaaugagguggcucuuuaugcauuaaaaugggauuauuuc

SEQ ID NO: 4141280 - RNA, 71 nt, Human
gaaacauguuaauaugcauugaguacuaagcaugggccagcaagguacucaguaauauaacauauuguguc

SEQ ID NO: 4141281 - RNA, 59 nt, Human
gaaacauugagcagaaggagaauggggcccacauauuacuacccuccacuuaauguuuc

SEQ ID NO: 4141282 - RNA, 97 nt, Human
gaaaccaaaguuugaaucuauguugccccauaaucagccagugaaagcccauugagacaaauggaacaaugaagacugaaauuuaaacuuuuguuuc

SEQ ID NO: 4141283 - RNA, 64 nt, Human
gaaaccacaguucagugcuuuuggggaccuacuacagauucagauacucauggaacuggguuuc

SEQ ID NO: 4141284 - RNA, 128 nt, Human
gaaaccaguuaucauucauuuagucauuugcuucauucauuuauucacuauuuaauaagcaccaaaugaugcauuggucuggggaaaugaagaggccacuccggacucuagaaugacuccugggaauc

SEQ ID NO: 4141285 - RNA, 94 nt, Human
gaaacccagagggcuuuagcaggguaaauguagauggagaggccuagagaaaaacuuuuccuucuuuauaauuuuccugcuucuauucuguuuc

SEQ ID NO: 4141286 - RNA, 79 nt, Human
gaaacccauggaauguguggcuugagaauagugguugaaaaaaaccucugugccuaagaugcaugucucagagggcuuc

SEQ ID NO: 4141287 - RNA, 58 nt, Human
gaaacccuuccuagagggcaaguggaauuucaacacugaauuauuuuaggaggguuuc

SEQ ID NO: 4141288 - RNA, 78 nt, Human
gaaaccuagauaugugcugggcuggguggcagugccacagcugggcacuuuacuccccaacauaaauguaggcauuuc

SEQ ID NO: 4141289 - RNA, 78 nt, Human
gaaaccuuguggcucuacugaaacuuuucuucaacuggguuaaguaaugcacuaaaaaguuucaagcccacaguuauc

SEQ ID NO: 4141290 - RNA, 84 nt, Human
gaaacggguauaggcauuuugauuagaguggauaaguguaauuauuauucaacuguaauauuuuaagaugucugugauuauuuc

SEQ ID NO: 4141291 - RNA, 68 nt, Human
gaaacgucugcuagaauuucuggaaaagagagauuccucucuuugcuccaugaaaucuauuagauuuc

SEQ ID NO: 4141292 - RNA, 61 nt, Human
gaaacuaagacuaaugaagaacuaguguucguuuuucuaggacugcauucuucuuagucuc

SEQ ID NO: 4141293 - RNA, 57 nt, Human
gaaacuaaugauuguagauuuguggguuucuaacccaaagcaauauucaucaguuuc

SEQ ID NO: 4141294 - RNA, 67 nt, Human
gaaagagguuauuguucccagcuuauagacugagaaaacugaagcguagagggaguaacuuacuuuc

SEQ ID NO: 4141295 - RNA, 82 nt, Human
gaaagauaucuauuucaccuaaaagugucaaaggccuccugagguaggaauugugcauuagggaaaggaacugcuguuuuuc

SEQ ID NO: 4141296 - RNA, 63 nt, Human
gaaagcacagugggcagagcagcccuccauacucaugggggcagggaugacccucugugcuuc

SEQ ID NO: 4141297 - RNA, 80 nt, Human
gaaagcaggagcccuggcauguucuuccagcuuccauauagcaugccggcaaagaccagucuccagggcucaccucuuuc

SEQ ID NO: 4141298 - RNA, 71 nt, Human
gaaagcaguauuuaguucuguuuugauuuguuaaguuuaagagacaguaaugcccuaaauacuugcguuuc

SEQ ID NO: 4141299 - RNA, 93 nt, Human
gaaagcaugaagucaggauuuccaugauuuaaagauagaaauauucuccgaaugucuugguuucauaacagguaccugcacuuuaggacuuuu

SEQ ID NO: 4141300 - RNA, 62 nt, Human
gaaagcauguucugggaauaguaaggggguugugcugccuacuuugccuagaauguucuuuc

SEQ ID NO: 4141301 - RNA, 59 nt, Human
gaaagcuaaaccuguuugugucccuuuaucagacacauuuagcaccagguuuaucuuuc

SEQ ID NO: 4141302 - RNA, 68 nt, Human
gaaagcucuuacuagcuacaaauaucacuaauagugaugagagugauguugacuagcuauaagcuuuc

SEQ ID NO: 4141303 - RNA, 57 nt, Human
gaaagcugaaccaggaaccaugcguuguuucagaugcauugauuuuuaucagcuuuu

SEQ ID NO: 4141304 - RNA, 62 nt, Human
gaaagcuggcaaggcuuuagauucagacagccauggguucaagugucaggucagccacuuuc

SEQ ID NO: 4141305 - RNA, 55 nt, Human
gaaagcugguuauucugaggcagcuggagaggcugcugaagggauuucagcauuc

SEQ ID NO: 4141306 - RNA, 93 nt, Human
gaaagcugucugagcuguggggcaggcagcgaggguuucuguagggaagccugccucucuccuccucgcccugacucagucuguccagcuuuu

SEQ ID NO: 4141307 - RNA, 59 nt, Human
gaaaggaccugaugggaaaggcgcucggccccgggccggggccagggucaggaccgguc

SEQ ID NO: 4141308 - RNA, 80 nt, Human
gaaaggaugggugagggaagaaagaauugaugcguuuugauauauccaacauauuuuuucuucccuuuuauucucuuuuc

SEQ ID NO: 4141309 - RNA, 75 nt, Human
gaaaggcauggauagugaauucagagcuuaucagugcugucucuuuuauuugaaauucauuguuuuauguguuuc

SEQ ID NO: 4141310 - RNA, 130 nt, Human
gaaaggccagcccagagccucacccuccucccucugucccuggcacugaccaggcacugacugccagguuuggcucacugguggaugcugggagggagggcaggcgggugguggcaccggcuggccgguc

SEQ ID NO: 4141311 - RNA, 115 nt, Human
gaaaggcuucgugacaaaaccaaggugcggagggccguugggagggcuugaaggaaaccccauuggucucugauuucacagcugucuuccgucucggucugcaacccugucuuuc

SEQ ID NO: 4141312 - RNA, 64 nt, Human
gaaaggcuucuuaagcuucacuuucagguugggaagagucuauuuuggagaugagaagccuuuu

SEQ ID NO: 4141313 - RNA, 89 nt, Human
gaaagggagccgaaauacuuaaaaucucaaacaaugcacaaaauccucuuuugugacuguggacuuuugugggguuuuugcuuuuuuuu

SEQ ID NO: 4141314 - RNA, 89 nt, Human
gaaagggagugacagaguuguugauguaugcuuuguaguuaucacuuuacgacaguuaccaaacagcagcagcuuuuuagcuaguuuuc

SEQ ID NO: 4141315 - RNA, 71 nt, Human
gaaagggcaaaggcaugcuucuacugucaguucccuucagcaucuggccugagccuucccucugcccuuuc

SEQ ID NO: 4141316 - RNA, 80 nt, Human
gaaagggccaagagucucacgggcuucuuacguguugcuggaugcucaggaggaggcugugaggacgaaggcauccuuuc

SEQ ID NO: 4141317 - RNA, 80 nt, Human
gaaaggggacaacuuuggaagugauagauaugaugaauacaacacauucugugaccuugcaaagaaaauagucacuuuuc

SEQ ID NO: 4141318 - RNA, 67 nt, Human
gaaaggggagcuucauuuugaccugggacagggaccuguaggucucagugucugagcuacuucuuuu

SEQ ID NO: 4141319 - RNA, 60 nt, Human
gaaagggugugcugcuaucccacuaccaaguuuccaggcagcuggcagugccaccuucuc

SEQ ID NO: 4141320 - RNA, 73 nt, Human
gaaagguccccaucuaagcugaugacaauuagaaguacuauuauuuucaagacguuaagucagcuuaccuuuc

SEQ ID NO: 4141321 - RNA, 63 nt, Human
gaaaggugcuaguuugcuuuccagcuuuagaaauagagucuacugaagauaacuggcucuuuc

SEQ ID NO: 4141322 - RNA, 81 nt, Human
gaaaggugguauaaaaauagcuguuuuuaggccaaauaagcauguugguuacuucugccuuagagaacacuacagcuuuuc

SEQ ID NO: 4141323 - RNA, 63 nt, Human
gaaaguaugccaucuaccucuuuauucuagaagaguuuauguagaauuggcaauaauucuuuc

SEQ ID NO: 4141324 - RNA, 70 nt, Human
gaaaguauggacagggcacaggcgcagagacaggucacucucuguguuucauucccguccugacacuuuc

SEQ ID NO: 4141325 - RNA, 91 nt, Human
gaaaguauuauguuuuuuacuguuacuuaacucaguguaauguuucaaauagcaauagcacagcaguggcauaaacaauagcaauauaguc

SEQ ID NO: 4141326 - RNA, 67 nt, Human
gaaaguccugugaucacauaguuugaugguauugcccuuuuauuccauccagcccacagugacuuuc

SEQ ID NO: 4141327 - RNA, 60 nt, Human
gaaagucuccagcaagucuuuggaagcccugggguuucaaagggaagacgcuggaauuuc

SEQ ID NO: 4141328 - RNA, 68 nt, Human
gaaagugggcaugucuucaggaguaaauaucauuucacugaaauguccuuccugagaucccuguuuuc

SEQ ID NO: 4141329 - RNA, 66 nt, Human
gaaaguguagagugccucaaaauacgcaauuuuccuugaauguuauuauggaguaccugcauuuuu

SEQ ID NO: 4141330 - RNA, 84 nt, Human
gaaaguguaugggaaagcccuugaguaguacaguuuaggccagagguagccccagaauucacagggcuuuccgcauggacuuuu

SEQ ID NO: 4141331 - RNA, 76 nt, Human
gaaaguuccuucuagcagcaccuacacgucagagccuacugugcucaugaagcuggggcucuaaacagguuuuuuu

SEQ ID NO: 4141332 - RNA, 71 nt, Human
gaaaguuguauggaagcaacagugcaugggcacaugggugcuagcaucuguucuuucauuaaacaauuuuu

SEQ ID NO: 4141333 - RNA, 79 nt, Human
gaaaguuuucauauauaccaaagaccgcacgaauuuucccaagugcuuauguugguacuuugugcucagaagacauuuc

SEQ ID NO: 4141334 - RNA, 104 nt, Human
gaaauaaaacagacagugcacuccaggugggauuuugcugcuugaaggaaucccuuagucaagcaaggaauccuuuuguaaaguaagugcucacuguggauuuc

SEQ ID NO: 4141335 - RNA, 72 nt, Human
gaaauaaaauguccaauuucugaggcugcuguuaaaccucaaaaaacaggcugcuucaauggauaagauuuu

SEQ ID NO: 4141336 - RNA, 62 nt, Human
gaaauaagaguccaugccagguucccuaucaacaugccugacuguggcauggacucuauuuc

SEQ ID NO: 4141337 - RNA, 110 nt, Human
gaaauacccuauuuguuugcacaauuuagcugauuuuugcccaaguauuuuuuugguuaauacuaaaacuguggagcaguggcuagggauaggcaaaaaggagguauuuc

SEQ ID NO: 4141338 - RNA, 69 nt, Human
gaaauacuggaaaacacuacuacaugcacgugcacaugcgcagcacuaguguucuucaguaauauuuuc

SEQ ID NO: 4141339 - RNA, 82 nt, Human
gaaauagaaacuuugucuuuuaugcuuacagacuguuuaguuuuucuguuuccaaaugguauaaagacagggaaaauguuuu

SEQ ID NO: 4141340 - RNA, 84 nt, Human
gaaauagaugguuauuaaggccucuuucaguugugacucguggaguuccacauugcuugucucugagccuccugcuucuauuuc

SEQ ID NO: 4141341 - RNA, 83 nt, Human
gaaauagguuauauugucagcugaucauauuaaaauguagaccuuuuauguucaucuggugcaucagucacgacaaccauuuc

SEQ ID NO: 4141342 - RNA, 64 nt, Human
gaaauagugcugucuuggguagaaagagguccccaaaggacaaucuuaaaacccaaauaguuuc

SEQ ID NO: 4141343 - RNA, 85 nt, Human
gaaauauacuaaaaaacauugaauugcacacuauacguguuuuaaauuagucgauuguaugguaugugauauauguguauauuuu

SEQ ID NO: 4141344 - RNA, 76 nt, Human
gaaauaugacuaugcagaacguuugugaaacuuuuaaguuuugugaaguugaauaaaaugaucuguauucacauuc

SEQ ID NO: 4141345 - RNA, 68 nt, Human
gaaauauuuguuauaggaucagugucacuuuauuuaaauguaaguguauuugccuauaaaaauguuuc

SEQ ID NO: 4141346 - RNA, 77 nt, Human
gaaaucaaagcaucagcagggccaugcucucucugaaggcuuuagagaaguauccuuccuugcugcuuccuaguuuc

SEQ ID NO: 4141347 - RNA, 82 nt, Human
gaaaucaguacaucaguuugaaauguuggcaauauucagacagaggaguguacuuccauuucaacugacaaauuugaguuuc

SEQ ID NO: 4141348 - RNA, 98 nt, Human
gaaaucaucuuaagugcauaucuucuuccucauuuauacauacaaagagcuguauggcaaugcauaggaaggaaauggcacaggaaaugaacauuuuc

SEQ ID NO: 4141349 - RNA, 87 nt, Human
gaaauccaauguguuuugugaaaugaagucacaacugggacucauaucccaguaaugcugccauuucucaaaauaucuuuagaauuc

SEQ ID NO: 4141350 - RNA, 96 nt, Human
gaaaucugaaguaauguauuaaaaagcagugacaaaaaugaagaacauguugcagucacucuguuuuacucacuguugaugcugcuucacucuuuc

SEQ ID NO: 4141351 - RNA, 85 nt, Human
gaaaucuuagcaugcucuucaaaugauuuccuuaggacacauuuccuaaaagugggauucauuggacagauuguaugcguauuuc

SEQ ID NO: 4141352 - RNA, 62 nt, Human
gaaaucuuccuucagugaagaagagguuuuuauguuauguuccuccuucuucagaagguuuc

SEQ ID NO: 4141353 - RNA, 67 nt, Human
gaaaugaaacaggcuuuuaaggcuugaaaaaaaggaaaauagaaggccaggggcaaauugucguuuc

SEQ ID NO: 4141354 - RNA, 129 nt, Human
gaaaugaagucuuuuaaauaaguuaucuuuuggguaguuauucugcacaccuuuaaaaugcauuuuacuuauuugugguggguggaguagaaagaugaauucuggagaaguugagaggaaaauaauuuc

SEQ ID NO: 4141355 - RNA, 74 nt, Human
gaccuaaggaaaaggauauauaugugcucuaggagugaauucuggugagaacguuuguauucuuuccuuuccuc

SEQ ID NO: 4141356 - RNA, 90 nt, Human
gaccuacggcacauccagcugugacucuaauuugcacaaaggcaccauaugugcuagcagcaguccaacugagguggcauaaugaagguc

SEQ ID NO: 4141357 - RNA, 95 nt, Human
gaccuagaaucauucuuauuucacagcaaccugugucuugacuaauguuaaacugacuaauuuguuuugaagcugagaaugagaaauuggagguc

SEQ ID NO: 4141358 - RNA, 65 nt, Human
gaccuauuuuuuucccugucuuauugaaaacaggauuuacaggacaaggggaagaagauaaaguc

SEQ ID NO: 4141359 - RNA, 68 nt, Human
gaccucaagucucuuaaugggcagaaaguguuacaaaauaugggcacuaggaagagauucuagagguu

SEQ ID NO: 4141360 - RNA, 79 nt, Human
gaccucaaguuggucuccuguagcaacaacuugggcagagccaauugagaagaguccaagcaguugccaggaugagguc

SEQ ID NO: 4141361 - RNA, 92 nt, Human
gaccucacugaagaggugacauuuaagcagcaauuugaaggagaacugcuuuuaggauuuuaagaacucuuuagugaauuuguuuaaucguc

SEQ ID NO: 4141362 - RNA, 77 nt, Human
gaccucaggauguacuacagaaggcaaucaucuauaggcauucuugcauuuggagccaucugguauuuccugacuuc

SEQ ID NO: 4141363 - RNA, 55 nt, Human
gaccucagugaauggucauguaaauggacaauuugcagaaauuccagcugggguu

SEQ ID NO: 4141364 - RNA, 130 nt, Human
gaccucaguuucuuuaucuguaaaacggggauaauuauggcaccuuauuauugcggguuucucauguggcguacuggcauguaguaggugcuauaaaagcauuugcuguugucaaaauuagauggggguc

SEQ ID NO: 4141365 - RNA, 60 nt, Human
gaccuccauucugucaugacugacaccaugguagucugucagcuugaccaguggagaguc

SEQ ID NO: 4141366 - RNA, 60 nt, Human
gcuuaaugggcuguggauuuaggaacuucaugucuccugaagcucuuaagaccuuuaagc

SEQ ID NO: 4141367 - RNA, 55 nt, Human
gcuuacauucauuaccucagugucugggcuuggcacaugguggugcuugauaagc

SEQ ID NO: 4141368 - RNA, 83 nt, Human
gcuuaccaaugauuucccauugcugcuuggaaugaaaacccaaugacacauuucaaaauuuugcagugguaaaucauguaggu

SEQ ID NO: 4141369 - RNA, 68 nt, Human
gcuucauuagaauugaagagagagaaaguggcccaucccgucacccuccucucucauuguaaugaagu

SEQ ID NO: 4141370 - RNA, 58 nt, Human
gcuucauuugagaaccucuguguuaacuccacaaagggggaaacaggcucagagaagc

SEQ ID NO: 4141371 - RNA, 70 nt, Human
gcuucauuugugcuucauggacuugaaguauuuuuggacuucaaacuugcgucaugucaugaaaugaagu

SEQ ID NO: 4141372 - RNA, 88 nt, Human
gcuuccaaaguacauaauaagugaugaugagucacucuaagccagguagucaccucacaucccuuauaaagugaacuuacaugucagu

SEQ ID NO: 4141373 - RNA, 90 nt, Human
gcuuccaaccugcugaaucaaaacaaagguuuacucugugagauaaauacacacauucuaaagccuuuugacagacagcuugcaugaagu

SEQ ID NO: 4141374 - RNA, 57 nt, Human
gcuuccaaugaugcaaggagcugccugcgcaacagugagcuccucaucacuggaggu

SEQ ID NO: 4141375 - RNA, 130 nt, Human
gcuuccagcggcagcacuccuguacuuagaagucuggcugaaguuuugcagagaguaaggaaaaucccauuugcuccaggcugcagacucugagcaguuuggcugcugagucuggguccuguccuggagc

SEQ ID NO: 4141376 - RNA, 66 nt, Human
gcuuccaguuuuaggacauguggauguaauuuuauaucguguuucucauguucguugacuuaaagc

SEQ ID NO: 4141377 - RNA, 64 nt, Human
gcuucccaggcgccugaccuuucugagcugcuggcaggagagggcagugggagucagggauggc

SEQ ID NO: 4141378 - RNA, 60 nt, Human
gcuucccuaggggccagguucuugcaaagggggaaggggccuguagagcuucagggacgc

SEQ ID NO: 4141379 - RNA, 76 nt, Human
gcuucccucccccagguaccaaacucugcuagcagacccacuacagauuugacugguaccuggccucacagggagc

SEQ ID NO: 4141380 - RNA, 71 nt, Human
gcuucccugcccagcggcuccaaccuccagccugggcacccagacccagagggcugcugggagggacaugc

SEQ ID NO: 4141381 - RNA, 56 nt, Human
gcuuccuauugcuggaaaaguuucugugauguuaucaccagagauagcaauagugc

SEQ ID NO: 4141382 - RNA, 80 nt, Human
gcuuccucaugugcagccccucacagagcuguccugaggcucagagaagcugacaggggcgugcaucuggaugacaaggc

SEQ ID NO: 4141383 - RNA, 79 nt, Human
gcuuccucauuugucuuucucauuugcugccaauggccacccacaccuggcacugggugggagaucugaaugagugggc

SEQ ID NO: 4141384 - RNA, 59 nt, Human
gcuuccuccagggaggggccugcuggacccaugccugcucagccccuccuggcaguggc

SEQ ID NO: 4141385 - RNA, 80 nt, Human
gcuuccugaaacagggcaaggcagcccgcugaaccacauuuguggaugugagggaggagcugcccugcguuuugggaggc

SEQ ID NO: 4141386 - RNA, 93 nt, Human
gcuuccugcgccuuugcaacgcuuugcuagcacugcgcuucccuuggcagcgccuggaagcggcgcuagcugagauuugcgaggccagcgggc

SEQ ID NO: 4141387 - RNA, 79 nt, Human
gcuuccugcuuucagcacccugguagagcccagucucaggacaggcaccacacuaggggcugacacugagggcaggagc

SEQ ID NO: 4141388 - RNA, 78 nt, Human
gcuuccugucccauagaaugcagcaggaaaguucccacaaucaagggggccucucuuagugcauuccaugcgggaagc

SEQ ID NO: 4141389 - RNA, 56 nt, Human
gcuuccuucuaccacaucaugcugcagaaaacacagcagaugggaagagacgaggc

SEQ ID NO: 4141390 - RNA, 72 nt, Human
gcuuccuugguccuggucuaaggccucucccaccucaccauacugagagaacuaagaacaagacuaggaagc

SEQ ID NO: 4141391 - RNA, 130 nt, Human
gcuuccuuuuaacucccuugaagacugaauguuucuuauaagaaugcuguuaggggauuugggaaaaggucuuaaaucucacuggguauauuggagugaugagauuucaaagggaaaaugagaagugggc

SEQ ID NO: 4141392 - RNA, 82 nt, Human
gcuucgccauaucucguucggggacacuuugggguuggggguuuucugcugacuguguuccagggcgcgaagguggugucgc

SEQ ID NO: 4141393 - RNA, 57 nt, Human
gcuucggguggcccaggucuuggccuuggccaggaaggcucccuggucacccugagu

SEQ ID NO: 4141394 - RNA, 70 nt, Human
gcuucuaaagagugacuguguagcuaugauucugaauuuuauagacaugcaacacuuuuuaccacauagc

SEQ ID NO: 4141395 - RNA, 70 nt, Human
gcuucuauaagacucauauuucuuuauauuugagaaaggaaagaaauauugggccuuauaaaccggaagc

SEQ ID NO: 4141396 - RNA, 56 nt, Human
gcuucucauccaccccagcuagucuagugacuggaguguuuggaggaugcaggagc

SEQ ID NO: 4141397 - RNA, 87 nt, Human
gcuucucauugggccucuggguuagucccuaagcagacagguugugauggaacuaggguuacccagagcuugcuuucugagaucagc

SEQ ID NO: 4141398 - RNA, 55 nt, Human
gcuucuccccaguaagccugcacuguggggucuccauaggaggagcuggggaagc

SEQ ID NO: 4141399 - RNA, 69 nt, Human
gcuucuccccuucucaaacugagacugucuaagcccagguuugaagcaucuggucugagaauuaguagc

SEQ ID NO: 4141400 - RNA, 70 nt, Human
gcuucucucauucaaauuaaagugaauggaagcccauucccuuagacuacuaauaugagcugggagaggu

SEQ ID NO: 4141401 - RNA, 63 nt, Human
gcuucucuggccugcagggcaucagggacccugcuguccugauccccaugccgucuagaaagc

SEQ ID NO: 4141402 - RNA, 76 nt, Human
gcuucucuugggguaugugggguugaaggaggagacacauucuuccaaacacccuccaugcugcaaaauggggagc

SEQ ID NO: 4141403 - RNA, 59 nt, Human
gcuucucuuguccaagggcagggaugaaaaggaggaauucuugcuugauauagagaagu

SEQ ID NO: 4141404 - RNA, 94 nt, Human
gcuucugaccacgugaucucaggcacugcuuucugauaugugaugcucaguccaugugucauaugugcagcacuugccauuacugcagagaggc

SEQ ID NO: 4141405 - RNA, 79 nt, Human
gcuucugaguggaguagugaaugcauuucauuuuaagaauuuagguuauuagugcauagcugcgaagcauuuuugaagc

SEQ ID NO: 4141406 - RNA, 87 nt, Human
gcuucugauaacaguagcuucaguugaggccugagaauuugcauuuuuaaguuuccaggugauucugaugcuauuggugcagauagc

SEQ ID NO: 4141407 - RNA, 62 nt, Human
gcuucugcaggguccucgcugucaacgaguggugguuaucuaauaggggucccugccgaagc

SEQ ID NO: 4141408 - RNA, 71 nt, Human
gcuucugcuucccgcaguggcacucucaucacauauauugguaaguauagaggugccaaggagaagcaggc

SEQ ID NO: 4141409 - RNA, 57 nt, Human
gcuucugggcacaaaauauugaugaaucacauuucagcaucacgugguccgagaagc

SEQ ID NO: 4141410 - RNA, 76 nt, Human
gcuucugucuuguaauugaagagcuguuccucauucaucuacaugggaacccagcacucuaagugcaagacacugc

SEQ ID NO: 4141411 - RNA, 57 nt, Human
gcuucuguggugcaucuuugcuuguggguggguuccagaugauggauuaacggaagu

SEQ ID NO: 4141412 - RNA, 71 nt, Human
gcuucuguucuucacauuuuggggucacggacucguuugagcaucugaugagucuugugaagaauggaugc

SEQ ID NO: 4141413 - RNA, 87 nt, Human
gcuucuguugcuuguguguccugagucaagugugggcaguccaguggcucugcugaucuuggcuaggcucacucacaggucaggggu

SEQ ID NO: 4141414 - RNA, 61 nt, Human
gcuucuuaggaguggguugagcugauagagaaaaaacggccuucagcccaggcugggaagc

SEQ ID NO: 4141415 - RNA, 92 nt, Human
gcuucuuauaauccaugccauguuacacuuaaagagaucaguaauauuuuaauugaaaauuuuguugagguaauugucaauuuagaugaagu

SEQ ID NO: 4141416 - RNA, 62 nt, Human
gcuucuucucuacauccuuugauugccaauccaagcaucauacuggguagagagaggcaagc

SEQ ID NO: 4141417 - RNA, 79 nt, Human
gcuucuuuauccaccugcagcuuucucugguuuaguaucagaguggcaaaaaaagcagcagcacguggaagagaucagc

SEQ ID NO: 4141418 - RNA, 123 nt, Human
gcuucuuuauuugcugaaacacaggucuuugguaugagcuguuuuuccugcaccuccuaauaaggugcaguguuuaaaaguagcaaucaaacacugauuugucaauauucuaaauagaguugc

SEQ ID NO: 4141419 - RNA, 60 nt, Human
gcuucuuucccaggcauguuuuagucuagaacugaguaguaauauuuugggaaaugaugu

SEQ ID NO: 4141420 - RNA, 58 nt, Human
gcuugaaagaugagucuaguaacugacuuuggucaguuacagugaccauuuauuuagc

SEQ ID NO: 4141421 - RNA, 65 nt, Human
gcuugaaagcugggaggcggagguuauggugagccgagaucacgccacugcacuccagcccaggc

SEQ ID NO: 4141422 - RNA, 83 nt, Human
gcuugaaauucuagaaacuugauuuagaacuaaggcugccaaggcagaacccuuaggauuuagacagguagccuagauuaggc

SEQ ID NO: 4141423 - RNA, 82 nt, Human
gcuugaagauaggccccugaauuaucauggaccuucuucuaggacagaagagagaggccaguuguucagugggccgucaagu

SEQ ID NO: 4141424 - RNA, 61 nt, Human
gcuugaagugaauugauaauauuaaauaaguaccuuggauauuuucagucuccuuucaagc

SEQ ID NO: 4141425 - RNA, 78 nt, Human
gcuugaauaggcaagggauacaauauaccguuucuuaaauugagugguauuauuaaguguauuugaccuauaucaggu

SEQ ID NO: 4141426 - RNA, 66 nt, Human
gcuugacuaauuauguuacuaaucacuugaagcaucuuccaugugacaauguaauuaugucagagu

SEQ ID NO: 4141427 - RNA, 55 nt, Human
gcuugagaacuucaacucaguguuuguucagaugcugauuugugaccucucgggc

SEQ ID NO: 4141428 - RNA, 72 nt, Human
gcuugagcccaagagguugaggcugcagugagccaugaucaugccacugcacuccaacuugggcuacagagc

SEQ ID NO: 4141429 - RNA, 72 nt, Human
gcuugagcccaggaauuggaggcugcagugagcuacgaucgugcuauugcacuccagccugagcaaaagagc

SEQ ID NO: 4141430 - RNA, 81 nt, Human
gcuugaggagcccuucagcccgcagcugcaccgugggagccccucucugugcuggcugaggccugagcgggcucccucugc

SEQ ID NO: 4141431 - RNA, 71 nt, Human
gcuugaguacuuuuguuuccauaauuaagugugaggcccuugucucaaugugaauuaagaauacuucaagc

SEQ ID NO: 4141432 - RNA, 58 nt, Human
gcuugaguuuugggacaaagccuuccguauuuccuuugcuugacuccaaagcccaggu

SEQ ID NO: 4141433 - RNA, 74 nt, Human
gcuugauuaauugccaagcuaaggcuagugaaugaaaguucaauuagaauuaugcuugcuaaugaaauccaagu

SEQ ID NO: 4141434 - RNA, 62 nt, Human
gcuugcauuucacaaauggccacaucauuuugucaaauuguggagccacuuggaaauugggc

SEQ ID NO: 4141435 - RNA, 73 nt, Human
gcuugccaaauauucaggcaccuauuaugugccaauaugaauagcacauaauagguaccugaauaauguaagu

SEQ ID NO: 4141436 - RNA, 89 nt, Human
gcuugcccagugggccacuggucgugugugucugcgggucagagagcuccaggccugagcagacagcaugauggucagcagagggaagc

SEQ ID NO: 4141437 - RNA, 62 nt, Human
gcuugcuaucguagcucccacagaugacguugucaccuagggccaaaggcugugaugcaggu

SEQ ID NO: 4141438 - RNA, 87 nt, Human
gcuugcuguugccaggugcguguguggguucucuggagaggccucucugaaggcauccucacugcaacucccucacacaggcaaagc

SEQ ID NO: 4141439 - RNA, 60 nt, Human
gcuagcccagguccugagcccagauggggaaacugucugggcaccuggccugggaagagc

SEQ ID NO: 4141440 - RNA, 63 nt, Human
gcuagccugacaguuucuugaaguccugucccucagagggcagcaaugcugugcaggcauggc

SEQ ID NO: 4141441 - RNA, 56 nt, Human
gcuagcugccaguaaaaagaugcagucccaggcuccagcucuuacuuugcagcagc

SEQ ID NO: 4141442 - RNA, 95 nt, Human
ggagcugggaggaggugcugacugccaggacugacgucuucagacugauucgucuaagcucggccagccccugcccugcuuccucuuccaccucc

SEQ ID NO: 4141443 - RNA, 101 nt, Human
ggagcugggcaagagccauccaugagagcgucugggucgguuaaggucccuuucuguacccucgcgauucuccucugaggccuaugucucuguccgucucc

SEQ ID NO: 4141444 - RNA, 69 nt, Human
ggagcugggccagaccuuguggucuugcggaaugaacugcaagggaggaguugugagcuggccugcucc

SEQ ID NO: 4141445 - RNA, 55 nt, Human
ggagcugggguuggcaucuucccggauggugaaguuggccugcagccugggcucc

SEQ ID NO: 4141446 - RNA, 63 nt, Human
ggagcuguuauggcauaagcaugucuucugaccagacagcuguaaaaaucccaagacagcuuu

SEQ ID NO: 4141447 - RNA, 68 nt, Human
ggagcuucugcgccaccuugugcuugugcccgcugggcgccagcagguuggugcgcagcgcgugcucc

SEQ ID NO: 4141448 - RNA, 69 nt, Human
ggagcuugcuacuaugccuggcuaauuuuuuaaguuuuuaguauguugccuaggcuggucuugaacucc

SEQ ID NO: 4141449 - RNA, 62 nt, Human
ggagcuuugcagggaccaaaagaggcaguauaauauagugguuaagcggcccugggaagucc

SEQ ID NO: 4141450 - RNA, 66 nt, Human
ggagcuuuggcgcccaccuucaggcucuggccaugccagacaucaugaagggcagccucaggcucc

SEQ ID NO: 4141451 - RNA, 58 nt, Human
ggagcuuuggugccaaguauuugguggaccucaccggaucacucuaaucaaagucucu

SEQ ID NO: 4141452 - RNA, 71 nt, Human
ggaggaaauuggaguagauauuguacaauugacaacaucacagcuguaaaauaauucuccauguuuucuuc

SEQ ID NO: 4141453 - RNA, 73 nt, Human
ggaggaagaacauuuggauuuguaaauuuaguguguuaaaaaaaucacuuaucacagauguuuggaaucuucc

SEQ ID NO: 4141454 - RNA, 94 nt, Human
ggaacuuuggugugccuauagccacuucuaaaauccgggcauuccuuccaaauccuguucacgguguguuguuaggacacaaauccagauuucc

SEQ ID NO: 4141455 - RNA, 70 nt, Human
ggaagaacagcaggaaggccagguaagggugggaucugccucugccugacucuccuugucugaaucuucc

SEQ ID NO: 4141456 - RNA, 69 nt, Human
ggaagaacuagacagagugaagacaagugggcuccccagcuccaucuccacgucacucugcuggcuucc

SEQ ID NO: 4141457 - RNA, 101 nt, Human
ggaagaaugaaauaagugguaucuuggucgauuagcuccaaaauccauaaaaggugagggcaaauuagaaucaaauuuuaaagaauuuauuucauuuuucc

SEQ ID NO: 4141458 - RNA, 79 nt, Human
ggaagaccugaugaccuugcuacuguucuuugcuagaguugguuugauuuuggcaaccuuggccagguacucagaaucc

SEQ ID NO: 4141459 - RNA, 80 nt, Human
ggaagacggagacuucgugguucagaugucuugagucucaggggcucaggggacagccagcuggagguuugugcucauuc

SEQ ID NO: 4141460 - RNA, 100 nt, Human
ggaagagaaguuaauucauuucccaaaguuagcauucucucuugcuuaaccuaagucaguagaaaagugugacauuggauugguaugaaauuuaucuucc

SEQ ID NO: 4141461 - RNA, 65 nt, Human
ggaagagagagugguugguguaugggguauuuaaccccagugcaccauuucccucuguuccuucc

SEQ ID NO: 4141462 - RNA, 64 nt, Human
ggaagagagguucagcccuaagauagauaugguaaauuggcuuggcuuguucaaucucuauucu

SEQ ID NO: 4141463 - RNA, 56 nt, Human
ggaagagauucuuuacauucauuuuacaguuaaugaagaguaagaggaccuuuucu

SEQ ID NO: 4141464 - RNA, 60 nt, Human
ggaagaggcagcgggugcaguauaugcuaaugaccauuagacuuuaucccuguuuuucuc

SEQ ID NO: 4141465 - RNA, 73 nt, Human
ggaagaggcucucauugagggcugagguccugggauacagaauugagugagaccugggugggaccccucuucc

SEQ ID NO: 4141466 - RNA, 58 nt, Human
ggaagaggguauugcaaggacuaggggggccauuuagaguccaggccugcccacuucc

SEQ ID NO: 4141467 - RNA, 89 nt, Human
ggaagaguaauucauagcccuccuuuguucaugcugccuuugagguauccauuagacauccaaggagaggcauggaguuacaagagucu

SEQ ID NO: 4141468 - RNA, 57 nt, Human
ggaagauacaucauuuauaccuucagaauuguguuugaggguggagagaguaucccc

SEQ ID NO: 4141469 - RNA, 102 nt, Human
ggaagaugacgugcuggagcuuuucuagagccgcagcccuauguuuuaguaagaaagaaaacauuacagauggaucuagcaaaauauuucacaauuuccucc

SEQ ID NO: 4141470 - RNA, 87 nt, Human
ggaagaugcugucaucuuaucauuguugcuguugacuugaauccaagguuauuguggacaguagauggcucagagacaggcauuucc

SEQ ID NO: 4141471 - RNA, 129 nt, Human
ggaagaugucuuaaacaaaggucaguggagcuaaaucgaaggccagugccuuuccagggcuccaggaaauuccaagcucaauuuaaggcuuggcuugagaaagcucacugagaaaaugugaauaucucc

SEQ ID NO: 4141472 - RNA, 55 nt, Human
ggaagauuuuccauuccucuuuccaaaggauaggaggguugaggaggauacuucu

SEQ ID NO: 4141473 - RNA, 60 nt, Human
ggaagcaagggugcugcuaucaggaagccugucuggucuggucauagcauccuugacucc

SEQ ID NO: 4141474 - RNA, 58 nt, Human
ggaagcaaguggccugauucagauaaucacuuucucugggagagucuaacuuguuucu

SEQ ID NO: 4141475 - RNA, 56 nt, Human
ggaagccaagguggccucuauuacaguuuggaauauuuugggaggccuugguuucc

SEQ ID NO: 4141476 - RNA, 96 nt, Human
ggaagccacuggcucuagggugcaggccccaggacacuaggccacccacuacagguccuggauucugcccugaaggcacccgguggcccaccuucc

SEQ ID NO: 4141477 - RNA, 76 nt, Human
ggaagcccaguuuguucucccgauucagucccaagcaucccaaaggacuucaacuucuggggagcaaagggccucc

SEQ ID NO: 4141478 - RNA, 57 nt, Human
ggaagccuagccuugcuguuguccaggcccuggagacacccacauugcugggugccc

SEQ ID NO: 4141479 - RNA, 85 nt, Human
ggaagccuuuccagguccuuugcaacugggugcccagcacugccuguggcacagggggcugaggacuaguguggaauuagcaucc

SEQ ID NO: 4141480 - RNA, 70 nt, Human
ggaagcggaaggcuugguuuuuucaacaccuucaagcguugguguuuuugaggagcugagcuugggcucc

SEQ ID NO: 4141481 - RNA, 74 nt, Human
ggaagcuggacaggcuuugaguuccccucuacccucccuacccaaagauggauacucauuccugcuguguuucc

SEQ ID NO: 4141482 - RNA, 57 nt, Human
ggaagcugguaauuguugggacccaggcugaguccuggagugaagcgacgaguuucc

SEQ ID NO: 4141483 - RNA, 70 nt, Human
ggaaggacccuggagacccacugggagaguacugaaauuuuccaggugagagaggcccagggucugagcc

SEQ ID NO: 4141484 - RNA, 96 nt, Human
ggaaggagaauugcuugaacccagcaggaggagguugcagugagccaagacugcgccacugcacuccagccugggugagagagcaagacucugucu

SEQ ID NO: 4141485 - RNA, 58 nt, Human
ggaaggagagagacaucgucccugguuuuaaugauaggcagugucucuuauccugucc

SEQ ID NO: 4141486 - RNA, 72 nt, Human
ggaaggagagggcgcccgagcucugcucccgggcuugcgccuggccuggaguggacuuggccccucacuucu

SEQ ID NO: 4141487 - RNA, 83 nt, Human
ggaaggagaugggagucucgggcagagcucugaggacagugguguugcucagggagcuuccugguggaaguccuucuccuucc

SEQ ID NO: 4141488 - RNA, 128 nt, Human
ggaaggagauuuccuuugcucucagaauaaguaccuggugagaucuuugcuugaaggauagagugaaagcauucaaaucuuuaauugaggaaucaugaaccauuacguucugggacuaggaacaagcc

SEQ ID NO: 4141489 - RNA, 59 nt, Human
ggaaggaucuggcugaaauccaagcucugggggaaguacagggaguggcagaucuuucu

SEQ ID NO: 4141490 - RNA, 63 nt, Human
ggaaggauggaugucaguacagagaggaaacacccuguuccucaguggggcauucauuauucu

SEQ ID NO: 4141491 - RNA, 64 nt, Human
ggaaggcaagugcuccuugggucuguuuggugucgucccugggccuggaauauacuuggcuuuc

SEQ ID NO: 4141492 - RNA, 59 nt, Human
ggaaggcagaguaacuauuucuaaaacucauuccaggaaacagguagcccuagccuucu

SEQ ID NO: 4141493 - RNA, 55 nt, Human
ggaaggcagugaaggggcugaucaagacuggcaagacuccaaaacacugucuucu

SEQ ID NO: 4141494 - RNA, 69 nt, Human
ggaaggcaguuaccgcaauggaggagcccguucucuggaguaucucuaaaucugguucacuugcugucc

SEQ ID NO: 4141495 - RNA, 69 nt, Human
ggaaggccuugccgaaggaugccacccaaccagcaucuaacggacauggcauuuuuggcaaugccuucu

SEQ ID NO: 4141496 - RNA, 59 nt, Human
ggaaggcuccacccaaggcgaggaagggaguugagggcucuccaggggaagagccuucc

SEQ ID NO: 4141497 - RNA, 58 nt, Human
ggaaggcuccauacacaaagcaaaagggcuacacuuugauuucugaauggaaccuuuc

SEQ ID NO: 4141498 - RNA, 95 nt, Human
ggaaggcuuccccacggacgaggggcaagccccucgacgucagggugucgucuauguagaggggaaucugccuccucucaaaggggaauucuuuc

SEQ ID NO: 4141499 - RNA, 123 nt, Human
ggaagggagacuccggaaaggaaaagcagaugacauuuuaucaaaucaguauugguauagaaugacauagauguuauaaugcauugagcuagaauggaaaauuuuauccuggagaacccuucu

SEQ ID NO: 4141500 - RNA, 70 nt, Human
ggaagggaggacucggagggugacagggagcagguguaccacccaccccacacccuacggccucaccucc

SEQ ID NO: 4141501 - RNA, 58 nt, Human
ggaagggaguaguuggaaugcauauaaguaagcaggcauuuacaaaacagucccuucc

SEQ ID NO: 4141502 - RNA, 79 nt, Human
ggaagggauguucugugguggucaggaauucuggacaacaccuucccagauucaggacuggccacagccccucuuuucu

SEQ ID NO: 4141503 - RNA, 70 nt, Human
ggaagggcugcagaagcagaugugaucugagccaaccugguuuuccuccucagucugccuucucccuucc

SEQ ID NO: 4141504 - RNA, 74 nt, Human
ggaagggcuugagacccgggagccagacugaagccaggguuggguucaagggggucucacugagagccgcuucc

SEQ ID NO: 4141505 - RNA, 55 nt, Human
ggaaggggccuugagcaaacugaguuugugaucauguuuaaucggcugccuuucc

SEQ ID NO: 4141506 - RNA, 78 nt, Human
ggaaggugaaauugcuaggaacagguugcacccccaagaggcagaggaugguugguaacucccugugcagugccuucc

SEQ ID NO: 4141507 - RNA, 56 nt, Human
ggaaggugcucccuggacagagguucuucucacccucagccuggccuggcccuucc

SEQ ID NO: 4141508 - RNA, 79 nt, Human
ggaaggugugagggagggagagggaaugucagcucuagaugugagaagacagacuucauauccuuccucugcgacuucc

SEQ ID NO: 4141509 - RNA, 64 nt, Human
ggaagguuuuccuagggaagcugacaagccagaucuuccucccagccucccacggauuccuucc

SEQ ID NO: 4141510 - RNA, 60 nt, Human
ggaagguuuuucuccugguggguugggcuuucuccaagcggaaaaugagaaaggcauucc

SEQ ID NO: 4141511 - RNA, 93 nt, Human
ggaaguaaggcuggaaaaaugugcuagagccagagugccuaagaccucaggugagaucagagaguuuggauuuuaggacaucuagugacuucc

SEQ ID NO: 4141512 - RNA, 56 nt, Human
ggaagucucacagacagaucagacucaacaggucugaaaugaacucuugaacuucu

SEQ ID NO: 4141513 - RNA, 59 nt, Human
ggaagugacaccaacucuuguuaauuaacccuuuugacauaaacagaaggugugcuucc

SEQ ID NO: 4141514 - RNA, 81 nt, Human
ggaagugcagauggcggcugggcucguucccacacgcgugcaugcaugugugcaggagggcgcggcugucaguucacuucc

SEQ ID NO: 4141515 - RNA, 99 nt, Human
ggaagugcccccguuguacccccuacacaccccucuuggcauugagugccaguccucugccaggcucuguguuacaaguuggggagggcggcaaagucc

SEQ ID NO: 4141516 - RNA, 118 nt, Human
ggaagugcucagcaaauaugucuagggugucaggagguagaagccuuucuuggcuguaagaagauggccaggagggugguuacucaaucucuguuagccauggugcacucagcagucc

SEQ ID NO: 4141517 - RNA, 68 nt, Human
ggaauaucaugcugacacaguuuaucuauguugaaaaaagauaggaauuugggguuacaugauguuuu

SEQ ID NO: 4141518 - RNA, 99 nt, Human
ggaauauguauaagguucuuucucucccaugaagcuucuauucagagggaggaagacuaaaaaggagacaaauaagcuaauacaucaaaaaauaauucc

SEQ ID NO: 4141519 - RNA, 68 nt, Human
ggaaucaagaagguucuauugagcccuggaguauuuccacaggcuuugccuggaauuuccuugguuuu

SEQ ID NO: 4141520 - RNA, 81 nt, Human
ggaaucaagccuaaggcaucaaaaacaguaauaaagugaauuuguagccauauugucuuuggugcuuccaggacaaagucu

SEQ ID NO: 4141521 - RNA, 77 nt, Human
ggaaucagaaagaucuugaugagaaauaaauauacguagaagcacuugcguuuucacuccuggaucaucugugcucc

SEQ ID NO: 4141522 - RNA, 63 nt, Human
ggaaucaucaucgguccaagauuguuagugaucugagaaauuucaugugcugaggaugaugcc

SEQ ID NO: 4141523 - RNA, 96 nt, Human
ggaaucaugguucugcauaucagaagaggaaaaugaagcacuuaagcuuagcucugggcugcuucagccuucgccgugcuaugcgagccccucucc

SEQ ID NO: 4141524 - RNA, 93 nt, Human
ggaauccccuuuguagguuucauaguuuauacugauauuucugaugucgucucagagaauuagucacaauuauaggaacucagaaggcauucc

SEQ ID NO: 4141525 - RNA, 62 nt, Human
ggaauccugugagggcugagaguuggagcucugccucugaaguggccuuuaaauaguauucc

SEQ ID NO: 4141526 - RNA, 66 nt, Human
ggaauccuuucauuuuuucucaucugugaagacaaaucuuccaguguuucuggcaaaugaaagucc

SEQ ID NO: 4141527 - RNA, 88 nt, Human
ggaaucuuacucugucacccaggcuggaguguaguggcacgauuucggcucacugcaaccucagccuccuggguucaagugauugucc

SEQ ID NO: 4141528 - RNA, 72 nt, Human
ggaaucuuucagagcuccaucagggagucaggaccuuccuuuucccugauguuuucucugccuuuggauucc

SEQ ID NO: 4141529 - RNA, 80 nt, Human
ggaaugaacaguggagacaagagaguuaaauaggguuugacucauuaaagucuccguaugcuggguuucaauuuuauucu

SEQ ID NO: 4141530 - RNA, 107 nt, Human
ggaaugaagaugaaauaagcucccgagaugagguaggggcaguguucuuaucuaagccuuagauacagaacaagccucaccuccugcuccagccuccccuucucucc

SEQ ID NO: 4141531 - RNA, 85 nt, Human
ggaaugaagggcuuggaagggauauuggcauaugaugcucuaaucguguucguacgucagcgucuccucucagcccuuaauuucc

SEQ ID NO: 4141532 - RNA, 65 nt, Human
ggaaugaauuuccagcugggucccuugucauaggagggcucgugguaccuucugggaaacauucc

SEQ ID NO: 4141533 - RNA, 73 nt, Human
ggaaugacuggcucugaaacuccugcaccuucuucagcuugaugcacagaggcaaguucagagcuaggaagcc

SEQ ID NO: 4141534 - RNA, 78 nt, Human
ggaaugagucaaugaaugaaugagaguaggucaggggagcuacccugaacaucucugcuuuauuuaggcuuugucucc

SEQ ID NO: 4141535 - RNA, 91 nt, Human
ggaaugauuguaugaaacuuuaggaaggaauuuacaugcuuuuuguuuaaaaccugugaauucuacuuccuuugaagagcuaacucauucc

SEQ ID NO: 4141536 - RNA, 130 nt, Human
ggaaugcaaacacucaaaccauagcaaggauggagagagauucagggcagauugugaagcaccuuggaauguggucuccagugaaucuccuccugguuccaugugugaguccugggagcaguuuguuucc

SEQ ID NO: 4141537 - RNA, 83 nt, Human
ggaaugcaggggaggggcauaguucaccaucacaugaauucaaauguagugaagguuuauuugugccuuucuccaucuccucc

SEQ ID NO: 4141538 - RNA, 90 nt, Human
ggaaugcccgccuggaagguggcggcugccagguccugggcuuugagcgcgugacaugguuugccgucccugaccaagacgggcacggcc

SEQ ID NO: 4141539 - RNA, 67 nt, Human
ggaaugccuaguaucuaagcagaccugcuuagcuggucuaacaagcauuaggaacccaagguauccc

SEQ ID NO: 4141540 - RNA, 129 nt, Human
ggaaugcucucccugcccuuucccaagguggaaacugaggcuuggaggggucuggucucugguuaacagauacccagccaggcuuccaggcuuccaaccccagcugggcugggggaggggguggcugac

SEQ ID NO: 4141541 - RNA, 60 nt, Human
ggaaugcugcuuuaaaaagugcugauugcaaauuaaucaacauuauuuacaagcaguucc

SEQ ID NO: 4141542 - RNA, 65 nt, Human
ggaauggacgucagcacugagggucauaaggccccugcucuauggcuuccaggcuggccagggcc

SEQ ID NO: 4141543 - RNA, 68 nt, Human
ggaauggaugaguccacguuuagggcagcuucagguguaggcugcugugcauggagggccguucaucu

SEQ ID NO: 4141544 - RNA, 86 nt, Human
ggaauggcugaugggaaguguggccucaacgggaugcaaugcugaauucagagcauagcagcuggggcuauucaucaguuaugccc

SEQ ID NO: 4141545 - RNA, 87 nt, Human
ggaaugguggaauuccaaacacuugcgacuagccaguagagagguuguucaagccugggcugauuuagucacguuuuuccccaaucc

SEQ ID NO: 4141546 - RNA, 68 nt, Human
ggaaugguggcucacgccuauaaucccagcacuuugggaggccaaggugggcggaucacuugaggucc

SEQ ID NO: 4141547 - RNA, 73 nt, Human
ggaaugguuauacucauuugacaacguuguugugaggaucugauggguuucucugcaacaugugucaaauucc

SEQ ID NO: 4141548 - RNA, 61 nt, Human
ggaauguaacgugaccaaguuccuacacgauaagaagugggaacgaugguauuuaaauucc

SEQ ID NO: 4141549 - RNA, 56 nt, Human
ggaauguagaaucucuggucucagcuuagagcuaccgaaaucagaaucugcauuuu

SEQ ID NO: 4141550 - RNA, 63 nt, Human
ggaauguaucggagcuuggggugggaccucagggcccacaucuaagccuucaugauaugcucc

SEQ ID NO: 4141551 - RNA, 62 nt, Human
ggaaugugcugacacgcgagagugguacuggauagccaguggaaaugcguggcauacguucc

SEQ ID NO: 4141552 - RNA, 56 nt, Human
ggaauuacagaguuguuaagucagcaaggugcugagaaaacaguuuguaauaaucc

SEQ ID NO: 4141553 - RNA, 84 nt, Human
ggaauuacuguuuuagacucaugcuucuuuuaacaagaaaacacuccaucaagaaggagcugagucagcccgacagcugaaucc

SEQ ID NO: 4141554 - RNA, 73 nt, Human
ggaauuauugcuaucuucauggaaauacagggaucauaggucgcuuguacugaaaugaaggugcuucuauuuc

SEQ ID NO: 4141555 - RNA, 60 nt, Human
ggaauucaagcuuuauguguuuuaaggaccucuuauuaucuuagcauagacuugaguccc

SEQ ID NO: 4141556 - RNA, 79 nt, Human
ggaauuccugaauuccaugauaguugucaauuuaaggcucugauuacuguuacauugcaaauucauggaucugaauucu

SEQ ID NO: 4141557 - RNA, 73 nt, Human
ggaauucucacauuuuaguaccaugauuuagaaucaggcuaaauuugucaagugucugaaagugagguuuuuc

SEQ ID NO: 4141558 - RNA, 77 nt, Human
ggaauucuuggauucauacagugauuucaugguguuauguguugugaaacauugcacuguaugaaucuggaauaucu

SEQ ID NO: 4141559 - RNA, 88 nt, Human
ggaauuguagaggucaggaagugcugaggcugcuucucugaaauggggcugaaagcagggcaggcacuccaagacucauacacauucu

SEQ ID NO: 4141560 - RNA, 99 nt, Human
ggaauuuguauuuuauccugaaguugacaaacuuugcaaaacuuacaguucuugaagacugaggucaugcauaguuucuacucccagaaaaugaauucc

SEQ ID NO: 4141561 - RNA, 85 nt, Human
ggaauuugucagggaugagagauggcacagauaauuuuuccuugaauagaaagaacaauucugcauuucuuauuccuuugauuuc

SEQ ID NO: 4141562 - RNA, 105 nt, Human
ggaauuuuaagaagacauugccucuguuucagauauauuuguacuuagcucuaaggcaacaaauugaggauagugaauuuaaguggggguaguagucuuaauucc

SEQ ID NO: 4141563 - RNA, 74 nt, Human
ggaauuuuugagaugggucuugcucuugucacccaggcuggagugcaguggcacgaucucagcucacugaaacc

SEQ ID NO: 4141564 - RNA, 79 nt, Human
ggacaaagcacaacaggagaaggcaaugcagcaucagaaaggcaguaucuguuggcuccuaguuguaccccacuugucc

SEQ ID NO: 4141565 - RNA, 66 nt, Human
ggacaaagcacaggacguagagcuuggaggccaagugccugccaugccuuuaccuggcuguggucu

SEQ ID NO: 4141566 - RNA, 79 nt, Human
ggacaaaggucaaucauggauccuggguaccagucaaaagaugagggaaggguacagaggaggggauuuuaauaugucu

SEQ ID NO: 4141567 - RNA, 57 nt, Human
ggacaaagugagaugggagucagaggagcaauguccucagcaaacacuucacucucc

SEQ ID NO: 4141568 - RNA, 65 nt, Human
ggacaagaaccacuagccacaguucaucacugagggcaccagacacugagguuagaugccuugcc

SEQ ID NO: 4141569 - RNA, 86 nt, Human
ggacaaggcagaaaggcaaugucauggcucuugcccucacacucuagggccuagacuggugugacaauguccaugcuuacaugucc

SEQ ID NO: 4141570 - RNA, 89 nt, Human
ggacaaguuucccgcccucccagaguuuguguucuaguggaagacacagagaauaaacaaaggacaaggaggugcaggagaugcugucu

SEQ ID NO: 4141571 - RNA, 130 nt, Human
ggacacagacauaaggggcggaguggcaaagggcuggugagccuggccuccugccucagccugcaggggcugcaggccuggccggccacuuccuggcugccucaccucgccagauccugugucucaguuc

SEQ ID NO: 4141572 - RNA, 72 nt, Human
ggacacagcccugcccugccauguggcagcugauuggagugguguugcuaugaaacagggagggcugcguuu

SEQ ID NO: 4141573 - RNA, 61 nt, Human
ggacacagggcucacucucucuccugcucccugggaggcggagaccagagcccugcuugcc

SEQ ID NO: 4141574 - RNA, 59 nt, Human
ggacacauaguugaugagcguguacgugucgcccacgagcaugaugacggcuguggccc

SEQ ID NO: 4141575 - RNA, 76 nt, Human
ggacagaagauggagcagaguagagaugccuuuaaauaacucagagggaagggcucuuuucugagcuucacugugc

SEQ ID NO: 4141576 - RNA, 69 nt, Human
ggaaccagcaggcagucaggggaaggccacuccuaggggccucuucucuguggccugguggugauuucc

SEQ ID NO: 4141577 - RNA, 79 nt, Human
ggaaccaggagccagcuagagagcucgagagagucugauugccugaggcauccucugagagcucuagauauccauuucu

SEQ ID NO: 4141578 - RNA, 80 nt, Human
ggaaccagguguuuucugcagacagagaggcuucauaagcacccuggggccagcucagaugcaggaaggacacuggcucc

SEQ ID NO: 4141579 - RNA, 82 nt, Human
ggaaccagguugaaauccugccauugccuugugcuugcuuuaugaucacagaagcaaaagcaggaucuuuauucugaguuuu

SEQ ID NO: 4141580 - RNA, 63 nt, Human
ggaaccaugcaggucuggagcuuggggagaaacuccccuacccuagagccugacuugcuaucc

SEQ ID NO: 4141581 - RNA, 103 nt, Human
ggaacccaaacaagaguccugucucacccugucaguugcaggauagguaucucagccuucuauagucacucuuagggcagaggaagguaccugucuggguucc

SEQ ID NO: 4141582 - RNA, 79 nt, Human
ggaacccacucacuguccaacaggcuuuacuaccugagaacaugaagcaggagagaagggcaggggcgaggugggggcc

SEQ ID NO: 4141583 - RNA, 69 nt, Human
ggaacccauucuuuuagcucugcaaggaaagcuagacuugggcuuuccauuguuggagcauaaaguucc

SEQ ID NO: 4141584 - RNA, 61 nt, Human
ggaaccccguucugaggaaacaggggugcuggucagccucuggcuccauccuuggggaucc

SEQ ID NO: 4141585 - RNA, 75 nt, Human
ggaacccucaaagcagcacauucgcaagcccgacguauaauuuggagcuuccauguaugcucuugacaucuuucc

SEQ ID NO: 4141586 - RNA, 81 nt, Human
ggaacccugggucucuggccaccccagccccauaguacuggcucagcaaguggcugagggauggccggggcucaggagucc

SEQ ID NO: 4141587 - RNA, 91 nt, Human
ggaaccgggaaggcacgaagucucuaaagcauccagaagaccccuacaccagggucugguccgcuccuauucgccgcagccuuucuguucc

SEQ ID NO: 4141588 - RNA, 79 nt, Human
ggaaccuaagcaagaaagcuauuauuauccuuagagcaguuacaugcuuugaagucaggcuuucuacccuuuaaauucc

SEQ ID NO: 4141589 - RNA, 120 nt, Human
ggagacuagauuagccauugucugcucuggugccuguuuuuuccaaagucauucuaguacagaguuacugcagagaugaauauggccuugggcaagucauuuagcuuuucuguacucucc

SEQ ID NO: 4141590 - RNA, 58 nt, Human
ggagacuggcuucugcauucaaccuauaguaauggagaguuagcagauuucugucucc

SEQ ID NO: 4141591 - RNA, 78 nt, Human
ggagacugggggcaaggugcagccuuuggaauuagagacuccaugcgauccuuccacuggcugccgcccccuuucucc

SEQ ID NO: 4141592 - RNA, 70 nt, Human
ggagacugugcggcugcaagagagaugaguaacuugcuccuuuguuuccuuccagcuugugacagucucc

SEQ ID NO: 4141593 - RNA, 78 nt, Human
ggagacuuuuaacuggggagcucaauuaugucaggcuaacaaaaccuguucauacaagcagccucuguagaggucucc

SEQ ID NO: 4141594 - RNA, 79 nt, Human
ggagagaaaugcuucagauuugggguauuacugugggaacacucucuaaaucuaaucuccaaaugugguaucucuuucc

SEQ ID NO: 4141595 - RNA, 108 nt, Human
ggagagaaggccaucaggccauauacagccagcugaauguaccaugacucauacugaaugggaucaggcauucagugggcugacugaagccguguauccuaucacucc

SEQ ID NO: 4141596 - RNA, 61 nt, Human
ggagagaauuccauggacaugugcuaauguuuuuguuagucuccuccauacaauucucucu

SEQ ID NO: 4141597 - RNA, 56 nt, Human
ggagagagcuguccuggauuguucauggagcagaaacagucuccccagaucucucc

SEQ ID NO: 4141598 - RNA, 77 nt, Human
ggagagaggagauauuuguauucugucucucuaaagcaacaaaaaagagaagaaagaucaaauaguuuccagucucu

SEQ ID NO: 4141599 - RNA, 90 nt, Human
ggagagagggcugaaacuguccuugaaaaaauggauuucucagugugauguguauacagugucccuuuuucagacauggcaccuucgucc

SEQ ID NO: 4141600 - RNA, 81 nt, Human
ggagagcaagggugggggacgcaggggcgagggggauccccacucccacgcaccccacugucccucaaccaaaacgcuccc

SEQ ID NO: 4141601 - RNA, 72 nt, Human
ggagagccagggauggcagugcccagcaagagccaggacuagcauggaguuuauucaucccuagggcucacc

SEQ ID NO: 4141602 - RNA, 69 nt, Human
ggagagcucauugcauuggaauuguauuguaauuuuccaaauaauauuugaacagucacugaguuaucc

SEQ ID NO: 4141603 - RNA, 61 nt, Human
ggagagcuuggaaauaaucauggagauaaucuugauguucuuuauauauucccaggcugcc

SEQ ID NO: 4141604 - RNA, 55 nt, Human
ggagaggagcagcucccccugcuacuggaggguugggaggaagcugcuucucucu

SEQ ID NO: 4141605 - RNA, 111 nt, Human
ggagaggagggggcaugaaggugaggcugggagccccacagagucagggcgccuuagcuuucggccugggcaggcucccacguuuagagccuggcuuugucccaucucucc

SEQ ID NO: 4141606 - RNA, 69 nt, Human
ggagaggaggugagaggaaguauccugacugagugacaaagcagcuccuccuccuuucaccccuucucu

SEQ ID NO: 4141607 - RNA, 86 nt, Human
ggagaggaggugcuucaaggccaugucaagcucuucaaggccaugugauguaggagggcuggauuuggucuuagguaacaggcucc

SEQ ID NO: 4141608 - RNA, 57 nt, Human
ggagaggauuaaucaagguuuugaugccacacagaccuggauuccaauccuaccucc

SEQ ID NO: 4141609 - RNA, 60 nt, Human
ggagaggcgaugagucacagccaagcgaacuuucucugcuccugaacaaauugcuucucc

SEQ ID NO: 4141610 - RNA, 86 nt, Human
ggagagggagcagggaggaugagggagggcacgcuuugaggcccccagagucugugcuaauuuauccuuccucucaaauugccucc

SEQ ID NO: 4141611 - RNA, 64 nt, Human
ggagagggcaggcagggccacaggagggagcagggcuguccugauggccucuggcuccagcucc

SEQ ID NO: 4141612 - RNA, 94 nt, Human
ggagagggcugcuggauggccuuuggugagaagaguaagcugaaagugauacuucaaagaacgucuuccagagccuccaucccuagcccugucc

SEQ ID NO: 4141613 - RNA, 58 nt, Human
ggagagggcuggaaacuuccugggcccaucaggccccaagacaguucaagugcucucc

SEQ ID NO: 4141614 - RNA, 85 nt, Human
ggagaggggcggguguccugggcaggcagcugacgggcaucccugucuucucccaucggccgcagggaagcagccgcucuugucc

SEQ ID NO: 4141615 - RNA, 61 nt, Human
ggagaggguagggguccugcccaccugcagucaccccucagccaggccucuuacccucucu

SEQ ID NO: 4141616 - RNA, 94 nt, Human
ggagagggucuccugcucguggcucagcuccccaugguuccugaagcgcacacgcgcccagcgccggcggcggcacgagugguaggucuucucc

SEQ ID NO: 4141617 - RNA, 66 nt, Human
ggagaguaacaaagugggagaaugauugcaaagaguauguuaucaugaguuggcuuugucaucacc

SEQ ID NO: 4141618 - RNA, 69 nt, Human
ggagaguagaaaguaaaguacgaaugguugacugaguacacacaucuauuuuauuaucuacugaacucc

SEQ ID NO: 4141619 - RNA, 55 nt, Human
ggagaguccggauauguaauaugcauuugauaaauauuagguauuauugcuuucc

SEQ ID NO: 4141620 - RNA, 118 nt, Human
ggagaguccuuaaucaggacaaggaugacaaccuucuaagcacaguguuuaccccaugcacacaugcacagaugggcuuguucauacauucauacacuguccuggucggguccucucc

SEQ ID NO: 4141621 - RNA, 67 nt, Human
ggagagucugcuggccacagugauggcacauucauggaaagcaugcaacugagccagugacuucucc

SEQ ID NO: 4141622 - RNA, 56 nt, Human
ggagagucuuucuccugcacugcccuucauccuguaggagcuggagaaaacuuucc

SEQ ID NO: 4141623 - RNA, 60 nt, Human
ggagaguguuuuugugaagauuuagagcaugucucuggaugaacacauguacacauuucu

SEQ ID NO: 4141624 - RNA, 109 nt, Human
ggagaguuauuauuugugcagauggugcagggacaggcucuggggaugggugugugugcaggucucccaucucuguccuugugcuuccauguggaguuucuaccucuuc

SEQ ID NO: 4141625 - RNA, 91 nt, Human
ggagaguucugaugaauacaauguucuacauauacauaacuguauccauuuguguuuugcagagcauugaaaucauauagcagcaucaucc

SEQ ID NO: 4141626 - RNA, 85 nt, Human
ggagauaaggaggugccucaagggcagggaguuugugucuagagggcugcacggcacagaccccagcccagucaccucaacugcc

SEQ ID NO: 4141627 - RNA, 62 nt, Human
ggagauaauccagggagggacucagcugagaacaguucccugccuucucuggaauugccucc

SEQ ID NO: 4141628 - RNA, 71 nt, Human
ggagauaggcagugagcagggugucaugagcuuguaauaugucagcuuggcuaggcugaacugccuuuucc

SEQ ID NO: 4141629 - RNA, 65 nt, Human
ggagauccacuguguuuguguugaggauucauuacacaugacucaguagaaaauacauggacuuu

SEQ ID NO: 4141630 - RNA, 56 nt, Human
ggagaucccuggggcaguggcucggaggcacgaccucuccuccucacagggacucc

SEQ ID NO: 4141631 - RNA, 71 nt, Human
ggagaugaaacaagagacaugaauacucgaaggugcagaucuuugaggugucaucucuguggcuagucucc

SEQ ID NO: 4141632 - RNA, 58 nt, Human
ggagaugaccaagccuuggucugcucucuagcagcuuccacagacuuggcucguggcc

SEQ ID NO: 4141633 - RNA, 56 nt, Human
ggagaugcacgagcagguggagcagcugaagcagagcauccaccgcgugcaccucu

SEQ ID NO: 4141634 - RNA, 77 nt, Human
ggagaugcagcggcccuggggaagagcaggcauggccacgggcugggcagcuccuuuaggcugcaaagggcaauucc

SEQ ID NO: 4141635 - RNA, 79 nt, Human
ggagaugcuguagagagcacaagcuucagagucacucaucccaaggugcaaaggagcuggguguuuauuugccaacucc

SEQ ID NO: 4141636 - RNA, 56 nt, Human
ggagauggcaagaaguuauuagguucugguuugaagcuugaacugauucuauuucc

SEQ ID NO: 4141637 - RNA, 72 nt, Human
ggagauggcucaggccagaccacgacuccgacaugagaauguggggguccugagaaggccuuggcauccucc

SEQ ID NO: 4141638 - RNA, 69 nt, Human
ggagauggggucuggcauaugguagauaaucaauguugguugacuaaauaaaagccaaacuucaucucc

SEQ ID NO: 4141639 - RNA, 55 nt, Human
ggagauggugugcccgcaggaagcccuuccaccuuccuaggcaugcugagucucc

SEQ ID NO: 4141640 - RNA, 86 nt, Human
ggagaugucauagauuuuugucuuaaguagauuacagccugagagcccuccaaguugucucuggaacuugagcuauaaacaucucc

SEQ ID NO: 4141641 - RNA, 72 nt, Human
ggagauguggccauuauccaguuaauuugaucauuguaacaaccagaacugauaauggacacauaaaaagcc

SEQ ID NO: 4141642 - RNA, 57 nt, Human
ggagauuggaagcuaaaugaagacagagucaaggaugucuuuguuaauuuuaucucc

SEQ ID NO: 4141643 - RNA, 90 nt, Human
ggagauuucugaacccuucuacuacuuauuuacuuauaugugcugauuguggguaaaaugaguuaggagaaaacuuggcuucagaucucu

SEQ ID NO: 4141644 - RNA, 56 nt, Human
ggagcaaagaugccucuugcuauauuuuagcaaagagacugguggcauuuugcccc

SEQ ID NO: 4141645 - RNA, 93 nt, Human
ggagcaacucugugcaucggaaucacccgggaucccagcaggucugggagggacugagauucugcucccaggugaugcugauacugcugcucc

SEQ ID NO: 4141646 - RNA, 60 nt, Human
ggagcaagagguggugaaaaauguuuauuuacucugcauuaguggcuaaccuccuguucc

SEQ ID NO: 4141647 - RNA, 94 nt, Human
ggagcaagccggccugugagagggcgaguguagacuccgggacagccugcccgguucaucucacagcucugcugcaugcugguucauuagcucc

SEQ ID NO: 4141648 - RNA, 62 nt, Human
ggagcaaggcugucagcacagccauggccaccagauggcaggcucagguuaccagucccucc

SEQ ID NO: 4141649 - RNA, 82 nt, Human
ggagcaagggcagcccuucugggagggcaugcugcuguucauaauaugagagugggguccugucaaggguuguuguuuuucc

SEQ ID NO: 4141650 - RNA, 74 nt, Human
ggagcacagcagcugcucaguugcuccuugaaggaccccacccugagagccugaaggcagcugcugucagcccc

SEQ ID NO: 4141651 - RNA, 83 nt, Human
ggagcaccaacauaauagcauuucuaauuuguaccauaauugcaugcagagaugaaauguuguugucuaucauaugcugcuuc

SEQ ID NO: 4141652 - RNA, 81 nt, Human
ggagcacuguaagaaguuggaaaugauugagagguuauaaaauugcccccuguucuucuuccaauauucuguugauguucc

SEQ ID NO: 4141653 - RNA, 80 nt, Human
ggagcagaacuacucuucuccauucauuuuacucucacaagagcuucaagagguaggauggguggagaugaucuaccucc

SEQ ID NO: 4141654 - RNA, 94 nt, Human
ggagcagaagaaagugcaaagggcuuuauaucaguguguuuacaguaugacacaauugacuguugucccuuauaucugcauuuccuuuuacuuu

SEQ ID NO: 4141655 - RNA, 65 nt, Human
ggagcagcaggccagguugcagguugaggaagucagaaguuaacuugagcugaguuugcagcucu

SEQ ID NO: 4141656 - RNA, 87 nt, Human
ggagcagcccggcuucugggacacccaaggaaagagcagggagggacccugacuccugcaaggguguucuaaggagcucuucucuuc

SEQ ID NO: 4141657 - RNA, 105 nt, Human
ggagcaggaaaccacugcugcaucucuuugcucuuuccuuggaaagaaacauuauuucacagaaagacaacagauaaaugcugaaugguugcuuuccccugcucu

SEQ ID NO: 4141658 - RNA, 73 nt, Human
gcuucauuauuuauguauguggauguguuuacacagugauuuucagaagcacaccuauuacauaaaugggggc

SEQ ID NO: 4141659 - RNA, 55 nt, Human
gcuuccaaagucauguugcugauauugaaaugucaauuccuugaccuuuggaugc

SEQ ID NO: 4141660 - RNA, 70 nt, Human
gcuuccacuuaguggauccuuguguaauauuuacuaauuaaaaauaaagaauauccaaaaagauggaagu

SEQ ID NO: 4141661 - RNA, 63 nt, Human
gcuuccagaccccagucccucaggaaaacaucauuaauccaugugggauucauuuggaucagc

SEQ ID NO: 4141662 - RNA, 95 nt, Human
gcuuccaguugagcaccugucacagcagcgcccgaccacaagagguuuacacuggcacuggccuccaagucggcugcagcuggauccgacugagc

SEQ ID NO: 4141663 - RNA, 64 nt, Human
gcuuccauacuaauaaaacagaaugcccacuuccugcauuuuauauggcacauugguuggaagu

SEQ ID NO: 4141664 - RNA, 100 nt, Human
ggagaagcuucacuucccggaaagcaugggaggccuggaggaggucuuuggcagguccccucucgggaaauccccugugaguugggagugggaggaauuc

SEQ ID NO: 4141665 - RNA, 57 nt, Human
ggagaaggaagaaagcuacuauggccaaggccauccucaguacucacucccauuucc

SEQ ID NO: 4141666 - RNA, 64 nt, Human
ggagaaggcgaagucauucuuugucagcuaacucaugggaagggaaaacagacuuucuuucucc

SEQ ID NO: 4141667 - RNA, 60 nt, Human
ggagaaggugcuggucacugugcguaagagugcuaacaacauucugucuguuccuuuucc

SEQ ID NO: 4141668 - RNA, 86 nt, Human
ggagaaucacucaaucccaggcggcacagguugcagugagccgagacugcagcauugcacuccagccugggcgacagcgagacucc

SEQ ID NO: 4141669 - RNA, 86 nt, Human
ggagaaucacuugaacccaagaggcggagguuguagugagcugagaucaugccacugcacuccagccuaggcaagagugagacucc

SEQ ID NO: 4141670 - RNA, 88 nt, Human
ggagaaucacuugaacccaggaggcagagguugcagugagcccagaucacaucacuguacuccagccugggugacagagugagauucc

SEQ ID NO: 4141671 - RNA, 87 nt, Human
ggagaaucacuugaacccaggagguggagguugcggugagccgagaucacaucacugcacuucacccugggugacagaggagacucc

SEQ ID NO: 4141672 - RNA, 88 nt, Human
ggagaaucacuugaaccugggaggcagagguugcagugagccgagaucgcaccauugcacucuagccugggugacagagugagacucc

SEQ ID NO: 4141673 - RNA, 88 nt, Human
ggagaaucgcucgaaccugagagguggauguuguagugagccgagauggcgccacugcacuucagccugggcgacagagcgagacucc

SEQ ID NO: 4141674 - RNA, 88 nt, Human
ggagaaucgcuugaacccaggaaguggagguugcaauaagccaagaucacaccacugcacuccagucugggugacagagugagacucc

SEQ ID NO: 4141675 - RNA, 87 nt, Human
ggagaaucgcuugaaccuggaggcagagguugcagugagcugagaucgcgccauuguacuccagccugggugacagggugagacucc

SEQ ID NO: 4141676 - RNA, 89 nt, Human
ggagaaucgcuugaaccugggaggcggagguugcagugaguugagaucacgccauugcacuccagcuagggcaagaaaagcgaaacucc

SEQ ID NO: 4141677 - RNA, 87 nt, Human
ggagaaucgcuugaaccugggaggcggagguuguagugagccaagauugcgccacugcacuccagccuagcaacagagagagacucc

SEQ ID NO: 4141678 - RNA, 89 nt, Human
ggagaaucucuugaacccgggagguggagguugcagugugccgagauggcgucacugcacuccagcuugggcaacaagagcaaaacucc

SEQ ID NO: 4141679 - RNA, 56 nt, Human
ggagaauggcaggcaguaucuaggaccucauuaaagggucuguccuuccauucuuc

SEQ ID NO: 4141680 - RNA, 87 nt, Human
ggagaauugcuugaacccaagaggcggagguugcagugagccgagauugcgccauugcacuccagccugggccacaggcaagauucc

SEQ ID NO: 4141681 - RNA, 89 nt, Human
ggagaauugcuugaacccaggaggcggaagguacagugagcugagaucacgccauugcacuccagcucugggcgacagagcaagacucc

SEQ ID NO: 4141682 - RNA, 88 nt, Human
ggagaauugcuugaacccuggaggcggagguugcagugagcugagaucgcgccauugcacuccagccuaggcaacagagcgagacucc

SEQ ID NO: 4141683 - RNA, 82 nt, Human
ggagaauugcuugagcccaggagagugcagugagucgagaucaugccacugcacuucagccugggugacagugugagacucu

SEQ ID NO: 4141684 - RNA, 67 nt, Human
ggagaauuuaggaaaggaacauugaaacguucuuuuauaacauuucaauguuuuuuccuugacaucu

SEQ ID NO: 4141685 - RNA, 63 nt, Human
ggagacaaaagagagcugaggagcuccagugcuucuggagggacuucugucuuuuuagucucu

SEQ ID NO: 4141686 - RNA, 67 nt, Human
ggagacaauguggacuuuauuuuagggaggacaauguugauuuuaaauuuagguccaaaauguuuuu

SEQ ID NO: 4141687 - RNA, 55 nt, Human
ggagacaugcagacugagauacuuuuaaagguuucaaaugaaucaguaugucucu

SEQ ID NO: 4141688 - RNA, 67 nt, Human
ggagacccagccuacaaagcucaccuuuaggguguuugaaaggcgagcgugauugucagggugggcc

SEQ ID NO: 4141689 - RNA, 68 nt, Human
ggagacggccguggcccgggcgcggcggccgccccucuggcugcucugccuggucgcgugcuggcucc

SEQ ID NO: 4141690 - RNA, 55 nt, Human
ggagacuacguugugaguagcaaugccuguaaaugguuacucacauuuagauucc

SEQ ID NO: 4141691 - RNA, 72 nt, Human
ggagacucaccccgcauucuaggccggagaagcgggcgggcuugggaugccggcaggaggcaaugacucucc

SEQ ID NO: 4141692 - RNA, 65 nt, Human
ggagacucggguucuagccuugugaacuuggaccacgaccuuggccucucugggacucggucucc

SEQ ID NO: 4141693 - RNA, 107 nt, Human
ggagacuucuuauggguauucuuauucacaauuaacuuuauacuuaaaugucuuaaggauagaugggugaggggugguugugacugcuggauaccauagaaaguucc

SEQ ID NO: 4141694 - RNA, 89 nt, Human
ggagacuugcuugaaucccuggggguggagguugcagugagcugagauggcaucacugcacuccagccugggcaacagagugagacucc

SEQ ID NO: 4141695 - RNA, 79 nt, Human
ggagacuuuguacucugcuuuagaauccaguagcucuaucagugugagcuguuuccauucuugaguagaaguuuucucc

SEQ ID NO: 4141696 - RNA, 63 nt, Human
ggagagaacagagcagacucucagcccuggaguuccuggggccaaggaggcucugugguuucc

SEQ ID NO: 4141697 - RNA, 82 nt, Human
ggagagaaggggagcacagacuuuggugaagagcugguuguucauggcaaaaacuaaguaguuuguuccucuuuuucuuucc

SEQ ID NO: 4141698 - RNA, 58 nt, Human
ggagagaaggguguagccugggcccuugugaaggaggcucaggcccugccuuugcucc

SEQ ID NO: 4141699 - RNA, 79 nt, Human
ggagagacaagagcauggugcuucagugaaggcguuucugugucugaauuaacugggguugccaugugucagucucuuc

SEQ ID NO: 4141700 - RNA, 66 nt, Human
ggagagaccuuuguuauucuaggagauugggagcguaacauucuaggcaggaacaaggguuugucc

SEQ ID NO: 4141701 - RNA, 67 nt, Human
ggagagagaggaacuagcagggauuuggaguuuauugauccaguggacugcugugauucccuccucc

SEQ ID NO: 4141702 - RNA, 70 nt, Human
ggagagaggacaugugccuggggcaccaggcccaggacagggcacugacugugcagcgcacccugucucc

SEQ ID NO: 4141703 - RNA, 100 nt, Human
ggagagaguguugguccccgauauccacauguggcugagucuugaagaucaaagucucugacuccuaugccccaugggccucagggaaacacuacugccc

SEQ ID NO: 4141704 - RNA, 58 nt, Human
ggagagcauugaggagagauucugaacuaguuguuuuauguuccucuuuaugcgaucc

SEQ ID NO: 4141705 - RNA, 58 nt, Human
ggagagcgugaaccuguccauagcuccccugggggaaguagggcucauuaugaucucc

SEQ ID NO: 4141706 - RNA, 91 nt, Human
ggagagcucugugaaguuggccaagggcaugcuuugagaaugauagauuuaacguuugcuuucuuuggccuggacguuucccagagucucc

SEQ ID NO: 4141707 - RNA, 66 nt, Human
ggagagcuguuuaucuucuucaaagcaauuuuuguugcuacguugugcaaguguagaugguuuucu

SEQ ID NO: 4141708 - RNA, 101 nt, Human
ggagaggaagcaggcaggugguauugacaagguggagucuuggaacuugguuuucuaucucauauguguucuagguaccauugcugcauaacaaccuuucc

SEQ ID NO: 4141709 - RNA, 69 nt, Human
ggagaggaaggcugugagcaggcagaaugcuggugucuggaccagcagucccacauggccguuugcucc

SEQ ID NO: 4141710 - RNA, 77 nt, Human
ggagaggaauuucccucccccagccuggcagggcucugaguagggcugagcugggaaggguagggcaacaccucucc

SEQ ID NO: 4141711 - RNA, 56 nt, Human
ggagaggacauggcucccacagaaaggcuggauauuuaaggagccuguuccucccc

SEQ ID NO: 4141712 - RNA, 65 nt, Human
ggagaggacuagaaaccucugcuucucaauacaucugugacaucagaggcuucaagucauucucc

SEQ ID NO: 4141713 - RNA, 65 nt, Human
ggagaggcagggaaggguaugggcaggaagcacuuggcuguuuguucccucucuuuccugacucc

SEQ ID NO: 4141714 - RNA, 66 nt, Human
ggagaggcucaggucucaggucuggcuacugaaacuggagguuuuuccugcugacuugggucuccu

SEQ ID NO: 4141715 - RNA, 118 nt, Human
ggagagggaauggggcgggcuccccuggccaagguucauucauagcagguuuuggaccccugcagaccagagggcugggaugugcugugugacugaggguaagucccucuaccucucu

SEQ ID NO: 4141716 - RNA, 69 nt, Human
ggagaggggauuuggacaucuccugggcccugagacccagcucucugggugugucuagauagaacuccc

SEQ ID NO: 4141717 - RNA, 56 nt, Human
ggauaggggcuggggagcccagaggucuugggcucagcaaugaugagccccugucu

SEQ ID NO: 4141718 - RNA, 75 nt, Human
ggauagguauacguuuagcuuuaugagacauugccagaccuuuuccaaagcaaauguaacauuuuuuaucugucc

SEQ ID NO: 4141719 - RNA, 81 nt, Human
ggauaucacuaguuugguuuacucuggggauaucugaaaaaucucuggaagacuuagaguagcaucaguuguaggucaucu

SEQ ID NO: 4141720 - RNA, 111 nt, Human
ggauaucucacaggauuuauguagaauuuuuaaggcagugaaacuauucuguacaauacgacaaugguggauacaugucauuauacauuugcgaaaauccauggaauaucc

SEQ ID NO: 4141721 - RNA, 85 nt, Human
ggauauguggugacagaugaagcuggggaccaggcccagccaguggaaccuggucaugccacucuaucugaucagcuaugauuuc

SEQ ID NO: 4141722 - RNA, 60 nt, Human
ggauauguugguaggaaagaaagcugggugacaacagcaacauuuuucaauuaacauccc

SEQ ID NO: 4141723 - RNA, 81 nt, Human
ggauauucaaagauuacugauaugcuuuuauucaaaagaaaaguguagaguaucacaugucccuaaucuuuaggauaguuc

SEQ ID NO: 4141724 - RNA, 62 nt, Human
ggauauuuauucucauaguuaugccucaagaaaagcuggcaagcuugaaucaauggauaucc

SEQ ID NO: 4141725 - RNA, 81 nt, Human
ggaucaaauggcaugcauauuuaaaaagcauuauuggcuugaccaaauuagcuuccaguaaguugcugccauuugcagucc

SEQ ID NO: 4141726 - RNA, 82 nt, Human
ggaucacaacggcagcccuugcgacacccuggcuggggaguuuuauuccugaggggguugcgcaggggcucccuuggacucc

SEQ ID NO: 4141727 - RNA, 91 nt, Human
ggaucaccacacaaauauucuggaggcaaagcagcaccuucuguuuuaacucgggccuccgguugauauuauguuagugcugggcugaucc

SEQ ID NO: 4141728 - RNA, 60 nt, Human
ggaucaccuguguaucucuguaugugcacacugcugcagggcacacgcacgggugugucu

SEQ ID NO: 4141729 - RNA, 75 nt, Human
ggaucagauuagucuuuugagaaguauaucuacagaauguuccugaguguauuaugcagcggaggucucaggucc

SEQ ID NO: 4141730 - RNA, 57 nt, Human
ggaucaggugggagcugcggaggccugggcacccccagcaucggcucccucugaccc

SEQ ID NO: 4141731 - RNA, 89 nt, Human
ggaucauauuugggucuaucaccuuucuggcaaugaggaaaguaaagcucaguggucagauuuauguggcuaggcucauugauguauuc

SEQ ID NO: 4141732 - RNA, 79 nt, Human
ggaucaugucaggcacagcugggcaauugcgguuccagaguaaagguccgucaaaguucucaguucaugucaaugauuu

SEQ ID NO: 4141733 - RNA, 97 nt, Human
ggaucauguuuagcugcaaugacugaauaugugauuaugacuuaaaacaacugcagcaaggaucagcaaggcaaucacugcagcuggacaagcaucc

SEQ ID NO: 4141734 - RNA, 56 nt, Human
ggauccacaggucauguaauguggaguucuucugggauccauuguccugaggaucc

SEQ ID NO: 4141735 - RNA, 66 nt, Human
ggaucccagcggcucccagggucugggaauggaguuacaguuuccuagggcagagccgcuggggcu

SEQ ID NO: 4141736 - RNA, 82 nt, Human
ggauccucggugcaggagaauagcugaugagcaugggcagagaccagugcacacacaggagucuccuccacccagagucucc

SEQ ID NO: 4141737 - RNA, 74 nt, Human
ggaucgggaguguagaaagcuuucugaaaguucucuucccuucuuagaacaccauucuauauuacccaugaucc

SEQ ID NO: 4141738 - RNA, 64 nt, Human
ggauugcaaaagccgaggcacuccagcuaggacacggcgucauuggagugcccuggugcguucc

SEQ ID NO: 4141739 - RNA, 107 nt, Human
ggauugcugagcgcgucuagagaaaguucacacauccacauggauuaauacuuugcaaauucauggauuccuaugugaacuuccuccucaggagcaucaagcaauuc

SEQ ID NO: 4141740 - RNA, 64 nt, Human
ggauuggauagucgaauuucagaagguagcauugccuagauucagaaaaagaccauugcaaucc

SEQ ID NO: 4141741 - RNA, 65 nt, Human
ggauuguggcaucaagauuuagauucauuccucuguuuguuggagucauugaagccaguauaucc

SEQ ID NO: 4141742 - RNA, 81 nt, Human
ggauuguuggagugacuuuaucugagcuaaguugccucacuuaaugugucuaaacaaucagauauagucauuuaaauaacc

SEQ ID NO: 4141743 - RNA, 64 nt, Human
ggauuuauuuuaaugcagccuggaaacacacaacuuuaaaucucugggcugcuuaaggagaucc

SEQ ID NO: 4141744 - RNA, 74 nt, Human
ggauuucgccagagccucuuaugaagaucgcaguucucggcagccugcgcuucucauccaggccuugggauucc

SEQ ID NO: 4141745 - RNA, 77 nt, Human
ggauuugucuucuuguguugccugucuuggucaucacuguucauccacuugcccaagcugagaucaagaagaccucc

SEQ ID NO: 4141746 - RNA, 77 nt, Human
ggauuuuagcaacuugccucaaaucauggaaguaaaaggugaagaacaccugaauuugaaugcagguagcugagucc

SEQ ID NO: 4141747 - RNA, 70 nt, Human
ggauuuuaguggcauguuguuaguguuucccauugaaguaaaauccuggcaaagacgcuagcuaagauuc

SEQ ID NO: 4141748 - RNA, 57 nt, Human
ggauuuucugauuugcauguaguaccugcacauauucauguaacauuagagaaaucc

SEQ ID NO: 4141749 - RNA, 80 nt, Human
ggauuuuuaagugguuuuaauguuguagauuuauagugaaaaaggcuaggaaucucaagcuguaaauaccucccaagucc

SEQ ID NO: 4141750 - RNA, 125 nt, Human
ggcaaaaauaggcagguuuuugauagcucucggggaaggagguacauucaaaacugcugcccuuucugaaauguucaagugucuuucucucuccaaguggcuucagaacacugaaaacugugacc

SEQ ID NO: 4141751 - RNA, 73 nt, Human
ggcaaacagacuugaccaucuucagacccacugcauucucaagcugaaguggucugcucauaguuugugugcc

SEQ ID NO: 4141752 - RNA, 56 nt, Human
ggcaaaccaguuucugcuuuuccuguucucguggcagcagggagcaucugguugcc

SEQ ID NO: 4141753 - RNA, 83 nt, Human
ggcaaacuccugggcaugggccaccccacugcccacgcugcccauggccaggcggggguccggggguccaagcucggagggcc

SEQ ID NO: 4141754 - RNA, 67 nt, Human
ggcaaagaauucacuugacauuugcauagcacuuuguauguguaacaucacagugauguuugaugcu

SEQ ID NO: 4141755 - RNA, 67 nt, Human
ggcaaagaauugaggguggccucuggauaacagccauugagggccagaaucccucagucuaauagcc

SEQ ID NO: 4141756 - RNA, 129 nt, Human
ggcaaagcacaggugagagagauugggguccagacccugcaggaugaguccccuugcccuugaugggccuggccuguggcaguggaggacccugugucugauccucacacccugcaccagugccacgcc

SEQ ID NO: 4141757 - RNA, 74 nt, Human
ggcaaauacaagccuuggaaauccauucugagucacaaaucucucucaagaagugggccaagguugcuguugcc

SEQ ID NO: 4141758 - RNA, 72 nt, Human
ggcaaauagauauagugaaagugauguguggguuucagacuuaggccucaagauucccugugugcuucugcc

SEQ ID NO: 4141759 - RNA, 64 nt, Human
ggcaaaucuggaagaacggggcaugcugaauuccuacucuguaacucaccuuucagguaaugcu

SEQ ID NO: 4141760 - RNA, 70 nt, Human
ggcaaaugaaucuagggagaggaagcaugaguuauuuaaugucaguuacuccuuuccuuagguuuuugcc

SEQ ID NO: 4141761 - RNA, 55 nt, Human
ggcaaauguacaaauauacuugucuucugagacaccaguguccuagucauuugcc

SEQ ID NO: 4141762 - RNA, 56 nt, Human
ggcaacaugaugucaaccaggauguagugaaccacacuaguuaaugucaugauguc

SEQ ID NO: 4141763 - RNA, 89 nt, Human
ggcaaccagagcugaugaaaguuacagauugggagcagagcuauuucuaguauuguuuggaggcuggaacagaucauaacucugcugcc

SEQ ID NO: 4141764 - RNA, 69 nt, Human
ggcaacgcuggggcuuuuugcuugagauacauagccaguuuucuccaggacugagcuccagccacagcc

SEQ ID NO: 4141765 - RNA, 129 nt, Human
ggcaacuauuuauuuaauuuggucaggcaaggcagucaaagcagacuucucuugcccaaaaauuuacaugaaaggacugaguugucuggguugacagccuagcuuggccaaguuaaacagcucauugcc

SEQ ID NO: 4141766 - RNA, 82 nt, Human
ggcaacugcuguucuacuuucugugucuuugaaauugacuaauuuagauaccucauguaaguggaaucagacaguauuugcc

SEQ ID NO: 4141767 - RNA, 72 nt, Human
ggcaacuuggaaaggagauucuauuguguguggucccugaaguggguaagccuacaagaauccccaguuguc

SEQ ID NO: 4141768 - RNA, 58 nt, Human
ggcaagaacaugcuucauggggacucccccgaccuggaauuuguguguguucaaugcc

SEQ ID NO: 4141769 - RNA, 80 nt, Human
ggcaagaagaaggaaauuuuacuaaucugagugugagguauagucauccugaaucacguucacuuuggaaaauucuuccc

SEQ ID NO: 4141770 - RNA, 57 nt, Human
ggcaagagggcagauggagugcagggagauggcgugacuuccaucuaucuucuuacu

SEQ ID NO: 4141771 - RNA, 77 nt, Human
ggcaagagguccaagaggucucagaugagccccaugugacucugggguucuuuaauggcgcucucugcauucuugcc

SEQ ID NO: 4141772 - RNA, 91 nt, Human
ggcaagcaccaguugagaauguauuuuugugugagcaggguguuaucaguaagguucaacauguucuacauaagggacuggaagcucugcc

SEQ ID NO: 4141773 - RNA, 84 nt, Human
ggcaagcacgugcccagagcaguguuuguggaccuggagcccacugugguugauagguccucgggcacuggauggcagcuuucc

SEQ ID NO: 4141774 - RNA, 56 nt, Human
ggagagguguauucagugggucuugcuauuaaggacagacuggacaugcucccuuc

SEQ ID NO: 4141775 - RNA, 93 nt, Human
ggagagugagcuguuacugaaaguggucaacaguggagggagcgugcacaugugcagucacuuuugaucccuaugcagucgcagucagucucu

SEQ ID NO: 4141776 - RNA, 109 nt, Human
ggagagugaggggguggcugcuccccugaggagcuccaucucugucccuagcugggccagguggggcgcccucaggcaggacagggcggaguggaccaggccucucucc

SEQ ID NO: 4141777 - RNA, 117 nt, Human
ggagaguuagaagaaaaagucacacugaggacacaugcuagaauaaaucuccaggggccccuccuggguuccuucuuagagugccucuuccugugugcugauuguuacuaauuuucu

SEQ ID NO: 4141778 - RNA, 61 nt, Human
ggagaguugauguuccaugacauucagacucuuaauugucagaggaucaucaaacguuuuc

SEQ ID NO: 4141779 - RNA, 80 nt, Human
ggagaguuucaagaaguaucuauauguauacucaugguugggguucuagaggcauuacaucuaaauauuuaugacuuuuc

SEQ ID NO: 4141780 - RNA, 112 nt, Human
ggagauaaauauuucaauaauuuucauugacaguuguuucaaauacguuuuauacuuuuucaacauguaacuuuugugaucugucgauuuuuguggaaauguuaaacucuuc

SEQ ID NO: 4141781 - RNA, 76 nt, Human
ggagauauauaggagaaagaguuuguugcugauguuauagaaucaccaaugcagcauugcacuuuuguucuuuucc

SEQ ID NO: 4141782 - RNA, 84 nt, Human
ggagaucucaagaaacuguagcaauggguagaauggugugauguuuuuaccaagaaauucguuacuuagauuuuuucccccucc

SEQ ID NO: 4141783 - RNA, 94 nt, Human
ggagaucugaucauggcugggcucauuugugugucugggaaucugccagggaucagaccaucuaggcugggcucagcaggguugguucaucucu

SEQ ID NO: 4141784 - RNA, 60 nt, Human
ggagaucuucacgcugcggucgcuggaacuagccucagcaucuucagcauggggaaagcc

SEQ ID NO: 4141785 - RNA, 87 nt, Human
ggagaugaggagggggccugagguuauccaucuaccugugauuugauggguagguuuaauuucaggauaaaauuccaacucaugucc

SEQ ID NO: 4141786 - RNA, 69 nt, Human
ggagaugagggaugccccagcugacagaggcccagcugggcuacugacucacuguggcucuuaaucucc

SEQ ID NO: 4141787 - RNA, 78 nt, Human
ggagaugagugagucagugggggugagugcuuagggauagaaauaaucuuuggaucgcucccccuuccacucuucuuc

SEQ ID NO: 4141788 - RNA, 72 nt, Human
ggagaugaguuggggguuccagggaggcaccacaguugccaaaguccucuugccucccuggcaagucucucc

SEQ ID NO: 4141789 - RNA, 64 nt, Human
ggagaugccagaauugcaaauuuucucugcugauuuguguccuacugauucuggcucgcuuucc

SEQ ID NO: 4141790 - RNA, 61 nt, Human
ggagauggccaaaaacacaaaugaguauaauucuaggcugccugugguaugugccaucucu

SEQ ID NO: 4141791 - RNA, 65 nt, Human
ggagaugggggaaaguacgagcauggccuugucgaccaucuccuggccuuuguuccccccacucc

SEQ ID NO: 4141792 - RNA, 121 nt, Human
ggagauuccugggccccagguggcggggggaaggguccagcaccucggcuccaggcaugugugccagaggaagccccagcugugggaucccauccguuccuggagcccagaacacuucucu

SEQ ID NO: 4141793 - RNA, 128 nt, Human
ggagauucuaucaggagcaaacagaauggguggaagggagaaaacuuguggcuuauuguaaaaguggccauguguuauuuucuucucucuauccaugaccuuugguagugccaucccacacugucucu

SEQ ID NO: 4141794 - RNA, 77 nt, Human
ggagauuggagggugaggggaagggagacgccaggguauuucuuccucugucucucugcccccauugcucuggcuuc

SEQ ID NO: 4141795 - RNA, 70 nt, Human
ggagauuggcauugcugcaccugagaaagcuuccaacacuuguggacucaugugcaaaaguccaaauucu

SEQ ID NO: 4141796 - RNA, 112 nt, Human
ggagcaaaaguuaaccuaagccuagguagaaccuucuuuacuagaguauuaggcauggguuguggcaacuauucuaaccaaagaggcuccacugagggcggguuggcaaucc

SEQ ID NO: 4141797 - RNA, 59 nt, Human
ggagcaaagagcacaagcacaaagaagaagccuucucugagccccugccucuuuccucc

SEQ ID NO: 4141798 - RNA, 63 nt, Human
ggagcacagaggaagcacagacucugccuacaaggcaaagagaaaggaugcugcucugugucc

SEQ ID NO: 4141799 - RNA, 91 nt, Human
ggagcacagugucaugaaggcuggccuguaacauugcuguagucacuuuuuaaguuuguucacaggggagccauuuauuuauucugagccc

SEQ ID NO: 4141800 - RNA, 60 nt, Human
ggagcacccugcucagccaagcaacccugaagucagaggccggccgagccaaggggcucc

SEQ ID NO: 4141801 - RNA, 69 nt, Human
ggagcaccucaauuugcuauuuggggguaccugaaaugaaaaauuccaaguacugaguugggaugcucu

SEQ ID NO: 4141802 - RNA, 65 nt, Human
ggagcacugauacgaguuugacuuuuucaagagcgcuugaauuccaaauuguguuugugagcucc

SEQ ID NO: 4141803 - RNA, 75 nt, Human
ggagcagccagaauuauugaaaagaauaaagaaggaaaauuccuuugguaguuuucuuaaagaucaaauagcucc

SEQ ID NO: 4141804 - RNA, 94 nt, Human
ggagcagccucaggaguugaaggggauccugucccucccagaggaaagcucacgauuggauuggaacuucuagcgacugccugaggugagcuuc

SEQ ID NO: 4141805 - RNA, 128 nt, Human
ggagcaggaaaugagcgguugcagccggcguggagcgggaagcuguucagugucaugggccuuaucugggaacaggcugcccaauuacagggccgugcccgcugcacccggcagcugccggcuccucc

SEQ ID NO: 4141806 - RNA, 55 nt, Human
ggagcaggcaggaggcuacuaagggucuucuuuaacaaaugacucuugucuuucc

SEQ ID NO: 4141807 - RNA, 99 nt, Human
ggagcaggccuugcccucagcauuggguuaccuuuguuuauguucacagaaagaaaagccagcccagagcccgagaccccccagcagaggccugauuuc

SEQ ID NO: 4141808 - RNA, 83 nt, Human
ggagcaggcugugacacaaugugcaggacaccugucagauuuccucuggagcaagcuguccaugccauuguucaagcugcucc

SEQ ID NO: 4141809 - RNA, 57 nt, Human
ggaauaguguuguucacucaggagguugcauucuaaaccaugugucaauacuguacc

SEQ ID NO: 4141810 - RNA, 77 nt, Human
ggaauauaacaguaggcaucacauaaugacucgauugcuuuucuaaucucaguugaaugcuuuauugggauauuacc

SEQ ID NO: 4141811 - RNA, 76 nt, Human
ggaauauggcugaauggaaaagacauugauccuaagagcuagcuuaggaaauauugauuucagucaccuaucuucc

SEQ ID NO: 4141812 - RNA, 64 nt, Human
ggaaucaauuuuugagauuugucagagaggguugcaaacuguuuaucaaauucucauugauuuc

SEQ ID NO: 4141813 - RNA, 88 nt, Human
ggaauccugucagcaauguaauaaagacuccucuguuacagaaagugagguaacagcuugggaugcuuuauuucaugaucaauguucc

SEQ ID NO: 4141814 - RNA, 83 nt, Human
ggaaucguaguugucuuaguguuuagggaaucaaggggucuucccagacccugugucugcacauuacucagcucucagauucc

SEQ ID NO: 4141815 - RNA, 56 nt, Human
ggaaucucaaguccauagaaucaggaaucauaguuccaaucccuggacuugaaucu

SEQ ID NO: 4141816 - RNA, 80 nt, Human
ggaaucugugcucuaugagauccuccucaccuguucagcucaaggagagaagcagguguagggcucuuuguacagacucu

SEQ ID NO: 4141817 - RNA, 73 nt, Human
ggaaucuucaggggcaauggagauaugacccagagagacuuuguuuaaugucuucauuccccaugaagucuuc

SEQ ID NO: 4141818 - RNA, 76 nt, Human
ggaaugagauacacacagggaauggagggaucaguacagcugaagugcagagccuagcccuuuccucucucauuuc

SEQ ID NO: 4141819 - RNA, 56 nt, Human
ggaaugagcucggagcagaagggucacaucuguuuccuuuucuuggguagcauucc

SEQ ID NO: 4141820 - RNA, 60 nt, Human
ggaaugaguauuucucuaugcuagcucucagcauggauagaugaaugcuuaaagauuucc

SEQ ID NO: 4141821 - RNA, 66 nt, Human
ggaaugauggagggugguaagacagagagaggccacuuccuuucuuugcaucccuuccauaguucc

SEQ ID NO: 4141822 - RNA, 102 nt, Human
ggaaugauuacguagcucuagggugacuucaaagauauccuaauacugucuagcacuuugaaaaaugguuuccuagauaccuaugaugaucgcaggcauucc

SEQ ID NO: 4141823 - RNA, 76 nt, Human
ggaaugauuauauguauaugugaaagauguuuauuaggucuccagauaguguuuaguacauaugcauauaauuucc

SEQ ID NO: 4141824 - RNA, 67 nt, Human
ggaaugauuggagaaaggaguguuauaggggucaagagccucugagaguccaucuccaagccauuuu

SEQ ID NO: 4141825 - RNA, 113 nt, Human
ggaaugcaggagagaaugacagggaggccggaagcagccaggcagugcaaauuccacauccagauggggcccugugccuggcauucugggcuucuugggguugccugggcucc

SEQ ID NO: 4141826 - RNA, 92 nt, Human
ggaaugcaugcuuuucucaaguuaagacacauaaaagaguuguccuggcccaggugagacucgccuuuguguagcagcuggagcuucauucc

SEQ ID NO: 4141827 - RNA, 56 nt, Human
ggaaugcugagauccucaggccagauacccccaguaucuguucaaaucuuaguucc

SEQ ID NO: 4141828 - RNA, 71 nt, Human
ggaaugggaaguggcuggucuuugcuaauagagggccaaauuccugcucaggaucagccaccucuuuuucc

SEQ ID NO: 4141829 - RNA, 63 nt, Human
ggaauggucaugugaugagauuuuggauaaugaaacccaagacaauauugcugugaacguucu

SEQ ID NO: 4141830 - RNA, 62 nt, Human
ggaaugguuuagcaagguguuuuuuccuuuguuuauaaggagagagauugcuaaaccacucc

SEQ ID NO: 4141831 - RNA, 129 nt, Human
ggaaugguuugaugccuuguguacuaguauguucagaacaggagcugcuuuggugcgguuugagucaugagucacucugacaaaaggcagcuuaugauauggauauguaagguguucucuuaguguuuu

SEQ ID NO: 4141832 - RNA, 61 nt, Human
ggaaugucccaccaggguaugacaggcuguagcuugccuggcaggccuguuggggcuuucc

SEQ ID NO: 4141833 - RNA, 73 nt, Human
ggaaugugcugcuucuccaaaguaggacuuaugaaaaaaugagggucccagcauaggggaagcaucaaugucc

SEQ ID NO: 4141834 - RNA, 58 nt, Human
ggaauguucuggucugguucaucuuggagccuuggagcucauggggaccaagcauucc

SEQ ID NO: 4141835 - RNA, 118 nt, Human
ggaauguuguaauagcacuuggaucggcuucaguaauuccauguccagaaauuucugaugcaucuggugucaaauuauugaguuucaucuccaagaagucgugcuauuaaaaaucucc

SEQ ID NO: 4141836 - RNA, 57 nt, Human
ggaauucaccagagguuagaauauuuuauaugaaauaaucuuacucugcuggacucu

SEQ ID NO: 4141837 - RNA, 112 nt, Human
ggaauucagaugagagucuuuggaagagugagggaugaagaacugcgggacaaaucugcugcugcgggaccucauccuauccuagggcucuucccugggacuuucugacgcc

SEQ ID NO: 4141838 - RNA, 80 nt, Human
ggaauucugggagucaggagggugacaggcccuggcaggugggggucuuggcuaguaccuuccugccagaacaggauucc

SEQ ID NO: 4141839 - RNA, 56 nt, Human
ggaauugaauugacauucaggugcaaacagccagccacugaacacaguacaauucc

SEQ ID NO: 4141840 - RNA, 74 nt, Human
ggaauugacagcagcagugucugaaucucccacacucuuuagagguuaggagaagagacugucacugcaguacc

SEQ ID NO: 4141841 - RNA, 76 nt, Human
ggaauuggaagcuggacucugccauuuacuugccgugugacccugagugaguggagagcucuagguuuuguuuucc

SEQ ID NO: 4141842 - RNA, 66 nt, Human
ggaauuuagauguuucucaacucuuuucucauucuaggaacugauaaguggggaauucugaggucc

SEQ ID NO: 4141843 - RNA, 58 nt, Human
ggaauuucacaccccaccccauccuacccuuaaggugcccuggagggguugaagggcc

SEQ ID NO: 4141844 - RNA, 84 nt, Human
ggaauuuccugaaccacaaugugaagaaggaggugcuccugauugggcuucuuuucucagcuuugugguuguuuaugagguucu

SEQ ID NO: 4141845 - RNA, 118 nt, Human
ggaauuuggauacuuuauggacaucagcaacaucgucacaugugauaaggauuucugaagggugauuacucuucaucccuuuaucaggaugucccugacaccauaggauccaaagguc

SEQ ID NO: 4141846 - RNA, 57 nt, Human
ggaauuuggguaccauguuuccauuuccuguuuuucagaaaaugcugcucaaauucc

SEQ ID NO: 4141847 - RNA, 130 nt, Human
ggaauuuugcucuuguuucccaggcuggagugcaauggcaugaucuuggcucccugcaaccucugccucucagguucaagccauucuccugccucagccucccaaguagcugggauuacaggcacacacc

SEQ ID NO: 4141848 - RNA, 63 nt, Human
ggacaaagggguacgaucuagcuggcaugaaacuggagggaaguuggcaaggccuguuuguuc

SEQ ID NO: 4141849 - RNA, 77 nt, Human
ggacaaaucuaggcucauccuggucccacaggaaguuuuaaagugugaauggcaccaggaucagucugucauuguuu

SEQ ID NO: 4141850 - RNA, 57 nt, Human
ggacaaaugagucccuguggugaccugugaccuuccaucaacaguacugguuugucc

SEQ ID NO: 4141851 - RNA, 61 nt, Human
ggacaagauuggugaagcugcuauccuaccuggcaguuuacaucuucaaucucauuguacc

SEQ ID NO: 4141852 - RNA, 63 nt, Human
ggacaagcauaagugagaugaauaaggugacuuuagccuugucuguuuuccccuguguugucc

SEQ ID NO: 4141853 - RNA, 110 nt, Human
ggacaaggggaaggcuaauggugucuuuuguucaccugauauauguagcuccuucugcuucuuauggguaauguguauagguugugcuaauagugccaugcuucccuucc

SEQ ID NO: 4141854 - RNA, 100 nt, Human
ggaucuaaacacucauuuuucuagguuuacaauacugcaugaaucacugcuaugcuacaguaacauuuaggaaaggaaaagauugaguauuuaaugaucu

SEQ ID NO: 4141855 - RNA, 98 nt, Human
ggaucuagggaccagcucuggggaccauggcaucuaaaccaagcuguucuccaggugugauugggucauggccccagaccucuggcuuucuuggaucc

SEQ ID NO: 4141856 - RNA, 61 nt, Human
ggaucucauucacuauaugcuuaaugucccucaucuauugaguguguucccugugagauuu

SEQ ID NO: 4141857 - RNA, 70 nt, Human
ggaucugcugugccucuuuucacgugucucccuaaaaaguccaugugucuccagaggcagagcuaaugcc

SEQ ID NO: 4141858 - RNA, 55 nt, Human
ggaucugggcucugccaaucagacuuggaguaagaagcagggacugcccaggucc

SEQ ID NO: 4141859 - RNA, 73 nt, Human
ggaucuggugggacagggacacuaucagaacugaggcucugucuugguggcugcucccugccuugaccuugcc

SEQ ID NO: 4141860 - RNA, 57 nt, Human
ggaucugucucugcaauuaguccugaugccaggucugccugcuggggagacagaucu

SEQ ID NO: 4141861 - RNA, 68 nt, Human
ggaucugucuuugagaucucagccugaauauguccucucauaaaggcccugagcauccgagggcaucc

SEQ ID NO: 4141862 - RNA, 94 nt, Human
ggaucuguucaagaagacuugaguugggugcuuacuauucuauguacuugggauaccaacaauagaauaaggcacagauucuuucaagggaccc

SEQ ID NO: 4141863 - RNA, 75 nt, Human
ggaucuuaggaguguuagcuaggaauggaaauuuguguucuuuuuuguuaucauuucagccauuuuuaaaugucc

SEQ ID NO: 4141864 - RNA, 57 nt, Human
ggaucuugauuucaacccagaggaucuuaaauguucucuggaacugaaacaagaucu

SEQ ID NO: 4141865 - RNA, 55 nt, Human
ggaucuugggccacaaugagccgaggagcugaggugacugggggcgccagggucu

SEQ ID NO: 4141866 - RNA, 72 nt, Human
ggaucuuugcucuuucuguccgcagggccugggaucucagccccaccccaagacaguagaagagaagggacc

SEQ ID NO: 4141867 - RNA, 72 nt, Human
ggaucuuuucccuggacuccaacuagggacuggagagcuuccugguaaauuauguccaggcaagugggauuu

SEQ ID NO: 4141868 - RNA, 67 nt, Human
ggaugaaaugucuaucuggcauauuccaccuugggucaggaauagccggcaucagucacaugcaucc

SEQ ID NO: 4141869 - RNA, 66 nt, Human
ggaugaagccagcaugaagacagaggccaaaaucuugaccaaaagaagucugaugcuggcucuucc

SEQ ID NO: 4141870 - RNA, 79 nt, Human
ggaugaaucagacccagcaggucccacugagggcccccguugaagaucagaggggucuggcagggccugugggacaucc

SEQ ID NO: 4141871 - RNA, 67 nt, Human
ggaugaaugaaggagugugggagucaugcgugcuggaagcacauaucuuucccucuccugaacaucc

SEQ ID NO: 4141872 - RNA, 95 nt, Human
ggaugacagggaacaguggggacuggagagcacauguuuuguccagugagggcauucccagugucuccagaugcuccaauuuuuccugggaagcc

SEQ ID NO: 4141873 - RNA, 60 nt, Human
ggaugacauuuaugugugugcuguuaugacuuugagaagcacagacuagaaaggucuuuc

SEQ ID NO: 4141874 - RNA, 121 nt, Human
ggaugagaaaagacuggcccacaacuugagugcauuguucacugugaaucuugauaauaacagguaucccucaucaagcacuucuacaugacaugcacugugcucggcuuaaaaaacaucu

SEQ ID NO: 4141875 - RNA, 67 nt, Human
ggaugagaaaauucauuccauccaggacaacguagggacuccauggaaaagggccuguuuuccaucc

SEQ ID NO: 4141876 - RNA, 65 nt, Human
ggaugagaacuuuguagacuugaugaacauugugaaauguaacauuagguagacauaagccauuc

SEQ ID NO: 4141877 - RNA, 70 nt, Human
ggaugagcgagucgggucggcccgggaguguuccgaacggagcuggcuccgccacgcccacuccuacccc

SEQ ID NO: 4141878 - RNA, 55 nt, Human
ggaugagcggcguugcaaagccaggcucuggcgugcguccugcaacuggcucucc

SEQ ID NO: 4141879 - RNA, 65 nt, Human
ggaugaggcaggaaguuauauaaugcuaauugaagaauucugcauuauaaguuccuuuuuggucc

SEQ ID NO: 4141880 - RNA, 55 nt, Human
ggaugaguguuuagaaaacacuggcauacaguaggugcucaauaaaugcucauuu

SEQ ID NO: 4141881 - RNA, 94 nt, Human
ggaugcaggggcagggaagggcagggucuaugcaccaacugccuuugugcagaaaaccuuuccuuucccccauaucaaacccucaacugcauuc

SEQ ID NO: 4141882 - RNA, 55 nt, Human
ggaugcaugugcauuuugaaaaaccuccccagguaauucugacugacaugcgucc

SEQ ID NO: 4141883 - RNA, 67 nt, Human
ggaugccaugcguuucuucuuuagcaaugauuaagaauaacugcagaggaaaugcaucugaccaucc

SEQ ID NO: 4141884 - RNA, 81 nt, Human
ggaucuguuucucugcuucguagaccagaaauuuaguuuuguagggugcucagagcugauuggauccagagagacugacuc

SEQ ID NO: 4141885 - RNA, 68 nt, Human
ggaucuugaggggauuggaaggaacaccccaguggcagucagaagagcuggguucuaaucucagaucu

SEQ ID NO: 4141886 - RNA, 64 nt, Human
ggaucuuuaauacagaagcaagacacugguaggcaaacaguacaugggucaugcucuguguucc

SEQ ID NO: 4141887 - RNA, 126 nt, Human
ggaugaaaugagucuacagagaauuuagggagcacugaagaugcgacuagugcuggggagacaguggacaagccccaucccauuuaaucuucaugccgucccuguagacgacaucuauuaccaucc

SEQ ID NO: 4141888 - RNA, 61 nt, Human
ggaugaagauggagcaagugccuguacaacauaggacuaaaaagaugcucucccuuuaucu

SEQ ID NO: 4141889 - RNA, 69 nt, Human
ggaugaaggcaccaaggaagaaucuauuugaggccgucuccggcccauucccacaugguggcuccaucc

SEQ ID NO: 4141890 - RNA, 70 nt, Human
ggaugacagaugcaggcuuugagagggaccaaaaggaacacucuccacugggguguggggucagucaucc

SEQ ID NO: 4141891 - RNA, 59 nt, Human
ggaugagcaaugaugcgcuguaauguacguaagugugcagcaagcaaguaugguucucc

SEQ ID NO: 4141892 - RNA, 56 nt, Human
ggaugaggaaaccacaguguccuuauugaaggagugacuuacugacuucuacaucc

SEQ ID NO: 4141893 - RNA, 76 nt, Human
ggaugaggccaaggagccugauuuaggauucuagacucuuguguuggaauuuuguauuagcuuugaggucuugucu

SEQ ID NO: 4141894 - RNA, 55 nt, Human
ggaugaguuaggggccugaguggaccccugucccucaccuagucuuugacucucu

SEQ ID NO: 4141895 - RNA, 57 nt, Human
ggaugaugagcugugguagcacgaugaucaauaacauuagcuucaaagccaucaacc

SEQ ID NO: 4141896 - RNA, 83 nt, Human
ggaugaugaggucuggcacucaugcagcaggaaaaggagcucucucuugaaccuguuggaguguagguacuuccagggcaucc

SEQ ID NO: 4141897 - RNA, 74 nt, Human
ggaugauuauggcccagguaccacaggauguggaguuucugggcucagcaucaugguaucuggggcccacgucc

SEQ ID NO: 4141898 - RNA, 67 nt, Human
ggaugauuugaggauuucaugaggccagaauuuccacacgcugucacauggaaucuucagagucacc

SEQ ID NO: 4141899 - RNA, 71 nt, Human
ggaugcaggcacagcuaagacuggccauaaccuauggagaguccuggccaaucagcugugaccugcugucc

SEQ ID NO: 4141900 - RNA, 65 nt, Human
ggaugcagggcuggcaggagcuuugucaggcucuguggacugaguaggcacuguugucuguaucc

SEQ ID NO: 4141901 - RNA, 70 nt, Human
ggaugcaggggcagcagagccugguggagacugcaaggauuuguggcucugagucugcccuuggcuagcc

SEQ ID NO: 4141902 - RNA, 64 nt, Human
ggaugccuggaggcccagcaggugcagcaggagccacuugcuuuacaagccugcuuccucaucc

SEQ ID NO: 4141903 - RNA, 56 nt, Human
ggaugccugucucagggucuguuucugauaaaccuacccuaagacagaguauuucc

SEQ ID NO: 4141904 - RNA, 57 nt, Human
ggaugccuuaauuuucuaagcugugcccaagguugcuuacuggaaauuaagggaucu

SEQ ID NO: 4141905 - RNA, 122 nt, Human
ggaugcgauuaaaaggaaaaauacaggaaggcaauuagaaacaaaauaguuauuugauuuuggugaacaguaaaaauuuuagcuaccaguguuuuuaaugaccacuugcuuuguaauugacc

SEQ ID NO: 4141906 - RNA, 67 nt, Human
ggaugcuaccuuuguaaaaucuaaaagcauaguguauaugguuucuggauucauacagauguagucc

SEQ ID NO: 4141907 - RNA, 77 nt, Human
ggaugcugcuuucugggaagaagugggcuacauuuucuaggcuaaaucuagccuuuugguucccaaguagcaacucc

SEQ ID NO: 4141908 - RNA, 84 nt, Human
ggaugcuuuauguucuggcauuuuugucuucuuuucugaagugaacauacaagauggcauacauuuccaaagcagaucaauucc

SEQ ID NO: 4141909 - RNA, 77 nt, Human
ggauggaagagggagggcaaaggcacugagcaggaauguguauggugucuccauccugcccugcccuccuccacucc

SEQ ID NO: 4141910 - RNA, 128 nt, Human
ggccaggcccaagggauugugaaagagcuccguccuuuauuuacuggauggccuugggcaccucacuucauuucucugaaccccaaugucaugucugugaaacgaggacucauagucuccacccggcc

SEQ ID NO: 4141911 - RNA, 56 nt, Human
ggccaggcuggccagcaccuucugaaauugcucucaggcagcuggaaggccuggcu

SEQ ID NO: 4141912 - RNA, 61 nt, Human
ggccaggcuggccucuacagggaggcaggacuccugcucccugcucagagaggccagggcc

SEQ ID NO: 4141913 - RNA, 93 nt, Human
ggccaggcuggucucaaacuccuaaccuugugauccacccaccuuggccucccaaagugcugugauuacaggcaugagccaccacgccuggcc

SEQ ID NO: 4141914 - RNA, 74 nt, Human
ggccagggagcucguuggguuaaccaggaugucaaugauuuuguacuugccauagaacaacaucucuuugagcc

SEQ ID NO: 4141915 - RNA, 59 nt, Human
ggccagggggcuucagacuccacuguacucugcauuccaggauucucuguucucuggcu

SEQ ID NO: 4141916 - RNA, 59 nt, Human
ggccagguaagagugcagccgccgcccacccgacgccaggccucgcuccccgccuggcc

SEQ ID NO: 4141917 - RNA, 81 nt, Human
ggccaggugagggcgaucacuccguuucucuauccaguuaccuuuguacguuagaaaagcaggagcucaauacaccuggcu

SEQ ID NO: 4141918 - RNA, 85 nt, Human
ggccagguugauggacuugagagaaucggaggagucccuccugccaugaccgagggagagcucaucaucugauuccucccuggcc

SEQ ID NO: 4141919 - RNA, 69 nt, Human
ggccaguaacugcaagaguaaaugucuagacuuaaaauauauuucuagauaagauuuuugggguggguc

SEQ ID NO: 4141920 - RNA, 60 nt, Human
ggccagucucauuuucuucuggguuaccaaggcuauaaacaagggagagugggaauggcc

SEQ ID NO: 4141921 - RNA, 86 nt, Human
ggccagugcagcaaagcgguugaaagugugcacuugaggaggcagcagagccugaguucaauuuccagcuguucuguuuacuggcc

SEQ ID NO: 4141922 - RNA, 84 nt, Human
ggccagugugaggacagacaggugugguaggcacaggugcagggcugcuggccucacucacucugaauggcagacucacaggcc

SEQ ID NO: 4141923 - RNA, 84 nt, Human
ggccaguguguaaauugucuuggcauucaaauuaggcuccuuaagauaggaccuagaaugaaaguuaaggcuuuaucguugguc

SEQ ID NO: 4141924 - RNA, 63 nt, Human
ggccauaacaugcagaaaucuuagcuacuuaacaucauuuuuaagagcucuuuuguuaugguc

SEQ ID NO: 4141925 - RNA, 59 nt, Human
ggccauagcagugacuaauaggauacaaucaccuuguucauucgcuauugucuauggcu

SEQ ID NO: 4141926 - RNA, 59 nt, Human
ggccauauuucuguaucagucuuggugagcugugcuguggcagaacagaggucauggcc

SEQ ID NO: 4141927 - RNA, 79 nt, Human
ggccauccaauuaauaaugcagcucugucgccauuaaacaauuuggcaguggugacugggacuggauaugaacaugguc

SEQ ID NO: 4141928 - RNA, 57 nt, Human
ggccaugcauccuuggacuuggcgcagguuuuugcuuggccucugagggugugugcu

SEQ ID NO: 4141929 - RNA, 63 nt, Human
ggccauguggaagcugugggucucuggaaaucagugucuccucagacccuguguccuguggcc

SEQ ID NO: 4141930 - RNA, 59 nt, Human
ggccauguucaaugaaucaggcuguugugcagagcagccugugugcuuuggacagggcu

SEQ ID NO: 4141931 - RNA, 71 nt, Human
ggccauuuauaaaaggaguauagugugacaagauuaaagauuacacaggcuggcucuuugagauacaggcc

SEQ ID NO: 4141932 - RNA, 75 nt, Human
ggccauuuucugcuuucagagugagacaaaguucaaaaugacagucugucagcucauugaaggcacaagauaccc

SEQ ID NO: 4141933 - RNA, 76 nt, Human
ggcccaacucagauucaagagaaggggaaauagacuccacuucuggagucuggcccuucuuuuaaagagaguggcc

SEQ ID NO: 4141934 - RNA, 59 nt, Human
ggcccaaggcccaggucgagcuccucguccucgucggagucugggagggguguugggcu

SEQ ID NO: 4141935 - RNA, 73 nt, Human
ggcccaccaaggcagcagacuguuaaucagacaaacagaucucugagaaggugcaucagcugcuuugaaggcu

SEQ ID NO: 4141936 - RNA, 64 nt, Human
ggcccagaaaaaggcuuagaauguguuucuggaagugguauaaaggaagccuuucuuuagggcc

SEQ ID NO: 4141937 - RNA, 69 nt, Human
ggcccagacaggaacacacaucucccuaaauucugacuaaaaggcguggugaacccugcucugucggcc

SEQ ID NO: 4141938 - RNA, 78 nt, Human
ggcccagagcugggcgggagggagacaggcagauagcagggaagaaugagccaucucuguccccucagcuggggugcc

SEQ ID NO: 4141939 - RNA, 65 nt, Human
ggcccagcacagugcuugggggccggcggcucccagcucccgggccgcccugcugcacaaaggcc

SEQ ID NO: 4141940 - RNA, 72 nt, Human
ggcccaggagggggcuagcuaagugccugagauguucaaaguuaccaucauaacagcuaagucccuuucucc

SEQ ID NO: 4141941 - RNA, 64 nt, Human
ggcccaggccucugagcagcacucaugggucacuuuacucauuguggaucacagagccugggcu

SEQ ID NO: 4141942 - RNA, 60 nt, Human
ggcccaggcuggagugcaguggugugaucauagcucaccacagccuccaucuccugggcu

SEQ ID NO: 4141943 - RNA, 67 nt, Human
ggcccagguagguauaaugcacuuccgguccaugaugccacagguguccaauaccugcuuccuggcc

SEQ ID NO: 4141944 - RNA, 129 nt, Human
ggcccaguagaugcagacaaucuugggugaaagugggaccggagcugccggcccacaguacuacuugugagaaguagcaccauacccggcagcucgagacucacauucaccacauuguggguggggggc

SEQ ID NO: 4141945 - RNA, 78 nt, Human
ggcccauccugcccucuaggcuacaguuccagcgcucacgacggagcuggaacucaggauggaacucaggaugggacu

SEQ ID NO: 4141946 - RNA, 81 nt, Human
ggccccaaaaugauugucaaaguucuguucacuuaaauucacuguaauuaguaagaauaguuaucauuuauuuugggugcc

SEQ ID NO: 4141947 - RNA, 74 nt, Human
ggccccagggaagaagguggucucuucagaucccacaguaugagccagcuucaaccaucucccugacuuggguc

SEQ ID NO: 4141948 - RNA, 57 nt, Human
ggccccagguagaagauauagaagcaaaggggauacuucugugauuucugugggguc

SEQ ID NO: 4141949 - RNA, 58 nt, Human
ggccccaggugagcuuuauuuggccgugaagcugaauguacaggcuggcuauggggcc

SEQ ID NO: 4141950 - RNA, 67 nt, Human
ggccccaggugaggggagcuagcaugccuugggauauacauucagcuggaagcgccucucaacugcc

SEQ ID NO: 4141951 - RNA, 68 nt, Human
ggcccccacagaagaaagcuacacauagaguggaaauccuguguuuacuggcuccugugguucaggcc

SEQ ID NO: 4141952 - RNA, 74 nt, Human
ggcccccaccuggggcucucuggaaugcuuguggucaggcccacagggggcugcugaggcccggguguggggcu

SEQ ID NO: 4141953 - RNA, 58 nt, Human
ggcccccacucuccagcacaccccauuucucugaaagggccaauggagagugugggcc

SEQ ID NO: 4141954 - RNA, 64 nt, Human
ggcccccgcgcggccggaggcucggggccgcagcagccagugccucugcucugcguuggggacu

SEQ ID NO: 4141955 - RNA, 57 nt, Human
ggcccccugcuugcuuuggggucugaguuagcuccuggcuccacugagcaggccguc

SEQ ID NO: 4141956 - RNA, 65 nt, Human
ggccccuccccacagcccaggagacuucacuaauagaugaagauccuggggucuggggaggagcc

SEQ ID NO: 4141957 - RNA, 124 nt, Human
ggccccugagaucagagguggugccuccucugugugcuggugggguccugggcucuagccacagaagcaccugucagcuacauguuggugagaugguuuuauggcaccuggcucagcgcgggcc

SEQ ID NO: 4141958 - RNA, 75 nt, Human
ggccccugagugaggugaagaguggagcucaggaccuuugguccugaguuagugaguucacuaacaaguggagcc

SEQ ID NO: 4141959 - RNA, 56 nt, Human
ggccccugcagaccaaugccauagaguuuccucgugucaauuuucugguaggagcc

SEQ ID NO: 4141960 - RNA, 77 nt, Human
ggccccugcgaggggucacaugggcuggcuuauuuggagaacaaaguuagauaacucaugugaucccacagagggcc

SEQ ID NO: 4141961 - RNA, 80 nt, Human
gcagggguugaaacagaguggauacagugaguauauuuuauaucacguuuguucaucgauuuuauuuugacuuucccugu

SEQ ID NO: 4141962 - RNA, 64 nt, Human
gcagggucaggagaagggugcggcagauggagaaucuguaucacccguucccagaacgucccgc

SEQ ID NO: 4141963 - RNA, 63 nt, Human
gccaugccuggcuaauuuuuuucuguuuuacagacggagucuugcuauguugcccaggcuggu

SEQ ID NO: 4141964 - RNA, 92 nt, Human
gccaugcuuuugaucaaagcugauacucagcaaguauccugggugugauuguacuaguuacuuguugcuaaugucucuucugauagcuuggc

SEQ ID NO: 4141965 - RNA, 104 nt, Human
gccauggagaguccuagggaguaaaugaugcuacaguuuucccaucuggaagaagguggggugagcuuuagguaaacauaagacacuuauuggcucuaaguggc

SEQ ID NO: 4141966 - RNA, 60 nt, Human
gccauggagucuacaaaguguuggaaccuccagagguucuaggaagaaaggccccauggc

SEQ ID NO: 4141967 - RNA, 72 nt, Human
gccauggcuucuuucucugccagaccacguagcacuggcugguucuguauuugagaauguagaggucaaggc

SEQ ID NO: 4141968 - RNA, 60 nt, Human
gccauggggucacauggagagagaaagcaaaccaacuuucagagcucuaggcucucaggc

SEQ ID NO: 4141969 - RNA, 77 nt, Human
gccaugugacuuuacaguuccucucguggaggugaaauguacuuucacuccacugauguugaauuuagucauguggu

SEQ ID NO: 4141970 - RNA, 57 nt, Human
gccauguuggaacuucacauucuacagucucacuguggagauuauccugggcauggc

SEQ ID NO: 4141971 - RNA, 85 nt, Human
gccauuaaguuucaacaugcaaacuuugggagacauauucagaccauagcuguccucaaaguucauucauguuguugcauauggu

SEQ ID NO: 4141972 - RNA, 98 nt, Human
gccauuagggaucugugggccucuugaggguggcuaugagaaucaggccagggugagggucugugggcaucuauggggcaccgcgggucugcaugggc

SEQ ID NO: 4141973 - RNA, 61 nt, Human
gccauuauccauuuugagucuuaccgcaacucuuguggggucaggcaagacuggugguggc

SEQ ID NO: 4141974 - RNA, 73 nt, Human
gccauugaugcauucauucauucauuagguauguaguauguacugcugagcuggguagaaggaauacaauggu

SEQ ID NO: 4141975 - RNA, 72 nt, Human
gccauugcuggcucucucuccuggguaguccaaggaauccgugagaccacuggggugagggccaucgguggc

SEQ ID NO: 4141976 - RNA, 89 nt, Human
gccauuggcauugguagcaucacugaggaguaauaucugugugggcaguuagggagugcuugucaggauaagcucuggcugcugguggu

SEQ ID NO: 4141977 - RNA, 60 nt, Human
gccauuguuuuaguagguacacugaggccaggaaggucuuguugccaagagaauagaagc

SEQ ID NO: 4141978 - RNA, 67 nt, Human
gccauuuaggggaagaccuggcacuacagcccggagguccuggguucuuuugugguuuuccccgugc

SEQ ID NO: 4141979 - RNA, 83 nt, Human
gccauuuucuucagccuucacaaccugaaaaucuuucacucaauccagaaaggauaggaaugagagggugaggauuugugagc

SEQ ID NO: 4141980 - RNA, 70 nt, Human
gccauuuugcuucaguagcucuuuaaagcuacuuaaaguuguuuuaaaggggcuuugagugucuaguggc

SEQ ID NO: 4141981 - RNA, 60 nt, Human
gcccaaaauuguugaugcugcuuugcgggcaugcagacgguuaaacgauuuugcuagugc

SEQ ID NO: 4141982 - RNA, 68 nt, Human
gcccaaaggguggcacaggugcagagggucgcgggcccgccaaggacagcugcaccuggccgccuggc

SEQ ID NO: 4141983 - RNA, 101 nt, Human
gcccaaaugauugcuaacugauacaaugaccauauuauguaagaguagagaaguaguuuuauaaacagaaauggcauccuggaucaauaggaauuaagggc

SEQ ID NO: 4141984 - RNA, 108 nt, Human
gcccaacaaacugccccaggauguuucuuccaugaguagcaguauuuccuguuucuccucucaccuugcaggacaugcugugacugauguucccuggggacaugaggc

SEQ ID NO: 4141985 - RNA, 57 nt, Human
gcccaacagguaaacuuaaaauagggaguuaccaccugcuugcuuugucugaugggc

SEQ ID NO: 4141986 - RNA, 60 nt, Human
gcccaagaucacauuaauaaugaaucuaguauuuauacacaagaaaugugauucuagggc

SEQ ID NO: 4141987 - RNA, 117 nt, Human
gcccaagaugcccgagguggccgaaguccaggcugugcgcaccguguggggacugcuggggggcagggaucgcccgugugugguggccaugguguucggcacugggggugugugggu

SEQ ID NO: 4141988 - RNA, 87 nt, Human
gcccaaggcuuggguugugcagucagacugccugggcucaaacucugagacugaggccugcuugcuguguaaccuugagccaagggc

SEQ ID NO: 4141989 - RNA, 128 nt, Human
gcccaagggugucucugaucagggagcaauuucagggaagccugggugauccuaaagucaccucccaguucaaagauguauuuaggauaacuccaguuuucccuagaaacucuucaguacucuuuugc

SEQ ID NO: 4141990 - RNA, 55 nt, Human
gcccaagguauaucagagacaguagaucaacaagucaacugguagacuuuugggc

SEQ ID NO: 4141991 - RNA, 56 nt, Human
gcccaaggucacacacaggaaggaaggcaaaauuccuccaguauguuauuuggugu

SEQ ID NO: 4141992 - RNA, 74 nt, Human
gcccaaggugccaugcugggcgggggagauggagcaugagcuauccaaucccaccuuccguggaacccgugggc

SEQ ID NO: 4141993 - RNA, 63 nt, Human
gcccaagucaauuaguaaacuuggaaacuggaauacaguuuagcaggaagaguuggcuggagu

SEQ ID NO: 4141994 - RNA, 55 nt, Human
gcccaagucagugcuucuggcaauauguauuuuucuaaaggcaugugacuggggc

SEQ ID NO: 4141995 - RNA, 95 nt, Human
gcccaauaaauaauacgcaauucuuauguuuuauuguuauucauuagccauggauuauggcuuaugaauaacaguagguggauuauuugaauggc

SEQ ID NO: 4141996 - RNA, 67 nt, Human
gcccaauuugaacaaagauacuucaaucauuauagagaggaaaacaguacuuuuuguucaauugugc

SEQ ID NO: 4141997 - RNA, 71 nt, Human
gcccacaggggaccugguggcuccguuccacaccucaccccagcagggccagccugaguuacccugugggc

SEQ ID NO: 4141998 - RNA, 58 nt, Human
gcccacaguacgaggcucaggcauguaauaauuaacauagccuugguaccucuguggc

SEQ ID NO: 4141999 - RNA, 59 nt, Human
gcccacgucgaacuugcuccagagcugcagcggcuucugcuggaagggucggcgugggc

SEQ ID NO: 4142000 - RNA, 63 nt, Human
gcccacuccagcuucucccacacagcccucagauggagcaaggcugggccuggccgggugggc

SEQ ID NO: 4142001 - RNA, 65 nt, Human
gcccacucugauuuuggcuccacugaagaguagaagaaucagucauggaggaugauucagagagc

SEQ ID NO: 4142002 - RNA, 66 nt, Human
gcccacuugaugaauaaguaaacuccuuugguuaaaauaauuaguguuugcaauauuccagggggu

SEQ ID NO: 4142003 - RNA, 70 nt, Human
gcccacuuugaguguuuuuaauugaaguuuugguugaaaauucacuugaauucauucugcgaaagagggc

SEQ ID NO: 4142004 - RNA, 84 nt, Human
gcccagaaggcagcauggccauuucucgcugcuuuuuuguaugguuguuagaggcagcguggggcugagucagcugcugugggu

SEQ ID NO: 4142005 - RNA, 69 nt, Human
gcccagagagcuuucuuugugcuuucugccaccauggaaguuacagugaaaagaaggcucucuaugagc

SEQ ID NO: 4142006 - RNA, 76 nt, Human
gcccagccagggacgcugcaggcuacccuggggccugcugggagauguaguucugcagugucaccugagacugggc

SEQ ID NO: 4142007 - RNA, 58 nt, Human
gcccagcuggaucccugcagaacuuagaccuuaccaaaggugaaggggaccagcuagc

SEQ ID NO: 4142008 - RNA, 103 nt, Human
gcccagcuggcggguaagcugugggauggcagacgaggcagcaggggcccuuguggguccaucucugucucacugucagccuggcaggauagcccacccgggu

SEQ ID NO: 4142009 - RNA, 81 nt, Human
gcccaggaagccaggcuggaguuaccuuuaggggagccuagaguccucuccuugggguaacuccagccuggcuuucugggc

SEQ ID NO: 4142010 - RNA, 58 nt, Human
gcccaggaaguugaggcugccgugaguugugauuguggcacuaugcuccagccugggu

SEQ ID NO: 4142011 - RNA, 64 nt, Human
gcccaggagguggaggugcagugagccgagauuacagauuauagcauugcacuccagccugggu

SEQ ID NO: 4142012 - RNA, 86 nt, Human
gcccaggcagccuccuaguucucugccagucgcugaaggacacccaggacaguuauugagugcagagcagggcugcugcuggaagc

SEQ ID NO: 4142013 - RNA, 72 nt, Human
gcccaggcaugucuaccugugaagacccagauccuucuaccccacaaugcugcucuucagugacagucuggc

SEQ ID NO: 4142014 - RNA, 58 nt, Human
gcccaggcuagagugcaguggcaugaucucagcucacugcaaccucugccucccaggc

SEQ ID NO: 4142015 - RNA, 61 nt, Human
gcccaggcuccagcuuccugcucagccuuaggucaggagugguggguugggaugccugggc

SEQ ID NO: 4142016 - RNA, 62 nt, Human
gcccaggcucugugauccacaaugaguaaagugacccaugagugcugcucagaggccugggc

SEQ ID NO: 4142017 - RNA, 82 nt, Human
gcccaggcuggagugcaauggcgugaucucagcucacugcaagcucugccuccuuggguucacgccauucuccugccucagc

SEQ ID NO: 4142018 - RNA, 57 nt, Human
gcccaggcuggagugcaguggcacauaucuguucacugcaaccuccaccucccgggc

SEQ ID NO: 4142019 - RNA, 58 nt, Human
gcccaggcuggagugcaguggcacgaucuuggcucacugcuaccucugccucccgggu

SEQ ID NO: 4142020 - RNA, 58 nt, Human
gcccaggcuggagugcaguggccugaugucagcucacugcacccucaaacuccugggc

SEQ ID NO: 4142021 - RNA, 58 nt, Human
gcccaggcuggagugcaguggcgcaaucuuggcucacugcaagcucugccaccugggu

SEQ ID NO: 4142022 - RNA, 58 nt, Human
gcccaggcuggagugcaguggcgcaaucuugguucacugcaaccuccgccuuccgggu

SEQ ID NO: 4142023 - RNA, 58 nt, Human
gcccaggcuggagugcaguggugcagucauagcucacugcagucuugaucuccugggc

SEQ ID NO: 4142024 - RNA, 58 nt, Human
gcccaggcuggaguucagugguguaaucuuggcucaccacaaccuccgccucccgggu

SEQ ID NO: 4142025 - RNA, 57 nt, Human
gcccaggcuggaguucaguggugugaucucagcucacugcaaccuccgccucccggu

SEQ ID NO: 4142026 - RNA, 57 nt, Human
gcccagggcgauggucggggccuaaccugccggcucggccccccccggcccuugggc

SEQ ID NO: 4142027 - RNA, 60 nt, Human
gcccagggcugccuggccugggggugaaacacugggcucuggagucaggcagcccugggu

SEQ ID NO: 4142028 - RNA, 63 nt, Human
gcccaggguccccuggggaucagcuggaauugcagacacaguuaggauuucuccggggagggc

SEQ ID NO: 4142029 - RNA, 58 nt, Human
gcccagggugaagugcaguugugcgaucucgacucacugcagccuccaccuuuugggu

SEQ ID NO: 4142030 - RNA, 86 nt, Human
gcccaggguuggaguugagcacggaggccuagggugccaccagguguguccuggcaggugguccugccccgugcacagagcugggu

SEQ ID NO: 4142031 - RNA, 57 nt, Human
gcccagucagguccaaggccaccgcugcuugggcugugccauccgcuugaccugggc

SEQ ID NO: 4142032 - RNA, 77 nt, Human
gcccagugggcggcaccauggccaugagccuuuugcaggacuagugccaggggccuggacauggacgcgcacagggc

SEQ ID NO: 4142033 - RNA, 78 nt, Human
gcccauacagaugguggucccacagcccacccgcuagaauaccagugccugggcuguggagcaccuuugcagaugggc

SEQ ID NO: 4142034 - RNA, 123 nt, Human
gcccauccaaggcugagacggucgggaaucucacacuucuguguugcacacugccaucuacugugucucugcagcaaguggagccccagacuuuauuuaugaucccaggccuugauggugggc

SEQ ID NO: 4142035 - RNA, 60 nt, Human
gccaccaguagcuaacaacagugauuguuguugaugauuuugcuguuguguucuguuggc

SEQ ID NO: 4142036 - RNA, 59 nt, Human
gccaccaugccagacucauuuuuguauuuauaguagagacaggguuuugccauguuggc

SEQ ID NO: 4142037 - RNA, 58 nt, Human
gccaccauggccggcuaauuuuguauuuuuaguagagaugaggcuucuccauguuggu

SEQ ID NO: 4142038 - RNA, 73 nt, Human
gccacccagcacacaugugagcagagaggcgcugugaaggagugugugugugugugcgugugugugugugugc

SEQ ID NO: 4142039 - RNA, 76 nt, Human
gccaccccuaagcaucagugcacacaauccucugccgaguuucauuucuguuggaugugacacuguuaggugaggc

SEQ ID NO: 4142040 - RNA, 58 nt, Human
gccacccggucuggagccggccucgucugccagcgaacagccaacuuuagcggguggc

SEQ ID NO: 4142041 - RNA, 77 nt, Human
gccacccgugcacacucuuggggcacuuucuguuggaugucaacuugauggugacuugggagucguaggcagugagc

SEQ ID NO: 4142042 - RNA, 69 nt, Human
gccaccgcccaguuccaguggccccacgaagcccccaguggcuggcuguccagcugggcaaacaguggc

SEQ ID NO: 4142043 - RNA, 84 nt, Human
gccaccuaguuguauacuuugaaaggguuaaagugguaaauuuuauguuaugugaauuuuacuacaauuuuuuuaaacguuggc

SEQ ID NO: 4142044 - RNA, 58 nt, Human
gccaccucccaggacgaggcugucgugucagucccccagccccgcucucccagguggc

SEQ ID NO: 4142045 - RNA, 58 nt, Human
gccaccuccuccucugucccugcugggaucaacucuccacaaggaaccaggagguggc

SEQ ID NO: 4142046 - RNA, 87 nt, Human
gccaccugaagaaugcccagcauauaggaaauguugaaucaauaacaauugagugcaguaucuucuguguccuuuucccuugguggc

SEQ ID NO: 4142047 - RNA, 81 nt, Human
gccaccuggggacaagugguugcuugugaguccccggaggccgcugagggcacaaaggcaacauucauccucgggacuggc

SEQ ID NO: 4142048 - RNA, 58 nt, Human
gccaccuguuucagaugugguuggagguaugugcagccacagcaguuucugggguggc

SEQ ID NO: 4142049 - RNA, 60 nt, Human
gccacuaacuagugcacauuguuucucaaugugccauugagacacaaggcacaguaaguc

SEQ ID NO: 4142050 - RNA, 72 nt, Human
gccacuacuuuucacuuccuccgcaagcaagaguuccuaaaacagcugcuaagcugaggaagaugagagggc

SEQ ID NO: 4142051 - RNA, 78 nt, Human
gccacucacgccucaccaccugcuccuugagcugcuccugguccuuguucuggugcacguggcugcagucgauguggc

SEQ ID NO: 4142052 - RNA, 79 nt, Human
gccacucccaucccucagcaaaccgugguggucacucggaugugaguucuguccacugcuggggccucgggagugaagc

SEQ ID NO: 4142053 - RNA, 65 nt, Human
gccacucuaaccgcagugacgugggacuuccucggcagggccuguuugaugucucuguguguggc

SEQ ID NO: 4142054 - RNA, 129 nt, Human
gccacucuccccuaggccuaaaaaggaucccugcugcauuagugcaucuucagugccggugcucaguuugguuucugaggaauuaauacagaacaggcucagcucuagggaggccucugggaaagaggc

SEQ ID NO: 4142055 - RNA, 61 nt, Human
gccacugaggcuggagugcaguggugccaucucggcucacugcaaccuccaccucccgggu

SEQ ID NO: 4142056 - RNA, 63 nt, Human
gccacugaggucacagcuggggauggaguucuccucggucuucaucaccaggguguccauggc

SEQ ID NO: 4142057 - RNA, 59 nt, Human
gccacugggugaaucaugcaccucaaccucugcugagagagccugaaucucuuacuggc

SEQ ID NO: 4142058 - RNA, 56 nt, Human
gccacugucaucuugugaagcaaucaccacauguucccaucacagcugaugguggc

SEQ ID NO: 4142059 - RNA, 59 nt, Human
gccacugucauuuccugaaugcugagucaaaacuacucuguacgcaagagauggagggc

SEQ ID NO: 4142060 - RNA, 61 nt, Human
gccacuguugcuccucaggaaauggcuuggagccucagccuucagaagaaguaacaggggc

SEQ ID NO: 4142061 - RNA, 56 nt, Human
gccacuucucucgggaagccaggaaggcuccucgcaaauccugguggagaaguggu

SEQ ID NO: 4142062 - RNA, 77 nt, Human
gccacuugggagagcugggaaagccguggagagcaggaccccugaggucuccauugucccuaggucuccauugucgu

SEQ ID NO: 4142063 - RNA, 81 nt, Human
gccacuuguuccuccaauguccuagaguacauuccacugcuaucagugcuggcuguuaggacagugguuagggcagauggc

SEQ ID NO: 4142064 - RNA, 82 nt, Human
gccacuuuccauugauggaaacuuggguaagucauagaaacucugugagacucaaauuuaucaacuauauuaugggaauagc

SEQ ID NO: 4142065 - RNA, 66 nt, Human
gccagaaaagcaguaaauguaugaccuucaguuaagaaaaggucauggcuucacugcuaugcuggc

SEQ ID NO: 4142066 - RNA, 100 nt, Human
gccagaaaaggccacuucaaaagcucugguuggcccuggaaaucuccucccaccccaccuuucagcccuuccuggagcuuuuaaugagccuuuccauggc

SEQ ID NO: 4142067 - RNA, 69 nt, Human
gccagaaacauacacaucacuuccaaaaguuuccuuccacacauuuugucauuguguguguuugugugc

SEQ ID NO: 4142068 - RNA, 79 nt, Human
gccagaacauauguuguaggggugugggauggcuuuccuuccaccaucuuacaccauucaaauauuuucuuaccagggc

SEQ ID NO: 4142069 - RNA, 78 nt, Human
gccagaaguuguagguuugcauauuuacuccacuacuuccuggugagguggcaugaguaaacuguuuaguuucuaggc

SEQ ID NO: 4142070 - RNA, 58 nt, Human
gccagagagguuggggcugcagugagcugagaucacgccacuguacuccagccugggc

SEQ ID NO: 4142071 - RNA, 61 nt, Human
gccagagcauggggaccuauuuuaccaauuaaucaugcuguagguucagucuccaugcugc

SEQ ID NO: 4142072 - RNA, 58 nt, Human
gccagagcugagacacgaguccugccucuugggcucaaaguuuaggucucagacuggc

SEQ ID NO: 4142073 - RNA, 58 nt, Human
gccagagcugaugggcccaggguagauucuuaguccacuuggggcaaugaguucuguc

SEQ ID NO: 4142074 - RNA, 61 nt, Human
gccagagcuuuggcuagaugguugaucccuaagggcaacgaauacccccagaguuuugagc

SEQ ID NO: 4142075 - RNA, 58 nt, Human
gccagaggccuucaauacucauuucacacuagagaggguguccuaguugccaucuggc

SEQ ID NO: 4142076 - RNA, 91 nt, Human
gccagagugcuugugacugcuuuucacugauagaguuaugucaggcauccagccauauagaucauguuaaaagcuccagugcacucuuggc

SEQ ID NO: 4142077 - RNA, 63 nt, Human
gccagagugggccgggcccagcauccuggggaugccggggggcagccugaggcccuuucuggc

SEQ ID NO: 4142078 - RNA, 63 nt, Human
gccagaguugaggcaguuuauucaucuauguucagguggacccaaacgagccaucauucuggu

SEQ ID NO: 4142079 - RNA, 77 nt, Human
gccagaugaaaaagaaauugccuagagugauuuauuaggcaauaaguuauuagaucaucagugggcucuuauguggc

SEQ ID NO: 4142080 - RNA, 59 nt, Human
gccagauugacuaauugaagaaaugggguauauccaaauuuguucaaugucuauuuggu

SEQ ID NO: 4142081 - RNA, 81 nt, Human
gccagauuugucuucuguauucaagucuauuguaugcucuacuaauauaauacugcuuucaacagaaguaugcaucauggu

SEQ ID NO: 4142082 - RNA, 66 nt, Human
gccagcagaguaucaauguauuuucaagaaaagugcaauuugaaauucugcauuuuuaacaguggc

SEQ ID NO: 4142083 - RNA, 56 nt, Human
gccagcagccacagaagucacugguuucaggugagugauucuaaguaagcugcggc

SEQ ID NO: 4142084 - RNA, 88 nt, Human
gccagcagcgcccucccagccgugggauucugagcaaagccccgccccgcugggccucaguuuccccggccugggcgggcgcguuggc

SEQ ID NO: 4142085 - RNA, 82 nt, Human
gccagcagggaagucuuacuuuuggaaaguggccaggucccaucacgagggccucaccuggcugaacaaagucccuccuggu

SEQ ID NO: 4142086 - RNA, 56 nt, Human
gccagcagggcggagccaucuaccacaaaaauggcugccauggcucaccugugggc

SEQ ID NO: 4142087 - RNA, 55 nt, Human
gccagcaucccugggguuggccagagucccugccagugagcccugggaugugggc

SEQ ID NO: 4142088 - RNA, 88 nt, Human
gccagccaggacgcagcagcugccugcaccuucccaaagcugaggucaagggcucucagcagugugcaggugugcuggcccucauggu

SEQ ID NO: 4142089 - RNA, 58 nt, Human
gccagccauccccacagggccccauccuuuugucccugcuucccugggagaggcgggu

SEQ ID NO: 4142090 - RNA, 89 nt, Human
gccagcccacuguccugcaugggcucagaggagcuggaacggugucagcuggugccagcucccugggggcagggcaggccgggccaggc

SEQ ID NO: 4142091 - RNA, 79 nt, Human
gccagcccuuccgguggccaacaagaggccggguggaguuucugggagugugucuggccauccggagucaggggcuggc

SEQ ID NO: 4142092 - RNA, 65 nt, Human
gccagccugggugucgaucacuaguguggcacauaauugcuguggugguugaucuggggcacagc

SEQ ID NO: 4142093 - RNA, 129 nt, Human
gccagcuaagaaaaacagaucagugaaaugcauauucuucguauucuuaauuucagcccuauccaaauguuuacagaauaguuugaagagauuugcaguuucuuguuaucagucuuauuaagccuuggc

SEQ ID NO: 4142094 - RNA, 99 nt, Human
gccagcucuaguugucaccuugucugugggaggauucagaauugggaccaaaaauuguuguagccucauuuaucuuccccagguaccaugccagcuggc

SEQ ID NO: 4142095 - RNA, 57 nt, Human
gccagcugaauuuccaacuguuucaaguuuuugaaacaggaggguuuucagaugugc

SEQ ID NO: 4142096 - RNA, 63 nt, Human
gccagcugagcaaauuccagcugccugagggcagccuucuggcaaagauuugcaacaguuggc

SEQ ID NO: 4142097 - RNA, 75 nt, Human
gccagcugccaggccacaagaacuaccccaucuggcugugggaagccagccuggggucccuuguuggcacuuggu

SEQ ID NO: 4142098 - RNA, 57 nt, Human
gccagcugcucgcguaggguagagcaugugaugcuuuacuucugggggcaagguggc

SEQ ID NO: 4142099 - RNA, 55 nt, Human
gccagcuggagugagagugggcugggcugaaacgcuccacuguuguugagcuggc

SEQ ID NO: 4142100 - RNA, 58 nt, Human
gccagcuggcugcaggucccaggggaggcggccuugggagcucuggaguggguugugc

SEQ ID NO: 4142101 - RNA, 94 nt, Human
gccagcugggagcuuguuagaaauguagacucucaggcccuaucccagaccuacugaauuugaaucuguguuuuaacaaaacccccagcugagu

SEQ ID NO: 4142102 - RNA, 60 nt, Human
gccagcugucugucuccugaggagaccugcuugugcauucacccagguccaggcucuggc

SEQ ID NO: 4142103 - RNA, 57 nt, Human
gccagcuuggacuccaugacacguuagccucgagaaggccggucuggggccauuggc

SEQ ID NO: 4142104 - RNA, 57 nt, Human
gccagcuuggcaugugaggaguggggagccucagucuaccucucguuuuaaccuggc

SEQ ID NO: 4142105 - RNA, 96 nt, Human
gccagcuugucuccucugcucuguggcuaucauacugaaggcuuugcaagccuugggugcaccauagcuggagaguugggaauaaaagccuuuggc

SEQ ID NO: 4142106 - RNA, 67 nt, Human
gccagcuuucuggaagccccagagucagauguacuccuguccugacuuccagccuuccaguacuggc

SEQ ID NO: 4142107 - RNA, 65 nt, Human
gccaggaaccgaugaucagaggggaaugcguuugagcuccgcucugaauaguauuuguucugagu

SEQ ID NO: 4142108 - RNA, 64 nt, Human
gccucuuuauucaggaggugcucgaaggaaaucuggcuucuugugaguuuccuggaaguuaggc

SEQ ID NO: 4142109 - RNA, 90 nt, Human
gccucuuucuuguuccccagggaagcuccugcgcuguggggggccugaauccaaaggcaggagccccuggggaaaauccaaauuuuuggc

SEQ ID NO: 4142110 - RNA, 94 nt, Human
gccucuuugauuaaaacaggagaaaacauuacauaggugugugauccuuugccaauuuuaucaccaguaaguuuucaguuuuuuucccauaggc

SEQ ID NO: 4142111 - RNA, 61 nt, Human
gccugaagggagagagaauagccuauggaaagacacagagguaggcagcuugacccuuggu

SEQ ID NO: 4142112 - RNA, 58 nt, Human
gccugacagcacugcauuauucuuaagugaguuauuacaaggaucuguguaggcaggc

SEQ ID NO: 4142113 - RNA, 62 nt, Human
gccugacuccuauccauguucuuugccccugcggccagagccacaguggauaggagccgugu

SEQ ID NO: 4142114 - RNA, 77 nt, Human
gccugacuguucaggagaauuccaagaaguauucagagaaaacagaaucacuucuuggcuccagggaggaaucaggc

SEQ ID NO: 4142115 - RNA, 65 nt, Human
gccugagagacccauggggcaaaggucaguucucucccaggccugcucccugcagcucucauggc

SEQ ID NO: 4142116 - RNA, 90 nt, Human
gccugagagucagauagucuaugccaguucuuucugagccagcaggcugcagggaaagggcacugggcuuagaaucaaagacacuuaggu

SEQ ID NO: 4142117 - RNA, 65 nt, Human
gccugagcagcuauacacacaggcaaaaagcaacaaaaauaaucuguguuguagagacucagugu

SEQ ID NO: 4142118 - RNA, 61 nt, Human
gccugagcagggagcugggcugagcuggucuuggaggcaggcuuguccucccugcuggggc

SEQ ID NO: 4142119 - RNA, 66 nt, Human
gccugagcuugcagcacuggugaauggccaaauggcuuggccugacugucaggcuguauguggggc

SEQ ID NO: 4142120 - RNA, 83 nt, Human
gccugaggaaacuguaguaggaguaaguaugcuguguuuaagaggucacagauaaaauuaauauuaccaauccaucaauaggc

SEQ ID NO: 4142121 - RNA, 118 nt, Human
gccugaggccagggcuugggcucuaggccugcagggaagcuggugcgagcugugcucagggacagaucugugcugcagacgcaguagcucugagccaagaacugggccggcuucaggc

SEQ ID NO: 4142122 - RNA, 108 nt, Human
gccugauguuuuucaagcauuuaugacaauuuuccccauagguuaucuugaguaucaauaugauuuucuaaaugggaaaauugcugaguccuagauacaauguaaggu

SEQ ID NO: 4142123 - RNA, 102 nt, Human
gccugcaaaccuucccucagacacagccccacgaagucucugcccauaaccuaccgccaggcacuuuguaaauuguugugacucacgggaaccaucucaggc

SEQ ID NO: 4142124 - RNA, 64 nt, Human
gccugcaaauuucuuuaguacauaaagucuuacuugauguacacaaugaaauuaugauguaggc

SEQ ID NO: 4142125 - RNA, 87 nt, Human
gccugcagccugcccaccugugcccuuuccugcuccuccaggccccagccugccaguaaugagggcaaggaucaccaggcugccagc

SEQ ID NO: 4142126 - RNA, 55 nt, Human
gccugcagcuguugccuggaaaaggagcuggcuccuagcaacaguaucagcaggc

SEQ ID NO: 4142127 - RNA, 84 nt, Human
gccugcaggucugaucccugcccccagacagaauccaguugccaaugaggcagcuggggaggguuuggaggaagggcugugggu

SEQ ID NO: 4142128 - RNA, 56 nt, Human
gccugccagccacaguggcagccugguccccagagcugccgaucaccuggcauagc

SEQ ID NO: 4142129 - RNA, 122 nt, Human
gccugcccuaugcucagaaugccagugugaaggggcaucauucuggcucuuuccauggucucaagcagacccuuuagguggagaagggugagaagaacccuccagauaggucaugggguggc

SEQ ID NO: 4142130 - RNA, 56 nt, Human
gccugccucaaaaucccaguucugccacuugcuagcuuugugaugaugggcguggc

SEQ ID NO: 4142131 - RNA, 74 nt, Human
gccugccucugugugaaucuauugaauauaugugcaugcauguaacggcaggauuuuuauggugguaauauggc

SEQ ID NO: 4142132 - RNA, 67 nt, Human
gccugccuggucucaggcauggggacagcccagcccuccccagauccccugaggcaggcguaucggu

SEQ ID NO: 4142133 - RNA, 56 nt, Human
gccugccuucggugcgcagcgggggaacagggcuagugcagccgccggaggggggc

SEQ ID NO: 4142134 - RNA, 125 nt, Human
gccugccuuucugcuucugugccugggauuuccuccagucucacuaggaacuugcuuggcccaugcuagggcacuucagucagacugagacgacccaggagcuaccaucugcggaugucacaggc

SEQ ID NO: 4142135 - RNA, 96 nt, Human
gccugcggggguagguucugcagcagcccggccagaggaugcaggcuguguacugcggcuggcagggugggcuuugcuuuucugcaucucacaggc

SEQ ID NO: 4142136 - RNA, 65 nt, Human
gccugcucuguucccccaucaucucaauccuccuccuaauggcuuggcaggcggggcagggcugc

SEQ ID NO: 4142137 - RNA, 59 nt, Human
gccugcugugacaagcuaucuuuaggaaguaagaauuugugaagauuaaguuacugggc

SEQ ID NO: 4142138 - RNA, 129 nt, Human
gccugcuuacauacugucugauguugggucauauugcuuauuaaguggccgaaauauuuuucaauuauuugaugcuaagauuuaauaaaguagaugaaauaagaaccagaauacaguccacaaucaggu

SEQ ID NO: 4142139 - RNA, 63 nt, Human
gccugcuucacggacaggccucuuauaggcauagaugacgaggggucuguccgugacaguggc

SEQ ID NO: 4142140 - RNA, 64 nt, Human
gccugcuuccuuuucauagauggcacccucuagcugugucuucauguggugggaggggcaaggc

SEQ ID NO: 4142141 - RNA, 55 nt, Human
gccuggacaggugagugacucaggguggugagcuccacccugcccugauuuaggc

SEQ ID NO: 4142142 - RNA, 83 nt, Human
gccuggaccggcugcugcugucagcaggccuuguuucucaccagcagcaggggcaagugacaguugcuuuuucugcuucgggu

SEQ ID NO: 4142143 - RNA, 69 nt, Human
gccuggagaauuaaaaggaagggcacauuauuacgucugccucuauuuggucuuuuggcucucuuaggc

SEQ ID NO: 4142144 - RNA, 68 nt, Human
gccuggagaccugauggcagcggcggccuuucccagcccugaacccgcuggccgccgggucucucggu

SEQ ID NO: 4142145 - RNA, 56 nt, Human
gccuggaggaauguagcugaggucaccaaaauuggauuccuggcuuccaucuuggu

SEQ ID NO: 4142146 - RNA, 55 nt, Human
gccuggaggcgagaacccaaugucuuuguuaucgggcccucucguucuuccaggu

SEQ ID NO: 4142147 - RNA, 56 nt, Human
gccuggaggggacagucucuggggugggcuucacaggauaggucaguuuuccaggc

SEQ ID NO: 4142148 - RNA, 59 nt, Human
gccuggagugcaguggcgugaucucgguucacugcagccuccgccucccgccuccaggc

SEQ ID NO: 4142149 - RNA, 69 nt, Human
gccuggagugguuaacuucugagcaggcuggagaucuucgcaacucagcaacuuaacugcuggccgggc

SEQ ID NO: 4142150 - RNA, 56 nt, Human
gccuggaguuguggugaagccaggagcuauucugagaucuuuccacuauuucaggc

SEQ ID NO: 4142151 - RNA, 72 nt, Human
gccuggauaauuuaaugcaagugauucacaccucacuuuugagaaguuacucucguuaaauauguuccaggu

SEQ ID NO: 4142152 - RNA, 60 nt, Human
gccuggaucccagggagucaggcuaugucauuagauggaagaugcccuugagaugcaggc

SEQ ID NO: 4142153 - RNA, 58 nt, Human
gccuggauuacaaacagccaaccauaacagaguuaugcucuggcugcuggaguagggu

SEQ ID NO: 4142154 - RNA, 75 nt, Human
gccuggcaaaucuuucucuccaagucuuuuuccucaaugaacugaaggcuccuugagggaaggacuuggucacgu

SEQ ID NO: 4142155 - RNA, 106 nt, Human
gccuggcaccccucccgccucugccuuguuccauaucuacugucaggacccagaccccaguguucacucuguggagcccaggcagagcccgagaggcagccauggc

SEQ ID NO: 4142156 - RNA, 55 nt, Human
gccuggcacucaaucaucugcuauuugugguuuaauaaagaacuuugggcuaggc

SEQ ID NO: 4142157 - RNA, 65 nt, Human
gccuggcagauggagaagcagcaggugcuguggugugacgggaccuugcuucccaucauguacgc

SEQ ID NO: 4142158 - RNA, 69 nt, Human
gccuggcagcuaccuggcagcucuccuccagccaagacaauggaagaggugguucagguagagcccagc

SEQ ID NO: 4142159 - RNA, 66 nt, Human
gccuggcagggcccggacggcagaugcgcuucggugcugcugugagucuugugcucugccuuaggc

SEQ ID NO: 4142160 - RNA, 68 nt, Human
gccuggcauaaagcaggugcucagugaccaguggguaucaguuggucccuugcugcuuugaguugggc

SEQ ID NO: 4142161 - RNA, 66 nt, Human
gccuggccaacguggugaaaccuugucucuacuaaaaauacaaaaauucgcugggaguggccaggc

SEQ ID NO: 4142162 - RNA, 58 nt, Human
gccuggcugggcugaaugcuuaucaccuaauuauaucaagcauagagcaccagaaggc

SEQ ID NO: 4142163 - RNA, 57 nt, Human
gccuggcugucuggcaagguucuuccaaggaaccuccaccaugaaagccaugaaugc

SEQ ID NO: 4142164 - RNA, 105 nt, Human
gccugggaaugucggggccuccaccugccuggagcugaguguggagcuugcaacgcgcagacucugacaucucuuggggcagcugcuggcuguggaagccggggu

SEQ ID NO: 4142165 - RNA, 69 nt, Human
gccugggaccacacuuuggaaaucacgauuaugaacaggaaucagaauuucugaagauguggccugggc

SEQ ID NO: 4142166 - RNA, 60 nt, Human
gccugggcucagcccaugcugucccgcuaagccacgcggaggacugggugcgggccuggc

SEQ ID NO: 4142167 - RNA, 68 nt, Human
gccugggcugcagcgggagcgacgcgccggccgccggguggggguggagccccgccgcggccccaggu

SEQ ID NO: 4142168 - RNA, 62 nt, Human
gccuggggacagagggaggucagagucacgucccaccugcucugauaacucuggccccaggc

SEQ ID NO: 4142169 - RNA, 66 nt, Human
gccuggggcagggagagaggcagagagugaguuccuugagcccagcuucuccucccgcucccaggc

SEQ ID NO: 4142170 - RNA, 118 nt, Human
gccuggggcucccagggagauguuaggaugaggggugccguccucugcugcagcugcucuuauguucagauuccaguuuguggcuccccucuuucucauauccuuggauguuccuugc

SEQ ID NO: 4142171 - RNA, 117 nt, Human
gccuggggggcuaucaccggcccucagcucccugugggaacuccugaguugggggccacccacagggcuucucauggggugcagagcugggcagggaugggggagggcagcuuaggc

SEQ ID NO: 4142172 - RNA, 58 nt, Human
gccugggguucuaagcccuuguuagaugacugucccaagagcuucuaggacgcugggc

SEQ ID NO: 4142173 - RNA, 58 nt, Human
gccugggugauuccacaguacagugaggcugagacuccuggcucuguugucacccggc

SEQ ID NO: 4142174 - RNA, 55 nt, Human
gccuggucuauauagacagagaccaugucucauuuguuuagguagcaccauuugc

SEQ ID NO: 4142175 - RNA, 85 nt, Human
gccuggucuccuccagauguuuauaacucaugagugccaggacuagaccugguacuaggaagcagcugcauuggauuuaccaggc

SEQ ID NO: 4142176 - RNA, 61 nt, Human
gccuggugcaccaaguaaggguggaaaagucagucuuuauacucucagcggagcaucaugc

SEQ ID NO: 4142177 - RNA, 98 nt, Human
gccuggugggacagguagcauuuuuccucuuucccagcugaaaauugaaguucagagagauuaaaugacuuguccaaguucaccugaaaaaauaaggc

SEQ ID NO: 4142178 - RNA, 57 nt, Human
gcccauccugcggggagcagagggcaucagggugcccuugaguuggcccaggagggu

SEQ ID NO: 4142179 - RNA, 64 nt, Human
gcccaucuuauuuucuucuagugcucuuuuacuuggagaaacagaauacgaaagcuaagagggc

SEQ ID NO: 4142180 - RNA, 58 nt, Human
gcccaugagguugaggcuguagugagcugugaucaugccacugcacuucagccugggc

SEQ ID NO: 4142181 - RNA, 87 nt, Human
gcccauggacuuuggucuguccauccugccuucccuuucccaagagacaggccaggccacagguggaagccagagaauccagaccgc

SEQ ID NO: 4142182 - RNA, 77 nt, Human
gcccauguagcacuuggauauacaaaugaaguagcaucauuuuauuucccuguaauaaucccaguuuucucaugggc

SEQ ID NO: 4142183 - RNA, 68 nt, Human
gcccauuaagcagcaggugugcuuuuaaugagaaucuaaaucauuucuuccuugcuugcugcuuaggu

SEQ ID NO: 4142184 - RNA, 57 nt, Human
gcccauugcccugaccagcugggauaauacucugcuugcugucccaggccaaagggc

SEQ ID NO: 4142185 - RNA, 80 nt, Human
gcccauuuauuuucuccuucccauuaccuucugcucucuagaugagcaaggcaugcacaagaagggggaggugggugagc

SEQ ID NO: 4142186 - RNA, 73 nt, Human
gccccaaagcaggcucccuucucggaauucuugcccagagagcccaguuguacccugaagggagccugguugc

SEQ ID NO: 4142187 - RNA, 84 nt, Human
gccccaccagcccugaaucgaggcuccacaggguuggaaggaugcuuaccagggccaagagaccucgagguggggcugcggggc

SEQ ID NO: 4142188 - RNA, 107 nt, Human
gccccacccuuaugacuucauuuaaccuuaauuaccuccugaagacccugucucuggguaugguaacguugggguuuagggguucuacauaugaauuugggggaggc

SEQ ID NO: 4142189 - RNA, 75 nt, Human
gccccagaaguguccuagagcaggagucuccgagaagucuuggaacagcuggggcuuugcucuggguucuagggu

SEQ ID NO: 4142190 - RNA, 72 nt, Human
gccccagacccuuugacuugugacauuacugguuugcagacauaauaacuacacucagaggaccauggaggc

SEQ ID NO: 4142191 - RNA, 123 nt, Human
gccccagaguccaaaggcuagagaaccuggaguucugcuguccaagggcaggggaagaagggagucccagcuccaagggacagcgaauucacuguuccucugacguuuuguucuaccuggggc

SEQ ID NO: 4142192 - RNA, 80 nt, Human
gccccagauccaucuggaagccagauacucagugugugggcauaaaacugucuucuguuccaggugcugucucugguggc

SEQ ID NO: 4142193 - RNA, 57 nt, Human
gccccaggcugugcaaggccagcacacagacauaucugagccaaccacagcaggagc

SEQ ID NO: 4142194 - RNA, 60 nt, Human
gccccagggugcuaauuaaauaugcuaagaguaagauucucguaucuggcaucuuguagc

SEQ ID NO: 4142195 - RNA, 81 nt, Human
gccccaggucaacaacagcuuagccagucaagcucucccaucgggauggcaagaucuuggcugagcaucuugacaugaggc

SEQ ID NO: 4142196 - RNA, 80 nt, Human
gccccagguccuuagccaccagaaagguuuucaggggaagugugcacccucagcagcugcugcuggugggcaggaugggc

SEQ ID NO: 4142197 - RNA, 119 nt, Human
gccccaguccagcccagaagaaggagcacaggcuuugguggacaccaggggcuuccacccagcuguguuacgucccgacugugccaccccagccuggcugccugggcucccuggccugc

SEQ ID NO: 4142198 - RNA, 67 nt, Human
gccccauagcuggagauaggcuaacuccugagcaggugcucuacagccaucauccugcugcuggggc

SEQ ID NO: 4142199 - RNA, 58 nt, Human
gccccaucccuccagaugcugccggagauccaagauucgcgggccuggaggguggggu

SEQ ID NO: 4142200 - RNA, 111 nt, Human
gccccauuggaauguuagccucugagccaguuuagugggcaguguagagcacagaugucucaggcauucccacauagaaucauuaguagaaagugcacugcauccaaaggc

SEQ ID NO: 4142201 - RNA, 57 nt, Human
gcccccagaagggccacagauucuugaguagaaagagccugguccugacugaggggu

SEQ ID NO: 4142202 - RNA, 76 nt, Human
gcccccauggaggcuccuucaaagcaccuggcuccucucaggagagcaaaggguuacggaggaggcuccaggaggc

SEQ ID NO: 4142203 - RNA, 76 nt, Human
gccccccaaguaacuaggauuacaagcgugcgccaccacaccuggcuaauuuuugcauuuuuaguagagaaggggc

SEQ ID NO: 4142204 - RNA, 96 nt, Human
gccccccaagugacauggauccgauugcacauuccugaagccugagucauuccuggguccugcucaggcucaggaauguguuuaugcucauggggc

SEQ ID NO: 4142205 - RNA, 82 nt, Human
gccccccuuccuggucucugcucacauggcuccaugcaggccucccggcccuggugcugcucuguguggcagaaagaugggu

SEQ ID NO: 4142206 - RNA, 80 nt, Human
gcccccguccaugcagucaccuccagcuccaaaccuguuauuugucagacagagcuguccugggacguggauuugggggc

SEQ ID NO: 4142207 - RNA, 57 nt, Human
gcccccgucugccugccacuugaugguauugccaugggcugaguggaaugagggggc

SEQ ID NO: 4142208 - RNA, 110 nt, Human
gcccccucuucuguggcugcagcguccccuccagagcaggcagccucccguucuccuuggccaggggcggguggcgaggcuucucggggcgcggccagcaggacgggggc

SEQ ID NO: 4142209 - RNA, 69 nt, Human
gcccccugaggguggcuccucccugggcccgucccuauuggcuccccaggcugguccccucgcuugggc

SEQ ID NO: 4142210 - RNA, 96 nt, Human
gcccccuggucugucuggagcagcugcagccgcagcuguggccugggccucaccuuccagcgccaggagcugcugcggccuccucugccagggggc

SEQ ID NO: 4142211 - RNA, 66 nt, Human
gcccccugguucccacgggcagaugugguugguugguuugaauauuuccaaggccugucagggggc

SEQ ID NO: 4142212 - RNA, 89 nt, Human
gccccgacccgcgccggguucacagcaugcggaggggccgaggccgggcugcuccucugcuccaggcuggacuuccgcguggguggggc

SEQ ID NO: 4142213 - RNA, 65 nt, Human
gccccgccgccuuugggacgccccgccugggguaggggaggggagucucccaaagccggucgggc

SEQ ID NO: 4142214 - RNA, 77 nt, Human
gccccgggagagucagcaaauguaugcucauuuuucucuuauuauaaaauggccauaucauugcagagccauggggu

SEQ ID NO: 4142215 - RNA, 79 nt, Human
gccccuaaggaucuugugcauuuguucauuggcuucuguuuuccucucugcccaacuagacugcaggcuccuugagggc

SEQ ID NO: 4142216 - RNA, 80 nt, Human
gccccucacccuuccuagccaggcugcagcugauccgaggugguuccuugauccuggagucugaagggacauugaggggc

SEQ ID NO: 4142217 - RNA, 60 nt, Human
gccccuccuauguaccaggcugugguaagcccuggggauacagccaggaacaugaggggc

SEQ ID NO: 4142218 - RNA, 89 nt, Human
gccccuccucacagagugcacaucccuggcaggcgcuucugcucacaggugaggggagggcucccugggaguggaugggaggagggagc

SEQ ID NO: 4142219 - RNA, 57 nt, Human
gccccuccugcagcaccuuucuuagguugauucagggagggaagcugugggaggagu

SEQ ID NO: 4142220 - RNA, 62 nt, Human
gccccuccugugcucaccuggaggccucugugcucagggcaccccugagacaaaggaggggc

SEQ ID NO: 4142221 - RNA, 94 nt, Human
gccccugcccacuugggucugucuggccagaugcaucuguuaauguuuaaugauaguuuaccuuccagauggcuuacccacuguggguaagggc

SEQ ID NO: 4142222 - RNA, 69 nt, Human
gccccugcugaggucagccacccaauccccaaggaagcucauguugggucuuauggcuggaguaggggc

SEQ ID NO: 4142223 - RNA, 63 nt, Human
gccccugcugguccauguguccaaaaugguuaaagcaacuuuggguccauggaacagaggugc

SEQ ID NO: 4142224 - RNA, 64 nt, Human
gccccuggauuuggguugucacugugguucuccugccagugcuauaauccagugucguaggugc

SEQ ID NO: 4142225 - RNA, 71 nt, Human
gccccuggccgacuugaagucugcaucuaaggcagggccuuagacauggcagcuccaaguguuucaugggc

SEQ ID NO: 4142226 - RNA, 70 nt, Human
gccccuggcugccuuguguugaucucuggccuagguaaugaccagaaaucucacuggcaggcaggcaggc

SEQ ID NO: 4142227 - RNA, 62 nt, Human
gccccuggcuugggcuuaacuguagguucagagaacagaacggaaagcccacgcccucuggc

SEQ ID NO: 4142228 - RNA, 59 nt, Human
gccccuuccaucaugugaggacacagagagaaggugccgucuauaaaucaggaaggggc

SEQ ID NO: 4142229 - RNA, 85 nt, Human
gccccuuugccccgcgaaauuccaacaccauggcggcggcugcccuggcugcccccagccugggcuucgauggggugauuggggu

SEQ ID NO: 4142230 - RNA, 76 nt, Human
gcccgcccccugacucggcgcgcucccgucgcgcagccaaucgggacgaggggugagcccgggugggcggggcggc

SEQ ID NO: 4142231 - RNA, 63 nt, Human
gcccgcggugcugcgacguugacccgccuggccucaggcucagggcggcgggcagcccagggc

SEQ ID NO: 4142232 - RNA, 81 nt, Human
gcccgcugcccuuugcagcucuagguggaagcacaagcuugcuaggcucggcacgcucagagcugcaggaaggcggucagc

SEQ ID NO: 4142233 - RNA, 80 nt, Human
gcccggacugcugucacaguccagccuaguauguauaccauaugguuugauacuggguguggacaaaguagucagugggc

SEQ ID NO: 4142234 - RNA, 130 nt, Human
gcccggagccgagcauggagcccggccgaggccugucucggaaguauccucuguggcccucccugugcccgagcagagugagccgaggcugcucuccagcggcugcaccucagugcuguggcuccguggc

SEQ ID NO: 4142235 - RNA, 79 nt, Human
gcccggagggucagaguucaggucgagggccccaagaacaugcccuuacuaugaccuggaccucagccaagaccagggc

SEQ ID NO: 4142236 - RNA, 57 nt, Human
gcccggccggagccgcgggggugagucuagccccagcuccgagcuccgagccguggu

SEQ ID NO: 4142237 - RNA, 75 nt, Human
gcccgggucacucagccugccugguuccucuaaccuggcaugacagagaccguugcaggcugaguguaugugugu

SEQ ID NO: 4142238 - RNA, 61 nt, Human
gcccggguuguccgcgcguccggccgccccuccgcggcugcggcucugcgggcagcugggc

SEQ ID NO: 4142239 - RNA, 80 nt, Human
gcccggugaguggggccacacugaucucccagagcagaccguggucugacugggcugugguguggcccaaaucucccagc

SEQ ID NO: 4142240 - RNA, 63 nt, Human
gcccguagguagaaagaggaccugucuuggaccugagccccugaguuucuuucugccuggggc

SEQ ID NO: 4142241 - RNA, 72 nt, Human
gcccuaaaaaggccaucuuuggaauuuggagaacccuccagcuguaguggauuugagauggucacguugggu

SEQ ID NO: 4142242 - RNA, 71 nt, Human
gcccuaagaacauuuucggaaagauaugcaagaaauuaaucuuaauuaucuuugagaaaugaacuaggugu

SEQ ID NO: 4142243 - RNA, 75 nt, Human
gcccuaagaugcauccaaagcuuuggguaggaaugggagggucacucuuuccuucccaaguagcugcugcauggc

SEQ ID NO: 4142244 - RNA, 80 nt, Human
gcccuacccaccagcccccaggugaggcuuccagcugggaccugcccagacaggcugagccugggcgugguggguggggu

SEQ ID NO: 4142245 - RNA, 55 nt, Human
gcccuaccucaguccagaucugagucagggucuggaaagagcugagguucagggu

SEQ ID NO: 4142246 - RNA, 63 nt, Human
gcccuacucagaaaggugccauuuauguagauuuuaugucacuggcuccuuucuggguagagc

SEQ ID NO: 4142247 - RNA, 68 nt, Human
gccuggugggagguguuuggaucauggggguugauaccuaaugaauggcuuggcaccaucuccuuggu

SEQ ID NO: 4142248 - RNA, 67 nt, Human
gccugguggugugcucaaguggcuuuaggcugaagcagcaugacugauagcacauccucaaccaggc

SEQ ID NO: 4142249 - RNA, 112 nt, Human
gccuguacagcucugugauuuaugaugacaucacguccuuucagagauaacacuauuaugucacugaaccugaaguggugaggucagaaguacaugugaaguaauuaugggc

SEQ ID NO: 4142250 - RNA, 61 nt, Human
gccuguaggagguagcuuaaucucacguacuguuggaacuugguaccaccuucugaagggc

SEQ ID NO: 4142251 - RNA, 72 nt, Human
gccugucacugcgcugcuucgugaugcaguuguaacuggagcacagccucaugauuuuuagcccauugcggc

SEQ ID NO: 4142252 - RNA, 81 nt, Human
gccugucagccuuuuuaauauuuauauaauuuucuuugaaagagcuuagugaaguuauuuccugguguuggaggcuggggc

SEQ ID NO: 4142253 - RNA, 88 nt, Human
gccugucaucuuggaguuuggcucugggugccugugcagccccugggugagcgcggugcccccaagaggccagggucccuggcggugu

SEQ ID NO: 4142254 - RNA, 76 nt, Human
gccugucugggauuuuauagacaugcucucucucucuguuuauugugauggcaguuugcacaauuccucuucaggc

SEQ ID NO: 4142255 - RNA, 108 nt, Human
gccugugaaaagcuggcugcugccaccagagguaggcagggugacuuggcuucaugcagggaggccaagauagucacuuuccugcugugcagccugcuguuuaugggc

SEQ ID NO: 4142256 - RNA, 75 nt, Human
gccugugaggcugacagcagagggagggaugguaccauuuuaugagccucaaaucugagucuguccagccucggc

SEQ ID NO: 4142257 - RNA, 82 nt, Human
gccugugcggcggcaggaagcgucuugaggcuccccaagacuaccugaggggccgcccaagcacuucagaagcccaaggagc

SEQ ID NO: 4142258 - RNA, 72 nt, Human
gccugugcugcugucacggugcuaaggggccuggcaagcacggggucuuucuugcuggacggaggcacaggu

SEQ ID NO: 4142259 - RNA, 74 nt, Human
gccuguggcucaaaaucccaugauacugaagauaaaucugaaaauuggcauuaugcauuuugcccuacagcagc

SEQ ID NO: 4142260 - RNA, 64 nt, Human
gccuguguccagcugggugucaucugggguccauguccucaugggguuuggcuggaugucaggc

SEQ ID NO: 4142261 - RNA, 64 nt, Human
gccugugugugugauaccacaugugaauguaugucugcauauguguauguaucuaugcauaggu

SEQ ID NO: 4142262 - RNA, 62 nt, Human
gccuguguucguccucaccuugccgccagucgcggaucuggggccaaggaggagaaacaggc

SEQ ID NO: 4142263 - RNA, 59 nt, Human
gccuguguuuuccugcccaccucugaugcuaaaugcacccugaggccugagaaccaggu

SEQ ID NO: 4142264 - RNA, 81 nt, Human
gccuguuaagcccaucuugccuucucuccucuggacaagaaguaaaugggagugaaagguaaguugagcuuagccuuuggc

SEQ ID NO: 4142265 - RNA, 65 nt, Human
gccuguucugcccugagagccuucucugcuaggagguagguugacugacucagggagaagggugc

SEQ ID NO: 4142266 - RNA, 61 nt, Human
gccuguuuacuuugccgcaggaggagaagguccucuggaggugcuggacaggguggcgggu

SEQ ID NO: 4142267 - RNA, 61 nt, Human
gccuguuucuggagugaucugugcuuucagccccuggaaugcaggcuccaugaggacaggc

SEQ ID NO: 4142268 - RNA, 57 nt, Human
gccuguuuggcugcugacauuggcaguaaggagccaugauccaggcagagggcaggc

SEQ ID NO: 4142269 - RNA, 59 nt, Human
gccuguuuucucuugggguggagcagccuugguguuggaucacaggagggaaggcaggu

SEQ ID NO: 4142270 - RNA, 102 nt, Human
gccuuaaggccaguuggcaauugccucagagucuucagugaaacaggggccaggguaaaucuuaacucucugaggacuugggguugccuguugcuuuaaggu

SEQ ID NO: 4142271 - RNA, 81 nt, Human
gccuuagaaaugcuuauaccuaaugaucuugugaugcacaugguuuuuagagaauauagguuauuaguuucuugucuuggu

SEQ ID NO: 4142272 - RNA, 61 nt, Human
gccuuaggcaggauaagaaguuguaaacucacccaucagcagcugccuccacuucugaggc

SEQ ID NO: 4142273 - RNA, 79 nt, Human
gccuuagugcaaacauucaggaguacaggagccacgacccagauucaauugccuccuuguacuugaauguuugcaaggu

SEQ ID NO: 4142274 - RNA, 86 nt, Human
gccuuaguguugggagggacccugaugacugaggagccugguagcuccaggucgcccacacuuucaggucucuugcaccagaaggu

SEQ ID NO: 4142275 - RNA, 74 nt, Human
gccuuauaguaacagguuuauuuuacaggaagugaacgucacacuuccagaaaacucugccugguaugaaaggu

SEQ ID NO: 4142276 - RNA, 83 nt, Human
gccuuauuuuauggaauauagucuuauaucucaaagcauuuauugcauaguaggggagauaagacauguccugugauaauggu

SEQ ID NO: 4142277 - RNA, 81 nt, Human
gccuucacguugaaagcuuuucauuuaguuuguuugacauuuaauaauacaaccuagcuagauaaaagcuuuuauuaaggc

SEQ ID NO: 4142278 - RNA, 57 nt, Human
gccuucagagaugaaaaguggagacugggagccucacccuucacuuucauuucaagc

SEQ ID NO: 4142279 - RNA, 81 nt, Human
gccuucaucuguucaacaagucuuuuuucacugccuuggaauacagcagcgaccagacugugaacuugaggauaagaaggc

SEQ ID NO: 4142280 - RNA, 81 nt, Human
gccuucauuccaaagauuauggagaaauaauuagaagcagaccuuuuaagauauuuucuguaaauuuagaugaauaaaggc

SEQ ID NO: 4142281 - RNA, 64 nt, Human
gccuuccagcagcgugggagaaguauuugccauggcaacuauugcaucauccugcagggguggc

SEQ ID NO: 4142282 - RNA, 106 nt, Human
gccuuccagccccuccacagaauccagaauugcugaggugccaguuaauucuucauucugcaccuccccucaccaaucugguuuucugggagggcucuggcagggc

SEQ ID NO: 4142283 - RNA, 61 nt, Human
gccuuccucccagaugugcccaauggagucugaacucugguucuaauuuguggaggugggu

SEQ ID NO: 4142284 - RNA, 71 nt, Human
gccuuccucuacaacaccaggcacggaguggcugaaccauugcuaggcccuggcuugagcucagggaaggc

SEQ ID NO: 4142285 - RNA, 63 nt, Human
gccuuccuuccucuccugaugucucaggccucuagaccuagacugggguucuggcaaggaggc

SEQ ID NO: 4142286 - RNA, 59 nt, Human
gccuucucugugagcuccuaggagaucuucccaugacaaucuaggggauagugaagagc

SEQ ID NO: 4142287 - RNA, 88 nt, Human
gccuucuguggcccuaauguguuggacagcuucuacugugaccuuccucggcuucucagacuagccuguaccgacaccuacagauugc

SEQ ID NO: 4142288 - RNA, 56 nt, Human
gccuucuucuugcaagggaaugucagagagcaugaaccccccuggcaaagaauggc

SEQ ID NO: 4142289 - RNA, 87 nt, Human
gccuugaaagugaauuguuugcaugaccugauuuccuucagucuggucauugcaguggcaaaucacagcgccucaauuuccacuggu

SEQ ID NO: 4142290 - RNA, 77 nt, Human
gccuugaaagugcugaccagggucacucacagggcuguuaaacagcugcugcgccucacccuggcagcaaacaaggc

SEQ ID NO: 4142291 - RNA, 92 nt, Human
gccuugaaguuaccuggaaggugaugguacagcaggucgcacccagcagccugugcuguaccaaugccuucaaugcaggugaugucugaggu

SEQ ID NO: 4142292 - RNA, 71 nt, Human
gccuugagaaucaauuagauucuaugaguuuuauaguaaaagccucauauaacaugauuggucuauaaggc

SEQ ID NO: 4142293 - RNA, 70 nt, Human
gccuugcaugugcuaacgacaagcaaugacuuacaugcauagcuuguacaucacuggcagaugggauggc

SEQ ID NO: 4142294 - RNA, 60 nt, Human
gccuugcugugaugcucacauugaaaauaugaauuuguuccaaugugacuaucagggagc

SEQ ID NO: 4142295 - RNA, 56 nt, Human
gccuuggcccacagugcuccuggcuuggauuuagccagguccucaccgccagaggc

SEQ ID NO: 4142296 - RNA, 59 nt, Human
gccuuggcugaugugcgaaugaaagcaguccucggcugguuuauacaauagccagaagc

SEQ ID NO: 4142297 - RNA, 70 nt, Human
gccuugggaaguaauaugguggucucacacacucuacugacaggccuucaucucaugugacuccuuaggc

SEQ ID NO: 4142298 - RNA, 66 nt, Human
gccuugggacagccagcuucagacaggagugaauuugaugcucauucucugggauugacccaaggc

SEQ ID NO: 4142299 - RNA, 107 nt, Human
gccuugucaaacugcuuggcucugaucagauguccagugugauccuugauucugaacaccaacuggugacugauucugggagccagauuaaggcaggcgguaagagc

SEQ ID NO: 4142300 - RNA, 66 nt, Human
gccuugucauugacuuugcuguaaggauuuucucgacaacuccaugcaaguguuucugacaguggc

SEQ ID NO: 4142301 - RNA, 82 nt, Human
gccuuguuaagguccugcuuuaaugagugaauaauggugauugauuuaugauuuacacaucaaagcagcagguuagcaaggu

SEQ ID NO: 4142302 - RNA, 73 nt, Human
gccuuuagaaugcuguauaucuuagcuaaugagaaugaucuaaucucacacugagaggugacagcgugcuggc

SEQ ID NO: 4142303 - RNA, 77 nt, Human
gccuuuaguauauggauauuggccaaacucauuuguuucugcugcaauuggguuuucagauguccuccuacuguggc

SEQ ID NO: 4142304 - RNA, 67 nt, Human
gccuuuaugucugaaaaucagcauugaguccaaucuuggcugucgauuuuaaggcuuauuuaaaggc

SEQ ID NO: 4142305 - RNA, 84 nt, Human
gccuuucagcccucucucgugcaggccuugcucggagucccaggagauccacagguccggcaugaacagugagaggucagaggu

SEQ ID NO: 4142306 - RNA, 117 nt, Human
gccuuuccaaaaccuaagucucuuaacccagaaguccaggccucuuucuaauggugcuggaggaaugauuggcaagccugagauccgggaguggagauuauagggaacgguacaggu

SEQ ID NO: 4142307 - RNA, 86 nt, Human
gccuuucuacccaucugcuguucuucacagcuugucucugggcucagccccaagccuggaggggcaguaaauggauucagaguugc

SEQ ID NO: 4142308 - RNA, 125 nt, Human
gccuuucugucauuucuccuuuauucccucaugguucauuuagauguaaacacuuuccagaguagaaaauuacaguuaaugugacuaaccagcgagggcugaaacgggaacaugggcucagaggu

SEQ ID NO: 4142309 - RNA, 61 nt, Human
gccuuugaaugcaggacauacagaagugacaucucacugcuggaugugcugauucacuggc

SEQ ID NO: 4142310 - RNA, 62 nt, Human
gccuuugagcagcagucugcaggcccugggaaacacugggcugagagugacuguucuguugc

SEQ ID NO: 4142311 - RNA, 82 nt, Human
gccuuugcuauuguaaauagugccacaauaaacauaugugugcgugugucuuuauaguagcaugauuuauaauccuuagggu

SEQ ID NO: 4142312 - RNA, 82 nt, Human
gccuuugcuauugugaauaaugccgcaauaaacauaugugugcaugugucuuuauagcagcaugauuuauaguccuuugggu

SEQ ID NO: 4142313 - RNA, 87 nt, Human
gccuuuggcauggauuucugaugcagcaucaauaaauuuucuauuagcaagaucugcaaagaagcaacauccuugucuuaauuaggc

SEQ ID NO: 4142314 - RNA, 63 nt, Human
gccuuugucauucuguguauuuaaauccaguggucuaaaugucaguacagaaugacagagugu

SEQ ID NO: 4142315 - RNA, 112 nt, Human
gccuuuuagauauacauaggaagauaaaugaccagaaauacagcuguggugcggggcuguguacuguacugucuuuuuugcuguucauuuuuaugcuauagguaugaugggc

SEQ ID NO: 4142316 - RNA, 96 nt, Human
gccaggaaccucgguguccugccuuccagccuugggcucugccuccuucagagcccccagggaaggcaggcagugagaaagugggucaauccuggc

SEQ ID NO: 4142317 - RNA, 80 nt, Human
gccaggaaggaguucuuugaggagguauggcuuaagagcuguaagaugagcugugcagagcggggaagagcaccccuggc

SEQ ID NO: 4142318 - RNA, 91 nt, Human
gccaggaaggucuugaucuccugaccucgugauccgccugcuuuggccucccaaagugcugggauuacaggcaugagccaccgcgcccggc

SEQ ID NO: 4142319 - RNA, 57 nt, Human
gccaggaaugaaaggucaggguuggagaccucaugagucuggguuuucauuugaggu

SEQ ID NO: 4142320 - RNA, 65 nt, Human
gccaggacuuggucccaggcagagggcucgacccccaagcccugcugcccuagacccaguccugc

SEQ ID NO: 4142321 - RNA, 55 nt, Human
gccaggagacuccauucauuuggucuggaaugguccagggagggacacuuuuggc

SEQ ID NO: 4142322 - RNA, 58 nt, Human
gccaggagagcgcccucccggccccuuccaugaggggugugaagcgcccucugcuggc

SEQ ID NO: 4142323 - RNA, 93 nt, Human
gccaggagaggggaugcuuccaaggcuaagacaagaccccuucauuugugggcuuaaauaguuuguuuuaugagaaauaugcccuccucuggc

SEQ ID NO: 4142324 - RNA, 66 nt, Human
gccaggaggggcggguucuuggcacauggaauuccugaguagcacaaguaucugcuuuuccucagc

SEQ ID NO: 4142325 - RNA, 91 nt, Human
gccaggauggccucaaucuccugaccucaugauccaccugccuuggccucccaaagugcugggauuauaggcaugagccaccaugccuggc

SEQ ID NO: 4142326 - RNA, 91 nt, Human
gccaggauggucucgaucuccugaccucgugauccagccgcuucggccucccaaagugcugggauuacaggugucggccaucgcgccuggc

SEQ ID NO: 4142327 - RNA, 91 nt, Human
gccaggauggucucgaucuccugaccuugugauccaccugccuuggccucccaaagugcugggauuacaggugucagccaccgugccuggc

SEQ ID NO: 4142328 - RNA, 91 nt, Human
gccaggaugguuuugaucucucgaccuugugauccaccuaccuugaccucucaaagugcugagauuacaagcgugagccaccgcaccuggc

SEQ ID NO: 4142329 - RNA, 63 nt, Human
gccaggauugggaagcccucaucuuagcuguguccaggggagaguccuuuccaguucccuggu

SEQ ID NO: 4142330 - RNA, 66 nt, Human
gccaggcaaaggcuuccacugcauccuuccaggcauguggaggauaaacacggagcuuccccuggc

SEQ ID NO: 4142331 - RNA, 66 nt, Human
gccaggcacaaugagcgccaucuuuuccugcugcaagaaugagguuuggguucauugcuggcuggu

SEQ ID NO: 4142332 - RNA, 63 nt, Human
gccaggcacagaguuauucauuuauucaauaaauauuuacugaaugccuacuaugugccaggc

SEQ ID NO: 4142333 - RNA, 69 nt, Human
gccaggcacugagaggucugcagaacacauggcgguaagguccugcccucagaggccucauagucuggc

SEQ ID NO: 4142334 - RNA, 71 nt, Human
gccaggcacuguguuaggcacuguguauccaacaggacauaacagugaauaagacaugugcuuucccuggc

SEQ ID NO: 4142335 - RNA, 67 nt, Human
gccaggcagccacccucugcgaagcccagcccagcuggauguaugugaugggugggcuguggauggc

SEQ ID NO: 4142336 - RNA, 58 nt, Human
gccaggcccugaggauucggcggggaagaaagcugggaccuguccucucagggcuggc

SEQ ID NO: 4142337 - RNA, 72 nt, Human
gccaggcuuacccagcccugcccagauguggcuacagugcagggugcaggcggggguggguaauaggcuggc

SEQ ID NO: 4142338 - RNA, 55 nt, Human
gccagggaauucauaagcccccuuuugcuguggccugggagcugaggucuuuggu

SEQ ID NO: 4142339 - RNA, 57 nt, Human
gccagggacagucuggcuggaaauauuauuauucauacuggacagcugguuccuggc

SEQ ID NO: 4142340 - RNA, 77 nt, Human
gccagggagcugcgggcggcagcaggacauuagccuggggacaggcagauguucugggguguuuguggcucucaggc

SEQ ID NO: 4142341 - RNA, 76 nt, Human
gccagggccagcagguugucaaggagcugagcugccccaggugucugguggggcuccugggcagcugcucccuggc

SEQ ID NO: 4142342 - RNA, 83 nt, Human
gccagggccuggggccgcggccuucccucgaggagcagcgcaggucucagggugcgauccugggcuguggccccgggcagggc

SEQ ID NO: 4142343 - RNA, 61 nt, Human
gccagggcuuacuggaggcugcuuuggcaaacagaggccagcuaguccaggaagucugagc

SEQ ID NO: 4142344 - RNA, 56 nt, Human
gccagggcuucucccucacagcagcugccuccuacuggagucagaaaugccuuggu

SEQ ID NO: 4142345 - RNA, 72 nt, Human
gccagggcuuggugaccgauuagcacuagagcuuaggggaagaaaggugcugaggacaccuagccuucuggc

SEQ ID NO: 4142346 - RNA, 75 nt, Human
gccaggggcugggacagagccaagcuccugcaaucggcugacuguuugggucccucugucccacugcccaagggc

SEQ ID NO: 4142347 - RNA, 55 nt, Human
gccaggguuggggaggagggcgauuggcugucucucuuuuucuccagcucugagc

SEQ ID NO: 4142348 - RNA, 57 nt, Human
gccaggguuuugaaugccaugauggccaaaugaaggcuauaaauucagagcuuuggu

SEQ ID NO: 4142349 - RNA, 99 nt, Human
gccagguaacacuuacugggaaauuuuagguuugucucggaagccaaucccuaucauuuugacacaaaagaggauuuucuuuuaucugagcaucuuggc

SEQ ID NO: 4142350 - RNA, 92 nt, Human
gccaggucaggguaaaugugguuucagacagacucgaacucucuuugccagucugaguaucucugagccagauucuuugcggagggcuuggu

SEQ ID NO: 4142351 - RNA, 67 nt, Human
gccagguccucacuuccugcccugggugcacacaugaauggggcagccagcaggaagcgggagaggc

SEQ ID NO: 4142352 - RNA, 60 nt, Human
gccaggugauucugauauagcuaaaguuugaaaacuagugcagucggguaaucgccaggc

SEQ ID NO: 4142353 - RNA, 57 nt, Human
gccaggugccuccagucacagugcagacucaaccccugcuuggugcuugcccuuggc

SEQ ID NO: 4142354 - RNA, 59 nt, Human
gccagguggacuugauuugaauacuggcuccacuguuuuuagguuguguccccuuaggc

SEQ ID NO: 4142355 - RNA, 60 nt, Human
gccagguggucuggcuccagagccugcacuuuuaaccuccucuugagcauuucauuuggu

SEQ ID NO: 4142356 - RNA, 78 nt, Human
gccagguuguaauuugcaaauguauugucuggcccuuagggguuggcagcuaacaauuguuugcagaaggagccuagc

SEQ ID NO: 4142357 - RNA, 69 nt, Human
gccagguuuuauuuuacauaaagucuuuuccagaagaagaccauaauguaagaugaauuuguacuaggu

SEQ ID NO: 4142358 - RNA, 81 nt, Human
gccagguuuuuuagugacauugugguuauuaaauguuuaaauuaauuugauacauaugacagcuuaagucacuuauuuggu

SEQ ID NO: 4142359 - RNA, 86 nt, Human
gccaguccugaccgagcccagccggauucccaguucccgccguccggggccagggaaguuuuggcggggagggguagagcgcuggc

SEQ ID NO: 4142360 - RNA, 73 nt, Human
gccagugacagugaguucaucaagacaugaucagucauuuucuucaggugaacuuauuuaucagaauccuggc

SEQ ID NO: 4142361 - RNA, 87 nt, Human
gccaguggagacuuuuuaaucacuaagguccucauguaacccaugucugagguuacaggggacauuggggacaucagucucaguggc

SEQ ID NO: 4142362 - RNA, 60 nt, Human
gccaguggaugucucauagugugaugagccucugucaccuguuggauguauacugucagc

SEQ ID NO: 4142363 - RNA, 130 nt, Human
gccaguggcuuuugugcccagucuguuuuuccugcaaugcuuuggauuucugauuugagcuccauuucuggaacucuguguaggaaccaggucauguaugagaggagcuaaggggaccuugccaacuggu

SEQ ID NO: 4142364 - RNA, 62 nt, Human
gccaguguggcuccaaagcaugggccccugagcaggggccucucaugcccagagccaagggc

SEQ ID NO: 4142365 - RNA, 74 nt, Human
gccaguuuucugcuggauguuuaagaagcuuacacauauacaaauguauuuuaugcauauagcagauacgaggc

SEQ ID NO: 4142366 - RNA, 64 nt, Human
gccauagaccccccaggacucccucacacuaaugaggggugcugcagggaagucgggggguggu

SEQ ID NO: 4142367 - RNA, 84 nt, Human
gccauaugacuugagaaggcuggaguuaggaaaagauaagguauuuauuccugauuccuggcuugauguucuuugugugugugu

SEQ ID NO: 4142368 - RNA, 90 nt, Human
gccauaugguucuguuucugccuuccuucuacucccuucuugcuaauuggaaucaggucaagauggugagggcagaaguaaccauggggc

SEQ ID NO: 4142369 - RNA, 125 nt, Human
gccauauguggcacuuuagguuggcauauaucugaaauggcauguuuaauguacuguauuacuaggauuaguaauuuuacaguggaaggcugcuacuuuuaugauauagucuccugcugcugggc

SEQ ID NO: 4142370 - RNA, 103 nt, Human
gccaucaaguacuucuaagacaaaccuggcaugccuugggugccucugggcucauaccuaggaguucagagagguuggcuaggauguuugaauagaucuaggc

SEQ ID NO: 4142371 - RNA, 62 nt, Human
gccaucaauacagugcuaauaaaugcucaauaauuucuucuuauuguacuucuguugauggu

SEQ ID NO: 4142372 - RNA, 66 nt, Human
gccaucaauucuuaggaaaauagcugcaucaacaagucagcuaugcaguuccuuaaggauuugggc

SEQ ID NO: 4142373 - RNA, 119 nt, Human
gccaucagcagagguuguccucccagagcauguggcuuuggcaugugccccuuguagcagagaaggggcuggggcaugugcccaacccaccaguugggaggcacccacucugcuauggc

SEQ ID NO: 4142374 - RNA, 69 nt, Human
gccaucauaaaccacuuuguaaucugcauucaauuaucuuuugcagugcucugguuuuugugaacuggu

SEQ ID NO: 4142375 - RNA, 70 nt, Human
gccaucauggcaggaggcugcuggcagagcuucaccugguuuccacugccagucccuuaugcccaguggc

SEQ ID NO: 4142376 - RNA, 57 nt, Human
gccaucauuauagguuucuugcuucuuaucacaacagcaaggcuucuuugauggggu

SEQ ID NO: 4142377 - RNA, 62 nt, Human
gccauccagaccgugccaugcugccauuuggcguaaggccucuggucucggaauucccuggc

SEQ ID NO: 4142378 - RNA, 79 nt, Human
gccauccuuuagacacuugagcucgggcaauggguucccccaagccuggcacauuggagucugcugggaauuuucuggc

SEQ ID NO: 4142379 - RNA, 119 nt, Human
gccaucuccuccaugugucuggggaacaaggcuagccuagccuucaccagcguaguggcuuucgcucugccauggaaguggccagaccuagccaugggucccuaaacacaggguguggc

SEQ ID NO: 4142380 - RNA, 63 nt, Human
gccaucucggagcuaucaaaggaacugauuucuggaggucaccuucgaaggugcugggauggu

SEQ ID NO: 4142381 - RNA, 56 nt, Human
gccaucuucaacaucagaaguuuugaagaauuuuugauaaauugaggaauaauggc

SEQ ID NO: 4142382 - RNA, 57 nt, Human
gccaucuugagacaugaaagguguccaaauugggaugaauucagcacugaagauggu

SEQ ID NO: 4142383 - RNA, 59 nt, Human
gccaucuuggaagccaauauugcugguuuuaaaggaaaccagauaaauggcuccagggc

SEQ ID NO: 4142384 - RNA, 77 nt, Human
gccaugaacugaagccuuguguggccucucuagcaaccuagguuugauggggagugugaugaggguuucagcagggc

SEQ ID NO: 4142385 - RNA, 66 nt, Human
gccaugagguucucuuuaaucauucugauaguuucauuagaaaauuuagaacugaacuucuucggu

SEQ ID NO: 4142386 - RNA, 64 nt, Human
gcagggucgcucuaggagaucagcacaaagcuggguuuguuucaguggggcuacuugacccugc

SEQ ID NO: 4142387 - RNA, 95 nt, Human
gcagggugugaggggagguggccagggcaccugguguucagcagguugaugacucuggcccaggucucucugagcccucuaaugcuguauccugc

SEQ ID NO: 4142388 - RNA, 93 nt, Human
gcagguaguggaaccggucguaguucuucagcagguacuugggcgcauacaugugcucgcuggggucugcaggcggguacuccugcugcgugc

SEQ ID NO: 4142389 - RNA, 65 nt, Human
gcaggucacauauauccaaagcaagaacauguauuaauugcuucuggauagggguauggagcugu

SEQ ID NO: 4142390 - RNA, 56 nt, Human
gcaggucuagaagcugccucugaaccacaucacacugugcaugcuuguggaguugu

SEQ ID NO: 4142391 - RNA, 56 nt, Human
gcaggugagagaagguuucccugagcaaggccagggcuucauuuuaauucagcugc

SEQ ID NO: 4142392 - RNA, 59 nt, Human
gcagguggggcaacccagagccaugggggcuacccaugggaauugggaggucccaaggc

SEQ ID NO: 4142393 - RNA, 93 nt, Human
gcagguggguguaagaaacagcuagaaagccauugggaaccuagaauguccucuuucuagcccuuguuuuucuuucuuugcagacugacuugc

SEQ ID NO: 4142394 - RNA, 56 nt, Human
gcaggugguccccguggagugggcaaguguauuccucugacaaugaugucaccugc

SEQ ID NO: 4142395 - RNA, 67 nt, Human
gcagguggugggagagcuugcuuugaugcucccaaagaaaguguugcccagguucucuccugcuugu

SEQ ID NO: 4142396 - RNA, 55 nt, Human
gcaggugguuaaggucccauguguuacaacaaaauacaggggucaaagcacuugc

SEQ ID NO: 4142397 - RNA, 90 nt, Human
gcagguugacuuguuccaggugcuuccaacaggugauuucucagcgagccugagccaguagucagggacaaacaggaagguuaaccuugc

SEQ ID NO: 4142398 - RNA, 93 nt, Human
gcagguuggaugcuugaugaaaggaacaaaugagaaaauaugguaaacauuuaaaaaauuguuauuuguccuuauuaagaucuguucacuugc

SEQ ID NO: 4142399 - RNA, 57 nt, Human
gcagguugguuucuucugaggccucucuccuggccuugcagauggccaccuacuugc

SEQ ID NO: 4142400 - RNA, 82 nt, Human
gcaguagaaggcucuguguguccacacauacauacauauuuauaugucuuugcugugugcugggcccaacccagagaacugu

SEQ ID NO: 4142401 - RNA, 68 nt, Human
gcaguaguauuagcaaugccucaugucccagcacuuugcgguuuagaagcauuauuuaauuuuacugc

SEQ ID NO: 4142402 - RNA, 81 nt, Human
gcaguauaaaugucaaguagaacuauaaugaugucuaauagggcauuuaucauuuuauauuggaauuauuuauaugacugc

SEQ ID NO: 4142403 - RNA, 84 nt, Human
gcaguaucuauuguucccauguuaauuuucaugugugcuuaauguuuagcuccaacauauacaugggaauauguggaguuuugc

SEQ ID NO: 4142404 - RNA, 68 nt, Human
gcaguaugaguguuuuagacaucauuuaaaguagacaucauuaaggaaaauguugauauucaugcugc

SEQ ID NO: 4142405 - RNA, 55 nt, Human
gcaguauucagcacaauuuggccaauacguauguguuccaagcugcuggauaagc

SEQ ID NO: 4142406 - RNA, 57 nt, Human
gcagucaaugggacugcccuguuuuuaccuaauagauguuuucuccuaauuggcugc

SEQ ID NO: 4142407 - RNA, 76 nt, Human
gcagucacuggaauagcugaggauaauacagaaguugauuauacuccucucugccuccuucagucuagaugauugu

SEQ ID NO: 4142408 - RNA, 57 nt, Human
gcagucagacaggaggagcucccucuuaccugugggaaggucagccuguuuuacugu

SEQ ID NO: 4142409 - RNA, 65 nt, Human
gcagucauggaaaaauguauaccuacagaggcaggagcagggggaagauauuuuuucaauguugc

SEQ ID NO: 4142410 - RNA, 81 nt, Human
gcagucauuauguggggcuuacaaaggcagaucaucugggcaaaugacucucuacugguacugagucccaaagaugagugu

SEQ ID NO: 4142411 - RNA, 63 nt, Human
gcagucuccagauggccacaggaugcaggccuugcuuccugagaugcugauuucgggggcugu

SEQ ID NO: 4142412 - RNA, 100 nt, Human
gcagucuccucccuuguggcccagacccagcugggucccuuccuccuaggcagcugagggaaggacugcuggguuggccacgggccugggaaggggaagc

SEQ ID NO: 4142413 - RNA, 62 nt, Human
gcagugacacucaguggcucugucccaugcauguuaaaugggaagagccuggggugucaggc

SEQ ID NO: 4142414 - RNA, 65 nt, Human
gcagugacauggcccaaaugauauuuuagcagauucaaguggcugcuauguuaagaauagacugc

SEQ ID NO: 4142415 - RNA, 98 nt, Human
gcagugagagcuguggccucuggagucacagugaccugagucagaguccagcuuugcuacugucuaucugugcuucucuagguggcagauuuaacugc

SEQ ID NO: 4142416 - RNA, 118 nt, Human
gcagugauggugccaaagcaauagaggguaagacuguuggugccuuagcaugaaucaagauaguggcaccaaacuugacuaguuaucacuguauucuuugcuaucacauacucacugu

SEQ ID NO: 4142417 - RNA, 71 nt, Human
gcagugcagcuccuucaaucucaccauggccucugccagaaugcagauccugggagucguccugacacugc

SEQ ID NO: 4142418 - RNA, 61 nt, Human
gcagugcauugcaguaggaacuaaguaaauaauauauucaaaguccuagugaaaugccugu

SEQ ID NO: 4142419 - RNA, 122 nt, Human
gcagugcccuggacguggccucgaaccgcgugcccuggcucuucuuguuccacacguggacagcauagguggcacugagcagccgcggcagcuccucgggguugauguccucaaaguacuuc

SEQ ID NO: 4142420 - RNA, 77 nt, Human
gcagugccuacuuuaaaugcaaauguaagggugggaucauagaaauuauccaauuugcauuuucuaguucaugcugu

SEQ ID NO: 4142421 - RNA, 81 nt, Human
gcagugccuggcuaggacucauccuguuucuucucuuaagugaguggagcuauggagauuccuaugcuuauaugcaacugc

SEQ ID NO: 4142422 - RNA, 62 nt, Human
gcagugccugguuugaaagagcccuuccaugggucugccggaagagcugucaggaaggcugc

SEQ ID NO: 4142423 - RNA, 61 nt, Human
gcagugcuggagggaggcagguucagaauugaccuuagagcuaccucccugccagcaaugc

SEQ ID NO: 4142424 - RNA, 55 nt, Human
gcagugcuugcucaggcuucauagccaagacuugcccaggccugcccagcacugu

SEQ ID NO: 4142425 - RNA, 100 nt, Human
gcaguggcagucgaacaauggcugggcuggagucuucugaaagccaaacucaucugauggcccagauggcuccucccaucacagauuugacaguugaugc

SEQ ID NO: 4142426 - RNA, 64 nt, Human
gcaguggcaugaguauaggcuucucacucacaugguguuugguaguuucuucuugagccaaugc

SEQ ID NO: 4142427 - RNA, 86 nt, Human
gcagugggggaagagcuuguuaaaguaaacgauccaaaaacuacaaaaaugcuggaggacuuuugugcaggucucucccaagcugc

SEQ ID NO: 4142428 - RNA, 64 nt, Human
gcaguggggucuguccucuucugggugcucgucagucacuuagaugaagucacagaacccaugc

SEQ ID NO: 4142429 - RNA, 57 nt, Human
gcagugguggagcuuacauaucauaccuuugaaaaugacucugaguaccacuuuugc

SEQ ID NO: 4142430 - RNA, 88 nt, Human
gcagugguuaucuauuggaaagaagaaugauagaagguggggucggcaugacaugacuauuucccucaucaucuuccacuagcccugu

SEQ ID NO: 4142431 - RNA, 67 nt, Human
gcaguguggccccaguaucacgcagagccuaaccacuuucuauguggcccucgugggcucguacugc

SEQ ID NO: 4142432 - RNA, 61 nt, Human
gcaguguggcguggggaccuaaagcaucauuuaucuggucuacaaaaugccagccaugggc

SEQ ID NO: 4142433 - RNA, 69 nt, Human
gcagugugucagaggcucagggucucagggacaauauccaggcucuaggucaccuuugacuuuaccugc

SEQ ID NO: 4142434 - RNA, 56 nt, Human
gcaguguguguccccacacuggcagagggacugucugugaacaaugacagcacugc

SEQ ID NO: 4142435 - RNA, 63 nt, Human
gcaguguuacuuggaguacuaauggcccagguggccucaauacagcauuucaaauaacucugc

SEQ ID NO: 4142436 - RNA, 65 nt, Human
gcaguuagucagaagggccaguggauuugaguauuucagaucagauucugccuuugugacacugc

SEQ ID NO: 4142437 - RNA, 80 nt, Human
gcaguuccacaaagcuguagaaucaucuuaauauggggagcaaaaauaugauaagauggucaauuauagucauucacugc

SEQ ID NO: 4142438 - RNA, 59 nt, Human
gcaguuccacugaggcuagccaaggaaaagggcuuggcugcaaucacagggacucaagc

SEQ ID NO: 4142439 - RNA, 70 nt, Human
gcaguuccugaggccagcugcagagcucuaaccuggagaaggggcagagccacggcaggccuaggaaagc

SEQ ID NO: 4142440 - RNA, 68 nt, Human
gcaguucuagcaugccuuuuagcacauacuuacugauuaugugccagaaaauaugcugaggauacagc

SEQ ID NO: 4142441 - RNA, 64 nt, Human
gcaguugaagauccgugaggugcccagaagaucaugcagucaucagucccacggagcagcccgc

SEQ ID NO: 4142442 - RNA, 58 nt, Human
gcaguuguaauaugaugugaggucugcaauagaaauacacacacgauguuaggauugc

SEQ ID NO: 4142443 - RNA, 77 nt, Human
gcaguuuauuuaaagguucuacuuuuaaagaauaucuaagguauucuuaggacuuaggacguuucaaagucacuagu

SEQ ID NO: 4142444 - RNA, 74 nt, Human
gcaguuuuacaguccuuguuucggucagauguguuccauucaacugcuguuuagcaaggcugacuaagaugagc

SEQ ID NO: 4142445 - RNA, 81 nt, Human
gcauaaaaccuugaacaccuuuuauucgccaggcacauaaaaagaaucuuuugaguguugauaaugggguagguugugugu

SEQ ID NO: 4142446 - RNA, 63 nt, Human
gcauaaaggacuauaaggaucaaaaagcaagcagaaaugaauccacauucuaguccuuuaugc

SEQ ID NO: 4142447 - RNA, 104 nt, Human
gcauaaaugaaaauggaagcuguagcagaaucagugcuacagagcacuaaagagacugugaagcauagauucuguagagaugcacuuucguuucauacuuuagc

SEQ ID NO: 4142448 - RNA, 74 nt, Human
gcauaaaugaugaaccgcuucauggugccuguagaggccucuugcagagcacccugcagugguaugguuugugu

SEQ ID NO: 4142449 - RNA, 76 nt, Human
gcauaacuuagugucagcaucucauugagcuaggcaucucauuguggcuuauaauguucugugacacugucggugu

SEQ ID NO: 4142450 - RNA, 55 nt, Human
gcauaagggcauauugacgggugagugggggguccacacaguggagugcccuugc

SEQ ID NO: 4142451 - RNA, 55 nt, Human
gcauaaucagaguuaguucaguguuaauuauuuugagagaugaacucugauaugu

SEQ ID NO: 4142452 - RNA, 66 nt, Human
gcauacauguauguguacgugcauguguacgcgugugugugugugugugugugugugugugugugu

SEQ ID NO: 4142453 - RNA, 125 nt, Human
gcauaccgacuugaagucaaauuuuacucugaaaauaguagcugaggaacuuucauugagguucuaaccuccugaagucucuguuuucucauuugcuaaauggauaaaauaacuucaaaaauugc

SEQ ID NO: 4142454 - RNA, 61 nt, Human
gcauacgugcaugcugccgcccucgacuguuggagaccccgggccagcugaugcacgaugc

SEQ ID NO: 4142455 - RNA, 58 nt, Human
gcauacuucuugcugcuuucagggccacaguccaagcccagccagccagcagguaugc

SEQ ID NO: 4142456 - RNA, 92 nt, Human
gcauacuugaagucuugagucuuauuuucugucuacuaaaguuaugccaaauacuuguggagaacagugagugagugaggagaauaguuugc

SEQ ID NO: 4142457 - RNA, 62 nt, Human
gccaugauugauucuacuuaaaacauauggagaucuaugaaauuguuggugaaucuaauggc

SEQ ID NO: 4142458 - RNA, 105 nt, Human
gccaugauuggcauguucuuuuucuucgugugaaauguuuugacaaugcaauucaugcauugcaacugacagaucauuuugaaguaguuaauauugaaucauggu

SEQ ID NO: 4142459 - RNA, 93 nt, Human
gccaugcaggcaggggcagcuaguuuaagaaagaggauggcuuucuuccaguuguauuuauccuuucaggcaagcucccugcuaguauuuggc

SEQ ID NO: 4142460 - RNA, 60 nt, Human
gccaugcugaugugccagguuugcccugcacacaggcaacagaccauugcaugagcaggu

SEQ ID NO: 4142461 - RNA, 85 nt, Human
gccauggacuugugagcuccuccugacuugugagccccuccuacaguguuuccauucuaggaacagucagccuuacaguccuagc

SEQ ID NO: 4142462 - RNA, 79 nt, Human
gccauggaggcugugcucagagcuccagcucuccucgucugguagagguggggggagcuugggagcugccaacaguggc

SEQ ID NO: 4142463 - RNA, 77 nt, Human
gccauggccucccuccacugcccugagcuccagguggaguagaaagaaggcacugggcccugggcaggcacauaggc

SEQ ID NO: 4142464 - RNA, 60 nt, Human
gccauggccuccuucuccuggccacaggcaugcucugcuccugagccagggaggccaugc

SEQ ID NO: 4142465 - RNA, 62 nt, Human
gccauggcgacugcaguggcucggccccuugcagcaaggccagaggcucagguugccauggc

SEQ ID NO: 4142466 - RNA, 98 nt, Human
gccaugggccuaugaggccuccccaucucuccuucagcugaggccccgagguuggggcuaggacacggagggguggggugggcuuggcaguucguggu

SEQ ID NO: 4142467 - RNA, 69 nt, Human
gccauggugccuuauacauaauuagugcuuauacuuacuaagcauuaauuaugcaaaaggccccauggc

SEQ ID NO: 4142468 - RNA, 116 nt, Human
gccaugguugucccgcuuguuguagauugcugacaaggggcaauaacauucaagugauccagucucacaaugugguuugucaucuuuucaguuccuauugucugaccuaucauggc

SEQ ID NO: 4142469 - RNA, 67 nt, Human
gccauguaaaggagaccuggagagauuggaauugagaugcaauuaggacuccaggacucugcguggc

SEQ ID NO: 4142470 - RNA, 70 nt, Human
gccauguauuauucagucugucuagggaguuaagucccuuuguuuucacucccacugagugaaacauugc

SEQ ID NO: 4142471 - RNA, 104 nt, Human
gccaugugcagucaggugggccugggcuugcaucugugcugggugaccagagccaagucacucagcuccucagagccucaguuuucccaccucuacaaugaggc

SEQ ID NO: 4142472 - RNA, 72 nt, Human
gccaugugcgucaaagggcagacgaggcgucagcaugggcaccuuuugugucugcguuuguggcgaaauggc

SEQ ID NO: 4142473 - RNA, 68 nt, Human
gccauguuccaaguguauaaagugccauaucuacugagauuauuuguauaaauuggagcaauguuggc

SEQ ID NO: 4142474 - RNA, 61 nt, Human
gccauucaguauuucauuuauucacuacauaaugagugccuaccaagugcuggauacuggc

SEQ ID NO: 4142475 - RNA, 76 nt, Human
gccauuccacagagaccaguuacagcguccagguagguaaaaaggcaggauccugaagacugggcucuugaauugc

SEQ ID NO: 4142476 - RNA, 111 nt, Human
gccauucucacucuggugauacuauuaguuaacuuucaggugcauguuugcauucuagugcaaauaugcugacaguuggauauaauuggaauuuucagaagagacuguggc

SEQ ID NO: 4142477 - RNA, 80 nt, Human
gccauugaauccuugcagaggucucgccucucccaugggcagggacccggugcugaggccuuggcagggagggugguggc

SEQ ID NO: 4142478 - RNA, 64 nt, Human
gccauugcgcuugggcaaaucgcuuagacuuucugggccucaguuugcuuaauguguagagggc

SEQ ID NO: 4142479 - RNA, 75 nt, Human
gccauuggagauaugucauguaaggugagcugcugaaaucagcuacucaaggacuauugcaugacucccaagagu

SEQ ID NO: 4142480 - RNA, 62 nt, Human
gccauuggguccucaguaaaugacucugaaaaauguuuuuauuaauuagugacccaaugagu

SEQ ID NO: 4142481 - RNA, 69 nt, Human
gccauuuacaguacaccacuguguacaguacaccacuguguacaguacaccacuguguacaguacaggc

SEQ ID NO: 4142482 - RNA, 80 nt, Human
gccauuucaggauggcacccaagcucuuaguagucaucccaagauggcauccaaguucuggguggccauuccaagauggc

SEQ ID NO: 4142483 - RNA, 59 nt, Human
gccauuuucuucaggccagaaaagcugagaccucagcacuuugcaggaaggaaauaggu

SEQ ID NO: 4142484 - RNA, 113 nt, Human
gcccaaagcccaccagggcaccugccgucugcagccuccaggaguucacacagagaucugggauugcuggggcaggcuguagcccacggaugucgccuccugaguuucugggc

SEQ ID NO: 4142485 - RNA, 65 nt, Human
gcccaaagggggaugcacuagcauauuccuaaguuacuuggugcccauguaucccuucacugggc

SEQ ID NO: 4142486 - RNA, 92 nt, Human
gcccaaauuucgggacaguuacauuaaacaaaaggaucagaaaauggaaaucuauuccuuugaaauggcuguaauuggcugaauguugaggc

SEQ ID NO: 4142487 - RNA, 130 nt, Human
gcccaacagaacuaccuggagagugcuuauuuuauuuauauucguugaaauucagaucugaaggcucugcgagaucugagcuagaaaguaugcccuagaaaucagcauucaaguaguguguacuuugggc

SEQ ID NO: 4142488 - RNA, 119 nt, Human
gcccaacuguaggccaauguaaauguuguaaguacaucuaagguaugucaggcuaagcuauagacguuugguagguuagauguauuaagugcauuuucaacuugugaauuauagugggu

SEQ ID NO: 4142489 - RNA, 101 nt, Human
gcccaagaagccaacuuuaaggaggcacucaucucccagugcuagccuuguacuugcaaagccccaagagugagugcuuccuuaaaacaugcauccugggc

SEQ ID NO: 4142490 - RNA, 107 nt, Human
gcccaagcacagcgcugagcauaggacacagaggugugaggggccacaccuuccacacccacucagcaccugccugcugccugcugcuugccugcuacaugcugggc

SEQ ID NO: 4142491 - RNA, 88 nt, Human
gcccaaggcccaguacuuugugaguagauaaggcacaagucacacucuggcuuucugacucuacaacccucaaacguagcacuugggc

SEQ ID NO: 4142492 - RNA, 82 nt, Human
gcccaaugacaauagaguucucauaggacaccguuacuacugccuauuuggugucuccucagugaagucauuguguuguggc

SEQ ID NO: 4142493 - RNA, 56 nt, Human
gcccacaggcaggugcaugggcuggucccgccagcaccugcaaccuucuugugcgc

SEQ ID NO: 4142494 - RNA, 129 nt, Human
gcccacaucagagccaaacuagaguucugucuguacugagaguucugucucuacaccuguuuauacauagcuccaagaucaugcagagauuucaguaacagcaggguuuugcucugucgugucccaggc

SEQ ID NO: 4142495 - RNA, 71 nt, Human
gcccaccgcccccacucucauggccucuggugcagccacagggccuugguaaugggggacuguuggggggc

SEQ ID NO: 4142496 - RNA, 101 nt, Human
gcccaccucggccucccaaagugcuggaauuacaggugugagccaccacgccuggccuccuuccacuucuguucuuuggguuuaggcuggugguaaagggc

SEQ ID NO: 4142497 - RNA, 77 nt, Human
gcccacgacgcauuagcaucugcuguaagcuuauuaaucaccuaacaggcaauuagcaagcuguuacuguuugaggc

SEQ ID NO: 4142498 - RNA, 64 nt, Human
gcccacucguagcuccacccacucacagcacggccagcugcaagggugacagguugcucugggc

SEQ ID NO: 4142499 - RNA, 66 nt, Human
gcccacucucagaccacacagccccugccuuacucuggaagugggcaguucaauucugggaggggu

SEQ ID NO: 4142500 - RNA, 64 nt, Human
gcccacugcuugucaauucgcuugguaccucuguguaccagacacugugaagacaggcauuggc

SEQ ID NO: 4142501 - RNA, 65 nt, Human
gcccagaaagacugccuaacaggccacuacacaauauccacucuguuuggcuugguauucagggc

SEQ ID NO: 4142502 - RNA, 55 nt, Human
gcccagacaucuguugggaccugacccccggucauugguuaccagugugucuggc

SEQ ID NO: 4142503 - RNA, 61 nt, Human
gcccagacugagugugcuugguguuucuccauuaaacagaugaggcccaucagucugaggc

SEQ ID NO: 4142504 - RNA, 55 nt, Human
gcccagagagacacgacagcuagugcgaugaggcaugcuggauggauccuggagu

SEQ ID NO: 4142505 - RNA, 86 nt, Human
gcccagagcgcucugcuggcggcagaggcggcggcgaggcuggcgcgcuugccgccgucugcucgccccgcggaggcgaccugggc

SEQ ID NO: 4142506 - RNA, 77 nt, Human
gcccagagggcacugucugagcuggugauuagagacacaaaaacaagggucuccagacugucuggcccuuuuugggu

SEQ ID NO: 4142507 - RNA, 56 nt, Human
gcccagcacagcuggaagagucaacuggucacagaagguuugggcugauguugggc

SEQ ID NO: 4142508 - RNA, 61 nt, Human
gcccagcacuaaaagcuuugcugguuuuucuauccccacagcagagguucucuggcugggc

SEQ ID NO: 4142509 - RNA, 56 nt, Human
gcccagcaggggauggcagcucugcagagagacagggggccuucaucuugccgggu

SEQ ID NO: 4142510 - RNA, 67 nt, Human
gcccagcggggcccuuagcagagccucuccaauccucggcgccuccccuacacaggguucgcugggc

SEQ ID NO: 4142511 - RNA, 68 nt, Human
gcccagcucuguguauuuuccccacauuuggaugaaugagguaaugugcuacuuacagggagcuuggu

SEQ ID NO: 4142512 - RNA, 64 nt, Human
gcccagcuggcguggagugauugcaggccagguggugugagggccugcccaggccagguugggc

SEQ ID NO: 4142513 - RNA, 58 nt, Human
gcccagcuggugucggaggacguggacaaggacgugcuccuuccccacccgcugaggu

SEQ ID NO: 4142514 - RNA, 59 nt, Human
gcccaggaaggccaaggcugcagugagcccugauggugccacugcacuugaccuugggc

SEQ ID NO: 4142515 - RNA, 58 nt, Human
gcccaggaggcagagguuguggugagcugagaucucaccacugcacuccugccugggc

SEQ ID NO: 4142516 - RNA, 67 nt, Human
gcccaggaggcugaauugggguucuaggugugcagccuugguuucccuuuuggccucuccuuugggc

SEQ ID NO: 4142517 - RNA, 72 nt, Human
gcccaggauaaccauggagcuuugguugaaaguguaagcacucacagggcauuauggcuccagggucagggc

SEQ ID NO: 4142518 - RNA, 62 nt, Human
gcccaggcccuugcagagcgggcuuggagggaacagccucugccugcgcucacggggccggc

SEQ ID NO: 4142519 - RNA, 57 nt, Human
gcccaggccucccucugcaccuccccaagggccuugugcagagcaagggcugagggc

SEQ ID NO: 4142520 - RNA, 58 nt, Human
gcccaggcuagagagcaguggcaugauuacagcucccugcaaccucugccucccgggu

SEQ ID NO: 4142521 - RNA, 81 nt, Human
gcccaggcuggagugcaauggcgugaucucagcucacugcaaccuuugccuccugaguucaagccauucuccugccucagc

SEQ ID NO: 4142522 - RNA, 62 nt, Human
gcccaggcuggagugcaguggugcgaucucggcucacugcaaccucugccucccuccugggu

SEQ ID NO: 4142523 - RNA, 58 nt, Human
gcccaggcuggagugcaguggugugaucucagcucacugcaaccuccaccucccgggu

SEQ ID NO: 4142524 - RNA, 81 nt, Human
gcccaggcuggagugcaguugcaugaucucaccucacuguuaccucugugucccggguucaagcaauucuccugccucggc

SEQ ID NO: 4142525 - RNA, 58 nt, Human
gcccaggcuggagugcaguugugcaaucucuguucacugcaaccuccgccucccgggu

SEQ ID NO: 4142526 - RNA, 91 nt, Human
gcauagcucugauccacaaauucaaauuucaucaguguauaauguauaugagcugguagauuuuguaauuuagauuuugaaagagcuuugc

SEQ ID NO: 4142527 - RNA, 83 nt, Human
gcauagcuuugagacuucuuucaauaagguucugcucuuagggaaaucggggguagggugauugugaaguaaguuugcugugc

SEQ ID NO: 4142528 - RNA, 59 nt, Human
gcauagcuuugaugcugccuuaauauuacacuaaugauaccuugggccaaggcuacugc

SEQ ID NO: 4142529 - RNA, 63 nt, Human
gcauaguacauggguguccucacacaguccucccaagcugugugugugugugugugugugugu

SEQ ID NO: 4142530 - RNA, 58 nt, Human
gcauagucaguaggauucucaauucuuaaguuuggagguugggauuucuguugaaugc

SEQ ID NO: 4142531 - RNA, 80 nt, Human
gcauagucugagaggauuuagaaggugucauugacuuggaauuacaguucuuuguuacagaaugaauuuccggaccaugc

SEQ ID NO: 4142532 - RNA, 89 nt, Human
gcauauaaagguagaugagguaagaauguaacaccucugugaucuuauucugaaaccagguguuuucuuuccuccuaucauaaguaugc

SEQ ID NO: 4142533 - RNA, 60 nt, Human
gcauauacguguguguguauguguguguguguguguguguguacacauauauguaugugu

SEQ ID NO: 4142534 - RNA, 112 nt, Human
gcauauggucggugcacaaaaauaaguaugcuuuauauaacagagacugcuauguacguuaaagugauggugauguuauaguaaacaacuuuacaaauuguugcacauaugc

SEQ ID NO: 4142535 - RNA, 72 nt, Human
gcauaugugcacacauauauaugagcauguacaugugugugggugcauguaugugugugugcauccaugugu

SEQ ID NO: 4142536 - RNA, 64 nt, Human
gcauaugugcaggcuucauuuuaccccaaaggcugcuuguaauuuugucccccugcacauaugu

SEQ ID NO: 4142537 - RNA, 75 nt, Human
gcaucauagcagcgagacuucaucucuacgaaaaauuuaaaaauuagcccaggaggucaaggcugcagugauugc

SEQ ID NO: 4142538 - RNA, 82 nt, Human
gcaucaucacagaauguuauuggacagcaguggucaauuuugucacccuuguuaaauaagauacugagacugagaaugaugu

SEQ ID NO: 4142539 - RNA, 70 nt, Human
gcaucaugaaaaugacagauagucuucauuugcuuucuuuggccaaaugugcacucugcagucaugaugu

SEQ ID NO: 4142540 - RNA, 62 nt, Human
gcaucaugagaaguggccuucaaaaagagaguuggaacuuuuugcaagcuucuucucugugu

SEQ ID NO: 4142541 - RNA, 95 nt, Human
gcauccaugugggcugugcaugcaugugcauaugugcauggauauggauguucauguucauauguguauaucaguggcugcccacgcuugaaugc

SEQ ID NO: 4142542 - RNA, 76 nt, Human
gcaucccacugggucucuuuagggugccguauguagcucauguuagaauuugaguaugguaccuuagaagacaugc

SEQ ID NO: 4142543 - RNA, 55 nt, Human
gcaucccauuaccagcgcauugugagcgaaaugacuugcauguguaugugggagu

SEQ ID NO: 4142544 - RNA, 59 nt, Human
gcauccgggcugucggggcugggcgaagguaggcucagcguggcuccgacgggccgugc

SEQ ID NO: 4142545 - RNA, 130 nt, Human
gcauccucauccugagcguagcagcugcaaggggccuuacacagaacggauaaucaauauucauuguagguugaaugaugguguguucuugccuuuuccaguccguuuuguucguuagagaaaaggaugc

SEQ ID NO: 4142546 - RNA, 77 nt, Human
gcauccugacccugagcaaaagcaguucucucccuaagaaacaccggugacuuuuguucauggcacuccauggaugc

SEQ ID NO: 4142547 - RNA, 109 nt, Human
gcaucgauauuaccuaggagcuuguuagaaaugcagaaucucaggucccacuuuuaauuugcugaguuagaaucuacauuuuaacaagaugcccaggugauuuacaugc

SEQ ID NO: 4142548 - RNA, 77 nt, Human
gcaucgauauuccugggauugaacugcuuccaagccagaaauaauccucaagcuuucaaaacuggaaaaucagaugc

SEQ ID NO: 4142549 - RNA, 68 nt, Human
gcaucuaaauuccaccaugggguucaaauuuuuuaaaugaaaucuuagacccuugguagaaaaagagc

SEQ ID NO: 4142550 - RNA, 58 nt, Human
gcaucuacacugauuaggugaacauacaagaggggucuguucauauuagugaggaugc

SEQ ID NO: 4142551 - RNA, 94 nt, Human
gcaucuaguaucuucccuggcacauaauaggaccucaguaaaugauacuaauauuuauugagcacaugcuaugugccaaggcacuguucuaugc

SEQ ID NO: 4142552 - RNA, 78 nt, Human
gcaucuauagauugaguucucaaguuacaguagaauaaugcuggaguaacaagacacucagacacugaagauccaggc

SEQ ID NO: 4142553 - RNA, 74 nt, Human
gcaucucagauauugaauuuaaauuguuuguguuguaacagugauacaaaaauguucaauagcucuuugaaugc

SEQ ID NO: 4142554 - RNA, 62 nt, Human
gcaucuccaggauuuucacacucagagaugaccacucuuaugaguagaacuccuggagaugu

SEQ ID NO: 4142555 - RNA, 63 nt, Human
gcaucucugugccugcggcucuuuccccaggacucagggaagcaagcugcagaccagaagugc

SEQ ID NO: 4142556 - RNA, 84 nt, Human
gcaucugagagggauccagagaccagugauuaaaggcacaugcugagggcccugggaaugcugauuucaggaacucugggaugc

SEQ ID NO: 4142557 - RNA, 61 nt, Human
gcaucugagcuucugccugcugcaagaccgagucuggccccggcaucugaagcucauuagc

SEQ ID NO: 4142558 - RNA, 62 nt, Human
gcaucugauguucuguccgagucacauuccuugugugccugaccucuggagaacaauagugc

SEQ ID NO: 4142559 - RNA, 72 nt, Human
gcaucuggaaacuucugugcucuccuuggccucuguguucuucaucuccagguuuagggagcacccgggugc

SEQ ID NO: 4142560 - RNA, 56 nt, Human
gcaucugggcccagcaagaguucagagguuugguagucucugcuugguccauaugc

SEQ ID NO: 4142561 - RNA, 91 nt, Human
gcaucuggggacuuguaagaaaugcagaaccugagaccauaccucgcaccuaaugaaucagaaucugcauuuuaacuaaaccucuaggugc

SEQ ID NO: 4142562 - RNA, 68 nt, Human
gcaucugucaccauggcaaugagccagaugaaccaccucagcaccauugcaaauauggcagcagcagc

SEQ ID NO: 4142563 - RNA, 69 nt, Human
gcaucuuauuuagagaggacuagagaaauugucuaacacugcuuuccagaccuuuuuaaaucaagaagc

SEQ ID NO: 4142564 - RNA, 77 nt, Human
gcccuugcaucagggagagcccagccuugagugaaacugccugggagacaggcugggcgcuuccugcggcagucggc

SEQ ID NO: 4142565 - RNA, 57 nt, Human
gcccuuggaagcggcagguagcacaugacccucacacccucuucugcuuccaaaggc

SEQ ID NO: 4142566 - RNA, 61 nt, Human
gcccuuggggugucuguaauaaaggcuggaugagagaauuuaaacuaacaauugcaagggc

SEQ ID NO: 4142567 - RNA, 77 nt, Human
gcccuuggugcccuccgugcccucaucugcacuucauccuuugauaguuuaaugccacggcagggaacagcuggggc

SEQ ID NO: 4142568 - RNA, 81 nt, Human
gcccuugucucccguuuggaaaggaugcagcauuuuauugagggagcggcagcauccccaggcagcagggcaagacagggc

SEQ ID NO: 4142569 - RNA, 103 nt, Human
gcccuuucuaccccaaacguagugcuuccugggacaccuaacucuaugcacagcccugagcuggaugcugguuucccaggaagcucacaguuuggggggaggc

SEQ ID NO: 4142570 - RNA, 67 nt, Human
gcccuuuguaugugccuuuugcggaaguagacuguauuucuucaauuuuccauauacugcaaauggc

SEQ ID NO: 4142571 - RNA, 79 nt, Human
gccgaauuugacacuaagaugcaguuauacuguguagaaaaugcacaauuuguuugcucuuagucaggaacaguuuggu

SEQ ID NO: 4142572 - RNA, 57 nt, Human
gccgacaagcaaagaaucuuaggcugcauuaauggagucaggauaugccuugugggc

SEQ ID NO: 4142573 - RNA, 58 nt, Human
gccgacccuaugucacacgcugucugugacagguccaggauuuguggggucuuaaggc

SEQ ID NO: 4142574 - RNA, 79 nt, Human
gccgagcuccucaaaaauguaccaauuacauuuuugcuaacuaaacguaaagauguuuuaauauuucgaggaguugugu

SEQ ID NO: 4142575 - RNA, 74 nt, Human
gccgaggugagaggaucauuugagccuaggaguuugagaacagccugggcaacauagugagaccccaucucggc

SEQ ID NO: 4142576 - RNA, 72 nt, Human
gccgaguucuccuuggcuaggcagcggcuguccuggcugacagggcagcgcccucgucaugagcuacuuggu

SEQ ID NO: 4142577 - RNA, 59 nt, Human
gccgauggccucagugcccaaaggagaacgcuucuuacuggccuauggaagccacuggc

SEQ ID NO: 4142578 - RNA, 67 nt, Human
gccgcaaguucucacucuccuccauggggcagccugcagaaaggaggggugggaaugcagagcaggc

SEQ ID NO: 4142579 - RNA, 87 nt, Human
gccgcacugaggggcacuccacaccacgggggccgccgcggccgacagccagccaggcggcuguggugggggugaggcuggggcggc

SEQ ID NO: 4142580 - RNA, 72 nt, Human
gccgccgccgcugugcaauuuagcagaaauccgacaggggccgcguuugcugagcgcauccggcggccgggc

SEQ ID NO: 4142581 - RNA, 129 nt, Human
gccgccucccacuugcgcuuggugaucugagcugccauguccgccgcgguccaggagcgcagguccucguucagagcgauguaauccuugccgucguaggcgugcuguucauacccgcagaggaagcgc

SEQ ID NO: 4142582 - RNA, 101 nt, Human
gccgcgccccgcaguccccagggccuggcuggcuccaccugcugccagggaagacccucggccggagagccaagugcugcugggagguggccgggcguggc

SEQ ID NO: 4142583 - RNA, 68 nt, Human
gccgcgcgggcuccucacugcauccccaggcugaggggguuggggauggggucgggacccugcucggc

SEQ ID NO: 4142584 - RNA, 90 nt, Human
gccgcgcuucaggagcccuucagcccgcagcugcaccgugggagccccucucugugcuggcugaggccugagcgggcucccucugccggc

SEQ ID NO: 4142585 - RNA, 86 nt, Human
gccgcgggaguggggagagcgggaggugccacagcgcggaccugcgaacugaggugauggcccguuuuccuuaacucuccugcagc

SEQ ID NO: 4142586 - RNA, 99 nt, Human
gccgcggucagcuugccagcccggcgcgcuuuguucucagguagcugggcuccagcagaggcagccggggaaaaggacugggaagccgugggaucuggc

SEQ ID NO: 4142587 - RNA, 94 nt, Human
gccgcugcuuugucuuuguccuggggcgacuuggggcccaggaaacagacucagaauucagggcucccgucucuagggcaggaauaucaggggu

SEQ ID NO: 4142588 - RNA, 84 nt, Human
gccgcugguguuuagugcuuaggaaauggggaaauggccaugucagaggucccacagcaugaguaacucucaaaugccaguggc

SEQ ID NO: 4142589 - RNA, 73 nt, Human
gccggcagacgggcccauggacacccaagugccagcacugcuguccuccaggucuccggggcagucugugggc

SEQ ID NO: 4142590 - RNA, 67 nt, Human
gccggcugccuuggggguugucauuacaugcuaggcaugagaugaugcaggccccaagguagggagc

SEQ ID NO: 4142591 - RNA, 129 nt, Human
gccgggacugggagaggcaagcaaggggacuagagcucaggauuuaaaggggcacucacucuuaaaguuguggagugccuccuugaaaucugugcucugguugccucauuggccucaucuaguccuggc

SEQ ID NO: 4142592 - RNA, 58 nt, Human
gccgggagaguggaaccaagaggaaaaaugcaaaugccuaggccuuacuuuccugugc

SEQ ID NO: 4142593 - RNA, 86 nt, Human
gccgggaugcggccgguacccgcuccccgccgggaacaaccucuccacucuuccugcagggagcuggugccagccgacagccgcgc

SEQ ID NO: 4142594 - RNA, 115 nt, Human
gccgggcagcggcagcauccaaccugcuuuauuccuccugccugcagcgccacagcgagcgagcgagcgaggagggggagagagggagucugucugcaaagugcugcucccuggu

SEQ ID NO: 4142595 - RNA, 123 nt, Human
gccgggcuuccuucacggaccuugcgaaccugcagcuccagccgacuguaagaaggaagugccuuuuugcagguggggucggggaaguagggccgcgaaggccucugggaaauguaguucggc

SEQ ID NO: 4142596 - RNA, 57 nt, Human
gccgggggccugcugcagguucaggaugcugucgauggcgcucugcaggugcucggu

SEQ ID NO: 4142597 - RNA, 72 nt, Human
gccgguccuugcugggcuguuccuguccaugugccuggucacggugcuggggaaccugcucaucauccuggc

SEQ ID NO: 4142598 - RNA, 83 nt, Human
gccguaugccagcucugguccagggagggcaccaccugcuggcuagacugaguuccuucccaccccagggcggggccuacggc

SEQ ID NO: 4142599 - RNA, 74 nt, Human
gccguauuaagcugcuuuaaagauuuauguuguacccaaucuuagaguguuuuugaagcuagcucaaggacggc

SEQ ID NO: 4142600 - RNA, 96 nt, Human
gccguccuccccuacucuggacagggacacagccagugagguggaugaccuggagccugacagcgugucccuggcccuggaaauggggggcucggc

SEQ ID NO: 4142601 - RNA, 55 nt, Human
gccguggggcgcccagccggagccucuguccucugccuguucccgauuccauggc

SEQ ID NO: 4142602 - RNA, 67 nt, Human
gccgugucuguggagcgaggcugguuuuucucucagcgacaacagaaugccaggcuccauagccggc

SEQ ID NO: 4142603 - RNA, 82 nt, Human
gccguuagacgaagcuaaauaucagagcaccuacucugccguauauucuuaauaggguuccuguacuuagcuauguaacagc

SEQ ID NO: 4142604 - RNA, 59 nt, Human
gccguucuugguaguucugagagcugucagaacauucaaagagcugccagaacugaggc

SEQ ID NO: 4142605 - RNA, 75 nt, Human
gccguugcgcccaauaggagccuucgccgucccgcuuccgugccggcugggcucgcugauuggcugcgcuggggc

SEQ ID NO: 4142606 - RNA, 61 nt, Human
gccguuuucuguuacaaaguacagcgauaguuuuuuccugugcucuuuagccgaggaccgc

SEQ ID NO: 4142607 - RNA, 83 nt, Human
gccuaaagcccccggugggaaggggccagugugcggcaaggcggcccaggcagagggauccccauccuaggcagggggcaggc

SEQ ID NO: 4142608 - RNA, 87 nt, Human
gccuaaauggcaggaucaguuucugcaucuuucucugcuugaaccaaagacauuuuaauagugcagggcuauaacuccauucugggc

SEQ ID NO: 4142609 - RNA, 58 nt, Human
gccuaauaguuaagcaacuuuuuccagauaauggaauccuuguuuagaauuauagggu

SEQ ID NO: 4142610 - RNA, 67 nt, Human
gccuaaugcucacccugcaucaggcuugggcugacucagccaaauggaauccaggugacgcauuugu

SEQ ID NO: 4142611 - RNA, 66 nt, Human
gccuaaugugaucgcuuuagaagcuuggugguuuuuacauaggcauaugaauugaucaaauugagc

SEQ ID NO: 4142612 - RNA, 64 nt, Human
gccuaauucuuccaaccauugcauagucagcaguaaacuaugcaagagggaaaaggaaauaggc

SEQ ID NO: 4142613 - RNA, 72 nt, Human
gccuacaggaauucagacugucuaaaugguuucaaugagaaucuuugaaaugacauuaggauccugcauggu

SEQ ID NO: 4142614 - RNA, 59 nt, Human
gccuaccacagugauauuuugcauaugacuuccuucaguuagcaaaauguuuuugaggc

SEQ ID NO: 4142615 - RNA, 76 nt, Human
gccuagaaauaucuacauuuguuuucucucaucaauauuaucagcuucugagggaucaaaaaauguacaugcaggc

SEQ ID NO: 4142616 - RNA, 65 nt, Human
gccuagagcagcaaacgggauuuuaauugccuacggcuauuucucuagugccuugcucucuaggu

SEQ ID NO: 4142617 - RNA, 67 nt, Human
gccuagagcuccucccaggguagcacuggucucugcuccagugccuagaggugaagagcuaucuggc

SEQ ID NO: 4142618 - RNA, 60 nt, Human
gccuagggaugacaaauauucuucucagauucuagcaguagaguuacugucauccuaggu

SEQ ID NO: 4142619 - RNA, 55 nt, Human
gccuagggcagagugacucacacucuggacagaguccagacagcaccugccuggu

SEQ ID NO: 4142620 - RNA, 85 nt, Human
gccuaguacaauuccuagcacauaacuuagaauaguuuaaaaaguuuaggagauauauguguguguguaggggaguacauagagu

SEQ ID NO: 4142621 - RNA, 70 nt, Human
gccuauaaucaggaggauaaggggguccagcauucgacagugggacucccagcaaccucucagauugggc

SEQ ID NO: 4142622 - RNA, 72 nt, Human
gccuauacccauugcaaguaguuguuagaaggacaaucaccuuauucaacagcuuacucaauggugauuugc

SEQ ID NO: 4142623 - RNA, 111 nt, Human
gccuauauuuuucuucuugaccacaggauauuaugagagaccuugcuaagugccuugcugaagucccaagcuaauagccaguuuucuuccuguggagucaagaagaagggc

SEQ ID NO: 4142624 - RNA, 60 nt, Human
gccuccccuccuuaggucuucuagccaccagagaggagggcagagguaggagagggaugc

SEQ ID NO: 4142625 - RNA, 70 nt, Human
gccucccuacccuccccgcaacacacccucuaggacccuaggcuaggcuuggaggcaaugggaaggaggc

SEQ ID NO: 4142626 - RNA, 63 nt, Human
gccucccuuggccauagccagccuaggugguugagaugaagaugggcuggaggccaagggggc

SEQ ID NO: 4142627 - RNA, 95 nt, Human
gccuccucagugccccaggcugaguuagaggugucuucugggccccuuuggcccccagugauucccaugaucacagcccugagcacuguagcggu

SEQ ID NO: 4142628 - RNA, 119 nt, Human
gccuccugccuucagaaggucucuggcuugugugggaaaggagauauuggagagugaaaagggcuuuuccucugcuuugcacugacuccuuccuguacccaccaucagaggcuggaggu

SEQ ID NO: 4142629 - RNA, 80 nt, Human
gccuccugcuagcuccucgcaguugugcugaggcccacagcccagcuccacugucagaugagaaacagaagcacggaggc

SEQ ID NO: 4142630 - RNA, 61 nt, Human
gccuccuucagagcugcugccggaaaaggugauuguuuccacugcagcuucugauggaagc

SEQ ID NO: 4142631 - RNA, 60 nt, Human
gccuccuugcugcugaucucguccugccuaggcaggcagucagcccugcuagggucuggc

SEQ ID NO: 4142632 - RNA, 66 nt, Human
gccucgcagugcucucacucagacagcgcaggaucagacucccucugagugauuagccucuggggu

SEQ ID NO: 4142633 - RNA, 55 nt, Human
gccucgcccgccagcagcacguugcccaggugcgagauguagcuggaggccaggc

SEQ ID NO: 4142634 - RNA, 128 nt, Human
gccucgcgcccaccgcgcucggcaguggcugcucgggcuccggccccgcgccaggcgggcggaagcgggucgcggccccgggcuggggcuccgggcgccggaaccccgggcgggcgcggcgccgaggc

SEQ ID NO: 4142635 - RNA, 56 nt, Human
gccucgcucagcugagguuuccugacaggaggggaagcugccagcugagcugaggc

SEQ ID NO: 4142636 - RNA, 61 nt, Human
gccucgcuuucaccgggaaauuaucguugcuuguaaaacagaagaagccgggaaggcaggc

SEQ ID NO: 4142637 - RNA, 58 nt, Human
gccucggagguugaggcugcagugagcugugauggcucuucugcacuccagccugggc

SEQ ID NO: 4142638 - RNA, 81 nt, Human
gccucggccucccaaagugcugagauuacaggugugagccaccacgccuggcuaauuuuuguauuuuaguagagauggggu

SEQ ID NO: 4142639 - RNA, 63 nt, Human
gccucggcggcugcugccaccacagcccggagucggggccugggagggcagcagugugggggc

SEQ ID NO: 4142640 - RNA, 62 nt, Human
gccucgguggccuccaaggcuuaaugggccugagucuauuugucuaagaggcugacagaggc

SEQ ID NO: 4142641 - RNA, 111 nt, Human
gccucucacgauaugcuaaccacaauuaaucacuuuucucuaauguagcugagcugcuuuauaacaccggcuacacaaaaggagagugaguuaaaguaaggaacuaaaggc

SEQ ID NO: 4142642 - RNA, 62 nt, Human
gccucucagcagagcucugacuguucucaggcugcaguaucagacagaggcuguaugagggc

SEQ ID NO: 4142643 - RNA, 77 nt, Human
gccucucagucccagcaccugcccaggcuuuggaugaccgaccacuggcucaggagcugggagagcuacuugagggc

SEQ ID NO: 4142644 - RNA, 63 nt, Human
gccucuccucuuaauaccauuacauuggggauaaaguuucaacauaugaauuuggagagaggc

SEQ ID NO: 4142645 - RNA, 57 nt, Human
gccucucucauuuuguucuccugaguucauugcaaccggaacaugaaugugaguggc

SEQ ID NO: 4142646 - RNA, 61 nt, Human
gccucugaauugagauaggaucagucucaaauucuugagauaaauucauuaauucaccggc

SEQ ID NO: 4142647 - RNA, 83 nt, Human
gccucugacaacucuggggagggagagcaacuggucagauccccaaagacuuggccuuauuuccacagaaugauuuucuaggc

SEQ ID NO: 4142648 - RNA, 70 nt, Human
gccucugacacgccgugcccuggacccgaaaugcccgccccacuccuggagccuccggugugugagaggc

SEQ ID NO: 4142649 - RNA, 68 nt, Human
gccucugagccaugggucuaagcacuccauccccuaccuugaagugacacaugguggcucuaaggggc

SEQ ID NO: 4142650 - RNA, 57 nt, Human
gccucuggaagugggaagggguaggaaggaaggcucuuuuccuggagcuuccggggc

SEQ ID NO: 4142651 - RNA, 59 nt, Human
gccucuggccacaugggacauagggaggagugaggcccuguggacaggggcgcagaggu

SEQ ID NO: 4142652 - RNA, 62 nt, Human
gccucugggaucagcaguagugaugauuuuuuacaaggucagaaccagcuggugcccagggc

SEQ ID NO: 4142653 - RNA, 64 nt, Human
gccucugguuagccugugaccuuggggaagucaguaaggucugugaggcuguuuguccaggugu

SEQ ID NO: 4142654 - RNA, 87 nt, Human
gccucuguagaauaaauguacacaucuguuuaacauuuggaguuauugaaaucagaccuguugugcauuugccaucuauuaagaggc

SEQ ID NO: 4142655 - RNA, 76 nt, Human
gccucuguccuaaaccuguuaauagagcgaugcguuacugguuuugguuagcaaguuuuaacauuuuagaagaggu

SEQ ID NO: 4142656 - RNA, 77 nt, Human
gccucugucugcaagcagguuugcuauuuucuuuucuuuagagagggggccagcugcaccuggguucaggcagaggc

SEQ ID NO: 4142657 - RNA, 66 nt, Human
gccucuuaccaaauucuaaaccaucacaaccuuacccuguggguguuggaacauggugagauuggu

SEQ ID NO: 4142658 - RNA, 78 nt, Human
gccucuuacguggccuuuauggugaguugugcuuggccacugaagcauuaguugcucacuacaagguuauucagaggc

SEQ ID NO: 4142659 - RNA, 83 nt, Human
gccucuucucagccaucuaggauuugaaugcacaguagcugcugcauuguggacccaaauccuagauggcugaggagguuggu

SEQ ID NO: 4142660 - RNA, 57 nt, Human
gccucuucugaaaaauaucagccaaucuggucacacugggcugaaauuuuucauggc

SEQ ID NO: 4142661 - RNA, 65 nt, Human
gccucuuggagaauucugaaggcaaaaguuaucugcuagggcuguuaguaauucucagaugaggc

SEQ ID NO: 4142662 - RNA, 82 nt, Human
gccucuugggaaacagcucuuuggggcugucuguccuucucccuucaaggacuacaggagcugcuguuuacccaugucaggc

SEQ ID NO: 4142663 - RNA, 62 nt, Human
gccucuuguaugugugcagugcuuuugccuucaggcaacagaauaguugauguacaguaggc

SEQ ID NO: 4142664 - RNA, 104 nt, Human
gccucuugucuccacaguaggaaauuuucugcccauucuuagagucuagggaaauacuuggauguuaugaggugguagacuaagauggugaggggcagagaggc

SEQ ID NO: 4142665 - RNA, 56 nt, Human
gccucuuugaugauuaggcaauuuuuuaaaaauuggaaaaugaggcacagagaggu

SEQ ID NO: 4142666 - RNA, 65 nt, Human
gccucuuuggguucagauuuggucucuucuuuccugccagucaucuccugagaacccacaguggu

SEQ ID NO: 4142667 - RNA, 59 nt, Human
gccugaacucugcucaucuggucugagacagagcccagcaguaagauuagagauuaggu

SEQ ID NO: 4142668 - RNA, 73 nt, Human
gccugacucccggaaauguagagggcgugccuccugggaccgucuucacauccuucccaugggaaaggcaggc

SEQ ID NO: 4142669 - RNA, 58 nt, Human
gccugagaggcugagguugcagugagcugaaaucacgauacugcacuucagccugggc

SEQ ID NO: 4142670 - RNA, 76 nt, Human
gccugagaucuugccuugagaucugauuggacuuaacugagcauuugugauuugaucaucuuaagguaucucaagc

SEQ ID NO: 4142671 - RNA, 55 nt, Human
gccugagauuggacauuauuuaaaagcaauuuggagaguuuucuccauuucaggc

SEQ ID NO: 4142672 - RNA, 79 nt, Human
gccugaggcacagcugccuguauuguccucaucuguucugacugaaggauggaggugcugaauaaauuaggccucaggc

SEQ ID NO: 4142673 - RNA, 58 nt, Human
gccugaggcaucugggcacagaaguggucaacagcacacacgucccauggugccaggc

SEQ ID NO: 4142674 - RNA, 67 nt, Human
gccugaggggaaggagaagaucaauguuccacucagggagugaggcagaaguucccuuuuacuuggc

SEQ ID NO: 4142675 - RNA, 62 nt, Human
gccugaggggcgcuggcagguuccuuggggacaguggagguugcaggcagccccuucugggc

SEQ ID NO: 4142676 - RNA, 74 nt, Human
gccugaguguuauuuacagagggguuuuacagguauuauaaacacuggaaagauuucuuuggaguccacugggc

SEQ ID NO: 4142677 - RNA, 62 nt, Human
gccugaugcagggauucagggagcccuuggaaucucucugcucccugucccugcacuuaggc

SEQ ID NO: 4142678 - RNA, 66 nt, Human
gccugaugcuuacagcucuccugggaguaaaguggcaagccccaguaguguugcugagugucaggc

SEQ ID NO: 4142679 - RNA, 68 nt, Human
gccugcaaagcugaaucaaguuaaguucagccaccauguagaacacugagaaagucagcuuuacaggc

SEQ ID NO: 4142680 - RNA, 66 nt, Human
gccugcaacaaagcuuagaccuaagagaugcauuuaacguagaauuucaaucucucuaaggcaggc

SEQ ID NO: 4142681 - RNA, 100 nt, Human
gccugcagaggucccugggaggaguuguauacacuuaggcagauagaugguuaaaugacugccuugauuaucagcuaacaccuuccagggccuugugggc

SEQ ID NO: 4142682 - RNA, 118 nt, Human
gccugcagcagaaagacccugggccagaauggguugugccaucugucaccagauauugccaagguagaucuggcugacuuugugggacagcuuguuucucaauaaucacuuugcaggc

SEQ ID NO: 4142683 - RNA, 76 nt, Human
gccugcagcucccuggcuuuuacaguguaacugcuuuguccagcucugcaaguuggagccugggaagcuggcgggu

SEQ ID NO: 4142684 - RNA, 81 nt, Human
gccugcaggagaaaacuggacccaggacgccccagauuuggccacaccagcagggcaguuaaaggguccuuucuugcuggu

SEQ ID NO: 4142685 - RNA, 77 nt, Human
gccugcagugcugaacuauaaaaagcuuucguugucaggggacccagaaacuauuuuaguaguugggccaagcaggu

SEQ ID NO: 4142686 - RNA, 60 nt, Human
gccugcaguucugugcuaggcagcaagaaagcuccacagcugguggccagugcugcaggc

SEQ ID NO: 4142687 - RNA, 65 nt, Human
gccugcccugggccaggaagcggccaugguacaagucucugggcugccacagggcucaggcaggu

SEQ ID NO: 4142688 - RNA, 64 nt, Human
gccugccgcgcgcccagguuagguguguccgcucuuuucacacucgcggccggcgcgcgcgggc

SEQ ID NO: 4142689 - RNA, 73 nt, Human
gccugccugugcuagugcagggaaaucuuuggaacucuuucaaauguucccuguacuggccggacaaccaggc

SEQ ID NO: 4142690 - RNA, 88 nt, Human
gccugcuacaucaugaagcauuacaggaugacagcagccgagaccauugcguggguaaggaucugcagaccuggcuuggugaucgggc

SEQ ID NO: 4142691 - RNA, 90 nt, Human
gccugcucaaaauaguauuaucauugguaauauggucuguaucuugucugacccggaugaugugucccaagaaguaggguuugagaaggu

SEQ ID NO: 4142692 - RNA, 58 nt, Human
gccugcucugagugugggggguccuggaaccuguggaagaccccugacuccugcaggc

SEQ ID NO: 4142693 - RNA, 61 nt, Human
gccugcugccccugagcucagccugucacaguaguggggcagggcagagggagcagagggc

SEQ ID NO: 4142694 - RNA, 115 nt, Human
gccugcugggaccccaggggcaccugaucugccuuuggggcuuuggggcaccccuccuccuggggcucuuggaccagggucccagaguaugacaggggugcuuggggaagcaggc

SEQ ID NO: 4142695 - RNA, 55 nt, Human
gccacucugauuucaagggagauaauugaagauuuccagugcaauccugagaggu

SEQ ID NO: 4142696 - RNA, 99 nt, Human
gccacugaccuucacagaauugucuugacuggagguagcaagaaugugcucgcugucugggugccaguccaggccauggauuuuggagaggugggcggc

SEQ ID NO: 4142697 - RNA, 63 nt, Human
gccacugauaauuuuggaguaggggugaaugcuagaauuccuuuuaacuagaguaucagcugc

SEQ ID NO: 4142698 - RNA, 55 nt, Human
gccacugauuccaagucaauuucugggccucagauuuauugggugagucauuggc

SEQ ID NO: 4142699 - RNA, 75 nt, Human
gccacugcagccaugggaacaccaugucgagcgaugaauguucaucuggaaguucccaaggcugaguuccauggc

SEQ ID NO: 4142700 - RNA, 106 nt, Human
gccacugccaagucuagcugucagguuggucucagagcucugucuugauccccaccaggucgcccagccugcgaucccaccuggccugcucuaucuuucugugugc

SEQ ID NO: 4142701 - RNA, 79 nt, Human
gccacugcucuggccaucuugaggugccagucugaggggcaaucugagcagaggcaccaucuggaacagccaugguggc

SEQ ID NO: 4142702 - RNA, 62 nt, Human
gccacuguauuaguuguauuaguuuucuuugcuggauagaaaauaaccacuaauauaguggc

SEQ ID NO: 4142703 - RNA, 71 nt, Human
gccacuguccugugccugugcuuccagcacaaaauagacaugggccaaggacagggaacaggacaggaggc

SEQ ID NO: 4142704 - RNA, 100 nt, Human
gccacuuaacuugcaguuccuuuuuuuuacuauaguccagcccuuuuucuguugagaaagggcuauuuugagguagaagcaauugcaauuguuuauuggc

SEQ ID NO: 4142705 - RNA, 55 nt, Human
gccacuugugucagugacgucugcugugcaagcaugaugucuuggucacaguggc

SEQ ID NO: 4142706 - RNA, 76 nt, Human
gccacuuuucagagucaauguccaagaagcuaaagaaauuuaacuuugauuuugucauuauucuuggagguguggc

SEQ ID NO: 4142707 - RNA, 93 nt, Human
gccacuuuucuguaggauuucuaccugguuucuguuuggaaacuguauuuaacuaccaauuagaaaccucagggaaaucuuugggguaguagc

SEQ ID NO: 4142708 - RNA, 88 nt, Human
gccagaaauaaaacagaacuggaagagucagccaucugucuggaagcacacacagucccagauggcauuuccuuucuggcuuucuggu

SEQ ID NO: 4142709 - RNA, 89 nt, Human
gccagaagcaucuucugccaggaaagccuugaguuugacaauaaacuuuggaagccagggauuccugagggagauguuugcuucuaggu

SEQ ID NO: 4142710 - RNA, 70 nt, Human
gccagaagggguggauccaggccucugacaccaaguccaaguccucugucugcguuuccacaccucuggu

SEQ ID NO: 4142711 - RNA, 61 nt, Human
gccagaccacaggaucugauguuggccaagaggccauggccacaggcuuucugaggcuggc

SEQ ID NO: 4142712 - RNA, 69 nt, Human
gccagagaccuaagauugcaaacucucuccaggcuccuuggggagagcuccaaucuuuggaguccuggu

SEQ ID NO: 4142713 - RNA, 58 nt, Human
gccagagagauggaaaagcuuaacagaccuucuaguuugcauuucuuuuucauuuggc

SEQ ID NO: 4142714 - RNA, 55 nt, Human
gccagagcagaauagaguggccuaagacaucugggaucucuggaaugacucuggc

SEQ ID NO: 4142715 - RNA, 58 nt, Human
gccagagcaucgcacccuccauggccgacaugugggagcuggagauugcgcuacuggu

SEQ ID NO: 4142716 - RNA, 68 nt, Human
gccagaggacuugggggcugaaugugagggugguaagaggaacagucagggugucccggguuucuggc

SEQ ID NO: 4142717 - RNA, 61 nt, Human
gccagaggcuccucggugccucgugcgaguccccgccgucagccccgaggagccuccuggc

SEQ ID NO: 4142718 - RNA, 94 nt, Human
gccagagguaagauauuggagcuuucugagaucuuuccagguguguccuaaauauccaggaauagaucagagauuucccaaugucccuaugggc

SEQ ID NO: 4142719 - RNA, 62 nt, Human
gccagagguucaacaacugucuguauugugccaucacaggaggucagaguggauuucauggc

SEQ ID NO: 4142720 - RNA, 81 nt, Human
gccagauaucucaguguguacacugagcauuuguguagcuugucacaaauuucuuggguacaguguacauauuagccuggc

SEQ ID NO: 4142721 - RNA, 56 nt, Human
gccagaucuagagcuuuuccaucuaugcaaaacaggugagauugcuuuagucuggc

SEQ ID NO: 4142722 - RNA, 58 nt, Human
gccagaucugacauaguggaagcaacccuagcacuuucauccucuguccugguguggc

SEQ ID NO: 4142723 - RNA, 72 nt, Human
gccagauuagcuccccagcuuagcccuggcugccacauucuugugacaguuguagaacuggagagcaucggc

SEQ ID NO: 4142724 - RNA, 74 nt, Human
gccagauucagcauuuggacagcggcucuggggcgcagucggcccagcgaguuugccggugaacagccucgggc

SEQ ID NO: 4142725 - RNA, 66 nt, Human
gccagauucugggaguggggugauuagagggccuggaagccacuuagccuggcacccggggcuggc

SEQ ID NO: 4142726 - RNA, 66 nt, Human
gccagcacugcuucgcagccagggauucugacccugcuggaaacccuacggcagagcagugauggc

SEQ ID NO: 4142727 - RNA, 73 nt, Human
gccagcaguuaaacugaaaggcucguucacuugcaggagagcugggugacucagggcgucaguaacaacuggc

SEQ ID NO: 4142728 - RNA, 129 nt, Human
gccagcauuucauccugaggggcagggagcaauggagggcaaacuccugaccucaggcuagccacugggaagugugcaggccacaggccagggcugccccagcucucaaugcccuuguuggaguauggc

SEQ ID NO: 4142729 - RNA, 55 nt, Human
gccagccagaguccaucugagaguuuguuuugugaaaggaggaccugagcugugu

SEQ ID NO: 4142730 - RNA, 69 nt, Human
gccagcccuuguuucuaaagcugcaacuuggagccuuuccauuagggcagccaagagaccagggcaggc

SEQ ID NO: 4142731 - RNA, 70 nt, Human
gccagcguucacaagcuggguuucugcacccccuuucuagaagguguggguucccuggcuugacacuggu

SEQ ID NO: 4142732 - RNA, 66 nt, Human
gccagcucagacccucagcuuuuauaaugcagagcuggauagaaaggcuggggacugaggaagggc

SEQ ID NO: 4142733 - RNA, 130 nt, Human
gccagcucgucgcucucuguagccugaaagcuguacagggccacggacuccaugccgcugcucggggcuccagcagcugggcucagagcugggccgacagcuuccugcuuccucugcagucgaggacggu

SEQ ID NO: 4142734 - RNA, 58 nt, Human
gccagcucuguggcuguacuugugcccagagagacagguggcagcggcagaguuaggc

SEQ ID NO: 4142735 - RNA, 66 nt, Human
gccagcugaagggaagcuccuggcugagccccagcacccucuguuggagcuucuggucagccuggc

SEQ ID NO: 4142736 - RNA, 58 nt, Human
gccagcugacaccuugauuuugaccuugugauacccagagcugaggauccagcugagc

SEQ ID NO: 4142737 - RNA, 78 nt, Human
gccagcugcuggaacagcgcgagcaacugcaccgcgagcacgaggacacgcgggaccuggcgcgugugcacggcuggc

SEQ ID NO: 4142738 - RNA, 73 nt, Human
gccagcuguguccuuuccgggccuggaggcuuggccccuccucucccaagccuggcaggggcacuggcccggc

SEQ ID NO: 4142739 - RNA, 130 nt, Human
gccagcuugaccucuaggcagggcgucugcacgaggcuggagaguccgugcucuguccaccuccaacaaaaacaggcugcugacuucauccagcuuccaguccuuucccagacaggucccagcucucggc

SEQ ID NO: 4142740 - RNA, 74 nt, Human
gccaggaaaugcaggcugugucauuuagugauuccaaugagugaaaugaucugauacuugcauuuaaaucuggc

SEQ ID NO: 4142741 - RNA, 58 nt, Human
gccaggaaggaccguccagaucaggccugccugguuccaggauggaucuuucccaggc

SEQ ID NO: 4142742 - RNA, 58 nt, Human
gccaggaaguugggccagucuauauucaauuccuucaggacugugcuuucaauuuggc

SEQ ID NO: 4142743 - RNA, 61 nt, Human
gccaggagaauuaggaacucaagauaaccaaucaguuauuugcuaguggaauuuuccuggu

SEQ ID NO: 4142744 - RNA, 64 nt, Human
gccaggagauuggcagaugacucaagagccuaaaacuuguuuuauucugcaauuucccuguggc

SEQ ID NO: 4142745 - RNA, 82 nt, Human
gccaggagcaucaugcagagucugggcuucagccuauaggcagugagagcccuggaagauuuugccaagugaaugcucaggu

SEQ ID NO: 4142746 - RNA, 74 nt, Human
gccaggagcuguauuuagggagucccuuuacaauacuucucuggacccacccuacuagcagugucccacguggc

SEQ ID NO: 4142747 - RNA, 60 nt, Human
gccaggaggcugcuguguaggcaggaacgucugccuuugaauuugcuagccuaaccuggc

SEQ ID NO: 4142748 - RNA, 95 nt, Human
gccaggagucgagggacauaaacguugcuauuuacugcaagagcuuauccugagcuuggccugcaggcagcagcgcaugugccgauuaaacccgc

SEQ ID NO: 4142749 - RNA, 69 nt, Human
gccaggagugucaauaauugauagauauuggccauauuauuuccacuuucuaucaaguauuggguuggu

SEQ ID NO: 4142750 - RNA, 65 nt, Human
gccaggaguucagaugcauguuuaccuccuugaauccuuugggacuuuugcaucuaauaucuggu

SEQ ID NO: 4142751 - RNA, 91 nt, Human
gccaggauggucucgaucccccgaccuugugauccacccaccuuggccucccaaaguguugggauuacaggugugagccaccgugccuggc

SEQ ID NO: 4142752 - RNA, 91 nt, Human
gccaggauggucucgaucuccugaccucaugauccaccugccuuggccucccaaagugcugggauuagaggugugagccaccgugccuggc

SEQ ID NO: 4142753 - RNA, 91 nt, Human
gccaggauggucucgaucuccugaccucgugaucugccggccuuggacucccaaagugcugggauuacaggcaugagccaccacaccuggc

SEQ ID NO: 4142754 - RNA, 91 nt, Human
gccaggauggucucgaucucuugaccucgugaucugccggccuuggcuucccaaagugcugggauuacaggcaugagccaccacuccuggc

SEQ ID NO: 4142755 - RNA, 62 nt, Human
gccaggcacaguucuaggugcuggggauauugcucugaguacaacagaaucuuugcuuuggu

SEQ ID NO: 4142756 - RNA, 63 nt, Human
gccaggcaggugaggagggcucagggaaugccaagcuggucacuccuccaccugcuuuacggc

SEQ ID NO: 4142757 - RNA, 65 nt, Human
gccaggcccuaccauuuugaggauggagagacucuugucacucagcuucaagguguaggccaagc

SEQ ID NO: 4142758 - RNA, 68 nt, Human
gccaggcccugcgauuagguggcagggccucugcccugcuccaggccgcaugggugucugaacuuggc

SEQ ID NO: 4142759 - RNA, 59 nt, Human
gccaggcucaguagcgauuccuccugcguuugaaugcccuuugcucuuguggcucuggu

SEQ ID NO: 4142760 - RNA, 63 nt, Human
gccaggcuccccggaucccuggaccaccuccacuccagaccagacaauggggaagcugcuggu

SEQ ID NO: 4142761 - RNA, 57 nt, Human
gccaggcugaauauguuccagggucacccaacucuguccuuguacaguuagccaggc

SEQ ID NO: 4142762 - RNA, 80 nt, Human
gccagggcagagauucagccgucugcagucagcaggaccuacugugaggccuagacagccugggagcacucugcucuggc

SEQ ID NO: 4142763 - RNA, 78 nt, Human
gccagggcccgccucccagcugccccggccgccggggggccuggcggugacggcggcgccuggcggcggggauuuggc

SEQ ID NO: 4142764 - RNA, 113 nt, Human
gccagggccugcguguccugccauccccccuccuggggggcacuucagcacaaugggcuuggcggccccguggcuucccaggcggaugugauggcaaauagcaggcacuuggc

SEQ ID NO: 4142765 - RNA, 76 nt, Human
gcuaaguuuugggggguggagguggucucuuugucccugaagggauucauccuuaccaguccccgguucaaagagc

SEQ ID NO: 4142766 - RNA, 79 nt, Human
gcuaauaccuuccauuuuagauguuuguuauagugcuuacuuuucgguacuaguucucauaugaaauaaggaagauggc

SEQ ID NO: 4142767 - RNA, 61 nt, Human
gcuaauagaacaauaauuguaaacuucaugaagggguauguacuaguuauuguucugaagc

SEQ ID NO: 4142768 - RNA, 67 nt, Human
gcuaauaugauuccacuauuguaugggagaggcaucaugugaauuagugggaaucaccuuuauuagu

SEQ ID NO: 4142769 - RNA, 64 nt, Human
gcuaaucucccaguugcucuguuccuugucacuggaaguggucagagcuguugcggggcuuggc

SEQ ID NO: 4142770 - RNA, 127 nt, Human
gcuaaugaaggaaguaggaccucagcaggugcuuuguuuacuccuggaacaucucaaacauaagcauuccagagugagagaggagguggugaacauuugcaucugcucccugcugaccuauccuagu

SEQ ID NO: 4142771 - RNA, 94 nt, Human
gcuaaugugcaaaagacucugggcuuaucauaauuuuaaaagauuucaucuauaucuauuuugaaauaugugaugagagaguacacgauuuagu

SEQ ID NO: 4142772 - RNA, 97 nt, Human
gcuaauuaccuuuuccaaagaacugggguaccauguaaugucuucgaaaagguaauuuagugaaugaugcccuguuaucuuggaagaguuaauaugc

SEQ ID NO: 4142773 - RNA, 91 nt, Human
gcuaauugugacaacugagugggagguuugugugaugauuaucuguccaagcagaauuacacuaaaaccccccaacucauuucacagcagc

SEQ ID NO: 4142774 - RNA, 105 nt, Human
gcuaauuuugcugauugcuaaauaugugaaugauaucacuuuguuuuauucuuacaacauucugcaaagcugacaucauuacauuuucuaugagcaaaccaaggc

SEQ ID NO: 4142775 - RNA, 103 nt, Human
gcuacacauggugccuagggaagaugugggcccacuccagagcucaggccaccugcaguguuauuugagaugugcucccauucuuuucuuccacuaucugugc

SEQ ID NO: 4142776 - RNA, 114 nt, Human
gcuacagagguauacaaauaggagagucauagaaaauugcuggcagccuuuauucaagcccuuauggagaaaggaugccaugauugaaggccucaguuugucaauccaaguggu

SEQ ID NO: 4142777 - RNA, 86 nt, Human
gcuacagauaguguuaugcaugaagauccuguauguuuuuguauuaauuacagaaauuuauaucuuggugauuaucuuauuguagc

SEQ ID NO: 4142778 - RNA, 79 nt, Human
gcuacauucaaccaauguuugcuauuauuauaugggccuggcaaaaggcaaauggcuagacagguuguaaaaugaaugc

SEQ ID NO: 4142779 - RNA, 130 nt, Human
gcuacauucaggucugauuuaggcauucgagacuguguggcagggaguugaagagcugugauuaugacccauuuauacagcuuuugcagcuguuuugcuaaguugugauaugugagauggaaaacugaac

SEQ ID NO: 4142780 - RNA, 59 nt, Human
gcuacauugugucucuaucuagucuggguauuucagauaaaaggaaucauauauguggc

SEQ ID NO: 4142781 - RNA, 114 nt, Human
gcuacauuguugaauuggaaacaaaggagcacuggcuaaaaaagaggcagaaggauauauuauuucucugccuucuuuuagucaucuuguuaccuaugcuucugguaucaaagc

SEQ ID NO: 4142782 - RNA, 57 nt, Human
gcuacccuuucagaaguguacggguaaauauauucauaagcacuucacagggauagu

SEQ ID NO: 4142783 - RNA, 76 nt, Human
gcuaccuauauauacaccugcuauguguguggauauguauuuacacauacacauaucagguguauacauacguagc

SEQ ID NO: 4142784 - RNA, 67 nt, Human
gcuaccuucuucuaucuuagaugacuguaaggaauuagggcuuucagcacaagacuagacagguggc

SEQ ID NO: 4142785 - RNA, 70 nt, Human
gcuaccuugacagauuggagaauuggauugaggguuaaugacucagugagcuccugucugucccuggagc

SEQ ID NO: 4142786 - RNA, 55 nt, Human
gcuacucagaagccuugauuaucuagagugaagcauucagaaggugucugagagc

SEQ ID NO: 4142787 - RNA, 63 nt, Human
gcuacugcugagcauggugggagcaucguuuccuguucuuacuaguauguuucagcagcuagc

SEQ ID NO: 4142788 - RNA, 63 nt, Human
gcuacuggaagugggagaaauuagcucuaguuggauagauuggggaagguuuuacugacuagc

SEQ ID NO: 4142789 - RNA, 55 nt, Human
gcuagaaacuguuuaaucucuuuuauaugaaaguaggauugaacuauuucucagc

SEQ ID NO: 4142790 - RNA, 79 nt, Human
gcuagaaaucgacuucagaauuugugagacuagggggaaaauaacccauucaaaacuauucuagaaguuguuuuuuggc

SEQ ID NO: 4142791 - RNA, 66 nt, Human
gcuagaagaggcaggaugaggacuagaaccgaggucuguagaucccaaaucaccugcuuauuaugc

SEQ ID NO: 4142792 - RNA, 78 nt, Human
gcuagagagcuacagaaagccuucaaguagauguaaggugugaucugaccuauguuuuagaaaggcaguucuauuggc

SEQ ID NO: 4142793 - RNA, 72 nt, Human
gcuagcaauaaucuagaacauaugagagcauggacauccuuucugcaugcucgaaguucuggauuaaauagu

SEQ ID NO: 4142794 - RNA, 69 nt, Human
gcuagcauacuaugagcauagcgcauagcaaaaacacgguguccuuugagcuaagcuauguuaugcagc

SEQ ID NO: 4142795 - RNA, 65 nt, Human
gcuagccaauagauugaagcuauguuggcacaauauccuacauccucccgaucuacuggcugagc

SEQ ID NO: 4142796 - RNA, 61 nt, Human
gcuagccuaguucuagccaccaauguaauguuaauacaagaugguaaggcagcuggcaggc

SEQ ID NO: 4142797 - RNA, 70 nt, Human
gcuagccucuggaauccuuucucuugaccuguggaagagagaacauuuucaggguuucaggggcuauggc

SEQ ID NO: 4142798 - RNA, 87 nt, Human
gcuagcuaagauuucagagcuuugcagcuaauuacuauguaccuuacaggacaguuaaauugaaguugaguccucugucuuugcugc

SEQ ID NO: 4142799 - RNA, 76 nt, Human
gcuagcucuccgccucuucagcaaaguucggcccccuguuggggguaucucuguuaaggagcauuuugagguuagu

SEQ ID NO: 4142800 - RNA, 66 nt, Human
gcuagcuugcucuagauguucagagcugccuucaguaugauuaucuagcaaguucuucaauauagc

SEQ ID NO: 4142801 - RNA, 55 nt, Human
gcuaggaaggacugcagcauuugguccccaagggccaacaucaguucugccuggc

SEQ ID NO: 4142802 - RNA, 56 nt, Human
gcuaggaguaaggagaccuucauuugccucaugcaauugacuuuggcacuuuuggc

SEQ ID NO: 4142803 - RNA, 61 nt, Human
gcuaggaucccagaguuccuucuggccugagagaggcuccuuauggcuuugggguuccagc

SEQ ID NO: 4142804 - RNA, 62 nt, Human
gcuaggcacagucaccauucaaauucauagccagaucuguaucauuugaaagcugugcuugc

SEQ ID NO: 4142805 - RNA, 85 nt, Human
gcuaggcagaauuaaaagaccuguugagguuaguggucauuaauugaauuuagcagugcuuuuuucuaguuuguucugcucuggu

SEQ ID NO: 4142806 - RNA, 61 nt, Human
gcuaggcucuuccaucagggcaaacacguuugugaguggggucaggugggaguagccuagu

SEQ ID NO: 4142807 - RNA, 79 nt, Human
gcuagggucaguuuugagaaagcgugcauccaauugugucaugcacagaauuuucucuuuacaaugaacuggacccagu

SEQ ID NO: 4142808 - RNA, 59 nt, Human
gcuagggugugccggggcuggagcuccccguggacacggcuccuggaggcaccacuggu

SEQ ID NO: 4142809 - RNA, 111 nt, Human
gcuagguagagaaggauuaaaucagaugauuucaaucaacaucuauggguugcgcccuauauuaugugcaaacuauucugcuugaaauuauucucuugaaaauccaccagc

SEQ ID NO: 4142810 - RNA, 75 nt, Human
gcuaggugccugcguccacggcugggagacgggccguagccgagccgcucccuguuugggcggaggaaccauggc

SEQ ID NO: 4142811 - RNA, 74 nt, Human
gcuagguugucagacuacuugugggcugggcugugacaucuguuggguccuccagugguacuggccaauucugc

SEQ ID NO: 4142812 - RNA, 74 nt, Human
gcuagguuuuccaauuugguagucaucggacucauguagcuaguggcuaccauauuggacaucagagcucuagc

SEQ ID NO: 4142813 - RNA, 76 nt, Human
gcuaguaggggguaggggagaauuucaacucagguggcuggacuccaagagccauccucucuccaucccacugugc

SEQ ID NO: 4142814 - RNA, 77 nt, Human
gcuaguuaaaggacaucccacagguuugauuaaaacuuugaagauuaaaucuguucucaugucuguaugaaacuggc

SEQ ID NO: 4142815 - RNA, 79 nt, Human
gcuaguuccucaggcuuaacuugucuugauauaaagggaaugacuucauggaggcagguuagccagacgaaguucuagc

SEQ ID NO: 4142816 - RNA, 69 nt, Human
gcuauaagccaggaagagagccuucaccagaaaccaaauugguucgcaucuugaucauggacuucuagc

SEQ ID NO: 4142817 - RNA, 130 nt, Human
gcuauacaagugaguuguaggaguguaguaugguguugagagagucaaggaacugcaaagccaaggugucauugcuuccuugagcucuccaaucccagccuaggucagcccuacuuacuccagcuguagc

SEQ ID NO: 4142818 - RNA, 82 nt, Human
gcuauaccaguucuuucucuguuucuggaauauuuuuucugucugugucaaauucuaguuacauaaaguggacuguuguggc

SEQ ID NO: 4142819 - RNA, 77 nt, Human
gcuauauguaaauuucccgggccauuuaaauuaucuucauguccugguguuuaaauggagggggaaauacguuaagu

SEQ ID NO: 4142820 - RNA, 57 nt, Human
gcuaucccaccaaggucccagugcaaagaugucccucccaggcgccugguggggagc

SEQ ID NO: 4142821 - RNA, 90 nt, Human
gcuaucuaaauaucaccuggaauuguuacaccaugcagugaauguuuaagaaaugagaguggacgauuuugguugaugguuuuaguuagc

SEQ ID NO: 4142822 - RNA, 70 nt, Human
gcuaucucuucugauugcagggcaaguaauuaagugagaaaugugagcccugcagucagggugagauggu

SEQ ID NO: 4142823 - RNA, 60 nt, Human
gcuaucugguggcgugacuaagacuuugauagucagaucauagguguguuaccaguuagu

SEQ ID NO: 4142824 - RNA, 105 nt, Human
gcuaucuuuuaguggagcuuugaaauuauguuucagacaacuucgauucaguucuagaauguuugacucagcaaauucacaggcucaucuuucuaacuugauggu

SEQ ID NO: 4142825 - RNA, 61 nt, Human
gcuaugaacagacagcugugggguugugucuagaccacacaauguaagaguuuguucaugu

SEQ ID NO: 4142826 - RNA, 69 nt, Human
gcuaugagacuguggcugcguguaaggaacuaagcagguucuucuuaccucagccauauuucucaaagu

SEQ ID NO: 4142827 - RNA, 130 nt, Human
gcuaugauacaagauaacaauauacaucagcaguacccaguuauuuugucuuuguaguuuuauuagaaaauaauuucuuggcugguaaaguuccugcugguauaccuuguuucucugugauuagaucugc

SEQ ID NO: 4142828 - RNA, 83 nt, Human
gcuaugauagcaaauauuuuaaugagcacuguuuuuguauauacaguaauuuuuguucuauugaauuauuuugcugagauagc

SEQ ID NO: 4142829 - RNA, 62 nt, Human
gcuauggaaggcccuguuuguagaaggucuugaaugccaaucucagcagggccauccugagc

SEQ ID NO: 4142830 - RNA, 62 nt, Human
gcuauggcuuguugaagugacuugcuaugugguuugcuuaaguccuucagcaaguuaguggc

SEQ ID NO: 4142831 - RNA, 60 nt, Human
gcuauguguguuuugcugcagcucuauucuccaugccugcaacagcauccgacacauagu

SEQ ID NO: 4142832 - RNA, 75 nt, Human
gcuauguugcaguugcauaugccccuacagauugauauuucccaauaguauuaacauagcaagcugacaaucugc

SEQ ID NO: 4142833 - RNA, 71 nt, Human
gccuaucaaguggcagcaaaugccuggacuaaaucccucuguggaauggagcaggacugcugcccucaggu

SEQ ID NO: 4142834 - RNA, 75 nt, Human
gccuauuuuguacuuguuuguguuaaucaauguuaauuacaaagcaagcacagggguuaacgaauuauaaugggc

SEQ ID NO: 4142835 - RNA, 67 nt, Human
gccucaaaauuugguuuuucuuucucaugaugaccuaaucugucaggaagcuaccaauuuuguaggc

SEQ ID NO: 4142836 - RNA, 84 nt, Human
gccucaaauaugucuuuauuagcagcaugagaaugggcuaauacagugugugcccugcaguuguuagauguuuauguauuaggu

SEQ ID NO: 4142837 - RNA, 61 nt, Human
gccucaagagacgggcaaggcaagagcccuagagccugucuaacccaugucucugcagggc

SEQ ID NO: 4142838 - RNA, 66 nt, Human
gccucaaucccugcccucagugcacccggcagcaggcgcugggggagcuggcgggcaggcucaggc

SEQ ID NO: 4142839 - RNA, 59 nt, Human
gccucacagcugcuucaggauccagcauuaugcuggaaagguaugggggagcugugagc

SEQ ID NO: 4142840 - RNA, 78 nt, Human
gccucacuaggacacagacugauugcagcauuucugcacauuuucugcaguucugcuugcuccacuuuccugugaggu

SEQ ID NO: 4142841 - RNA, 88 nt, Human
gccucacugaggaaugagggagauguuggugcauuugaggaacucagaggcauguaccaacaucccccucauuccucaaucuuuaggc

SEQ ID NO: 4142842 - RNA, 73 nt, Human
gccucacugccuguagcccugagaugugggacccagaccaagaagaaccacagccaggagccaugggcagggc

SEQ ID NO: 4142843 - RNA, 67 nt, Human
gccucagaaucuuugcugagcucuggaguuuccaaagcuccagucucuuucggagacacugaguugc

SEQ ID NO: 4142844 - RNA, 65 nt, Human
gccucagagaguucucaugcuuuccaguguggcacaggaagcaguagaacuuuuccuuauguggc

SEQ ID NO: 4142845 - RNA, 64 nt, Human
gccucagcaucaacauucucagcucuggucacauuguagaguugucuagugugaucuccauggc

SEQ ID NO: 4142846 - RNA, 68 nt, Human
gccucagcaugcagccccuggcagcuccugccgugugugagggcagccaagggugugugcccacuggc

SEQ ID NO: 4142847 - RNA, 57 nt, Human
gccucaggacuggcauacucauacucacuggacaaagaggaugccauccugaauggu

SEQ ID NO: 4142848 - RNA, 105 nt, Human
gccucaggaggaaaaggggggcacggagcuugucacuggggggcagagggagaagcaagccccugcccccagcucucaagcucaaaggccuuccugagcugaggc

SEQ ID NO: 4142849 - RNA, 72 nt, Human
gccucaggcuagcuggcuguggauuccaugccaagacacaccgcccagacacaucuccagccagcaggaggc

SEQ ID NO: 4142850 - RNA, 55 nt, Human
gccucaggugcaucucucauuccaagugucuggaaggaguaacugaaucagaggc

SEQ ID NO: 4142851 - RNA, 56 nt, Human
gccucagugauaugugggacaauaucaaguggucucacucauauauaauugaaggc

SEQ ID NO: 4142852 - RNA, 58 nt, Human
gccucaguguccuccuccaugugacggucaugucccuguggguggauggcagugaggc

SEQ ID NO: 4142853 - RNA, 61 nt, Human
gccuccacagagaugcugauuguacgcaugcugcguaagccucagauuuuucuguucaggc

SEQ ID NO: 4142854 - RNA, 58 nt, Human
gccuccagaagcgggagagaagacauuccuguuguuuuaaacuccccuaguugguggu

SEQ ID NO: 4142855 - RNA, 78 nt, Human
gccuccagcaaggcuuauagcuuauauuuaaggcuuauagcccugaaacauaggcucuaagcagagaguggcuggggc

SEQ ID NO: 4142856 - RNA, 76 nt, Human
gccuccagccagugugaccgaggaggacaguaugagauggcagggcccuguuuucagcuaagucacacgcugaggu

SEQ ID NO: 4142857 - RNA, 55 nt, Human
gccuccagcgcgauccacuccggggcgcagcggccuccccggagcgcuaggaggc

SEQ ID NO: 4142858 - RNA, 76 nt, Human
gccuccagcucugcuguacuuuugcaggucacagcccgugcacgguguuugguuugcaguacaggagucugugggu

SEQ ID NO: 4142859 - RNA, 58 nt, Human
gccuccaggucggucuuucucuuuccgguuugcugaugaggaaacuuauacuuggagc

SEQ ID NO: 4142860 - RNA, 77 nt, Human
gccuccauggugcuggguguucacccgaggcgcucccucgaggacagugcuuucccugaaaccuucccaguggaggu

SEQ ID NO: 4142861 - RNA, 77 nt, Human
gccucccauggugccugaauccccucugaggcugcaccucgcugaaggagucucuaggaucagacacccaggcaggc

SEQ ID NO: 4142862 - RNA, 88 nt, Human
gccucccuccgugggucccgcagggugggccugucuggccauguguccaccacagagcuggcggcccgcccuccccaggcagggaggc

SEQ ID NO: 4142863 - RNA, 87 nt, Human
gccucccuggccucugaguguccuggugggggcccugcaggagcagaugcuagagcccuuccuuagacagcaggauccagggcaggc

SEQ ID NO: 4142864 - RNA, 66 nt, Human
gccucccugggagacugguacuauuauucccauuuuacagaugaugaaaugcuggcucagggaggu

SEQ ID NO: 4142865 - RNA, 129 nt, Human
gccucccugggcccugaggacggagcggguuacacaggcucccuggaauguuggcugcccccaggaguagccgccuguucuugggaauucugugcugaccgcggcagccccgcaggggcccgggguugc

SEQ ID NO: 4142866 - RNA, 78 nt, Human
gccucccuuuuauuuccuacuuucuuucccaagaggugggagcugaguccacgggauugaggguggggguuagggggc

SEQ ID NO: 4142867 - RNA, 82 nt, Human
gccuccgccuagaagugacucacauugcucauauuucuguaucccagacuaguaacaugaguuuuucuaauggcaaggaggc

SEQ ID NO: 4142868 - RNA, 82 nt, Human
gccuccgcuagagggcuggcuugggaaggagguggaaagcuuccauaaugagauucccagcccggcucagucaagcagaggc

SEQ ID NO: 4142869 - RNA, 108 nt, Human
gccuccuaacugcccccggcugggaguggccugccugggagcagcaggggcaagagggcaaggccuguuggaagguguaggcccccagcagggcgcugugcaggaggc

SEQ ID NO: 4142870 - RNA, 86 nt, Human
gccuccuagaagucacuuucuacuugguuucucaaguucuuuguccuugcuacuuaagaaucaaagagaaauacuuugaaggaggc

SEQ ID NO: 4142871 - RNA, 130 nt, Human
gccuccucaacuuuccacaacccaucucuggaacugacucauaaaauagaaaccacugcucaaacucuaacaggguuacagcaacagguuuauuaucuuaugacuguaguucuccagaaauuguagaggu

SEQ ID NO: 4142872 - RNA, 97 nt, Human
gccuccucuauuuguuuauuuuacuguauauauuuaaggcacguaacaugaggcuuugauauaaguauacauagugaaaugguuacuagagucaggu

SEQ ID NO: 4142873 - RNA, 83 nt, Human
gccuccuguuaacccuguagcagcugaccuggcuaagggagcucaggcccugccaucuccccuguuacacuaggucacugagc

SEQ ID NO: 4142874 - RNA, 60 nt, Human
gccuccuguuguggcucuagccucaguggcgcugagcuacaguugcccucagcaggaugc

SEQ ID NO: 4142875 - RNA, 63 nt, Human
gccuccuuccacagcucacacuggucugccccuucucaugccagugauugccuggaaggaggu

SEQ ID NO: 4142876 - RNA, 61 nt, Human
gccuccuugcugcucccaagaggcagcugcaaacuguugcacugcggaguagcgagguagc

SEQ ID NO: 4142877 - RNA, 80 nt, Human
gccuccuuugugucagauuaauagcaauaauaagugauaaucacuugcuacaucuaaaucugacuaaagcagguggaggc

SEQ ID NO: 4142878 - RNA, 64 nt, Human
gccuccuuuuugaaauagacuuauaaaggauacaacucuauuauuuucuccucagaaagugggc

SEQ ID NO: 4142879 - RNA, 84 nt, Human
gccucgcuuccggucuuccucugcggcgccgggcgcgggcccgcggcggccagcgcuuccggucggcaggaggcggggcgaggc

SEQ ID NO: 4142880 - RNA, 80 nt, Human
gccucggcauucuggugccuggcuggagguuggggguugcacuccugcagaccucagucaggucuccucuguucuuaggc

SEQ ID NO: 4142881 - RNA, 112 nt, Human
gccucgggcccagggugggggcauuccaggggccuccucacccugcucaggcaggccggcugggccagcagcugugggguggccagaugccccaccccuggcgccuuuaggc

SEQ ID NO: 4142882 - RNA, 130 nt, Human
gccucuaaugugugcuauuucucaugaggaaccugacacuauaugacacuucaguuaaagcuucugaaauauugcaauggcauaauugacagguuuuuugguguggugacuuucuuguacauguaaacuc

SEQ ID NO: 4142883 - RNA, 77 nt, Human
gccucuacagcagaucagaacauuugcaggauguuaaugaccauuuccuguucauuuuuugacucugcagugaaggc

SEQ ID NO: 4142884 - RNA, 69 nt, Human
gccucuacugccggcgccugcgguuccuccuggccccaaggcaccgcugcaggcgccugcggucucugc

SEQ ID NO: 4142885 - RNA, 70 nt, Human
gccucuagaacuguagagaauacauuucugucuuuuguaggauacugagauuuacauguucuaguagagc

SEQ ID NO: 4142886 - RNA, 130 nt, Human
gccucuagccuuuuguucaguuucuccugcuuagggcaccuuucaucccaucuagaugugucucucuuuaacuauucuaggaguugauaaaagggcuaggaaguaggaaguugggaagaaggggaggggc

SEQ ID NO: 4142887 - RNA, 63 nt, Human
gccucuauuuuuucucugaagugggaggcaagaccaucugcugagaaugaggggguagaaggu

SEQ ID NO: 4142888 - RNA, 69 nt, Human
gccucucccgaguguccgugcagccccagaccugagcgcucgucuuccgggacggacacgcggcacggc

SEQ ID NO: 4142889 - RNA, 58 nt, Human
gccucucucuacccaguaugaugcuuggauuggcaaucaaaggauguagagaagaagc

SEQ ID NO: 4142890 - RNA, 74 nt, Human
gccucucucugccaccuccuuggagcguuuugagcagcugcacgagaugugccuccaaggggugcacuaguggc

SEQ ID NO: 4142891 - RNA, 92 nt, Human
gccucucugcaucugcguguccagccucuccugcgugccagaaguucccaggcaggaguguggugggacauccggcugggguaaggacaggc

SEQ ID NO: 4142892 - RNA, 59 nt, Human
gccucugaagcagggagugucugcauuaaaaaugaccuguaguucucugcuucauaggu

SEQ ID NO: 4142893 - RNA, 56 nt, Human
gccucugaggcagugaguguucuugagguggaaagcccaggugcagccucugaggc

SEQ ID NO: 4142894 - RNA, 57 nt, Human
gccucugaugaugaucgagcuguggugauccuaucagccaagcagccaucaucuggu

SEQ ID NO: 4142895 - RNA, 61 nt, Human
gccucugcacuguggcacaccacugacauuaaauccagucauggccuaaguggcaugaggc

SEQ ID NO: 4142896 - RNA, 78 nt, Human
gccucugcaggugcgguuaucccuggaggcgcuuccauuaaguccagucagccucccucuuacccauuuugcacaggc

SEQ ID NO: 4142897 - RNA, 60 nt, Human
gccucuggagcuuguuucagaugguggcacugcccagcacuaucuggcaagcugcagggc

SEQ ID NO: 4142898 - RNA, 64 nt, Human
gccucuggcugucccgaugagcagagauuuaagauccuguucuccauaaagauggcuagauagc

SEQ ID NO: 4142899 - RNA, 80 nt, Human
gccucuggcuucccacucugccgggcugccucucauuaucucauuuguugcucacaguaucccugggaggucagaagggc

SEQ ID NO: 4142900 - RNA, 128 nt, Human
gccucugguggugggaccuacuuaagucugacggaccuguccuguccaggccagugcccagggaaggugugggaggcccuuugagccuggccugcagagaccauccguguccccucccaccuucaugc

SEQ ID NO: 4142901 - RNA, 64 nt, Human
gccugcugugcccacucggggccaguguccuuggcagcuggaacccgggugggcagcggggggu

SEQ ID NO: 4142902 - RNA, 108 nt, Human
gccuggacacaaaagccaugagucccuggccagccugucgaugcccucccucaggucagguguguaccgcaggcugcccuuguguggcuuggacuuuuggucacaggu

SEQ ID NO: 4142903 - RNA, 64 nt, Human
gccuggagaaaggaaggugggaaggccaggacucggacuuaccaccugacuccuacuccagugc

SEQ ID NO: 4142904 - RNA, 55 nt, Human
gccuggagagcacugugcgcuugcugcacagaaguacacugcagagucuccaggc

SEQ ID NO: 4142905 - RNA, 61 nt, Human
gccuggagcaggagcugcagaggaggggcuccaggagcccagcuggccauuugcuucaggu

SEQ ID NO: 4142906 - RNA, 61 nt, Human
gccuggagcucggcugagggcgcaaacacggacguggggcgccaccugcgggugcccgggc

SEQ ID NO: 4142907 - RNA, 56 nt, Human
gccuggaggggcccaggcccaagaggauucuuuaccccuggaagagcuccccaggc

SEQ ID NO: 4142908 - RNA, 79 nt, Human
gccuggaguucagcaugucugggccggugcacccugggcccuggacucagucuggccugcccagagcagcucugcaggu

SEQ ID NO: 4142909 - RNA, 112 nt, Human
gccuggaugaauuaauuguuauaguuuccaaggagucuuaaguuacauugguguucaaacuuguuugcaugauagaaaggacacuuggugauuaugauguuguuuucagagc

SEQ ID NO: 4142910 - RNA, 81 nt, Human
gccuggcaagagcagcucacaccucaucaggguggggccaguaggugccccaggaauuuuggugucugcugcugccauggc

SEQ ID NO: 4142911 - RNA, 71 nt, Human
gccuggcacagaggaaggcucugggaauguuugggccggauggaucugggagccucuuuugcaugccaagc

SEQ ID NO: 4142912 - RNA, 66 nt, Human
gccuggcaggaaucuggcgccccuagugacucugaggauggcaaaggggcuuauguuucuccaggc

SEQ ID NO: 4142913 - RNA, 60 nt, Human
gccuggcaggggaggugcuugcuuagaggguggaacgucuagcucuguacaaccugaggc

SEQ ID NO: 4142914 - RNA, 69 nt, Human
gccuggcccuggagcuagacuaggacauuggcgccuagagccugugucuggucugcccagguucugggu

SEQ ID NO: 4142915 - RNA, 84 nt, Human
gccuggcucagugagcugucugagucucuuggcuuuagggccaaggggccuuuagacacuauauaggaaagcagugggcuuggc

SEQ ID NO: 4142916 - RNA, 68 nt, Human
gccuggcuccaggucaugcacucaccucuaacauaagagaugcuugagaugcggccuggagugaaggu

SEQ ID NO: 4142917 - RNA, 56 nt, Human
gccuggcugccggccuuggcaauauucccaaugcguuccugaggcuucgccagugu

SEQ ID NO: 4142918 - RNA, 82 nt, Human
gccuggcugcugcugugacagagucucauggaggcggcacugccuccagcagccacaccucuggacacggaaggcagucugc

SEQ ID NO: 4142919 - RNA, 72 nt, Human
gccuggcuuuaaacacuggggguuaaugcagaaucuggagagagcugucaaacucccaguuugauacguggc

SEQ ID NO: 4142920 - RNA, 56 nt, Human
gccuggcuuuuguuuauaaauucucaagggaguucuccuucaacaggagccaaggu

SEQ ID NO: 4142921 - RNA, 77 nt, Human
gccugggaaggggguugggcuguggucugauuguuuugcuaucagagccaggcccagcccagcccuucgauccuggc

SEQ ID NO: 4142922 - RNA, 69 nt, Human
gccugggaccagggaaaggggagccaagcgucagccuggucucucuagugccaugaaaguccuccaggc

SEQ ID NO: 4142923 - RNA, 64 nt, Human
gccugggagauuaauuaggaaggaugccaagaaaauaucucagccuauguucuaaucucucagc

SEQ ID NO: 4142924 - RNA, 55 nt, Human
gccugggauagaggcaaugcauggacccaacagccuguguuccucuccccaaggc

SEQ ID NO: 4142925 - RNA, 68 nt, Human
gccugggcaccaagcacuaggacuucagucucuagggccacagaggggguccuucugcuuagccaggc

SEQ ID NO: 4142926 - RNA, 69 nt, Human
gccuggggaacgcagcgagcagcgccggccgggcagacucucaccagugcgcaugcguggcucuccggc

SEQ ID NO: 4142927 - RNA, 62 nt, Human
gccuggggagccgccugagcccccgaugcugggaugcggcgguggggccggcucacccaggc

SEQ ID NO: 4142928 - RNA, 69 nt, Human
gccuggggauaggagauugggaguguuucuguccgaggaacacuuuuuccuccugucugguuauuaggu

SEQ ID NO: 4142929 - RNA, 96 nt, Human
gccuggggcaggggaaugggagagaggaaggcucugaguacuacuggaagacacacauacccaggcuuuucucuugccccauccucuauuccaggu

SEQ ID NO: 4142930 - RNA, 99 nt, Human
gccugggggcccaucagugcucugggcugccugacaugaggcccuugggucucugugccucaguguccucgaguuccaguugagaugggugcccauggc

SEQ ID NO: 4142931 - RNA, 64 nt, Human
gccuggguaggagacaaaagguguguauccacagcacagaacgaccuacuguauccacccaguc

SEQ ID NO: 4142932 - RNA, 67 nt, Human
gccuggucccugauagguggcugggcugacaccaggcacugggcucaguccuguaggggcuccaggu

SEQ ID NO: 4142933 - RNA, 59 nt, Human
gccuggugauucacucuauaaugaggcagaacacaaugucucgagucaagacacuaggc

SEQ ID NO: 4142934 - RNA, 78 nt, Human
gccuggugcuuuauggagcccaucucauuccauccucaacagccugaaugaggcagauguugcaugaggcccugaggc

SEQ ID NO: 4142935 - RNA, 59 nt, Human
gccuggugucuccccaaggaaguggugggacagggucuucaugggggcaggccccaggc

SEQ ID NO: 4142936 - RNA, 62 nt, Human
gccuggugugauugagcccaggugguggcaauuaaucccuaagaagcaaagugauaccaggc

SEQ ID NO: 4142937 - RNA, 86 nt, Human
gccugguuccuuuuucucacacaacgaaccaaaauaaguguguauaugugcauguaggaauguuuguguaugggaaaaggucuggc

SEQ ID NO: 4142938 - RNA, 71 nt, Human
gccugucaggauggggcugugggcaaagccugcugacuuaggcaccagcucagaccccacccuggcagagc

SEQ ID NO: 4142939 - RNA, 91 nt, Human
gccuguccgggagccccagaacccgguggaggcagugggaugcugcaguaucuccaguccugguuuccuggaugggguggcugguacgggc

SEQ ID NO: 4142940 - RNA, 63 nt, Human
gccuguccuggaugcucugcaaccaggugcccugcacugccaacaugcaugccaggacagcgc

SEQ ID NO: 4142941 - RNA, 56 nt, Human
gccugucuccuccuuaaaaggugacaaacucaggcuccuucagggaggggccaggc

SEQ ID NO: 4142942 - RNA, 57 nt, Human
gccugucucuuggaacuugguacuacgagaguccuuacuuccuucucagagacaggu

SEQ ID NO: 4142943 - RNA, 57 nt, Human
gccugugaugcccccauaaguaucccuggacacuaacaaaaugggaggcacagaggc

SEQ ID NO: 4142944 - RNA, 66 nt, Human
gccugugcugugggaucugcuccagagggaaaagaguguuugggcccugcagauucuagugcaggu

SEQ ID NO: 4142945 - RNA, 76 nt, Human
gccuguggccugucgggaggcgcucccuucuuguggaggaaggaaggucaagaaggagcucccggcagaccagggu

SEQ ID NO: 4142946 - RNA, 73 nt, Human
gccugugguuuaggcaauaagccucaacugucuuucucgaggauauguucccaggugguuguacuccaugggc

SEQ ID NO: 4142947 - RNA, 97 nt, Human
gccuguguuauuuaucagauuuacgaccgcuaguagcacuuaucaaaagugacguuuauugggugugaaauguucucauuuguuagauaacacaagc

SEQ ID NO: 4142948 - RNA, 96 nt, Human
gccuguguucuccauccucuauccuauucaucauuaaaagaacaaaaaguuuugauuuugaucaugaagaggauaaacugaaaaggguacacacgc

SEQ ID NO: 4142949 - RNA, 82 nt, Human
gccuguguugcccaggcuguuuucaaacuugggcccaagcaguccugcugccucagccuccagaauagcugggauuacaggc

SEQ ID NO: 4142950 - RNA, 74 nt, Human
gccuuaaagaacugaagcucuagucagggacacagauaaguuauucaaugauuagaguuuagugugauaagugu

SEQ ID NO: 4142951 - RNA, 60 nt, Human
gccuuaauuaguaacagaccauuacuggguuccuaucacguggcuguuguaauguuaggc

SEQ ID NO: 4142952 - RNA, 60 nt, Human
gccuuagccugcacuuccuguuuuaaagccucaagguuagcagaggugagagcuuagagc

SEQ ID NO: 4142953 - RNA, 74 nt, Human
gccuuauaaacauaaauauagcuguucuuagccacagaucucuuuuggccaagaaugauaugugaagguagggu

SEQ ID NO: 4142954 - RNA, 63 nt, Human
gccuucaagagcugaaguggcuugcucuggucauaaaacuagagggcagcaagcucugaaggc

SEQ ID NO: 4142955 - RNA, 104 nt, Human
gccuucaagcucuggcauuccaguaagggcugacuuggaacugucacagagaaacugggggacaguaaaugcagucuagcacuuguuuggaacuagagcauggc

SEQ ID NO: 4142956 - RNA, 130 nt, Human
gccuucaccuucauuggcugccgguccugccacuccagacccugcucuggggcucugccuuucgccgcagguucucccgcagagggggucauuggucugggaaggagauugaagaguggggguuggaggc

SEQ ID NO: 4142957 - RNA, 59 nt, Human
gccuucagaggucagcccccagcucucauccugauauggggaucuaggcuuaugagggc

SEQ ID NO: 4142958 - RNA, 58 nt, Human
gccuucaggaaaucaguccuugaauaugaagcccaagucaccaacugaguucugaggc

SEQ ID NO: 4142959 - RNA, 61 nt, Human
gccuucaguaguauccucaugaaccugcgucaugguguuguuagguguaauuaaugaaggu

SEQ ID NO: 4142960 - RNA, 82 nt, Human
gccuucauucugagagucuugaguccgugaguccacaaaugauucugugauucuggaauucuaagauucugugaaagggagc

SEQ ID NO: 4142961 - RNA, 57 nt, Human
gccuucauugccuucccuuucaaagcauggcuugccuuuggacugagguagucaggc

SEQ ID NO: 4142962 - RNA, 56 nt, Human
gccuucccugugcaugucuccucucuuuugaccaaacacaugacaacaggggaggc

SEQ ID NO: 4142963 - RNA, 67 nt, Human
gccuuccugcagcucugagcgugccgagccuagcaagcuugugcuuccaccuagagcugcaaagggc

SEQ ID NO: 4142964 - RNA, 80 nt, Human
gccuucucauugcauggcuucuuggaauggagguugaacaaacaucccgagugccaggaagcauaauguagugggggggu

SEQ ID NO: 4142965 - RNA, 83 nt, Human
gccuucuccugcuguggguuaagacacuguccccaggagucccuuugugcaauacacagugcugaacgacauggaaggauggc

SEQ ID NO: 4142966 - RNA, 95 nt, Human
gccuucugcaaguucuccugaccuucacuggcacugggugagauuagagggagcagaaccuugauuacaauguuccagaggcagagauaggaggc

SEQ ID NO: 4142967 - RNA, 72 nt, Human
gccuucugcugcagagcugcgggugccuggggugagccagugugcaguugcacucugugcccagcagagggc

SEQ ID NO: 4142968 - RNA, 75 nt, Human
gccuucuguagacaauggcugcaggguucuuaugcccaccccacccuguagcuccagccugucuacacagaaggu

SEQ ID NO: 4142969 - RNA, 69 nt, Human
gccuucugucccaggagcuguaagacacugcaccuguggcugucuuaccuuccagcuucuggggagggu

SEQ ID NO: 4142970 - RNA, 89 nt, Human
gccuugaaacuaaaugauggauuuaaacuuucuaaaggaguuccauuuuaauagucuauagagaguucugaaauuaucuuuacucaggu

SEQ ID NO: 4142971 - RNA, 56 nt, Human
gccuugagcugcacggccaggugcaggcugcgcgcccgccgcugauagcucugggc

SEQ ID NO: 4142972 - RNA, 89 nt, Human
gccaggggcucuucucccaggagguguagcugcguggcuugaguguauagcagaggccugaguugggcuuucuggguucgaauccuggc

SEQ ID NO: 4142973 - RNA, 116 nt, Human
gccaggguugucagggagggccauucugagggggugacacuucagcagagacaugaauaaaaacugguagucaacccugggggaagagcuuuccaaacagagaggacagccagggc

SEQ ID NO: 4142974 - RNA, 114 nt, Human
gccagguauuaauccagcuagcuaugccccaguuuccuuacuaaguaauaccuacuuaugcaggugcuuuaguagaaugauacagggcagaaggugguuaagacaauacauggc

SEQ ID NO: 4142975 - RNA, 57 nt, Human
gccaggucgucuccauguccaaacgucaagcacggggaugaguggggagacccuggc

SEQ ID NO: 4142976 - RNA, 56 nt, Human
gccaggugcaccugcccuggccaaugguggacagguggccauggcaucgccugagc

SEQ ID NO: 4142977 - RNA, 67 nt, Human
gccagguguccucacagugaggccuugggcuuacagaccugaguacuucccaugggagauaccuggu

SEQ ID NO: 4142978 - RNA, 74 nt, Human
gccagguuaucaaggucaacauugacagugauaagugauaacauguacccucgauaugaucugaugaaaauggc

SEQ ID NO: 4142979 - RNA, 61 nt, Human
gccaguacuuugugcaacaaauguaauaguaaauaaauuuuauuuguugaaggugcuuggc

SEQ ID NO: 4142980 - RNA, 80 nt, Human
gccagucacucuucuaagcacuuugugaggauuauuacaagacaucaucauaacaggcugagaggauuuaggugacuugc

SEQ ID NO: 4142981 - RNA, 77 nt, Human
gccagucauaaaaauuuauuauguacaggcacuauaccuuuucauguauaggucacuagcauguaaaugaaacuggc

SEQ ID NO: 4142982 - RNA, 68 nt, Human
gccagucucccucaguccucugggccggccgaagcccagacaccuucacaggaugauggagacuuggc

SEQ ID NO: 4142983 - RNA, 73 nt, Human
gccagucuguguacuggguuucuguaaauccucccugagauauggauccucucaguauagugguaaaauuggu

SEQ ID NO: 4142984 - RNA, 61 nt, Human
gccagugaccccuuccuggccuccccacccaggguccccggagggcagagggauuacaggc

SEQ ID NO: 4142985 - RNA, 84 nt, Human
gccagugagaccaguggaggccuugggaccuuuucuuucugguaagcaauagguccaaggagaggucuuuuuugucccuuuggc

SEQ ID NO: 4142986 - RNA, 67 nt, Human
gccagugauacagucaucugauggugcugaaagauucacuuccagacucacucaugugacuauuggc

SEQ ID NO: 4142987 - RNA, 82 nt, Human
gccagugguauucugcuuuaaauaugaauuagcauuagcacuugcagagguuuucuuguuucaaagaugaauuagcccuggc

SEQ ID NO: 4142988 - RNA, 118 nt, Human
gccagugucuggcauguaggaaagucucaaguguuaguauuauucugcuucuauguaagacugagggauaaacacugaugauauggggcuuuugaaguccugaaauguaaaagcuggu

SEQ ID NO: 4142989 - RNA, 60 nt, Human
gccaguguuuauagcagugagggcacugugaucaaauccuccaaaagcuguaaugcuggc

SEQ ID NO: 4142990 - RNA, 59 nt, Human
gccaguuccuguggagucagagagaucuuagcucagaagugcugacagcaggggcuggc

SEQ ID NO: 4142991 - RNA, 65 nt, Human
gccaguugauccagcaauggccuuuguagaaaaauaucuaaucagaaccuugggucauaacuggu

SEQ ID NO: 4142992 - RNA, 58 nt, Human
gccaguuucccaagccauuggcucugcagagaccugccaggaguggguagacuaaugc

SEQ ID NO: 4142993 - RNA, 77 nt, Human
gccauaaauauuucaccucacccaggagaaucaaagcauuuucacauugguucuuacuggggaguugagauaugggu

SEQ ID NO: 4142994 - RNA, 69 nt, Human
gccauagccugggcccugccucuucucugcgcuuugcagaaaucauauucucaguccuucagcuguggc

SEQ ID NO: 4142995 - RNA, 71 nt, Human
gccauagcuuagggguuaaacucacagacauuuaagucacauguucuugaguucaaguccaaguugcuggc

SEQ ID NO: 4142996 - RNA, 72 nt, Human
gccauaggcaggaguaugcagcuaugguuuagcuauccuguggcagccauguauauuguugcagucuuuggu

SEQ ID NO: 4142997 - RNA, 55 nt, Human
gccauaguagcauuuggaaaaauuggagcuacccaagcuucuaaugcugcugagc

SEQ ID NO: 4142998 - RNA, 59 nt, Human
gccaucacuucuguagacuaagucauugaauguuuggguuaaaaugaggaagugguggc

SEQ ID NO: 4142999 - RNA, 68 nt, Human
gccaucacuugggacaaagcuucugcucuagacugcugucuuagcucuuuugcucuccaaguuuuggu

SEQ ID NO: 4143000 - RNA, 61 nt, Human
gccaucagcagcccugugggugacaccacaaacucgcugagcccacagagcaugcugaggc

SEQ ID NO: 4143001 - RNA, 69 nt, Human
gccaucagcuuuaguaacccacugcucuguggacaagaaacaagagcagugugggggcgaagguagggc

SEQ ID NO: 4143002 - RNA, 79 nt, Human
gccaucauauuuuagcccacacaaaucauggggagaaaucguuucucuuucaauuuuguugggaagaagucuuugaggu

SEQ ID NO: 4143003 - RNA, 65 nt, Human
gccauccgcauaguacaggaguccccagccucccuggggacgagaucuuggcagugugggaaggc

SEQ ID NO: 4143004 - RNA, 57 nt, Human
gccauccugaugacaggccacucguuguggccuuauggcaaagucaguugauagggc

SEQ ID NO: 4143005 - RNA, 107 nt, Human
gccaucugaacaauagguuuucauaagaagguaacauccuuaaucuuauuuuuaguuucaggauggaguaccuuuuauaacugagaaaacuucuugugacuuugugc

SEQ ID NO: 4143006 - RNA, 57 nt, Human
gccaucugaugggcuuggagucaggguuccuucuggcugcguggccuuuagcagggc

SEQ ID NO: 4143007 - RNA, 64 nt, Human
gccaucuguagaacaugguguuauauaggcauaugguagacuaguauuucacucuccagauggc

SEQ ID NO: 4143008 - RNA, 58 nt, Human
gccaucuuagucaaaacuucagagaaaacugaaaugaauuaaguuuugauauaauggc

SEQ ID NO: 4143009 - RNA, 65 nt, Human
gccaugaaggccagcagagugaaggcagccauuuugccuucauagaguguaggccuuugcagggc

SEQ ID NO: 4143010 - RNA, 68 nt, Human
gccaugaggcuccgagaagucaguuuacagagaugcaagcaagcaggcuuucuucucugucugauggc

SEQ ID NO: 4143011 - RNA, 105 nt, Human
gccaugauuugguaauggguuuucaaaggaggcagaguagccaagcucuuggcacaagagccagcuguacugccugcucaggaaaucuucucauugcuggcuggc

SEQ ID NO: 4143012 - RNA, 63 nt, Human
gccaugcaauggaauaaaaucacauguuagagaaucaugauaaaauuugaucuguuguaaggc

SEQ ID NO: 4143013 - RNA, 74 nt, Human
gccaugcaggccaagcaggaaucuggccucaggagagagccacuagaggccaugcuagaggccugggacauggu

SEQ ID NO: 4143014 - RNA, 74 nt, Human
gccaugccugaagcaaggguaggcaggucucuuauccccaauaucaccagcccugcucuuccucuggucccggc

SEQ ID NO: 4143015 - RNA, 72 nt, Human
gccaugcggauaucuagggaauagcacucuagguaugggaacagcagugcaaacucccugagguggcagggc

SEQ ID NO: 4143016 - RNA, 68 nt, Human
gccaugcuaaaccagaacauaggaguuuuccagcuaaggacacuauccauguacacuguuugccaggc

SEQ ID NO: 4143017 - RNA, 62 nt, Human
gccaugcucucuggcaacuuguguuuuggcaacucucaaccaugugcccaugagagcauggu

SEQ ID NO: 4143018 - RNA, 58 nt, Human
gccauggaaaugcuuugcgucucugccaaagaaaaguuuugaccagaguuuuccaugc

SEQ ID NO: 4143019 - RNA, 74 nt, Human
gccauggccagguccucugcagcgucucacagaacuugaggagugagacucuggaggggcugguccuauguggc

SEQ ID NO: 4143020 - RNA, 71 nt, Human
gccauggcuucgcgcguccccgcugccgcugcugacucgacacaaucggcgggucgcgcgggggccguggc

SEQ ID NO: 4143021 - RNA, 66 nt, Human
gccauggggagggcagcgccugguugcugggagggcagugacaacagugggcuuguuuuccuuggc

SEQ ID NO: 4143022 - RNA, 56 nt, Human
gccaugggucugcuggcucagcucauggaacaccugcuugauaggcagaccugggc

SEQ ID NO: 4143023 - RNA, 61 nt, Human
gccauguaaagauguguaccuugugcccuggagagcuccagggcauccucacaucgcaggc

SEQ ID NO: 4143024 - RNA, 65 nt, Human
gccauguacuuugugguaauuuguuacaguaguccuaggaaacuacuacaagugaguacaaaggu

SEQ ID NO: 4143025 - RNA, 76 nt, Human
gccaugucagccuguagucugguccaggugaaccgaggaagccuuggggcuuggaaguaggauugggagauauggc

SEQ ID NO: 4143026 - RNA, 63 nt, Human
gccaugucugcuggcuuuacucuucuauucggagacuaaaacaguggcuaguagacagaaggu

SEQ ID NO: 4143027 - RNA, 74 nt, Human
gccaugugcccagcacugugccagucaccagggaucugaugcacugggguggacaugauguggggacagagggc

SEQ ID NO: 4143028 - RNA, 62 nt, Human
gccauuauacucagucucauugccaguucccuugcucaggagacugaggcugaauauggggc

SEQ ID NO: 4143029 - RNA, 61 nt, Human
gccauuauccaggaagagguguguugggaaagauugauuucucugaacuuccuggaaaggc

SEQ ID NO: 4143030 - RNA, 77 nt, Human
gccauucaaaauuacauguacaaacaauucuuaaugccaugagaagcugcuugugcuguauuguuaggugaaguggc

SEQ ID NO: 4143031 - RNA, 72 nt, Human
gccauucgcacaggaaguuucuguuguuucucuaaauacagaacugaacagcaggcuucuaccugauaaggc

SEQ ID NO: 4143032 - RNA, 57 nt, Human
gccauuggccauccaccugaaacugcuccucugcagaggccaccuguggccacuggc

SEQ ID NO: 4143033 - RNA, 74 nt, Human
gccauuuuugggggaaucugauuguagcauuugucacacaauauuguuacaacuauagaucccaagaaaugugc

SEQ ID NO: 4143034 - RNA, 57 nt, Human
gcccaaacauucagaugcaaugguaggaguccuuguccagcaccuggauguuugggu

SEQ ID NO: 4143035 - RNA, 103 nt, Human
gcccaaauacaaaagcaacugugauguuagcucuguguuacaaggaauuucuauauagucccugucuucugccugacacagagcaaacaccauugguaugggc

SEQ ID NO: 4143036 - RNA, 79 nt, Human
gcccaagccucuucuaccuguagcccugaaagcgcuugagaaguucaagugcaaagcugcugcugugguaggaaugggc

SEQ ID NO: 4143037 - RNA, 70 nt, Human
gcccaagcugagccagacagguaagcagagacuuucacugcagugaugcuucuggcucagccccaggagc

SEQ ID NO: 4143038 - RNA, 56 nt, Human
gcccaagucuauagccuugguugaucugaggauugaggauauuaggugauuugggu

SEQ ID NO: 4143039 - RNA, 80 nt, Human
gcccaaucucauggaaguucauucuccuggugcuggagcugcacacacaugaaguugcugagcuaccaugagaagggagc

SEQ ID NO: 4143040 - RNA, 75 nt, Human
gcccaaugccccaacuccuccccagcaugccaagccucugggguuggugcauggggcgggaguaggggaaagggc

SEQ ID NO: 4143041 - RNA, 84 nt, Human
gcccacagccaaggccugcucagcugucugugcugccucuucacuggagggucacagcuuagugagcguccugagggugugagc

SEQ ID NO: 4143042 - RNA, 66 nt, Human
gcccacaggcggaguggcgggcaggagaagccccuggcuccaggcugcccccagccacccgcuggc

SEQ ID NO: 4143043 - RNA, 56 nt, Human
gcccacagguggaagccucggaagggguuccugagaggcugcuccgccugugaggu

SEQ ID NO: 4143044 - RNA, 94 nt, Human
gcuauguuucacagagugcauaauauacaugcuugauccugacucuaaaagccuuaggagaagagacugcauguuaucuuugugccuacagggc

SEQ ID NO: 4143045 - RNA, 57 nt, Human
gcuauuagacacaauuagugauucagauuccaaggaguugcuuuucgugucaauggc

SEQ ID NO: 4143046 - RNA, 64 nt, Human
gcuauuaggcuuccauuucaugcacaaaugaauuaugcagagaaugccauagcuuaguuucagc

SEQ ID NO: 4143047 - RNA, 130 nt, Human
gcuauuaucguaguuaauuaaaacauuuauugaaagcuuguuugugcaugauggugugugaagcucugugcaacauuuguacuaaagaaguucacuuuuuacuaaaaguuuauaaugugacgcuauaaac

SEQ ID NO: 4143048 - RNA, 109 nt, Human
gcuauucacuguaucuguaauauacgcugucuaauguaucuguaaggguuaaaucaaguuucuagcacauacauaauagauagaagcuauuauucacccaggugaaagc

SEQ ID NO: 4143049 - RNA, 61 nt, Human
gcuauucucagugggaagggcacaguucaggauacucaauuaucucuugccacuguuaagu

SEQ ID NO: 4143050 - RNA, 63 nt, Human
gcuauucuggcucuuugggugauuguaaauaaaucuuuugcaauguccuggaaccagaucagc

SEQ ID NO: 4143051 - RNA, 90 nt, Human
gcuauugacaucuagggccagauauuucuuuguuucagggucuguccuuugcauucuagauguuuagucuacccacuagaugccauuagc

SEQ ID NO: 4143052 - RNA, 90 nt, Human
gcuauuuccugggauuaagguggugauuuaccuuauauuaagcugugaaaguucuuauuauuuuagucaacacauuaaaccuagggaggc

SEQ ID NO: 4143053 - RNA, 62 nt, Human
gcuauuuuuaaucagcuacucuaacgccugaaagcuuagcugaguggcugauggaaagaagc

SEQ ID NO: 4143054 - RNA, 60 nt, Human
gcucaaaaugguucagaauugugguugcucaucagcuguuccuuucagaagcauuuuggc

SEQ ID NO: 4143055 - RNA, 61 nt, Human
gcucaaagaccagacagaggagcuugggauuagaguagagagccuuguuuggucuuugagc

SEQ ID NO: 4143056 - RNA, 58 nt, Human
gcucaacucuguggcugucccacaaaagcgaccagugaccagacagacaugagugagc

SEQ ID NO: 4143057 - RNA, 57 nt, Human
gcucaagcccuguugucugaugaugggaaccucccugucucccuggcauggcucagc

SEQ ID NO: 4143058 - RNA, 104 nt, Human
gcucaaggaaacucaggcaagggaguuacugagggcggggccccgagggggacgaccugccaaccucugugccuucucauucucuuuccuggccccuuaggagc

SEQ ID NO: 4143059 - RNA, 55 nt, Human
gcucaaggacacucccugcugggcauaggaugugccugcaaaaaguucccugagc

SEQ ID NO: 4143060 - RNA, 57 nt, Human
gcucacacuuucugauuuuaaaacuuacuacaaagcuacguuaaucagaaguguggc

SEQ ID NO: 4143061 - RNA, 78 nt, Human
gcucacagaugcugugggucaggacuuaaagcagaauauagcaggaauggcuuuucucuguuccacagugucuggagu

SEQ ID NO: 4143062 - RNA, 71 nt, Human
gcucacagguccuuccugcccugggguccgggcuuggcucugccccuccagcgcgggggggaguugggggc

SEQ ID NO: 4143063 - RNA, 77 nt, Human
gcucacagucugcugagugcagauguaaacaacuagauuuaaugcaagacacccugcacuauagcagcaaugugagu

SEQ ID NO: 4143064 - RNA, 61 nt, Human
gcucaccaccgaacaacaagggcaagaagaaccagccuucugcucugaaguucggcugagc

SEQ ID NO: 4143065 - RNA, 61 nt, Human
gcucacccaccucacuggauuauuguaaagagggaaaagauaaaugugagcagggcugggc

SEQ ID NO: 4143066 - RNA, 74 nt, Human
gcucacccucgcaggccgggcacugcgcuaggugcugaugcugcaccucauucaacccuggccuguggggcugc

SEQ ID NO: 4143067 - RNA, 70 nt, Human
gcucaccuguaaucucagcuaaucaagaaguucaggcagaauaaucacuugaaacugggaagcagggggu

SEQ ID NO: 4143068 - RNA, 59 nt, Human
gcucacucacacagguugaacccggguuuccccucaccuuuuucaccagugugaugggu

SEQ ID NO: 4143069 - RNA, 56 nt, Human
gcucacugaugugguguuggcaggauucaguuccucaugggcaccagacggagagu

SEQ ID NO: 4143070 - RNA, 75 nt, Human
gcucacugcacacauguuuaaguggaaaauccgauuucacaacuccuuuccauaauuguucaugugaguaggagc

SEQ ID NO: 4143071 - RNA, 88 nt, Human
gcucacugguagcuggaacuggguuuguuggagggaccaucauaaucacugccucuaaagcaaggccuuuccaaugacaguagugagu

SEQ ID NO: 4143072 - RNA, 82 nt, Human
gcucacuguggaugagggagugaacaaagauaccugacauguuuuaguggacuuuuaucacuguucucaccaucagacuagc

SEQ ID NO: 4143073 - RNA, 69 nt, Human
gcucagagccaguuagcaggugcccagggucugucuaccaccugucaagcauugcugcugccucugugc

SEQ ID NO: 4143074 - RNA, 61 nt, Human
gcucagaggccacuguuggaaaugaagcugacagcuguagguuaaugaggaggcccugggc

SEQ ID NO: 4143075 - RNA, 57 nt, Human
gcucagagguuguucuuggguuucuuucagcuaauagcuucagaauggccucugagc

SEQ ID NO: 4143076 - RNA, 63 nt, Human
gcucagagugggccuagcuguaaaaggacagggguccuucuccagccacgcccacucccgggu

SEQ ID NO: 4143077 - RNA, 97 nt, Human
gcucagaguucacuguucucuuucuguuucauaugcucagguguguugcuaaacaugagaugcugggaaacugaaaggaauacguaagaaagauggc

SEQ ID NO: 4143078 - RNA, 91 nt, Human
gcucagcccuggcuaaucagcaggaaccacugccccccugugggggcagggacaaggcagguguucugagcuugggagccagggccagggc

SEQ ID NO: 4143079 - RNA, 129 nt, Human
gcucagccugguagguagaaacagcccagagauguagagugauggcaggcaggugaguagagcccuguaagcgcagauucuggaaccagccugccuggggucacauccuggcuccaccguaggaugggu

SEQ ID NO: 4143080 - RNA, 61 nt, Human
gcucagcggagaagaaucuguggccugcugacagggaccauguguugauucucugcagagc

SEQ ID NO: 4143081 - RNA, 59 nt, Human
gcucagcucaccuguggaaugcccucaucuacuguguggcuccugggaugggacugagc

SEQ ID NO: 4143082 - RNA, 56 nt, Human
gcucagcugcaccuggagagccccaugugaguguggcacuucuguugcugcugggc

SEQ ID NO: 4143083 - RNA, 74 nt, Human
gcucagcugguccaggguguaguacagaggcaccugugggagcuccucagucaugacgcucaggacccucuggc

SEQ ID NO: 4143084 - RNA, 126 nt, Human
gcucaggaaacacuaagcaaauuccaacagauuagcaaaggugauuuagauauauuauguugauuuagauaucaacaugcuaugagagauuacuucuacugaucacagcagcuaagaagacugagu

SEQ ID NO: 4143085 - RNA, 58 nt, Human
gcucaggagcucuugguggcgcggguccgcuuccgcuucaccaucacaggcuucuggc

SEQ ID NO: 4143086 - RNA, 81 nt, Human
gcucaggaggucucaaacucuagggcuccacauuccuuuucuaggaguuuugucuguccugggguauugugaaagaugggc

SEQ ID NO: 4143087 - RNA, 66 nt, Human
gcucaggaucgcuugcccuagggaagugacccaaaccuucacaccugaagggucaggguccucagc

SEQ ID NO: 4143088 - RNA, 56 nt, Human
gcucaggcaauccaaccgcuucggccucccaaagugcuaggauuacaggcgugagc

SEQ ID NO: 4143089 - RNA, 55 nt, Human
gcucaggcccagcggcuggugucacuggggccgguggcugggagcugaacauagc

SEQ ID NO: 4143090 - RNA, 55 nt, Human
gcucaggccuggcuauccauugcugacaaagaaagcugguuugccuggccugggu

SEQ ID NO: 4143091 - RNA, 58 nt, Human
gcucaggcuggauugcaguggcacaaucuccgcucacugcaaccucuuccuccugggc

SEQ ID NO: 4143092 - RNA, 73 nt, Human
gcucaggcuuguggcgguugugggcauccgagacuguuuugugcacuuguccaaagccgacugacaucugagc

SEQ ID NO: 4143093 - RNA, 92 nt, Human
gcucagggagguuaaggaaauggcuagcuuagagucaugcuagaccuuggucuagaugagccuuuaaacuagauguccuugcucucuagagu

SEQ ID NO: 4143094 - RNA, 59 nt, Human
gcucagguguguggcucuggaccaugugggaccaggugguuccuucccugcccuucagc

SEQ ID NO: 4143095 - RNA, 65 nt, Human
gcucagguguuauacaugaaauuuacuuggguggguugcugagugacaccucaaagacaacgggc

SEQ ID NO: 4143096 - RNA, 69 nt, Human
gcucagugauagcaaauaaaauguaaccauuucccuaugguuuugcuguuauaugcuauuauagacagc

SEQ ID NO: 4143097 - RNA, 65 nt, Human
gcucaguuuagcauuuaccgugaugccuggcauaaaugagguaucuguuaugggcugaauugcgu

SEQ ID NO: 4143098 - RNA, 70 nt, Human
gcucauauuuaguguuuggagaucgggggcaacacaacuccuugguuuuugguuuaacacuauguguggc

SEQ ID NO: 4143099 - RNA, 74 nt, Human
gcucaucauguuuggaauguuuuaauauaaauuuugcuacuuugaaagaauuuaagaacauuucaggacugggc

SEQ ID NO: 4143100 - RNA, 93 nt, Human
gcucauccuggaaaugggguucagugaugccuucaggacuuguggaagguuucuggggcaaggggcauuugagcugagccuugaagggugagu

SEQ ID NO: 4143101 - RNA, 88 nt, Human
gcucaucucaauagacuaauuuucuuucacacauaggaugauggauaaacauaucugccugugguggaggaaguuucuugagaugagu

SEQ ID NO: 4143102 - RNA, 88 nt, Human
gcucaucuggccagugccugugggccccgggcagggcacugugcacagggcagagacgcagggggcccaucggcacugcugugauggc

SEQ ID NO: 4143103 - RNA, 65 nt, Human
gcucaugcacgcugccuguuuucugauuguucaacacagucugccucucagagcagcuguugggc

SEQ ID NO: 4143104 - RNA, 66 nt, Human
gcucauggccucggagaaaggcagcuccaccucccaggaggggagcugagcucugagccacgacgc

SEQ ID NO: 4143105 - RNA, 80 nt, Human
gcucaugugaagugcagagaccuggucaggcaugaagaauacagcuuuuccuacugccuuuccaggcucuggccaugggc

SEQ ID NO: 4143106 - RNA, 68 nt, Human
gcucauuaggcaagcaguucucaaguguuuuacuccucggauauacccaacagcugccuugcuugagc

SEQ ID NO: 4143107 - RNA, 56 nt, Human
gcucauuccagauuccaggugugaugucuguggugccugcugugaucuuagugagu

SEQ ID NO: 4143108 - RNA, 80 nt, Human
gcucauuguuccauacgacugaggucucggugucacucacauagccaucgucuccuguguagugugugggguagaugagc

SEQ ID NO: 4143109 - RNA, 74 nt, Human
gcucauuugcccaggcuuggcuaaucuuggcuaagcucuuucacaugucugaagccuugccugggaaacugggu

SEQ ID NO: 4143110 - RNA, 80 nt, Human
gcuccaacacagcuauucuuugugucuguccagaugagcuguccagaugagcugcacaaacacagagaauagauggcagc

SEQ ID NO: 4143111 - RNA, 58 nt, Human
gcuccacagaggcaggggacccaaggcugagccggcugugggcucugcuuccuggagu

SEQ ID NO: 4143112 - RNA, 74 nt, Human
gcuccacugcauuagccuguucauggccaggcacaaagccuggaaaugcccaaacagagcugaccagugagggc

SEQ ID NO: 4143113 - RNA, 73 nt, Human
gcuccagaugaaggcagccgugugacugcauguguacugcagcacgugaagcaggaaggcugcccaguggagc

SEQ ID NO: 4143114 - RNA, 128 nt, Human
gcuccagaugauauuuucugagauuuggguuuaauuuugcuucagauauucaauuaaguuaaagcaaaucacuuucguuugaugggguauuuugcuguuugaaucuggguuggaguuguuauagaugc

SEQ ID NO: 4143115 - RNA, 63 nt, Human
gccucugucauagcucaugugauugaguauagacaucaagggugaguguggcugagaugaggc

SEQ ID NO: 4143116 - RNA, 55 nt, Human
gccucuguuucuguuuuuguucaucuagugaauuaagaacaguagaacaguaggu

SEQ ID NO: 4143117 - RNA, 73 nt, Human
gccucuguuucuucaggaaugaaaugggauaaugagccuuaucucacacugugaagagacaagcagauaaggc

SEQ ID NO: 4143118 - RNA, 67 nt, Human
gccugaaaacucucuguagaggugggcguugggggccucaacccucacucugcacccugcagcaggc

SEQ ID NO: 4143119 - RNA, 66 nt, Human
gccugaagcacccggagcuggcacuguagcucugcucugcauuugccacucccaggugccucuggc

SEQ ID NO: 4143120 - RNA, 118 nt, Human
gccugaagccggcccaguucuuggcucagagcuacugcgucugcagcacagaucugucccugagcacagcucgcaccagcuucccugcaggccuagagcccaagcccuggccucaggc

SEQ ID NO: 4143121 - RNA, 62 nt, Human
gccugaagcuuaauuaugaccagcugcauuuuaguguccagaggucaccaugaguuucuugc

SEQ ID NO: 4143122 - RNA, 77 nt, Human
gccugacccuggggcugccuugcucucugagcaugcuguuccugcugcuucuggggacaggcugccugggucaaggc

SEQ ID NO: 4143123 - RNA, 73 nt, Human
gccugacuggccuugucgugagcuuguuuauccacugcaucugucaggaagcaauuaugauaaggccgcuggc

SEQ ID NO: 4143124 - RNA, 58 nt, Human
gccugacuuauuagacaucuucauuguguaagcaugaugaagaggcugaugauaaggu

SEQ ID NO: 4143125 - RNA, 66 nt, Human
gccugagaagcgcggcgucggcguggguccugcgcagccugccccgcgagcgcccgcugcaagugc

SEQ ID NO: 4143126 - RNA, 63 nt, Human
gccugagaaggacacagcaggucagaggcaggcccucacccuuccugcccugccuccucaggu

SEQ ID NO: 4143127 - RNA, 102 nt, Human
gccugagaauggguuggaacuggauuucauguagcuguaguucuaaaauaauuaucucucuugcugcuauagauuuuaaguuauaacucaacugcuaaaggu

SEQ ID NO: 4143128 - RNA, 82 nt, Human
gccugagguuacuguacaguguagucaugagguuacuguacacuguagucaugagguuacuguacacuguagucacaucagc

SEQ ID NO: 4143129 - RNA, 56 nt, Human
gccugagucuauucuguguguaaggugaggucuuuucaaucauuagaaucucaggc

SEQ ID NO: 4143130 - RNA, 129 nt, Human
gccugauacucaacacuuuaauaugaugauccuuaauauggaagaguucucuacugguugaggagaaaaagguaaugauagccuuguagaguuuccauuuauccaauuaaaggucacuucccucagguc

SEQ ID NO: 4143131 - RNA, 57 nt, Human
gccugaucagguccucggcauacugguaagugaggaugcuggguuugcccaucaggc

SEQ ID NO: 4143132 - RNA, 71 nt, Human
gccugcaaggcagggagguuugcugaccugguguuuguacugguagcuccugaauaucccucugugcaggc

SEQ ID NO: 4143133 - RNA, 58 nt, Human
gccugcaccccaguuuccuuauugucuuucuccuggcacuaaggcagcagugacaggc

SEQ ID NO: 4143134 - RNA, 57 nt, Human
gccugcagaacugugaggcaauacaucuguauuguuuuaagccagucugccuauggu

SEQ ID NO: 4143135 - RNA, 78 nt, Human
gccugcagagcacggagacugucagagcugggguggggccuaucguccagccccacagccugcggucucagcccgggc

SEQ ID NO: 4143136 - RNA, 61 nt, Human
gccugcagccucuucugaaaaucugguaaagacugugauucagaaugcagagacuguaggc

SEQ ID NO: 4143137 - RNA, 63 nt, Human
gccugcaugcaacagugcccuggaaucccagcccaggauuucagcucagucugugcagcaggc

SEQ ID NO: 4143138 - RNA, 77 nt, Human
gccugcauuaaaucuuuuauauggaaacuaauucauuuuucuacuccuggaaagcaggauuguuuccauugcauggc

SEQ ID NO: 4143139 - RNA, 57 nt, Human
gccugcauuucacauuuaaacuuuuauguuuaaaguuguaauggaagaaaugcuggu

SEQ ID NO: 4143140 - RNA, 60 nt, Human
gccugccacgcaugcagagucacuggaacauaugacuuggucuucaaaugcaugauaggu

SEQ ID NO: 4143141 - RNA, 58 nt, Human
gccugccacuagcuuucacaucuuugccaccagggaucuuucugaugcuguggcaugc

SEQ ID NO: 4143142 - RNA, 89 nt, Human
gccugccccacagaggucugggcccagcagagacaagacuugcuccauugcccuucuguggcugucgggcccaucucuguugagcuggu

SEQ ID NO: 4143143 - RNA, 57 nt, Human
gccugcccugcggguggaggaggccauuuggcuggaaucacaugagcuggggcaggc

SEQ ID NO: 4143144 - RNA, 59 nt, Human
gccugccuagaauugcagcuuugcagaguccacugggugcuugggcugaauucacaggc

SEQ ID NO: 4143145 - RNA, 70 nt, Human
gccugccuucuugucucaaaaccauuauuuauagccauagaaugacagagauagaagggaugucacaggu

SEQ ID NO: 4143146 - RNA, 94 nt, Human
gccugcgggccucccagaggugucauucgagcugucuugaaagaugagaaggugcuugccagacacucgaggggggcacacaaucuccgcaggu

SEQ ID NO: 4143147 - RNA, 58 nt, Human
gccugcuccgagagugauugcauuuggcacaauaugcaguuugcuucgcagcaguagc

SEQ ID NO: 4143148 - RNA, 63 nt, Human
gccugcugagcugcugugcacagccucuuccauggcugggacacacaaggucagcucuagggc

SEQ ID NO: 4143149 - RNA, 58 nt, Human
gccugcugagggaaguugggcauggcccuguuccuugcccaagccagccuucacaggc

SEQ ID NO: 4143150 - RNA, 59 nt, Human
gccugcugccgagggucuuuuggggcagucccacugaguacccgauggcugccugaggc

SEQ ID NO: 4143151 - RNA, 64 nt, Human
gccugcugggagacacccccagccucaggcagugcugucggggugggcuaccuaagcugcaggu

SEQ ID NO: 4143152 - RNA, 57 nt, Human
gccugcuuucugacuuugaaggguugguaugcuuccauuuuucauuauaaagcaggc

SEQ ID NO: 4143153 - RNA, 57 nt, Human
gccugcuuugugccugaucuuuagcuccaugugcaugagaaugggucaguggcaggu

SEQ ID NO: 4143154 - RNA, 62 nt, Human
gccuggaagucauuccucguucccuugucugaguggccuggagccgagcuguguuucugggu

SEQ ID NO: 4143155 - RNA, 72 nt, Human
gccuggacuugcugcagaaaccuuuccugauuugaguccuuccaaagcuggaggcuuucuguaucucuaggu

SEQ ID NO: 4143156 - RNA, 55 nt, Human
gccuggcacucacugaagaggcagggcacuggagcuuccuccacaggugccaggc

SEQ ID NO: 4143157 - RNA, 63 nt, Human
gccuggcaggccugggccagcaauaucuagaacacaggccuggcuccaggagaagccagaagc

SEQ ID NO: 4143158 - RNA, 91 nt, Human
gccuggcagugggaggagaccgucugggcagaguugugaugaacuggggaccgagcagccccagcucgccucggagguucccgagccgggc

SEQ ID NO: 4143159 - RNA, 76 nt, Human
gccuggcauagcugcuggauucuguuuugcacauguugguguuugcaaucagaaaguucagcgguccuuccagugu

SEQ ID NO: 4143160 - RNA, 68 nt, Human
gccuggcaugaggagcaugagguuuggggagagacccuuggccaugucguacucuuuacugccaaggc

SEQ ID NO: 4143161 - RNA, 60 nt, Human
gccuggccacaugugugcugagcauggggacacccugccuggcugugugugugcugaggc

SEQ ID NO: 4143162 - RNA, 70 nt, Human
gccuggccuaagcccaggaaugcacuucagcuccugguugagcaaugucacugaggcuugggagucgggu

SEQ ID NO: 4143163 - RNA, 68 nt, Human
gccuggcuaagcagaaggacccccucuguggcccuagagacugaaguccuagugcuuggugcccaggc

SEQ ID NO: 4143164 - RNA, 56 nt, Human
gccuggcuaauuuugguauuuuuaguaaagaugggguuuugccauguuggccaggc

SEQ ID NO: 4143165 - RNA, 58 nt, Human
gccuggcucugaguuucucuccugcagucuucaggggacagaaagcaggaguuuaggu

SEQ ID NO: 4143166 - RNA, 55 nt, Human
gccugggaaaugguggggucaguggcuggcagcucacaaucucaguuccucaggc

SEQ ID NO: 4143167 - RNA, 58 nt, Human
gcccaggaagccaccgggaaguuuugccggagcugauuucuaggggauuuucuggugc

SEQ ID NO: 4143168 - RNA, 76 nt, Human
gcccaggaaguggccuucaggcacugggguuuagaugcaggaaccucuguauaguugccuguggccacaucugggu

SEQ ID NO: 4143169 - RNA, 58 nt, Human
gcccaggaauuggaggcugcagugagccgugaucaugccacugcacuccagccugagc

SEQ ID NO: 4143170 - RNA, 71 nt, Human
gcccaggaccugccccagccccaccugccaccugaccugaggcucccagagggcagaggggccuccugggu

SEQ ID NO: 4143171 - RNA, 59 nt, Human
gcccaggagaggccagggcugagccagcauggaaauggaauugccccugccuccugggc

SEQ ID NO: 4143172 - RNA, 58 nt, Human
gcccaggaggucgaagcugcagugagcugagauuuugccacugcacuccagccugggc

SEQ ID NO: 4143173 - RNA, 56 nt, Human
gcccaggaguucaagucuagugagcuaugauugugccacugcacuuuagccugggc

SEQ ID NO: 4143174 - RNA, 56 nt, Human
gcccaggaguugaaugcagcagugagcuauuauuaccacuguacuccagccugggc

SEQ ID NO: 4143175 - RNA, 58 nt, Human
gcccaggaugguguguaguggugugauuucagcucacugcaaccugccgcuccugugc

SEQ ID NO: 4143176 - RNA, 74 nt, Human
gcccaggcaaucacauuuacauugcuaauugaagaagaaagcuacaguaagcaauagagugagaauuauuaggc

SEQ ID NO: 4143177 - RNA, 59 nt, Human
gcccaggcacccagcccagucgcacgggucccuguuaggacuuugggcugugcuuaagu

SEQ ID NO: 4143178 - RNA, 68 nt, Human
gcccaggcauuuucaacuuuaguuuccuauuagaaucacccaggcacugaaguguacuaaugcagggc

SEQ ID NO: 4143179 - RNA, 58 nt, Human
gcccaggccggagagcagugcugccaucucggcucacugcagccuccacuuucugggc

SEQ ID NO: 4143180 - RNA, 58 nt, Human
gcccaggcuagagugcaguggugugaacauggcucacugcaaccucagacuccugggc

SEQ ID NO: 4143181 - RNA, 58 nt, Human
gcccaggcuggaguauaguggcgcgaucucggcucacugcaagcuccgccucccgggu

SEQ ID NO: 4143182 - RNA, 55 nt, Human
gcccaggcuggagugcaguagcgcgaucacagcucauugcauuuuggcgcugggu

SEQ ID NO: 4143183 - RNA, 58 nt, Human
gcccaggcuggagugcaguggugccaucuuggcucacugcaagcuccgccucccgggu

SEQ ID NO: 4143184 - RNA, 60 nt, Human
gcccaggcuggagugugcaguggcgcgaucucggcucacuguaagcuccgccucccgggu

SEQ ID NO: 4143185 - RNA, 66 nt, Human
gcccagggcccuuuggacucccuggagugacagaggagucucugccuggggggaucagaacugggc

SEQ ID NO: 4143186 - RNA, 56 nt, Human
gcccagggcugguuucuggagcacagcucagcagaugccucaggaaccugucuggc

SEQ ID NO: 4143187 - RNA, 61 nt, Human
gcccaggggcagcgcauagugggacugguaccacuguugguauggugcgcuguugaugagc

SEQ ID NO: 4143188 - RNA, 63 nt, Human
gcccagguguucuuuauuauguaguuuuucuccuugggcaaagcauggcaugaagaacauggc

SEQ ID NO: 4143189 - RNA, 55 nt, Human
gcccagguuggagugcaguggcacaaucaugacucacugcagccuugaccugggc

SEQ ID NO: 4143190 - RNA, 80 nt, Human
gcccaguaagaagggccugugcugugccaagcucccaggcuugggaucaugagcacaugccagcccuucucuuuuugggu

SEQ ID NO: 4143191 - RNA, 103 nt, Human
gcccagugagggcugguuuccaaguggugagagggucauuagauucuggucuguggcucaauugccuacugacacuggagacacaauagcaccuccacuuggu

SEQ ID NO: 4143192 - RNA, 57 nt, Human
gcccagugcccuagaaugcacuugucauagagacauuugcauuaaguggcauugagc

SEQ ID NO: 4143193 - RNA, 66 nt, Human
gcccagugggggcacaccguuaguaaugagacaucuuagcaccaauaugugcuuuucacauugggc

SEQ ID NO: 4143194 - RNA, 68 nt, Human
gcccauaucugcucucugcucuggaggaggaggcauuccuccacggcccauugggcaggacgaggagc

SEQ ID NO: 4143195 - RNA, 58 nt, Human
gcccaucccuugagagagcacaaggcccugaggucuuucugcagcacaggggcagggc

SEQ ID NO: 4143196 - RNA, 95 nt, Human
gcccaucuugccuccugcuugcaauucacaacaaaaggauaugaggauugaagcagucucauuguuugauguggauucagccaaaagcugugggc

SEQ ID NO: 4143197 - RNA, 57 nt, Human
gcccaugagguggaggcugcagugagccgaggucgugcgcugcacucccgccugggc

SEQ ID NO: 4143198 - RNA, 58 nt, Human
gcccaugccaggggcugagaaggaacguccaggaaaguuggaguggucccgggugggc

SEQ ID NO: 4143199 - RNA, 72 nt, Human
gcccaugcugugccuagagagcacccaaaaggcugacuuggcuacugucucugcccuagugcgcaguggggc

SEQ ID NO: 4143200 - RNA, 61 nt, Human
gcccauggcccugguggacagacagccuaugaauugggggccaugcuccaggcccaugggc

SEQ ID NO: 4143201 - RNA, 66 nt, Human
gcccauggcccuuuauuccuucuucccucgguccacgaacaggaagaggcugaggccaugcugggc

SEQ ID NO: 4143202 - RNA, 55 nt, Human
gcccauuguuuuuguucaucagcgcugccaccaaguguggaggaaucacaauggc

SEQ ID NO: 4143203 - RNA, 110 nt, Human
gcccauuucaauuggugauguuuauauaaagauaacuuuucuucaugggauauuuugugauaaagcuauuuuuaauucuguuugacucucuuuugaaauucuccuggagc

SEQ ID NO: 4143204 - RNA, 72 nt, Human
gcccauuucucagcacuuccuaucucccaaauacucuaaaauugggagguaugagccaguugaguuuugggc

SEQ ID NO: 4143205 - RNA, 88 nt, Human
gcccauuugauggcagagaaguuucugguuugcauaggccagaacugguuugcaguaacuaggcaagcuugaagcaacucucuugggc

SEQ ID NO: 4143206 - RNA, 86 nt, Human
gccccaacagucuuaucuacuccugaauauaucuagcuagauuucacagacuaguaggagauaaaaucagagagguaacuuggggu

SEQ ID NO: 4143207 - RNA, 84 nt, Human
gccccaacccugauaugaacugugagugugaugggguagcacacagcaaugcugcauucgcucgcauugauagauggacgaggc

SEQ ID NO: 4143208 - RNA, 78 nt, Human
gccccaauucagcaggaagcaguuagagcugucauuggccaaccuccccaacagcacuuggguuuuccuguugagggc

SEQ ID NO: 4143209 - RNA, 91 nt, Human
gccccacggggcagcuuggaagagaagcugggagggaugaggggcuccacuagcauuccuuguggcuucugaguguagcugcccugggugu

SEQ ID NO: 4143210 - RNA, 100 nt, Human
gccccacucugggcugcccuguucuucuucaugcuguugcugcuuggucucgacagccagauuugcauggggcucugggacagggagccaggagaggggc

SEQ ID NO: 4143211 - RNA, 72 nt, Human
gccccagaaccugugacugugaucuuauuugcaaauaaggucuuugcagauauaauuaaguuaagaugaggu

SEQ ID NO: 4143212 - RNA, 70 nt, Human
gccccagagucaagguggcauuuagcugggccuucaguccggcaccagcaagugcucuuuaacuuggggu

SEQ ID NO: 4143213 - RNA, 59 nt, Human
gccccagcagcaaugcgguugagaaggggacccucaaacgucacuuuccugcugggugc

SEQ ID NO: 4143214 - RNA, 81 nt, Human
gccccagccucccgaguagcugggauuacaggcucccgccaccaugcccagcuaauuuuguauuuuuaguggagauggggu

SEQ ID NO: 4143215 - RNA, 75 nt, Human
gccccagcgcaguucucuugccuggugcggauaucgcuggguucccggcagcacuggcaugugaggcgguggcgc

SEQ ID NO: 4143216 - RNA, 55 nt, Human
gccccagcguggcuguguuaggaguccuuugcccaacauugugcugcacuggagc

SEQ ID NO: 4143217 - RNA, 55 nt, Human
gccccagcucaccggcucacugccccccagcugcgcuugagccgguagauggggu

SEQ ID NO: 4143218 - RNA, 57 nt, Human
gccccagggaaagaucuuggucagaguuguccaccaaaaccaggaacuucccuaggc

SEQ ID NO: 4143219 - RNA, 114 nt, Human
gcuaauauuagaagcauguucaaggagcagccucugggguuaauagaguuuaauuugcaagacaaaugaaagcuuauuuucuccuaggcucucugcucauaauucuaguagggc

SEQ ID NO: 4143220 - RNA, 78 nt, Human
gcuaauauuuucaugaggguguuuuacuucaguguaugagauacauuggucuguaguuuucuuaugucuuugucuagu

SEQ ID NO: 4143221 - RNA, 68 nt, Human
gcuaaucaguuugaucugacagauuuuaauuacauuaauuagggcuuuucugaauaggccugauuagc

SEQ ID NO: 4143222 - RNA, 65 nt, Human
gcuaaucccucaagaguucuguucuacaacaaagaaagagcaggcuuaugguugaagggaguggu

SEQ ID NO: 4143223 - RNA, 62 nt, Human
gcuaaucuauuccccaguccugggagguuugugcucucacccagggacugugauggaaaagc

SEQ ID NO: 4143224 - RNA, 97 nt, Human
gcuaauuaagcauaaauggaauaauuuugaucagaagggagcaguguuuuuuguuguuuccuuuuuaauuaaucuaauuaugagaugcuuacugggc

SEQ ID NO: 4143225 - RNA, 63 nt, Human
gcuaauucaaccccauggcuuuaaauacuaucagugugcuaaugucuccaggguugaccuagu

SEQ ID NO: 4143226 - RNA, 60 nt, Human
gcuacaaacugucauggugcuuaaaggagugggugccaaaugacuuguauguuucugagc

SEQ ID NO: 4143227 - RNA, 122 nt, Human
gcuacaaaguuaaauauuauuuggugauauguuucucaacauacuguuguuauuaaaaaggauuugcuuacuggcacuauguuggagaaaugauaacauaaaguuuauuugauccauugugc

SEQ ID NO: 4143228 - RNA, 91 nt, Human
gcuacaaggaugugccuccaugucuuuuucccucgcagugguguguaagcucugugagggucacagccaugcccacacuguucuuugcugu

SEQ ID NO: 4143229 - RNA, 60 nt, Human
gcuacacaauagcguucacuuagauuuuaguuuaagaggaaaaaaaaguuguucuguagc

SEQ ID NO: 4143230 - RNA, 66 nt, Human
gcuacagaaaccuuuuucauacaggcaaacagaugcucuccuuguaugaaaauguuuuuguguugc

SEQ ID NO: 4143231 - RNA, 84 nt, Human
gcuacagagaauaauaggacaggugauuuaugcuggcgcacuugaccuuaaucugucccuguuguucuacugaaaguugauagc

SEQ ID NO: 4143232 - RNA, 60 nt, Human
gcuacagagagagggguuaccaggucuaucagaggcagcugccacaccucuuucucuugc

SEQ ID NO: 4143233 - RNA, 62 nt, Human
gcuacagaggaaguuccuugaugagacucaaguccguucucuaggagaaacuuccuuuccgc

SEQ ID NO: 4143234 - RNA, 55 nt, Human
gcuacaggagauaaaggccucuccaugagacacugcagaggcugucaccuguagc

SEQ ID NO: 4143235 - RNA, 75 nt, Human
gcuacauacgcgagcuggcaagccgcugggcgccucuacgagccggcagagcuuccugcucagcguguccguggc

SEQ ID NO: 4143236 - RNA, 111 nt, Human
gcuacccuuggggacugcuguggcuugguucaguaggcaugccuggggcacaggaggagcuuacgggagaggcaucugaacagccaguugggggucugguucuuggguagc

SEQ ID NO: 4143237 - RNA, 96 nt, Human
gcuaccucauguugcuccgggggacuacugggaaacugcugauggaacuugagucaguagaacacuugaccacugcucccuacagcuccaugaagc

SEQ ID NO: 4143238 - RNA, 92 nt, Human
gcuaccuggaggcauagaaagaguaaaguacuuggaauacccagaacuccuggauuugcauuucauuucugcuucuuucuagcuaugguggu

SEQ ID NO: 4143239 - RNA, 83 nt, Human
gcuacggcugaucugacaggaggcagagcucagguggccaugcuugcuugccccuggcucacuuucuguugugcagccagugc

SEQ ID NO: 4143240 - RNA, 64 nt, Human
gcuacuaaguagcagaacuaagaauugaacuaggauucaguuccagauuuaaaugcuugauagc

SEQ ID NO: 4143241 - RNA, 88 nt, Human
gcuacuagagaaacaguucaaagaucaaugggucuguuaucuugaguuucauaaacagaacauggauuuuugaaguucucacaguugc

SEQ ID NO: 4143242 - RNA, 59 nt, Human
gcuacuaguacagcaaggacuacaguggacauggcuauggccuuggugguuuugguagu

SEQ ID NO: 4143243 - RNA, 75 nt, Human
gcuacucacuuaacagaggucuauucauuugugcagacuaaauuugaucaacaaauguccuuugugacugauggc

SEQ ID NO: 4143244 - RNA, 63 nt, Human
gcuacugcucaauuugagaugcuacagggacaauugucaauaguuucacaaauugucaauagc

SEQ ID NO: 4143245 - RNA, 127 nt, Human
gcuacugcugguaaauaauggagucuuccuuucuggcucugccaaguuacgcaaaguguaacugaugauggugguuacacaauauaugguacuugguuuggaugcagaauugggauggagcaggggu

SEQ ID NO: 4143246 - RNA, 69 nt, Human
gcuacugugcaaaaaugaauauuguaauauuaaaagagaaacuaauuguucaguaucauugcacauagu

SEQ ID NO: 4143247 - RNA, 59 nt, Human
gcuacuugguacucaauguccagaauaaacuagaacagguuauugaccuccaggcuggc

SEQ ID NO: 4143248 - RNA, 62 nt, Human
gcuagaaaugcucaagagaaagugaugaaaaucuagaaucauuuugcuuuugaaguuucagu

SEQ ID NO: 4143249 - RNA, 70 nt, Human
gcuagaacaaauggucauuucucuuuugugacugaacaagucacagaaugggauuugaauauuucuuggc

SEQ ID NO: 4143250 - RNA, 89 nt, Human
gcuagaaguuacagaguuuacaugcaugcaagaaugaggaacuuuaaauugauccucaaagucauggcaggcucagauugacuucuggu

SEQ ID NO: 4143251 - RNA, 88 nt, Human
gcuagaauuuccugagcccccaggauuuccugcaccgccagccgccucuuccccaggcacagggagcucugggggcacacggucuggc

SEQ ID NO: 4143252 - RNA, 58 nt, Human
gcuagacuuuaagcuccugcagaguaggauuaugcuuuguucaucauuagagucuagc

SEQ ID NO: 4143253 - RNA, 63 nt, Human
gcuagagagugucucaaggcaggaaaguguuuacaggacaaacaccggcagagugcuucuagc

SEQ ID NO: 4143254 - RNA, 74 nt, Human
gcuagagugcaugacaugaucuuggcucacugcaaccuucaccucccgggcucaagcgauuguccugccucagc

SEQ ID NO: 4143255 - RNA, 61 nt, Human
gcuagaugcugggaaggcugcugggucuuaguugucuccagcuccucuucccagugucagc

SEQ ID NO: 4143256 - RNA, 73 nt, Human
gcuagauuaugcgugggccaacuguuucuuggucuuuuggcgaagaucaaguguacuuuauguauggacuggc

SEQ ID NO: 4143257 - RNA, 70 nt, Human
gcuagcaguguucagugaagcaggaggcuccagacaauagccucagcuggccauagugaacacuucuugc

SEQ ID NO: 4143258 - RNA, 82 nt, Human
gcuagcgguggcgauuaggaguccagaugucuuggguauagccgucgccccgggaaagugggcucuagacgcaggaguuggc

SEQ ID NO: 4143259 - RNA, 78 nt, Human
gcuagcucaggugaguuuuuccaaacccauguagaacggacaaaacacaugcagugcuggagcugccacuugagcugc

SEQ ID NO: 4143260 - RNA, 65 nt, Human
gcuaggaaagggaagggcugggauucaaacacaggcaguuuggcuccagaccucccucuccuagc

SEQ ID NO: 4143261 - RNA, 64 nt, Human
gcuaggaaugcaggcacgugcaagcaagggaggguccuugaucauguagagccugcacuuuggc

SEQ ID NO: 4143262 - RNA, 58 nt, Human
gcuaggccacagggcaaaaaggaggccucaugagccuucgggcccccauggcauuggc

SEQ ID NO: 4143263 - RNA, 80 nt, Human
gcuaggucacaagcucacaucagccaaugauagcucagaaucuuuagcucagaaggaaacgaugccagcuugaucauagu

SEQ ID NO: 4143264 - RNA, 107 nt, Human
gcuaggucauagaaugccuucugugugcauuugaagguggccccuuggggcagacauacgccacaaggaccucagauggaugaacagaucacaggauagacuucagc

SEQ ID NO: 4143265 - RNA, 100 nt, Human
gcuaguaagacugccuuaugaggaaagagacugcuuuauauuguacucauugagugggaugggaggccuuuucaaggucuuugggccauucuuacuuugc

SEQ ID NO: 4143266 - RNA, 71 nt, Human
gcuagucaagggcugggcugcuuguugucacugggucuccuuuucuggcuuugcaugcccacccuugaugc

SEQ ID NO: 4143267 - RNA, 72 nt, Human
gcuagucuucacuuaccggagcgaucgccguggggugucccaaagccagcaaggugaguuucaaagacuagu

SEQ ID NO: 4143268 - RNA, 80 nt, Human
gcuagugcuggggacauagccagucuggcugauacccauaucaguacagaaagcuguccucacccacuucaugcacuagu

SEQ ID NO: 4143269 - RNA, 81 nt, Human
gcuagugggaucuuguuuaauauuguuuauuucuuguccaaggcaugaucaaaagcaguauaaagcagggaucaagauggc

SEQ ID NO: 4143270 - RNA, 78 nt, Human
gcuaguguaagcuaaacauggcuuagaacacuccuuuuuggagcauuuuauuuaugauuaguaauacugaacacuggc

SEQ ID NO: 4143271 - RNA, 57 nt, Human
gcuagugucccugcagccagcugugcguacugagagcuacugcaggaaucagcuagc

SEQ ID NO: 4143272 - RNA, 94 nt, Human
gcuaguuugauggauucacgauggcucuacucaaauaucuggcacuuuggcacagaaggccagaagacuggagucagcuggaucccucucucgc

SEQ ID NO: 4143273 - RNA, 63 nt, Human
gcuauaagacagauacugacuuuuaaagcugugcuguggcaagucagaagcuguaaauauagc

SEQ ID NO: 4143274 - RNA, 103 nt, Human
gcuauauaaaaagaggaagcgccuagagcccuguggacugucaaguuuuauaaagagaacugggcaucccauggcagagccuuggugcucccagaaauguggu

SEQ ID NO: 4143275 - RNA, 57 nt, Human
gcuauauaccaaaauaucagaaagggaggaucuuuugaaauauuugguauauauggc

SEQ ID NO: 4143276 - RNA, 88 nt, Human
gcuauauagaaguaacauuuauauaacucacuaggauaaaauuaguauaaaucugaggcugauuccagugaguuaagauguauauggu

SEQ ID NO: 4143277 - RNA, 82 nt, Human
gcuauaucauagauuugcuucacacuaaaaauguuaaagguuuacaaauauuugauuaaaauaguguugguagugugguagc

SEQ ID NO: 4143278 - RNA, 58 nt, Human
gcuaucaugaaagccaagauuucuuuucuccucagaggccuugguuaugguaugaugc

SEQ ID NO: 4143279 - RNA, 55 nt, Human
gcuaucccuggcucaucucuugguguaaugugcugagggcugagaagggacuagc

SEQ ID NO: 4143280 - RNA, 70 nt, Human
gcuaucggcaaugcacauugaaugagcaaacugcuagaugcuauucuucacucaaugugcucgcuuaagc

SEQ ID NO: 4143281 - RNA, 56 nt, Human
gcuaucuugagagacaacacagcaauaccugguauguugcaaguuuucaagauagc

SEQ ID NO: 4143282 - RNA, 72 nt, Human
gcuaugaagagagcaguggaucaccuagcacagugcuugagcucugcuaagggauaggcugccuccucaagu

SEQ ID NO: 4143283 - RNA, 70 nt, Human
gcuaugagggcguaaaacaauguaucuugcuauacaauauaaaacaggauuuauuauaugcccucauagc

SEQ ID NO: 4143284 - RNA, 55 nt, Human
gcuauggaaagagcaucuaggccuuuuacugcuacauaaauguacuguccauggc

SEQ ID NO: 4143285 - RNA, 72 nt, Human
gcuauggagcuaaauuguaaucauagcugcgacgcuauuuuuaaaauguuguuacaauuuugaguuccuggc

SEQ ID NO: 4143286 - RNA, 57 nt, Human
gcuauggagucagauggcucacagcucucuagccagagccugccugaacucuguggc

SEQ ID NO: 4143287 - RNA, 102 nt, Human
gcuauuagcuugccacuguccuggaugcugagagguaccaagcaaguacauuugaguugcuucuuagugccaaguacuggacuagggggaauagaaaauggc

SEQ ID NO: 4143288 - RNA, 127 nt, Human
gcugcuguguaacagaucacuccaaacuuagaggccugaaagaaugaucaguuuaccugucaccauucugcagguugagaauuuggucagggcucagcagggguggcucaucuguauuucauguggu

SEQ ID NO: 4143289 - RNA, 105 nt, Human
gcugcuuccauuugucugugucucugacuccaugcccuccucccccaugcagacugcagggagggcugccagguggagcgggggcgucccagugcauggagcagc

SEQ ID NO: 4143290 - RNA, 65 nt, Human
gcugcuucugugggauaaacuggucaucagauagcaccagccagggaaucaggcagaagucaagc

SEQ ID NO: 4143291 - RNA, 57 nt, Human
gcugcuuggugucccucugagucuugucuuggugaggguccagggaucaccaggugu

SEQ ID NO: 4143292 - RNA, 73 nt, Human
gcugcuuuaguaauccagccuugugcuuaauuuucacauauccauacagggaugaggaagauuacugagaagu

SEQ ID NO: 4143293 - RNA, 58 nt, Human
gcugcuuuaugauaucaucauaugaucugaauagauaguaugaagauaugugaacagc

SEQ ID NO: 4143294 - RNA, 130 nt, Human
gcugcuuucagguggcuuugcugucaccauuuaucgccccauucaaaaugggcugaccugugccuagaggaggcagcagcuccagagcccuuugaaccgaacacgcagagcaauccugaccacuugcagc

SEQ ID NO: 4143295 - RNA, 78 nt, Human
gcugcuuucggauugggauggcuugcauuugaggacuauaaguaauagucauuuaucuuagccauuauggaaagcagc

SEQ ID NO: 4143296 - RNA, 74 nt, Human
gcugcuuucugcaccccaggucgacgacgccgggcaaaaccuuggcaagauggcacugggggguggaggguugu

SEQ ID NO: 4143297 - RNA, 61 nt, Human
gcuggaacagucuuuaagcaggaauuagaccacaucacccccugccuuaacagcuuucagu

SEQ ID NO: 4143298 - RNA, 60 nt, Human
gcuggaagaugagucagggggugcaacuggggagagcagcucugaauccugcuucucagu

SEQ ID NO: 4143299 - RNA, 71 nt, Human
gcuggaaucuagucuccuuaagucuuuccauuaucagagagaauuaauuaggagcacugaaaauucacagu

SEQ ID NO: 4143300 - RNA, 119 nt, Human
gcuggaaugcaaguggugccaucauagcucacugcagccucgaacuccugggcucaagggauccuccugccucagccuucugggugacuaggaguacaggugcacccaucauccccagc

SEQ ID NO: 4143301 - RNA, 76 nt, Human
gcuggacagccuuauucuuuaguuuacaauauuuucuggcauuuguaagcuguuaagauuagugcuaaguuguagc

SEQ ID NO: 4143302 - RNA, 56 nt, Human
gcuggacaggcgcagucaaagaaauacugagaccucagcuucugcugccuuucggc

SEQ ID NO: 4143303 - RNA, 57 nt, Human
gcuggacagggccaaaccggcugaucucucuggggaugggaggaaggcccugccagc

SEQ ID NO: 4143304 - RNA, 76 nt, Human
gcuggaccauggucauuugagcauggccagucccuuggcuccaggcuuuggccaauuccagaggaucauguccagc

SEQ ID NO: 4143305 - RNA, 82 nt, Human
gcuggagacuuggccaagauggcuggaaggcuagacucagcugggacugucugcuagaacaucuauacguggccauuccagc

SEQ ID NO: 4143306 - RNA, 114 nt, Human
gcuggagagaaguaggagagguucagcuccagcucuaucucauuuccccacgucugagaggcuggaagagaaaggaguggaucuugaguuggcaacucccauuucuccaucagc

SEQ ID NO: 4143307 - RNA, 85 nt, Human
gcuggagagacuggaaugggcuguggcauugguugacugugagguugguuuguguggcagauccucucuuuguuucucucuaagc

SEQ ID NO: 4143308 - RNA, 86 nt, Human
gcuggagagcagagaacagaguugaaacaaggcuggaagguaggccagucuggaccaagcagccuucuuucaacuauguuuccagu

SEQ ID NO: 4143309 - RNA, 66 nt, Human
gcuggagagcugcaagguagggcgggagggagacuuuccccguggaccccuuuguaccucuugagu

SEQ ID NO: 4143310 - RNA, 56 nt, Human
gcuggagaggggucacucugagauacacuucaaaggugaaugaaucccucuucagc

SEQ ID NO: 4143311 - RNA, 70 nt, Human
gcuggagaugcuaugcagagggucaacauucccauuagggacucgggcuccuugguaugccaugcccagc

SEQ ID NO: 4143312 - RNA, 68 nt, Human
gcuggagauguaaucauucuauugucauccuuuuguuacuuugauuugguuccuucugcauuuucagc

SEQ ID NO: 4143313 - RNA, 62 nt, Human
gcuggagccaagcugcucuugguugaggugugaaugggagccaggaaaagcggaagucuagc

SEQ ID NO: 4143314 - RNA, 59 nt, Human
gcuggagcguugccucgguuugaacaagcgcaaaaagaaggacggcagcagcuccgugc

SEQ ID NO: 4143315 - RNA, 97 nt, Human
gcuggagcuuaauccagcucaggucauuccagggaugaccuaaagaugcuggagaaggaggguuaucccuggucugaggggauaauggagcuacagu

SEQ ID NO: 4143316 - RNA, 100 nt, Human
gcuggaggaacaagggauuggggggcaggagaaguguauuuuagucuuggcucuagcacuuguuuuauguuccugagaaagucccuuaaucucuccuggu

SEQ ID NO: 4143317 - RNA, 63 nt, Human
gcuggaggaccacagaagcuggugggguaauucagcacgagucugaaggccugaaaacccagc

SEQ ID NO: 4143318 - RNA, 64 nt, Human
gcuggaggauucagagacagguuucugcagccaaugugccuaaacugcaucucugagccucagc

SEQ ID NO: 4143319 - RNA, 90 nt, Human
gcuggagggaggcuguuaggagggacucugagcuucacaccugucugcugccaugggugcagagcccuaguccugauggccccugguggc

SEQ ID NO: 4143320 - RNA, 94 nt, Human
gcuggaggucagaaaaggguguuuguucagggcugcuugaguggguaacgagcugaaccucucugaacauggcuuccucuucacagccuccagc

SEQ ID NO: 4143321 - RNA, 58 nt, Human
gcuggaguccagugguaugaucuuggcucacuguauccucgaucuaucuggcucaagc

SEQ ID NO: 4143322 - RNA, 77 nt, Human
gcuggauauaggcagugcucugugcuucagugugcaagcguguacauggguguacuggguagccuguggagugcagc

SEQ ID NO: 4143323 - RNA, 55 nt, Human
gcuggaucaaguccuucacccauaccauucccaaggguuuaaggaucaauccagc

SEQ ID NO: 4143324 - RNA, 59 nt, Human
gcuggauccacaaauaacuuugcaugagcaggaaaucaguuuuguuguguuaauccagu

SEQ ID NO: 4143325 - RNA, 80 nt, Human
gcuggauggggcucugcggcugcuccccacuuccccagcccggcguguagggaagagaccguacccuggcccaguccagc

SEQ ID NO: 4143326 - RNA, 56 nt, Human
gcuggauucuagcucaguggcccaaguguggaguccaacaccaucugagcuccagc

SEQ ID NO: 4143327 - RNA, 129 nt, Human
gcuggcacaggagaacgaagagcugcggcggcuggugcagcucauccaggagaaccaggagcugaagcuggugcucaggaaccgcggcagcagccugggcuucugcagcuccggguuccuggcugaggu

SEQ ID NO: 4143328 - RNA, 62 nt, Human
gcuggcacggccguguguguaccuauaggcuucccgcaaguccuggcacuggccugcugagc

SEQ ID NO: 4143329 - RNA, 57 nt, Human
gcuggcacugggaaggacugaguacaauggagcccuucagaucugauacagaccagc

SEQ ID NO: 4143330 - RNA, 82 nt, Human
gcuggcacuucucugcauuugacuccugguuauugcagcugugcccaugccaggcauuuguuaggugcugggaugugccugc

SEQ ID NO: 4143331 - RNA, 63 nt, Human
gcuggcagauguauaucacagcuuaugugaacaacaugcuauaagcuguguuccacugauagc

SEQ ID NO: 4143332 - RNA, 87 nt, Human
gcuggcagcuuugcccagcuggccagguggcuuugaggggagcccaccuccugccaagccucuacccugagccagcagcugcucagc

SEQ ID NO: 4143333 - RNA, 55 nt, Human
gcuggcaggagccuuucccuuucccggguuuggguacaaagaggcuccuccuugc

SEQ ID NO: 4143334 - RNA, 106 nt, Human
gcuggcaguggcucuggguccaggucuguuugcuggcuccguuccugacgcuacaggugggcagcucuuggcaggcaguucaggaugguccuguggucagugcugc

SEQ ID NO: 4143335 - RNA, 87 nt, Human
gcuggcaucucacucccugccuggacacuugcugaauuacagaaucagcagucuugccacaggguuucaaagggagcagagccaagu

SEQ ID NO: 4143336 - RNA, 71 nt, Human
gcuggccagguguccccgucacugcagaguucuggucuuagacuggcugcacacggagacuccagggcagc

SEQ ID NO: 4143337 - RNA, 57 nt, Human
gcuggccaguguggugaccaccugcuaccuguggcuauugagcacuuaguggcuagu

SEQ ID NO: 4143338 - RNA, 113 nt, Human
gcuggccccacuggagguugugcuggacucagaguugguggcagugcuggcccuacuggacacugugcuggacucagaguugguggcugugcuggccccacuggagguugugc

SEQ ID NO: 4143339 - RNA, 67 nt, Human
gcuggccccuccucuggugcugccaacccgcugccaggcagaggggaggcccagaggagagggaagc

SEQ ID NO: 4143340 - RNA, 69 nt, Human
gcuggccgugccacuuaccugggaggaguugauuugagggacuucucuucauagguggcaauggcaagu

SEQ ID NO: 4143341 - RNA, 58 nt, Human
gcuggccucgcaggcaggauguccauacggagggucgccugcugcagcgggagccggc

SEQ ID NO: 4143342 - RNA, 59 nt, Human
gcuggccugagggccgaggcucccugaccagguaggacccaggccagccccaggccagc

SEQ ID NO: 4143343 - RNA, 82 nt, Human
gcuggccuuucauguucccacacuacacgguuguuggcucaggacugcacccaggggccugugaaggugcccaagggccggc

SEQ ID NO: 4143344 - RNA, 64 nt, Human
gcuggcgagguuucagagagcggcugcucugagcucgccuuuuuauucugaaauucuuaucagc

SEQ ID NO: 4143345 - RNA, 77 nt, Human
gcuggcgaugcaugugugugggugggagaauuuggcugcucucucuuggcagccuccaucccaugcacaaagccugc

SEQ ID NO: 4143346 - RNA, 62 nt, Human
gcuggcgccaggccucuggccacuccagcugcugucccgacugagccagggccugggucagc

SEQ ID NO: 4143347 - RNA, 77 nt, Human
gcuggcggauguagaggaaggcgugcugguaggccacacccggcuccaaggccagcagcucccucaggguccgcugc

SEQ ID NO: 4143348 - RNA, 73 nt, Human
gcuggcuacaaaauuuuuagacaaggcuuugccuccuuaaacaaucgcaaguuuaaaaaucuuugaauccagc

SEQ ID NO: 4143349 - RNA, 120 nt, Human
gcuggcuagaggggcccaguggcagguggugguggguggcggggugguuaacccuuucacuucccucuaggcguugagguccagucuccacccacuacugccccagggccugucuucagc

SEQ ID NO: 4143350 - RNA, 57 nt, Human
gcuggcuggagugagcuacccugugcucucacucccaggguucuaccccagaccagc

SEQ ID NO: 4143351 - RNA, 91 nt, Human
gcuggcuggcacguucgcacguggccaugucagcuccaaggaggaugcugacauccugcuggcuggcacguucgcacguguccauguuagc

SEQ ID NO: 4143352 - RNA, 73 nt, Human
gcuggcuugcaaacagaaacuugauguaaaaauguuacuuccaaguuuugauuuugcaguaaaaaauaauagc

SEQ ID NO: 4143353 - RNA, 55 nt, Human
gcuggcuuuaacccuacaaaccuguugguacaggucuccacugggguuggucagu

SEQ ID NO: 4143354 - RNA, 63 nt, Human
gcuggcuuuaaugucaucuuucucacuccaaaaagaguaagagcagaauaauucaagcucagc

SEQ ID NO: 4143355 - RNA, 99 nt, Human
gcuggcuuugggugggugcuggauggcagacagugaguggcuaugcuguuagcagaagccucaguggcuggcauucugugugcccaaccuaggcacagc

SEQ ID NO: 4143356 - RNA, 90 nt, Human
gcgcuuugucgguguggcagcucggacccgcggggacugcaaggaauguccuugaggcccggcaggccgagcggcggccggcaucagugc

SEQ ID NO: 4143357 - RNA, 74 nt, Human
gcggaaggacuucucggccguguggaugcgcuggugccgcaccagcgaggagcuaugccggaaggccuugccgc

SEQ ID NO: 4143358 - RNA, 66 nt, Human
gcggaaucucaaccucaacuuugaauauuguuauucaagaacuggaaauugauaugagauuacugc

SEQ ID NO: 4143359 - RNA, 127 nt, Human
gcggacggcugcugggaagccaaucagcgcgcucgagccugcagccccucugcaguaguuaugccagagcgcccuguguagagcggcugcgagcgggcagcugggcucggcugccgggagccaccgc

SEQ ID NO: 4143360 - RNA, 68 nt, Human
gcggagaaugcagggcuuccucuuggaguuaaagacucauuggcuccuggaaagcccucgcucucugc

SEQ ID NO: 4143361 - RNA, 68 nt, Human
gcggagaggcagagacuccgcgcgucgccauuucuggacuaggcugcugcuuucugugcuuuuucugc

SEQ ID NO: 4143362 - RNA, 61 nt, Human
gcggagccugcaggccucggccucauggcggccugaggcaggggccuggaggcugguccgc

SEQ ID NO: 4143363 - RNA, 112 nt, Human
gcggagcgauggacgcccgcagggccgcgcgaacccggggccuuagacgcgggugccgccagucccagggauccuccgggucgcgccucccugcaggcgcuccucgcggcgc

SEQ ID NO: 4143364 - RNA, 73 nt, Human
gcggaggggcagcauaaccccuucauaauuccuaaacugcacugugauuuccccagucuugcugcucuucugu

SEQ ID NO: 4143365 - RNA, 67 nt, Human
gcggaugcucagucuggccaccugcucaagucaaguagcaggcaggucacaugcuuggcgacuccgu

SEQ ID NO: 4143366 - RNA, 55 nt, Human
gcggcaaggguagaggcaucaguagacuggugaggaggcuuugcacucauguugu

SEQ ID NO: 4143367 - RNA, 94 nt, Human
gcggcaguucccucugccaacacuucuuugucaccugcuucgaggccaauaacucugaagaagguggcccagggguagguggaggggcugccgc

SEQ ID NO: 4143368 - RNA, 106 nt, Human
gcggcauuucucuuugggauacaagguguucuaucacuuagggaaaacugaaaaccaaagugauaaugaugggaaauaaauugauggccucaaaaggaaggguugc

SEQ ID NO: 4143369 - RNA, 87 nt, Human
gcggccaaugccccagcagcaggggcgggcuccaggccagcuccaccugccugggccuucccaccucugggcggggauggugaccgc

SEQ ID NO: 4143370 - RNA, 76 nt, Human
gcggccagagcccagggucaugcaggaugagccuagagaggaaggcaggggccuggugauccuggacuuggacugc

SEQ ID NO: 4143371 - RNA, 89 nt, Human
gcggccagaucaggccaagcugccaggccuccgcugucccccggcacuggccaggaggggagcgggggccggcccugagaaugcgcugu

SEQ ID NO: 4143372 - RNA, 65 nt, Human
gcggcccacaccaggggccacagugcacccgccacuucauggcacguggccaacaggaugggcgc

SEQ ID NO: 4143373 - RNA, 58 nt, Human
gcggccgcggcaccggaagugccccccacgggaggcugcccucggggucgcaggccgc

SEQ ID NO: 4143374 - RNA, 76 nt, Human
gcggccggggcauggcgacuuccucuucacuggccacaugcacuucggggaggcgcggcucggcugugccccacgc

SEQ ID NO: 4143375 - RNA, 114 nt, Human
gcggcggcggcggcggcggcggcggcggcugggcuguuuguucuggucucccgcagccgaggagccgaagcaguggcggcggcagcggcugcggcggcugccggcggugcccgc

SEQ ID NO: 4143376 - RNA, 57 nt, Human
gcggcuccgaagccaggccgcgcauggugaugcgcaccggcuugucucggcagccgc

SEQ ID NO: 4143377 - RNA, 64 nt, Human
gcggcuggcuguccaaacugggcccgcguccugaagugaccccagccugaucucggccagcugc

SEQ ID NO: 4143378 - RNA, 57 nt, Human
gcggcugugcagcaucuugauggcgcugugcugugcuaucagguguucagccacugc

SEQ ID NO: 4143379 - RNA, 70 nt, Human
gcggcuuccucagcugcugguguaucggguccuaguucggcuggcggcccggguccccagcagcagccgc

SEQ ID NO: 4143380 - RNA, 82 nt, Human
gcgggaaaaucugacagucucauugauuugcucucuuugccaucaccacucuugagaggaagaaaugugacuucaaacuugc

SEQ ID NO: 4143381 - RNA, 100 nt, Human
gcgggacguccucaucgguuggagagaggcgaguuaccugugcucccgguuguuuaggggagagcgagugggcuggccuuucccuaggagaggacucagc

SEQ ID NO: 4143382 - RNA, 66 nt, Human
gcgggaggcccugcaggaagcaggauguugacccggagccucccugcgcuccugcggcggccccgc

SEQ ID NO: 4143383 - RNA, 83 nt, Human
gcgggaggcuccgcggcugcgcgggcgcgugcugguggccucggcggaggcucagucccggcccgcgcccgcggcgcccccgc

SEQ ID NO: 4143384 - RNA, 61 nt, Human
gcgggcaauaagcugcccaaguaaacaaauacucuauccagcuuggcagcugagauccugc

SEQ ID NO: 4143385 - RNA, 57 nt, Human
gcgggcaggcagcccuggggaugggcagccccgcucuuucuugggccgugugcuggu

SEQ ID NO: 4143386 - RNA, 64 nt, Human
gcgggccgcgcggggggcagaagcugcggccgcccccguuuccucucuuccuccgcgccgccgc

SEQ ID NO: 4143387 - RNA, 91 nt, Human
gcgggccugggggcaaaggcucagaaucggcagacccagaccccaguugguguguuugaaagcugagccugcugguccucccgggccacgc

SEQ ID NO: 4143388 - RNA, 68 nt, Human
gcgggcuuccuccagggaagugcuuggcccuccaccaccacaggcauggccuucagggacagcugggc

SEQ ID NO: 4143389 - RNA, 66 nt, Human
gcggggaccugcuuuucccagggcucuccagggagucccugcacagcccucaagagccugcccugc

SEQ ID NO: 4143390 - RNA, 74 nt, Human
gcggggacugggaacaaggugcucagcggacacucagcaaacggccugaacgccgacgccucucccgucucugu

SEQ ID NO: 4143391 - RNA, 80 nt, Human
gcggggagaggacaggcucucagccaguuggcaggacucugccaagccugucccggccucagagccuguccuguugcugc

SEQ ID NO: 4143392 - RNA, 87 nt, Human
gcggggcagggcuggucugaggggauguuuuugacggagcggagcuccagaugcugcacauuccugaucgggucaggccugcccugc

SEQ ID NO: 4143393 - RNA, 73 nt, Human
gcgggggcagacugggcaguuccaguccugaucauugacauucugguauuccugcccagauuuuaccaccugc

SEQ ID NO: 4143394 - RNA, 58 nt, Human
gcgggggggucuucagaccucagagcacugccauucuuggucuaggggcccuucccgc

SEQ ID NO: 4143395 - RNA, 84 nt, Human
gcggggucuauuucucuaccccuugaaucugagcagggcucgugccuugcuuuggccacuagaauucagggggauggcccgugc

SEQ ID NO: 4143396 - RNA, 62 nt, Human
gcgggucaaaugauaauugcuucuaauuggcauccccagaagcaccuuaauuauuuaucugc

SEQ ID NO: 4143397 - RNA, 55 nt, Human
gcgguauugcagagaagucaaugcuauuguuuacaugacagaugcugcagaucgu

SEQ ID NO: 4143398 - RNA, 65 nt, Human
gcggucccaggcuggggccaggugaccggaggagucgaggagccgcggccgcggccuggggaggc

SEQ ID NO: 4143399 - RNA, 57 nt, Human
gcggucccgcguacccugccaccgccgccgcagagguucgggcaggugcggggccgc

SEQ ID NO: 4143400 - RNA, 117 nt, Human
gcggucccugccagaagauggccuauugaacauuuccagaaauagcacagccaagcccgucaacugcuuucuuggaaauacauucaauaaggauggcgguccuccagcagggagagc

SEQ ID NO: 4143401 - RNA, 78 nt, Human
gcggugacucggggcuguagcacagcugagcgcaggguucuccugcugggcguccucggccuccuccggguccacugc

SEQ ID NO: 4143402 - RNA, 56 nt, Human
gcgguggaggaggagauagagaggaucucaucuguucucuuggcuuugucuacugu

SEQ ID NO: 4143403 - RNA, 55 nt, Human
gcggugucuauaaauuucugcugucacugauguuagcagaacagucgagcacugc

SEQ ID NO: 4143404 - RNA, 103 nt, Human
gcgguucucacagacucuccugcaaagccucugauuucacuuguacuggcuacagcaugagcuugguccagcaggcuucaugacagggauuuguguggguggc

SEQ ID NO: 4143405 - RNA, 87 nt, Human
gcguagaugucuucagucuucccuccagugcaacugaagguaaacucgucuuuggggcccugguggaagggcuguaugucauuuggc

SEQ ID NO: 4143406 - RNA, 61 nt, Human
gcgucaauuccaucauucuucuggccauccaaaagggaaugauuagaauuaucuuugaugc

SEQ ID NO: 4143407 - RNA, 78 nt, Human
gcgucccugccuuucuucguuugcaccuuaucuccucucuucucucaaggcugguguccuugcagaaggcggcgacgc

SEQ ID NO: 4143408 - RNA, 74 nt, Human
gcgucgccccccucaguccaccagagcccggauaccucagaaauucggcucugggucuguggggagcgaaaugc

SEQ ID NO: 4143409 - RNA, 98 nt, Human
gcgucuacaguuuugacagcugaggcgggagcacgggaggcggagcugguggcagcgcagcgccccgccccggcuccagcaucagccaauggugacgc

SEQ ID NO: 4143410 - RNA, 84 nt, Human
gcgucucccaggcccaggggcuuuccuguuuauggaagagcuuauucugagagcuguagaagccuauuggauucccugucacgc

SEQ ID NO: 4143411 - RNA, 78 nt, Human
gcgugauuuuggggacugcucagcaggccagggggauguggcugguucuucgcugggcggcugcggggagaguggcgu

SEQ ID NO: 4143412 - RNA, 81 nt, Human
gcguggagggugcacagagcccagggccgcgucucucgagcacucagccugggaugcgcccagggcagcgcccccacacgc

SEQ ID NO: 4143413 - RNA, 77 nt, Human
gcguggcucugggccuccaaggucuguucuuacccacggcauccugggguguaggccucaggaccccagggcugugc

SEQ ID NO: 4143414 - RNA, 83 nt, Human
gcguggcuggcugcguucugccuggcggccuagugucaucagcccagaggcugggccacugcugcggaaggcgccggccucgc

SEQ ID NO: 4143415 - RNA, 72 nt, Human
gcgugggcugcacugcucuuuaucgcugaggcuccccugggcugcuugugggaaggagagagcaguccaggc

SEQ ID NO: 4143416 - RNA, 99 nt, Human
gcguggggucacaguucuuaggaacaaggccagugccugcugcucagggcccuggugggcuguguguccuccgugcgcuggguucccugggcucuaugc

SEQ ID NO: 4143417 - RNA, 75 nt, Human
gcguguaugcaggucugugcagugugaugugguugaguaugugagugugccguguauaugaugugugaugugugc

SEQ ID NO: 4143418 - RNA, 65 nt, Human
gcgugugucagccuccuccaccccagagucggcugcagacucaggggcaggggguggcucacugc

SEQ ID NO: 4143419 - RNA, 59 nt, Human
gcguguguguguguguguguguguguaugugaaugugcacaugagacacacauauaugu

SEQ ID NO: 4143420 - RNA, 57 nt, Human
gcguuccuuaccgcuucccgcgccugaugcgugaauuucagggucugguaggaaagc

SEQ ID NO: 4143421 - RNA, 70 nt, Human
gcguucuucagcauuagaagucaugcacaaauuaaauuuuaauaaaaaaugcucugaugcuguuaaaugu

SEQ ID NO: 4143422 - RNA, 63 nt, Human
gcguugaaagaagagaugcugucuauacacccugugugacugccgauuguccuucucucuagc

SEQ ID NO: 4143423 - RNA, 98 nt, Human
gcguuugaugcgggacguuccugugggagggagcggcuggaucacaguucggugugcggcuggcucugcucacauccucguccuuggcauuacagcgu

SEQ ID NO: 4143424 - RNA, 102 nt, Human
gcguuuggguuuaaggucagagugagcuggccccuccgcuggcugccacaucgguuugcuugggugcuggaggcugccgcccgucugacuucccuaauuggc

SEQ ID NO: 4143425 - RNA, 65 nt, Human
gcuauuaggaaaucacuuugcucaccauugaaauggugucauugggaugguuuccugugaugggc

SEQ ID NO: 4143426 - RNA, 60 nt, Human
gcuauucaaaucugccauugucgcgcaaaagcagccacagacaauauguagaugaauagc

SEQ ID NO: 4143427 - RNA, 75 nt, Human
gcuauucaccauuuuauguuuauggagugcugaacuuacacagcuuuuuauaaaauaugaaauaaaggcuuaugc

SEQ ID NO: 4143428 - RNA, 62 nt, Human
gcuauucaucaauuguucuagcccucaguuuugggaugccuaggacacauugaagugaaggc

SEQ ID NO: 4143429 - RNA, 55 nt, Human
gcuauucauggagcauguacugugugccauacacugugcugacccauugauaugc

SEQ ID NO: 4143430 - RNA, 66 nt, Human
gcuauuccagaugccuaaaucugggcaaggcugcucaagcuucagucaggauuggguacuaauagc

SEQ ID NO: 4143431 - RNA, 63 nt, Human
gcuauugacaauuugugaaacuauugacaauugucccuguagcaucucaaauugagcaguagc

SEQ ID NO: 4143432 - RNA, 70 nt, Human
gcuauugugaauagugccgcaauaaacauacgugugcaugugucuuuauaguagcaugauuuauagucgu

SEQ ID NO: 4143433 - RNA, 75 nt, Human
gcuauuucuuccuuguucacugguugucuguuuuaucucuaauguggagaacugaauagaccagacaagaauggu

SEQ ID NO: 4143434 - RNA, 58 nt, Human
gcucaaaacagcaccuagcuuccuauaguaccuuauuauuugcugacagugcuggagc

SEQ ID NO: 4143435 - RNA, 88 nt, Human
gcucaaaauaauccuuauccaaaguggcauauuauaggguagcauauucugaucuucuauaacagugugguuuggagauugauugagu

SEQ ID NO: 4143436 - RNA, 61 nt, Human
gcucaaagaggccuccaaauccuuccaggcucagcccagaccuugaaggccuuuuugcagu

SEQ ID NO: 4143437 - RNA, 64 nt, Human
gcucaaagucauaauuauaaacaucaguuauucuuguggacugauuuugguuguuacuuagggc

SEQ ID NO: 4143438 - RNA, 68 nt, Human
gcucaacagaguuaucugaguucacucagcuagaaguggcugagcugggaguagagacucuggagagu

SEQ ID NO: 4143439 - RNA, 87 nt, Human
gcucaacuuuuuuauugugaauuuggaagcaaugaucuuuccaguuuucuaggucauuccuuuauuuuuaaaguaauugaaaugggc

SEQ ID NO: 4143440 - RNA, 99 nt, Human
gcucaagaauuaguuguauuaggugaacacuuuuaggaguagaaguaagauuguuuuucaucaguuccugggaguggccauguaauguugcuuaugagc

SEQ ID NO: 4143441 - RNA, 70 nt, Human
gcucaagagagaugcaguucuuaagaugggaagauauuccaaaugccaagacuaguaucucuuuaagagu

SEQ ID NO: 4143442 - RNA, 130 nt, Human
gcucaagauucuugucuaacaggcucccaggugaugcugaugcugcuuuugcccuaccacacuguugaguagcagagcuaccgccgcaucggcauaccugugaaccugugaagaaugcagaaccuuggac

SEQ ID NO: 4143443 - RNA, 66 nt, Human
gcucaagcugaauuucagauauaaacugugaagccaacaucgggugucugugauuuaggccagggc

SEQ ID NO: 4143444 - RNA, 63 nt, Human
gcucaagucauuacugaaaugucaccucuucagugaggccugaucauuuuaaauggcaaccgc

SEQ ID NO: 4143445 - RNA, 112 nt, Human
gcucacaacagccucuguuuuuacuaugugaacucugacucucaugccugaugggcaucaaauccaaggguaugaaucagguucucuggaagggaacugaggaugcuugagc

SEQ ID NO: 4143446 - RNA, 82 nt, Human
gcucacauucugaagggugccugcuguucugcugauuacauucagaaauguuccacagauauagcaugcagucucugugugu

SEQ ID NO: 4143447 - RNA, 61 nt, Human
gcucacauucuuggucaccuuguggcccuuguugaggcccacagcuauaggguagugcagu

SEQ ID NO: 4143448 - RNA, 64 nt, Human
gcucacauuuccacucccuaugcgugauccuguguuaaguguggggcucagugggaaugugugc

SEQ ID NO: 4143449 - RNA, 71 nt, Human
gcucaccagacaguuacugcauguucaauaaauaccauuugaugacaauaaugugcuuagcugcugguagu

SEQ ID NO: 4143450 - RNA, 73 nt, Human
gcucaccagggccugcuucucugggcuuucuagagacuagaaagucuuuucagaggccaaaaagucccugggc

SEQ ID NO: 4143451 - RNA, 115 nt, Human
gcucaccaucgauuauaucuagcaacuggccucaguggcuuuaggaguucaggguagccuguccucuugcucauuggggcagaucagugaggcauugggugaaguccuggugggu

SEQ ID NO: 4143452 - RNA, 64 nt, Human
gcucaccucgcugcagguggguggcagugacggagacugcagugcgccagagcgguaggagagu

SEQ ID NO: 4143453 - RNA, 56 nt, Human
gcucaccuucguccagcagccgcucgaggugguugaagaucccgcagaaguugggc

SEQ ID NO: 4143454 - RNA, 55 nt, Human
gcucacgguauuuuccgaaguccuccguguaaaaagggcgggcggugcagugggc

SEQ ID NO: 4143455 - RNA, 60 nt, Human
gcucacugccaaccugggacuggaucacaggacucuuuccgacccauguugccagucagc

SEQ ID NO: 4143456 - RNA, 56 nt, Human
gcucacuuaauuucaugcuacaauucuuggaagaaaaguggcauaguugauugggc

SEQ ID NO: 4143457 - RNA, 55 nt, Human
gcucagaaugcaguuuucuucuuucugcagagguuagaacugaaucauuuugggu

SEQ ID NO: 4143458 - RNA, 71 nt, Human
gcucagagcugugcuagcagauguaucucuucugccaguggggagcuggguuucuggcaggcuuaugaagu

SEQ ID NO: 4143459 - RNA, 55 nt, Human
gcucagaggagcaucauaaggaaauaagagaaguccuucaaagcuccuagugagc

SEQ ID NO: 4143460 - RNA, 64 nt, Human
gcucagcaaugugauacugugcaaggugcccaaucucuguauaccggucucacauuugcuaagu

SEQ ID NO: 4143461 - RNA, 70 nt, Human
gcucagcacucuugaguggcaugcucuaaccaggcccacagcuuuguucccugaccccucaagguugagc

SEQ ID NO: 4143462 - RNA, 84 nt, Human
gcucagccuauugccaggcauucaaagaaugguaauuauuaucuuacauaguuuguauauuuugaauguagcacagugucgggc

SEQ ID NO: 4143463 - RNA, 72 nt, Human
gcucagcgccagggcuggguuugucgguguucccaaaacugggucauauuugcccccaugcccuggccuugc

SEQ ID NO: 4143464 - RNA, 61 nt, Human
gcucagcuggagagggacggguugggacgcacuguccuuuugcccuucccccuccgcgagc

SEQ ID NO: 4143465 - RNA, 58 nt, Human
gcucaggaccgaggggugggaauucaaaacuccauggagccgccaucccuuucugggc

SEQ ID NO: 4143466 - RNA, 68 nt, Human
gcucaggaccugaacuguaggcuucccucacaaugagaaguaaagcuaaguauaggugaauccugagu

SEQ ID NO: 4143467 - RNA, 57 nt, Human
gcucaggccucacuccauuuggagacaaaaauugauagaggaagugauuggucuggc

SEQ ID NO: 4143468 - RNA, 69 nt, Human
gcucaggcgaccuccauggcucaguuucagacaaguuucuaagcaggucugauggccuggggccugggc

SEQ ID NO: 4143469 - RNA, 56 nt, Human
gcucagggcugggagcuguuguugcugcuggcagcccagcugcuauguaccugggc

SEQ ID NO: 4143470 - RNA, 91 nt, Human
gcucagggugagagugggccugcagguucugagaggcugggcuggggacaguugucucccaaccccugugcccagucuucuugccaggagu

SEQ ID NO: 4143471 - RNA, 127 nt, Human
gcucaggugcuuggaaguuccccuggggucccuugggauuccugagauucuccuggcuuggaaggcgcgggagccuugggagugccagccgggcucuuggugggaggcugagaagagcagcagcagc

SEQ ID NO: 4143472 - RNA, 72 nt, Human
gcucaggugugggccuguaugggucucagauaggccuaggggaucugucugggacacaggcuccacccaagc

SEQ ID NO: 4143473 - RNA, 83 nt, Human
gcucaguaauccagcagaacaguuaaagaaaccgugagcacuuucuugagguucuugguguguuuugauuuggguuauuuugc

SEQ ID NO: 4143474 - RNA, 74 nt, Human
gcucagucauauuguaguaauaaacaacccacacauuucaguggcuugaaaauguuaacaaagguuggcugggc

SEQ ID NO: 4143475 - RNA, 55 nt, Human
gcucagucuuugugggguacgggacaugcugccaccucacuucacagaggagagu

SEQ ID NO: 4143476 - RNA, 72 nt, Human
gcucagugagguagguaccauuaucacugcuagaaagcagugaacuuauauggucuuacuguggcacugggu

SEQ ID NO: 4143477 - RNA, 61 nt, Human
gcucaguucuagaacucucagcuguguccauuuggcugaagagaaggcauagaacuugagu

SEQ ID NO: 4143478 - RNA, 69 nt, Human
gcucaucaccacauauaacaaagguauuggauuuccaaggcaaacuuugcuugaauucuugggaagagc

SEQ ID NO: 4143479 - RNA, 98 nt, Human
gcucauccgggccaggcgugguuuaguggucuuagccugguugggggaaagcucccgagccaccagagcuggcucugagcacccgcuuguccgauggc

SEQ ID NO: 4143480 - RNA, 71 nt, Human
gcucauggagagaccagaauccagcugccucaccaaaacuaggaggcagcuaaaagcuguuuucccugagc

SEQ ID NO: 4143481 - RNA, 94 nt, Human
gcucauggagccagucagugacuuuauuuucuuuuccauuuuccuacagacauggguagacugacaaagucaaugcugucuuggauaugugagc

SEQ ID NO: 4143482 - RNA, 79 nt, Human
gcucaugggcuucuugcugggggccucagugcuguccgcuaaagcaccuacugugugcccagccgagcugccccugagc

SEQ ID NO: 4143483 - RNA, 92 nt, Human
gcucauguuccauccucugucuccccacuccccucauucuuucuuucaugagcagggaggugagaagggggucagaugagaggacauuuugc

SEQ ID NO: 4143484 - RNA, 71 nt, Human
gcucauuaggugauggagaaucagggagucaggggaauuuucugacccuggcucuucaccaccugcccugc

SEQ ID NO: 4143485 - RNA, 57 nt, Human
gcucauuugugguuugugaaggacaggcaagcagucauguacaugcauaaaugaagc

SEQ ID NO: 4143486 - RNA, 60 nt, Human
gcuccaagcucccaggauacagacuaauccauuuggugaggcuccugggaacuugcuagc

SEQ ID NO: 4143487 - RNA, 56 nt, Human
gcuccacacuuuguucuuuggaauucccccagagacugaagagcauguguaggagc

SEQ ID NO: 4143488 - RNA, 68 nt, Human
gcuccacagaguggaggcuuggccugacuccuguagcuccagcuaggcucuugccuucucucugcagc

SEQ ID NO: 4143489 - RNA, 75 nt, Human
gcuccacaggagaggguccauucuuugccuuuuccagguucugguggcugguggcauuccuugacuuguggcagc

SEQ ID NO: 4143490 - RNA, 68 nt, Human
gcuccaccccgugccggugcuggugccggagcaggggcgccaaggccuugaaggcgcgggggcagagc

SEQ ID NO: 4143491 - RNA, 62 nt, Human
gcuccaccuagcaauggaggucacugaagucgcuccagagaacuccaguggcuggcggaagu

SEQ ID NO: 4143492 - RNA, 71 nt, Human
gcuccagaguaacuuucuugugacauuugggguuuuaauggauuccagaaaccugaaaguuucucugcagu

SEQ ID NO: 4143493 - RNA, 102 nt, Human
gcuccagagucggggaagcgccaugguuccugcgcagaaaggaugcggguuggggccggcagauccugccaggacuaggggccuucccuuuccaucaggagc

SEQ ID NO: 4143494 - RNA, 62 nt, Human
gcuccagauguauacuuuccaagguucugcucucagcccuuuuuaaaaguggcaucugaagu

SEQ ID NO: 4143495 - RNA, 78 nt, Human
gcuccagcuacaguguuauugcaagcaauguguauuuaaaacuaauauacagaaaaguggauagccaggggcuggagc

SEQ ID NO: 4143496 - RNA, 109 nt, Human
gcguuuuguucauuguuggugucacugauauaaauccuacaaaguauauuuuaauauucacuaaacaaauguaacugguagauuuuaaaucggagccagauauaaaugc

SEQ ID NO: 4143497 - RNA, 109 nt, Human
gcuaaaaguuaggugauucuauuacuaaaaaagaaggagagaacggaaauggagauacaaauuagcagucuccacuacuuuguuuuuggugcucucacuacacuuuagc

SEQ ID NO: 4143498 - RNA, 89 nt, Human
gcuaaaaucaaaguuugaacuaagaccuugggaguaauaaaaaauuccacuuuugugguguuuccagguuuuuucaagcauauuguagc
